United States Patent Application Publication US 2006/0135758 A1 - sequence listing, part 3

SEQ ID NO: 3964 - DNA, 1773 bp, Glycine max
tcagctacgtaggccccccccccccgaataggacaggaccgtacgagagtgcgatgcgatgcgaatgtgagtgactgagggagtaggattgtttttgcttcttccattttgagcctcagcgtttccactttcctctcacatggagtaccatagagatcgggtgtagaaatcttgcttctccgtggtcttattctcaatggaacctattggtaaagaagaaaaaattgcttgtgtgattggtgaccgatcaactagtgatgttgatgtgaggctacgcacacaggaaggtcgagatgattggctatactgccactcagagattcttgtgaagaattgcaagtattttgccgatcggttgtctgagaactggccaacatgtcagatccttgattcacgcaactgtgttgatgtctattgccaagagttgaattttgattaccatgtaaatcttatacgccttctctacattgtcgtagatagttcagttgatgatttgtggcatggtgttaggaattcccttggcattctccaggtcgcagttgagcttggatgcccacaaattgtaactgcctgtgtgaattacttagaagcggtgacatgggaagaggctgaggaggatgagatattgaaaattgtacctcgaatgggattacaggcagagcctatcctagctagacttcaaccagttaaccagtctgctattgtaaacatctttgtctctgccctccgctttgctacatcatccccacctccacaaatgaatgatcttaagtcttcggcgcaagagcaacttgagtacatgctaactgaagatgatgatgcccctttgttgacagctgatgacaacataaaacttgaggttaaagaatgtgtaaacagactactttcccggtttaacgactcattaacagctttgttctgtggttccacagaatcactctctgaggctggaaatattcagttgtttaaatcctatttgactgatttgtcatgggcttgtcagatattgagtaagttggaaattatgagggagtttgttgagtattggtttgatgcatcggataagattgtcaaggtgcttgaacaaggaagttctacaactgaagtaattgagataaaattaagagctattgaggtgacatccaaggtgttagaggcaattgggtatggcactgttatattgccaactgcaaaacgccttcaggtcttgaaagtgtggcttccatttgtgagggttacaaaaccattgattgattctgtcacgatgaattgtgagaatgccatgcttcttaaattagatggcgaaatgtggcaatccttagaatccacgtttgtgtctatcattcttgcattgccttcaggggatcaagcagaggttttaactgagtggctggataatgagtacatgcagtatccagacttaactgaggcatttgaagtgtggtgttataggtccaaggtttctaagagaagactatcattgctagaggatgagcatgccatgactaactcattttgatgctttcacaaattctgtttctttatattagactactaatccaagatttctaccttgtcaaggcatttgaagagatcatctcttttttgcacatgaatggaaatttttgtaggaggcatttaaaatctccatttctcatcaattcaatgtaaattatggtgaagagtttgtaaaatgttgtagtttctaactatgaactgtaaaggatgtatttttgaaataattgattacatagtaagcaaaatcacgatact

SEQ ID NO: 3965 - DNA, 2936 bp, Glycine max
ataaaaaagaaatgaatatactaaaaaaatgtaatatgcttgatgggcgtgggacagtgggggaagttgtaggggtttcagggcacgcattctatcgctgtttctctcgaatcaacaaaacgccaccgtttcattgatctacttcctccaaggccaggtctccaagaattggtaccaattcaagctgcaaatatacttgaacttcaacttatcccacattctccactctcaatggcttcaactctcaaatctggcggaattcatacaggggcaatcaatgatgatttatacaaggaattgtggcatgcatgtgctggtccccttgtcactctccctcgtgaaggggaacgagtctattactttccacaaggtcacatggaacagcttgaggcatctatgtatgagggattagagcagcagatgccttccttcaacctgccttctaaaatattatgtaaagtggtcaatgttcatcttcgagctgaacctgaaacagatgaagtatatgcacagataactttgcttcctgaagcagatcaaagtgaggtgaccagccctgatgatcctctgcctgaatctccgagggtcaagatccattcattttgcaagacacttactgcttctgacacaagtacccatgggggtttctctgttcttcgaagacatgcagacgattgtctgcctccactggatatgtctcagcagccaccatggcaagaattggttgcaactgatttacatgggaatgaatggcattttaggcatatttttcgagggcaacccaagcgccacttacttaccactgggtggagtgtctttgtcagttccaaaaaattagctgctggtgatgcctttatattcttaaggggtgaaaatggagagctgcgagttggggttaggagggtcatgagacagcaaagcaatgtgccttcttctgttatatctagtcacagtatgcatcttggtgttctggccactgcatctcatgccattgccactggaacactgttttctgtgttttacaagcccagaacaagccggtcagagtttattgtgagtgtcaacaagtatctggaagttcagagtcataaactctctgttgggatgagattcaaaatgcgatttgagggtgatgaaattcccgaaagaaggttcagtggcacaattgtgggtgttggagataataaatcatcgtcggtctggcctgattctgagtggcgatcattaaaggtgcaatgggatgaaccatcctcaattttgcgtcctgacagagtttcatcatgggaattggagccacttgtgtctaccactcttgcaaactcgcagccaacccaaagaaacaagagggcacggcctctcattctaccttctacaatgcccgattcttctttgcaaggtgggtttgctgggttggttgtgcagaatttctttgtcattctgctgcccattctgtttttctacataatcatctttctttgtgcaccaggcatatggaaatcatcagttgaatctacctctttctcttattgtgacccccaacaaggacgtggcctctatccatcaccaaagttcaattcttctgcaactaactttattggttttagtgggaatagctctgtgggatctccttccaacaaatcaatatattggtctaataggatggaaaataacttggaatctatttcagctatagctcttaaagaagctggagagaagagacaaggcactggaaatggctgtagactctttgggattcagctacttgagaattctaatgcagaaggaaatctacaaacagtcactttgtcaggaagggtgggtgatgataggtcggttccatctttagatgctgagtctgatcaacattctgaaccatcaaatgccaaccgatctgatattccttcagttagttgcgatgctgaaaaatcatgcctgcagtctccccaggagtcacaaagcaagcaaataaggagctgtacaaaggttcacatgcaaggaatggctgttgggagggctgtggatttaacacgatttgatggatatgaggatcttctcaggaaattggaagatatgtttaacatcaagactgagctctgtgggtccctaaaaaaatggcaagttgtctacactgataatgaagatgatatgatgatggttggagacgatccgtgggatgagttctgtagtgttgtgaggaaaattttcatctacacagcagaggaggtgaagaagctttcaccgaaaataagacttccaatgaatgaaaaagttaacccaagcaagcaggattcagaagcaatagtgaatcctgaggaccagtcatctaatatggggcccagctgctagaagtcgtatgaattccagttccagtatatcctagttgttatgaatgcaataaatgttggtgtggagagaggcgataatgaactaaaggtggccggccaatactaataggagcatgcatatcacttccacttgtgtattgtattgtattgtattgtattgtattgtattgtattgtattgtattgtgcagctaggctggctggctggcatgacgtcagcaagcaagaatcgacgcagagggttgttttgagatactgctgtttgatcttgccttgccttgaatgaaagatattgtgggttttctatttcttctacggctcggttatcttatcgccgggagggagtgtagtggtccttgctcattcggttttgagttggccgcaagcaccaacatgtatgtctttacttaatatcatgccatgcatgatatgatctttttttttttgttttttatgagaggggtgggtattttcttttgtaactcactcaatgtgatgcatgcctttttgtacagaagtatttattattatcttcgaatgctatttatatgtacgaggcataaccctccgttctcccgctaaaaaaaaaaaa

SEQ ID NO: 3966 - DNA, 2784 bp, Glycine max
tcctcacgcgtccggccgtgcggtgtacagaattagaattagaaagagaaagagaaagagggggggtcgtgtcggcttgaaaccaaacacgaccttatcggcgatccaatttcgatctgtgcaaatcgtaaaccctacctacttgcttctgcaattctggtggactggatccattttcatctcaattctcagtaagttggggcacatcacacaataactttgacatggcttccgctgcgccaggtgcaaccaatgatgctttatacaaggaattgtggcatgcctgtgctggaccccttgtcactcttccgcgtgaaggggagagagtttattacttccctcaaggtcatatggaacaggtacaacttgcctgggcatgttctcttaatttctgactttaattgaacttgaggcatccatgaatcagggattggagcagcaaatgccttcctttaatctgccttctaaaattttatgtaaagtggtcaatgttcatcttcgagctgaacctgaaacagatgaagtatatgcacaaataactttgcttcctgaagcagatcaaagtgaggtgacaagccctgatgatcccctgcctgaatctccaaggtgtacagtccattcattttgcaagacactcactgcttctgacactagcactcatggaggtttctctgttcttcgaagacatgcagatgattgtttgccaccactggatatgactcagcagcccccatggcaagaattagttgcaactgatctgcatgggaatgaatggcattttagacatatttttcgagggcaacccaggcgccacttactgaccactgggtggagtgtctttgtcagttccaaaaaattagtggctggtgatgcatttatattcttaaggggtgaaaatggagagctgcgagttggagttaggaggctcatgagacagcaaagcaacatgccatcttctgttatatccagtcacagtatgcatctgggtgttctggctactgcatctcacgccattgccacaggaacattgttttctgtattttacaagcccagaactagccggtctgagtttattgtgagtgtcaacaaataccttgaagctcgaagtcataaactttctgttgggatgagattcaaaatgagatttgagggtgatgaagttcctgaaagaaggttcagtggaacgattgtgggtgttggagataacaaatcgtcagtctgggctgattctgagtggcgatcattaaaggttcaatgggatgaaccatcgtctattttgcgtcctgatagagtttctccatgggaattggagccacttgtgtctacccctcctacaaacccccagccatcccaaagaaacaagagatcgcggcctcccattctaccttcaacaatgcctgattcttctctgcaaggtgtatggaaatcaccagttgaatctgcaccattctcttattgtgaccatcaacatgggcgagatgtctatccatcaaccaatttcaattccactgcaactggttttcttggttttggtgggaactgctatgcttccaacaagtcaatatattggtccagtaggatggaaaactccacagaatctttttctcctgtagcacttaaagaatttggagagaagagacaagggactgcaaatggctgtagactctttaggattcagttacatgacaattctaattctaatgaagaaagtctaccaatggtcactttgtcaggaaggatgggtgatgatggcccccttccatctttggatgctgagtctgaccagcattctgaaccatcaaatgttaatcgatctgatatcccttcggtaagctgtgatgctgaaaaatcatgcctgcggtctccccaggagtcacagagcaggcaaataagaagttgcacaaaggtccacatgcaaggtatggctgttggaagggctgtggatttaacacggtttgatggatatgaggatctgctaaggaaattggaagagatgtttgacatcactggtgagctctgcggatcgacaaaaaaatggcaggttgtgtacactgataatgaagatgatatgatgatggttggggatgatccatggcttgaattttgtagcattgtgaggaaaattttcatctacactgcagaggaggtgaggaagctttcacccaaaataggacttccaatcagtgaagaagttaaacccagcaaaatggactctgaagcagtagccaatcctgaggatcagtcatctattgtggggcctggttgctaatgtcttaggtcttccaacatttcagttgttatatatatatacaatagatattggcatgaaaataggaagtagaacgtgagagaaacgagtatgtacctggcaagcccttcatcatggcctataaggagcatatggttagtgtattctgcatctatacaggagcagcataacagcaccaaagcagagggcttggggtattgtggcttttctctttctttcatagctctgtaatcaccgagtttcgatgccttgcttgttcagttttgtattggttgcgagcgtgcagaaatgtcttgtttttttttttttggttgcgagcagcataacagcaccgaagtatcttactatgtatgcatttggattttttttttggttcttttgtaattcacttgttatgatgcatcatctcatttatgtatatataactttctattatatacatactatttaatgtatgtatatcgagccattttttttcctagcagagctgtagcaaaaaaaaaaaaaaaaaaaaa

SEQ ID NO: 3967 - DNA, 1417 bp, Glycine max
atttcatcaggaaataaataaccatttccaagatgcgtgattaaacggctgagattgtgtacagttatccagaaacagaaaccgtagacaacccgaatcccttattaagcaggggtttcgcggcgcgagacggtgacactggcagagtggaatttccgccgccattcgaagctacagcgatggccataaccgccaccatttccgttcccttcacatcccccagtcgccgcactctcgcctccgtcaatagcctctctccgcgttctacccgatccactttgcccacaccgcaacgcactttcaaataccctaattcgcgcctcgtcgtgtcttccatgagcaccgaaacagccgtcaaaacttcatccgcctccttcctcaaccgcaaggagtccggcttcctccatttcgccaagtaccacggcctcggaaacgacttcgttttgattgacaacagagactcctccgagcccaagatcagtgctgagaaagcggtgcaactgtgtgatcggaacttcggcgttggagctgacggagttatctttgtcttgcctggcatcagtggcaccgattataccatgaggatttttaactctgatggtagtgagcctgagatgtgtggcaatggagtgcgatgctttgccaaatttgtttctcagcttgagaatttacatgggaggcatagttttaccattcatactggtgctggtctgattattcctgaagtcttggaggatggaaatgtcagagttgatatgggggaaccaattcttaaagcctcagatgtgcctactaaattacatgcaaataaggataatgctgttgttaaatcagaactagttgtagatggagttatctggcatgtgacctgtgtcagcatgggaaatccacactgtgtaactttcagtagagaaggaagccagaatttgcttgttgatgaattgaagctagcagaaattggcccaaaatttgaacatcatgaggtgttccctgcacgaactaacacagagtttgtacaagtgttgtctaattctcacttgaaaatgtgtgtctgggagcggggagcaggagcaaccctagcctgtggaactggagcttgtgctactgttgttgcagcagttcttgagggtcgtgctgggaggaattgcacggttgatctacctggaggacctcttcagattgaatggagggaggaagataatcatgtttatatgacaggctcagccgatgtagtttattacggatctttgcccctttaatatgttgcccccattgttaaacccaatatggaattaggaattgctgaataatatttgtatgagaggtggactttctgcttgttcttactattttgccacatatttatatcttcctacccttttttggttgaatgtgtcacaacaacggtttgttaaaa

SEQ ID NO: 3968 - DNA, 1981 bp, Glycine max
ttcctcccggccgggaaaggccaaagtagcattagcaatagcatgtttgttgctcccatttgagtttcaagtttgagcatttgcttttgtttttttcctagagcgcagttatggttcagcttcctccaaacgcgagccccctcaagtgactgctttataagccaacctctttcacaaacaaacatcacaatctctagagttctacacacacaagcacgttctagagagagataggaaattattaaattaagcatatgggtcgcaatagcatagacatggacagggagagattaacggctgagatggacttcaaggactcatcctccgccgtgatcagaatccggcgccggctgccggatttccttcagtcggtgaaactgaaatacgtgaagttgggattgggatacggttactcatactcatgcaaagcagccagcattgtgatgctagccatcaccctccctctcgtgttctctctaaccggtggtatcaagctctccaaactctgctcccacaaccaccagctcgacgccgagaccgtggcggcggcttcggcggcgctactctccctggccgccctgtaccggtggaagcggtccccggcggtgtacctggtggacttcgcgtgctacaagccggagaaagaacgcaaaatatcggtggaggggtttctgaagatgaccgaagagagtggggggttcgaggaagagtctctccaattccagaggaagatttccacaagggcgggtttgggcgacgagacctaccttcccagaggaataacttctcggccgcccaagctctgcatgagcgaagcgcgtctggaggcagaggcagtcatgttcggcgccctggacgctcttttggccaaaacgggggttgatccgaaggacattgacattctggtggtgaattgcagcctgttcaacccaacaccatctctatctgcaatgattgtgaaccactacaggctgagaagcaacataaagagctacaacctcggcggcatgggatgcagcgcgggactcatatcggttgacttagccaaagaccttcctctaagcaaacccgaactcctacgcggtggtggtgagcacggagaacataaccctcaattggtacatgggcaacgaccgatccatgctactctgcaactgcattttccgaatgggaggggccgcagtgctcctctcaaacaagccatcagacatggcacgctccaagtaccagctcctccacacagtcagaacccacaagggggcagatgacaagaactacaactgcgtataccaaaaggaggaccagagcgggaaaataggggtgtgtttggcgagggagttgatggcagtggcaggggaggcgttgaaaacaaacataacgaccttggggccgttggttctgccatattcggagcaggtgatgttcgtggtgtcgctggtgaggaggaaggtgctgaagatgtcgggggtgaagccatacattccggatttcaagctggccttggagcatttttgcatacacgccggggggagagcggtgctggacgagctgcagaagaatcttgagctgagcgagtggcacatggagccctccaggatgaccctgcacagattcggtaacacttccagcagctccctctggtacgagctggcctacacggaggccaagggtcgggtctccaagggggatcgggtctggcagatcgccttcgggtcgggtttcaagtgtaacagcgccgtctggaaggccgttagggacatgccattcttaaaggactggcgtggcaacccctgggatgactccatcaataactatcccgttcatcttccctccgcatcttctaattaactctattaccccccgattttactactctcttcttcattagctgcttcattttcttgcatggaattccaaacttgttcaccatgtctatcaatactaaaggaacccatcttctccttcgtttatattcccaaaa

SEQ ID NO: 3969 - DNA, 2355 bp, Glycine max
cccacgcgtccgggcacagacacggtgcattccagatatgcatggagtctctctctctgtatgaacacgcaaaagaccattgattgtccgagagaacgcaagcactgacatcagtactccatatatttgctactctgcatgaacataacattcatacttaagttttgctggttgtgtgtgtgttttttgttcttggtcgagccttgtactgattaacgagaatggacaaggaagtggagcttggttcccttgaaggtgaaatggccacccagcacatttcacaaccacagaagcgcaagggtggtcttgttaccatgcctttcatcattgcaaatgaggcacttgcgagggtggcaagtttgggccttttgcccaacatgatactgtatttgatggggacctacaggcttcaccttgcccaagcaacccagatacttctctggtcccatgctaccagcaatttcacacctgtggtgggtgctttcattgctgattcttatctgggtcgattcctcgctgttgggttgggttcggccatcacttttctgggaatgacactgctgtggttaacagctatgatcccacaggcacggcctcccacttgcagtagcaataaagctggaggctgtaaatcggcaacaggagggcaaatggcaatcttaatctctgcccttgctctcatgtctgttggaaatggtggtctttcatgctccttagcatttggtgcagaccaggtgaacagaaaagataaccccaacaacagaagggtcttggaaatattcttcagctggtattatgcttctgctgctatttctgtcataattgctctcacaggaatagtttatatccaagatcatcttggatggaaagtgggttatggagttccagcagcactcatgcttttatctactgtctccttcctccttgcctctccactttatgtaaagaataaagtagaatccagcttgttcacaggatttgtacaagtgattgttgttgcctacaagaacagaaaacttccattaccaccaaacaactcccctgaacattaccatcataagaaggagtcagaccttgtcgttccaaccgataaactaagtttcctgaatagagcctgtgttatcaaagatcgggaacaagaaatagcctcggatggttcagcatcaaatccatggaaactctgcacagtagatcaagtagaggaactaaaagccattattaaagtgattcccttgtggtctacagggatcatgatgtcagttaacattggaggctcatttggattgctgcaagctaagtccctggacagacacatcacctcacacttccaagtgccacctggctcttttagtgtagtcatggtacttacaatatttttatggatagctctctatgaccgagccattcttcctttagcatcaaagataagaggcaaaccggttaggatcagtgcaaagagaagaatgggacttggcttgtttttctcttttatccacttggtaacttcggctattgtcgaatccgtaaggcgaaggagagcaatcaaggagggatatcttaacaatgccaatggtgtgttgcatatgtctgcaatgtggcttttcccacaactttgcttgggtggaatagctgaagcattcaatgcaataggccaaaatgagttctattacacagagtttcctaggaccatgtccagtgttgctgcttccctttctggactgggaatggctgcaggaaacttggtgtctagttttgtcttcagcgttgtacaaaatgctacttcaagaggggggaaagaaggttgggttttggataacattaacaagggtcgttatgacaagtactactgggttatttctggactcagtgctcttaatatagtgtattatctaatatgcagttgggcttatggacctaccgttgagcaagtacaagtacgtaagttaggtgaagaaaatggctcaagggaattagaaccttcaactgaatttaggaatgggagtcaggttgacaaagaattccagattagtaaagaaaatggctcaaaggaggaagaagagttaactaggtgatatgttgaattgctcctctaggcatattgttgatcgggcaaatacacttaatgcccagtgattcactctcaaataatatcttttttttctctccatgttttgaccagtagtcgcatttataataaggctatagatgaatatacacacatatattatgtataatcggttagtgtatgaagatgcgaataatactataaaatgctgtagaccataaatttttctggaacccttttggttctgttgagaaaaaaaaaattatttaagtcttaatggtttttttaat

SEQ ID NO: 3970 - DNA, 643 bp, Glycine max
ttttctgtctcgttctcctctttctctttctctttctctttctctttcaggaacaacacaaacacaaggatgataccgcaacagtgggcttctccatgtggaaaccaatgcaccaataaatacgctgccctaaccaaaatcccatggcgagtattctgcaaaaagggttgcgactcagatggagagacatgggaagaatgtttggaggactgcaatcaaatatgctacaaggatcccgtactaaaggaccagcagtggagtgcttatattgatcgttcccctggagctgccagttattcagaggaatgttttcatgcatgtgtatctggctgcggttacaagtttgaggttaaatcagaggaagctgataaagtcagtcctaacaggcaactgaagccggagaccaagccgaagccacaaccaaagccaaagccacaacctgtatgccccattgacccgccaagtgatatacctgatacttctgcatagtgaaagacaaacatacatatttgacaaaattccaaaatgtatacttgatactttgttggctatatgctcaggaatttttttttgtttcattttcttttttaccttggaacctgggaattgttatcagcatgggttacttacattttggggggca

SEQ ID NO: 3971 - DNA, 830 bp, Glycine max
ctaatttctgaaatagttttggggaaataaaatagctgaagcaatcccttatataaaggggttcccttgctcagtagcttctgatctgtgttgtcttgttggtaaagaaagagaagaaaagagtggaatcgaagacgaagacgaagatggaggacgcatcagcatcaaagttcatcccacaccaaatcggaggggtccaaaacgacgtgcttcgatttggtctccatggagtcaagagcgacatcgttggttcccaccctcttcaatcttcactccaatctacaaggagaatggatgaagcgatgaagaagcaatgcaaagttaacctgtacggaactgcttttcccctgaaggaggagcttgacaggcaaatcctgtctaggttccagcggcctcctggaccaattccatcttcaatgctgggtttggagactgttacaggaagtgttgatcactttggttttgaggattgtctaaatgacccccgtgagtcagagactttccggccattggacatgcatcatgggatggaagttcgccttggtctgtctaagggaccagtgtacccaagtattatataattaaatttgactgttattctagtgccagaaaacagtattttgtgatcgaagtttcttgctattcgttaaaatgaaagtgtccaaggagttggcatattttgtgatcaaagcttcttgttttcctaatgctctggatgctagaaatgttattgatccatataaacagagcatgtctttcaaattaaagcagaatttatgcatgaggcatttgagttgagcaaaaaaaaaaaaaaaaaaaaaacccccaaa

SEQ ID NO: 3972 - DNA, 1035 bp, Glycine max
cggccgggtcggccccaatcggtgttgtcttgttggtaaagaaagaaagagaagagaagaatcgaagacgaagatggaggacgcatcagcatcaaagttcattccacaccaaatcggaggggtccaaaacgacgcgcttcgattcggtctccatggagtcaagagcgacatcgttggttctcaccctcttcaatcttcactccaatctacaaggagaatggatgaagcgatgaagaggcaatgcaaagttaacctgtacggaactgcttttcccatgaaggaggagcttgacaggcaaatcctgtccaggttccagcggcctcctggaccaattccttcttcaatgctgggtttggagactgttacaggaagtgttgatcactttggttttgaggattgtctaaatgacccccgtgagtcagagactttccggccattagacatgcatcatgggatggaagttcgccttggtctatctaagggaccagtgtacccaagtattatataattaaatttgactgttattctagtaccagaaaacagtattttgtgatcgaagcttcttgttattcattaaaatggaagtgtccgaggattctccatatgtagtcgtggacttgtgttttcctatgctttggatgctagaaatgttatggtccatataaacagagcatgtctttcaaattaaagcagaatttatgcatgaggcatttgagctgagcatccatccttattggattataatttgattccccccgtttccccttttcaatactcgatatggagggaattaatttattatgcctggaatggttgacgaatatctcgtgtttttgtgtgtcttcatctggatatggggtacaagtgttaaattagataacgattcatgtctaatgtagatccccgtatcctgctatttttcatctgctcatcttttgcaaattccattcttcctttgttcgaactcgggggtatttttatgcaggagttgtggctcggtagctacaaatccaaaatcaaaatgataattgtatg

SEQ ID NO: 3973 - DNA, 1517 bp, Glycine max
aactagcgagaacaactcagctcaactttgaatgataattttaagtgtctcctacagaaaatgattaaaacaagaaggatggtccaaaagtatctaataggccatctcgatctcatctgaccaagcttcctggttaattcctttgaattgaataatataaaaaaaagaagatgatggatgtgggtagagctcagtataacccacctacctccaattgctgacttttcaaaggccaaacatgaagaaatgttgcaggccaaaaacgggggcccggccggggtgcgcatcaacaaatattggaatactacactatacttgtcaaccctttgagagttagaatggctgctgctattgaaatccccacaatagtgtttccaaactcctctgcccaacagaggatgccagtggttggaatgggatctgcccctgacttcacatgcaagaaagacacaaaggaggctatcattgaggccgtgaaacagggttacagacacttcgacactgctgctgcttatggctctgaacaggctctcggtgaagctctcaaggaagctatccatcttggcctcgtctcccgccaagacctctttgtcacttccaagctttgggtcaccgaaaatcatcctcatcttgtccttcctgctttgcgcaaatcacttaaaactcttcaactagagtacttggacctgtatctcatccactggcccctgagttctcagccagggaagttctcatttccaattgaagtagaagatctcttgccttttgacgtgaagggtgtgtgggaatccatggaagagtgccagaaacttggcctcaccaaagccattggagtcagcaacttctctgtcaagaagcttcagaatctgctctctgttgctaccatccgtcccgtggtcgatcaagtggagatgaaccttgcatggcaacagaagaagctaagagagttctgcaaagaaaatgggataatagtgactgcgttctctccactgaggaaaggtgcgagcaggggcccaaatgaagtgatggagaatgatgtgctgaaggagattgcagaggctcatgggaaatccatagcccaggtgagtctgagatggttgtacgaacaaggtgtgacatttgtgccaaagagctacgataaggagaggatgaaccagaatctgcacatctttgactgggcattgactgaacaagatcatcacaaaataagtcaaatcagccagagccgtttgatcagcggacccaccaaaccacaactcgctgatctctgggatgatcaaatataaactatttactactatgcagctcccactctatttttataatccatctttttacctcttgtttcattttacgtttaaataattcatgccatgccacttcttattttagatttcacaatcaataaactaggcacgcgcggcacatgatatgaataaactatgttcaatttttttttcttctcttaaaaaaaaaaaaaactaaacgagttaaaaatcttgattaattgaaattcg

SEQ ID NO: 3974 - DNA, 495 bp, Glycine max
gccaaagaggccctgaaggagggaccttctaagaattcccccttgctctcccacccggactttgctaatacacgtgaatctgttgtccaggtccttggcaacttaacagcagttcactcatactttgatttattcacaaggaaaatcgaccaagatgatatggagcttgaggaggctgagttggagctagacattattcagaaggaacatgcattaccaggacgaatggatgattccaaagattggaatcagattccaggtcttccctcctacagaaaggatgtctcaaggcttcagcaaatcagagagtgcattcgttccctagaaaagtccaaacttaaagaagatatcatagctcgtaggcaaaagaaactacttatgagacatgcccgtcaaaaacatttggaagaagcagctttacgggaagcagatcttctgcaagaacttgatagggagagaacagctgaaatggaaaagagctggaagacaagattg

SEQ ID NO: 3975 - DNA, 2980 bp, Glycine max
ttctatcgcgtccgaactcagcaaaaaaaagacagacatgagccatgcctctctctggtaagcaggagaaaggaggtcctaggttggttatcatgggagagaccaaacaacttgttacccttttgacacaatttcaagaggcaatgaggatggtcaaggatatagtggaaaaaagcagatcgagtaaaacgagcaaacgattactaaggaaaaccctcaagaatatgactcctctactgcaggaaatcaatcaatacaatgaacacttggacccacccagagaagaaatcgacactcttatcaaagataaagacgccgtagaagagattgtgtgctgctattcctgctccaggagcatttggtggaccaaattattctcttggcttccactctacggggataaattttggaataacaagaattattcccttgctgcagatgacaaccaagttaagtatatcaaaaacacactgtacaaggtgaaagaggttcttgagcgtctagacatagagaattttcagctgaaactcaaaggtgttggatcaccaatcaagtgtccttttggtgttcctgaaaaccctggattcactgttgggttgaatccactgttgagcaagttgaagatggaggttctcagggacggtatgtccacccatttgttgactggtttgggtggatcttcagctacgtaggccccccccccgctctgtagggatgaagaagtcaagggtaaattcaaggaaaatattttatttttcaccttctcacaaacgcctaagttgaagaatatcatagaaagactatttgaacattgtggataccacgttcctgagtttataagtgatgaagatgcaattaaacggttggaaattttgctgcggaaaattgagggaagtccacttttgttggtcttggatgatgtttggcctggatcagaagccctcattgagaaatttcaattccagatgtctgattataaaattgtggtgacttctagggttgcatttcctaaatatggcaccccatatgttttaaaaccacttgctcatgaagatgcaatgaccctattccgacatcatgctctcttggaaaaaagcagttcacatattcctgacaaagaaattgtccaaaaggttgtgagatattgcaagggtttaccgcttgccgttaaagtgattggtagatcactcagtcatcggcctattgagatgtggcaaaagatggtggaggaattgtcacaaggtcattctatacttgattctaatattgaattacttacatgcttccaaaagctcttgcatgttttggaagataatcccaacaacaaggagtgcttcatggacttggggttatttcctgaagaccaaagaattcctcttcctgttcttattgatatatgggcagtgttatatggatttgatgatgacggcatagaagcaatggacatcataaataaattagactccatgaatctggttaatgtcttagtagcaaggaaaaattcaagtgactcagacaattactactacaataaccactacgtcatcctccatgatcttctaagagagcttgcaatctatcaaaacaacctggaaccaattgaaaagagaaaaagactgattaatgacataaatgaatccgaggagaagcaacaaggcatgatagcccgcttattgtcaaaattttgcagatgcagtgttaaacagacactccaacaggtccccgcccgcacattgtctatatcagctgatgaaacaaacacttcatatcagtcccacatacaaccatccctagctgaagttctggttttaaatcttcaaactaagaagtattcctttccagagtacatagagaaaatgagtgaactaaaagttcttatcatgacaaattatggttttcatccgtgtgaactagacaatttcaaactactcagctctgtatcaaacctgagaagaatcagactagagcggatttctgttcctcacttaggggcattgaaaaatcttggaaagttatccctctacatgtgtagtaacataagtcaggcttttgaaaatggtaccatcacagttttggattcatttccaaaactatcagatttgaacattgactattgcaaggatatggtgaaattgcctactgggatctgtgatattgtctcactaaagaagctcagtattactaattgtcacaagcttagttctctgccccaagaaattggacagttgttgaatttggaactcctgaacataagttcctgtactgatttggaagagataccagattctattgtaaaactttctaagctaagacttcttgacctctcaaactgcataagcctttcaagtttaccagaggacattggtgatctatgtaatctcaggaatctcaatatgacaagctgtgcaaggtgtgaattgccatactcagtaaccaatcttgagaatttgaaggtggtggtatgtgatgaagagacagctgcttcatgggaagcattcgaagctatgcttccaaatctgaagttagaggttcctcgagtcgaggttaacttaaactggcttcattctattagctcctaagacatgacctggttcatgggaagcatttgaaactatgattccaaatctaaagtttgaggttcctcgagttgatgttaactgaagctggtttcgttcaatttgctcctatgacctctttctataaatgttagaccaatggccgtgactgtttcatgtgtaataatcttgtttaaaatatggataataatgtgtattcaagttgctgtagtagtatttgcatgtttagtgtaaacagtactatgttacttgaaagaagttggcgattttatttgttgtatgtgttgtcatgagtgaacatcttagcatgatgatgtccacaaaataattgaactatggtaagttaaaaagtttgtttttataaagtatgttttctaatattcaaatttaaaaaaaaaaaaaaa

SEQ ID NO: 3976 - DNA, 3620 bp, Glycine max
ccacgcgtccgataagaaaggcgtcgtttgccggcatgcgtggtgagcaaggacgaaagaagatgaagatgggtgaactcgaaaattcggaaaactataaaggaggggaagaaaaactgaacacgttgatctcctttaactcttgacaaattgaacactttctcttctctcaagtggcgtgttagttcattcaccaatttctatgactgcttctgcaattcacatggatccctttgtttccacttcatcatcccttcttattataattctccgatctcccatgtttccctgcaagagggcctcaacaacctcagctacgtaggccccccccccagaaccatgcttcatcgccgaagttagtttcttcttgttcacggtcacaaatcgagacgcgccttgccggaagttgcagaaacaaccttcaccagcaacctacgattaacccatgacgaccagttcctccggttgcggaagaactaactcggcgaaaaaaaaaacccaaataaaaaggagacagacatgagcgattatctcaaagagaaaggaggtcccaggttggttatcatgggagagaccaaacaacttgttacccttttgacacgatttcaagcggcaatgaaaatgatcaaggacatagtggaaaaaagtagatcgagtaaaaagagcaaacgattactgaggaaaaccctcaagaatatgactcctctgctgcaggaaatcaatcaatacaatgaacacttggaaccaccccgagaagaaatcaacactcttatgaaagaaaaagatgcagtggaagagcttgtgtgctattcctgctccaggagtatttggtggaccaaatttctctcttggcttccgctctacggggacggactttggcataacaagaataatccccttgctgcagatgacaaccaagttaagtatatcaaaaacacactgtatgaggtgaaagaggttcttgagcttctagacatagagaattttcagcagaaacttaaaggtgttggatcaccaatcaagtgtccttttggtgttcctgaaaaccctggattcactgttgggttgaatccactgttgagcaagttgaagatggaggttctcagggacggtatgtccacccatttgttgactggtttgggtggatctggtaaaacaactttggctacaaagctctgtagggatgaagaagtcaagggtaaattcaaggaaaatattttatttttcaccttctcacaaacgcctaagttgaagaatatcatagaaagactatttgaacattgtggataccacgttcctgagtttataagtgatgaagatgcaattaaacggttggaaattttgctgcggaaaattgagggaagtccacttttgttggtcttggatgatgtttggcctggatcagaagccctcattgagaaatttcaattccagatgtctgattataaaattgtggtgacttctagggttgcatttcctaaatatggcaccccatatgttttaaaaccacttgctcatgaagatgcaatgaccctattccgacatcatgctctcttggaaaaaagcagttcacatattcctgacaaagaaattgtccaaaaggtgcttattttgctttctgacattgggagtaatctgtaccagtcctttgtgtctgaagccattgttgatttagagagtacaaagttgtgttttgactcctcaaaccaatattatggttgtgagatattgcaagggtttaccgcttgccgttaaagtgattggtagatcactcagtcatcggcctattgagatgtggcaaaagatggtggaggaattgtcacaaggtcattctatacttgattctaatattgaattacttacatgcttccaaaagctcttgcatgttttggaagataatcccaacaacaaggagtgcttcatggacttggggttatttcctgaagaccaaagaattcctcttcctgttcttattgatatatgggcagtgttatatggatttgatgatgacggcatagaagcaatggacatcataaataaattagactccatgaatctggttaatgtcttagtagcaaggaaaaattcaagtgactcagacaattactactacaataaccacttcgtcatcctccatgatcttctaagagagcttgcaatctatcaaaacaaccgggaaccaattgaaaagagaaaaagactgattaatgacattaatgaaaccggggtgaagcaacaaggcatgatagcccggttattgtcaaaatttctcagatgcagtgttaaacagacactccaacaggtccccgcccgcacattgtctatatcagctgatgaaacgaacacttcagaccagtcccacatacaaccatcccaagctgaagttctggttttaaatcttcaaactaagaagtactcctttccagagtacatggagaaaatgagcgaactaaaagttcttatcatgacaaattatggttttcatccctgtgaacttgaaaattgcaaactacccagctctgtatcaaacctgaaaagaatcagactagagcggatttctgttccccacgtaggggcattgaaaaatcttgaaaagttatccctctacatgtgtagtaacataagtcagatttttgaaaatggtaccatcccagtttcagattcatttccaaaactatcagatttgaacattgactattgcaaggatatggtggaattacctactgggatctgtgatattaccccactaaagaagctcagtattactaattgccacaagcttagttctctgccccaaaacattggaaagttgttgaatttggaactcctgaacctaagttcctgcactgatttggaagagataccagattctattgtaaaactttctaagctaagacttcttgacctctcaaactgcataagcctttcaattttaccagaggacattggtgatctatgcaatctcaggaatctcaatatgacaagctgtgcaaggtgtgaattgccgtactcagtaaccaatcttgagaatttaaaagtggtggtatgtgatgaagagacagctgcttcatgggaagcatttgaagctatgcttccaaatctgaagttagaggttcctcgagttgaggttaacttaaactggcttcattcaattagctcttaagacatgtcctgcttcatggaaagcatttgaagctatgctttcccaatctcaagtttgaggttcctcaagttgatgttaactgaagctggtttcattcaatttgctcctatgacctctttctataaaaatgttagaccaatgatcgtaactgtttcatgtgaaataatcttgtttaaaatagggataataaatgtgtattcaagttgctgtagtagtatttgcatgtcgtgcaaacagtactatgctacttgaaagaagttggtgattttatgtgttgtgtgttgtcacgattggacatcttagcataatgatgccaacaaaataattgaactatgataacttcaaaagtttgtttttatgaagtaggttttcttatcttcgaatttaatcttatgtccctccaatttttcgttctgattcgtttcccgattaatgtaatgtatgaaatcgcgtattt

SEQ ID NO: 3977 - DNA, 781 bp, Glycine max
cggccgctcgaggcggcgggccaccaatattatccaaattcgtgagagcttattcaatcaaaatgtctcccaaatacaagctagtgctgttgatagcattggttttggttgcaacctcccttgctggtcgcacaaaggaacatcctaagcatcctccatcccttcaagaacaacaacacaccccacaccttgatagctacccgccaaagcatagaccgaaaccacctcatcctgtacatggtgccggggaggaaccaacctccattccacgaaagaagggaccaagaaggcctccgaactgatgagtgagtcaaaggtttcagattgcctcaaatggtttaactttgactcgatctctaccaccacaacatcacgatatgttgttacaatcataatcgcaatttgaaaccttgggctagctaaaactattttaatataaagtattaatggtcactgctacatgagcgtctatgattaaataaaaagtagggagtttgaacccatgtaataccatgttgtgaggttctccctctttgtgtgtgctttaaattttcacatatagtttgatttgtgtccggtgtggtctctgtttcttgtatttatttgtacaagctagatgctaaaatggatgagttaaagctcgcacttgttaaaaaaaagctagtatatgtgctattcgggaaccagataaaataaaattattattcatatgaaaaacagttaaaaaatactcgagactcgttctctaaaattatgggacgttttttttaaaaaaaaaaaa

SEQ ID NO: 3978 - DNA, 1257 bp, Glycine max
tcagctacgtaggcccccccccccctattatttgtgattttctcgcatgattctaaattttagtagaattggagaaaaatcaatttattaaatcattatataagattaaatttctcggtcttttctgaatttggagaccttcaaagttatcttattaagtaccaaaagttacttctattggagcatttgttcagtatctttgcaatatcatagccttttcattctgataaagatcaagatggacatgatattttgctacatttcgaaacatgtaaatttttgctgaatttggtcttctgtttgagcttatgcagcataaaagcactgtagttaatgaagagttgtggagagaagcacaaacttatggagacgtgcagctgatgccatttgttgactactacagcctcatcacttggaaatctttagcaatctgcatttttgggacacaagtttcagcaaagtttgtcatgaagacagatgatgatgcgtttgttcgggtagatgaagttttagactctttgcacagaatcaatactgatcatgggttactatatggactcatcaattcggattcccgacctcatcgaaatacagatagcaaatggtacatcagcccagaggaatggagcgaaggaacttatcctccttgggcacatggtcccggctatgtggtctcacatgatatcgctaggacggtgtccaagaaattcagagagaaccatttgaagatgtttaaactagaagacgttgcaatgggaatctggatcgctgacatgaagaaggaaggtctagaagttcgctatgagaatgaggtcagagtgtaccctgaaggttgtaaggatggttatgtggttgcccattaccaaggccctagggagatgctctgtttgtggcagaagcttcaggtagataaacgtgcaaaatgctgtggtgatagtaggaaatgattgatgactgaccaggttacaacttactgaaaataaataaaagaaaaagatcccccttttgaatggctggggagcttgtataatgattagaatagttagctttagcctgaaattattagaaatggttaatggtagggcatattcttagtcattaattcgtttaagtaaatctgatgattgttctatgtagagagagagagagagatttgtatagatcggtcaatcggaaatagtttatcagattttctggcacctaatcaattttgtttgagatgtcattctactagggaaccacaatttttgggcggcc

SEQ ID NO: 3979 - DNA, 2019 bp, Glycine max
tgagcagctacgtagtccccccccccccccccggcaaatgctagctcatatacaatatctgaggagacagatcccgagaagctgattccaagaggaactcgccttacactgtatcttaagagggacgacaaaggttttgctcatccagagcggattgagaagcttgtgaaaaactattcacaatttgtttcattcccaatatacacatggcaggaaaagggatacaccaaagaagtggaagttgatgaagatacagctgaagacaaaaaggatgatcaagatgataagactgagaaaaagaagaaaactaaaactgttgttgagcggtactgggattgggagctgacaaatgacacccaaccaatctggcttcgtaatcctaaagaagtcactaaggaggagtacaatgaattctacaagaagacttttaatgaatacctggagccattagcatcatcacactttaccacagagggggagggagaatttagacccacaccccatgttcctgccttcgctccctctggaaaggatgacataatcaatcccaagaccaagaatataagactttttgtgaagagagtgttcatttcagatgattttgatggagaactgttcccccgatacttaagctttgtcaaaggtgttgttgactcaaatgaccttccactcaatgtgtcacgtgaaattcttcaagagagccgcatagttcggattatgaggaaacgtctagttcggaaagcttttgacatgattctgggaatatccatgagtgagaacaaagaggactacgagaagttctgggagaacttcggcaaacacttgaaattgggttgcattgaagaccgtgagaatcacaaacgtattgctcccttgcttcgttttttctcgtcccaaagtgatgaagaactgatcagcttggatgaatatgttgagaacatgaaacctgatcaaaaggatatttattacattgctgctgacagtgtgactagtgcaaagaacacaccgttcttggagaaaattgcagagaaggatcttgaagttctgtttttggtggatccaatagatgaagttgctattcaaaatcttaaatcatacaaggaaaagaattttgttgacattagcaaggaagacttggatctaggtgataagaatgaggaaaaggaaaaggaaatgaagcaggaatttggccaaacgtgtgactggatcaagaaaagattgggagataaagttgcaagtgtgcaaatttcaaaccggcttagctcttcaccttgtgtcctggtgtctggaaaatttggttggtctgcaaacatggaaaggctgatgaaggcacaatctatgggtgatgcatccagtttggaattcatgaggagcagaagggtgtttgagatcaaccctgaccattctattatcaggaacttggatgatgcatttaaaacaaatcccgatgatgaagatgccctaagagctattgatcttttgtatgatgctgctttggtttccagtggttttacgcctgataatccagcacaacttggagggaagatatatgagatgatgggtatggctctcactggtaaatggtccacacctggtcagttccagtccacagtaacccagccccataccccagaaactttagaagctgaggtggttgaaccaactgaggctggtggtcagaagtgaggacagtcgtgtggacatttttgttttcttcgcgttactttctgttctttcttttaacactgcttacggagttacgggtgaaattgtattcttgaagaacatgggtattgatagtaatatttagttttttttttttaccaaagtaatatttatagttatcctttccgttgtgattaaaaaacatccagcataaccaagtagtttttcttttgtttggggaaaaaaagatatcaagataatttggataaatatgctctgtggcagcatgcgacaaggattagctcaatggaaccgttgccccaacgaaaagggttatgcgttgtacttctgtcc

SEQ ID NO: 3980 - DNA, 993 bp, Glycine max
acgaatttttgtggtattgatggttgggtatgagaagagaagacaatttgattgatgatggaaacgttggccacatcttcttctgcaactcttccatcttcttcttctcccttttctatattcccttcaagaagaacttccctttctcctcccaagactctccaatttcgtttaccctcctccaagcgtgatgatgctcgcgattcagactctaaccaaaacaatcttcctattctcagtgatcgctgcctctccctttcccctctttccaaagatgctgcgatggggctggtgctgagtgctgcaacgggcagaggatggaccacgggttcagggatggaaggcccctctgttcctgcagttggtagggatagcgaatctgggacggggaacatctccactttcccatggtctctcttcacaaaatcccctaggagaaggatgctggtggcttttacttgtaccatctgtggccagcgaactacaagggctattaatccccatgcttacactgatggcactgtttttgtgcagtgctgtggatgcaatgcatatcataagctcgtggatcacttgaacctgtttcaggagacaaattgctatttgaattcaagttttaattataaaggagaaggatgggatgatcttaagttcaggtatatggatgataacgatgatgatgacatattccccattgcataagtgaactgcctgcatatggagcatatactctctgcctaatcatgtggaagttcagtttagatgtcttgtatattctttaggttttcatgctttatagtgaaatttgtcagagacttgtatagtaacatgtttatatatagctttgaactcatttttatgatcatgaatttcataatgtacaagacattacacaaataaaaaaaaaaaatctctacattctgtgaaaatgctagcttttttttaaaaaaaaaaaaaaaaaaaaaaaggggggggggggaaaaaaaaaaaaat

SEQ ID NO: 3981 - DNA, 1325 bp, Glycine max
cgcagaaactaataacctcttcgaatccattgatacgcattcaagccctagatttcaatctagggtttctttgcacgctaattccatcttcaaattctgccttcattcgattcaggggggaattaaattgtttctattttttttcgaatttaccacaaattagaaatcgataaagaaaaatggtgagggtgttgagaagctgcattcaatcgattttgaagctggtgaactcggtgattgggatggcggggctagccatgattctgtactccgcatggatgattagggtttggcagaggaagatgggcgaacttccctttggtcacgattctgattacccacctccgtggttcatttacatgtttcttggccttggagttgctttctgtgtaatcacttgtttaggtcatgttgctgctgaaactgctaatggctgttgcctatatttgtatatggtatttgtggttttgcttatcatgctggaagctgcagtaactgttgatgtatttgtaaaccaggactgggagaaggacttcccaaaagacccctccgggagttttgatcagttcaagaattttatcaggtcaaattatgagatgtgcaaatgggtaggcctgtcacttgtttctgtacagggactctctttattattggcaatgatactcaaagcactagggccacatcaatattatgacagtgatgatgaatatgctcctgacagggtgccactcttgagaaatgctccacctcattatgttgttgttgatccaggatatgtgcatggaaatgatgcatggaggagacaagacaaataggtaagcccattttgctttgaattgaaccttgatgcttggagccatggaaggtgggcgtggcaatcattttttatgccagttgacttagaaggggacctgtatgcttgagatggattagctattggattaatggctatgggagaaacaagttcttatcgtgacccttgcatctgttacaccaatttcatacagttatgagcaaacgtatacgttgtatcatatatttttatatttcttttttgggtgaatggacgaacgtatgtatcatattgattcatgtctgtatatcataaataaaatgcagaatctcttgatgaatgatccccctgtatcttctgttaaatgtatcacagaagttggatcaatagatagataagaacaaattttcctttgtttatcctgattactgatcattcatccagttgatacaaaatggaattttggtgcccggtgcatttacacaaaaacatgactgtcctttgtttttttctttcaaaaaaaaaaaaaaaa

SEQ ID NO: 3982 - DNA, 2471 bp, Glycine max
  misc_feature (34)..(37): n is a, c, g, or t
ctcaattgctcctaacttacctccattcttaatnnnntgtttgcttttataacttaaaagtcttggttgttatgtttttcttcccttggctacatctatatttattagaatttattggttgtgcatatcaattccaaagtaccctattgttcattttttttttttctgatttattgctattccaccaatcggaccttcctaaggaaaccaattgtttaatatattaaggagtcttcaagagattgtcttgccctttggtttgctataatcaaacgctcaaccacttggtcaaaagccttatctgagtttccttctgtgtctctaggagcatcaaccttatctgtctcaagttgcatcagcaaagtcatcttagaaggttcaacaagattttatcagtgagcacttgttttactatttctcaagactgaaattttgtatgagctgagtgaataaaaggagaactatgtcattggttatatctacagagttggctgatacatcatatgggaatgccaagctctacacactaaagggaactgatgttacaccagatttgtcctcccacaattttgcaccagataagcacagaaacatgtacatgacaaagtcatactcctgtgagagttatgaaaagtacttccacgattcaccaacagaagagctgatagaaccatcaagttccagcatatcaggaaactcagttcaccctgatggtgcttcttcttacctgctcagagctagttcaggagcttctgtgattgttaataacccatttgacacttctatctggtctacaaggcatcgcgatgcctatcagtccaattctgtatcagatttcgtggaaaatgggagcccggatggccttgacttcgatggtgaaatgagactaaaacttcaagaattggagagggctttgctttctgatgaagaagaggaggagcaaggcatatttgagactgttcaaagcatggagattgatcctgacatggtcgagtgggccaatccgcttcaagatatgctgctccatgactcaccaaaggagtcctcatcctcagattcttccaatcttagcagcatcagtagcaccaccaaagacacatcacaaaactcaccccaaacccctaagcaactgctttatgattgtgctaggatactttcagaaggaaatgaacaggaagccacatctatgataaacaagctccggcaaatggtctcaattcagggtgatccttctcagagaattgcagcttacatggtggaaggacttgcagctcgtgtcgctacatccggaaaatgcatctatcaagcattgagatgcaaggaacctccttctaacgatcgcttagcagcaatgcaaatactatttgaggtctgcccgtgttttaaatttggatacatcgcggcaaatggtgcaatagctgaggctgttagagatgaaaagaaggttcacataatagactttgacatcagccaaggaactcaatacataactctaatacaaacacttgcttcaatgccaggtaggccacctcatgtgagattaaccggggtggatgatcctgagtctgtgcagcgttccattggtggcataaacatcataggacaaagacttgaaaagctggcagaggaacttggattgccatttgagtttcgagcagtggcgtcagggacctcaaatgtcacacaatcaatgcttgactgtcgtccgggggaagcacttgtggtgaactttgcattccagcttcaccacatgcgcgatgaaactgtatcgacagtgaacgagcgagaccaacttcttcgcatggttaagagcttgaatccaaaacttgtgacagttgtggagcaggacatgaacaccaacacctccccttttctcccaagatttgttgaagcctacaattactactctgctgtgtttaacacacttgatgcaactctccctagggagagccaggacaggatgaatgtcgaaaggcaatgcctggcaaaggacatagtcaacattgttgcttgcgagggtgaggaaagaatagaacggtatgaagtcgccggaaaatggagggcaaggttgtcaatggctggcttcactccatccccaatgagcacaaatgtgagagaagcaattaggaaactcattattaagcaatactgtgacaaattcaagataaaggaggaaatggggggtcttcattttgggtgggaagacaaaaacttaattgttgcttcagcatggaagtgaccaatacaaattcttttgttgcatgagactcattgtagtgttgatgtagtatttgtttgcttgtttagtttgtatctgttatgtttatgcttggttcagactcagatgtatactaacgtgcaacttatgctaatacatactttcatgtgtatggcaacacaaaacagctatcaatgcttaggcttgtaatgacatcattttcttgttagttagcatataattttgcgtttcc

SEQ ID NO: 3983 - DNA, 1962 bp, Glycine max
caaaaccacaacctcaacgcgtgcgttctcagattttcgcggtggtcgaaaaatctgcgtgggttccgggacttggctcggacattgcagtttaaggatctctgcattggaaatttgtttcaatttatatgttctaaacacggcttaggaaacctggcatgggagttgttactgtttctaccttagctgctaggacgccattaagattgaatacaaggttgaccagtcatcagcaggtgcataaaagacctttaattgtagcttttaaaggaaataaattgaataaagccgctttggtttcacctcaggagcaaattcctctacccatagaaacagcaaagaaagaccaaaaaagggtaggaaagactagtgagtctctgaagagagtgagagctgtctctattgttgaaacctctccatgcaccttggatatggactacaatgaagctgcagccaaacttgaaaatatatataaactcagccctgtatctgatacctgtaatatggaagatattgatagtaaagtcgagagagtcttgtggaggaggaggaaggttggtaatgaacatgatgatgaaaattgtgatattgtggttagaaaccagaataagaaggccaaacgattgagtcttgataagaggattacattgaaaaataatgcaaaggaggaagtgattgaccaaactcagaagataagaaatgttaagaatagagtacaaaatattgatgtgcttatcagggattattcagcatcaactgatttagttagcatggactggaagaaaatgaagattccggcagttcttccttcttcagagcatgcatggttgttcaagttgatgcaaccaatgaaggcactcctacaagcaaaagaagatttacagtcagtggggaaagaaattacagatggtgaactagctgatgcaacaaacatgagcattattcaagtaaggaaagctatagaggttggccgagctgcaagaaacaagctcataaagcacaatctccggcttgtgttgttcgtgattagcaaatattttcaagattttgcaagtggccggaggtttcaagatctttgtcaggcaggagttaagggacttatcacagcaattgatcgttttgagccaaaaagaagacttcagctatctacatacagtttattttggataagacattctatcgttcgttccataaccctctcaagcttcacacgtgttccttttggacttgaaagggttagagtagatatccaaagaacaaaacttaagttaacatttgagctccagaggtcaccaacggaagaagagttagtagaaagaattgggatctcacttgaaagatatcatgaagtaatgaaggcatcaaaacccattttatcccttcattcaagacatataaccacgcaagaggagtatattaatgggattactgatgttgatggtgttaatggtgataataggaggcaacttgctgttctaagacttgctcttgatgatgtgcttgattccctgaagccaaaggagagcctagtgatcaggcagagatatggacttgatggcaagggtgacagaacattgggagaaattgctgggaacttgaatatttctagggaaattgtccggaagcatgaagtcaaagctctcatgaagcttaagcatccagctcggttggattatcttcgtcgttatgttgtataaattaacaaatatatatatatgcttccattggtgtcattttagtcccacgtacgctacctatagccatgcccttgataattctcataacaattatttaagtatacaaaattataatcatttgtcatgtaatttgtatatgaaggagttattgctcataagaaataacaacccaatacatgttacatgtaatgtgttgtgttcatgaattacattccaaattatataatagttgctagagttcatgtcgtaaaaaaaaaaaaaaaaa

SEQ ID NO: 3984 - DNA, 2190 bp, Glycine max
tcagctacgtaggccccccccccccggggagcatcatcatcacattgaaaagaaaagaaaagaaaatcaatggcggaaaccgcttcaccatcttccaaaccctcaccaatggaccctcaaattcaaaaccccgcaccctccaactccaactccaaccctccaatcccttccccttccccttctcacaacatggcctctccctctctcccacccctcccccaagaccaacaacaacaacttcagcaacagctaagtccccctcaacaacaacaacaacaacaacaacaacaacaacaacctttggtttcttcgaacagcatgaacaacatgaaccctatctccaatttccagctccagcaatccatgcagcgatcgccttccctctcgcgcctcaatcagattcagcctcagcagacaacgcagcagcagcagcagtttggtgtcatgcgccagcaggccggattgtacggcggacagatgagcttcgccgccgcgggtggtgccggtgccgctcagcagcagcaattgggagggtcgaatctgtcgcggtcggcgttgatggggcagagcgggcacttccccatgctttccggggctggaacgcagtttaatttactctcctcgccaaggcagaaaggtgggggggccttaggtccagtcgtctcaattctcttcaggtaattctgctggacaatcactgcaaggaatgcaagcaatgggtatgatggggtcgccaaatctcacctcgcaactacgagcaaatggagccatggcttatgcacagcagctgcgtatgagtcagggtcaaatcaggcagcaactatcccagcaaggttcacttaacactgcacaggttcaaggtttaccaaggtcatcatcccttgcttttatgagttctcagttgtctgggttgtctcagaatggacaacctgcaatgattaactctttaacacagcaacagtggcttaagcaaatgccagcaatgtctggccctgccgcaccattgcgtcttcaacaccagaggcagcagcagctgggttcttctacccaattgcaacaaaactccatgaccctgaaccaacagcaattgtcccagctgatgcagcaacagaaatcgatggggcagcctcagctgcttcagcagcaacaacaacagcagcagcagccgcagcctcaacagctgcaacaacagcttatacaacagcagccacaacaacaatctcatctacaagtttcggtccatcaacagcaacagcaacagcaacagtctccaaggatgccaggacctgcaggccaaaagtcacttagtctaacaggatcacagccagatgtgactgcatctggcgcaactacaccaggtggtagttctagccaaggaactgaagctacaaaccaagtccttgggaagagaaagatacaagatttagttgcacaggtggatccacaaggtaggctggaccccgaagttatagatcttcttttagagcttgctgatgacttcattgattctgcaactacacatggttgcattttggcgaaacatagaaaatcgtcaactttggagtccaaggatttattgctacacctagagaaaaattgggatttaacaattcccggatactcaagtgaagagaagaagaatcagagcaaacctcaattaaatgaccttcacaagaggcgcctagatatggttcgcacattgatggaatcctcatcctctgagtcgagtattaacagctctaaagagatgagtagacagggcatttctaatcctccccctgtaggaacccatcatctagtaagacccttgagtccagagcagttggtttctcatgcagctggttctcaaatgctacagcagatgacaaggttttaatgaacctctgattttggtcttcatgctgctaggtttgattgcctgtatgcaggtctgtgaagagatcgcttgctgaaactgattagcatacaagggaactgtaattacttagtatttagacatgaaaaatagttgttaaaaggatcccagttattgactacctcttgttatttgccccaacccctatatagtcatctcgtttcgctgtttgagcctaattaattaattaattaattatggatttttaatgtacattggtgcctgaatcgagtttatttgttgtctaaacttacactttcttggatacttgcttt

SEQ ID NO: 3985 - DNA, 1053 bp, Glycine max
ctgcgagaaaacgcgaaatctgtgagcggaggagataccagtgggcactccgaggcaacttcacactccttttaatctttcatcctatctttgtattgttgaaccctccattctctgcaacattcttcgattcaattgctcttgtgaaattcctcctttattagcggctaaaccctaaatcagaactttggtgtggtgtgttgacttaattgagtgtagaaatagaataatggtgaaagcatatacacaggaacacgtctacaagcacccttgggaacgtgtaacttgtgcatcttggcgcaagtttgctgaccaagagaacaaacgcatattatcccatattcttgatgttgacacattgaaccacagccttgaccctttcatcagggatgctttacacgacccgtgctatcacgatccattgtcctgggccgtggtttgtccgcaagattgttggtcaggatatttgccactgtgtggaatccactgtggtggatgcacggtcgcgctccatgcaactaacctcccggaatatcagcctccagaagttcattgaagtggaagagaagatccgatatgatcctcacccggataacccgactgggtggacaatttgccagcaggagactcgcatccggattaagccgctgtcggctttggcatccatggctgaaaaggtggagcagcgatgtgctgaaaagttccttcagaatagtgtcaagggtagagaggttatggagaggatttgtaaatatcttgaagcagaatcaagcagccttgccttgtgattctatctttctcatctcagttttgggtttatttagtttaaattgttacatttgtaagataactgagaaaacattgccacatcaagcaagacatggaagatgatgaagcttgtgtctctacccttgatggtaagaacactatttggatcttctctaaattttgaactggcaaataattttttaaattgttgtaacacaacttaaagaaccctgttgaatctccttttatctgaatcttgatcagagtgagtttgggccccccacc

SEQ ID NO: 3986 - DNA, 994 bp, Glycine max
gggcgtgcgtacggctgcgagaagacgacagaagggggggcatttaaagctaaaattaattatttaagccgaaaagagcatccgactcgtgcttgctctctctgtggttttgggtctctctcactcacaggcacagcaacagcaccatggaaggcgcaacgatgttactgttgtcgccaatatcgagctgcaacgtgcgcagtaagcatttaaactactcactcagaaggcgtagctgttattcttctcccagggcactgaaaatagtgagcatggcgaaggagggaagcgacaccggcaacggcgtggtagaaaaagcagccatagcgggtggattgatctcaaccccagtaattgcttggtctctctatactctcaaaacaacagggtgcggtcttcccccaggaccaggtgggtcaattggagcattggagggtgtgagctacctcgtggtagtgggcatagtgggttggagcttgtacactaaagccaaaaccggttcgggacttcccaacggtcctttcgggttgttgggtgccgtggaaggattctcctatttggcattggttgcgattgtggtcgtgttcgggttgcaattccttgacaagggttacatccctggtcctctccccgccgatcagtgctttggctagctaccttcttcattcgcttctcttgctttcgataatgtaataataatgtcagccactacaattctatcctggatggataaggtcgcaccgtcttgtcttaggatgtcattttccactacctctgttactaaacaaattactttgcataaaaaaaaaacaaattactatgttaagggatgctggttgaattggtgagcgattataaatcccctcacacttttgattgattgcatgataaaaaaaaaaaaaacttattgctattatttttccgtgtaagagttcaggccattaatgaaaattactgtgtcatatcgttaaaaaaaaaaaaaaaaaaaaaaaaa

SEQ ID NO: 3987 - DNA, 504 bp, Glycine max
ggaagtgcggaaaccctagtggtagtggagttgggtgagaatgggaatagcaggtaaggttggggattatgctttcaaggcattcaccgccactcttggagtcgccactatttacctcactgcaaccttctctgtcaacgtttacagaggcctctcttggcacaatgctcaaaccaaacttgataaacaagatgctgatgagcaagcaccgtgacttgatctcataagcccaccatcttaaatttcaaatcatgttgtgtagaaaaataatttaaagttgtataattccatgtaatgagccgtttctcggattgacttcaaatcaccgtttatctattccggttgtaacagcttttcgaggcagcatttaaatttcaaatattttttgatgcattttgttaaacatacgcgttgtatgaatctgttatgacttatatgggtccatttgttcaagttttttttatttattaaaaagtcacttctttttttaaaaaaaaaaaaaaa

SEQ ID NO: 3988 - DNA, 513 bp, Glycine max
cacaccaaactccacagcgactccaaatctctcgtggtagacagcttccatctcatctccggcgatgtctgggcgtggcaagggcggcaaggggctcggcaagggcggcgccaagcgccaccggaaggtgctccgggacaacatccagggcatcaccaagccggcgatccggaggctggccaggaggggcggtgtgaagcgcatctcggggctcatctacgaggagacccgcggcgtcctcaagatcttcctcgagaacgtcatccgcgacgccgtcacctacaccgagcacgcccgccgcaagaccgtcaccgccatggacgtcgtgtacgccctcaagcgccagggccgcaccctctacggcttcggcggctgagcgccatcagcgcgctgccgctggctgacactgctgtttcctgctttgctctgtagtcttactcccccccgtcgtgaatccagtgcgctggctatgcttgtttctgtagtttgtctagtgagatccaacttctagtt

SEQ ID NO: 3989 - DNA, 520 bp, Glycine max
acccatctcttcactcaccgcctccacccaccaaaatccccaaatcccctctcttcccaagctactcggagcaggcagccatgtcggggcgcggcaagggcggcaaggggctcggcaagggcggcgcgaagcgccaccgcaaggtcctgcgcgacaacatccagggcatcaccaagccggcgatccggaggctggcccggaggggcggcgtgaagcgcatctcggggctcatctacgaggagacccgcggcgtgctcaagatcttcctcgagaacgtcatccgcgacgccgtcacctacaccgagcacgcccgccgcaagaccgtcaccgccatggacgtcgtctacgcgctcaagcgccagggccgcaccctgtacggcttcggcggctgaagagccgcggcgctggctggccctggcgcaccagccatggctcgcggtcaagaaagtggagaagaggagaaatctgtagttgatctgggttctgtgccttctatgcttagtagtagtagtatcctatg

SEQ ID NO: 3990 - DNA, 1759 bp, Glycine max
ccgaggagggcggcgatcggcgatgagcagcggcggcggatcgtcagaggcggcggcggcggcgaaggagaaggagaaggagaaggcgcgtgtgagtcgaacgtcgctgattctgtggcacgcgcaccaagacgacgccgcagcggtgaggaagcttctggaggaggatccatcgctggtgaaggcgagggattacgacagccggacgccgctacatgtggcgtcgctccatggatgggttgaggttgcgaattgcttgatcgaattcggtgctgacgtcaacgctcaggatcgttggaaaaacactcctctggctgatgcagaaggagctaaaagaactgccatgattgagcttttgaagtcacatggtggcttgtcgtatggccagaatggaagccattttgaaccgagtcctgttcttcccccattgcctaacaaatgtgattgggaagttgacccttctgagctggacttctccaattcagtttgcattggaaagggatcttttggtgagattttgaaagcccattggcgtggaacacctgttgctgtcaaacgtattcttccatctctgtcagatgatagattggtcattcaggacttcaggcaggaggttaatttacttgtgaagcttcgacaccctaatgttgttcaatttcttggagctgttactgacagaaagcctcttatgttaattactgagtatctgagaggaggtgatcttcataagtacctcaaggacaaaggtgcacttagtccttcaacagccatcaattttggcttggatattgctagagggatggcttatcttcacaatgaaccaaatgttatcattcatcgagacctaaagccaaggaatgttcttttagtcaactccagtgctgaccatttaaaagttggtgattttggacttagtaagctcattaaggtccaaagtgctcatgacgtatacaagatgacgggtgaaactggaagctaccgctacatggctcctgaagttctcaaacaccggagatatgataagaaggttgatgtgttctcctttgcaatgattctgtatgagatgcttgaaggtgaaccccctttttcaaattacgaaccttatgatggagccaaatatgtggcagaaggacacagaccttcttttaggggaaagggttatatccctgaactgcgagagttaactgagcagtgttgggatgctgacatgaagcaaagaccttcattcatagagatcattaaacaccttgaaaagatcaaggaaaatttgccttcagatcatcactggcacttgttcacttcatgatttttaggagcattggtgccgtgaaattcagatgattatctgctattaccattccagcgggttgccttatctactgtcgcgggtttttgaacagagccgacttggaaaacctagctaaggtcatgagcattgctttgaactgttagattcaaatgagcataacaggtttatgctgattgcctttatctggtgtttacattcaattactgttttttgtctcattaaaattcttggcgaattctattcagctatttaagtgagcagatactagttgttgcttgagtgtaatatgtagggtacaaaacccattgaggaaaaatataacacatcatgcaatctagtgtttaatattttatcttatgattaaaaattaatagcggttttcatttcttccatattgtttgaccaattcttctgttcaatgctaccaactactatgagattctctttctc

SEQ ID NO: 3991 - DNA, 3065 bp, Glycine max
  misc_feature (2982)..(2982): n is a, c, g, or t
  misc_feature (3030)..(3030): n is a, c, g, or t
ggctcgagtttcatttggcatttacatttgcatttgatttccgcgttcgcaagttgtaatcaaaatcaagccatagcgaccgaggaaggcggtgatcggcaatgagcagcggcggcggaggcgaaggagaaggagaaggcgcgtgtgagtcgaacgtcgctgattctgtggcacgcgcaccaaaacgacgccgcggcggtgcggaagcttctggaggaggatccgtccctggtgaaggcgagggattacgatagccgcacgccgctgcacgtgaagtcactccacggatgggtcgaagtgtcgaagtgcttgatcgaattcgatgctgacgtcaacgctcaggatcgctggaaaaacactcctctggctgatgcagaaggagctaaaagaactgccatgattgagcttttgaagtcacatggtggcttgtcgtatctggtcaggacttcaggcatgaggttaatttactagtgaagctttcgacaccctaatgtcgttcaatttctcggagctgttactgacaagaagccccttatgttaattactgagtatctgagaggaggtgatctttataagtacctcaaggacaaaggtgcacttagtccttcaacagccatcaactttggcttggatattgctagagggatggcctatcttcacaatgaaccaaatgttatcattcattgagacctaaagccaaggaatgttcttttagtcctctggtgctgaccatttaaaagttggtgaatttggacttagtaagctcattaaggtccaaagtgctcatgacgggtgaaactggaagctactgccacatggctcctgaagttttgaaataccggagatatgataagaaggttgatgtgttctcctttgcaatgagtgagatgcttgaaggtgaacccccgttttcaatttaagaaccttatgatggagccaaatatgtggcagaaggacaaaggccttcttttagggcaaagggttatatcctgaactgcaagactgttgttgttgttggcggctggggttagtctctgtggaggtttgggtgttttttgaggcagagcttattctcattttgctccaatggagatgcaggaccaaatagaaagcacaagatcaaccatatttggctcagctagtaacatccattccaatgctgaaaagcaggccgaaaatgttgctcccaaggtgaggaaaccatataccattactaaacaaagggagaagtggacagaggaagagcatcaaaagttccttgaagctttgaaattgtatggtcgtggctggcgccaaattgaagagcatataggtaccaaaactgctgttcagattcgaagccatgctcaaaagtttttctctaaggttgtgagggaatctgaggtcagtgatgagggttctatacaaccaattaacatacctcctcctcggcctaagaggaaacccctgcatccatatccccgtaaatcagttaattctttcagaggacccaccataccaaatgaaacagaaatatctccatctacaaacttgttggttgcagagaaagacaccccatctccaacctcggtgctatctacagttggttcggaagcatttgggtctcaattttcagagcagactaacagatgcctttcaccaaactcttgcaccactgatattcactcagtcagcttatcacctgttgaaaaggaaaatgattgcatgacatccaaagaatctgaggaggaagagaaagcatcaccagcttcacgtcctttatccactgtttctaacccaaaaatgtgcatgaaacctgagtttagttccaaggagatagaagatgctactgatatgccacaaaccactagtattaagctttttggaagaacagtctctatggtaggtaatcagaagtcactgaagatagatgatgatggtaagccgataactgtgaagtccgatgaagtagatgatgttgagaatgagaagcttggccaatcaggagaatccaagcaagtagatacacaattatcactcggcgtggttagtggtaactggcctataacacccgatgctgatggagctaatgtgaccagcatagagcccccaaaggagaaccaatgcttcagtgaatctgcacctgatgcattttttccgcagtggagtttgtcccaaggccttccacctttctacctgaggccatgcaatcaggtcctaaatcccttgcctcttaggccctcctctttgaaagtaagaacaagagaggaggaaagttgttgcactggttccaacactgaatcagtctgtgacatggaaaaccaaggcaagaactcagatgctgttgattctaagtttcaaaaatatcacgaggaaggagctgcaccccagaagaagcctgcaaggggatttgtaccatataaaagatgtttagctgaaagagatggacattcttttattgttgccatggaagagagggaggggcaacgagcacgtgtgtgctcatagccttacattctatttttacatgattcataatcatggtgttaatcagagaaaaaaaaaaaactgagagaaataaggacatgatttaggtagctgtgatctaattgtctaattgacaagcatctgatttccaattcttttttccaatatcttctttctttcacatgaaaacacttcatttccaataattcaagtggggggctggtggcattgtttgttctggtttttatcatgttacagttactttaaccaaatagagacatatagcagcaaattctgtcgttactgttttatttttctactcttggcatctttgtgtccttttagttgcatgatgattgcatcagtgatgggggtgtcctagggaagcgtggacaaagcaccagaatgtcactagacatcatatctgtcataacaattggctctgggaaacaaatgatatatgccaatgtattaaagcttaaagagtgtcatgtgctgatgactaccttagcaatntgtatatttggattttctttctgtatcattatttttaagaatagattntaaacattgttgaaaaaaaaaaaaaaaaaaaaaaa

SEQ ID NO: 3992 - DNA, 931 bp, Glycine max
aaggaagatctgcagacaacatttggacgcggtagagaagaaagaaaggaaagggtagggtagatcaggcaggcttcagttcagccatgagaactcacactcacacttacacttatactattttctctctaattcttctctccttatttcttcgaacccattccgaggttataacgttaacctctgatacatttaatgataagatcaaggagaaagacactgcatggtttgtgaaattctgcgttccctggtgcaagcattgtaagaatcttggttcattgtgggatgatttggggaaagcaatggaaggagaagatgaaatagaggttggagaagtcgattgcggcatggacaaagcagtatgttccaaagttgatattcactcctatcctacctttaaggttttctatgatggtgaagaagtagccagataccaaggtacaagagatgttgaatcaatgaaaacctttgttttggaagaagctgaaaaggcagcagcaaaagcacttgaaagtaacaaagaattataacaacttttgaggtgcagtcattatctggattacaactagctctttactgtgggtggtgcacatcccagataagtaatcacctttgggttcaggctgagacattcattcttctctgttctgatcaacatttgtttgtttgacgtagcagttgtgagttaagaactaatttcgtacactaccacaatttctttctgctatactccacaattttcttttttaggtttatttatactctactaaactgatagtggcttgtcatgtttaaagtttcaatataatgatcagtgaattatgaatcgtacctcaggatttgtttatataatcatttggtcttttgaatgctcattattttcatgggattataccatcccaaaaaaaaaaaaaaaaaaaaaaaaccaaaa

SEQ ID NO: 3993 - DNA, 733 bp, Glycine max
gtctgtggagtcgttgaagttgaaagataataagaaagaagaatgcccatattctctgcaagcttgggctccttcacttccatctccttcctctcaacttcacaatcacaatcacacctttctcctttcaagttaactgtgaagacaccttggcaatggcagcatcatcactatctcacttctaaagtgttggtctctgcctctggcaacacccaaattcctaatactgaacttcttcaacgccctactcctccagaccctctcgatgacgctcgtcaggctcggtagagatcgtcagattggaaggctgcaaagacatatcaagatagtaaactcatctataatggtagagtggaaggttttaattctggaggcctgctggttcggttttattctattatgggctttctcccattcccccaattgagtccagtgcatgcttctaaagaaccagagaaatctatacaagaaattgcacaaggcttaattggttcaatcatgtcggtgaaggtaattctagcagatgaggataacaagaaattgatcttatctgaaaaggaagctgcctggtccaaattttcaaaacaggctaatggtagggacatttttgaagtaagagttgggtatgtgaggaatatggcgctattgttatttgcgcttccctgaaccgcttatagcctacctggcctataacatgtcagagtgtcatgggatctaatgaggaggcagaaat

SEQ ID NO: 3994 - DNA, 1024 bp, Glycine max
  misc_feature (58)..(58): n is a, c, g, or t
aacttgccttttcccacttaaattccacacacgcccaattttgggctaacacactatntaaagacacattacccttttgcaaccacttcatcacagaatcataagagtttttgtgtgctcttggattggttgttagaatggagggtcagagtaagggtagttttaatgtgatggaagggagtgagggcaaaggaagggagtttgtggtggaaaagtctgcatcatcaatagtgggaacttgtgatttggttctaaggattttggcctttttactaacccttgtggctgctgtagttattgggacagataagcaaactgccattgttccaatcaagcttgtggattctatgccaactttgtacgttcctgttgcagctaagtggcattacttgtctgcctttgtctattatgtgggggcaaatgcaatagcatgtgcatatgcaatactgtctctcttgctcactcttgcaaataggcgtaaaggcaaaggaacgatggagacattgatcactgtgctggacacagtaatggtagctttgctcttctccggcaacggagccgccatggcggttggtctccttggcttgcaaggaaactcacatgtgcattggaacaaagtgtgcaatgagtttgggaaattttgtgaccaagtggctgcttcccttttcatatcactgcttggatcaatagcattcctcttgctgctgatagttcctcctgttttgagacttaaacagacaacttaaggtgcctaggagtctttaatcactgaatcaataaatttaatgtggttaattatccacaactttattttatatgttatgtgtgagaattaatagtattatggtggcaccctaagcccaatagactgactacattgtaatgtgagagaaacttgtactttttttaggaacatgtaatgggtttatttggattatagcatatgaatgtatgctagacattcaacttcctaaaaaaaaaaaaaaattgaccaaatattttgataagaaaaaaaaaacccaag

SEQ ID NO: 3995 - DNA, 2072 bp, Glycine max
gacgatgatgatgatgatgatgatgatgcgggagaatatgaggtgcacgtggtagataagaaagtggttgatggagataataatgatgggaacaaggccaaggagcacgccgcattccgtacccggagacctggttcccggaatccacttgaggttgctaaagagattcagattctatttcagagggcttccgattctggtgcccaaatcgccaagattcttgaggtcggcaagcttccccacaatcgaaagcacgcagcttatcaagcttcttccaagatgttacaagttgttgctccctctttgtcccttgtctcctcccaaccttctacttccaaagatgctgaatccgcctccgctgctaacatggattttaatgttgatctaacaaccggggcacgcaatctttcctctacgcttcagaagctccttctttgggagaagaaactctttaatgaagttaaggcggaggaaaagatgcgggtcatgcacgataggaagtgtcacaggttgaagcgtttggatgataggggttctgattttcataaagtcgattcgactcgaactttgattaggaatctgtccacaaaaattagaatggcaattcaggtggttgataagatttctatgactataaataagataagggatgaagaactgtggccacagctgaaggaattaacccaggccccccccccccgttgactagaatgtggaaatccatgcttgaatgtcatcatgatcagtgtgaagcaattagagaagccagaatactgggttccattggatccaggaagaagagcagtgatagtcatctccaggcaaccaagcagcttgaacatgagcttatcaattggacattccaattctctggctggataagtgcccagaaaggttatgttagagcattgaataattggctgttgaaatgtctcctgtatgaacctgaagaaactccggatggcatagtccccttttcccctggtaggattggggctccgcaaatatttgtaatatgtaatcagtggtcccaagctttggatagaatatctgaaaaggaagttgttgattccatgcatgtatttaccatgagtgtgcttcagatatgggaacaagataagctagaaatgcataggcaggtgatgcagaataaggatctagagagaaaggtgagaaatatggatagagatgaccagaagctgcagaagcaaattcaagcgttagagcgaaaggtggttctggtatctggagaaggtaaaggtctctcagtttctgagaatatcatatatcagagtgacaaaagcagcagtctacaggctagcttgcagcgcatttttgaggccatggagagatttactgatgaatctgtgagagcttatgaggagttgctacaacggagcgaagaagaaagtgctgcccgaaatcatgagagaggttcataggggtggtgtagctgatggaagttggaatgatattatctttgccatttgccgagaatagaaactagctgatctccctctactaactattctttacaacagagtcttgggaggaggggttgggtttgatttctcactacgctaagctaactgcattggagctgaagatactactgagatgggacagtggagtttattgtcaaacgaaaagagaagtgtgaggtattaggcgcacagttgctttttgggtatgcagcgctataaggctacaagtgaagttgtgctgctaaaagacaggggaaggggagcccacaaattgtaacatctaaatggttcttctttctgcatttgaaaatagaaatgaaggagaaggacggactttcgggtatagaacccctgcaactggcaagtcatgtgatagaaggctcaaattgaatcagtaaaattggagtaacgcacgccactgaatgcatgggtgttattggttcctgtataaaaacattcgtttttaagttaaattattgtacagattacctattaacactgagcaggcttgatgaaaaagcatttagaataatttttttttttatagccctttgttcctccactgaaataaaatgctgagaactgttc

SEQ ID NO: 3996 - DNA, 1314 bp, Glycine max
  misc_feature (21)..(21): n is a, c, g, or t
tcgagtcagctcacgtaggcncccccccccgaaaagtctagagatttcttccagtgacgtcactgcattttggcatcagttttctaaaagggttacagaagctgcccttttaaatttggaagggtgccttgtaacagctgcatgcttggattctcttgcagagcttcctgcactgtcaaacttgaatcttaatagatgccttctctctgacaatggatgcaaaaaattttcacgactcgaaaatttgaaaatattaaacttgggatttaatgtcataacagatgcatgtttagttcacttgaaaggattgacaaagttggagagcttgaaccttgattcgtgtaagattggtgatgaaggattggtcaatttggctggccttgagcaattgaactgcttggaattgtccgatacagaagttggaagcaatgggctacaccatttatcaggtttgtctagtctgcagaaaataaatctgtcttttaccatgattagtgatagcagtttaaggaaattgtgcggactctcgtctctgaagtcacttaatttggatgcttaccaaattactgatgctgggctggcaaaccttacaagtttgactggcctcactgacctggatttgtttggtgcacgaatcacagattttgggacaaactatttgaaaaaatttaagaacctgaggtccttggaaatatgcggtggaggattgactgatactggtgtgaaaaatattaaagagctttcttctctagtgtgcttaaatttatcacaaaacagcaaccttacagacaaaaccctggagttaatttctgggcttactgggttggtttctttgaatgtttcaaattctcgtatcactaatgctggactgcagcatttgaagacactgaagaacttgagatctctgacattggagtcctgtaaggtgacagcaaatgacatcaagaaactgaaatcaatgtacctcccaaatttggtaagctttcggcctgggtagttattgcggtattctgatatgtgtatatgtatatattattatacttatatatgtcagtggtactgaagtcgtatcttagagaagaatggaaagacaacctcaaattgtacataggctataataatgactttatggaaggtgtaattctgcttgtgctgcgaagttttgttgttttattgtaaatgtatatgtatatgatatgacgaaaaagaatgatgcagggacgtgttttctacgcctttagtatttaaggtgaaaaatgggcgaataaaccttttatcagcagatgttaatagattaatatttcacttatcaaa

SEQ ID NO: 3997 - DNA, 2939 bp, Glycine max
aaaagatccaacatctgacatggctataatatctcgcaaaggatctactcttgttagagaaatccatgagaagcagagtatgaacaagtctcgccaacgcttttgggaacttgcaggctcaaaacttggtgatatcttgggtgttgaaaaaacagcagagcagattgatgcagacactgctgaagtgggtgaagatggtgaaattgattttaaggaggaagctaagttttcacagcatatgaagaagggagaagccgtgagtgactttgctaagtcaaaaacccttgcagagcaaaggcaatatctgcctattttttcagtgagagaagagttattacaggtggttcgtgaaaatcaggtggtggtggtggttggagaaaccggttcaggaaagacaacacaattgacacagtatctgcatgaggatggctatactataggtggtatagtaggctgcacccaaccaaggcgtgtggcagctatgagtgttgccaagagtcaggcgaagagatggatacagagttgggtgataaaattggctatgctatacgttttgaggatgtgaccgggccaaataccattataaagtacatgactgatggggtacttctacgtgaaacactcaaagactctgatctagacaagtatcgggttattgtcatggatgaagcccatgaaagatcactaagcacagatgttctttttggaatattgaagaaagttgtagcccaacgtcgtgatttcaagctgatcgtcacatcagcaactctgaatgcccagaaattttcaaatttctttggaagtgtaccgatttttcatattcctgggcgaacatttcctgtgaatatattatggagtaaatctccagttgaagattatgttgaaggtgcagtgaagcagactatgactattcacataaccagtcctcctggtgacatccttatcttcatgactggccaagatgagattgaggcagcttgctatgcccttgctgaaagaatggagcagaatggtgtcatcttccaagaaagctgtccctaaactcttgattcttcccatatactctcagcttcctgctgacttgcaagctatgatattccagaaagctgaagatggagcccgtaaatgcattgtggccactaatattgccgagacatcattaactgttgatggtatcttctatgtcattgactctggctatggtaaaatgaagagtgtataaccctaggatgggcatggatgctctccaagtcttccctgttagtcgtgctgctgctgaccagcgtgccggtcgagctggtagaactggtcctggtacgtgctatcgggtgtataccgagagcgcctacctaaatgaaatgttgcccagtcctgttccagagattcagaggactaaccttggcaatgtggtcttgttgctgaaatctcttaaagttgaaaatttacttgattttgatttcatggatccacctcctcaaggataatattctcaattccatgtaccagttgtgggtgttgggtgcccttaacaatgtgggggggttaactgatcttgggtggaaaatggttgaatttccactggaccctccgctggccaagatgcttttgatgggtgaacagttagggtgtcttgaggaggttttaacaattgtttccatgctgtcagtgccatctgttttctttagacccaaggaccgggcagaggagagtgacgctgcacgggaaagattttttgtgccagagtctgatcatttaaccctctacaatgtttatcagcaatggaaacaacatgattacagaggtgattggtgcaacgatcattttttgcatgttaaaggtctaagaaaggctagagaggttagatcccaactgcttgatattctgaagactttaaagatccccttaacctcatgttggccggatactgacattgtcaggaaagcaatttgttctgcatacttccacaattcagcaagattaaagggtgtgggggagtatgttaactgcaggaacgggatgccatgtcatcttcatcccagtagtgctctctatggtatgggttgcactcctgagtatgtagtttatcatgagttaatcctgaccaccaaggagtacatgcagtgtgcgacagcggtggagccccagtggctggctgagctgggacccatgtttttctctgttaaggattctgatacatcattactggagcataagaagagacaaaaacaagagaaaacagccatggaggaggagatggagaacttgaagaaggtgcaagcagaggttgagaaagaaaggaaacataaggagaaggaaaagatggctaagcatcagcagcaaatctccatgccaggtttaaggaagggttcttccacattcttgaggccaaagaagtttggtttgtaaattatgttgataatacagagaaatatcagcagactgtgaaagagaaggctgcattctgattgtaatgagatgtaagaaatattggcagactaagaaagagacggccgcagattccttggatggcggcaggactgccagaacacacttatttacattatggaaaacaatattcgaaagacctgatatattagttttgggtaatagcactgagctcttggaatattgtcgattgctctgcaagtttctagggttcataactgcacaaagcagaaactgtccacatgaaacaactggttatgtattcctatggtgtgtgaccatgtctagtatttacaacctcatcttcccacttatcattgtaatttagtcattgtaagctcttcaactcctaagcatcacgttttccatacacaatgaggtttgagttttaacttctagacattaattaaggaggggggagtgactctttgtttttgcgattttcaaggcagaatttgaacaaataatactatttttgccttgccttttttcac

SEQ ID NO: 3998 - DNA, 1210 bp, Glycine max
gggggaaaagcgtagtcatcagtttgccgatagaagtagaaaatggaatcttgatcgtattatctttgttgctcatccattactccttctgcagtagaataatatataaagagagaagagtgcaatctagaaccacatatatagttattttactgtgtgagagagaaaattaaacatgggaagaggaagggttgttctggaaagaatagagaacaagatcaaccgtcaagtaacattctcaaaacgcagaagtgggttgctgaagaaggcctttgagctttctgtgctatgtgatgctgaagttggccttatcatcttttctagccgtggcaagctttttcagtacagcagcactgatattaccaaaatcattgagaggtatcgccaatgtcgttacagcaagtcacacactggtgattcattggaacacgattcacagagcgcataccatgaattcttgaaattaagagcgaaatatgaatctcttgagcggacacaaaggcattttcaaggagaagaccttgagccacttagctttaaagatttgcagagcctggagaagcaactagacataacgctcgcactaactcgacagcaccaaacgaagaaactcatggcacgagcggatgaattacgcgaaaaggtgcataagttggaggatcttaacaaacaattggagtccaaggttttctctttaaataaccatgaaaaagatgaattctcgagtctcatccttgacaataacaattacattcaaatgcatgctacacaagttgatcaatttgagtctgagacagcactaaacacatggtttcaacatcaagaagttgtttctaaggaaaaagcaattgataccaggacagagcatagtcaaagcagtcacaacaaaaacaatggatggctgtaatgaatattcatttaatttacatgctaaaaaaatacctatcacaataactaatgggataatgcccattattggtattcacacaaatagtttatataaagtaaatgttatttctactaaacacacattattcctaataagaaattatgtattttatgcatcagaaaaggggatgaattgtgtatttcatctatcattgtataagttgtcattttaaaaaaatttcttaaatattgatattttacctattggcgtcatcattgtaatcagtttctagtagtagagagaaataattttatcctaaaa

SEQ ID NO: 3999 - DNA, 1717 bp, Glycine max
tcagctacgtaggcccccccccataaaaacacctgtctctaagaagaaagatgaaactgctgattccaataaaacagaaacactgtctgacaaaaaggatgaagggaacgttgtggcggttcaagcacaagatgacacacagagcactggcaagcagactgccaatgcagataccacagtgacaccagaggtgaagaaaactgggaaggttgtccctaaatcgcgttcaccgacctaggccccccccccgcgagacaatacagctgattccagtaaaacagaaacaaagtctgacaaagatgacaaaaaggaagaaagagttactggtgaaaaaagtggggcaaagacagacaagctgaaagcctctgataaagatgttaccaatgtaaaggggaaagtgaaagatggggacaagtcaaaagatgagaaagtaacccaagagagggatggaaaggacgagtccaaaagcaaatctagtaaggaagtgaaagacaagaggaagtctaatgaacctcctcgacaccctggatttattcttcaaacaaaatggaccaaagattctaaaatacgttctttgtcattgtcactggattcattgctggattatacagataaagatgttgaagaatcaaatcttgagctttcattgtttgctgaatcattttatgaaatgcttcagtttcaaatgggttctagaattttgacatttcttcagaaactgcgcataaaatttgtgatcaaaagaaatcagaaaaagaggcagagggaagatgagcaagagatggatgatgtaaaaaaatctcctgttaagcgtcaaaagggaaatgatccttcagtgaagaatgagcccacaaatatggacacgttaaatccaaccctactagatgatgagaaagctgttgctaggaatgataactctagtaataaggaggatgatgtgaagatggaagatggatcagacgaggaagaagatccagaagaggatcctgaagagtacgaggaaatggaaaatggtagtccccagcatgaggcatccaatgataaaaatgctgagcaagaggcgaatgcagatactaaatctgaaaatattactaccaatgataaaacagcagatgaaacttctaaagaggagattaaggttaaagatgaggtgcaagaatccaaggccgatctacaggtaaaagaagaaaaggaaggaaaggatgagattaagaaagaaactcctactgctaaggaggttgttgtggacagagaattgttgcaggctttccggttttttgatcgcaatcgtgttgggtacatcagggttgaagatatgagaataattatccataatctggggatgttcttttcgcacagggatgtcaaggaactagtacagagtgcattattggagagcaacactgggagagacgacagaattctttataataagctagtgcggatgagtgatatttgatgccccttgtgtctatttcattgtttacgaaacactggaattgcctgtgttgggacttgggattaatgaaagttgcttttgtaaaattacagttggactttatttgattgttgagagggctggtagtctttcgttttagcgaaagggtaaaacctttcttggcatttacaataggaaaccaagtattttatttacatgttttgaatttttttaatctcatcttttcgtgaaacttctgtcaaaaaaaaaaaaaaaaaa

SEQ ID NO: 4000 - DNA, 1778 bp, Glycine max
ccacgcgtccggcatgttagttgcgtgggtggcaacgtggaaaaacaagagtgggtaagaatagggaattagggagagaaggataagagagagaaaacaggaggagcaggaatcaggcatggaagggctggccatgctgaagcagctcattgctcagcttcaacacctctttgacacttaccactctcaatcttctctcatctttcaacaacaacaccccagatggacgacctcccttgacattgaagataactctgtagatgacttctgtggccttgtaatgacagctggaaagtctggcagtttcaggatgtcggagcctggaaagcctccacctactaagaagtctcgaagagatagaagcaggggcaaatcatctggaagatcttgtacaactgaagttatggaacaagaaatttggaaagattttcctgaagatttatttgaggctgtgattgcacgtcttcccatttccacatttttccgcttccgttctgtctgccggcagtggaattccatgctgaattctcaaagtttttctcagcattgtactcaagtcacacaagaaaatccatggttttacaccattacccatgaaaatgtgaattcgggagccatgtacgacccttctttgaaaaaatggcatcatccaactatatcaacaccgcccacaaaattgattgttttacctgtggcttcttctggcggcttagtttgctttcttgacattggtcatcgaaacttctttgtttgtaacccactgactcaatccttcaaggagttgccagctcgatcagtcaaggtctggtctcgtgttgctgtagggatgatggcaaatggaaactttgctggttcaggctacaagatcgtatgggtaggttgtgatggagaatatgaagtatacgactcagtcagaaattcttggagtcgtccaggaaacatgcctgtgggcatgaagctgccattgtcgctcaactttaggtctcaagctgtctctattggcagcacactttatttcatgcgttcagacccagacgggattgtttcctatgatatggcaactggggtttggaaacaatatataatcccagcgccactgcatctgactgatcacactctggctgagtgtgatggccaggtcatgcttgtgggtttgctcacgaagaatgcagccacttgtgtatgcatatgggagttgcagaaaatgactctcttgtggaaggaggttgacagaatgccaaacatatggtgcttggacttttatgggaagcacgttagaatgacttgcctggggaacaaaggcttgctcatgttgtccttgagatcaaaacaaatgaaccgattggttacttacaacatagcaaagaaagaatggctgaaggttcctgggtgtgtcgtgccacgtgggagaaaacgacagtggatagcatgtggtactgcatttcatccatgcctgactgcggtggtgtgatttctcatctatctctaacagcaatggcctagcaacggcctgccatttcccccctccagtcttgtagttcttttgcaatttgcaggcctttggtgttgctgtaggtaatcctaatgttcattgctggtgtaacaaagtagatgaaaaataatatgggtttgtagtgattcacgttttttcatgctctcagacatgtaaacattactttggttttgttatgaatgcctcatcctgggaacaccttggtaaaaggtgatataaaactgccgttcttttctgtattccgagtgtgagtggtttttttctt

SEQ ID NO: 4001 - DNA, 1900 bp, Glycine max
acaaaaccaactctcacctcaaatacttcctcgagccgattcggctcgagctacacaacaccaagaaatccaaatctaattccttatctcgtttgatatcctgatttctactctctcagtttccactctattgtatatctgtatatgtatgtatgtgatgaactgatgatatttgcatttgcttttatagtttgcttggtcaccaagtaacgacaaagggaaacagtttctagctttttcttggctgattgtaaataatctctctcttttctatattggatcatagctttctgcaccctcttcctcttaggttctcctatttttctctcttgtcgtggacctcaactttgtaggctcaccttagaaacaaaacttcttttctttttggcgggggtgagagttgctatcttattcctggtttcatctacaagacactaacatctttgttgtttttagtttcagaattcgttatactcacccacacaccaaaattctggtacaccatgatttttccaaggttttgtacgaatctaaaaggtatggcttttatagattctcaactttatcttgatcacacaggtaaaagattctgaaatctgtgcaccttgtgaatcaaagctctataatttcttcctttctgtgtttctgtgagcacccttttctagttcctctccatttccatctctttaggaacttaattcaactaagtttttgtatgcttgtggcttgagatatggaattggaaaccatctaccctccttgttttatgccaaattcaaattggtttgtgcaagagagccacagcacagagtggactagagaagataacaagaagtttgaaagtgcccttgctatatatgacaacgacaccccagatagatggttcaaggtggcagctatgatccctgggaagactgtgtttgatgtgatcaagcagtatagggaactggaagaagatgtgagtgaaatcgaagcagggcgtgttccaattcctggctatcttgcctcttctttcacctttgagctggttgacaaccacaactatgatggatgcagaagaaggcttgcacctgtcagaggctctgatcaagagagaaagaaaggagtcccatggactgaagatgaacacagacgttttctgatgggacttttaaagtatggtaaaggagactggagaaatatctctcgcaattttgtggtcactaagactccgacacaagttgctagccatgcacaaaagtactacataaggcaaaaggtttctggagggaaagataaaaggagaccaagcattcatgatataaccactgttaatcttacagaaacttctgcatcagataagaacaagcctcagttatttaatgcgtctcctgtgcttgcaccacagcagaagctgaatagcatatcaaaggtacagctgggctggactagtagccactacaatgatggatcattcatggttttcaacccaaatagtgatgccttgtttgtgtcatcttcacctgatgtcacttctatggccctgaaaatgcaagggcaagatctctatgactgtgctttacatgaggcttatgccaaggtaaaagttccaggtttcagcatggctcctagagacttcaataatgaagctgtttttggtattcatgcactgtaatgccaaccctgatgatgttaaacaaagaaaattccacgtcatagatcattgttctgtaggattaatgtagatgaccataagctagctagctactttgttcatggttagtgaacaacctaaaagaaaactagaataatgtttcaatccttaaaaactgaatttggaatgaacttattttaaagttttcctctttaaaaaaaaaaaaaaaaaaacccgatcagatcgagtatggaaaaccattcaggc

SEQ ID NO: 4002 - DNA, 1832 bp, Glycine max
gaacacaaccacctctcacctcaaatgacttcccattctctcttttgaaatcactacacaacaccaagaaatccaaatctaattcctcatctcgtttgatatcctgattcctactctcttagtttccactctattgtatggatgcatgtgatgaactgatgatatatgcatttgcttttatagtttgcttggccaccaagtaacgacaaagagaaacagtttctaactttttcttggctggttgtaaataatctctcttttctctattggatcatagctttctgcaccctcttcctcttaggttcccatatttttctctcttgtcgtggacctcaactttgtaggctcgccttagaaaaaaccttcttttctttttggtgggggtgagagttgctatcttattcctggtttcatcaacaagacactaacatctttgttgtttttagtttcagaattccttatactcacacaccaaaattctggtacaccatgatttttccaagattttgtacgaatctaaaaggtatggcttttatagattctcaagtttatcttgatcacacaggtaaaagattctgaaaatctgtgcaccttgtgaatcacagctctataatttcttcctttccgtgtatctcttctgtgttttttgtgagcagccttttctagttcctctccatttccatctctttaggaacttaattcaactaagattttttgtgtgcttgtggcttgaggtatggaattggaaaccctctacaccccttgttatatgccaaactcaaattggtttgtgcaagagagcctcagcacagagtggactagagaagataacaagaagtttgaaagtgcccttgctatatatgacaaggacaccccagatagatggttcaaggtggccgctatgatccctgggaagactgtgtttgatgtgatcaagcaatatagggaactggaagaagatgtgagtgaaatcgaagcagggcatgttccgattcccggctaccttgcatcttctttcacctttgagctggttgacaaccacaactatgatggatgcagaagaaggcttgcacctgtcagaggctctgatcaagagagaaagaaaggagtcccatggactgaagaggaacacagacgttttctgatgggacttttgaagtatggtaaaggagattggagaaatatctctcgcaattttgtggtcacaaagactccaacccaagttgctagccatgcacaaaagtactacataaggcaaaaggtttctggaggcaaagataaaaggagacctagcatccatgatataaccactgttaatcttacagaaacttctgcatcagacaagaacaagcctcctgtgattgcaccacagcagaagctgaatagcatgtcaaaagtacagctggactggactagtagccactacaatgatggatcactcatggttttcaacccaaatagtgatgacttgtttgtgtcatcttcatctgatgtcacttccatggccctgaaaatgcaagggcaagatctctatgaatgtgccttacgtgaggcttatgccaaggtaaaagttccaggtttcagcatggctcctagagacttcaataatgaagctgtttttggtattcatgcactgtaattccaaccctgatgatgttaaagaaaaaattatagatcattgttctgtaggattaatgtagatgacctgaagctagcaagctacttcgttcatcattagtgaacatcctaaaagaaaactagactaatgtttcaatccttaaaaactgaatttggaatggacttcttttaaagttttcctcttttatcttttt

SEQ ID NO: 4003 - DNA, 1671 bp, Glycine max
catcgatcgcatggttaggtctggttatgagagagagtgtcttcaggtttatagtagcgtccgtcgtgacgctttggatgagtgtttgattattctcggtgttgagaggttgagtattgcggggctgctgcggggtgcccccccgagtttggatgagaagatgaagaattgggttcaggctgttaaggttgttgttggagtgcttctcagtggtgagaagaggctgtgtgatggtttgtttggggatttggatgatttgaaggagatttgcttcaatgagactgctaagggctgtgtgatgcagttgctgaattttggtgaggctatcgcgatttgtaagcgctcgccagagaagttgtttcgcattttggacatgtatgaggctttgagggatgctatgcctgatttgcaggccatggtttcggatgagtttgtgattggtgaggccaatggcgtgctgagtgggcttggtgaggctgccaaagggacttttgctgagtttgagaattgtattaggaatgagacttccaagaagccggtcataaccggggatgttcatcctttgcctcgttatgttatgaattatctcaagttgcttgttgattatggtgaccctatggattcgcttctggagcttagtgaggaggatctctatcggtttaaaaatgatcttggtggtgatggttcgcagttagaggccatgtcgcccttggggcagcgaattctgctgctcatgtctgagcttgagtataatcttgaggagaagtcgaagctttatgaggacagtgcaatgcagcaggtgtttttgatgaacaatctttattacctagtgcggaaagtgaaggactcggacctagggaaggtcttgggggataattggattaggaaacgccgtggtcagatacgccagtatgctacagggtatctcagagcctcttggagcagggccttatcttgtttgaaggatgaagggattggagggagctccaataatgcatcgaagatggctttgaaggagaggttcaagagtttcaatgcttgttttgaagaaatttacagggttcagacagcttggaaggtaccggatgatcagcttcgggaggagctgcggatatctatatcagagaaggtgattcctgcataccgctcgtttgtgggaaggtttaggattcagttagagggaaggcatgtggggaagtacattaagtatacaccagaggatctagagacctatctattagatttatttgaaggatccccggctgtattgcatcacataaggaggaaaagtacatagtatatcataaaagatgcttttagcaggtgaactcattttatgaggattactagaaaatggtttcctgtgtcatgtgtatttctacttggataggtgttatattttacaggtgttaatgttagaatgggattttgtgacattcgactcttcttccaagccccttccccaaatccaaacaagattttttttttcatgtttcttcgaatactgtaatatcttttgtatatagtgtctgatacaggttatctgtgttgtttatacttgttgaaacagtacactcattagctatcataaattcagatcctgtgtatttacatatctgcagtttgcataattgccagctttctttataatcaaaggacattgattttctt

SEQ ID NO: 4004 - DNA, 2067 bp, Glycine max
gcttggtgggaagtatcctttttagaggaagttattctgagacacccaacaaacatatactctatattgttaaaagaaaaaatctctgacatcattatataaatgccatattggtgtataagacccaaaccattctcattttccatcaagcaaacgataagaaatgttatcagaaacattggccatccctgcagtactccttgtaatactcattttgattctatcctctgtcttgttccatcttcaagatgaaagaacaaatccaccaggtcctaaacccctcccaattattggtaaccttcacatgctggggaaactcccacatcgttcccttcaagcccttgccaaaaattatggacccataatgttcataaagttgggacaagtcccaaccgttgtagtttcctcccctgaaactgcagagctattcctcaaaacccatgacactatctttgctagcaggccaaaaactctagcttcagaatacatgtcttatggaagtaagggcctagcgttctctgagtatggaccctattggcgtaacgtgaaaaagttgtgcaccacacaacttctgagtgcatcaaaggtcgagatgttcgctccattgaggagggaggagttaggagtatttgtgaagtcactcgaaaaagcagcagcctcacgtgatgttgtgaatctgagtgaacaggttggggagcttatatcgaatattgtgtgtagaatgatacttggccgcagtaaggatgatagattcgacctaaaggggcttgctcgtgaggttctgcgtttgactggagtgttcaatattgcagattatgttccttggacaggcttcttggatcttcagggactaaaaggaaaaatgaagaaaatgagtaaggcatttgacgaagtgtttgaacaaatcataaaagaccatgaagatccttctgcaagcaacaagaatagtgtgcactctgaagattttgtggacatactgctatcacatatgcaccaagctgtgaatcagcaagagcagaaatatgtcattggtagaactaatatcaaggcaattatattagatatgattgcagggtcatttgacacatcagctgttgcagttgaatgggctatgtcggaactcttaaggaacccaagtgatatgaagaaacttcaagaagagttaaataatgtagtgggggaaaataaactagtggaggagtctgacttgtcaaagttgccttatttgaacatggtagtaaaggagaccttaaggttatatccggctggacccttgctagtgcctcgcgagtccctagaagatataactattaatggttatcacataaagaagaagacaagaattttagtcaatgcatgggccattggacgagaccctaaagtttggtcagataatgctgatatgttttgtccagagaggtttgtgaatagcaatgtagacattagaggacatgactttcaacttttaccatttggttctggtcgaagaggatgtcctgggattcaattgggtctgaccacatttggccttgttttggctcaattagtgcattgcttcaattgggagcttccatttggtgtgtctcctgatgacttagatatgagtgagatatttggcctttcactaccaagaagcaagcccttgctagctataccaacttatcgcctatttatcaaagcttaactaagggtcctttcgattgagtagaaaaaaataaaataaagatcaaatggttcatttatctttagaaaaattcattttagttctttatctttttaaattgcctgcttaggattggtgagcttcttattgcaggaattaggatggatctagatgtttatgtctgagtcattgtaaaatcaataatgtatttatatattgattctactcagatcttcaaatcagaggttttgactttttagatcttctctctggaggcttcttcatatttacttctctacatgtttagagtttctcatgtatgttggcatacgaccaagtctatagcttttactttttatcttttaataatatgaaatggaagtgggccggcattcggatattta

SEQ ID NO: 4005 - DNA, 1417 bp, Glycine max
  misc_feature (17)..(17): n is a, c, g, or t
tcgagtcagctacgtangcctccccccccagtgctcagctacgtcttgagtttcttctcttcactctcagaacactaactcccccaatgttggagggccaagcaacaacgcccacgtggccgcgcatgtgcgacacgtgccgctccgtcccctccaccgtcttctgccgctcccacaccgcctttctctgcgccacgtgcgacactcgcctccacgtctcgctcacgtggcacgagcgcgtgtgggtgtgcgaggcgtgcgagcgcgccccggcggcgttcctctgcaaggccgacgccgcctccctctgcgcctcctgcgacgccgacatccacgccgccaaccccctcgccagccgccaccaccgcgtccccatcctccccatcgccgccgccaacaacaacaacaacgacgacgacgacgttgctgacgttgacgacgaagacgaaaccgcttcatggctcttgctcaaccctatcaagagtgctactgtccctaacaccaataacaataacaataataacgggttcttgtataacggtgaggttgatgagtatttggaccttgttgataattgtaactcttgtggtgataataatcacttcgcttcagctgctgctactactgatcattacgctcagcaccaacatttcgctggtgtttctcagaagagttatgctggggacagtgttgttccggttcagcaacaccagcattttcagcttgggttggactttgacaactccaaacctgccttcagttacaatggttctgttagtcaaagtgtttcagtttcatcaatggatattggtgttgtacctgaatcaccaatgagggatgtctcaattgcccatacaagaccccccaaagggacaattgacctattttctggacctccaattcaggtgccttcccatttttctccaatggacagggaggccagagtcctaaggtacagggagaaaaagaagatgagaaaatttgagaagacaatcaggtatgcctcaaggaaggcctatgcagagactagacctcgtataaaaggtcgatttgccaagagaacagatgtagaagctgaagtggatcagatgttctcgacaacactaattacagaagttggatatggaattgttccctctttctgaatatgctgtgtagaacaaatggccagaagacattgaagatgctagaggatcatgattaatagaaatggaaaccacttgtgtactaagttattctgctgataatgtattttttatgtaatctaattgcttgcagttgtactaatcggatgctttattattttgtttattgtcttttgaatgaaacttgtatttgtaaatacagtccttgtattaaattattaaattacagtcaagtcaatcatatctcgaaaatttaacattttctcaatttc

SEQ ID NO: 4006 - DNA, 657 bp, Glycine max
tacggctgcgagaagacgacagaaggatacggctgcgagaagacgacagaaggggactcactcatacaatagagaccagcttttgcttctttgtgaacatggagatgaggaaatcatgtggcttcttcttcttgctcctcctccttgtctttgcttcccaggtggtggtgcagacggagggaagagtgtgtgagtcacaaagccacgggttccatggtttgtgtaatagagaccacaactgtgctttggtctgcaggaacgaaggtttctccggtggcaggtgcaaaggcttccgccgccgctgcttttgcaccaggatttgttgagatctcatcaaacactactcttgccatgcaaattaataaatcatagctaggccaaataaattgcatctactctttatccatttgggagctagctaccacaaccaactcatacttggtcattggattgcttccctttggcttctgcctttgcttatctctctacctctacgtcttgttcagggtttatgtttcgtaatgattaatgaatgctgtttaattaactagtaaaaaaaaaaaaaaaaaaaaaaaattaacaagtcacaacattccattatctgtcatttgcagggtttatttataataaaaaaatcattcaagataaaaaaaaaaa

SEQ ID NO: 4007 - DNA, 692 bp, Glycine max
acccgtccgtccgggtcagctacgtaggccgaggggggatacgattcctttggtttgcagtaatgggtgctctggatcacatatcggaactctttgactgctccagtggcagttccaagcacaagaagcgcaagcaattgcagacggtggaggtgaaagtgaagatggactgcgaaggatgcgagaggaaagtgaggaaggcggtggaggggatgaaaggcgtgaaccaggtggatgtggagcgtaaggccaacaaagtcactgtggtcggctacgtcgaggcctctaaggtggtcgcccgcatcgctcaccgcaccggcaagaaagcagagctctggccctacgtcccctacgacgtcgttgctcacccctacgcacccggagtctacgacaagaaagccccctccggttatgtccgcaacaccgatgatcctcactattcccatctcgcacgtgccagctccactgaggtccgctacaccactgctttcagcgacgaaaacccctccgcctgtgtcgttatgtgaaactattctctttatttgttatcttcgctttcattctatcttgtttttcagatcatgttgtattttttctctgttgaatgatactccttcgcctttacctacatctttctttcttccttcagagtctcactcacatctcgtttccagttcatcctcaacaactct

SEQ ID NO: 4008 - DNA, 824 bp, Glycine max
gtacgtaagctcggagtctcgccccttgctttagccatcactaacactcagtctctgaattggggctgagggtttcgagtaacgtttatttttcacgagtttaagatatcatgggtaaagagaaggttcacattaacattgtggtcattggccatgttgactctgggaagtcaaccaccactggccacttgatttacaagcttggaggtattgacaagcgtgttattgagaggtttgagaaagaagctgctgagatgaacaagaggtcattcaaatacgcctgggtgcttgacaagcttaaggctgagcgtgagagaggaattaccattgatattgcattatggaagtttgagaccaccaaatactactgcactgttattgatgctccaggacatcgtgatttcatcaagaacatgattactggaacttcccaggctgattgtgctgtccttatcattgattccacaactggtggttttgaagctggtatttccaaagatggacagactcgcgagcatgctctacttgccttcacccttggtgtcaagcaaatgatctgttgctgtaacaagatggatgccactaccccaaagtactctaaggccaggtatgaagaaattgtgaaggaagtttcttcctacttgaagaaggtaggttacaacccagacaagattccatttgttcccatctcaggttttgagggtgacaacatgattgagaggtccaccaatcttgattggtacaagggaccaacccttctcgaggctcttgaccagatcaatgagcccaagagaccctcagacaagcctttgaggcttcccttg

SEQ ID NO: 4009 - DNA, 790 bp, Glycine max
aattcggctcgagatgagatgtatcaggtcaatttgattcttgataatttgcctgctattaggttcacacagaaagaagggtacttgatgagatggactgggtaccctgttggtattaagattgaggatgcctattatgtgtttaaccatctcaagttcaatgttcttgtccacaagtacgaggagaccaatgtggctcgtgtgatggggactggtgaaggtgcagaactgatcccggttgtcaagcaggggtcttctgagaagcccggatacatggttgttgggtttgaggtgattccttgtagtattatgcataatgctgattctgcgaaaaccttgaagatgtatgagaagtatccatcgtctatcagatgcgatccagccactgtggcaatgcctatcaaggagggtcagcctgttgttttcacttatgaggtcacctttgaggagagtgacatcaagtggccatctagatgggatgcttacttgaagatggagggagctaaagtgcattggttctctatccttaattcgctcatggtgatcacttttcttgctggcattgttcttgtgatcttcctgaggactgttaggagggatctgacccgttatgaggagctcgataaggaggctcaagcacagatgaatgaagagttatctggttggaagcttgtagtgggagatgttttccgcactccgacaaatcctgctttgttgtgtgtgatggttggggatggagttcagattcttgggatgtctgttgtgacgatattgtttgctgcacttggat

SEQ ID NO: 4010 - DNA, 2085 bp, Glycine max
  misc_feature (1876)..(1876): n is a, c, g, or t
  misc_feature (1899)..(1899): n is a, c, g, or t
  misc_feature (1906)..(1906): n is a, c, g, or t
  misc_feature (1955)..(1955): n is a, c, g, or t
  misc_feature (1957)..(1957): n is a, c, g, or t
  misc_feature (1960)..(1960): n is a, c, g, or t
  misc_feature (1963)..(1963): n is a, c, g, or t
  misc_feature (1990)..(1990): n is a, c, g, or t
  misc_feature (1993)..(1993): n is a, c, g, or t
  misc_feature (1996)..(1996): n is a, c, g, or t
  misc_feature (2006)..(2006): n is a, c, g, or t
  misc_feature (2048)..(2048): n is a, c, g, or t
  misc_feature (2058)..(2058): n is a, c, g, or t
  misc_feature (2063)..(2063): n is a, c, g, or t
  misc_feature (2070)..(2070): n is a, c, g, or t
gagagaactagtctcgagttttttttccctttctttctcttctcttctctccgctcgccctcgagccgctcgtgccgcacaaagatgtgagagtttcgctggttttctaccctctcgtagctgtccatgccccaaaaatctgctaagtgcaacccctctttttattatggttttcttcacttcaacaccttaactttttgctacctccttggaccccaacacataacatcacacaagcgctgatggttaattgtgtggcccgtcctttcttaatattgcaacttacaaccaccactctttaccaatccctcaactattttagggttcagaaacccttagggttttcttgttcctcatagtagatttttgagtagtacctcttgtttgtttgttgaagcagaagcctctcgttcagcttggtcctagtccaagtactccaaggccaaatttcttgtactcttcagctagtggtggaaaccataatcataatcatcatcagcatcatagccatcaccaccaccatcagtttccaatcaacacctttcatcttcaatcgggtggatcagatcattgctttcagtctgatcaagtgtcaccacaccattctgtgaaatccgaagccagcacttctcagcttcacgctccgattttccactaccctttaatgagaggaaatcttcacaacactatgcatcatcatcatcctcagcaacaacaaggagggagcccaactagctccactggtgaagttgaagccataaaagctaaaatcattgctcaccctcagtactctaatcttttagaagtttccctatttaatttgtagataggagctccacccgaagtggtggcgcgtatggctgcggctaagcaagagtttgaggcacggcaaagatcttcagttggttcaagggaaacttcaaaagaccctgaacttgaccaattcatggaagcatactatgacatgcttgtgaagtatagagaggaattaacaaggcctattcaagaggctatggatttcatgcgaaggatagaaactcagctaaatatgctttgcaatggacccgtgcggatcttctctgatgataaatgtgaaggtgccggttcatcagaagaggatcaagacaacagtggaggagaaacagaacttcccgagattgatccccgagcagaagaccgtgaactcaaaaaccacttgctgaagaagtacagtggttacttaagtagccttaagcaagaactctccaagaagaaaaagaaagggaaacttcccaaagatgctaggcaaaagctacttaactggtgggaattacattacaaatggccatatccttcggaatcagagaaggtggcattggctgaatcaactggtttggaccaaaagcaaataaataactggttcataaaccagaggaagaggcattggaaaccatctgaagacatgcaatttatggtgatggatggcctgcatccgcagagtgcaactctctatatggatggtcactacatggcagatggtcactaccgtctaggaccatgacaaaagacaaggccaccttataaattattattatatatatttttaattgtaatttaaatgcaaggtatgtgtttcttattaacaaagagattgtgcccaaactggataacagtcaacgctctagctactagtttcaatattatcaagcatataccgtgaacattaattggttgtgcttgtgcagtgtgagtacttgagtagtttgccacagtgatgttgtacgttttattaaacaatgacggttgcttattatattttcataattagtagtattggtagagataatatatattcataagatgtgtcacatttggattttaatttttaaggattgcnctaggtgcttgtcgttgtgctgnacttttnttgatagtttacctatataagtgtgtgttactttgtggtatgatttggngnacncanaaaaggatcgaaatttgcgagagcttntgnacnatataaagtntgtaaggagctactagctatatatcaagattttaatataagngtatatgacnatatngtatccnaaaaaaaaaaaaaaa

SEQ ID NO: 4011 - DNA, 1740 bp, Glycine max
agtttgggttaagtagtgaggtttcttcttataagctattgcctttccgcaattggcttctccactgactctattctatagtctagcttctctctctttcttatcacatatgccaaatccaattttgacccgcaatagactttcaatattctaatgctactttacttcatcacttgcatctccttcttcttgtttttaaagtccctccttctcaagcctctcccatcatgggcatctgagatgtggctgtttccccttttgttttctcaagagttttctatgagcacaatctccaagctgttcaggaaccggttttggattggttttctgtgtcaaattcccataggaatgtctctggtgaggaagagtctgacttcaagagtggagaatgttgaggaaagccttgacatgtcagtgttggacttgcctgagttggccttggattgcattcttgagaggcttcccccctcttcgctgtgtcgaatcgccgccgtgtgccgcaccttgagggagaggtgtgtgagtgatcacctttgggagaagcacatgaggaagaagtggggtagagttattggccctgctgcttatagggagtggaaatggcatgttgcttccaaaaggaatgttgggggtcttaaacatggcaggcaaaagggtttgatgagatttatgtctcttcattggcctttccaatggattagaccaaaggttgatgcaaattataataacccaaagctgaggagctctctgcctgttgactcagtcatgaactggtatcttgctcttgagtctggcaatttttggttccctgctcaagtctataaccgtgagaatggtcatgttggattcatgctatcttgctatgatgctgaacttagctatgatccgcgaactgatacctttcaagccagatatcctccacatggaagaagggcaggtgctagagagtgtggcatcccatgggaaaggctaagagcacctcctattgatacttctccgcatgatcttcatttctccgactgtttaaatgatttgtatccgggtgatcacatagagattcaatggaggagaaacaaagaatttccttatggctggtggtatggtgttgtaggccacttggagtcatgcaatgggagtgaaaattattgccgatgtcatagtagtgacactgtggtgctagagttcaatcattacactcctggctcgcaatggaggcagaccactatcagtaggaaagaccatagggaggaggggaatgaggctgatggattttatggtggaataagaaagattaagagtgaggcggagattaccacttggaaacacctttggccattggaagtcttggaatagtaagcactggcactggatcggatcaaattctctacaacttagcatgatttcaatatagaagctttgtttcagcaactgaagcattgactggttctgcattatacaacctgaagtggactttcagatatttaggccaacccgattttttcctgtcctttgtcacatttttttatgtggttttcctcattgtaaattgctcatttacgcacaaatgtagaatattcattccactatatatagaatctagctgataatcccaaattagtagctttgaactcacatagcaatacagcttctatctcaatcaatgaagatgtagttcaggcattatttatgtgcaaacagttcattaactatatgcatcgaggatgctcgcgccccttggcc

SEQ ID NO: 4012 - DNA, 771 bp, Glycine max
atcgtcaaagaatccgaagcacaaacacaacaatcgagcttgcaacttcacccaagtctcaaacaaccttttaaacctcatcaaacatgtctctgattccatcattgctaagcaacagaaacatcatggaccccttctccaccaacatctgggcaccctctgactccgacagcgaggtttccgccttcgtgaacgcacgtgtggactggaaggaaaccccggagtcgcatgtgttcaaggcggacttgccggggctgaagaaggaggaggtgaaggtggaggtggaggaagggcgcgtgttgaacatcagcggagagaggagcgtcgagaaagaggacaagaatgagaagtggcaccgcgtcgaaaggggtcgtggaaagttccagaggaagttctggttgcctgaggatgccaaagttgatgaagtgaaggcctctatggagaatggagtgctcactgttattgttcctaaggtgccggacaagaagcctgaggtaaagaccattgagatcagtggttgaataacttcaattgagaccattgagatcatatgatacttgaacctcttgaataggagttaattgttagaaagaatggcaaaataaaattcaataatcgatgtataaaaatcgtattcgttttcttaagtgttaatgttgtggtggttgtaaatcttgtattaatttttacttgtgaggtaattcactagtttcttgtaataaaacataaagggagaaattactgtttaaaaaaaaaaaaaaaaaaaaaacc

SEQ ID NO: 4013 - DNA, 2036 bp, Glycine max
tcgatcagctacgtaggcccccccccccccccttatgcaaaatagtacatctagtccttgaatatattgattcttgttatgctgatttgcgtttaattatccttgtgtaggatgttaagtctgcagacaggatctcagatgctgctctagaatctgcggttctgcaatttatcccatgcatccgttctggtagttttgctgacattgggccacggagatacatggaagatgaacatataaggatagatgatttgtcgtctcatctgggatctctatacaactttccaaaaccaagtgccttctatggggtgtttgatggtcatggaggacctgaagctgcggcttatataagaaaacacgtgataaaattcttcttcgaagatgtcagtttcccacagacatccgaagtcgataatgtatttttggaagaggtagaggattccctcagaaaggcatttcttttggctgattcagctttggccgatgattgcagcgtgaatagttcatcaggcactacggcccttactgctttgatatttggaaggcttctaatggtggccaatgctggcgactgccgagcagttctctgtcgcaaaggagaggccattgacatgtctgaagatcacaggcctatttatctatcagagcggaggcgagttgaagaattgggtggctacatagaagatggttatctgaatggggttttatcagttactcgagcactaggggactgggacatgaagttacctaagggtgctccctcacctttgattgcagagcctgagtttcggcaagtggttctaacagatgatgatgaattcctcatcattggatgcgacggcatctgggatgtgatgtcaagtcagcatgctgttagccttgttcggaaaggcctgaggcggcacgatgacccagagaaatgcgccagggacctggttatggaggcattacgtctcaacacattcgacaatctcactgtgatcattgtatgtttctcttcccttgaccacgcggagccagagccatcccctcctcgccaacggaaattgagatgctgtagcctctctgcagaggctctttgtagcttgaggagcttgttggaaggcagtgcaagcaactgaatgtatgtacatacacagttcatctaataatgtgttgttgggattatacacactgttttcggttgcttcagtttagacattggaaaaagctgccatcatttttttacgtggtcggttgatgtacgtagcctgggttggaggatggtggtgtaaatatgtattgtcgttacattattattttgtactatagtcaatttttactatgactgccacattcatgtcagattcttgtgcgtcaataaatggaatctcttagcttctattccaaaaaaaaaaaacaattacatatactcattttaggacatgtatctatatactccgcataggactctggagcttaagtttcgagatggtttggcaaattttacttgctaggatccaaatccaatcatttctgaagtgctcaaagcagcgtgacagatctaggctcgcggttttttgttctgtcctttaacattatgtcggatgtgttcattttgcattaagaccgtctatcagagttatacataattaattaacacttcaaaatgggataaccattcatgcaaccaaaaattggcatgataacagtaattcaatcaatgttcagacagaatgagatcgccatgaaaataatcaggaatgttcacttttagaaatgtagccctgctataaaaatcaggacaatcataataaaaatttaggtgtagcttttggcgaatttagcaaatctttccaaaccacgttgaagtaaaccttcaaggaaaggctgcagtgccgatgccactggagctaaaagttgaggaacctcatatgagactgtcagttctactacacatgatgaaggacctagtgcttgactaagagccactgaggtagaaaaatggacaaaaaagcactatatattatcaccttttaagttctcctaattggctg

SEQ ID NO: 4014 - DNA, 638 bp, Glycine max
ggggggagcggcgaccatttctggatctttccacctttatctagatcctacacctgtagaactctaacttcaataacccgaatgatttaaacaccttattcattcggcaccatcatcatcaactacctcaaaattctaagcacaatttctctgagttgttttgtgagataatagcacatagcataacaagggaaggagtattaacaaccgcaaacctgaagagaaaaagagcagcagaagaagaaacaccaacgatgggtgtggattactacaagatcttgcaggttgataggagcgccaaagacgatgacttgaagaaggcttataggaaacttgctatgaaatggcaccctgataagaaccccaacaacaagaaagaagctgaagctaagtttaagcaaatttccgaagcatacgaggtacttagtgatcctcaaaagaaagctatctatgatcaatatggggaagagggtctgaagggtcaagttcctcctcctgatgctggtggtgctggaactggaactactttcttctccacaggagatatgccgggatcgtttcggttcaatccgaggaatgctgatgatatttttgctgagttcttggggttctcaagcccatttggtggaatgggtggg

SEQ ID NO: 4015 - DNA, 1842 bp, Glycine max
ccctcgcttcggcgtggagtaaaaacctgccatgacagtaataacaatgcctcctttcttatcttactctcttctttccctcgcgttcttcttcactctcaagtaccttttccaaagaagcagaaaagtacgaaacctgccacctggtccgactcctcttcctataatcggcaaccttaacctcgttgaacaacctatacaccgtttcttccaccgcatgtcccaaaaatatggaaacatcatatccctttggtttgggtcacgtcttgttgtggttgtttcatcacccacagcgtaccaagaatgtttcactaaacatgatgttaccttggccaacagggtacgctccctctcgggaaaatacatattctacgacaacaccaccgtagggtcttgctcccacggcgagcactggcgcaacctccgccgcataacctctctcgacgttctatcgacgcagcgcgtccactccttctccggaatccggagcgacgagacgaaaaggttgatacacaggctggccagggactccgggaaagattttgcgcgcgtggagatgacctccaagtttgctgacttgacgtacaacaacatcatgaggatgatttcggggaagcggttttacggagaagagagtgaacttaacaacgttgaggaagcgaaggagttcagagacactgtgaatgagatgctgcaactcatggggttggctaacaagggagatcacttacctttcctaaggtggttcgattttcagaacgtggagaagaggttgaagaatatcagtaagaggtatgataccatcttgaataagatccttgatgagaaccgtaacaacaaggaccgcgagaattccatgattggtcatctcctcaaactgcaagagacacagcctgactattataccgaccaaatcatcaaaggacttgctttggctatgctctttggcggaacagactcgtcaactggaactttagagtgggcattatctaatttagtgaatgacccagaggtgctgcagaaggcaagagatgagttggacgctcaagtaggaccagatcggctgttaaatgagtcagaccttccaaaacttccttatctcaggaagatagtccttgaaacacttaggttgtaccctccggctccaattctaataccacacgtggcttcagaagacatcaatatcgaaggattcaatgttccacgagacacaattgtgattattaatggttgggccatgcaaagagatcctaagatatggaaagatgcgacaagctttaaacctgagaggtttgatgaagaaggagaggagaagaagttggtagcatttggtatgggaagaagggcttgcccaggagaacccatggctatgcaaagtgttagctatactttgggattaatgattcaatgttttgactggaaacgagtaagtgagaagaagcttgatatgacagagaataattggatcaccttgtcaaggttaattccattggaggctatgtgtaaagcccgcccactcgccagcaaagttggaagttattaacaatattttatttggtatatttgggtgaggatctaatactcataatttcggtgtgtaagtctatgcatgttaaaattaataatatttgtcgtatgtccacaaggccaaatgtagtactgggtgtggacttgcatatacaatatcaatattgtataaatcccagtttccttgaataaatttctttactttctattgttatgaatcccagtactttttaaaaagagatgttacctttaatttcttgcattattaatgtcgtttagatgaataaaacaaaccattatctaaaaaaaaaaaaa

SEQ ID NO: 4016 - DNA, 1879 bp, Glycine max
tcgaatcggataacactgacagacagcatagtctctggtgcaagaatcaattgagcaagcatgggaatgttgttggtggtggtctcatacgctgtccttttcctggttctattcctcggcgtgaagtttgttttccaaagcagaaaattgagaaacataccaccaggtcctcctcctcttcccataataggaaaccttaacctcctcgaacagccaatccaccgtttcttccaacgcatgtcgaaacagtacggcaacgtggtttccctctggttcggttcacgtctggccgttgtcatctcctctccaacagcataccaagaatgcttcaccaaacacgacgttgccttggccaaccggctaccttctctctcgggaaaatacatcttctacaacaacaccaccgtaggctcctgctcccacggcgagcactggcgcaacctccgccgcatcaccgccctggacgtcctctccacgcagcgcgtccactccttctccggaatccggagcgacgagacgaagcgtctgatgcagaggttggtgctggccaagaactcgaacgaggaagagtttgcgcgagtggagattagttcgatgttcaacgacttaacttacaacaacataatgaggatgatatcggggaagaggttttacggagaggagagtgagatgaagaacgttgaggaagcgagggagttcagagagactgtgacagaaatgttggaactcatgggcttggctaacaagggagatcacttgcctttcctcaggtggttcgattttcagaatgtggagaagcgcttgaagagtatcagtaagaggtacgattccatcttgaataagatccttcatgagaaccgtgccagcaatgaccgccagaattccatgatcgatcatctcctcaaactgcaagagacccagcctcagtactacactgaccaaatcatcaaaggccttgctctggccatgctttttggtggaactgactcatcaactgggactttagagtggtcattatctaatttattgaatcacccagaggtgttgaagaaggcaagagatgaattggacactcaagtgggacaagaccgcttgttaaatgagtcagaccttccaaaacttccatatcttaggaagatcatccttgagacacttaggttgtaccccccggccccaattctaatacctcatgtgtcttcagaagatattacaattgaaggattcaatatcccacgagacacaattgtgatcattaatggttggggcatgcagagagatcctcagttgtggaatgatgccacatgctttaaacctgagaggtttgatgtggaaggagaggagaaaaagttggtagcatttggcatgggaagaagggcttgcccaggagaacccatggctatgcaaagtgtcagctttactttgggattgttgattcaatgttttgactggaaacgagtaagtgaggaaaagcttgatatgacagagaacaattggatcaccttgtcaaggttaattccattggaggccatgtgcaaggctcgcccacttgccactaaaattggaatttaattattaatagtatttttatttggtaaacttgggtgattcagaatctaatacttataattttagtgtgtaagagtggtgatcatatatacatttcaaaattaataatctttgtccaaaaatcatccatggacaactatatgtcaattgacatctagagagaaatatagatataagaatatttatattttattactcttctttatcttatgtgtcaaggcccattgtagaattgggtgagcattaacatatatcaatattgtataccgcccagttttctcaaataaatttctttactttcaattaaaaaaaa

SEQ ID NO: 4017 - DNA, 1792 bp, Glycine max
aatcctcataactgcactatcacacacatagttctcttatctggtgcaagtgcaacaatcaagtactcatcaccatgggaatgttgttgttgttgtcttactctctccttttcctggttctgttccttacactgaaatcccttttccaaagcagaaaattgagaaacctaccgccaggtcctcctcctcttcccataataggtaaccttaacctcctcgaacaaccaattcaccgtttcttccaacgcatgtccaaagaatatggaaacatcgtttccctctggttcggttcacgtctcgccgttgtcatttcctcaccaactgcataccaagaatgcttcaccaaacacgacgttgccttggccaaccggctaccttctctctcgggaaaatacatattctacaacaacaccaccgtagggtcctgctcccacggccagcactggcggaacctccgccgcatcaccgccctggacgtcctctccacgcagcgagtccactctttctccggaatccgaagcgacgagacgaaaaggttggtacagaggttgctggccaagaactccaaggagggttttgcgcgcgtggagataagctccatgttcaatgacttgacctacaacaacatcatgaggatgatatcagggaagaggttttacggagaggagagtgagttgaagaacgttgagaaagcgagggagttcagagagacagtgacagagatgctagaactcatgggggtggctaataagggagatcacttacctttcctaaggtggttcgattttcagaatgtggagaagcgtttgaagagtattagtaaaaggtatgataccatcttgaatgagatcattgatgagaaccgtatcaagaaggaccgcgagaattccatgattgatcatcttctcaaactgcaagagactcagcctgagtactacactgaccaaatcatcaaaggccttgctttggccatgctttttggcggaactgactcatcaacgggaaccttagagtggtcgctatctaatttattgaatcacccagaggtgttgaagaaagcaaaagaagaattggacactcaagtaggacaagaccgcttgttaaatgagtcagaccttccaaaacttccttatcttagaaagatcattcttgagacacttaggttgtatcctccagctccaattctaatacctcatgtgtcttcagaagatatcactattgaaggattcaatgtcccacgagacacaattgtgatcattaatggttggggcatgcagagagatcctcatttgtggaatgatgccacatgctttaaacctgagaggtttgatgtggaaggagaggagaaaaagttggtagcatttggaatgggaagaagggcttgcccaggagaacccatggctatgcaaagtgtcagctttactttgggattattgattcaatgttttgactggaaacgagtaagtgaggaaaagcttgatatgaccgagaataattggattaccttgtcaaggttaattccattggaagccatgtgcaaggctcgtccactcgccactaaaattggagtttaattattaatagtatttttatttggtaaagttgggtcaacatctaatacttataatttcagtgtgcatgtggtggttatacatgttaaacataatagtatttgtttgtatgtttacaaggccagttgtagaattggtgtgcattaggatatattaatattgtatgcatccccaacttctcaaataaattttttactttttaatcaaaaaaaaaaaaaaaa

SEQ ID NO: 4018 - DNA, 1260 bp, Glycine max
  misc_feature (1)..(1): n is a, c, g, or t
ngagttctaaaaacgaaagcttcattttccttttctctttcttcactcttttccagtttccaactttccttcttcttcttccttccttcctcgtttcgttaaccttctaattcaattcattcctcacttccttttccaaccgaaccttttctccgataatcagagagagataataatggattggggaaacgtaaccgcggaggatctgatcgacgcgctccgtgaggtggattggtcgtcgccgccgcgccctctgtcggaattcttctcgcgattcaccgttcccaggtcttcctccaaatggaacagccgcctcaaatgcaatctctactactaccggaccaactacttcattttgattgtttctgttctcatattgggttttcttcggaggccgcttgctattgtagctgcacttcttacggcactcaacattgcttttctgaatgacagctttgcaggtacctttagtgagaaggtaacaagaacagttaggcaattttcaccacatttagctgccaaaatgagacctcctctcacgcctgttattcgtggacgtccatcatccaagagagcaatttatatatgtggccggccgcgttgggtatttgtcttgatattttcttctgcaagtttctttctttggtttgtttctgctggtctcctgacagttttatgggctcttgctattggtcttcttgctaccatcctgcatgcaagctttagaacacctaacttgaaagctcgtctaaacacattccgtgaagaatttcgtgcagtatggcgcaattatagtgaactgtagcttacataaaatttgttggacttggatgtgttgctgctttattgttgaagtattttctgttaattggaatggaacattccatggcaagctgccgaccattggagactataagcagattgtaaattttcaggaatcttgttttttgtaaagtacactgttttcttgtttatgtctagcggaagctttggaatattgatacacgctgtaacctagacattgtcataattctagttgccaaaattcttaattgctctggacattggtgacataaaatacttcaatttcttttatgtttgttattagtaggtttcattttattttgatattgtggttgtgttctctggtaaagattgtaacaatggttgcttgcattgtatgatgcatgcatctgaagcagtttattttagtaagaagtgggatagtagaacttcaattcttgcatcacatatattatt

SEQ ID NO: 4019 - DNA, 1755 bp, Glycine max
gcattccaactgtgcttgcggctcctgatccagcacaaggtcatgtcaatcccctgatgactctctcacagaagttggttgagcatggatgcaaagtcttttttgtgaacacagactttgaccacaagcgagtggtgagttccatggtggagcaactagatagccttgacgaatcactactgaagttggtctcaatccctgatggtttaggacctgatgatgatagaaacgatttgagcaagttatgtgattctttgctgaacaacatgcctgctatgcttgagaagctcatagaggatattcacttaaaaggtgacaatagaatcagccttattgttgcggatgtgtgcatgggatgggcgttggatgttgggagtaaattgggaatcaaaggagccctgttgtgcccttcatcagcagctttttttgccctgctgtacaacgtccctaggcttattgatgatgggatcatagattctgatggtggattaagaataactactaaaaggacaattcagatatcacaaggtatgcctgagatggacccgggagagcttttttggttgaatatgggtgacaccataaatggtaagatagtactcaattatctgatgcagtgtacacagagttcggctcgggcagaatggtggctttgcaacaccacatatgaacttgaacatgcgccattatcatctattcctaagcttgtaccaattggtcctttgttgagaagttatgatgatacaattgcaactgcaaaaacaatcggacaatattgggaagaagatctatcctgcatgagttggcttgatcaacaacctcatggttctgtcttgtatgttgcctttggtagtttcactcattttgaccaaaaccaattcaatgaactagctcttggacttgacctcaccaatagaccttttctttgggttgtgcgtcaagacaacaagagggtataccctaatgaattcttggggtgtaaaggtaagattgtgagttgggctcctcaacaaaaggtgctaagccaccctgctatagcatgttttgtcacccattgtggttggaattctaccatagaaggtgtgtccaatgggttgcctctcttgtgttggccatattttggagaccaaatatgtaacaaaacgtacatttgtgatgagttgaaggttgggttgggttttgactcggataaaaatggactcgtgtcacgaatggagttagaaaggaaagtggaccaaatccttaatgatgagaacataaaatcaaggtctctggaattgaaggataaagtcatgaacaacatagccaaagcaggtcgttcgttagagaaccttaataggtttgtcaagtggcttaaagaataaggattgacattttatgcatctgtattatttatgttagctgaaagaaatcatatcaaagttgatgcagtaagcttttcaagcgattaaaatgtctacaaggtgcccaaaaatgaagatatatatggccatgaaactgaaacaaaatttagtaagcttttcaagtgattgaaatgcttacaaggtcactttctttgttttagtcgtcgggatgctttaagacaaagacagataatgtaatctagtatcctttcttcttttcatttgatatatatagtcttgtatgacattgtattcaagttaagagtatctcttagtactttaattcttaaatatgtttttcttataaaaaaaatcacgaaaactcattaagatgcgaaaaaaaaaaaaaaaa

SEQ ID NO: 4020 - DNA, 1170 bp, Glycine max
tgatagttggtgcaaatttatagataaaatcataggacttctatgtgaagcataatcaatcaatcatttacgtgctgtgtcaggtattcttagcttagcagcgagcttatccagtagactgatgggaagtgttccattggcctccgctgctgctcttgccagaaggctagaagggaaggtggcactgataactggtggagcaagtggtataggtgagtgcacagcaagacttttctccaagcatggagccaaagtggtgattgctgatatccaagacgagttaggccactcaatttgcaaagacttggattcatcttcagctacttacattcattgtgatgtcacaaaagaagaaaacatcgaacacgccgtgaacacgaccgtttccaagtacggtaaactagacatcatgcacagcagcgcaggtatagttggcgcatggaaccccagcatattgcacaacaagaagtctcactttgagcaagttatcagtgtcaacctggtgggcacattcctgggaatcaagcacgccgcgagggtgatgatcccttctgggcgtggcagcatagttgcaatggctagcatttgtggaagaattggtggcgtggcttcgcatgcctatacgagctcgaagcacggcatcgtgggactggtgcgaaacactgccgtggagcttggaaccttagggatcagagtgaatagtgtgtctccttatgcggtccctacgcccatgagtaaaactttcctcaacactgatgatgaggggattgctgcactgtattccaatcttaaagggactgttcttaagccccaggatgtggctgaagctgttctttacttgggaagtgacgagtccaagtatgttagtggccatgaccttgttgtagatgggggtttcactgtcgtaaaccctggtttgtgtgtgtttgggcaatccgtgtaggtttttaatttgtactttaagtcgtttcaagtgttttgaattacatcagccaaataatgaccaaataataaaacttttgatatattgtttggacctgttatgctggaatcatacaaaatttctattcgaaaaaattttttaaaattaaattccaatccaactcggttctccttaaataagggggaaaaggaaaataaatcttaaaaaaaattgaaattgggtccaat

SEQ ID NO: 4021 - DNA, 1341 bp, Glycine max
ggctcgaatagtaggcaatagaatagatggcagaggaagagtcttatccattgtttgagacaaggagggccaaaggaagggtcatttacacaatcttctctttatcactttttgtgggcattttgttcatctgggtttacagagtgagtcacatacccagagaaggtgaagatgggaaatgggcttggattggtttgctttgtgctgaactatggtttggtctttattggctcctcagacaccctttcagatggaaccctgtgttcagggaacctttcagacacaaactctctcaaagatacgaggagatattgccaagagtagacatctttgtgtgcacggcagatccagggattgagccagcagtgatggtgatgaacacagtgctatcagttatggcttatgactatccaactgagaagctgagtgtgtatctttcagatgatgctgcttcagatattaccttctatgctctcttagaggcttccctctttgccaaacattggcttacattctgcaagaaattcaaggtggaacccacctcaccagctgcatatttcaaaagtattgcctcatgcactcatccaaataatcatgtcaatgaattggtccccatcaagaaattgtaccaagatatggaaagccgaatagaaaatgcagctaagtagggccccccccccctcaagtacccgaagaagtacgcccaaagtataaaggattttctcagtgggattcatatacttctcgacgtgaccatgacacaattcttcaaatattacttcatggaaaggactcgagtgccaaagatgtagatggaaatgttatgcccatattggtgtatttggctcgcgagaagagaccccaagttgcacataacttcaaagctggagcaatgaattcattgttaagggtgtcatcaatgattagcaatggggaaattatccttaatgtagattgtgacatgtactcaaacaattcccaatctctaagggatgcactctgcttcttcatggatgaagttaaaggccatgaaatcgcttttgtgcagactccacagtgttttgagaatgtcacaaataatgatctatatggtggtgctctacgagtaatttatgaggtggaattccatggtttagatggacttggtggacctttttatattggaactggctgctttcacagaagagagatactatgcggaagaaagttcaatgaccaatacaagaatgattggaaagagtataagaatattgatcatatgaaagaaggcagcttgcatgaactggaagaaaaatcaaaggctcttgctagttgtacctatgaggaaaacacattatgggg

SEQ ID NO: 4022 - DNA, 828 bp, Glycine max
  misc_feature (803)..(803): n is a, c, g, or t
cacgcggaacctaagtgagaaacaaagaaaggaaataattgatctttgaaaatgcagggaggaaagaaagctggagagtccatcaaggaaacagctgcaaacattggtgcttctgccaaggctggcatggagaaaaccaaggccactgtccaggagaaggcagaaagaatgacggcacgtgatccgatgcaaaaggagttggcaacccagaagaaagaggcaaagatgagccaggcagagctggacaagcaggcggcgcgtcagcataacacggcggcgaagcaggctgccacggcagggcacatgggacaacccatggggacccatcagacgtcagctatgcccggtcatggaaccggacagcccacgggccatgtcaccgagggagtggtgggctcacaccctattggaaccaacagaggcccgggtgggactgctacggcccataatacccgtgcggggggaaacccaaatgattatgggtatggaactgggggtacttacaattaaataatgatgatttagaaaaggaaagctacgacccataagaaggtttagttaagagtatgacttttgttgtggttatcttcttgtttggttatctttttgtttgtgtctccttttctctccatttttgttgtggagaattgggtgtggttacacgacagtgttttcacttctactaggtgcaagcattctgtgtcgtgatgttgtattccttcgtttcaatgaataaataaaatcgtggttgtgcaaaaacaaaaaaaaaaaaaaaaaaaaactcggagtcttttaaacggccngggcccttgatttcaaccggtgggg

SEQ ID NO: 4023 - DNA, 1475 bp, Glycine max
aggagatgagcgagcgtgatgtgccggtgtccgattctggtagtggagttcctaaaagtgcatccggaagccgagtttggaagaaattcttcacagattactcattttttgaagcctgagacttttcaaggggttgtaaaagccataaacgagaggattctttctgttttggatgagaatggttcaggcaggctggatctgggaatgttttttgctattcttgctcctatttgtggcggtcctccggatagacgcaaaagggttgcctttgatgcacttttgtggcgtcctatgaacgaagacggtgctaatattaggaaatttgatgtcactttatacatcaagttgttaagggcagtttatcttcccagccaaggggttagtgaattaatggaggttcgtggagattcggacacttcaatggtgtctttctctgagtttttagttatgtttgacgatccagattggggttttggcatcatgcctactctggtgaagcttgaaaccggggatagaaataggcatggcgacgtggtgtgctctgtttgccgctacccaattattggttctcggtttaaggagataaaatctcattttagtttgtgtaaccaatgctacagtgagggaaaagtgccttcttcatttaagcaggaagagtacagatttaaagagtatggaagtgagggtgaagccatgaaagataagtgtatgtgcttcaacttgcaatcccgtaatgaaaagtagatagcggcattcaattttttgtctttagatttttttgttctactatcttgtattatcccatcttgtttatcctagcttttcaggtgtgaatgtgattataactagagctcatgagttcagcaggcattttggccccttgtttaataattgtttcaggtggtgcttcactgctctttagtaactgtttatagacattgtaaaacctttaacctccgtgacaaacatttgtgtttatcatgcttctctatcccttctttctgatttgtatgaagcatttatcttttgacacatgaagcctgaaaggcaagtctagagtactgtgattctaactttcaattatatttgtagtattcaacggaggagtggtcaatttttcccccttgttacgttagattttgtttatacgctttaagtaccatgagtacaatacattcaatggtttatatttcacctcaattttaatctgtcagtacatttaactctgctttgaactttcatttgtttccatatggttaatttgatgtgatgcaatgagagtatacaagaattttgaacagtagggactttgcggttttgtatttatatattcacgaatttttccatctcttcatccatctcttcatcaacagtacaatcagtggcggttctaccatgcggccagcaggggcatatgcccgggctcagctaggcattttttttggttacaagcccaatatttttttattagtctt

SEQ ID NO: 4024 - DNA, 1370 bp, Glycine max
atcgagccgaatcggctcgagggagcccaaggcaaatggggtgtgcttcctcgaagcgtgttgatgcggcagcagtcccctaccgtcccgcacccacaagcttggcggtgttcgacatcaacaccatcgaggagccatggctgaagcacctcaacaacaccacccctctcccccaagacaataataaaccctccctccccgcccctattctccacaaactcaacttgctcgacgccaccgatgccccccaatcctgggatgagattagcaaaacactccaagacctcaaacccccctccacctcaccccaacaacaacctcaacctccacaaaagaccaagtccttccacacggtggaagagctagacgccaagctcaaccccaagcccgagcccaagcccaagcccaatccagaattgaaaaagcccgctgatcagataattaacagtagcatagttaccgagccagtccgagggaacaagttgaaggaaaacatgttcatagttcgggacaggctggagagacagaaggaagagaaggagctcaccttcgagcgtcttcgtcgggacccgctgagcgcgttcccggagaagtgtccgccgggagggagcgagaaggtggtgttgtacacgacgtcgttggggggcgtgaggaagacgttcgaggactgcaaccgcgcgcgagacgtgctggaggggcacagggtggtgttcgacgagcgagacgtgtcgctgcacggggagtttctgagggaggtgaaggagctggtggacggggaaggggtggcgctgccgagggtgttcgtgaaggggaggtacgtgggtgggttggaggagttggtggagctgaacgagacgggtcgactcgggaggatattgaatgcgacgcgtgtggagagggggattgggaggcaaacgtgtggaggttgtggtggggctaggttcgttccttgcttcgactgtgctgggagttgcaagcttcttcacagagagaggtgccccaattgtaatgagaatggcttggtccactgccctgcttgtatttcataacttccatatctgctgtttaattttgttattcaaatcaccactagaatcatacatatttcacaccttgtctctctctctaccatcaacccttccacccaatatttttggaccatcttaattgttaccaatctagttatggggttaaagactctcttttttttattatcatacgcagataaatttacttgcgcaccttaacctgcacttagtttcatgttaaggttagaaaagttcaaaagcaatatattaaaatcataaaatgtatgtctaccgaattttaacgataagaataatatttgtacttatatatttttttattaa

SEQ ID NO: 4025 - DNA, 2355 bp, Glycine max
  misc_feature (2222)..(2222): n is a, c, g, or t
  misc_feature (2228)..(2228): n is a, c, g, or t
  misc_feature (2296)..(2296): n is a, c, g, or t
  misc_feature (2331)..(2331): n is a, c, g, or t
tcagctacataggcccccccccccccacttatgtgaaggcaacggagagtttagtactggtgaaagtgcttgggctgctgattatattaatcagttgggtgctcaaacaactaatgtccaatctagacgttgtgacactaacggtgatgataatacttctaagcttttgcttgaagtttgtcaaggagaggaggcacatatttgtctagcacaggataccgtggagattaaaaatcaagaagatcatatgaaaactgattcagaagaggctgcatcaggtatcaagagggagaatgttttcaaaagttgtttggagctacaagattttggtcagcaggctggaaatgctgatttacaaaatataggttcttcattgaagattcaaaattcagtagaggaatctaatgcaagtcatcctgcagttgatgaaaatgaacaggagagcattgcaatatctaaaaacggtgatgagttatcacctcctagtggttctgcttcttctaatggccatagatcaccaaaatcagagttggaaactcaagaggttgagaaaaatgcatcaggagaagttgaaactgcttctggctctcattctgtcactacttatagtgaacagaatgatgaacacgttgacaagacagtaacaaatgatgagttagatgataatcaacaaacccctgctctcaaagatgttagggctacaactgaggtggtggagcgctcaaacagaaacttccaataaaggggatcaaagccatttgggtttgggatttgagatctccctttgtggtcatgaacttaaggtgggcatgggttcaatagcggctgctgaagtgtttgaagcacatcgcatatctgtagttgacttcacaagttctgctccatcaataattaaaaatcaaaatcttgttatcaagtttaaagagaggtacatgacatgggaaaaggctgctcctcttgttcttggaatggctgtttatggtttagatttacctgttgagtccaaagatacaattcctgtggaacaggatcatgcattgaagtccagggatgatgatctgggatcatcttcgtctggacgcagatggagactttggcctattccttttcggaaggtcaaaacatttgagcatactaatagcaactcatcaaatgaggaggtatttctagattctgagtctggatctctgatagaaccaactccaacatccagtacccagggatcttctcataagcaatttctaagaacaaatgttcccactactgagcagatagcatccttaaatctcaaagagggtcaaaatttggtaaccttcagtttctccacaagggttcttggaacacaacaggttgatgctcatatttatttatggaagtggaatgcaagaattgtaatttcagacgttgatggaactattacaaagtctgatgttttggggcaattcatgcctttagttggcaaagattggacacaatctggagtggcaaggcttttctgtgctattaaggaaaatggataccaactactttttctgagtgcccgtgcaattgtccaggcatatctaaccagaaacttcttgcttaacctgaaacaggatggaaaaaccttaccaaatggacctgttgttatatcacctgatggattatttccctcgctttaccgagaagtgataagaagagcacctcacgagttcaagattgcttgtttagaggatatcaaaagacttttcccatctgactataatccattctatgctggatttggcaatagagatacagatgaacttagttacagaaagattggagtcccgaagggcaaaatatttattatcaaccctaagggtgaggtagctattagtcaccgtatcggcgcaaagtcgtatacgtcattacataccctcgtcaatgacatgtttcctccaacttctttggtcgagcaggaggactacaactcatggaattattggaaaacgccattgccagatattgattagtttcattgcttaagatacttagttcctttttgataaggatccgttggtatggaagttgaaaccctcaaagatgttaaccgaaaaaccagaaattcctcctacgtgaccctttcatgaccataattgattgaagtatccttctatacaggtttcattgatggggatgaccatgccattctttccttctttttgactgcttaaatccgattcattataacctctatcacnaaatgnttacattacctactggtatatgacaccctggatttttcaattcatggggatatagggataaggctaangctccaggcactttcttaaccaatttggtgggggnccggctggtctattgctttagcct

SEQ ID NO: 4026 - DNA, 760 bp, Glycine max
tcagctacgtaggccccccccccgacagcaaactctttgaaactttctcttctctcccacgcctcttccacacgccagccacaatccacaataataatggctttgagaaaatcaagtaaacttcctcaaacagcactcatcaagcaaatcctcaagaggtgttcgagtttagggaggaaagatgatcaaggcctcttggacgtgccaaagggtcactttgttgtatatgttggagaaaacagaagcagatatattgttcctatttccttcctaagtcgccctgagttccaaacacttctccaccaggctgaagaagagtttggctttgatcacgaaaagggtctcacgattccatgtgaagaggacgtttttgagtctctcacctccatgctcagatgagaaacttgccttaccacgtatcgatcatttttcgttttcttttcttttttttttttgaaggagaggagaaaattaatagctcaagatgaagctgcttcactgcttctcttacttgattttctccatttctttttctttatatatatgaggtttgtattttagagagactctaacctcacggaattatggtttagattgtaaatgtactagaagttaagcagcattttttcccacagaggtgaacgatcgagtaaatgtgccctgttggagaactaatttaaatgatagtatatattatatgttgaactctttgggttctttctttctctcttttgggtaaaattatgcgtttccctgcttt

SEQ ID NO: 4027 - DNA, 1925 bp, Glycine max
tagagatacggcggtcgagaagacgactgagcagtgtatactaaagattaaagaatagcagaagatagaagattggggttagggtttgatcgcaacgcaatggctggcaccggcatccatccataccaccagcaatgggctccggcggcagccgctcctcctcctcctcctccggcagccgcgggcggtcctcctcctcacccaggggaggaggttcgaactatattcataactggtcttccggaagacgtgaaagagagagagctgcagaatctgctgagatggttgcccggtttcgaagcatctcaattgaatttcaaagctgagaagccaatgggttttgctctcttctccgcaccacaccaagcactcaccgccaaagacattcttcaggacatgctcttcgatcccgacaccaagtccgtcctccatactgagatggcaaagaaaaatctattcgtcaaaagaggaatcggagctgatgcgggtgcttttgatcaaagtaaacgcttaaggacagccggggattatacacacactggctatacaagtccgtctccttttcatcctcctccgcctcctgtgtggggaccacatggatacatggcgccgccaccgccgcctccatatgatccatatgcaggctatcccgttgcacctgtaccaatgcccactcctgctcccattgcagcacctagcacttatgttccagttcagaacacaaaagataaccctccttgcaacaccctgtttattgggaacttgggagagaacataaacgaggaagaagtgaggggccttttcagcgtacaacctggttttaagcaaatgaagattttaagacaggagaggcatacagtttgcttcatcgagtttgaagatgtgaatagtgctacaaatgtgcaccataatctgcagggtgctgttatcccaagttccggttccattggcatgcggatacaatattcaaaaaatccatttggaaaaaggaaagataatcttcctgttgctgttcctagtgcaaatggagctccaccaacaatgacttatcagtagcttgaaggggatgtactctgttctttatgctccgacaaatattactacataataggatgcatcttgctgctgtcacatgcatccattgatcatcaagtcatcgccattagcatccttgctcatgtgaatgaatgcagtggcatcatatacatacatttggctatgttatactagtcggacatgcatatcttggcagcatgtgttggttcctggattactttcataggcgtttagatttgatgcatgggtctaaattttgttacaattgtgtgctttatgtcatatactttctgtttacattggcattaggaatgttattcaaacagattttggcttctattttgcaaaaaaaagttcatttggtgctaatttgacatgacagctcttggggatccttactttgaattcatgtcacgacttggctagggtctggagaaataaggatgtcataccaatggtcatgctgccctttccaccatcatattaccattgtcattccaacattgaattcttttcccccaattgaatccgtcattcatgactccatttaatcagagcattgatgtttgatgctttgaaattcagagctttttcaaagaaatccccggagttatatgttgtctggtttatacaaggatttcgaaacgacaaagcttcctttcataatgggagatccattactgcggctgccatatcattgcagggaactttttgtttgcttgggtgaactcccgtcaaattaggttcgaacttctgtcgattgattatcaagggaaacaccccttcaattaaatgaggcctgagtttctcattaaacagctgactgactattttttgtccccgacaagctaattttgggctagttttcc

SEQ ID NO: 4028 - DNA, 1747 bp, Glycine max
tcagctacgtaggcccccccccccccacttcgcaacgatgccgttttgcaacgtcggaacgcagctaccctcccccgtcgccgacgtgcccctcaacaatgacatcaagatattctacagaacttacggtggcggtccaaccaaagtgctcctcatcataggattggccgcgacgcacgaagcgtggggcccacaaatcaagggcttgactggagcaaccgtccccgacgacgtcgtttggagcgaagaagaaggcaatggtggcatccatgtatgcgcgtttgacaatcgcggcgtcggtcgcagctccgtgcctgtcgaaaaatctgaattctcaaccaagatcatggcgaaggatgcaattgctttgttagatcatctaggttggaaaaaagcccatgtttttgggcactcgatgggagccatgatagcttgtaaagtagcagcaatggttcctgatcgagtcctttccttggcattgctcaacgtgacgggtggaggttttcaatgttttccaaagttggaccaacaaacgatctccgttgcttaccgtttcttgaaagcgaagacacctgaacaaagggctgctgttgacttggacacccattactctcaagaatatcttgaggaatacgttggaacagataagaggagagccatcttatatcagcaatatgttaaaggtatatcaacaactgggatgcaatctaactatggtttcgatggtcaactcaatgcatgttggacacataaaatgactgaaacagagattgaggtgatcaaatctgcaggctttcttgtttcagtcatccatggcaggcatgatataattgctcagatatattatgcaaaaagacttgctgaaaggcttcatccagtggctagaatggtagatcttcacggaggtcatttagtaagtcatgagcggtctgaagaggttaatcaagcactatttgacttgatcaaggcatcaaaagtgaatatgagcccacatgattggactaatttgccaaagaaagagtcttggtggaaagagaaaagggttttgatcagaacaaacattcaggccggaagcaatgtctcccttaactgctgcatgttagaaaaactgcatctcttcctattatacctctttggtcttcttgttttagcatttgaatatggaagaaagcttctaggaagcttaaaaccagctcaagctggaggttccccctcatatattgaaagtcaataactccttttgttaataggtgtgtattgtgtaatttgataaaccctcaaactcaatgataaagattacacgaaactgagtctcatgcatgcggcaatgttgacttcgttttctcagctggtaactggggtttctctcaagcagccagaaagcacgagagaatccttgatttgtgctacttgaggcttgcttgacactaaaatatccctttattgacaagatgaattccatgtgctccatgtagccttcaaagcgggacagaagagaggatggatgatcctctttcctttatgtactgttatatgtttcattagaatgcaactctagaaatcctggtccataccacattttttttgtacatgatgtttaataagtatttagaaataaaaactatcaaaaccaaatcacaggaaaaacgtttaacatgattctgcatgcttgtctatatcagcagatgatttaaatgaatcacaggattttctaaaaaaaaaaaaaaagaaaaaaaaaaaaaaaaaa

SEQ ID NO: 4029 - DNA, 2069 bp, Glycine max
tcttacaatggtcaaccattaaaacatatattttcttgttagtatgagctttaccagaagaactccagtcatcaatccctccattatgtgtggaaactctgccacgtgcgcccccccccctattttgtttaaatttaatgttattgtaaaatctttgtttttaattatagatatcctcctaaaggttgcttcctgtgacatgtgaaattctagtatgaatgcagggaattcagagaatcaatcctgggagttatgcctcaccaatgggtacatttatcaaccttgattatccttctgtactaaggcttaatcttaattactgtccgttcttgaataaatatgtttatcaggctaggagagaagatactttattgaagcttgcccacttcaggcggcacaagaggaaaacattgaagaaaacacccggaaaggctatgagttacccttttcacaagcctgaggaaaaccatcctccagggaaggactcaaccaaaaaaatttcaaacataattggaaaagcagcaaattatgctggttccgcaaaatctaagaagcaccttccttacgttcccaccataaccaactacactcaagtttggtgggttcctaatgttgttgtggctcatcagaaggagggcatagaagctcttcatttggcatctggtcgaacaatatgcaagcttcatctccaggaaggtggtctacatgctgatattaatggtgatggagttctagatcatgtgcaggctgttggaggaaatggtgctgagcagactgtagttagtgggtccatggaagtgctacgtccttgttgggctattgcaacgtctggtgtaccaatacgtgaacaactcttcaatgtatctatttgtcattatacccattttaacttattccagcatggagaactatatagaagctacagtcaaggttcagatattgcttctttagaggtagcaacacctattctaattcctagaagtgacggtcataggcatcggaagggaagccatggtgatgttatcttcttgacaaatcgtggagagattacatcatactcccctggcttgcatggtcatgatgctatttggcagtggcaacaatcaactggtgttacatggtcaaatctaccttccccatcaggagtgatggaaggtggtggtctggtgattcccacactaaagcctctttccttgcggttgcatgataatcaggaaatgatccttgcagccggggaacaagaagcggtgataatatcacctggaggtagtttattggccacaattgaactacctggtccaccaacacacgtcttaattgctgaggacttttcaaatgatgggctcactgaccttattcttgtcacctctaatggagtgtatggctttgttcagaccaggcaaccgggtgctctcttcttcagcatgttggttggctgtctcatagtcgtgatgggggttatatttgtcacccagcacttgaattccacaaaggggaagcctcgcccctcatccggttcacggtaaaaagccggaattgaaattatactcgcttaactttgcaggcactattgaagaaacagaaaacagtgagctctgcgcaaccagtggagagtcaaaagtattcaaaatgcgtagaatttaaggaaattttgaggaggtgacgaacagtcttatagactgttgattgtaaaatttggacagaatgtaggaaatttgatgttataatgtatgctgtccgcttcagggatttttgactgccgttatgaggaaagctatactgtacacacttgttacctgttcaaaattagttgatgcacaagagaaactcaccagccggtctttcctcccaaggattttcttgctttaaaggtggtatatatttcaccgtcccaaaactcctctccatgtttaggccaactgcccaagttccttatatataaatctgaatgagaataagatgttatatacagttcttgaaaaatgagtaaatgatggtttgttgagaaaaagacatttttttttataatcttgagaaaattcttgttgaaaagtgttttttttccattt

SEQ ID NO: 4030 - DNA, 1488 bp, Glycine max
aaccagtgttcaaggcacccacccacaaaccctaccctataaaccaaattcgcaatcccgtgttctctacccttcccattccaatttcgagaggaattcatttgaattagggttactctttttcttcgtttcatcatggacgctcagagagctctactcgacgaactcatgggtgcagcgcgcaacttgacggaggaagagaggaaggggtacaaggaagtgagttgggacgataaggaagtgtgtggattctacatggtgcgcttttgccctcacgatctctttgtcaacacgcgcagtgatctcggaccttgccccagaatacatgacccgaagttgaaagaaagttttgagaaatctccaagacatgatgcatatgtaccgaaatttgaagctgaactttctcaattttgtgagaaattggtgatggacttggatagaagagtaagacgtgggagagaacgtcttgctcaagaggtagagccaacaccaccaccaccactgacagccgaaaaatctgaacagctatctgtgctggaggagaaaattaagaaccttctggaacaagttgaatctcttggtgaagcggggaaagttgatgaagctgaagctcttatgagaaaggtggagacacttaatgctgagaagacagccttaacgcaacctcaaaatgataaggtgttgatgcttggtcaggagaagaagatggcactctgtgaaatatgtggttcgtttcttgtggcaaatgatgctgcagaaaggactcagtctcatgtcacaggaaagcagcatgttggttatggaatggttcgcgacttcataaatgagtttaagactgctaaggagaaagctaatgaagaggaaagattagctcgggaaagagaggcagaagaacggaggaaacagagggagaaggagtccgagagaaggagacgaagtgattcaagtgacagggataggcatcgtgataaagatcacaatagggagcgggataggtatagagatagagactcagatcgtgaaaggtctcgggagcatgatgttagaggttatcgagatggaggaaggggggtggattatagggcgagaaatggaagaaatggaggtagagacaggtaccgtgatcggagcaggtcacgctcccctggtaagcatagccacagaaggtcttcttgaagtccagtttgctcaaattagtggaatttcttgatagatgtcagaatttaattttaaaaaggtagtctttaatatcccaagacttacataaaatgtgcttttggagagttttttttgtcaccttcaagggtgaatttactcttttcccatctcagagctttgttgagactatacaatctccctttcatcaatattattaatggagaaaggggttgaggtaggtatttcactgttgtaacttttcttacaatttgttttgcaccttgatttaagtgatttatgacgattcatctctgaaaaaaaaaaaaaaaa

SEQ ID NO: 4031 - DNA, 1432 bp, Glycine max
  misc_feature (1)..(1): n is a, c, g, or t
ngaataaagctgtgaatgatgactcttccttcattgtcctctgtattcttcttcttcttctcttactctctctgtaacaacaccaccatcaacaaccctttcaagccggcctaaaccccattacccaaaatctgttttttttttttattttttttcctgcaacactctttattggatcatcttgtatttcattcctcctttacaatttcctttcaaaaaaaattttaaaaaatattaaaaagtgctcttttttgtgaattttgacccatttggccaccgacagatttcgatcttctccgtgccaaagttgtaatcttttcgacttttggcgaggtgggtcgatccgatttcgctcgaatgattgttggtttgatctgaaaaaggaaaaggaaaaaaaaattgggttatttcggattcaagattttgtccttttttgaaatggtctatttccatagctcaatctctctctgcaagtccgttgatcaatcatcttccatggcgaattcaatatgttctgctgatttcggttcgaaatcgaggcaaatcaatcaccttcagaagaatcggagaacccctagttcttcatcgtcatcgaattctcttcagataccaccctgtgatcgatctcgatcggctatggttgatgttgtgatgttcattgcttgttgtttgtgcctgtggctttttggtcttcccttatgtagagtttttggtgacaaagtgttacgaggttattaaggttgttgtgtttttgattaaggaggaggtttctgtggcaccttggatctatgtttccatagggttgagtgttgtgtttgctgcattggccacgtggggtgtggtggcttgcaccactaggaagtgtgggaatcccaattgcaagggtctgaggaaggctgctgagtttgacattcagttggagactgaggattgtgtgaagaattcggcttcttcgtcgtcgaatgtggcaaaagatggtgctggtggagtgaagaaggggctctttgaattgcctcgtgatcaccatagggagctggaggctgagctcaagaagatggcaccaccaaatggaagggctgtgctcgtgctgcgggcgaggtgtggatgttctgttggtaggttagaggttccgggaccaaggaagcatcttcgaaagatcaacaagaagtagcagctatcgtgaccgagacgagtaggacaagggacaggagaggacacccttttgatttattggatggaattaaggaaagggatgataattggatcaaatagaaatttgtacttgttgccctatgttcattgatctagtaggaaattagaatgtctttaaataagccccttggcaataagttgtaaggaactatgggtcatacacagtttagttggttatacctggaaatatataaaaaaaaaaaacatttttttttttaaa

SEQ ID NO: 4032 - DNA, 1205 bp, Glycine max
tgaagttgctctctctgtaaccccccaaacccaaaccttcattatctcaattctcacactcccatttctcccttctcttatttattattattacacacatcatcacaatttgtcaatttccccgaagaaaaaaaaaccctaaaaaatttgctcctttggatccatccaggggcacaccccggatctccgattctctagatcactctcaagttctcatctttttcgtttttggcgcagtgggtcgttgttaaatacatggtttctgatctgggtttgatttaagttgggggtttctgggtttgtgattgaaatggcttatttccatagctcaatctccctctgcaactcctccgttgaccaatacatggcgaattccctcgatttcgagccgaaatcgaggcacaggaaaacccccaattccctccagtctccgccgtgtcggcgatcccggtcggcggtggttgacgttgtgatttttgcagcagttatcgcggcttttgggttcttgttgttcccctatgctcaaattttggctagtgagagtgtcaaatttggaattttgattgtgaatttggtcaaagaggacgtttcttttaccccttggatttatatgttcataggtgttagtgttacctttgcagcattgactacttgggttcttgtggcttgcacaataaggaagtgtgggaaccccaattgcaagggtctcaggaaggctgcaacgtttgacattcagttggagactgaggattgtgtgaagaattcaccttcattaactaaggatggtggagttaagaagggactgtttaaggttttttgtgatcatcaccgggaactcgaggccgagcttaagaagatggcaccccccaatggaagggctgttcttgtcctcagaggaaggtgtggctgttctgttggtaggttggaggttccgggaccgaagaagaatcgaaagaccaagaagtaggatacagaaaagaagaaacaaaaagtcttataggaaggagaggatattggatacagaaagcagtcttaaattggtagagaagttgcttatagttatatggtcatattttatttaaaattaggttgtctttcgaataaatccctccaatttggcaataagttgtaagaaactatggatcatacacagtttgattatttatacctggtaatataaaatcctttaatttgaattgatttta

SEQ ID NO: 4033 - DNA, 1498 bp, Glycine max
tcagctacgtaggccccccccccttatttcttatagtagcactcctccagtacgttttaattgaattactttccttttttcaggagctctgaggattcaagtgatacaaatagtgatagcgctagtggcagtagttctagcgatgagaaagctgatcgtcatgcctcaggtcgtaaagcacctgctgacaataaagcccaaagaaatctagacacaggaaagcaattttccaacccttcttgtcaaaggcaaactattcctgaacaaacaatggatcccaaggtaagaagaattgtggacaagcaatcacatgaagaaggtgaattctctccggagaatggtgcatttgtgaataacaggcatgatactcaagctgaatttagtaaacctgctaagcaacatgctaattcagatgattcaaatcacaatagaggtgcaagtcctggaagaagtcctaccagggattctggggagctaaaccaaggacgtgctttgttgttggctagtcctggcaaaaaaagtcctggccaaaaagcatctgaacctcctgcccccaaacatggtcagggattttcaaaaagcccttcaccaaatagcatgcctaagcgtattaaaaaagggcgtggctttactgagcgttatgcctttgcacgaagatatcgcactccatctccagagcggtctcctcctcattcatatcgttatggtgatagaaatataagaaggaactttgatagaaacacaagctacagaagttattctgggcgctctccaccacgacgttttcgaagcccgccagggggcaggaatcgtccaagataccaaagcagaagaagtaggagtaggagcatctctggcagtccagtgcgtgggcgttttagagagcgtgaccgcagcaggagtccaagacgtagtcctagtccagaagacaggctgcctctgataagtgacagattaaaatccagacttggtccaagaagtgacgaaggactgcgagacagggggaggtcgaggtcgaggtcgaaatctaggagcaaaggctcttctcactccagatcccctgatgccacaccaccaaaacgatatgataaaaggacttctgtacctcgtagcaggtctagatccagctctgcatccggccaaaagggtttagtttcttatggagatgccagtcctgattctggctcaaggtagctaggtattatgctctcaagtcccagctggacctgaaattgctatacattatattacaagtctcaagaagagttaagtgttgcattagcttaaaaacgaccgttctatcatgttacttttagtaagagccaaaacttgaatgatgcgtcgtaaattggatctgccgtttgtgtttaataaatatttgttaacagtaatttatttctttttgaattccatccgtcccttgtgagataactattattttcatgttttttttataaagcaatattcaaataattcaaaatattaccttcgttttata

SEQ ID NO: 4034 - DNA, 1809 bp, Glycine max
tcagctacgtaggccccccccccccccgtgttttacaagagagagagagagagagagatattcaaggatctggtgccccttcttccttcttgtgttgggaccaattctttaatgagcgagagagagagggcgcaatagtagccatagccataatttattgttattatttagggatgagtgaagtgaatgaatgaaaacaaaaacaccgccatcgctcttgtctctcacggttgactctgcggttcttaatctctccgacatctccgatctctcccatgtccctgatcacatcctcctcgacctcttcctgagaatattgaaggctgggaagctgactgagaaagttctgagactttttatagcaactggtaaggatgaagtcctctcatttgttcaggcactcaatatccaacatattttgacccctgtgcttcccaccaggtgttctgaggcaaaatcagacttttagtttgtaagatagtctgtaccttgcaagatgtctcaagcagttatcaacgataatgaagtggacattgtgattggtgcactgcattctgatcttacaacttttatgaatgaatggaggccaattttctcccgctttcacctgataatagtaaaagatcctgacctcaaggaggaactccaaattcctgtaggcttcagcgtggatgtgtatacaaagtctcagattgagcaagtggtgggttcttccacttctgttcgcttctctggctatgcttgtagatattttggcttcctaatttcacggaaaaagtatgttgtctgcattgatgatgattgtgttcctgcaaaagataattcagggattttggtggatgctgtggctcagcatattgtgaacctgcagactcctgccacccccttcttctttaatacactgtatgatccattctgtaagggtgcagattttgttcgtgggtacccattcagcctgcgaagtggggttgattgtgctctgtcatgtgggttatggctcaatctggccgaccttgatgctccaacacaagctctcaagccagggcagaggaatttgcgatatgtagatgcagttctgactgttccttcgagagccatggtgcccgtgagtggaatcaacattgcctttaaccgtgaagctgttggtccagcattagtcccggctttgaggctggcaggggaagggaaattgaggtgggaaactatggaagatatatggtgtggaatgtgtgtgaaagttatatgtgatcacctaggccttggtgtgaaaagtgggttaccttatgtttggagaacagaaaggggtgatgcaatacagagcttgaagaaagagtgggaaggggtgaaattgatggaggatgttgttcctttctttcagtcattaaggttgccacaatcagcaactacagcagaggcttgcgtggtcgaggtggccaaaacagtgaaggagcacctggggaaggttgatcctatgttttcagaggctgctcaagccatggaagagtgggtcaagctctggaagtcagttagatctggttaaagctcctgaacttgaggactcttgtaggagtgaaggttattgccttattggcttctatatttctttatgttatttaactaatttatagctgccttttttttccagtttgtagtgaactaagcttacattttacctgacacagactaaaggctgaataaaatgatgataatacttattggttttgtgacaattgaataaattctgtcttgctttgtctataattggtctttgaacaaaaaaaaaaaaaaaaaaaaaaaaaaaaaaaaaaa

SEQ ID NO: 4035 - DNA, 778 bp, Glycine max
aattcggctcgagtctcaacatgcagagattgtcatcgtttgagtttaatgctggaagtgcttgatcaagaagcagcagctctatattcattcaaatcacaagctcagaggcttgaagcacttcatcaatttaaatcgggaaaggtttctatacttcttgcaactgatgttgccagccgtggtttggatattcgtacagttgaccttgttatcaattatgatgttccaaggtttccacgagattatattcatcgtgtaggccgtacagcaagagctggtagagggggactggctttgagccttgtcacccagaatgatgttgatctcattcatgaaattgaagcacttattgagaagcaacttgaaatgattgaatacaaagaaaatgacgcgctttctctcatgaaaaaggttttcagtgctaagaacgtagcagaaatgaagatgatagatgatggctttgaagagaaagctaaagagcggaaaaaacagaagctgaaaatgctagcagataaaggattgttaaataaaagaagtaaaaagagaaaacgaaataaagaatttgcagaggaaggggaagaacaaaaaaatgaggttttcactgttaggaatgtgacggaaatgaagaggatggatgaggatggcattgaggagaaagcagaagaggggggaatacaaaaacttaaaatgcgaacacagaaaggtttgtcaaagaaaaaaaagttaaaagaaagaaataacgaatttgcagatgaagggaaaaaaaaaaaaaaaaaaa

SEQ ID NO: 4036 - DNA, 3078 bp, Glycine max
cgaggaggaagtgggatgaagttgatgttggtagtgtgaggaaggtgcaagatgagaaggtggatttgaggagtgagcatggggagagtaaaatcagctacgtaggccccccccccccccagtctactagtaaggaggatagaagaggggattctgagagagggaagagtaaggggaagtcggattcgggggatgttggtcgtgaggagagggttgagaagcccaggcaccatagggcggctgctggttatgatgtggctgaaacctgggataggtcgttgaatgcagaggaggatggacatgtgcgggttagggataagagtaccagggaaagtgggaactcaaacaggtcgaggacgccggagaagagtggaaaacgccatcaagatttggagaactctgaggtggattatgaaagaagtagtagctttaaaaggaaggagcatgaaggtgatggctataaggatgatagatccaaagggaaagatgatacttggaatgataggaggaaggatcgggaaagttctaaagaaagttggaagaggaggcagccgagcaacactgacaaagattcaaaaaatgaagagagtgcttttgatgacaacagagattgggagttgcctagacatggttatgagaggatggataatgaaaggcctcatggacggtttggtggtagaaaagatgtgagcaggggggaagctgttaaaacatccactaagtttgggatttcgaatgacaactatgatgtgatagagatccagaccaagttttatgactatgggaaatcagagtctgtgtccaaccataccaagagaactgaaactcatcagcagtacattgctaaatcaggtgctaatgatgaagaatgggcataccatcaagatgaaagaggaaggaagagtgatttatctggttctgggacacctggtgaagatctgaaggagagatatgctgatgatgactatgatttttatgggggaagaggaagaggccagaaaggtggtgtatctgcccgtgttactggtggccaaagttctagtactggtggctcacagccccaatatggaaattcggagtctggatcctttaacagagctggtccacaaggaataaaagggaacagggttggtagaggaggaaggattaggcctactgggagagacaatcagcaagttggaataccgttgccaatgatgggatcaccctatggacctcttgggatgcctccgcctgggccaatgcagcctctttcacatggtatgtcacctgctcccggtccaccaatttcccctggagtcttcatgtcaccatttactcctggtgtttggcctggagctcgaggtgtagacatgaatattataggtgtaccacctgcagtgtctcctgtacccccaggtccttcaggtccgcgatttaatgctgctaatatagggaacccaccaaatcctgtaatgtattataaccaatcaggccctggaaggggaatacccccaagcatttctactcctggttttaatcctacaggatcaatgggtcgaggagccccacctgataaaactccagggggatgggctcctcctaaaagtagtggaactcttggtaaagctccttccagaggtgaacagaatgattattctcaaaactttgttgacactggtatgcggccacagaatttcattagggagcttgagctcacaaatgttgtggaggactatcctaagcttagagagcttatactgaaaaaggatgagattgtggaaaaatctgcatcggctcctatgtattataagagtgatttgaaagagtttgaattatctccagagttctttggaacaaagtttgatgtcattcttgtagatcccccatgggaggagtatgtgcaccgtgcccctggtgttgctgatcacatggagtactggacatttgaagaaataatgaatctcaagattgaggctatagcagatacgccttctttcatcttcctttgggtgggtgatggtgtaggccttgaacaaggtcgtcaatgtctaaaaaagtggggttttcggaggtgtgaagatatatgttgggtaaagacaaacaaaagtaatgcaactccaggactgcggcatgattcacatactttatttcaacattcaaaggaacactgcttgatgggcataaaaggaacagttcgtcgaagtactgatggacatataattcatgccaatattgacacggatgtcattatcgctgaagaacctccttatggttcaactcaaaagcctgaagatatgtacaggatcattgagcactttgcccttggaaggaggagactagaactatttggtgaagaccacaatatccgagccggttggctgactgttggtaaagaattgtcatcttcaaattttaataaagaggcatatgtgaaaagttttgctgacaaagatgggaaagtttggcaaggaggtgggggaagaaatccacctccagaggcacctcatctggtggtgactactcctgatatagaggctcttaggccaaagtctccaatgaagaaccaacaacaactgcagcagcagaattcagtatccatttcgttgacgtcagctagtgcatcaaacagaaggcctgctgggaattcgccgcagaacacaactgcactaggcgtcaaccaagacgcttctagctcaaacccttctactccagctccttggggttcacctctggagggcttcaagggacgtgaaggctctgtattgccttcagatgataaagtaatggatatgtacgggtttcatggaccagcatcagcaaactatctagattttgaatcatacagacaaatgaatctgttgtagcataactcttaaggataatgttccatgattacgtatcgtgtaatttttttccccaccaatataaatgggaagaaaattattcatattttgtatgttcattttttattagcattggtgaatgcattgtttaaccagcggaataaaagaaagcgtcagattactgtaaaattagctatattattattttgtcgaatgcttagaatataatttcaagtcacaagcttcccgtggc

SEQ ID NO: 4037 - DNA, 1122 bp, Glycine max
aaacagaaccgctattgaggagtcgggtttattaccaaagcataactcaaacaaaatattgctaacgcttacactacggttctgatatccaatgatcaatgacaaatataactacaattaatttggaaacatactaatcgttaatggttttgttctttacattttacatgattctaatgactagctggtaacaaaattgcctgacccttctcatctcttgtgccaatagtactgcccacttccgggcattgaagcgataattggacaaattattttaactccctatgcttatgaacccagagtttacgtctcactttctggcttctgaggtggaggtacagtagtagctgtttcctcagcagaaggctggatttgaggctcattgtcaccttccttggaaggtgtttgcccctgctgttgtgcagcagatgccttcagctgctcctctgtaatcttaagatactcctcagagctgtatgctttagtaggatctggcgtgccattagggtcaacagtggaagtggatgatgaagttggtgtggtattgcgtatgttggaattgtatgtgttctgggttggacttaaattgtcatcaagaccaatctcccgttcaagagtactcttaaattcccttgaaacatcctgaagctctttaatggtgggttgaaatgtacgcaatgtttttcccagatttctagcaacctcagcaagacctttagggccaaaaaccaacaaagcaacgaccccaattaccaaagcctcaggagctccaaccccaaagagagaagcataaaccaccttacccttacacccaccctttctatctatgtgaataagaggctttgctttagctgagatacccagatgctttaaaccactccaaggtgagacaaggcctcgacccagtggagagaacattgaagagagatgaaaagcttggaactttgtatgtgacactgcacaactccccagcttcggacataacattgatgaagaagccattgccaaggatcgtgtcatttctaagacactttattttttgtttgtttgaagattgttgaacgatgaatgtggcgggcgggcttaggaaactgactcgagggggggcccggtacccaattg

SEQ ID NO: 4038 - DNA, 776 bp, Glycine max
agcgctactcagctacgtagggattgattggcattgttgaataagttttgtatttgacatcatagccaacgaacggggacctctcgtttctttctcttctttcgcattctcctatctgttgtttgtttcactctcatggaccgtcgtaaagagaaaaatggtccatggttatcggtgccacaatttggggactgggatcagaagggccaagtgccggactactcacttgatttctcaaagatccgggaaactaggaagcagaacaagacaaatatatccagggctagccttggcaatgaagaagagttcatggattcgacaacctccagcagcgtcaacactggccacagcagtgagcaccctcaaccgcactaccatcaaaccaactctccaactgcaaggaagagcttcctcagctacttcaattgttgtgtgaaagcctaacatttaagggcaagtgcaatctttcgctagttttctgaagattatggataggaatagctatgcttctctgttcatttggtgataaatattaaatacttattacctattgatcttgattatggataggaatagctatgctcctctgttacttcttatggtagctaaaaatttggttaatcaaactacaggtaaagatggtaaccattaaacggcgctcatgagttttgaccaaaaaacttgtaaaaacacgataaatattttccattttatcactcttccaatcttattcttaaattaaatttcgtctaaaaaagaaaaaaaaaaaaaaaaaa

SEQ ID NO: 4039 - DNA, 1809 bp, Glycine max
cgattgggtaccgggccccccctcgagtcagctacgtagccccccccccggattcataacagaacggatctctctctctttcaaatccaatcatttcctgagagacaaaaacaaaataaaaatcgcgttcagatacactcacacacaaacacaaccaccaatccccaatctctaacttttcccgagaaaattttagtttccattttcatttctccctcagattcccggaaaatatattcacaacattaatttcgcacttcgccctctgccaactaccaagctccggcttcctctgccaattcaatccgtcgtcgttttcgccaattccgaatgcgtcgatttcgggttggagaatgagttctccgacctcttcttggatctctgttcaaaccgtcacacagtctctgcgttcggattctcttgtccaattttaactctctctccctctctctctctctctctctctcagttagtataactacgtatcaggcaaagaagttttcgccggctagcatggtgccgcataaatctcaaggtggtgtggagcagcttgcaaatgctggggttttgggaggatctgctgtaaaaattgccgctgcacctgctgggggaagtgggaagcagcgtttgaggtggacatctgatcttcatgaccgttttgtcgatgccattacacaacttggtggaccagatagtgggagcaacaccaaaaggtgttcttagagtgatgggtgtttttggactgaccatttatcatgttaaaagccatttacagaaatatcgccttgcaaaatacttgcctgaatcaccagctgatggtaaagactctaaagttgagaagaggaattctggagacagcatttctggcgcagattcttccccgggaatgccaatcaatgatgccctaagaatgcagatggaggttcagaaacgtctgcatgagcagcttgaggttcaaaagcaattacaaatgagaattgaagcacagggtaaatacttgcaaaagatcatagaggaacagcagaaattaggtagtaacttgacaacctcggaagcacttcccttgtcccatgatgagcaaaatcatcctcagtcagaggcttctggatctagtgaggcccttgcaagcactgtgtctccacttaaaaaacagagaattgatgatggttccaaggatggcttcactgcttcccaagtaagaaatgctgcacaaaagaatgactgcaatgttggtcagttggatccaaacttgtatgatgatgctgggtttgaatttgatttggagacaaaaaaggatgaagataatgagagtggacagtaagaactaggttccatttgtaggtcaatgtgtctcactgtaatgtgtagtgtatttttctggaagaaaatacaaatcatgctttgtaaattaaatttcacgcaatccatttgtacatattaatgtagatatagatgcattcttctctcccggtctgagagtcataaacactgcactccacccaacagaaatgctttgacatgcattacacgtgtggtcatggatgaatgttgggtgcaagattcttgtcgatgttcaggttgctatggtcttggccaatatcaaaggtatcaattagctgatgaccacattgtttgatccttgtagacaacctaatcatgggatactggcttggttctttttgttggagatagtaatgaccagcttcccttgatattaatcatttaatttaattatgtattttcttcgaggttaatgttgtttggcatatttagactcctgaatgtgatgctatctaacctatgagtaaa

SEQ ID NO: 4040 - DNA, 1788 bp, Glycine max
atccaatcatttcctgaaagacaaaaaccaaaacaaaatcagctatcgcgttcagacacactcacaattcacacaccaacaccaccaatccccaatctctaacttttcccgagaaaattataatttccattctcttttctccctcagattcccggaaaatatagtattcacaacgttatattttggcaccgccaagctccaattcaatccgtcgtcgttttcgcgaattccgaatgcgtcgacttcgggttggagaatgagttctccgtgctcttcttgtggctgtttgttggcgttcttggatctctcttcaaaccctccacagtctcctgtccaattttaactctcttagtcagtttaactatgtatcacacaaagaaattttcaccggctagcatggtgccgcataaatctcaaggtggtgctgaacagcttgcaaatgctggggttttgggtggatcggctgtaaaaactgctgcaccttctgggggaagtgggaagcaacgtttaaggtggacatctgatcttcatgaccgttttgtggatgccattacacaacttggtggaccagatagagcaacaccaaaaggtgttcttagagtgatgggtgttcctggactgaccatttatcacgttaaaagtcatttacagaaatatcgccttgcaaaatacttgcctgaatcaccagctgatggtaaagaccctaaagatgagaagaggatgtctggggacagcatttctggtgcagattcttcctcgggaatgccaatcaatgatgccctaagaatgcagatggaggttcaaaaacgtctgcatgagcagcttgaggttcaaaagcaattacaaatgagaattgaagcacagggtaaatacttgcaaaagatcatagaggaacagcagaaattaggtagtaccttgacaacctcggaaaccctccctttgtcccatgataagcaaaatcatcctcagtcagaggcttctggatctagtgatgcccttgcaagcactgtgtctccacttaaaaaacagagaatcgatgatggttccaaggaaggcttcactgcttcccaagtaagaaagaatgacaatgttggtcagttggatccaaacttatatgatgatgctgggtttggatttgatttggagacaaaaaaggatgaagataatgagagtggacagtaagaactaggatccatttgtaggtcaatgtgtctcattgtaatgtttagtgtatttttctggtagaaaatacaaatcatgctttgtaaattatatttcacgcaatccatttgtacatattaatgtagatatagatgcattcttctctcctggtttgaaagtcatagacactgcactctccatccaacagaaatgctttgacttgcattacacgtgtggtcatggatgatgaatgttgggtgcatgatacttatcgatgttcaagttatgatctaagtcaatatcaaaggtatcaattagctggtgacgacattgtttgatccttgtagccaacctaatcaggggagaaaggacttggttcttattgttggagatagtaatgaccagcttccctttatattagttatttaatttaattatgtattttcttcgaggttaatgttgttcagcatatttatacttgtgattgtgatgctatctaacctatgaggctatgagtaatactatatcttctttctccgtaaagtatgaaaatattcaaccaaaaaaaaaaacaaaactgtactactggatgtattgtgatttgtgagtgtaagaattcttatattg

SEQ ID NO: 4041 - DNA, 1226 bp, Glycine max
ccacgcgtccggaagacggagtctctaaaatttcccaattcattgagcaccttgccctaatcacgcgtcctattcttccggcgaatcgccaccgtcgccggcaataaaaccagccgctccactccctcgccggcggtggtactagcaactctccctcgccggcaactaaccaagactaaggaagtagagtgagaacccgcgaagactcttagcttcactttcttcagctcacagtttctatcacttgccgaatccaatccaacagagtcctggaaacagtggcatcagctttcgccccatgggtgttatggagatatcattgttaaaaatgatcgtaaatggaatgtcctcatttttgcatttatctttttctggaaacatgaactctgaacctgtctcaaagtattaccagaaggcagaggagatacataagttgttgaagccaatcattgatgcaattgttaatcctgagttagcttctgatgaagtgcttaataagatattggaagaaattggtcttgctgttaatgagttaaaggagcatgttgagaactggcacctattgtctagcaaagtatactttgttatgcaagttgaacccctgatatcaagaattcgcacttcagggctcaatatttttctgcagctgaaggattctcagcattgtctccctgatgaattaagttctgaacatttgcagcactgttcacaaaaacttaagcttttgggacatgaagaaacctcaccagtcattcaggaagctattacagaacatctggaaaatgtaggacccagttcagagctcctgtcaaaaattgctgatagcttgggcctaaggtctaatcaggaggttcttattgaggcagtggcccttgaaaggttgaaggagaatgcggaacaaactgaaaagactgcagaagctgaattgattgatcaaatgattgctgttgtaacacatatgcacgagcgtcttgttatgcttaaacaagcccagagtatcagcccagttccaatacctgctgattttcgatgtcctctttctttggagatgatgactgatcctgtgattgtggcatcagggcaaacatatgaacgagctttcatcaagaactggattgatctagggcttactgcttgtgcaaagacacgttagactctggttcataccagacctatacctaattatactgtaaaagcactaattgcatactggtgtgaatcgaaca

SEQ ID NO: 4042 - DNA, 1733 bp, Glycine max
  misc_feature (1733)..(1733): n is a, c, g, or t
actaatatttttctccctcgtaggccccccccccgaaacaaaacaatgaaacattgagtggcaattttactgtgtggaatgttcttcttctgataaaaatgaagtgtttctatttctcaaacggagaagacgaggattccgtggggggaggagcggcggcgagttcgcgcggcggctccacctcgcgcgtgtcgtgggctcgttcgctgagcctgatggacacgcgcagcagcagccgctcccacttcgactccgagtcgacggagttctccgacacggtggacttccaccacttcctggcgcagcgccgcgccaacgatctccgtctcttctccttctccgacctgaaatccgccacgcgcgccttcagccgcgccctcctcgtcggcgagggaggcttcggctccgtctaccgcggcttcctcgaccaaaacgacgtcgcgatcaagcagctgaaccgcaacggccaccaagggcacaaggagtggatcaacgaggtgaacctgttaggtgtcatgaagcaccctaatttggtgaagttggttgggtactgtgccgaagacgatgagagagggattcagaggcttttggtttacgagtttatgccgaataagagcttggaggatcatctccttgcaagagtgccatcgacgataatcccttggggaaccaggttgaggatcgcgcaggatgcggcgaggggtttggcgtatcttcatgaggaaatggattttcagctaatatttcgggattttaagacatccaacatcttgctggacgagaatttcaatgcaaagctttctgattttggactggctaggcaaggaccctcagaagggtctggctatgtttcaacagcagttgtcggcaccataggttatgctgcacctgagtatgttcagactggtaagctaactgctaagagtgatgtgtggagctttggtgtagttctttatgagcttatcactgggaggagagctgtagagagaaacctaccaaaaaatgagcaaaagcttttggaatgggtaagaccttatgtttctgatcctaggaagttctatcgtattgtagacccccgacttgagggacaatactgcatcaaatcagctcataaacttgcaattctagcaaacaagtgcatcatgaagcagccaaagtcccgtccaaaaatgagcgaggtggttgagtctcttggaagcattattaatgagattgttcctcaggatgaacaaatcccccaagctgctgtagtagcaattggagaagaaaaagaagaaaagttatctgtagagaacactaaacctgaaccttcagctaaacaagggaactattacctgaagaaggtttttgaattgaaagatattgtcagcttaagaaataagtctattggaaggttagattggaaaagttgtgcacctgggctagtaagaacttggtgaatggtgataagtgacctgtatatcttggaaagaaaaatcttcttcccctacagtcacctgctaatcgcaatgtttgttgatcacatagttttcagtcagtgaaatcaacattgtcaggcacacagttaacaacaagctggtatatatccaattttgtatcagttaataattgtatgtacaggttaattttgaggaaagctataatttgaaaaaaaaaaaaaaaaaatcaaaactaacatcgaatttagtcttcaaaatgaataagtatttaggtaaaaaaaaaaataaaaaggn

SEQ ID NO: 4043 - DNA, 2430 bp, Glycine max
gaccctttattttcgcattcgaagttgcgttagcacattcgttgtggaattcgaggaccacacccccttttctttccttttcctgtttttgacacgtatttgaaagtctgctgctatgtgtggaatttttatcttcctaggagcttataaataagccagggaaagccactaagatattcccatcttcatttcttcatttatttatattgtgtgcttttgatcttggagcaagacttcaattcatatacaccaaagacacatactatcttcataagcaaaggactcaaagtaatagttttctacaaaaaaattgaagtttggggggggatctacatctctatgggattatcactttccttactctcatcagcctgggaagaaatcgttagacattcactatttggtctgtctttgaacttcacttttggttccaaagatggggctatgattttgagatcaggtagcttcaagataagagaatcagaaactacttcaaagggtgcctctaccaccaacttttcaagcaaattgacggattgcaggcccgaacacatggtcctcgaaccaaacctttcgtgcattaaagatatggagatcatggaatcaaagagcagtgaacaacaattgcagcaccagcctgtccctgttctctctctgcctaaagaagtggttttctcttcgccaagaccggttagtgagcttgatgctgcggctactaagcttcaaaaagtctacaagagttaccgcactagaagaaaccttgcagattgtgctgttgtggtggaagaactctggtggaaggcattagactttgcttctcttaaacggagctctgtttcattctttgatgtggagaaacacgaaaccgccgtgtcacggtggacaagagcaaagacaagagcagctaaggttggaaaaggtttgtctaaggatgataaggcacaaaaattggccttgcaacattggctcgaagctattgacccacgtcatcgctatgggcacaatttgcacatgtattacgatacttggtttgaaagccaaagcacccaaccatttttctactggttggatgttggagatggtaaagaaataaatcttgagaaatgcccaagatccatcctacaacgccagtgcattaaatatcttggaccaaaagaaagggaagagtatgaagtaattgttgaaaaagggaagctggtgtacaaacaagatgggaggtttgtggatactaatggaaattccaaatggatatttgttcttagcacaacaaggtccttgtatgtggggcgcaagcagaagggtgcatttcaacactctagctttctagctggggctgctacaacagctgcaggaagattggtggctcagcaaggtgtacttgaggctatttggccatacagcggtcactatcaccccacagaagagaacttcaaagaattcataagctttcttgacgagcacaaggtggacctttctaatgtcaagaaatgtgccgtagatgacgatgctccttcaattgttgggtccaattcatttattgacattaatgaatcacaacaaattaatgagggtcccactgtctcttcttccaataatgtcaacaacaatggcatcaccattaatgcaacatttaacaaagagattgaaaagaaggtggtggccacagtttttgacgtgcccaagaggctaacatgcaagtggtctactggggcaggtcccaggatcgggtgtgtgcgtgactaccctggacaccttcaaataagggccttggagcatgttaacctatctccaaggcctgcttctgcacgcccatatagttatggcccaattccttctccaaggcccagcccaaaagttagaatgtctccaaggcttgcttacatgggcttgcccagcccacgcacctcaattcctgccacaagttaagtgcctgtttgtgtggatgtttctaagggagtttgcatcatcccgaggcaccaacgcaaaagaccaaagttcgttatttctgcgttttattcattggaaagagtgaaaattggtgacaagttggaaacaaacatagcctaacagcaaaatcatggttgggaattatatatggctaggctcacacatgtatacacttgtccccataatgacaaaaaatgtgttagttatgatgaaaattgaggtgacaccaagagagacttttaattctatctctctaattttttatttaatttttttattcttgggttaaccgaggcattttattaaccctatttgtctttggttcttttttttttttggaaagatcactcagttaattcttcattgtaagtagagtacaaaatttctaattaaacattagatattttttatctgtaataaaaattcagctattaagaacaatctggtgttgtacttcaaaaaaaaaaaaactcgcctcggggc

SEQ ID NO: 4044 - DNA, 2985 bp, Glycine max
aaccccgggccgccgatcaaaccacacacctcacctattagaagtaacaaaagaccctccctctcaaaagaataaacaagtataaaaaagaaggcacttccctcaaacagaaactaccctctatctctctcttttcaagccttaaatgagtaaaaaagagtgaagaaaggaaagaaaggagcaccatttttggtttgagaaacataattagcaagagagttcaaaatggggaagagagagtttaatggggtggtgttgatgatgctgtgtttgtgggtttgtggtgtcacagcctctgtgacttatgaccacaaagccattgtggttgatggcaagagaagaattttgatctctggctccattcattatcctagaagcacacctcaaatgtggccagaccttattcaaaaggccaaagatggaggccttgatgtcattcagacctatgtgttttggaatggccatgaaccttctcctggacaatactatttcgaagataggttcgacttggttaaattcgtgaagctcgcgcagcaagcaggcctctatgttcatctccgtattggtccctacatatgtgctgaatggaacttggggggatttcctgtctggctcaagtatgttccaggcattgctttcagaaccgacaatgagccgttcaaggctgcaatgcaaaaattcactgcaaagattgtcagcttgatgaaagaaaataggttgtttcaatcccagggtggtccaataattttgtcacagattgagaacgagtatggaccagtggaatgggaaattggtgctcctggaaaagcttatacgaaatgggctgcacaaatggctgttggtctagacactggtgttccatgggtaatgtgcaagcaagaagatgctcctgatcctgttattgacacctgcaacggattctactgtgaaaacttcaagcccaacaagaacaccaaacccaaaatgtggactgagaattggactggctggtacactgattttggcggtgcagtccctcgtagaccagcagaagacttggcgttctcagttgcaagattcatacagaatggtggttcattcgttaactactatatgtaccatggaggaacgaactttggccggacatcaggtggcctcttcattgccactagctatgactatgatgcgccgcttgatgaatacggacttgaaaatgaaccaaagtatgagcatttgagagctttgcataaagcaataaaacaaagtgaacctgctttagtggctacagatcccaaagtgcaatcgcttggatataaccttgaggcccacgtgttctcggccccaggtgcttgtgctgcattcattgctaattatgacaccaaatcttatgcaaaagctaaatttggaaatgggcaatatgatctaccgccttggtctatcagtattcttcctgattgcaaaactgttgtttacaacacagcaaaggttggttacggctggctgaaaaagatgactcctgtaaacagtgcatttgcttggcagtcatacaatgaagaacctgcctcatccagtcaagctgattccattgcagcatatgcactttgggagcaggtcaacgtgacccgcgattcttcagattatttgtggtatatgacagatgtcaacgttaatgctaatgaaggatttctaaagaatggacaatctcctcttctaactgtaatgtcagctggccatgttctccatgtgttcattaacggtcaacttgcaggaactgtgtgggggggattgggaaatcctaaattgacatttagtgacaatgtgaagctgagggctggcaataacaagctttctttacttagcgttgcagttggtctcccgaatgttggtgtgcactttgaaacatggaatgcgggggtgttaggcccagtcactctgaagggtctaaatgaggggactcgagacttgtcccggcagaaatggtcttacaaggttggactgaaaggtgaatccttgagccttcacaccgaaagtgggagtagctctgtggaatggatacaaggatcattagtggctaaaaaacaacctttgacatggtacaagacaacttttagcgcaccggccggcaatgatccattggctctagatttgggaagcatgggaaagggtgaagtgtgggtaaacggtcgaagcattggtcgccattggcctggatatatagcacatggtagttgcaatgcttgtaattatgctggatattatactgatacaaaatgccggacgaattgtggacaaccttctcagagatggtatcatgttcctcgctcatggctgagctcaggtggtaactccttggttgtgtttgaagaatggggaggtgaccctaatggaattgctttggtgaaaagaacatgaagtgtgatattttatgatgctctcttaaaaggagcagcattgacaggcaatatatatcttgtaacaaatgtctaggaaatgcaaagaagctgtcaagtgagtcctatgcggttaggaccctatgatgcagcaatttaccaaatacgtgtggtttagatcatattaggttcagtatataaaaaatatttgaagttcataattggtgctccttgtcttctggttgttcaagtatacctcaaaagattgccaaggcctaatcatgcattgcctggccaaaaacaaagatttatataagagaatttggatgcgcaaagactgtgtatactgtacatagtcaagtcaggctattgtgctgaatattgccccatgtattacagggcttgtatcaatgaagattgagcccttacacatttatttaatttactatgatacaatggaaagaattgtagacacgcaaaatgtgtcggagagtatatttgctatattctgccagaaataattgtgttttcccattataattattatgtaagaacagattgaaagtaataaaatatcctttgaaataaaaaaaaaaaaaaaaaaaaaaaaaaaaaa

SEQ ID NO: 4045 - DNA, 3066 bp, Glycine max
ttgaaattagaatagacggtgagaaagccaggcacacacaacacaggaacgggtgagtgagcgagtccccactccacactccaatcaatcaaccatttatttcaaaacggaacccggccctgggttcgatccatcgatcatggcggacgaggtcccttctccttcagcagcatctactgctactacctctcttggttcgagtgtgatctccctggtgaaccgccttcaggacatcttcgcccgcgtcggaagccaatccaccatcgacctcccccaagtcgccgtcgtcggcagccagagcagcggcaagtccagcgtcctcgaagccctcgtcggccgagacttcctcccacgcggcaacgacatctgcacacgccgccccctcgttctccagctcgtccagaccaagcgcaagcccgacaacgacgagtacggcgagttcctccacctccctggccggaaattccacgatttctccgagattcgcagggaaattcaggctgaaactgatagggaagcaggtgggaacaaaggtgtctcagacaagcagattcgactgaagattttttcaccaaatgttcttgatatcaccttgggagatctccccggcattacgaaggttcctgttggtgaccagccttctgatattgaagctcggatcagaacaatgatcatgtcatatatcaaaactcccacctgtctcattctagctgtcacaccagcaaattcagatttggctaattcggatgctcttcagatggcagggattgctgatcctgatggtaatagaacaatcggttttggaatgtagttggatataatggacagaggtactgatgctcggaatctgttactaggaaaagttattcctcttcgacttggttatgtaggtgttgtaaatcgcagtcaggaggatattcaaattaaccggagtataaaggatgctcttgttgctgaagagaattttttccgcaatcgtcctgtatacaatggtctagcagatagttgtggtgttcctcaactagcaaagaagttgaaccagattctagcacaacatataaaggctgtgctacctgggctgagagcacgcataagcacttcactggttgctgttgcgaaggagcatgcaagctatggagaaatcactgagtccaaggctggtcagggtgcacttctcctgaatattctttcaaaatattgtgaagcattctcctccatgcttgagggaaagaatgagatgtctacatccgagctatctggtggagcacgaatccattacatttttcaatccatctttgtcagaagtttagaggaggtggatccgtgtgaagacctgactgatgatgacatccgtactgccatacagaatgctactgggcccaaatcagcgttgtttgttccagaagtgccatttgaagtccttgtgcgaaggcaaatatcgcgtctattggatccaagtcttcaatgtgccaggtttatatatgatgaattaataaagatcagccatcgctgtatggtgactgaactgcagcgattccctttcttgcggaagcgcatggatgaagttatagggaactttctacgagaaggccttgaaccctcagagaacatgattgcgcacctcatagaaatggagatggactacataaacacttcccacccaaattttattggtggaagcaaggcattagaaatagctgcacagcagaccaagtcgtctagggttgctataccagtttctaggcaaaaggatgctctggaatctgataagggatctgcctctgaaagaagtgtgaagtctagggctattcttgcaagacaagctaatggagtagttcctgatccgggtgtccgtgctgcatcagatgttgaaaaaattgtaccatctggaaacactggtggatcaagttggggcatctcatcgatttttggtggaggtgatagccgtatgtctgtgaaggagaatatatctagtaaaccgcatgctgaaccagttcacagcattgagcaatcagtctctatgatccatttgagagagccacctcctatcttgaggccatcagagagcaattcagagacggaagctattgaaataactgtgacaaagttgcttttgagatcatactacggcattgtcagaaaaaatgcgggggatcttatccccaaagcaattatgcacttcttggtaaacaacaccaagagagagctgcacaacgtcttcattaaaaagctatacagagacaacctgtttgaagaaatgttgcaagaacctgatgagatagctgtgaaaagaaagcgctgtcgagaacttctccgagcttatcagcaggcttttaaggacttggaggaactgcctctggaagctgaaacagttgaaagaggatacagttatcctgaaacatctggtttgcctaaaattcatggattaccaacatcatccatgtactctacaagcagttctggagactattatgcagcttctccgaagcactctaggtcaaaaaggtcttcccattctggggagctgcaatcaccattgcatgccaatgcagattccaatggaagtggaaggccattcatgtcaggtttttatcccacggtggatgcatgagctataggtgaatgagctcattggtggaagtagtttaactcaaggcattttattcatttgattacactgcaacttccgggatttagaattctgcctcccggagctggactgcatgaaattactctatctaactaaaatggtgttgaatgttggtcactgctttctttacatatgttcactttttcttctcatacagcattgacattttttacaaggctccagagaaagaataataggagcaggtgattgttcacatttttgagaatcggctttctataaattcgtgtatatgaccttattatcttttttagttagtcagatatctttgtcatcaatagacaattatgtagttcgagagtttttttttttttttggttgaattggctgtgtgaatttgcaagtaatactgaattatcaagtttagataaaatgtagggatttcccttgtgattgtt

SEQ ID NO: 4046 - DNA, 1492 bp, Glycine max
  misc_feature (12)..(13): n is a, c, g, or t
  misc_feature (20)..(21): n is a, c, g, or t
tcagctacgtannccccccnncctataaagaatggacaatctcctgttcttaccgtaatgtcagcatgccatgttttgcatgttttaattaatgatcaactttcaggtaccgtgtacgggggactggactctcataagttaacatttagtgacagtgttaagctgagggttggcaataacaagatttctttactaagtattgccgtgggtctcccgaatgttgggccacactttgagacatggaatgctggggtgttaggtccagtcacacttaagggtctaaatgaggggactagagacttgtctaaacagaaatggtcttacaagattggtctcaagggtgaagccttaaaccttaacactgtcaagtggtagttcctccgtggaatgggtacaaggatcattattggctaaacagcaacctttggcatggtacaagacaacttttagcacaccagcaggcaacgatccgttagctctggacatgattagcatgggaaagggtcaggcatggataaacggtcgaagcattggacgccattggcctggatatatagcacgcggtaactgtggggattgttattatgctggaacttacactgataaaaaatgccggacaaattgtggagaaccctcccagagatggtaccatattcctcggtcgtggctgaacccaagcggcaactatctggttgtgtttgaagaatggggaggtgatcctactggaatttctttggtgaaaagaacaacagcaagtgtgtgcgctgatatattccaagggcaaccaactctgaagaacaggcagatgctagactctggcaaagttattagacccaaggctcacttgtggtgtccacctgggcaaaagatctctaagattaaatttgctagttatggattgccacatggaacttgtggaaacttcagagaaggaagttgtcatgctcacaaatcatatgatgctcctcaaaagaactgcattggcaagcaatcttgcttggtgactgtagctcctgaagtttttgggggagacccgtgtccgggaattgcaaagaagttctcacttgaggcactatgcagctaggatcatgtgatgcaacaatttacctgataaacatggagcagatttattaagctcaatatagaaaataacgataccccttcactttgtgtagttgaattccatacatacagaatgcaaacatgcaccggctgcgcgaaatcgaatgtaaataaaagaaattggctgcaaatgtagtacatagtcagattattctgctgattattactccatacactagggggctttcaataatgaagcattgagcagcccctcatacacattttttttctataaaagaatagttggacacgagaaaggtgtcagataactacaccattattctaccagaaaataaatgttatttttctattgaaatttttatataagaacaaattgaaactaataaatagattattttaagtggccttt

SEQ ID NO: 4047 - DNA, 1993 bp, Glycine max
aaaaaactttctttgaggttctgtcgcttcattaaactctcttatcttcttctgccccttttccacttcaattaggtatatcgccgattcgattcccaatttgcttaaactcaattaagctttcctgcgtcaatcattcaattaaagtttcggattgttatatttaagtagatgtagtgtggtttgattgctaaatggcatcctctgatggtagagttacgtattcttcattatctaagctagaaaaggagaatacccattttggctacgatgatataaatcatcatgttgaatctgtgtggtctgagcttatgcctggtaccccgtgtggccaattagtcccaacgttgtctaacaaagagacattgtatcagtttccctctgaggatgatgacttgtttgatggaggttatgaatcaggtgatgatgctcgtggtattgtaccctctaacaggccgcctgaggtgaacttgaagaatgtgctttctgggatctttgctattttgtctggacggaccaaggctccgagtgttactgcaaaccagcagctcccaagttcaaatgtgtcattttttgactctggaaagaatggggatgttttccttgactcttcggtgtacacgccaagtgctccgccactttgtctgccaaatggaattgattatagttcttacaaagaggtcttggaagctgaaccccctgagtggctccctgatagttctactactgtttgtatgcaatgtagtgctccttttactgcgattacccgtggtagacatcattgcaggttttgtggggggattttctgtcgaacatgtacaaaggggcggtgtttaatgcctgttgggttcagggaaagaaatccccaaagggtttgtgatgcctgctatgatcggcttgatcctttacagggcgttctgatcaacaccataagcaatgccgtacagggggctaagcatgatgtcacggactggacttgtgctagaggatggattaatcttcctattggtttatctatggagcatgagatttataaagcatctaatacattaagaaactactgtcaggtggccaaatccaatcctgagaagtccattcctttaactgttcttaaaagtgccaagggcctagcaattttaacagttgctaaagctggtgcactagtctcttacaaactgggtactggcttggttgttgctcgaagatcagacggatcatggtctgcaccgtcagcaatattctccctgggtttaggatggggtgctcagattggtggtgaacttatggattttatagttgttcttcgtgatatgaaagctgtgaagacattctgcagccgtatgcatttttctctgggtgctggttgtagtgctgcagcagggcctgttgggagagtgcttgaggcagatattcgtgctggtgacagaggctctggcatgtgttacacttacagttgcagtaaaggtgcatttgtgggagtgtctttggaaggaaatatagttgcaaccaggatggatgccaatttgtgcttttatggtgatccttacctcaccacatctgacattctactgggaatggtggacagaccaaaggctgctcaacccttgtatggcagtcttcaagaactatattcctgtctacgattctaagctggtccctggttccagttacagaattgcatcattttttctgtcttctgcaagtggtgtgataaatagtgcctgatgtatatacagttctagttctacatggatttctgaaatgtatggatgagggatctcctcataattcagttatacatcatatgtttactacaaatgatccatatatctaatacacgaatttataatgtgaatatgttagactaattgtacatagacaattggtgaaataagttctattcgtttgccgaattcttgttattcttgctgtgggactttcctcgaactgaaattgtaagttggtaatatttaaaaaagttcaaagcctattc

SEQ ID NO: 4048 - DNA, 1893 bp, Glycine max
gaccctccattaatgtcccctcctcgattttccaaaccctctctctctctctctaccctaatctccttctcgcccaccctctatataatactccatacaacatagcataacattcatatatacacacagtaccaaccactcttttttacttatggcatctttcatcttcacacctgtactctttcttcttatcatctccgccgtccttctcttcctccaccgccgatcccgctgccggcgcttccgcctaccgcctggtacactcgggctccccttcgtcggcgaaaccttacagctcatatcagcttacaagagtgacaacccggaacccttcatggaccagcgcgtgaaacggtacggtccaatcttcaccacccatgtgttcggcgaacccaccgtgttctcgaccgacccagaaacgaaccggttcattttgctcaacgaagggaagctcttcgaatgcagctaccccggttcgatatcgaacctccttgggaaacactctctgctcctcatgaaaggttctcttcacaagagaatgcactccctcactatgagcttcgccaactcctccatcatcaaggaccatttattggtcgacatagaccgcctcatccggctcaacttggattcctggtccgaccgggttcttctcatggaagaagccaagaagataacgtttgagttgacagtgaagcagctgatgagctttgatccaggtgaatggactgagacactaaggaaagagtacgtgcttgtgattgaaggatttttctcagttcccttgcctctcttctcaagtacctaccgtagagccatcaaggctaggacgaaggtggcagaggcattaacactggtagtgagggatagaagaaaagaaagcgtaacggaggagaaaaagaatgacatgctaggggcattgttggcctccggctaccacttttccgacgaggaaatagtcgattttatgttggctttgctcgtcgccggctatgaaaccacctctacaataatgactcttgccatcaagttcctcaccgagactcccttagcactggcacaactcaaggaagagcatgatcaaatcagagccaagaagagttgcccagaggcaccactggagtggacagattataagtcaatggcatttactcaatgtgttgtgaatgagactttaagggtggcaaacataattggtgcgatatttaggagagcaatgacagacatcaacataaaaggttacactattccaaagggatggagggtcgttgcttcatttcgtgcggtacatctaaaccctgaccatttcaaagatgcccgcaccttcaatccatggagatggcagagtaactcagaagcaagtagccctgggaatgtatataccccatttggaggagggccacgtctgtgtcctgggtatgagcttgccagagtggtgctctctgtcttccttcatcgcattgtcacccgttatagttggtttcctgcagaagaagataagttggtgttttttccaacgactaggacgcagaagaggtatcctatcatagtgaagcgtagagaggagtccaaactaagtaaatcgccatgagagacaccacacaaagaagaggaagaagagattgtagatgattttaatcattgtaatgtctaatgtattaagcaataatgaagtttcatccactagtttagccgtttatattttatttattttagggggttataggaaggaatgtcttattagtagaccttaggaagggatgggaaatgaggatgtgaaagatcaaacccctcatcaccctaataaaacagttgagctaaatccacctgtgtatatgatcttaattaattcctacaaatcctttcacgtatatcataataaatcaatggcgt

SEQ ID NO: 4049 - DNA, 1682 bp, Glycine max
aacacctctcaactgtcttgttaggccctcttattcacatttcctttcttgctctcgactcagctacgtaggcacccccccccgtagacactattgttgctagccttagatccagtctatgaatggcaaagccaagatcttggactcagatatggtcttctattgtcggagtgtgtgttctgaattttgttctgaacttcaagatcgtggcagtagcagatgacactggaagcaacagtattgtatcagaaggtgactgcaagaacacaaattatcagattttcctccctccaccttatcagaatatatcctctaccatatgcaaacctgtttggcattcatacgaattgaggtacaccaagacgggtgacaccacaactatcatattatctgctccatacactgtggggtgggtgggaattggattttcaagggatgggatgatggctggttccagtgcaatggtgggatggattaacaaacatggccatgcaaaagtcaagcagttttatctaaggggtaggaggcaatcagaagtaattatagacaaaggtgaactgcctctaaatactgtgcctgctgcggtggcaacaaatggggctgaaatttacatagcttttcagctgcaaaccacaattccatttgggaagcaaccaattttattggctttcagtactaaacatccactgaaccaccatctatcaaaacatgttgacaaagcagcaattatatttgatttctcttcaggttctacgggcccggtatcgaatgggttgattcacatgagaaagagccatggaatagtgggtataattgggtggggcctaatcctgcctgtgggggcaattattgctaggtacttcaggcataaggatcccctatggttttatctccattcagtcattcaatttgtgggattttcatttgggcttggcacagtccttcttggattacaactctatagaaacatgcatgtccacataccagctcacagaggcataggcatctttgtccttgtcctaagtattcttcagatattggcattcttcttgaggccagacaaggattccaagtatcgaaacatttggaatttgtatcacagttggtttggaagaatggcacttttctttgcagcattgaatatagtcctggggatgcgagctgcgggagcagggaatgattggaaggcaggctatgggttccttcttagcattgtacttgtcgcagttatcgttctggaagtcttggcgtatttgaaaaggtcagaaaagcgttctcttcctcagactttccaaatggacccagttggagatgctaacttcccaaccaatctagctaaagggtgaatgtgttggctcctagttttgtttgcacttgtacaagctgtgtcaattgtctcattcagccacttcagactaaacctcattcatcctacactactgcatgtgaactgagttgtggagctttcttgatgtagatagatatgtagccacctagaagtttgccaagatggacaatcctgacgtttggcttcctcacctgaacttgagattgaaccttttttgctttcttcattggttgtttttttgcatccgcatggtcagaaatggaatgctactacatttacatctatatatattttgttattcttctatgaaaatgtgatgaaaattaagggtcca

SEQ ID NO: 4050 - DNA, 1424 bp, Glycine max
  misc_feature (6)..(6): n is a, c, g, or t
  misc_feature (42)..(42): n is a, c, g, or t
tcgagnagctacgtaggcccccccccccccggcgtttgcttngttttgaaacagaagaagagtagcttctactttgtactactctacactccactctctcttcttctactgctaaaccccattattacatttttttttcttgtccttatatatataaataaataaaattaactttctcatgtgttgttctctctaccattgagcaatcaaaaagaatcttgggagatcagggaggtcatcgtcgtcatttctgcgctcaagattaacataacgacctcgcgcacccaggaacagggtattgtgttgtgtagctgaaggacatggagagaagcaatccggtgaggaagccacacacttcaactgcagatctgcttacgtggcctgaaactcccatttctgattccccagctcctccttcctccgccgttcgttctcaccagccgtcggatgggatcaggaaggtggtgtttggtggtcaggtcaccgatgaagaggtggagagcttaaataaaagaaagccttgttcggattataagatgaaggagataactggtagtggaatatttgtagccaatggagaagatgacgcctcagaagctggcagtgacaacccaaataagactggagtgcgtatgtatcagcaagcgatttctggaatcagccatatctcctttggcgaggaggagagtgtttctccaaaaaagcccactactttgccttgaggtggccaggcagcgtgagctaagtggaactttgggaaagtgaagactctatattgaaaaagcaactctctgatgccgaagtgcaaggagcttaagtggtcatgacatatttgctccaccaccagaaatcaaacccaggccaataactcctcgcatacttggagtttgaaggggagcatagacattgctgacggagatcaaggcgataccaactcttttgtttattaagcaaagaagatctatgacaagaaatttgcataactttcagggaatgacatattcaaaggggatgcaccgccttcatctgctgagaaatcattgagcggggccaaactacgagagatgagtggcagtaacatctttgctgatgggaaggtagaagctagagactacctaggtggtgtacggaagccacccggtggcgagagcagcattgccttggtataatttattagggtctaacttatcttcatactgtcttgttttgttttaattaatttttagtggggatgtgttattatattatttgaccttgtattctgggttttgggaattggtgttttaggtttcttgatgtcttttgaccaaaaaggaccatctgctaattggttgtatgtccaaaaaaaaaaaaaaaaaaaaaaaaaaaaaaaaaaaaaaaaaaaaaaaaaaaaaaaaaaaaaaaaaaaaaaaaaaaaaaaaaaa

SEQ ID NO: 4051 - DNA, 1406 bp, Glycine max
tcgagttcgagtcagctacgtaggccccccccccggcgtatgctttgttttgaaacagaagaagagtagcttctactttgtactactctctcttctttctacttactactaccagcataacatttttcttgtccttatatccttatatataaataaaattaactttctctcccgtgtttttgttctctctaccattgagcaaacaaaaagaatctttgggagatcggagaggtcatcgtcgtcatttctgcgctcgagattaacataaggaacaacagtgagcagggtattgtagctgaacgatatggagagaagcactccggtgaggaagccacacacttcaactgcagatctgcttacgtggcctgaaacaccaatttctcattccccaactcatccttcctccgccgttcgttctcaccagccgtcggatgggatcaggaaggtggtatttgggggtcaggtcaccgatgaagaggtcgagagcttaaataaacgaaagccttgttcggattataagatgaaggagataactggtagtggaatatttgtagccaatggagaagatgatgccttagaagatggcagtgccaacccaaataagactggagtacgtatgtatcagcaagcgatttctggaatcagccatatctcatttggtgaggaggagaatgtttctccaaaaaagcccacttctttgccagaggtggccaagcagcgtgagctaagtggaactttggaaagtgaagactctatattgaaaaagcaactctctgatgcaaagtgcaaggagcttagcggtcatgacatatttgctccgccaccagaaatcaaacccaggccaataactcctcgcatactggagttgaaaggaagcatagacattggagaacgtcatgctgatggagatcaaggcgataccaactctgctgggaagacagcaaagaagatctatgacaagaaatttgcagaactttcagggaatgacatattcaaaggggatgcaccaccttcatctgctgacaaatcgttgagcggggccaaactacgagagatgagtggcagtaacatctttgctgatgggaaggtagaagctagagactacctaggtggtgtacggaagccacctggtggcgagagcagcattgccttggtataatttattagggtctaactcatcttcataccgtcttgttttgttttaattaatttttagtggggttgtgttattatattatttgaccttgtattctgggttttgggaattggtgtttttaggtttcttgatgtcttgaccaaaaaggaccatctgctaattggttgtatgtccataatcctgtgatttcctgtgtttgcttttaatgaagtgatttgaactgtttacttgaaaaaaaaaaaaaaaaaac

SEQ ID NO: 4052 - DNA, 1040 bp, Glycine max
  misc_feature (895)..(895): n is a, c, g, or t
  misc_feature (897)..(897): n is a, c, g, or t
  misc_feature (928)..(928): n is a, c, g, or t
  misc_feature (931)..(931): n is a, c, g, or t
  misc_feature (938)..(938): n is a, c, g, or t
  misc_feature (960)..(960): n is a, c, g, or t
  misc_feature (966)..(966): n is a, c, g, or t
  misc_feature (968)..(968): n is a, c, g, or t
  misc_feature (971)..(971): n is a, c, g, or t
  misc_feature (978)..(978): n is a, c, g, or t
  misc_feature (980)..(980): n is a, c, g, or t
  misc_feature (991)..(991): n is a, c, g, or t
  misc_feature (1000)..(1000): n is a, c, g, or t
  misc_feature (1002)..(1002): n is a, c, g, or t
  misc_feature (1004)..(1004): n is a, c, g, or t
  misc_feature (1017)..(1017): n is a, c, g, or t
  misc_feature (1024)..(1025): n is a, c, g, or t
  misc_feature (1028)..(1028): n is a, c, g, or t
  misc_feature (1030)..(1030): n is a, c, g, or t
  misc_feature (1033)..(1035): n is a, c, g, or t
  misc_feature (1038)..(1040): n is a, c, g, or t
gctacggtaagaagagtgaagagtggttccaaaaagtagaagatatggtggggtccaccgctacgagtttggaagaagaagaagaggctgatgttatctatgaagaacagcatagtcagcatttcgggaacaataatggctttgattctaagtttatggcatctgcttctaagttctgggctgagaaagcctcactttgtcaggatgtacagtatgaatcccttgaatcaatgtataatacaaagcattttgttgcaagaagggagtctccctggaaggttgatggtgattctgctggagtttcctctaaacttaaattacttgaacaggacttactaaatctggagaagattggtaagagtgatccatccaaggtgccatccttgattaagaagcaggcaaagagatatcaagcaatttcagaaaaaattgatgatttatgcagaagaatagctaatgatccttgcgaaccctccctcagtacagaatttcgaacgcaaactcaaacggagtttttactggaagcatttcggcttcaactgggagcatctgaaactggacagaagctaatggcactgcaaactgaaattgggaagagccattatatttatagggatgagttaagcgagactacactgaccacaagacggtctttcgactctattaggaacaacttcaaagaaatccagcgaaatctggagatatggttggccagaattattggcgatcttgaggggattcttgcgagggaaggtgcatctcgtgtaagagaatattacatttctagatatccttttgttcaatagaatatgagaactggtggagctagctgtaggaaagcctcccttcaagctaccaagtatctcttggggtatgttatgttcactctaaaagngnagtggattcccctgaattaaatcttccaggnttntatgtgnctatcttgaaaaaaaaaaaaanaatctngnccngggatcntntttaaacggcnccccggggncncnccttgtccttagngggattnnccngngannnggnnn

SEQ ID NO: 4053 - DNA, 1154 bp, Glycine max
cttcagctcccgctctctagaaagtgcctttctctttccctctctcaacttccctacaattcatatatagccaagtagtgcagatcccgtgcagaagccaaataaaatccctttgtttgctcacataagatttgggtttcttcaaaattatctttttttttctctcctaaaaaaaaaagagaaaactttgtttgattctttgaaggaggtttgaagaaagcaaaaggtgtagttttgttttaagtttctttgaaatggttttcatgtctgagatattgttccccgaagaaaaaattgaggaaggagagtgggagaaggagagataagaagaagagaagaatacctacccagcaagcagaattagagaattttttttcacaaactgttgatttgattcattttcatctgcttctgctgggtggttggcaatgtctgctcctatgatcattgaccctatgatgatatcggcaccagaaactcaatcagcagcagctagcatactagttgcacaaagtgaagttgaatttgctgtatgtgactgttgtggactaacagaagagtgcaccccagcctatatagaaagaatcagagagaggtactttggaaaatgggtttgtgggttgtgtgctgaggctgttaaggatgaaattgtgaggtctgagagacttgtttgcacagaagaagcaatggctaagcacatgaacttctgcaaaaagttcaaggcatcagggcctcctccaaatccgacagtgcacttgatatcagccatgagacagattcttagaaggactttggattctcctagagtaaggtccacaccaaatagtccaaccaagactctcacaaaaattcatggttctgtgcttacaagatctgagagctgcttccctactctctctgaagggttgtgatgaagggaatacttgtgtatttagttggataaaaatggaagcaggaagcataaataaggacagaaaaatataagctgcaaaagtttagatgttcaattgtagttttgtccagtacagaactttcaatctgtttgttagaaaatttgaacataatttggtcaagaattttgcttcactcagaccagttacatacttttctatgccatttatttgtttgaaataagaaaaatatgttcataactg

SEQ ID NO: 4054 - DNA, 1378 bp, Glycine max
  misc_feature (1354)..(1354): n is a, c, g, or t
  misc_feature (1365)..(1365): n is a, c, g, or t
tcgagtcagctacgtaggcccccccccccaacgcttcttctttttctcttctctcatttttcagtttctcagtttcttattcgttagatctcatcttacactcaccgtcaagttcgtctcgcgccaccgtcgacgcagttccggccactgcctttggttccctcactttctgtctcttcttcttcttctcagaaatatgccttctcagaaggttgaaacgggtcatcaagacacagtccatgatgttgcgatggattattatggtaagaggctggccacggcttcatcagatcacacgattaagataattggggtgagcaacacggcctctcagcatctcgcaacattgactggtcaccaaggacctgtttggcaagtggcatgggctcaccctaagtttggttctctacttgcatcatgttcctatgatggtcgtgtcattgtttggaaggagggtaaccagaatgaatggactcaagctcatgtgtttgatgaccacaagtcatctgtgaattcggttgcttgggtgcctcacgagttgggtctttgcttggcttgtggctcatctgatgggaacatatctgttgtcactgcaagagcagacggtggctgggacactgcaaggattgatcaggctcatccagttggggtcacttcggtgtcgtgggcgccatcgatggcacccggagcccttgtcggtgctgggttgcttgatcctgtacagaagctgtgctctggtggttgtgataatactgtgaaggtatggaagctaaacaatggactctggaagatggactgcttccctgctcttcagatgcacatggattgggttcgagatgttgcttgggcacccaatttagggctccctaaatctaccattgctagtgcatcgcaggacggtaaagtgattatatggaccgtggcaaaagatggggatcagtgggaaggcaaggttttgaatgatttcaagacacctgtttggagggtctcatggtctttgacaggaaacatactggctgtggctgatgggaacaacaatgtgacattgtggaaggaagcagtagacggggaatggcaacaggtgacaacagtggagccttagaatgtgatttgaaaatggttagaattttcgttttgaaatatagttgatatcttgttctttgcatattatacagttgattaattgtgcttcataatgcactagttccttgacgtttgtgatccattaagtattccgtgcttggaagaatgaagttgattagtttgagttgctttaagatttagaatgatgttttctaggtatataatgtggcaatatcttatattccgagaattgcataaattaatggctgtngcgtttaaaanaaaaaaaaaaaaa

SEQ ID NO: 4055 - DNA, 1543 bp, Glycine max
gtcaagaaggtcaacgaatctggtttaggtgccgggcttaaagttacgggttggcttaactgggccagaaagcccaaaggattaggacagtgagatcccataaaaacaaaacaaaaggacaaaacgacagcacttcttctcctctctcatttttcagtttctcagtttcttattcgttaatcgttagatctcatcttacactcaccggcgagtccatctcgcgccaccgtcgactcagctccggccatcgccgttgattccctcactttctcactcttcttattcttcttctcagcggaaatatgccttctcagaaggttgaaacgggtcatcaagacacggtccatgatgttgcaatggattactatggtaagaggctggccacggcttcatcagatcacacaatcaagataattggggtgagcaactcggcctctcagcatctagcaaccttgaccggtcaccaaggacctgtatggcaagtggtgtgggctcaccctaagtttggttctctacttgcgtcttgttcctatgatggccgtgtcattgtttggaaggagggcaaccaaaatgaatggactcaagctcatgtgtttgacgaccacaagtcatctgtgaattcggttgcttgggcgcctcatgagttgggtctctgcttggcttgtggctcgtctgatgggaatatatctgttttgactgcaagagcagatggtggctgggacactgcgagaattgatcaggctcatccagttggtgtcacttcggtgtcatgggcaccatcgatggcacccggagcccttgtcggtgcagggctgcttgatcctgtacagaagctgtgctctggtggttgtgataatactgtgaaggtatggaagctaaacaatggactctggaagatggactgcttccctgctcttcagatgcacacggattgggttcgagatgttgcttgggcacccaatttagggctccctaaatctaccattgctagcgcatcacaggacggtaaagtgattatatggaccgtggcgaaagagggggatcagtgggaaggcaaggttttgaatgatttcaacacccctgtttggagggtctcatggtcattgacaggaaacatattggctgtggctgatgggaacaacaatgtgacattgtggaaggaagcagttgatggggaatggcaacaggtgacaacagtggagccttagaatgtgatatttttccttttgaaaatggttagaattttcgttttgaaatatagttgacatcttgtttctttgcatattatacagttgattaattgtgcttcataatgcactaagttccttgaggtttgtgatccattgagtattttgtgcttggaagaatgaagttgattagtttgagttgttttaagatttagaatgatgttttccaagcatataatgtgacaatatcttatattccgggagttgcataaattaatggctgtggcgtttaattttggattatcgagattaatccatccccattagtaaaaaaaaaaaaaaaaaaaaagaacgct

SEQ ID NO: 4056 - DNA, 1347 bp, Glycine max
aaaaattaaaacaaatgaacaaaacgacaacgcttcttctttttctcttctctcatttttcagtttctcagtttcttattcgttagatctcatcttacactcgccgtcaagttcgtctcgcgccaccgtcgacgcagctccgaccacctcctttggttccctcactttctcgctcttcttcttctcagaaatatgccttctcagaaggttgaaacgggtcatcaagacacggtccatgatgttgcgatggattactatggtaagaggctggccacggcttcatcagatcacacaattaagataattggggtcagcaacacggcctcccagcatctagcaactttgactggtcaccaaggacctgtatggcaagtggtgtgggctcaccctaagtttggttctcttcttgcgtcgtgttcctttgacggccgtgtcattgtttggaaggagggtaaccaaaatgaatggactcaagctcatgtgtttgatgaccacaagtcatctgtgaattcggttgcttgggcgcctcacgagttgggtctctgcttggcttgtggctcatctgatgggaatatatctgttttcactgcaagagcagatggtggctgggacactgcaaggattgatcaggctcatccagttggtgtcacttcggtgtcatgggcgccatcaatggcacccggagccctcgtcggtgcagggttgcttgatcctgtacagaagctgtgctctggtggttgtgataatactgtgaaggtatggaagttaaacaatggactctggaagatggactgcttccctgctcttcagatgcacacggattgggtccgagatgttgcttgggcacccaatttagggcttcctaaatctaccattgctagtgcatcgcaggatggtaaagtgatcatatggaccgtggcgaaagagggagatcagtgggaaggcaaggttttgaatgatttcaagacccctgtttggagggtctcatggtcattgacaggaaacatactggctgtggctgatgggaacaacaatgtgacattgtggaaggaagcagtagatggggaatggcaacaggtgactacagtggagccttagaatgtgatttttcgttttgaaaatggttagagttttcgttttgaaatatagttgacatcttgtttctttgcatattatacagttgattaattgtgcttcataatgccactagttccttgacgtttgtgatccattgagtattctgtgcttggaagaatgaaagttgattagtttgagttgttttaagatttataaaaaaaaaaaaaaaaaaaaaaaaaaaaaaaaaaaaaaaaaaaaaaaaaaaaaaaa

SEQ ID NO: 4057 - DNA, 1408 bp, Glycine max
  misc_feature (1384)..(1384): n is a, c, g, or t
tcgagtccgctcagctacgtaggcccccccccactctcatcttttcagtttatctgtttctcaatcgttagatctcatcttatactcaccggcgagtccatctcgcgccagcgtcgacgccgctccggcaaccgctccggccaccgcctttggttccctcactttctcgtccttcttcttctcagaaatatgccttctcagaaagttgaaacgggtcatcaagacacggtccatgatgttgcaatggattactatggtaagaggctggccacggcttcatcagatcacacaattaagataattggggtgagtaatacggcctctcagcatctcgcaacattgactggtcaccaaggacctgtttggcaagtggcgtgggctcaccctaagtttggttctctacttgcatcgtgttcctatgatggtcgtgtcattgtttggaaggagggcaaccaaaatgaatggactcaagctcatgtgtttgatgaccacaagtcatctgtgaattcggttgcttgggcgcctcacgagttgggtctttgcttggcttgtggctcgtctgatgggaatatatctgttctgactgcaagagcagacggtggctgggacactgtgagaattgatcaggctcatccagttggtgtcacttcggtgtcatgggcgccatcgatggcacccggagcccttgtcggtgcagggttgcttgatccagtacagaagctgtgctctggtggttgtgataatactgtgaaggtatggaagctaaacaatggactctggaagatggactgcttccctgctcttcagatgcacacggattgggttcgagatgttgcttgggcacccaatttagggctccctaaatctaccattgctagcgcatcacaggacggtaaagtgattatatggaccgtggcgaaagagggggatcagtgggaaggcaaggttttgaatgatttcaacacccctgtttggagggtctcatggtcattgacaggaaacatattggctgtggctgatgggaacaacaatgtgacattgtggaaggaagcagttgatggggaatggcaacaggtgacaacagtggagccttagaatgtgatatttttccttttgaaaatggttagaattttcgttttgaaatatatagttgacgacatcttgtttctttgcatactatacagttgattaattgtgcttcataatgcactaagttccttgacgtttgtgatccattgagtattccgtgattggaagaatgaagttaattagtttgagttgttttaagatttagaatgatgttttctaagtatataatgtgacaatgtcttatattccggagttgcataattaatggctgttgcgtttaattttgaaaaaaaanaaaaaaaaaaaaaaaaaaaaaaaa

SEQ ID NO: 4058 - DNA, 1429 bp, Glycine max
  misc_feature (1051)..(1051): n is a, c, g, or t
  misc_feature (1318)..(1318): n is a, c, g, or t
gtcaagaaggtcaacgaatctggtttaggttcctggcttaaagttacgggttggctgagcggggccagaaagcccagaggattaggacagtgagatcccataaaaacaaaacaaaaggacaaaacgacagcccgctcgcgcttctctcatttttcagtttctcagtttcttattcgttaatcgttagatctcatcttacactcaccggcgagtccatctcgcgccaccgtcgactcagctccggccatcgccgttggttccctcactttctcactcttcttcttcttcttcttcttcttcttcttcttcttcttctcagcggaaatatgccttctcagaaggttgaaacgggtcatcaagacacggtccatgatgttgcaatggattactatggtaagaggctggccacggcttcatcagatcacacaatcaagataattggggtgagcaactcggcctctcagcatctagcaaccttgaccggtcaccaaggacctgtatggcaagtggtgtgggctcaccctaagtttggttctctacttgcgtcttgttcctatgatggccgtgtcattgtttggaaggagggcaaccaaaatgaatggactcaagctcatgtgtttgacgaccacaagtcatctgtgaattcggttgcttgggcgcctcatgagttgggtctctgcttggcttgtggctcgtctgatgggaatatatctgttttgactgcaagagcagatggtggctgggacactgcgagaattgatcaggctcatccagttggtgtcacttcggtgtcatgggcaccatcgatggcacccggagcccttgtcggtgcagggctgcttgatcctgtacagaagctgtgctctggtggttgtgataatactgtgaaggtatggaagctaaacaatggactctggaagatggactgcttccctgctcttcagatgcacacggattgggttcgagatgttgcttgggcacccaatttagggctccctaaatctaccattgctagcgcatcacaggacggtaaagtgattatatggatcgntgccaccgacggccaccagtgggaaggcaaggttttgaatgatttcaacacccctgtttggaggagactcatggtcattgacaggaaacatattggctgtggctgatgggaacaacaatgtgacattgtggaaggaagcagttgatggggaatggcaacaggtgacaacagtggagccttagaatgtgatatttttccttttgaaaatggttagaattttcgttttgaaatatagttgacatcttgtttctttgcatattatacagntgattaattgtgcttcataatgcactaagttccttgagggttgtgatcccattgagtattctgtgcttgaaacaatgaagttgattagttcgagttgttttaaaaatttca

SEQ ID NO: 4059 - DNA, 816 bp, Glycine max
tttttttttttttttttttttttttttttttttttttttttttttttttttttttttttttttttcggaaggaataaaatgggttcataaaataggatttgtttcataatacaagcaatacaatgtgacaagcaacgctctagctcatagcgcaagacaaggcaaaacaggaagcaaccctggctcctaataataaaccacaacattgatacacacacataaataatagtctgtcttcttttctttcccccattgcagctcacttttacagcacaaaatataaattccgtagaattcgcttatggctctacagctcttatctttgagaaaatactgtgacgctagttacacataaacattgttcttctgttcaggcttttcacaggagcaaccattgctatgctatgattcggcagaagggttttgcatgcagcaaaaccattttttagtttgagttttgccaggctctactgcaggtttgctatgaggatcagtggcagtctttcctggtgaatctgggttaccacctgtctttttctcatccctggccttattaaaaatcactgtgaacccctcagctgaggttggatcattgacatcccattcaccaaattttggaagtggccggcccttttccgacatcaatacgacgaggaaatgttttcagggaaaggaaaaggagcgagtaaactccaattaataaaaggaatcggagagaggagaaaattcagagagagagagagagagagattgagttagagagagaaagtgcgagatgacgatgcacttccaaaagagtatcagtgaagtcggaat

SEQ ID NO: 4060 - DNA, 885 bp, Glycine max
gaatttcttcctcgattttccatttccataaccttagtcatcctcttctttcatctttctccctaacggtaataacaatacaaatctcaatctttctttcttttttctgttttctctgcttttattttagggttttgaaatttgtgatctcaccggtggatcgcttccggtctcgtttcaggtatcgagggaaaaatatggcggaagaacacagatgccaggcaccgcgcttctgcgccaacaattgcggtttctttggcagccctgccacgcagaatatgtgctccaagtgctaccgcgatttccagctcaaggagcagcaatcttccaacgccaagatggttctcaatcagtcgctggttccttcaccgccaccggcggtgatttctcagccgtcgtcttcttcttcggccgcggtagatccgtcatcggcggtggttgatgacgcgccacgcgagtcggaggaggttaaggcgccgcagcagaaccggtgtatgacgtgcaggcggcgcgtggggctcacagggttcaagtgtcggtgcgggatgatgctgtgcgggacccaccgttacccggagcagcacgcgtgcgagttcgacttcaaggggatggggagagagcagatcgcgaaggcgaatccggtggtgaagggcgagaagctcgacaagatctgaaacgaatgaacgaagggtgttatggtaatttcgtgtttatcaagttggtggtgatggataacggatgcgaaacgcgggtcggatcattgacccgtaaaaggcggtgggtgagtgggtgagtttggtgggtcattgttatgtggttgcgttgtcattgtaaattaaaaaatttgaaaaacatttcaattgtcattcaccttctttctgtttg

SEQ ID NO: 4061 - DNA, 1061 bp, Glycine max
  misc_feature (1)..(1): n is a, c, g, or t
  misc_feature (1054)..(1056): n is a, c, g, or t
ngatagactcgttgttgcgctccgtttggttacagaatacaaacaaacaaatagaaaacccaaaataaccgagaaaagaaaattagatagagagaagaagaaagcgtatctggaattttcgtttcgttggtgtgtcgtgtgcgtgtggaggttcttttctttgagactttccttcaaattctagattgcttccctttcttttctttcccttataaccaccaacctctccctttcccccttttcatttcttcctcgattttccatttccataaccttagtcatcctcttctttcatctttctccctaacggtatcgagggaaaaatatggcggaagaacacagatgccaggcaccgcgcttctgcgccaacaattgcggtttctttggcagccctgccacgcagaatatgtgctccaagtgctaccgcgatttccagctcaaggagcagcaatcttccaacgccaagatggttctcaatcagtcgctggttccttcaccgccaccggcggtgatttctcagccgtcgtcttcttcttcggccgcggtagatccgtcatcggcggtggttgatgacgcgccacgcgagtcggaggaggttaaggcgccgcagcagaaccggtgtatgacgtgcaggcggcgcgtggggctcacagggttcaagtgtcggtgcgggatgatgctgtgcgggacccaccgttacccggagcagcacgcgtgcgagttcgacttcaaggggatggggagagagcagatcgcgaaggcgaatccggtggtgaagggcgagaagctcgacaagatctgaaacgaatgaacgaagggtgttatggtaatttcgtgtttatcaagttggtggtgatggataacggatgcgaaacgcgggtcggatcattgacccgtaaaaggcggtgggtgagtgggtgagtttggtgggtcattgttatgtggttgcgttgtcattgtaaattaaaaaatttgaaaaacatttcaattgtcattcaccttctttctggttgaaagctgctactatttctaattcaaaaaaaaattttgcacnnntattg

SEQ ID NO: 4062 - DNA, 797 bp, Glycine max
cccccgcccgggtgcgaagcagtttgcagcatagcactatctcgaaattgttcattttcctctaatctatggatcccgaaacagcgttagaacttgtcaagcacggtgtcactctcctcttactcgatgttcctcagtacacccttgtcgccgtcgatactcagatgttctctgtggggcctgcttttaagggtattaagatgattcctccaggcgttcattttgtgtattatagttcatcaagcagggatgggaaggagttctcatcaattattggattttttattgatgctggcccttcagaggtaattgttcgtaaatgggatcaacaagaggaaaggttaatcaaattatctgaggaagaggaagaaagatatagtcaagctgttaaaaatttggaatttgacagacaacttggaccttacaatctcagccattatgaagattggaaacaattatctaattttatcacaaagagcgtcattgaacggcttgagcccattggaggtgaaattactgttgaatgtgaaaatgagatagttagaaatgctactaaaatgccaatggaggacgcactaggcaagcagctgaaggttggtaattctgcaacatctgttggcaagtcccggaggaaaggatgttattatacctcaattccacatgttgtgaaatgcaaggggattagtgggcaggaacttacttctttgaatcttgacaagacacatttgttagaaactctactgacaaaagatatggagattctgaagacttgcttcttggagactgcagtttgcatt

SEQ ID NO: 4063 - DNA, 998 bp, Glycine max
  misc_feature (844)..(844): n is a, c, g, or t
aattcggcagttaccgcgtggggagtgagcagccagggcgggtccccctcgggaggccccccccccccgtagatagtcggtaagtttatcaacattgcaagggatgatttagaaatgagaaatgtgagcacccctttgaccctaaaatcttcaaattgctctgaagctattggcttgaagtcaaatatttctgataatatggaaatcagaaacttgagtagtcctcctaacttaaaatcttcaagttgcaccgacttgatgaacatcaaatcaagtttttctgatcatcttcttgttaggaaacaagatgtgaaaaacactgattctcttgtttcaaaatctgattcctccgagtataccaaacataacactcctacagctgcagaggaaacacccccaaaggaaattttggatgttaaatcttccaggcagagagctgaagcacttgaaggtctgttggaattatctgcagatttgctgcaacaaaatagattggaggaacttgcagttgttctgaagccctttggaaaagataaagtctccccaagggagacagccatttggttagccaagagtctaaaaggattgatgatcgaggaaagtgggggacgcagttaatgagtgttttttaatccatggtgagtttgcttctatttgatattttcaatttactttttccactttcatagcttttcaagtgctacttgaattgagagaacaaacaggcttatcgttttttctttcattttttgtaattctttttatgctgatgtaaatagtaaccatacgaatgaataccatcaacttacgatcaattgtgtggacatggccaggccttattaanaattgatgtgcgcgctcagtgttctacctagatggtcaactccaatcatgctgtaatgaaacaaatagaaaacgattatgcatcaaaaagaaaacaattgagttaatgctatattctaccaatactttatactttcaaaaaaaaaaaaaaaaaa

SEQ ID NO: 4064 - DNA, 1138 bp, Glycine max
tacggctgcgagaagacgacagaaggggctacaagtgagggatcgcaaaggagtgttttggggcgggttaaaatgcaacgataacggttgaaatagaaaaaagaaaaacagtgttttggtgaagctgagaaaacaaaggtttagatcacctctgaaattctgctatggcctcaaccagatcactcattctttgtctgttcattcaactgtgcttctaccttctacccctctcattcgctcaatcccccgccaccgggtctgccgaaggttacaccatttatggtcgagtgaagatccccagtgtgggaacaaaagattatattcttcctggaaaaatttcaaatgtcaaagtcatactcaatggtggtcaaagagttacttttctgaggcctgatggatatttcgcattccacaatgttcctgccgggacacatctaattgaagtggctgcaataggctatttcttttctccggtacgagttgatgtaagtgccagacaccatggcaaaattcaggcagcactgacagaaaataggaggggacttagtgagtttgtcttggagccattgaaggatgaacaatattatgaggttagggagccattctctattatgtccattgtgaaaagtccaatgggtctgatgatgggatttatgctgattgttgtcttcctcatgcccaaattaatggagaacatggatccagaagaaatgaggcgtgcacaagaagaaatgagaaatcaaggagttccatctttagcaagcctgttacctggtgctgcaagaagcaactaggtgtatgagtaacggaaaaccagtgagcaagttggttacccccaagcaggagctgaaaaaatgacatacgatgattggagaattttcttgtgacaaattgatagcgatggaaatctttcgattatttatgtagtgaattagtaaaaatttgaaatttctgatagaggtttatatgtttgatttgaacagtcgggagtaggtttctacgtaattcttgttcactttctcgtcaatgttgataaccatgcactgatggatgattttttttttttttggtttacttatagaaactgttaatttccgaaaaaaaaaaaaaaaaaaaaaaaaggtattgatttatgatc

SEQ ID NO: 4065 - DNA, 1136 bp, Glycine max
acggctgcgagaagacgacagaaggggaccaaaaaaactactagtgagggatcgcaagggagtgttttggtgcgggttaaaatgcaacgataactgttgaaatagaaaaaagaaaaacagtgttttggtgtagctgagaaaacaggtttaaatcacctctgaatttctgctatggcttcaaccagatcagtctttcttcttcttttcattcaattgtgcttctcacttctacccttgtcattcgctcaatcccccgccaccgggtctaccgaaggttacaccatttatggtcgagtgaagatccccagtgtgggaacaaaagattatattcttcctggaaaaatttcaaatgtcaaagtcatactcaatggtggtcaaagagttacttttctgaggcctgatggatatttctcattccacaatgttcctgcagggacacatctaattgaagtggctgccataggctatttcttttctccggtacgagttgatgtaagtgccagacaccatggcaaaattcaggcagccctgacagaaaataggagggggctaagtgagtttgtcttggagccattgaaggatgaacaatattttgaggttagggagccattctctattatgtccattgtgaaaagtccaatgggtctgatgatgggatttatgctgattgttgtcttcctcatgcccaaattaatggagaacatggatccagaagaaatgaggcgtgcacaagaagaaatgagaaatcaaggagttccatctttagcaagcctgttacccggtgctgcaagaagcaactaggtgtactagtaaaggaaaaccattgagcaagttggttaccccaagcaggagctgaaaaaatatggcatacgatgattggagaattttcttgtgacaaattgatgccgatggaaatcttttgattatttatgttgtggattataaaaaatttgaaatttctgatagagaggtttatatgtttgatttgaacagtggggagtaggcagaactcgtcaatgttgataaccatgcactgatggataatttttttttggtttacttgtagaaactgttaatttccacttttggtccttttgcttgaaaaaggaattgatttatgatctgttttggctgcc

SEQ ID NO: 4066 - DNA, 1382 bp, Glycine max
ttaccttgcctgtttgtccttaacatgcgtgctgggaaattgtgacgtccgtaaagtttcctgagtttcatcactgagtttgcgtctcggaatacttaatataagagcagattgatccaatgtagctgcggttgctgtaatcctataacctttatcccaacgtttatggatgccctcacttggatagagaaaatctagtttaaccacctgtttactgaatccagcatttcgagatatttctacaccccaacgacttccaggagtggccattgaagtgacatgaaaaccttctctccacttcttgtttatccattgaaggggaaagattcactcactttgtaggattgttgagtatactgcgtaccttttgacatcaccacaagagagctgccattgttgctccctgcaatagaagtaatgtaaaagtttttatcccactgctccattatccattccttgtgcaagaaaaaggttgacaacttgtaaacttgagctgtaaaaccagttccagcatccataataagagcccaaagattgcaacaagaagacacacaactaataagaaggccatctgcaacccctctctcaacatgctgttctaatcttgcatcagacacattataatggtacctttgtttcattggcagtcttgcattgtaaattgaaatccattgtgtagcaggaacccctaaacggaccttctttcttggctgtgattcatcatcttcaacattcaatctaccccgcttttgcccaaccttttgggcaccttcagtattaattggccgcaatgctggattgggtccaatcgtaccatcaaacaaagatattagcttggaataattaggttcttcatcaaatttcatattcactacaatctcaagaaaatgcctaaaaggaggaggacacaagcagcatagcgtctcaggagatgtccccatcttctttttgcaaacaaggaaggatttgctatcaccctggtaaccttgccatggtaatcggcccttatggaggaagactagtgtgtatgcaagagattcaagatcatctcttctactagcagttctccccaaatgagcatgaacactagcatatcgaacagttcctctaaacatatcaggacgttgatcatagtccacatgctgtccactggaggtgtctctccattttgttgctaatccaaggtcaacaagaaacagtttcttctcttgcgctgtagctggttgaccaagtaaaaagttttctggttttacatccccatgcacataaccttttgagtgcatcttctcaagtattgataaggactcaaccgctatacatgagaccatttcagaagacatcatctggcttgaggtattccagctcgagccgatcggctcgag

SEQ ID NO: 4067 - DNA, 2795 bp, Glycine max
  misc_feature (2726)..(2726): n is a, c, g, or t
  misc_feature (2795)..(2795): n is a, c, g, or t
aataggaatctcagctgtactacctttaatattatattaaagagaagatgtcatacagcttaattgcttcttattacaagaatgtcatggagataataaatctgaaaaacctcagcaacatacctgattgaatattagttgaattaagcacgcagcatgcagagacaaaatataaaaccttgaataaacataatggaggaacatataaagctaaacaacattcattactctgcaacattccccatcccagtaaagcatataatagaaggggagggacagggaacagaacaatattcttataacataacaaaataaggttctctgctggcacaacaattagttcctttctacaaaaagatcttttgtggtggggcagatgacaactcataatccgcttgtcaataaaatgctttaaaatgtcatggaaatcagcatactgtgcgtccgtagcacaaacaggcaaggtaaaggttttttgaccatttttccttaacatgtgtgccgggaaattgcgatgtacgtagagtttcctgagtttcatcactgagtttgcgcctcggaatacttaatataagagcagattgatccaatgtagctgcggttgctgtaatcctataacctttatcccaacgtttatggatgccctcacttggatagagaaaatcaagttcaaccacctgtttactgaatccagcatttcgagacataacaacaccccagcgacttccagcagtagccattgaagtgacatgaaaaccttctctccacttcttgtttatccatttgaaggggaaagattcactcactttgtaagattgttgagtatactgcgtaccttttgacatcaccacaagagagctgccattgttgctccctgcaatagaagtgatgtaaaagtttttatcccactgctccataatccattccttgtgcaagaaaaaggttgacaacttgtaaacttgagctgtaaaaccagttccagcatccataataagggcccaaagattgcaacaagaagacacacaactaataagaaggccatctgcaacccctctctcgacatgctgttctaatcttgcatcagacacattgtaatggtacctttgtttcattggaagtcttgcattgtaaattgaaatccattgtgtagcaggaatccctaaacggaccttctttcttggctgtgaatcatcatcttcaacattcaacctaccccgcttttgcccaacctgctaaacttttgggcaccttcagtattaattggccgcaatgctggattgggtccaatcgcaccgtcaaacaaagatattagcttggaataattaggttcttcatcaaatttcatattcactacagtctcaagaaaatgtctaaaagggggagggcacaagcagcacagtgtctcgggagatgttcccatcttctttttgcaaacaaggaaggatttgctatcaccctggtaaccttgccatggtaatcggcccttatggaggaagactagtgtgtatgcaagagattcaagatcatctcttctactagcagttctccccaaatgagcatgaacactagcatatcgaacagttcctctaaacatatcagggcgttgatcatagtccacatgctgtccactggaggtgtctctccattttgttgctaatccaaggtcaacaagaaacagtttcttctcttgcgctgtagctggttgaccaagtaaaaagttttctggttttacatccccatgcacataaccttttgagtgcatcttctcaagtattgataaggactcaaccgctatacatgagaccatttcagaagacatcatctggcttgaggtattccagagatcccacaaacttggaccaagtatgtccataaccatcacataatattctccttgtcttcctttatagtgtacttttgggattccataactacccccaagggtgttgtatacttgccactcgtaaggagggccatagttacagcccttactgttcctatgttcaaatttcagagccacctccacagctccagcacctgttgcacgctcacgacggccaacaaaaacctgaccaaatccacctttacccaattttctctctaccttgtacatgggcgatcctcccacttgaaccctatcaggaaaaggtggagtggtggcatcctcctcaggcttattgccactcaagccaccgctttcgtcacccatattcacgcccacaccaacttcctttttctcttctttcgccggctccagtatcgggatcaacggttccggtatcggtgtcggtggtatcgggatcaacggctcctgaagctccaattccttcgccgccaatcgagtcctgggtctccctctcggcgccgcacgagccttcacctccttccttgcaggttccgatgctttctggccacggccacgcccccgtcgcacaccactacgaagctctggcattctctaaacccatgcaatcgattcgcagttccgataacctccctcgtcatatgctctaccggaacaccgatgcacgattcatgcctgaaattggaagaacgaaacggaagacagagagaaaatttgtcggaagatgtcacgatagcaatgggaatggggttttaaatcgagtgatgaggatgaggattagggttagggtttgatgagtgaacaaactcgggagcagattaatcgggaaagggaaagtagcgggaggcaagctcgaccctcnccctcccagatgaaaatgaaagcgaaaaatatatgattttttttaaaaaaaataataataattctcgtn

SEQ ID NO: 4068 - DNA, 2046 bp, Glycine max
ttaaaactattggactctttattcacaaggaaaactatccatacaatgtttttattagactagtcacggaaacaatcttgaaaatcagacaaaaaaaaatgataaaacctacatataatacataatggagtaacatataaagccaagctgtatacattaactgccacatcccccacccccaaggaacttgtaatagaatgggaggggagagagaataatactaaagatacaacaattctctgctatgttatacttgattgggccattacaaaatatataaatttcagacacaatacgttgacctgtgaaggaaattagcatactgtgcgcccatagcacaaacaagcaaggtaaaggttttttgaccatttttccttaacatgtgtgcttggaaattgagatgtacgcagagtttcctgggtttcatctcctggcctgcgcctaggaatgctaagtataagagcagattgatcccatgtagcagccgttgctgtaatcctataaccattatcccatcgtctgtggattccctcactaggatagagaaaatcaagttcaacaacctgatcactgaatccagcatttcgtgacataacaacaccccaacgacttccagcagtagccattgaagtcacatgaaaaccttctctccacttcttgtttatccatttgaatgggaatgagtcacttactttgtatgattgttgtgtatactgtgtgccttttgacatcaccacgagagagctcccattattagcccctgcaatagaagtaatgtaatagttcttctcccactgttccatgatccattccttgtgtaagaaaaatggtgacaacttataaacttgacttgaaaagccagttcctgcatccataataagggcccagagattggaacaagaagccacacaactaatcagaaggccatcagcaatccctctctccacatgttgtgctaatcttgcgtccgctacattgtaatggtacctttgcttcattggcagtcttgcattgtaaactgaaatccattgtgtagcaggaacccccaaacgaaccttctttttgggctgtgaatcatcctcttcctcaatattcaatctacccctcttctgcccaaccttttgagcaccttcagtgttaattggcctcaatgcaggattcggtccaagcataccatcaaacaaagatattagcctggaatagttaggttcttcatcaaacttcatgtttactacaatctcaaggaactgcctaaaaggagcagggcaaaaacagcatagcatctcaggagatgttcccatcttctttttgcaaacaaggaaggatttatgatcaccctgataaccttgccagggtaacctgcctttatgaaggaagatgagtgtatatgcaagagattcaagatcatcccttctactagcagttcttcccaaatgagcatgaacactggcatatcgaacagtccctctaaacatatcagggcgttgatcatattcaacatgctgcccactggaggtgtctctccactttgttgctaatccaaggtctacaagaaacaatttcttttcttgtggtgtagaaggttgacctagtaaaaagttctctggttttacatctccatgcacatagcctcttgcatgcatcttctccaggatcgacagggactcgactgcaatacatgcaaccatttccgcagtcatcgcctggcttgaggaattccaaacatcccacaagcttggaccaagcatgtccatcacctgcatacgtacccaaataaaaatgttctatagtaaagttggtgacgagaaaataaaatggttgttgtgtaggtcataccatcacataatattccccttgtctccctttgtagtgtactttaggtattccatgactgccaccaagggtgctgttcacatgccactcctttagagagataaaaaaactcaggcaatttcacttaaacacaaatcttgtgcataaccgaaagcaatcgtcgacacatatctcttgcaacataaacaaagcacctacttgtacctcaagccg

SEQ ID NO: 4069 - DNA, 1999 bp, Glycine max
gcacgagcgtagactggtccgtggcgcacaccaaacatgaagatgatatcgacgaatagagagaagggtggtaggtggtagccacttgtctttctctcccttcataatttacactcattgccaccaaccatcaccaacctcccttttttttttttttttttttctttttctctctcaactcaactcaacatctcagctacgtaggccccccccccggtgagtgtttttgttcctcaatcaatctaattctctcaatggcttcttctctctccaccaaaccattctcatcaaccgacgctctctccgccttcgcttctctcaatcccgatctccgatccttctcccccggctacctccgtctctcactccgtcctcgtcttcccaagagacttcagatacgggctgctgggagtatctatggaaatcactttcgtgtttcaacatatggagaatcgcatggaggaggtgttggttgtattattgatggatgtcctcctcaccttcctctctccgaagctgatatgcaattggatcttgacagaaggaggccaggtcagagccgaattacaactcctagaaaggagactgatacatgtaaaatattttcaggagtttctgaaggacttactactggaactccaattcatgtatttgtacccaatactgatcaaagaggacatgactatactgagatggcagtagcttataggccttcccatgcagatgctacctatgacatgaagtatggtgtcagatccgttcagggtggtggtagatcttctgcaagagaaacaattggaagggttgcttctggtgctgttgctaagaaaatccttaaagacttttctggaactgagattcttgcctatgtctctcaagtttataatattgttcttccagaggaccttattgatcatgacactctgactcttgatcagattgagagtaacattgttcgatgtccagacccggaatatgcagagaagatgatatctgcaattgatgctgtgcgagtgagaggtgattctgttggtggtgttgtaacatgcattgtgaggaactgtccacgtggtctcggttcaccagtatttgacaaacttgaagctgaactagctaaagctgctatgtcattgcctgcaaccaagggctttcagtttggtagtgggtttgcaggcacctttttgactgggagtgaacacaatgatgagttctatatagatgaacatggaaacacaagaacaagaacaaatcgctctggtgggatacagggtggaatttccaatggggaaatcattaatatgagaatagctttcaagccaacatcaacaattggaaagaagcaaaatactgtgactcgagataaaaaagaaacagagtttatagcccgtggtcgccatgatccttgtgttgtcccaagagctgtacctatggtagaggcaatggtagctttggttcttgtggaccaattgatggcacaatatgcgcagtgtaatctgtttcccgtaaactcagatttgcaagaacccctggtgcccatattacggccagaagaagcgcttctctgaagatgaagggggtgcataaaccagtaattggccttggataaaatcttccttctggctagtgtttagttggcggttaattcactttgatgacaagtccaagttccccccttgcgagcattcggctcctggtcgcattgtggcagatatttttgcgggtgcaatctatcgttttgtattaatgtaagttaaactatgtttattttcttctctcctattttctttttgagggtgaacattgtttccggtaaaccttgttgcaaaagcacagagataggggcattcttaaaagtgaactgatattaaaaattgtaagaaatgtatcagtttttggtctcaataagtgttgctatgcttttcaataaatgaaagctttggcaagtttaactggctgttcaaaaaaaaaaaaaaaaaaaagggcggccggtttacaggat

SEQ ID NO: 4070 - DNA, 1884 bp, Glycine max
tttgattatatggaagactagagagacatggtggtaggtcgtcgcgggtagccaaattgtacataatttacactcattgccaccaaccaacctttttcctttttctctctcaagtctcaactcaacaaccgaacttgatagatactgtgagtgtttttgttcctcaatcaatctaattctcccatttctcttccaatggcgtcttctctttccaccaaaccattctcagccgacgctctctccgccttcgcttctctcaattccgatctcggatccctctcccccgcctacctccgactctcactccgtcctcgtcttcccaagagacttcgcatacaggcggctgggagtacctatggaaatcactttcgtgttacaacatatggggaatcacatggaggaggtgttggttgtgttattgatggatgtcctcctcgccttcctctctctgaagctgatatgcaagtggatcttgacagaaggaggccaggtcagagccgaattacaactcctagaaaggagactgatacatgtaaaatattttcaggagtttccgaaggaatcactactggaactccaattcatgtatctgtacccaatactgatcaaagaggacatgactatagcgagatggcagtagcttataggccctcccatgcagatgctacctatgacatgaagtatggtgtcagatcagttcagggtggtggtagatcttctgcaagagaaacaattggaagggttgcttctggtgctgttgctaagaaaatccttaaagaattttctggaactgagattctggcctatgtctctcaagttcataagattgttcttccagaggacctgattgatcatgacactctgactcttgatcagattgagagtaacattgttcgatgtccagacccggagtatgcagagaagatgatatctgcaattgatgctgtgcgagtgagaggtgattctgttggtggtgttgtgacatgcattgtgaggaactgtccacgaggtctcggttcaccagtatttgacaaacttgaagctgagctggctaaagctgcaatgtcattgcctgcaaccaagggctttcagtttggtagtgggtttgcaggcacctttttgactgggagtgaacacaatgatgagttctatatagatgaacatggaaacacaagaacaagaacaaatcgctctggtgggatacagggtggaatttccaatggggaaatcattaatatgagaatagctttcaagccaacatcaacaattggaaagaagcaaaagactgtgactcgagataaaaaagaaacagagtttatagcccgtggtcgccatgatccttgtgttgtcccaagagctgtacctatggtagaagcaatggtagctttggttcttgtggaccaattgatggcacaatatgcgcagtgtaatctttttcccgtaaactcagatttgcaagaacccttggtgcccatactacggccagaagaagcgctcctctgaagaggaagggggtccataaatcagtaattggcctttgataaaatcttccttatggctagtgtttaattgacacggttaattcactttgatgacaagtccaagtgaacattgtggcagatatttttgcgggtgcaatctatcgttttgtattaatgtaagttaaactatgttttcttttcctctcttcttctattttcattctgagggtgaacattgtttctagtaaaccttgttgcaaaagcagagatagatgtattcttaaagtgaactgatattaaaaattgtaagaaacgtatcagtttttggtcttaataagtgttgctctgctttgcaataaatgaaagctttggcaactttaactggctgttcacattatgcatt

SEQ ID NO: 4071 - DNA, 3371 bp, Glycine max
cagatgtgtgaagccaaataatgttctcacgcctgctatctttgaaaatctcagtattatccaacaattgcgctggggtggtgttcttgaggcaattagaatcagctgtgctggatatcctaccagacggaccttttatgaatttcttaaccgatttggtgttcttgcccctgaagttctggatggcacccgtccggacaaggttgcgtgccaaatgatcctggataaaatgggtatgaaaggctatcagataggcaagacaaaggttttcctaagagctggccagatggctgaattggatgcaagaagagcagaggttcttggaaatgctgctagaatcatccagaggcaagtacgtacccatattgcacgcaaggagttcattgaattgcgccgagctgcaatttgctcgcaatctactttgcgaggaatattgtcccggaaactttatgagcagttgcgacgtgaagcaggagctgtaaaaatacacaagagcttcagcggatacattgccaggaaatcatacttaacagggcgatcatctgcagttatactgcaaacaggtttaagggctatgaaagctcgtgatgaatttagatttagaaagcaaacgaaggctgcaacttacatccaggcttatttgcgtcggctaattgcatattcatattataaaagattgcaaaaggctgcagttgttactcaatgtggttggaggagaaggattgctagaagggaacttagaatgcttaaaatggctgctagagaaacaggggccctcaaagaagctaaggacaaactagaaaagcgtgttgaagaacttacttggcgtttgcaaattgagaaacgtttgagaactgatttggaagaggaaaaggcacaagaaattgctaagttacaggaagctttacatgcaatgcaaatacaagtagaagaagcaaataccaaggtcatcaaagagcgcgaggcagcacgaaaggccattgaagaagcacctccagttgttaaggagactcctattataattcaagatactgaaaagattaattcattattggctgaagtcaatagtttgaaggaatcactcctattggaaaaagaggctaaagaagaggccagaaaagctcaggctgaggctgaagctagaaataaagagatggttaaaaaggttgaagattctgaccgcaaagtggatcaacttcaagaattggttcagagattggaggaaaagatttccaatgcagagtcagaaaatcaagttcttcgccagcaagcactggctgtatcaccaactggaaaagctctatctgcgagaccaaggacagtgattattcagaggacacctgaaaatgggaatgctctaaatggtgaagcaaaaattggatcggatatgactcttgctgtatccaatgtgcgtgaacctgaatctgagggaaaaccacaaaaatctctcaatgagaagcagcaagaaaaccaggacttgttgatcaagtgcataacacaagatttgggattttctgggggcaaacctgttgctgcatgtgtcatatataaatgtcttctccactggaggtcatttgaagttgaaaggacaagtgtatttgaccgtataattcaaacaatagcttcagctgttgaggcccaggataatactgatgtattagcctattggttgtctaatacatctactttgttgttgctactccaacgcactcttaaagctagtggagctgctagcttaacaccacagcggcggagaacagcgtcatcttctctgtttggaagaatgtctcaagggctaagggcgtctccccaaagtgctggattgtcatttctaaatggtcgaggtcttaatagactggatgatttacgacaagtagaagcaaaatatccagcactgctgtttaagcagcagcttactgccttccttgaaaaaatatatggaatgataagagacaacctaaaaaaggagatatctccattacttggactgtgtatacaggctccaagaaactcgcgtcaaagtctagtaaaaggacgtgcacaggcaaatgcagttgctcagcaagctttaattgctcactggcaaagtattgtgaaaagcttaaacaattatctaaagataatgaaagccaactatgcaccccctttcttggtccgaaaagtgttcactcaaatattctcattcatcaatgttcaattattcaatagtcttctgttgcgtcgggagtgttgttcgtttagcaatggagagtatgtaaaaacaggtctggctgaattagagcagtggtgcatcgaggcaacggaggagtatactggctctgcttgggaggaactgaaacatatcaggcaggctgttggattcttggtgatacatcaaaaacccaaaaagtccctgaatgaaattacaaaggagctttgcccagttctcagtatacaacagttatacaggataagtacaatgtactgggatgacaaatacggcactcacagtgtgtctacggacgttataacaaacatgagagctatgatgtctgaggactctaataatgctgtcagcacttctttcctattagatgatgactcgagcattcctttttcggtggatgacatttccaaatcaatgcacccagtagaagtagcagacgtggatcctcctccgttgatacgtgagaactcagggtttgggttcttactagcacggtcagagtgatacaaatacccaatgaatattgtctctgatgctccatcttgtggctatccccggggtattgcaccaaggtgcaggtgccaagctgtgcatataatttcgttgttgtcacgtgtatagtatattttagccaactcaggcttctaatattggtttgttgcccgggttaattcatttttacccctcaagtttcatcaacacgaggggtttttttaagaagccatgtcactattgatgtgagtcatgtgataaatggcggtcataggtaaaggctggtggtgtccaggcattctgtcacacctgccaaggttcttttttcgtatgggttggttttcaagtgttataggtggatgcaattagtgactccatgtattttataggtgggcatatttgtttcatgcgattgcttttttgtatttacttgtgcaatattctttctttcttttttcaaaattaaacttaagatagttttttttttttttaaatactgagtcataatggaagatgactcagtgcacctgtacagacgtgagatcatttatttgagtttcatttttttaagagttaactgtatcttgaaataccatgttgaaaactactgggaggaccagcgttatgtgaacaccatcagaagtagaaatttcaacgtgaaatttacatctag

SEQ ID NO: 4072 - DNA, 853 bp, Glycine max
tacaggataagtacaatgtactgggatgacaaatacggcactcacagtgtgtctacggacgttataacaaacatgagagctatgatgtctgaggactctaataatgctgtcagcacttctttcctgttagatgatgactcgagcattccgttttcggtggatgacatttccaaatcaatgcaacaagtagaagtagcagacgtggatcctcctccgttgatacgtgagaactcaggatttgggttcttactagcacggttgggagtgatacgagtaacccggtgattattgtatctgatgctccatctcgtggctatcctcagggtattgcaccaaggtgcaggtgccaagctgtgcatataatttcgttgtattcacgtgtatagtgtattttagccaactcaggcttctaacattggtttgttgcctgggttaattcatttttacccctcaagtttcatcaacgctaggggttttgttcagaagccatgtcactattgatgcatgtcatgtgacaaatggcggtcataggtaagagctggtgtccaggcattctgtcacacctgccagggttctttttccatatgggttggttttcaagtgttaaatgtggatgcaattagtgactccatgtattttataggtgagcatatttgtttcatgcgattacttttttgtatttacttgtgcaatattctttctttcttttttcaaagttaaacttaagatagttttttttttttgaacgactgagttataatggaagatgactcagtgcacctgtacagacatgagatcatttatttgagtttcatttctttttaagagttaaaagaaaaaaaaaaaaaaaaaa

SEQ ID NO: 4073 - DNA, 2426 bp, Glycine max
  misc_feature (635)..(635): n is a, c, g, or t
tttaacttaattaaccaaactgctcgtctcgttccgcgtcgtcgtttcctccaatcatcacaacaacacagtgatggtggcgctgtcgctgttgggggaaaaaaatccgaatccaaaggtggtagtagatgacgagaaaagccgaaggcggagaagcatcccagacgcaaacaaactcggacaatggttagaaacatgacacggaagtactgcaaaaagtagaaggagggaagaagaacgctctcatcactttattcatttcatttttggaccttacggagagcccctttcttgtcccttccctctctcgacaccactatttattcttactttctgctctctatctctctcgcgccgcatgttgctcgatttctatttccaacaacaccgcagcgtcgtagaattactactctctttctttcttcgtctctttgttccttcttcggccatgtcgctcaagcgccgccccgatgatgggaagactccagacgacaagcgtagaaagcctcctcctttctccagtgtggtgcgtgacgtgatgaagttacaatcactcgggcatttgctggagccaattctagagcccttggttcgaaaagtggttaagcgagtcagctacgttggggcccccctanagacccctttaaccagcatgaaacagacctgtggaaaggagtttcatactactgaattaagaaatttgcagctgcagtttgaaaacagcatttgtcttcctgtctttacaggagctcgaattgaaggagaggatggctccaacttaagaataagtttagttgatgccctaacagggaaggttgttagtacaggacctgaatcgtcagctaaggtggaaattgtagtccttgagggtgattttgaagaggaaagtgaaacttggatgcctgaagagttcaagagcaatattgtgagagagagggaaggaaaaaagccccttcttacaggagatgtaattttatatcttaaagatgggattggtatggtgggtgaaatttcatatacagataattcaagctggacaaggagccgtaggttcagacttggagcaagagttgtggacaactttgatggtgttagaataagagaagcaaagacagaatcattcattgtcagggatcacagaggagaattgtacaagaagcaccatcctcctagtctgtctgatgaagtttggagattggaaaaaataggcaaggatggagctttccacaagcgcttgagtcgggaaaagatccttactgttagagagtttctcacacttctcaatctggatccagcaaagctgcgcagtatactgggcactggtatgtctgcaaagatgtgggaagtaactgtggagcatgctcgaacttgtgtacttgatacaacgaggcacgtgtacttcccttctaattctcaagaacctggtgtggtcttcaatgctgtgggacaagtgacaggactgctttctgaatgcgagtatgtcacagtagataagctgactgaaactgaaaaggctgatgctcaaaactcagttactgctgcattaagacaaggggagaaatacacaacttttgaagatgaagactctctcatggatgggtcttcacacttaactaatgtactctactccccaagctctcccaagactgagggatcaagtgccaacaagattttggctccccaaaagactggaggattcaattacccgccagcaaatgcctcttccccagatatcatgtcatccatttattctgttggtggaactagtagcttggatgactattgcttgcctaattttgacagcatgggccttagatatgatcagaccctcagttttccagtccaagtttccaactctttgatctgtgacactgattcaatggctcatgcttttagtgatgaagaccatctgcagttttttgatactgatcttcaatcgcatgttcaagcagatctacagagtgctattgatagcttcatgttggcacgtcccacagccaatggtggtgcacaaaggagatggagaaaggtatgcaatgtcctaaaatggttcatggttaggaaacgaggaaaccaaatacaggtaaggttgtgaagaacatgaaggttcagttactattgtacattgtgctcatgaatgcagcaaaaaaaaatattttgtccccctcatagagaaaagttatgatttctcttagttgtaaatacatctatgcatttgttcttatagctggctagatgtcatagaatttccctatccttttgttattaggttgtaaatacttgtattttacagtcaggagaggatttctggttgatggctgatgcttggtaatttcaagatccagcgacctttattgatcatatttttgtaagcatgttttgtccaataaaatcagtttttccccctgagaaaaaaaaaaaaaaaa

SEQ ID NO: 4074 - DNA, 1178 bp, Glycine max
  misc_feature (7)..(7): n is a, c, g, or t
  misc_feature (1143)..(1143): n is a, c, g, or t
tcagctncgtaggccccccccccgtggtttcccttgcccctcaacacccagtgatggtggcgctgtcgctgttggggaaaatccgaatccaaaagtggtagtagatgacgagaaaagcccaaggcggagaagcatcccagacgcaaacaaactcggacaatggttagaaacatgacacgcaagtactgcaaaaagtagaaggagagaagaagaagcgctctcgccgctttattcatttcatttttggaccttacggagacacccctctttcttgtcctctaccctttacttctctccacacagtatatatgttactttctgcttggtttcgtcttcctctctatctctctcgcaccgcatgttgctcgatttcatcaccaccgctgcgtagaactctctttctttcttcgtctgtttcttccttagaccatgtcgctcaagcgcccccccgatgatgggaaaactccagacgacaagcgtagaaagcctcctcctttctccagtgtggtgcgtgacgtgatgaagttacaagcactcgggcatttgctggagccaattctagagcccttggttcgtaaagtggttaaggaagaagttgttttttttctaaagaggcatttaaccagcatgaaacagacctgtggaaaggagtttcatactactgaattaagaaatttgcagctgcagtttgaaaacagcatttgtcttcctttctttacaggagctcgaattgaaggagaggatggctccaacttaagaataagtttagttgatgccctaacagggaaggttgttagtacaggacctgaatcgtcagctaaggtggaaattgtagtccttgagggtgattttgaagaggaaagtgaaacttggatgcctgaagagttcaagagcaatattgtgagagagagggaaggaaaaaagcctcttcttacaggagatgtaattttatatcttaaagatgggattggtatggtgggtgaaatttcatatacagataattcaagctggacaaggagccgtaggttcagacttggagcaagagttgtggacaactttgatggtgttggaataagagaagcaaagacagaatcattcattgtcagggatcacagaggagaattgtacaagagcaccatcctnctagtctgtctgatgaagtttggagattggaaaaa

SEQ ID NO: 4075 - DNA, 1263 bp, Glycine max
taacactaattaatgtgaatcatatcaaataatgaaaagtaaataaaattgtaattaactctatatgtatacacacacaaataataaataatagtaaaaaaaaattatgataaatatttaccatctcataaagatatttaaaataatgataaaaatatagattattttttatgcaactagctagccaaaaagagaacacgggtatatataaaaagagtacctttaaattctactgtacttcctttattcctgacgtttttatatcaagtggacatacgtgaagattttaattatcagtctaaatatttcattagcacttaatacttttctgttttattcctatcctataagtagtcccgattctcccaacattgcttattcacacaactaactaagaaagtcttccatagccccccaaaaatgaagagcaccatcttctttgctctctttctcttttgtgccttcaccacctcatacctaccttcagccatcgctgatttcgtgctcgataatgaaggtaaccctcttgaaaatggtggcacatattatatcttgtcagacataacagcatttggtggaataagagcagccccaacgggaaatgaaagatgccctctcactgtggtgcaatctcgcaatgagctcgacaaagggattggaacaatcatctcgtccccatatcgaatccgttttatcgccgaaggccatcctttgagccttaagttcgattcatttgcagttataatgctgtgtgttggaattcctaccgagtggtctgttgtggaggatctaccagaaggacctgctgttaaaattggtgagaacaaagatgcaatggatggttggtttagacttgagagagtttctgatgatgaattcaataactataagcttgtgttctgtccacagcaagctgaggatgacaaatgtggggatattgggattagtattgatcatgatgatggaaccaggcgtttggtggtgtctaagaacaaaccgttagtggttcagtttcaaaaacttgataaagaatcactggccaagaaaaatcatggcctttctcgcagtgagtgagacacaagtgtgagagtactaaataaatgctttggttgtacgaaatcattacactaaataaaataatcaaagcttatatatgccttccgctaaggccgaatgcaaagaaaaaaataatactcgttaaattaaacactttactagtacgtattaattactacttaatcatcttgttacggctcattatat

SEQ ID NO: 4076 - DNA, 1522 bp, Glycine max
attaatatttgtcgctaaaagaatatctgatgtgatagaaaaaggaggaacgcagaccgaggcgtttccagttcgaaagggaaatgaaagtgtctttgttggtgaagggtaggtgagagaaacgaaaggggtgtgtgttgggttgaataggtatagataggatcaatgagcaacaacaacgcaggaaaggtggtgtgtgtgacgggtgcttctggtttcatagcttcatggatcgtcaaattccttctccaacgtggttacactgtcagggccaccgttcgctacccaagtaatctgaaaaaggtagatcacttggttaaacttgagggcgcaaaagagaggttgcagctgtttaaggcagatctgttggaagaaggttcctttgactctgttgtggaaggctgtcatggtgtttttcatactgcttcacctgtccgttttgttgtcaacgacccacaggctgaattgcttgatcctgcagtgaagggaactcttaatgttctcaaatcatgtgcaaaatcaccatctgtcaaacgggttgttttaacttcttctatttctgcagttgcatttaatcgaagacctaaaactcctcaagtggtagttgatgagacatggttttcagatccagatgtctgtagggaattagagttgtggtacacactttcaaagactttggctgaggatgctgcctggaaatttgtaaatgaaaacagcattgacatgatttctattaacccaactatggtggcaggacctctcttacaaccagagattaatgaaagtgttgagccaattttaaacctaataaatggtaaaccatttccaaataaatcttttggatgggtcgatgtgaaagatgttgctaatgctcatattctggcctatgaaattgcttcagctagtggaagatattgtttggttgagagagtcatacactactctgaacttgctacgattttacgtggtctgtaccccacattacaaattccagataagtgtgaggtagatgagccgtatatcccaacataccagatttccacagaaaaggcaaaaaaggacttgggaatagagtttactcctttggaagtgagtctcagggagactgtggaaagctttagagaaaagaagattgtcaactttaatccgtgatctatcctaaataaataaatgtcgatgatctcaaccacgttcaatttgtgactatgataaatgtcaggcttcagaaggaattatcactgtaaaatatggattgcaaacaggttaacattgtttgatgaaggaccgaatataaaaggataaattgtatataaattcctgaactttgggcgaattatgctttgtccttttttatgaatttcaactgtacaatgttcgagtacaaacctctcgtgatttcttcccccgatctccttcgatttattcattgaagaaagttaatgtacgatagggaaaaaataaagatatcaaatgtaacattactcgagtttttttgggtgttgagggtgtatttttgggagaa

SEQ ID NO: 4077 - DNA, 987 bp, Glycine max
  misc_feature (3)..(7): n is a, c, g, or t
  misc_feature (10)..(10): n is a, c, g, or t
  misc_feature (12)..(13): n is a, c, g, or t
ggnnnnnttnanncgattgggtaccgggccccccctcgagtcagtacgtaggcaaaaaaaaaacctttttgtttggggttttctgattaactctttcttctcataactctgccgccgcaacagccccaaatccaatggcttcagagaagaaactttcgaacccaatgagggagataaaggtgcagaagctcgtcctcaatatctccgttggcgagagtggagatcgtctcaccagagccgctaaggtgttggaacagcttagtggccaaacccctgtgttttccaaagcaaggtacacggttcgttcctttgggattagaagaaatgagaagattgcatgctatgtcactgtcagaggtgacaaggcaatgcaacttttggagagtggtttgaaggtgaaggaatatgaacttctcagaaggaacttcagtgatactggttgctttggctttggcattcaggagcatatcgatttgggaatcaagtatgatccttcaactggtatttatggaatggacttctttgttgttctggagcgtcctggctatcgtgtgggacgtcgccgaaggtgcaagtcccgtgttggaatccagcaccgtgtcacaaaggaggatgctatgaagtggttccaggtgaaatatgagggagtgatccttaacaagtctcaggcgattgtttagttagattgagttcatttcaggggagtgtttttatcagttttgtcaactatctttctgggatagtatcttaattttgaggcaggttttgaatcaatgtttctcatttcagttttgtgatgaagcacatgtattaacaatagcccttttaaacgacacttttattgcaacaagaacatgtgagacacttttaaatgcattctctttattgattatttattgaaaatgatcaaattttgtgggtcttaaaaaaaaaaaaaaaaaaaaaaaaaaaaaacaaaaaaaaaaaaaaaaaaaaaaaattaaaaaa

SEQ ID NO: 4078 - DNA, 897 bp, Glycine max
tacgccctgggcacggctccgggagcccggcaggccccgcgtttgattagggtttgtcattagcacttcttcttttcacactgccgctgcaacaatggcttcagagaagaaactttcgaacccaatgagggagataaaagtgcagaagctcgttctcaatatctctgttggcgagagtggagatcgtctcaccagagccgccaaggtgttggaacaacttagtggccaaaccccagtgttttccaaagcaaggtacactgttcgttcctttgggattagaagaaatgagaagattgcatgctatgtcactgtcagaggtgacaaggcaatgcaacttttggagagtggtttgaaggttaaggaatatgaacttctcagaaggaatttcagtgatactggttgcttcggctttggtattcaggagcatatcgatttgggaatcaagtatgatccttcaactggtatttatggaatggatttctttgttgttctggagcgtcctggctatcgtgttggacgtcgccgcaggtgcaagtcccgggttggaattcagcaccgtgtcacaaaggaggatgctatgaagtggttccaggtgaaatatgagggagtgatccttaacaagtcccaggcaattgtttagttagattgagttcgctgtaggattgtgttatcagttttgtcaactatagctcaatctttctgtgatagtatgttaattttgaggcaggttttgaatcaatgtttatcatttcagtttcgtcatgaagcatatggattaacattagccctgattaaacggcacttttattacgaagaactcgtgcacccccctcgttatgcgaccatgcttggcaaaaaaaaaaaaaaaaaaaaaaaaactcgagactagttcctcgt

SEQ ID NO: 4079 - DNA, 825 bp, Glycine max
ctcttctcctgcgttagggttttttcgcttcttctattcactctgttacggtgcaacctagcagcctccaaatccaatggcttcagagaagaaactttcgaacccaatgagggagataaaagtgcagaagctcgtcctcaatatctctgttggcgagagtggagatcgtctcaccagagccgccaaggtgttggaacaacttagtggccaaaccccagtgttttccaaagcaaggtacactgttcgttcctttgggattagaagaaatgagaagattgcatgctatgtcactgtcagaggtgacaaggcaatgcaacttttggagagtggtttgaaggtgaaggaatatgaacttctcagaaggaacttcagtgatactggttgctttggctttggtattcaggagcatatcgatttgggaatcaagtatgatccttcaactggtatttatggaatggatttctttgttgttctggagcgtcctggctatcgtgtcggacgccgccgaaggtgcaagtcccgtgttggaattcagcaccgtgtcacaaaggaggatgctatgaagtggttccaggtgaaatatgagggagtgatccttaacaagtcccaggcaattgtttagttagattgagttcactttagtttgaaggcaagttttgaaacattgtttgtcatttcagtttcatgatgaagcatatggattaacatgagccctgtttaaactgcacttttattgcaaagaacttgtgaaccccacgttatgcaattatgcttggcaattcacttagttttctttgcaaccaaaaaaaaaaaaaatctcctcgt

SEQ ID NO: 4080 - DNA, 923 bp, Glycine max
gggggttttctcattaacgcttcttctctcttcactctgcgaaggtgcaacctgacagcctccaaatccaatggcttcagagaagaaactttcgaacccaatgagggagataaaagtgcagaagctcgtcctcaatatctctgttggcgagagtggagatcgtctcaccagagccgccaaggtgttggaacaacttagtggccaaaccccagtgttttccaaagcacggtacactgttcgttcctttgggattagaagaaatgagaagattgcatgctatgtcactgtcagaggtgacaaggcaatgcaacttttggagagtggtttgaaggtgaaggaatatgaacttcttagaaggaacttcagtgatactggttgcttcggctttggtattcaggagcatatcgatttgggaatcaagtatgatccttcaactggtatttatggaatggatttctttgttgtactggagcgtcctggctatcgtgtcggacgccgccgtaggtgcaagtcccgtgttggaattcagcaccgtgtcacaaaggaggatgctatgaagtggttccaggtgaaatatgagggagtgatccttaacaagtcccaggcaattgtttagttagattgagttcactttaggagcgtgttatcagttttgtcaactatagctcgatctttctgtgatagtatgctaattttaagggaagttttgaaacattgtttgtcatttcagtttcgtgattaaagcatatggatcaacattagccctgtttaaacggcacttttgttgcaaagaacttgtgaacccctcgttatgcaattatgcttggcaaaaaaaaaaaaaaaaaaaaaaaaaaaaaaaaaaaaaaaaaaaaaaaaaaaaaaaaaaaaaaaaaaaaaaaaaaaaaaaaaaaaaaaaaaaaaaa

SEQ ID NO: 4081 - DNA, 677 bp, Glycine max
ggaaccacgacactggatccaggtaggaagggaaggggaagggatgaagtaaagaacagaactaaacactaactggatcaaaactaaagggtattcttccggcgattgtattgtatattgacgctcacagatttctgggagcgacagttgcaacttcgattcgacttgaagagagggaggaaggtggaaattggcaaattataagaatacgctgaaatgtcagcgcttttcaatttccattcatttctaactgtgatacttctgggaatatgtgcctgcacttatttcaagatgcagtttccggcgatccttgaccagaaaactgggtttcgtggtttcttctggaaggcggcaagaataggtgaacgtttaagcccgtgggtagctgcgggttgctttatgatgggcgtttcaataatcttcttctaagttttgttttactcaatagggcgtccgttctatgcttgaccgcagtttgatatgcaaaattcagatttctaaattcaaattatttgcagatctacaaaatgagagcttgtacttttgatttcattggagcccctgaaatcatagagttagctatctattttttttcgttgttgaaacgaattggagtttttgccattaatccccaagtttattacatggaattcgaatttctagcttaaaaaaaaaaa

SEQ ID NO: 4082 - DNA, 2289 bp, Glycine max
ggctcgagtgtctgtcagtcccatttcatttcacctctctttcctaacccccaacgccacgccactgtcactttctttctctcacaaatcacaatgtgctccgataactacaatctctcaattccccattaattaaaatcaaaatcaaaatctaatctgggtttctcccatcagaggacaaagcttccgactttgcgggattcgttcgtatttgtttcagtgctgtgatggggaaggtcgcggtgggagctgccgttgtctgcgccgccgccgtatgcgctgcggcggcgctggtggtgcgccaccgcatgattagttcccggaagtggagtcgcgccatggcgatactgaaggagtttgaggagaagtgtggcaccccaattgtgaagctaagacaagtggctgatgccatggatgttgagatgcacgcgggtctcgcatctgaaggtggtagcaagctcaatatgttgatcagttttgtcgataatctcccaactggggatgaggaaggcctctattatgcactggatcttggcggcacaaacttccgtgtccttcgtgtacatttaggggggaaagacaaaggtgttatcggccaggagtttgaagaagtttcaattcctccaaatttgatgactggctcttcagatgcattgttcgattttatagcagcagctcttgcaaagtttgttggttcagaacctgaaggttttcatcctccccctggcagacaaagagaactgggttttacattctcattcccagtgaggcaaacatcgattgcatctgggactctaataaagtggactaaaggtttcaatattgaagatgcggttggtgaagatgtggtgggagaactaaccaagtccatggaaaaaattggcctggatatgcgcgttgctgctctagttaatgataccattggaacattagctggaggcagattctacaatcaggatgtcattgctgctgtgattcttggtactgggacaaatgcagcatatgtagaacgagcacatgctattccaaaatggcatgggcttataccaaaatcaggagatatggttataaacatggagtggggtaatttccgatcatcacatcttcctctaacagaatatgatctagctctggatgctcagagcttaaaccctggagaacagatttttgagaaattgatttctggcatgtatttgggggaagttgtaaggagagctttattgaagatggccgaagaagctgacttttttggcgatactgttccccccaaattgaaagttcctttcatacttaggacgcctgacatgtcagccatgcaccatgacacaagttctgatctgaaagtggttggaaacaagttaaaggatatattagagatctcaaacacatcccttaaaatgaggaagatcgttgttgaactgtgtgacattgttgctactcgcggagctcggcttgctgctgctggtattttgggcatccttaagaaaataggaagagacacagttaaggttggggagaagcaaaagtcagtgatagcgttggatggggggttgtttgaacactacaccaaatttagagaatgcttggagagtgcactgaaggaattgctgggagatgaggctgctgagaccattgtcattgagcatgctaatgatggctctggcattggtgcagccctcctggcagcttctcactcccaatatttgggagtggaggagtcttaaattttattgccaaacaagggaaagacgtgtaatactagtttcattttttgcataggtggtagatcaacacattgaagcaatggtgccttgcagctggtgactgggggggcattcattattttggtttcagtgtttgtttctccttcgttaaggaataatatcaaagatataaacttcatcttgagtgactagacaccttttgcggaatgtagccaacgagaataaagcaggacttaatgtattgacaagcctaaatttgtttttatttcaaagcttttctgagttatcaatgaagactaaagcattgtttctgttattgttggtgttgcagtcatttgcatgacttaggcaccctccattttggttaccctgtctggaacataatgaaacttgctccctctcggggggttgaatggatgttttcatatcttttctagaggacgagcaaagtaaacatattttttggtaattgccatgagaggagagggtgtattacagtgtattttatgataattgccgcatttatggaaataaataaatggcagacttcaaaaaaaaacaaaaa

SEQ ID NO: 4083 - DNA, 1141 bp, Glycine max
ttttttatgtcttgtttcttgaaactataagaagggtcttttctctctttctatttatctcatctcataccctttaatgtaccccagagagatcagagagaatcaaaataccactttcttagtttcaaactcaactttttgagggtcttttctgtattaaaaacacaagagttagtcttagctaacagtgttcatatgatgaatgcttcaaagttcattaaatgtgttactgttggagatggagctgttgggaaaacctgcatgctcatttgctacaccagcaacaagttccccactgattacataccaacagtatttgataattttagtgccaatgttgctgtggatggaagcattgtcaatttggggctatgggacacagcaggccaggaagactacagcaggttgaggccattgagttatagaggagcagacatttttgtcttagcattctcactgattagcagagctagctatgaaaatgttctcaagaagtggatgccggaattgcgtagatttgcacctaatgttccaattgttcttgttggtacaaagttagatcttcgtgaagaccggggttatgtagctgatcacatgggatctagcgtcataacatctgctgagggggaagaactgaggaaacaaattggtgcagcagcttacattgagtgcagttcaaagactcaacagaatgtcaaagcagtgtttgacactgcaattaaggttgttctccaacctcaacctccaaggaggaaagaaatggcaaggaagaaaaggcatagaaggtctggttgctcatttgtaagtattatgtgcggaggctgtgctgcttaatacgcacatcaattgcaccgtcacttacttttgaactggatgttattttgcaaaagcttcaagatctaagtgtggaaaccctgacatctgatcgcatatctaaatgtatccttatgcttgtattgtaacttatgtaagatgtaagatagtaatatccagttatttccactttacattttacaagaccctattagacactgaagggaatttttcattctctcagttatgtatttattttatattgccaatttttgccattttttccttgaaaaaaaaaaaaaaaaaagcggccgctctagaggatcca

SEQ ID NO: 4084 - DNA, 956 bp, Glycine max
atacggctgcgagaagacgaccgcagcacacccattaattgtgacaaaacccataaatcctctcaccaaataaacctcaatttattgcattgcataataccatgtcaatgaagttgtatgcttccctcacccttacggtgtggcttttcatggccacattttcgcgagcccaatacgttattgacacaaatggcgaacccgttgacaatgatgatgagtattacatcaggccagccataaccgacaacggagggcgtttcaccttgatcaaccgaaacgggtcgtgccctctctacgtgggtcttgaaaacaccgatacgccacttggttatccagtgaaatttacccattttgccctcaacgttcaagatgaggatataagggtgaacagcgacttgagaatcgaattcgtggaagtttccacaacgtgtgtgcaatccacggaatggagggtgggtgagaacgacacgaggagtggaaggaggctcatcatcactggcctagatgataattttggatccattggtaactattttagaattgtggaaacgcaaagtgttggtatctataacatcgagtggtgccctatggaaatatgctccgattgtggattcgtttgtagcactggtggtattttgcgtgaggatggaaggattttctttgccttggatggtactccacttccagttgtgtttcagaaaaaagatgattaatttgaagcactaagtttgaagaatattgtggccgtttagtcatagttctttttatggtaaatagggattaatatatgatatatggagctatcatccatttattttaggaagaaataaagatacgtgtattcagtattctgttcttgatttgaataaagctcctaattgttatgagtttgtaattcatttgctactttggttattatatattatacttcttttatttcaaaattaaaaaaaaaa

SEQ ID NO: 4085 - DNA, 575 bp, Glycine max
ttccggcattcattcattcatacggtttccttctaaagcacaacactaaagttcagcaatcagtactctcaagaagagaattacaagatcatcatcacaataacaatatgagttcaggaattagagcatggagtgtggcaactagcgttggagttgtggaggccttaaaagaccaaggtatatgtaggtggaatcatgctttaagatcagctcaacaccatctcaaaaaccatgttggttcattctctcaggctaacaagctttcttcttctgctatgagctccacaacactaaaacatgggaagacaaatcagtcagaggagtcattaaggactgtcatgtacttgagctgttggggtcccaattagatgccataaggccaataaaaaaattgattctttctctttcaatttctagaaatgaaacttagtctcaaaggatgatgatggttgagatttctggggtcatactgtatagtattgaaagattgcttgcctgatgtgacaatcagtttgtaaattttgttaaatgataatgtttagcattgccaaatttatgtctccagttttcttccc

SEQ ID NO: 4086 - DNA, 3654 bp, Glycine max
cctcgcgccccggcgcctcaaccttgccttgccatggcctcaaactccatggctggcttgatcaccggttcgaattctcacttctcgcgtgactccgatgagcatcagactcctcctacccgacaggcttcatcgaaaactacttgtcgagtttgtggcgatgagattggatacaaggaaaatggggagctgtttgtggcttgtcatgtgtgtggatttcctgtttgccgaccgtgttatgagtatgagaggagtgaagggaaccagagctgtcctcaatgcaacactcgctataagcgccacaaaggttgtcctagagtagctggagatgaagaggacaactttgatgcagatgattttgatgatgagtttccggttaagaatcatcgtgaagatctagatcggaaccatgatgttaatcatgtggaaaatggggactacaatccagagaagttgcatcccaatggtcaagcattctcttcagctgggagcgttgctggcaaggatttcgaaggggacaaagaattctacagcaatgcagaatggcaagaaagagtagagaaatggaaagtcaggcaagaaaagagaggtcttctaaacaaagaagacggaaaagaagatcaaggtgaagaagatgattaccttttggctgaagctagacaaccattgtggcgcaaggttccgatatcttcaagcttaatcaatccatatcgcatagtgatcgtgatgaggctggtcatcctttgtttcttcttccgattccgtatcttaactccagcaaatgatgcatatcccttgtggttaatctctgtgatatgtgagatatggtttgcactgtcatggattcttgatcagttccccaagtggttccccatcacacgtgaaacttacttggaccgtttgtccttgaggtttgagcgcgaaggggagacaaacgaactagctccagttgatttctttgtgagtacagtggaccctttgaaggaacctcccattataacagccaacactgtcctttcaatcctctctgtggactatcctgttgacaaagtcagctgctatgtctcagatgatggtgcatctatgcttctgtttgattccttggcagaaactgctgaatttgcaagaagatgggttcccttttgcaagaagtataacattgagccaagggctcctgagttttacttttctcagaaaattgattacttgaaggataaggtgcagcctacatttgtgaaggaaagaagggccatgaagagagaatatgaagaatttaaggtgaaaattaattctttagtggcaaaggctcagaagaaacccgaggaggggtgggtgatgcaggatggaactccatggccagggaacaacactcgcgatcatccaggaatgattcaggtatatttaggaagtgccggtgcgctagacgtggaaggcaaggaacttcctaaacttgtgtatatttcacgtgaaaaacgtcccggctatccacaccacaagaaagcaggtgccatgaatgctttggttcgagtttctgctgttcttacaaatgcaccattcatgttgaatctggattgtgatcactacgtcaataatagcaaggcagtcagagaggccatgtgctttttaatggaccccaaccttgggaagaagctgtgctatgtccaatttccacaaagatttgatggtattgatcgccacgatagatatgctaaccgaaacacggtgttctttgatatcaatatgaaagggcttgatgggattcaaggtccagtatatgttggtactggaactgtgttcaacaggcaggcattgtatggctacgatccaccagtatctgagaaaaggccaaagatgacatgtgactgctggccatcatggtgttgctgttgctgtggtggttcaaggaagtccaagtcaaaaaagaaatcaggaaaaggtctcttcagtgtgttctccaagaacaagaacaagaagaaaatgatggggaaagactatgttagaaaagggtcagggtccatgtttgatcttgaagagattgaagaagggcttgaagggtatgaggatctagagaaatcatccctcatgtcccagaaaagttttgagaagcgattcgggcagtcaccagtgttcattgcttccaccttgatggaaaatggaggacttcctgaaggcacaaatagccaatcattggttaaggaggccatccatgttataagctgtggctatgaagagaagactgaatggggcaaagagattgggtggatttacggctcggtcacagaagatattttgactggattcaagatgcactgcagagggtggaaatcagtatattgcatgccaaagcgaccagcattcaagggatctgccccaataaatctatcagatagattgcaccaagttctgaggtgggctcttggctctgttgaaatttttcttagtcgtcattgcccgttgtggtatggctatggaggaaaacttaagtacctacagaggatggcttacaccaacaccattgtttatccatggacttccatccctctgcttgcatactgcacaattccagctgtgtgtctcctgactggaaagttcatcatccccacactaaacaaccttgctagcatttggtttatggctctatttatctccatcattttaactagcgtgctggagctccgatggagtggtgttaccatcgaagccctttggcgtaacgagcaattttgggtcattggaggtgtttctgctcaccttttcgccgtgttccaaggcctcctcaaagttcttggtggagtagacaccaacttcactgtgacagcaaaagcagcagaggacactgaattcggagagctctatctcttcaagtggaccactcttctcatccctccaactactctcataatcttgaacatcgttggagtcgtggccggagtctctgatgccatcaacaatggatatggttcatggggacctttgtttgggaagctgttctttgccttctgggtcattgttcacttgtaccctttcctcaaaggtctcatgggaaagcaaaacaggactcctaccattgtagtgttgtggtcaatccttctagcatctattttctcattgatttgggtcaggattgatcccttcttgcccaagcaaactggtccagtgctcaaacaatgtggggtggaatgctaataagactctgtggagaggccatgttgatgtcccaatgataagagttaattgcacttgtgtgcatgcttttattttcttactgctattgagtggtttgccttaattagaagagttatctgtgtacatagtcttaaaagaggaaagttgggtctgattggaatgtattcatttgatgatacaacaaaaccatatattgtagtatagccattgtcattgtttgggaaaacatgttctgtgttttggtgctactagatgatttttcatctattgagaataagaatatatatttttgccaacttcaaaaaaaaaaaaaaaaaaaaaagaaaaaaaggggaaccacctagttctatacgcggcccccaccgcggtcgaccccccaccttttccccctttccgtgcgcccctactcctccccccgccggctaccctccctccccctcttcgcctttccccccctccccccctttt

SEQ ID NO: 4087 - DNA, 1248 bp, Glycine max
  misc_feature (66)..(66): n is a, c, g, or t
tcactacgtaggcccccccccccattttgactggattcaagatgcactgcagagggtggaaatcantatattgcatgccaaagagagcagcattcaagggatctgccccaataaatctatcagataggttgcaccaagttctgaggtgggctcttggttccgtcgagattttccttagtcgccattgccccttgtggtatggctatggaggaaaacttaagtacctacagaggatggcttacactaacaccattgtttatccatggacttccatccctctgcttgcatactgcacaattccagctgtgtgtctcctgactggaaagttcatcatccccacactgaacaaccttgctagcatttggtttatggctctatttatctccatcattttaacaagcgtgcttgagctccgatggagtggtgttaccatcgaagctctatggcgtaacgagcaattctgggtcattggaggtgtttctgctcacctttttgctgtattccaaggcctcctcaaagttcttggtggagtagacaccaacttcactgtcacagcaaaagcagcagaggacactgaatttggagagctctatctcttcaagtggaccactcttctcatccctccaaccactctcataatcttgaacatcgttggagtcgtggccggagtctctgatgccatcaacaatggatatggctcatggggacctttgtttgggaagctgttctttgccttttgggtcattgttcacttgtaccctttcctcaaaggtctcatgggaaagcaaaacaggactcctaccattgtagttctgtggtcaattcttctagcatctattttctcattgatttgggtcaggattgatcccttcttgcccaagcaaactggtccagtgctcaaacaatgtggggtggaatgctaagactatgtggagaggccatgttgatgtcccaatgagaagagtaaatggcacttgtgtgcgtgcttttttattgtcttactggcattgagtggtttgccttaatgagaagattaatctgtgtacattgacttaaaggggaaaattgggtctgattggaatgtcttcatttcaagatacaacaaaaccatatactatagccattgtcattgtttgggaaaacatgttcttagttttggtgctactggatgatttttcatctactgaaacttgattcttgagaataagactaatattttttgccaaaaaaaaaacaaaaaaaaaataa

SEQ ID NO: 4088 - DNA, 2108 bp, Glycine max
aatcattcttcgctccttctcttcccattagcacggcttctctttttcccatgcactcgtcccagatgagaaatgcttccaagttgctgcaccacgaacgcgctcttttggttcgttggttttccggcgatgctcaatcctctctcaaccgaaaccgcgatgtgtggaaaactcaattccacgagtcttcaacaacaagaagtgtctttgaaccggcctccagctttaataaacgttcatttggtatgcagaagagaaacatctccatggctaccattaaaagaggttccttatcgggtttgggttcaatggagaaatttcgcgaagttcacaggtgctgtcaaggagatgctatgcgtcagcctcagatctccccccacaccaggaaattggaatgccttctctctcacctacaatgacagaggttcctactattttaatcttatgagattgctgtatagtgggtcatgatttctcctaaattattcccaatgatattcagggtaacattgcaagatggttgaagaaagaaggtgataaaatctctcctggtgaagtgctctgtgaagttgaaactgataaagccactgttgaaatggaatgtatggaggaaggttatctggccaagataatccgcggggatggggcaaaagaaattaaagttggtgaggtaattgctgtaactgttgaagatgagggagatattgcaaagttcaaagattatcaaccttcagcatctgaaccaagtgcagcccctgccaaagaaatatctgccccacctacaccaaagaaagaagaggaggtagaggaacctggccgagaacctgagccaaaggtttctaaacccagtgcaccaccctcatctggagatcgcacatttgctagtcctcttgctagaaaattgggcgaagagaaaaatgtacctctctctagcattaaaggaacaggacctgaagggctcattgtgaaggccgacattgatgattacttggcttctggtgctaaagaagtttcagcatcctccaaggccaaggttgcaacagatgcagcattggattatactgacattcctgtctctcagatacggaaggtcacagcttcacggctactattatcaaaacaaactattcctcattactatttaacagtagatacatgtgttgacaaactcacgagtttgcggacccaactcaattcattgcaagaagcctctggtggctcccgcatatcagttaatgaccttgtaatcaaggctgctgctttggctctccgtaaagttcctcaatgtaacagttcatgggcaaatgattatattcgccagtataataatgtgaatattaatgttgctgtgcagactgataacgggctctttgttccagtcatcagggatgcagacaagaaaggcctctctacaataggggaagaggtcaaacaattggcaaagaaagccaaagaaaacagcttgaaaccccaagattatgagggaggtacatttacagtgtctaacctgggagggccatttggtgtcagacaattctgtgcaatcatcaatcctcctcaggctggcattcttgccgttggatcttctgagaggagggtcgttccgggttcaggtgctgaagagttcaagtttgcttccttcatgtctgtgaccctcagctgtgatcatcgtgttatagatggtgcaattggtgccgaatggttaaaagcattcaaaggctatattgaaaatccagagaccatgttgttgtaagaataaattgaaggctcccatgacgtactaaattcctttcaagacgttgtaggcaggggatgagattttgttcaccttggtatttctatatggcccatttgggttttgttattgtatccctgaccaatttttgattgaagtatttaatcactgaaaataaattttgcagatttgtaattcttttaataagagagggtagattaggcatttaatttaaacccaaatgttttgctctcaattgaattctgccccgtaatacagacagatcagtatgtaacattttctttgttaaatgctgcaaatatttggaagaacatgtatttaaaatgtccgcgcgtcggcatcgtcacttgtt

SEQ ID NO: 4089 - DNA, 2195 bp, Glycine max
tacgacctcgcggtttcggtccggaattcccggctcgacccacgcgtccggctgagtttggctgctagcatcatagcaatagcatgccattttcatctgcttgatcggatctgccacccaacgaaccctaatcattcttccctccttctctttcgattaacatggcatctcatttactcaatcactcgtccaagatgagaaatgcttccaagttgctgcaccacgaacgcgctcttttggttcgttggttttccggcgatgctcaatcctctctcaaccgaaaccgcgatgtgtggaaaactcaattccacgagtcttcaacaacaagaagtgtctttgaaccggcctccagctttaataaacgttcatttggtatgcagaagagaaacatctccatggctaccattaaaagaggttccattatcgggtctgggttcaatggagagatttcgcgaagttcgcaggtgctgtcaaggagatgctatgcgtcagcctcagatctccccccacaccaggaaattggaatgccttctctctcacctacaatgacagagggtaacattgcaagatggttgaagaaagaaggtgataaaatctctcctggtgaagtgctctgtgaagttgaaactgataaagccactgttgaaatggaatgtatggaggaaggttatctggccaagataatccgcggggatggggcaaaagaaattaaagttggtgaggtaattgccgtaactgttgaagatgaaggggatattgcaaaattcaaagattaccaaccttcagcatctgaaccaagtgaaccccctgccaaagaaacatctgccccacctccaccaaagaaagaagaggtggtagaggagcctgcccgagaacctgagccaaaggtttctaaacccagtgcaccaccttcatctggagatcgcacatttgctagtccccttgctcgaaaattggctgaagagaaaaatgtacctctctctagcattaaaggaacaggacctgaagggctcattgtcaagggcgacattgatgattacttggcttctggtgctaaagaagtttcggcatcctccaaggccaaggttgcagcagatgcagcattggattataccgacattcctgtctctcagatacggaacgtcacagcttcacggttattattatcaaaacaaactatccctcattactatttaacagtagatacatgcgttgataaactcatgagcttgcggacccaactcaattcattgcaagaagcctctggtggctctcgcatatcagttaatgaccttgtaatcaaggctgctgctttggctctccgtaaagttcctcaatgtaacagttcatgggcaaatgattatattcgccagtatcataatgtgaatattaatgttgctgtgcagacagataatgggctctttgttccagttgtcagggatgcagacaagaaaggcctctctaaaataggggaagaggtcaaacaattggcaaagaaagccaaagaaaacagcttgaaaccccaagaatatgagggaggtacatttacagtgactaacctgggagggccatttggtgtcaaacaattctgtgcaatcatcaatcctcctcaggcaggcattcttgccgttggatctgctgagaggagggtcgttccgggttcgggtgctgaagaattcaagtttgcttccttcatgtctgtgaccctcagctgtgatcatcgtgttatagatggtgcaattggtgccgaatggttaaaagcattcaaaggctatattgaaaatccagagaccatgttgttgtaagaataaatagaaggctcccatgacgtactaaattcctttcaagtcattctaggcaggggatgagattttgttcacctgggtatttctgtttggcccatttgggttttgttgattgtatccctgaacaatttttgatggaagtatttaatcgctgaaaataaattttgcagatttgtaatttttttaataagagagggtagatggggcatttaatttaaacccaaaatattgttctctcacaatagaatgctgccccgtgatacagacagatgagtatgcaacattttttttgttagatgctgcaaatatttgaaagaacgtgtatttaataaactaacatgttgacatcctcactttcttgttagtcgagactgccttgatttgatagtt

SEQ ID NO: 4090 - DNA, 1522 bp, Glycine max
tcgagtagctacgtaggccccccccaagtgcaatgttcacactctcactctctcatactcatgcatactttaatcaatcatcatatttatctttgcaactaaaatggcgtcgtcacaaccagagatggagcatccaaagaaggtttttggttgggctgctcgggactcatctgggcttctctccccattcaacttctccagaagagaaacgggggagaaagatttggtattcaaagtgcaatactgtggaatatgccactcagatctacatatgttaaagaacgagtggggcaacacaacctatcctctggttcctgggcacgagattgctggtgtggtaacagaagttggaagcaaggtgcaaaagttcaaagttggagaccgggtaggtgtggggtgcatgattggatcctgtcgttcatgtgaaagctgtgatgaaaatcttgagaattactgccccaaaatgattctcacatacggtgtcaagtattttgatggcaccataacacatggaggctactctgacttgatggttgcggatgaacactttgtggttagaattccggataacctaccacttgatgctgctgctcctctcctctgtgctgggatcactgtgtatagccctttgagatactatggacttgacaagcctggtctgaatcttggtgtggttggtcttggtggacttggtcacatggctgtcaagtttgccaaagctcttggagctaatgtcacagtgattagcacatctcctaacaaaaagaaggaagccattgagaacataggagctgactcatttgtggttagccgtgaacaagatcagatgcaggctgtaatgggaaccatggatggtatcattgacacagtttctgctgtccatcctcttgtgcctttgattggcctgttgaagcctcatggtaaactagtcatggttggtgcaccagagaagcctttggagttgccagtattttctttacttatggggaggaaaatggttggtggcagtagcatcggagggatgaaagagacgcaagaaatgattgattttgctgctaagcatggagtgaagcctgatattgaggttattcccatagattatgtgaacactgcaatagagcgcctcgccaaagcagatgtgaaatatcgatttgtaattgacattggaaacacgttgaagccaagctcttgagtaaataaagaaatatgcatgcgtgattcagacttcagatactgaacgtacatggggcaagagataaagattgagaattgataataatttctttaagcattatatgtgttttccgtaatgagtttttgtttcaaggatttagctacgctattccttgataaataagcaattaagtgtggggtgtgcaattgcttaagcttggttataatccctttgggacgaaaattgttttgtactatatatacattttaaagagtgaaattgtgtgagattatgaacatgttaaatgtttttaattattttgattgttggcaagaaatagtttctatt

SEQ ID NO: 4091 - DNA, 1289 bp, Glycine max
  misc_feature (1164)..(1167): n is a, c, g, or t
aaaattataaaaagtgagatagataggtttggtgaaaaattgaataagaccataaaagttcgacatagttggtgttcactgctttttctcttttttcccgtggatcatcccaaagctctctgctttttggtggcacagatcccttgctgggtttaagttcctcactttggattctcccccaaatgggttcctttgatcgattgtttaaccgccaaagaggtcttcatgagatccttggtggtggtcaagttgcagatttaattctgtggaggcgtaagaaccttactgtggggatattgttggtcacactaggtgtttgggttgtgtttgagagatctggttatactcttctgtctcttatttctaatgttctccttctcctcattgtcattctctttctttgggccaaatcagcagatattctcaacagacctgctccacctctaccacagctgcgtctctcagaggaaatggcaaatgaagcgaagacttttatctgcacaagagttaatgatctgttgtcagtttctcaagatattgctctcggaaaagactcgaggctgtttctcaaagtagctgcatacctctggttaatttctattattggtggcttaactgatttccttaccctggcatacaccagtcttcttttggttcttacagtaccagcaatctatgaaagatatgaagattacatagatatgtatatcttgaagggttacagaaaattatgcctattgcatgttaaaataaatgagggatatgtcagcaaagtccacaactggattctggagaagaaaaagctaagctgagtttgtgtttttcgcattcattttgataagttctcttattattcttctaaagtatttcttacaggatcactggtgagattgtaattgtgagtttgagggacaacaatagtgatcttctccccccaaaaatgagtgtcttcctttttgcattttccatcttcaatgatggatcccttttttggtacataatgatgaaactcttacgttggactggttcatgtagtccactaagtatttaagatttcttcttaggttaacaaagaaaaaatataggtgtcactacctatacacaatataaaatgtgtttgccaagtatttgtacatgtaaataatataggtacaattattattnnnnaaaaaaaaaaaaaaaaaaaaaaaaaaaaaaaaaaaaaaaaaaaaaaaaattttttaaaaaaaaaaaaggttgggtgtttccggcccgccaccctcgggggggggcccggaccccatttcccc

SEQ ID NO: 4092 - DNA, 1929 bp, Glycine max
acgagaaagaaagcagaggaaaatcaacacggctacaaaaggagctgcaacgcctatcagttgatcgtgtcagctccgtgcgccccccccccccgaaaatcttctaccctttatccattttctactaccccatctctctccctttcccatctacttctaaaccttcatcaaacataactctcttcctagagaaacataaatatttttatagcataggacttatttgattcttgttaattcacaccacaaggataattgacatgggatcaagcttctctagttgttatgagggtgaatctgtgtctccttctccaaagccaaccaaagtggtggctacgaagggtggttcttcttccaacagggtctctataacggacttgagttttcctggctcaacgctttcggaggatctctccgtttctctagtggggtctaacctgcatgtgttttcactcgctgagctcaagatcataacgcagggtttctcttcgagtaactttctcggagaaggaggtttcggacccgtgcataagggcttcattgatgacaagcttaggcctggtctcgaggctcaaccggttgccgtcaagcttttggacttggacggttctcagggccataaagagtggttgactgaagttgtgtttctgggtcaactaaggcatccacatctcgtgaagctgattggatattgctgtgaagaagaacacaggcttctggtatatgagtatttaccacgaggcagcttagagaatcaactatttagaagatatacggcatcgttaccatggtcaacaagaatgaaaattgcagctggagctgcaaagggtctagcctttctacatgaagcaaagaaaccagtcatctatagagattttaaagcttcaaacatcttgttagactcggattataatgcaaaactttccgattttggcttggccaaagatggtcctgaaggagatgacacacacgtttcaactagagtcatgggcacacaaggctatgcggccccagaatacatcatgacaggacacttgacagcaatgagtgatgtgtacagttttggagtcgtgctcttggagcttctaacaggacgaaggtcagtggacaaagggcgcccacaaagagaacagaacctcgtggaatgggccaggtctgctttgaatgattcccggaaacttagcagaataatggatccaaggcttgagggtcagtattctgaggttggggcaagaaaagcagctgcattggcttaccaatgccttagccacaggccaaggagtagacccttgatgagcactgtggttaatgttctcgagccacttcaggactttgatgatgttccaattggaccctttgtttacactgttccagctgaacaacaacaatacaatgaagtcgcaaaagagagtgaaacacctaaggagaggaagagggaaaatggtcatcatcataaccgacgtcatcatcatcatcgccacaatggtcataggcatcatccacttaaatctcctaagacaccaatgccatcagatcagtcacagaatgatgaacaccgaaatggtagaaaaagtgggtctaattcacctgatacattcaatgcatcagaagctcaacgaagcatgggttagtagacacatatagatctttactgtacataggtgaattattagagttacatagtgtgccacgtactagtactaagtgcaacgagccttcaaggcaataagaaacaggaaaaagatgaaaaggaaaaggaaaagaaaaagagagtgccatatgtaatggtccttgcatggaaaacatgattgagttctattttttttttttaatttgtttatttgttccagaggaagttaattattttgaattgtgtatacaatgatgaattttttcccttgatgaatcaaaacaaaagaccagttcaat

SEQ ID NO: 4093 - DNA, 2047 bp, Glycine max
ccacgcgtccgccctcccgtccggatccccgggccgtccctcccgtccgacgaaactcaaaacagtgaaagaaagaaaaaaaaaacactgcacaaaacaatggctttgaatttgattcatcgaccagccactaaaccaccatcttcctcctcctctttcgtcacccctcgccctttgcggaccacacagagcatccctgtgaggaactcgcggcgctccatcgccgtgcgcgccgccgccacggaggctcctgtggctactattacggcggcaagggagtgcagggtgaagtcggtgaaggcccggcagatcgtggacagccgcgggaacccgacggtggaggtggatctggtgacggacgggcttttccgagcggcggtgccgagcggcgcgtcgacggggatttacgaggcgttggagctgagggacggggacaagagcgtttacggcgggaagggtgttcttaacgccgttaggaacatcaacgaggtcttggctcccatactcgttggcgtcgacgttaggaatcaagctgatgttgatgctattatgctggaaattgatggaactcctaacaaatcaaaactaggggctaatgcaatattgggagtttcgctgagtgtatgtagagctggtgcaggggcaaagggagtgcccttgtacaggcacatccaggagatttcaggaacaaaagaacttgttatgccagttccagctttcaatgttataaatgggggcagtcacgctgggaataatctggctatgcaagagtttatgatactaccagttggagcaacttcatttgctgaggctctccgcatgggcagtgaagtttatcatgtattaaagggaataatcaaggcaaaatatggacaagatgcatgtaatgttggagatgaaggaggatttgctcccaatgttcaagataacagggaggggcttgttttactcatggatgccattgacaaggctggttatactggcaagattaaaataggtatggatgttgcagcttcagagttttacactaaggatgggaagtatgatttgaacttcaagaaactcgagccgaatcggctcgaggctcatgttcactctgctcagagtcttggtcaactatataaagattttgttaaagaatttcccattgtgtcaattgaggatccgtttgatcaagatgattggggttcgtgggcttcattgctcgcttcagttgatattcaacttgtaggagatgatttgttagttacaaatcctaagagaatagctgaggccatcaaaaagaaggcttgtaatggtttgcttctaaaggttaaccagattggtacagtgaccgaatctattcaggctgcacttgactcaaaggctgcaggttggggtgtcatggttagtcatcggagtggcgagactgaggataacttcatcgcggatctctctgttggcttggccagtggacagataaagactggtgctccttgccgaagtgagcgattggcaaagtataatcagcttcttcggattgaagaggaacttggaagcgtgcgatatgctggtgaaactttcagatcaccttagagtgaactcaattgatccaaaaaatcttattctggaaaagattctgcatcagaatcattgtcatcattgatttaccaaggaaaatcctgagttttgatatagttgctagccttctggggttttcagatctacttgattagccttaagatatgttttgaactgaaattaccatgtgattggatgataacttggtgcagtaacatggtttcgtcggtgtaactttttttctttttttgaaagaaccctgcttgtgaattagtccccctgcttacgacaataagattttatagtgtgtcatcctttgaagaagggagaggtttagacgttgttgtttggtagttcagtgtttgtaatggtatttctctacataacttatgaacaattcccgtttgttactaccaagcattagtgatataggattgcaatttcttttgcctcaccttgcgcctagaaaggagatctgttaacttta

SEQ ID NO: 4094 - DNA, 636 bp, Glycine max
agtctttgaacaatgtagcacactttctctctttaaaataacacacacttcacaaccttttgcaataagattacaaaccctaggagacactttaacctctccttccagcatttgctctctcattctttcacctttgacaactaaggaacgcaagacaataagatcatcttgagacatgtatgctttcagtaggaattgttcctgacaccagctgatattgcgcagccaaccatcaacatcttgagagaagataagcgctgcatctctaagaaaagcactatccaatcccaaaagtttcctcacaaaattggaaactacatccaacaatctgccagcaatcactttaacatttttcccagcagtacaaatttgattgaatgctgtgcaagtttttcccatggcaatcaaagatgtgtcacaaaatgaagtgagttgtgttgccaatccctctaaaacagaaagagcctggaattgccctttaatttcttcagaaggtttgaaagcttgagacataacagttgcaattgtagaaactgcaatggtagcacatgtgattaactcactatttgaaacaaacttgcccgtcttgatagaaacacagaaggccccaacaatggctgatcgaacaaacaaacc

SEQ ID NO: 4095 - DNA, 2278 bp, Glycine max
  misc_feature (25)..(26): n is a, c, g, or t
cccacgcttaatttcgttcttccgnnctgatctcaaacaccgaactttatttttctccaactgtttttaccacccacgagctcaatctgttagatcagtgttcactgtttgctgatttttaatttttttctctgattggtgtttgtttggttgcacaaattcactctcagctacgtaggccccccccccgtgtttttctgtgtcgtataaatttgaaggataagaagatcctcttttgatcttcgaatttgcacggtgtttttgtggggtgtgtgattagttctcttctgatgttttatttccaatcacggtttcaattatcacctgctaattatctatcatctagacctcctttctcctactcaatttcccatgtttttctcccctctgatgtgttcttcatatcctgcttcaattgcctgagatttcgtctcaaaatttgatgctgtgatccaaagggggagttgctggttgctttcactgtgaatctttctgcaggttctttgaatcacacatctagttttctttggtgagaagtaagaataagagaaagagagaatttttgaagatgggagagcgttgtagacatttttccattgaggaattgccatcacatttggttttagaaattctgtgctccggcaggctcagcgcaatggaccttgtttgtttagaattgacttccaaaacatttggtggtagtcatggtttgcaccctttcaagttcaagtccttggttgcctttgctgcatttcaattgtgtgcctcccatgttacctatgcaagaatgggtttgaattctcagagggagttgtatgatagatgtggaggaaattggaagcgagttttgaggttcttgcagtctgtggaacaatcctctcagatggtcgagacatcatcaggcaatatgcaaataacaactggaaagtatcacaccttgttgatcagcaattcttctgtctattcttgtggttctggtttgtgtggtgtacttggtcaagggcctcgtacaacccccccccccccatttacccggattgatttcccacctttggcacgagtggttcacgtttcagcctcctttaaccatgcagcttttgttatgcaatctggagaggtattcacatgtggagataattcatcttcttgctgtgggcatagagatacaacccgaccaattttcaggccacgccttgttgaatccctgaagggaattccctgcaaacaagttgcagcggggcttaacttcacagtcttcctcaccagaaaaggtcatgtttatacatgtggaaccaacacacatggccaacttggtcatggcgacactcaggacagaccaacccccaaaatgattgaagtccttagctctgttgttcagattgctgcgggaccaagctatatcttatccgtaacagaaaacgggacagtatattcctttggatcaggtgctaatttctgtcttggccatggtgagcagcatgatgagttgcagccacgtcctatacagaaattcagaaggaaaggtattcatattgttcgtgtatctgcaggggatgagcatgcagtggcacttgattcaaatggatatgtatatacatggggcaagggatactgtggtgctttaggccatggggatgagattgagaagacaactccagagttgttgactagtctcaagaatcaattggctgttcaggtctgtgcaaggaagaggaaaacatttgttctagttgattctggttcagtctatggctttggctccatgggattcggcagcctcggattcctcgatagaagggtatctgataaagtattgaaacctagaatcttagataccttgagaactcatcatgtttctcaaattagcactggcttgtaccacactgtggtgatcactagcaggggacagatatttggctttggagacaatgaaagagcacaacttggtcatgacacattaagaagctgccttgagcccactgaaattttcattaaagatgtatctgaagatgtagaaagcatctgaggctccaaaagcaatcacctctttttatttgtggttctgctataccgcattgatcactactactgttaaagtttactgttctattttatagtacgttataattatattatagttattaagaataataaatataacatgcaacattgtcaccatttttcaatagggtatgattttattttgttgagaagatttggaactccttttctggtttgttagcttttaatttgatttaattatctatttagttcctat

SEQ ID NO: 4096 - DNA, 2238 bp, Glycine max
gcaccacaccgcaccgtatcatatccaaatcccatcactcttacgctttctttctttttttcttccaaattctctctttcttctaacctaaccctacaattatgccccattaacacaaatcgcaattaccccaaattcctcaccctagcgtagatcgatctcttcttccttcgtgaattctggttcagggtggctgccatgtatggcacttagtattttccctttttgaagattaggggtgggtgggttgtgtctcgcttagggttccaaagtttgttgttttgaatggaacctcgcgttgggaataagtttcgcctgggtcggaagatcggaagtggctcctttggggagatctatttaggcactaatattcagacaaatgaagaggttgcaattaagcttgaaaatgtcaagacaaaacatcctcaattgctgtatgagtccaagttgtacagaattctccagggaggaactggaattccaaatgtcagatggtttggagtggagggagattacaatgttttagtgatggatctgcttggaccgagtcttgaagatctttttaacttctgcagtagaaagctatcactaaagacagttctcatgcttgctgatcaaatgatcaaccgtgttgagttcattcattcaaaatcgtttctgcatcgggatatcaaaccggataattttctaatgggattaggaaggcgtgcaaaccaggtttatgctattgattttggtttggctaagaaatacagagatagttcaacacatcaacacattccttacagggaaaataagaatttgactggaactgcaaggtatgccagcatgaacactcaccttggcattgaacaaagcagaagagatgatcttgagtctcttggttatgttttgatgtacttcttgagaggaagtcttccttggcagggtcttaaagcgggaacaaagaaacagaagtatgagaaaatcagtgaaaaaaaggtttctacctcgattgaagccttgtgtcgaggttatccaacagaatttgcatcttacttccattactgccgatcattgaggtttgatgataagccagattatgcgtacctcaaaaggatatttcgtgacctgtttattcgtgaaggattccagtttgattatgtctttgactggaccattttgaagtatcagcaatcacagctagccactcctccaacacgggccattggtcctagtgctggaaccagttctggaatgccccccgctgttactaatgctgataggcatacaggaggggaagaaggtagacctcctgctttggtttcagtggattcctcgaggcgcagaatgtcagggcccattttaaatactttatcaagtgccaatgccttgggtcagtcaagtggatcatctaggagggttgctgtctctagtagccgtgatgcatttgttggtgctgagtcagatatccgtactcgcactgctgaggctagccctggagcagcacatcgagctttgagtgggcaaagaagttctccaattggatcttctgatcctaagagagttgtatcatcagggagaaatgcttctcatgtgaaaaattatgacactgcacttaggggcatggaaggtttgcaattagaaaatgatgagaggacccattattaatttcacaacttctctcctattaatttgtgagttgataggcactgccaacgttgcttgtgttgctaagttgagctgtgagaaaattcggatctgaacttgaaattctggctttgtattgttaacccatctggtcaaaccgatgaagctgtgaagctgaaataatttgagccaaaccagggattgtgcttgctgtaaagctcagttttaattggttcttctagctggaactcctaagttttataacatttttctgagttattatattggtttaccagatgtttacagtttcacgtggactgcaaatgtcaaaaactatcaaataccagcaaaaatgtaattagccattgtactcttgttggataagattcccttggtttacacgatgtaattgtctggcaaatattttggtattaggaacttgaatgttcgtatttgtgaggttccttcaaaagcttaaatgcatctctgtagtttttattagatctatcacaatgaactcgtatgcattttatgttgatctgtgaaaaggttttcattattaatataaaaaaagaaaaaaaaaaaaaaaaaaaaaaaaaaaaaaaaaaa

SEQ ID NO: 4097 - DNA, 928 bp, Glycine max
tacggctgcgattaggcgtctccaggggatgacatgcaacttaatatctctatatcttctccaccagttatacaagtgacctacctagacattggtgcaactatttttgtagatataacgattgatgttctggaagacggtgaagtcatacctgttgcatgcatctcagtggaaattagtgcttcatgtgctgtggaaattgaaggaaacaatattgctggttggctcagattacaaacattttctgcatacttgaagtggagcaaaatagggaaactgcacgtgcgtctgatccagtcactaatgtcaagtgtcctcaaaactgttgtccttccatacctgaacttcaaattaaagagaggattcccattaccaattattgatggttatggctttcagaatgcaattatcttgtacaatcatccatggattatggtgtgtagtgatgtttccttcttagaagattactatctaggtcaacagttagcttatgtttcataaaatatagctacattaaaaaatttgcctgctgtattattgtggtaagaaggttgtaaatgaagaatatatatagaaacccatttgtaagttactcgtgtacatttcacaattagtataccttttggatttagccttgtatacacatacatcctgccatgaagattacttgttaaaaatctataccattatttttgtgtcaaagtatgtataaacactcatagcttgtttgacttcatcttttacattacaagatttttaaaacttattttaaagcaatagtgtctttatcttttaaaaataaaatgaaattgaccacgaaagtttccaactggtacaagatatattacttcaggtcataagccaacaaaggcaaactgatttgttgacaacgcaaaaaccagcattgatgtgctgcaggcatgcaagc

SEQ ID NO: 4098 - DNA, 2631 bp, Glycine max
aaacacgacagcaagactcctactaatactaaagaagcagtggcgtattgtggtgtgtcggtggcattgttgttggagtgagcgaagaatatgtattctagagattcatggggtggaccgttggagataaacgcgacggactcggcgacggaggacgagcggagccggaacctgcaggacgttgacagggcagcgctgtcgcgtcccttggatgagacgcagcagagctggctccttggccccggcgagcagaagaagaagaagtacgtcgatctcggctgcatcatcgtcagccgcaagatcttcaagtggaccctcggcacaatcctcttcgccgccttcctcgccggcctcatcgccctcatcgtcaacaccgtcccccgccaccgccacaaacacccccctcccgacaactacaccctcgccctccacaaggccctcatgttcttcaatgcccaacgatcggggaagttgcccaagcataacaatgtttcgtggaggggaaactcgggaatgcaagatgggaagtcttcagatcattctgctgcgattaaggatctggtgggtgggtactatgatgccggggatgctatcaagtttaactttcctgcttcgttttccattactatgttgagttggagtgtgattgagtatagtgcaaaatatgaggctgctggggagcttgaacatgttaaggagatcattaagtggggtactgattattttctcaagagtttcaatagtactgctgacaccatcaccacccttgctgctcaggttgggcttggagatacttccggtggtgacagtccgaatgaccactattgctggatgcgcccagaggacatggactatgaccgccctgtgactgaatgccatagttgttctgatcttgcagctgagatggctgctgccttggcatctgcttccattgttttcaaggacaacaaggcctattcgaagaaactagttcatggtgctaccacgctgttcaagttttctagggagcagagaggcaggtacagtgcagggagttcggaagcttctatattttacaattctaccagttactgggatgagtatgtttggggaggcgcatggatgtactttgcaactggaaattcatcgtaccttaagcttgctactgctcctggcctggccaagcatgctggtgccttctggggaggccctgattatggggtactcagctgggataacaagcttgctggtgctcaggttcttctgagtcgtttgaggttgttcttgagtcctgggtatccatatgaagaaattttgaggacctttcacaatcagacaagcataatcatgtgctcctatctaccagttttcacaagctttaacagaaccaaaggtggcttgattcaattaaaccatggtaggcctcagcctctccaatatgtggtcaatgcggcctttttggctgccctatatagtgattatcttgatgctgctgatacacctggatggtattgtggacctaatttcttttcaaccgacgtgctccgtagctttgccaagtcccagattgattacatccttggaaataacccaaggaaaatgagttatgtcgtaggttttggtaatcattacccaaaacacgtccaccatagaggagcatctgtaccgaagaacaagatcaagtatagctgtaaaggtggatggaaatggagggacacttctaagccaaacccaaatacaattgttggtgccatggttgccggtcctgacaagcatgatggcttccatgatgttcgtacaaactacaattacacagagccaacacttgctggaaatgccggtttagttgctgcactagtggcattgtcaggcgacaaaggcacatctattgacaaaaataccattttctctgctgttcccccaatgtttcctacaccgccaccacctccagcgccatggaaaccataagctcatcgtgccattggttatttctttctagcaagtaccccagatgatatgagtgcaccgttaaccttcgttgttttgtatcaacttgaagatcagggtaattttgaagaaaaaaaagcttggagaagtggagcttggccactgaatatagctgcctggggccaatgatcgactcaagattagcattaagaattgataaagtggtacttgagagtgtgtctctttaaatttttgtgatactcatatagtatatatgtatctaaatcaaatcttgtattctttaaacatgaaaaactgaacagcttgtaattgtttgacagtttcatctaatgccttcacagttttacccaaaaaaaaaaaaaaaaaaaaaaaaaaaagcagcggccgctctacaggatccaaaaaaaaaaaaaaaaataaaaaaaaaaaaaaagaaaacaataaataaaaaaaaataaataaaaaaaaaggggggggccgttttaaaggaccaaattttatttcccggggcttgcaagatataattttttttttagggcccccaaatttaaatcccggggccgcggttttaaaacgtcggaaggggaaaaacctgggggttaccaaattaaatgcctttggaacaaatcccctttttcccatgggggttataaggaaaaaaggccccccccatttgccctttcc

SEQ ID NO: 4099 - DNA, 2438 bp, Glycine max
aattccgctccggcccggccgccacgatcctactaaaaccaaacaactactcgttgattgaaagaaacagtgtgtgttgtgttgtgttgtgtcggtggcatttttgttggttcgagtgagcgagggaagatgtactctagagattcatggggtggtccgttggagataaacgcgacggactcggcaacggaggacgagcggagccggaacctgcaggacgtggacagggcggcgctgtcgcgtcccttggacgagacgcagcagagctggctcctaggccccggcgagcagaagaagaagaagtacgtcgatctcggctgcatcatcgtcagccgcaagatcttcaagtggaccctcggcaccctcctcttcgccgccttcctcgccggcctcattgccctcatcgtcaacaccgtcccccgccaccgccacaaacacccccctcccgacaactacaccctcgccctccacaaggccctcatgttcttcaatggccaacgatcggggaagttaccgaagcataacaatgtgtcttggaggggaaactcggggatgcaagatgggaaatcttcggatcattctgctgcgattaaggatctggtgggagggtactatgatgcaggggatgctatcaagtttaactttcctgcttcgttttccattactatgttgagttggagtgtgattgagtacagtgcaaagtatgaggctgctggggagcttgatcatgtgaaggagattatcaagtggggtactgattattttctcaagagttttaatagcactgctgataccatcaccacccttgctgctcaggttgggcttggagatacttctggtggtgacagtccgaatgatcactattgctggatgcgtccggaggacatggactatgaccgccctgtgactgaatgccacagttgttccgatctcgcggctgagatggctgctgccttggcttctgcttccattgttttcaaggacaacaaggcctattccaagaaactggtgcatggtgcgaccacgctgttcaagttttccagggatcagagaggcaggtacagtgctgggagttcagaggcttcaatattttacaattctaccagttactgggatgagtacgtttggggaggtgcttggatgtactttgctactggaaattcgtcgtaccttaagcttgctacggctcctggcctggccaagcatgctggtgccttctggggaggccctgattatggagtactcagctgggataacaagcttgctggtgctcaggttcttctgagtcgtttgaggttattcttgagtcccgggtatccatatgaagaaattttaaagacctttcacaaccagacaagcataatcatgtgctcctatctaccagttttcacaagctttaatagaaccaaaggtggcttgattcaattaaaccacggtaggcctcagcctctccaatatgtggtcaatgctgcctttttggctgccctttatagtgattatcttgatgctgctgatacacctggatggtattgtggacctaatttcttttcaactgatgtgctccgtaattttgccaagacccagattgattacatccttggaaataacccaaggaaaatgagctatgttgtaggttttggtaatcattacccaaaacatgttcaccatagaggagcatctataccgaagaacaagatcaagtatagctgtaagggtggatggaaatggagggacacttctaagccaaacccaaatacaattgttggtgccatggttgctggtcctgacaagcatgatggcttccatgatgttcgtacaaactacaattacacagagccaactcttgctggaaatgctggtttagttgcagcactagtggcattgtcaggcgacaaaagcacatcgattgacaaaaataccattttctctgctgttcccccaatgtttcctacaccgccaccaccaccagcaccatggaaaccataagcgcatcatgccattggttatttctttctagcaagtatcccagatgatttgagtgcaccggtaaccttcgttgttttgtatcaactgaaagatcaaggtaattttgcagaaaaaaagctttgagaaatagaagaaatggagcttggcctactgaatatagctgcctggggccaatgatcgactcaagatttagcattaagaattgataaagtggtacttgagagtgtgtctctttaaatttttgtgatacacatatagtatatatgtatctaaatcaaatcttgtattctttaaacatgaaaaactgaacagcttgtaattgtttgacagtttcatctaatgccttcacagttttactcaaaaaaaaaaaaaaaaaaaaaaaaaaaaaaaaaaaaaaaaaaaaaaaaaaaaaaaaaaaaaaaaaaaaaaaaaaaaaaaaaaaaaaaaaaaaa

SEQ ID NO: 4100 - DNA, 618 bp, Glycine max
ggattccttggttctgggtgtgtcctttatttccaacatagctactttcatggctgtgactacctcttccagttccaccagcggcttcttcagtctccggtcaccaaattcggtcgattccagcaggatctcctccacccacggctcttcctccgcttgcggaaagttcgatggggtggccatgtggttcatcaacggcgtcacaaccgctttcttcgcctccttgaaccgttgctcttgcattcgcatcgccaccgaagaagacggcgacgatgccaacgacttgccgttgatgctcaacgacggaaacctccgccaggatggcgtcgtcgttgcgtgcaccaccagcaggagaaggacgggtaaagggaagaagagtgaagctgttctcgtcgacgacgactgaaaaaaagtggtaacaaatacgtactacgtaccctttgatgaggccttgaacaaattaaatcatatcaatgtctctcttaattttcttgctaagtgatcatatattataatgttatatgggtttgttaaaattgtgcttcacagcttacttatgttaattttggagagcgaaaatgaaattataagaaattaatcacccttgccttcaaaaaa

SEQ ID NO: 4101 - DNA, 1930 bp, Glycine max
ttttttttttttttttgttacgcaacaaatcggaaattttgatgatacattgttttcttctgttatggctttggctataggaaactagattcaaagaatctcctgctcgtttacaaaaccaagaatatttgaaaggggcttcacttaaaataaaaataaaaaaaactatatcaattaaagcttattttcaatcttacactcattttcccccgaaattgaaaaaaagcaaaaactaatagctagtgaagccacattccacggaactattaattgatggaaatgagcttattcaatatgaattgaagacacagctgatgtgattccattggttcgtggatcagccttttctaaacaaacgccacaaggatcttctttaaccaacaaggcaaggacattgagtgaactccatacttttgtcacattgctgctcgaatctcccaaagtaacagcaaagactgcatcaaatcctcctgcccctggaactccagccaacaatactccttccaagttcattgtagcatctaaaagttgtgtttgtggttctggttcaattggaacacctgcagcctcgcccattaggcgcatatgatatctaatccccagcatggcttcttttgctccaagcagtgctttaataactgcttccttgttaggttcagaagcttgttctatccacttgtctggtctgagcatgctgcagctgtcaatcacagatttatatgcattccattgttcctttgctaatttgcttaacaagtttagttgcatttccaatgctgaatttgcctctgacaatcttgtccatgtgtccagggatttctgagggtcagacttttgccattttttaacagcaccaaccatcgatggcgtggatgatccaccagttccaggttctcctagtaaaagagacatcaaaggtggtagagagaactcagtcgtgtcatggtcccaatttccttttataatttcagtgataccatctgataaaggcactgctatatctgcaaccttagtggaagaaatcacttccggtgaaaaccgcacatagcgctgactgccatacacagctgagctgacatcaaacccactgccaactttcccctgtgcaatacagtgtgcagtttgagctattttatgcaccatatcaagatctgcaacatccttcctttcccgatgatctttcgaagaggaaagctttacaacatccaggtaatgaagtagagcagcaactacagccattgtcatcgctgcagaagagcccaaaccagttttagccacttcaggcttgcaattccctccatcggcatcatcggtattgaaagtaatggaggaaaagggaggaagggtggccaatgattccggagtcaaagggagtccacgtctctcaatctcattcctatacgaataaaaatcattgccacccaaaattgtaatgtcaagaccatgtaaaagtagtttgtgcaacagctcctttttattatggtcaaacgttgcgtaagcagcagccacggaatactgcaccgcatattccacaaaaggatttctcgtatcacttggggaaacggtttggatggtgagatttttgagagcgagtttgtagagggcttctctggagagttgaggagaggttaatctgacatctgtccatgcccaggaatcaggtttgatttcgtgatgaattggtttgacgatggcgtaaaaacgagcgtttgtgctgaggacaagtcctgcattgggtcgctccaaaatcaggtaaccaccggtcattaacactttcccgggagctgaactaacaacctcgcccatcgctgttgtgcaattccaaatgcgatcaccaccagccactggagaaagaagcacaagaacaatgccaatttcgttaaagagtattggttagcatttatcttttttgatactaacaaaaaaattt

SEQ ID NO: 4102 - DNA, 721 bp, Glycine max
cccacgcgtccgcccacgcgtccgcccacgcgtccgtacggctgcgagaagacgacagaagggcgaccatcatgagatgatgggatcagggaaattgaaatatgtgaggcctttggctttggatggggacagggttttgttcgaacacaaccgtagcaagctctgttggtataacctcaaaactggtgacgtgagttgcgttaaaataactgctgcaattggaaacacgattgaaggcacggtttgtgtagaaagccttgttccgccaactttactgaatctgcgtgatgagagccagagccaggagaaaaatgggaagaaaagggatgacttcctctctcaggggttcaaattgaccttgtaaagcgagcaaaacaagaggaaatggattgaatttgaaggggaaccaaagtgctacagttcacaattttcaataccaagaaaacgatgataaaagatcccgggtggatgctgcttgattcttttccttacgttagaagctgttcatcccaacaaggagaaaactaatgcgccatctcccgttttgtttgtaataaatttgtatttatattttatactcctataggctgctacaaacttgagttctttgccccatcggggtggtttatgcatctttatattttatggttgtagccacccttatacaagccattggaataggtgaatctatacagttttacatgaatggttatctgttgaa

SEQ ID NO: 4103 - DNA, 2227 bp, Glycine max
ccggcgtcgacccacgcgtccgataaaagcaagttattaatttcccttcgtactgatatttttaaaggactggcttctttattttttgataatacaaagagaggaaagaatgtatttttagactggaggacctcaaagaataatgataaggacctcaatgaaattataccctggcttgagtggatgctatcccatacacttttgcgttctgctgagaatccccaacagggtcttgatagtttctgggttgaacaaggtggagcgcttttgcttagtctaatgcagagttctcaagaggatgttcaagagagggcagccacaggtcttgcaacttttgttgtaattgatgacgaaaatgctagcatagattgtggaagggctgaagcagttatgcgagatggaggcatacgccttctacttggccttgcaatcttggagagaagggcttcaatctgaggcagccaaggccattgcaaatttgtctgtcaatgccaatgtggccaaagctgttgcagaagagggtgggattcagattcttgctggtttggctaggtcaatgaacaagctggtggcggaagaggctgctggaggattatggaatctctctgttggagaagagcacaagggtgccattgctgaagctggtggaatacaagctttagtggatcttatattcaagtggtcctctagtggagatggagttttagaacgtgcggctggtgcattggctaatttggcagctgatgacaagtgtagtacagaggttgcactagcaggaggtgtacatgctctagtgatgcttgctcgtaactgcaaatttgagggagtgcaagagcaggctgctcgggcattggctaacttagctgcccatggagatagtaacagtaacaatgctgccgttggacaagaagcaggtgcccttgaggctcttgttcaacttacttgctctccccacgagggtgtcaggcaagaggctgctggtgcactttggaatttgtcatttgacgatagaaatcgagaggccattgccgcagctggtggagttcaggccttggttgctcttgcccaagcttgtgctaatgcctcccctggacttcaagagagggctgctggtgctctgtggggattatcagtctcggaaactaacagtgttgccattggacgagaaggaggtgttgcacctctgattgcacttgcacggtctgaagcagaggatgttcatgaaactgccgcaggagcactatggaatcttgctttcaatgctagtaatgctctaagaatagtagaggaaggtggagtatctgcacttgttgatctctgttcttcatcagtatcaaaaatggcacgattcatgtctgcgttggcattggcatacatgtttgacgggagaatggatgaatatgctttagtagtcacttcatctgaaagtatttctaagagtgtgagcttggatggagctagaaggatggctttgaaacacattgaagcttttgtccttatgttctctgatctacaagcatttgcggctgctgctgcatcatctgctcctgcagcattagcacaggttactgaaggtgcgcgcattcaagaagcaggacatttgagatgcagtggtgctgaaattggaagattcatcactatgctacgaaatccatcatctatactcaaggcttgtgcagcatttgctcttctccagtttaccattcctggtggacgacatgccatgcaccatgctagcctcatgcaaagcctgggagcatcaagagttctgcgtggtgcagccgctgcagcaactgccccacttgaagcaaaaatcttcgccagaattgttcttcgcaatcttgagtatcaccagatagagcaaacgctactgtagatcattcatttgttgtttacagtccccttttttaaaatcattttggacttgtaatatttcacatgtacacaaactgcccaatgtgtcataagaacactagtcggtgaccgtgatgcatgtgatgtgaagcaagttataaattgacaggttcttatttttcatctttggaactgcttagaaaacagttcttgttgagatgatgtatttcttccccccttgtaccaatctcttaatgtcaaggctgcaacagataggcacattgacataaattttattgccttgatgtttttttttttctttgtattattttaaagtattatgtataattatgtttagagctaaaaaaaaaaa

SEQ ID NO: 4104 - DNA, 1133 bp, Glycine max
gctggtgctctgtggggattatcagtctcggaaactaacagtgttgccattggacgagaaggaggtgttgcacctctgattgcacttgcacggtctgaagcagaggatgttcatgaaactgccgcaggagcactatggaatcttgctttcaatgctagtaatgctctaagaatagtagaggaaggtggagtatctgcacttgttgatctctgttcttcatcagtatcaaaaatggcacgattcatgtctgcgttggcattggcatacatgtttgacgggagaatggatgaatatgctttagtagtcacttcatctgaaagtatttctaagagtgtgagcttggatggagctagaaggatggctttgaaacacattgaagcttttgtccttatgttctctgatctacaagcatttgcggctgctgctgcatcatctgctcctgcagcattagcacaggttactgaaggtgcgcgcattcaagaagcaggacatttgagatgcagtggtgctgaaattggaagattcatcactatgctacgaaatccatcatctatactcaaggcttgtgcagcatttgctcttctccagtttaccattcctggtggacgacatgccatgcaccatgctagcctcatgcaaagcctgggagcatcaagagttctgcgtggtgcagctgctgcagcaactgctccacttgaagcaaaaatctttgccagaattgttctgcgcaatcttgagtatcaccagatagagcaagcactagcgtagatgagttcatttgttgtttacagtcccctttctcaaaccattttggacttctaatatttcacatgtagacaaactgtccaatgtgtcataagaacactagtcggtgaccgtgatgcatgtgatgtgaagcaagctataaattgacatgtttctattttccatctttggaactgcttagaaattaagatgtatttctttcctcccctgtaccaatctcttcatatcaaggctgcaacaaataggcaccttgacataaattttattgccttgatgttttttttttctttgtattattctacagtattatgtacaatcatgattttaggtaaatttatttagggctgggaatgcttattgtccttttt

SEQ ID NO: 4105 - DNA, 1000 bp, Glycine max
ctaaaacccttcgattttgtgcctctgattggatctgcagcttcctatttattccgattcgtccactttttttttttaaatttatttttttgaatttcgcgattcggttttctcagctcgaagtcgtgcttctttttaatttattattctgttttggttttttgttccaataaagacaaaaatcgattgctgctgtctctgcttcttcttctttctccagggtattttttgcaatatttaaactagttaatagaagaatattatggctgtttccatgagagatttggatccagctttccagggagctggacaaaaggctggacttgaaatatggcgtattgagaattttaatccagttcctgtcccaaagtcctcttatgggaaatttttcactggagactcctatgtgatcttaaagacaactgcctcaaaaagtggtgctctgcgccatgacatccattactggcttggtaaagacaccagtcaggatgaagcgggtgctgcagctatcaagacagttgagctggatgcagctcttggaggacgtgctgttcagtatcgtgaagtacaaggccatgaaactgaaaagtttctgtcttatttcaaaccatgtattatcccacaagaaggtggagttgcttctggtttcaaacatcctgaggctgaaaaacataagacacggttgtttgtatgcagagggaaacatgttgtacatgtcaaagaggttccatttgccagagcttcactcaaccatgatgatatttttgttctggataccgaatcaaaaattttccaatttaatggttccaattcatctattcaagaaagggccaaagctttggaagttgtacagtatattaaggatacctaccatgaagggaaatgtgaggtagctgctgttgaggatggaaagttgatggctgatcctgaaactggggaattctggggtttctttgggggatttgctcctcttccacgaaaaacagccagtgatgatgat

SEQ ID NO: 4106 - DNA, 1477 bp, Glycine max
  misc_feature (46)..(47): n is a, c, g, or t
tataggcgacgggtacttagccccctcgagtagctacctaggcccnncccccgatcatccttagttccttacaacaaaaacaataaaatactaaaaaaaaaaaaactacacttcacccaccaaaccaaagcaaaagggaaagaggacgatcgggaaagagagtgtctttaatttcacagtttcatagcaattatcgccgaaaaatgcaaaatttccactcatatctctttgtttatgacatctaaaacatctatctactctctacccactttctcagttccaggtcagcaagagaaacagtacttatccatattacagggttatgtgaactgaagagggagggtactggtttgtggaggcagtgacacttttgcaagcttagaatcctctatcctagttttttgtgaaaacaaatagtgtgatgcttttggaggctccttttctcaaagcttgcgtgtagcactatctgcattttggtgataagttgaagtgtgggaaaaaatctaaagctaaagagagtttgggaagctggaacaatgggttctgtttgttgttgtttgagttttgatgattttgaagattatgtaaatccaaatagtcctgtatataggaactgcgtgtgtctcagttgcttgatacagaaccttttgagtgtgtattcgtcaatattccgtagaggggatgctcattcaattccttcgtctattcaaggggcagcatctataacttcagcagcatcactcgataattcactatctgacatgtaccgctctcctccaaggccattaccatatgatgcagaacccagatattttcgctcacaacgtgatggactagtttcaaggcgtgagaagggttcaagtcattcaaatgaggaaacagaacctctaagaagtgatgcagatctggatccagagtccttaaattcaggagacaaatggaaggaaagtgcctgtgaagctgggtcaaaggaataccattctaagtcctccctaagacttcaatcaacaaaatattcaactggagtgggccttgtctatgcatcatcagaggaggaggatgtttgtccaacttgtcttgaagaatacactaaagagaatccaaagataatgacaaaatgctctcatcattttcaccttggttgcatttatgagtggatggagagaagtgacaactgtccagtttgtggaaaggtgatggtattcgatgaaacgactttcacttgatttcaaggtttatgttgtggatgaagccagcaactgaggcatggaagaatacaagtatatagacattgtgaatactacagattaagtgtttgtcatgtatagtaagaatgaaaagtttccttaaccattgttgtgagttcattctaatcccgcttgtttttgtgttttaaaatttccacatgtccaaaactgtgaagaaagaaagaatatgcaattttagatggaaaactttgtgatggcttcaacatctt

SEQ ID NO: 4107 - DNA, 1364 bp, Glycine max
gaaagcaaaagggaaagagggtgtctttaatttcacagtttcatagcaattatcgacaaaaaaatccaaaatttccactcacatctctctttgtttatgacatctcaaacattcgtcttcacctacgtaggcccccccccccccggtaagcaagagaaacaatactcatctttattacagggttgtgtgaactgaagagggagggtactggtttgcggaggcagtgacacttctgcaagcctagaatcctctctcctagttttttgtgaaaacagatagtgtggtgcttttggaggatccttttctcaaagcttgcatgtaacactatctacattttggtgatcagttgaagtgtggaaaaaatcttaagctaaaggcaatttgggaagctggaacaatgggttctgtttgttgttgtttgagttttgatgattttgaagattatgtaaatccaaatagtcctgtatataggaactgtgtgtgtctcagttgcttgatacagaaccttttgattgtgtattcttcaatattccgtagaggggatgcacattcaattccttcatctattcaaggggcagcatctataacttcagcagcatcactcgataattctctatctgacatgtatcgctctcctccaaggccattaccatatgatgcagaacccagatatttccgctcgcaacgtgatggactagtttcaaggcgtgagaagggttcaagtcattcaaatgaggaaacagaacctctaagaagtaatgcagatgtggatccagaatccttaaattcaggagacaaatggaaggaaagtgcctgtgaagctggatcaaaggaataccgttctaagtcctcactaagacttcaatcaacaaaatattcaactggagttggtcttgtctatgcatcatcagaggaggaggatgtctgtccaacttgtcttgaagaatacactaaagagaatccaaagataatgacaaaatgctctcatcattttcaccttggttgcatttatgagtggatggagagaagtgacaactgtcctgtctgtggaaaggtgatggtattcgatgaaacgactttcacttgattacaaggtctgtgttgtggatgaagtcagcaactgaggcatggaagaatataagcttatagacattgtgaatactacatattaagtgtctgtcatgtatagtaagtatgaaaagtttccttaaccattgttgtgagttcattctaatcccacttgtttttgtgtttaaaaatttccgcatgtccaaaaccgtgaagaaagaaagaatatctaattttagatggaaactttgtgatgatggctttaacaaattaacctgttattatttttttcaaaa

SEQ ID NO: 4108 - DNA, 1889 bp, Glycine max
tgattgtgtgattcttttcatctccatgttatgttgcaaccccgcattaaaccctcaccttctttctttcttccttctcatcacaaagacacaagctttcttcctcaactaccctacccaacttcttattccactcatcacttcctttgaaattgaaaccaccaaaattgtttttttttttctccttcactcgtagtaatattttgaaaagtgttgtgctttgggttgagaattgtggcagggcctaatgggtaactgcctagattcttctgccaaggttgatgcagctcagagctccaaatccacttctgcatcaggaatctcaaaaactactccttccagtttatctattccatcatacagtgaaaaaagcaatgcctcaagtcttcccacaccaaggtctgagggtgaaatcttgtcttctcccaatcttaagcccttcacattcaatgagctaaagaatgccacccgaaattttcggcccgatagtcttctcggtgaagggggatttggatatgtctacaagggatggattgatgaacacacatttacggcttcaaaacccggatcaggaatggttgttgctgtgaagaggctgaaacctgaaggttttcaaggtcacaaggagtggttgactgaggttaactacctcggacaactgtaccaccctaatctggttaaattaatcgggtactgcttggagggagagaaccggctattggtgtatgagtttatgcctaaagggagcttagagaaccatctatttagaagaggaccgcaaccactctcttggtcggtgaggatgaaagtggctattggtgctgccagaggactctcctttcttcataatgccaaatcacaagtcatataccgtgattttaaagcttctaacatcctgctggatgctgagtttaattcgaaactctctgactttggtttagctaaggcgggtcctactggtgatagaactcatgtgtccactcaagtcatgggtactcaaggatatgcagcacctgaatatgttgcaactggtcgtttgacggccaaaagtgatgtctacagctttggagttgtgttgcttgaacttctatccggaagacgcgctgttgataaaaccataaccggcatggagcagaatctggtggactgggcaaaaccatatttgagcgataaacgaagactgttccggattatggataccaagttggagggccagtacccacaaaagggggccttcacggctgccacacttgctctacaatgccttaacagtgaggccaaggcaaggcctccaatgacagaggttttagcaactctggaacagatagaggcccccaaaactgcaggcagaaactcccattcagaacaccatagagttcagactcctgtgagaaagtctcctgcacgaaaccggtcaccgttaaatctaactcctactgcgtcccctctcccagctcaccggcaatcgcctcgtgttcactaagctgtgaacatagagcatctgcatgcatgtaaattccttaaatttatcaggttgtgttttggaccgcgtgcgttgaggcatgtgtacttgaatgcaattttgggtacttgaatgcaattttgggtcatgcacggtagaatagttaacaccacatttatccaaatgctatgcaagttattgcatcagtattctgcatgtatatttcctttttccccacgtagaatgtcttgttgataataacaaccagacacattgcttcccttctattatgggtgcctcataatttgggtttttggcctaaaacaattccaaaacatggagagggttgttatgtacttgtaagttgttctattcttgtatatattatttttatcatatcactagttaatagttaatgtgagatttt

SEQ ID NO: 4109 - DNA, 663 bp, Glycine max
acataggtggctattcctgtgatagatttcagcactctcaatggagacaaaaggggtgaaaccatggcgcttttggatgaagcttgtcagaaatggggtttctttctgattgagaaccatgaaattgacaaaaacctgatggaaaaggtgaaggagctaattaatattcactatgaggagaacctgaaggaaggtttctaccagtccgagatagcaaagaccttggagaaaaaacagaacacctctgatatagattgggaaagtgccttcttcatttggcaccgtcccacttccaacattaagaaaatcacaaacatctcacaggagctttgccaaacaatggatcagtatattgaccaactcgttacgctggcagagaagttatctgagcttatgagtgaaaatcttggtttggagaaaaactacattaaggaggcattttctggaacaaatggacctgctatgggaacaaaagtggccaagtaccctcaatgtccacaccctgaactggttagaggacttagagaacacacagatgctggtggcatcatcctattgctccaagatgaccaagtgcctggcctagaattcttcaaagatggcaagtgggtggagattccaccctccaagaacaatgccatttttgtgaacaccagtgaccaa

SEQ ID NO: 4110 - DNA, 1567 bp, Glycine max
acggctgcgagaagacgacagaaggggagacgctgaccctctttggctcgccccaccctatttctcaaaacgctgtcgttccccgccacgccatgtcccgctcctccgaaacctcctttcccaccctcactactatctccatctctttctctcaactccaagataagaacgccgacttgtcattcaagattgaagaaggctttggacccaatggattggggattctatccgtcactgatgttccaggatactcttcattgcgcagaaatctattgcatcttgcaccaagattggcaaatcttcccaaagaagtgaaggaggatcttgaagatcctcatagtataattttggttggagtctcggctacgtgaaacttgaatctgggaagccagatattttaaaaggatctttctatgccaatcccatacttgatacacctacaacagaggcttctttgatacaacggtatccatcatattgcagatcaaacatatggcctagaaacgctttaccagaacttgaagtggctttcaaagcacttgggaaactgatatttgacattggattgatgttggcatatcactgcgatcaatatgtatccaaagggatgaaaattcacaaggatgaaggtctggaatcaatacttcatcgctcccgctgtcataaaggacgtttgctatattattttccttcacaacagggagtcccagatggcaactctttgtcttcttggtgtggatggcatactgaccacggttcactgacaggtctgacttgcagtatgtttacgagagatggtgtagaaattgcttgccctgatagtgctgctggcctctatattcgaacaagaaataatcaaattgtcaaagttgtctatggaaaagatgatatagcatatcaaattggtgaaaccactgaaatactttctggaggttatctttgtgcaacacctcattgtgttcaggctcctaagggggaggagtcctctggtattgagcgctcgacatttgcgttattcatgcagcctgactgggatgaaaagctcaattttcccgaggaagttcacattcataaagagcttattccatcaaatgctgcccttacttttggagagtattcagagatgctgctcgacaaatattaccaccaaaaacagaactaacttgttacttctctgccaacaagcataactggttgaagggacttagcttgttaattcatgagactaaaataaaattgtgtgaatgtgtagtcgctattggataatagcaaaagaaaaggataactgggtaaggttacaagtgtaactggttgaagagacttagcctgttaattcacgggtaaatgtgtagtcgctattgggtaatagcaaaagaaaaagaaaatttttatagattacgtggaatagcaacatgattccccggggacagaaatatagcccatttaatttagttaacaggatattaactcatgggatggaatgaaagttactgtacaatccaatacttatgttctttttctttaatgggaagtaaagcaatgatatcgcctaaaaaaaaaaaaaaaa

SEQ ID NO: 4111 - DNA, 939 bp, Glycine max
ttccctgtagtatactgagtgacccctagggggaggtttcgttaaagcatgtttcaatgagagaccaccagtaccccctggttaagtttgatattcaacccttgaaaaaacacctttatgtcgagcaccagcatggaccaagctatatcgctcagtgacttgaacgcttccccagtgagatatttcagtttcccgttctagctcctcaacaacagcaaaggcattgttattttcaaaatgaataagtacaggagaatatgaatacgggggatgattttcatatggcccgtatttcaactctgtaccagcacgtttagtggggtccatcactgtgaatgattctacccgagtgcttggagtcttaataaaagttgtctgttgcttgacatgatagggagacaataatattgcactatcacggaaataaaccaactgtgactctgattgacttatttctactgggaaaggttccagagaatgtgtcaatatgtaaagcacctctagtgttgtggtttcacctttacttaatggagttaacaaagttatagagaaaaacttagttccatttggtccatcaggtagctcggcagatttgacatctagaggaacataagttttcttcttcctcttcccagaagttgcagcagctctgactattgctagatgttctacttcagtgggtgaaaaggcaatatgtacttctgaagtaggagatgtccccaaattttcaaccttcaacgtcaagtacaccttaataatgtgagaagtcaagtcaatcctgcgttcagcattggcgatctgaaggtgttgggaaggagaggagttgacaattgagagaagggagagaaagaggaaaagggttagcagaggttgaggaaccattgcagttgacagaagcaggggagactcgggcccccgcctcccgtcctctcgcggccg

SEQ ID NO: 4112 - DNA, 1824 bp, Glycine max
tcagctacgtaggcccccccccccgtcttagtcttccctgcttccgtcaactgcaatggcaatggcaattgcaatggttcctcaacctctgctgacccttttcctctttttctcccttctctcaattgccaactcttctccttcccaacaccttcagatcgccaatgccgaacgcaggattgatttgacttctcacattattaaggtgtacttgacattgaaggttgaaaatttggggacatctcctgcttcagaagtacatattgccttttcgcccactgaagtagaacatctagcaatagtcaaagctgctgcaacttctgggaagaggaagaagaaaacttatgttcctctagatgtcaaatctgctgagctacctgatggaccaaatggaactaagtttttctctataactttgttaactccactaagtaaaggtgaaaccacaacactagaggtgctttacatattgacacattctctggaacctttcccagtagaaataagtcaatcagagtcacagttggtttatttccgtgatagtgcaatattattgtctccctatcatgtcaagcaacagacaacttttattaagactccaagcacccgggtagaatcattcacagtggtggaccccactaaacgtgctggtacagagttgaaatacgggccatatgaaaatcatcccccgtattcatattctcctgtacttattcattttgaaaataacaatgcatttgctgttgttgaggagctagaacgtgaaattgaaatatctcactggggaagcattcaagtcactgagcaatatagcttggtccatgctggtgctcgacataaaggtgttttttcaagggttgaatatcaaactaaaccaggtggtactggtgtttcttcatttaaacatcttttagcgaaactaccccctagggttcactcagtatactacagggatggaataggaaatatttcctcttcacatctacgtacagattcttggaagtcagaacttgaaattgaacctcggtatcctctatttggaggctggaaatcaacctttgtcattggttatgggctaccattgcaagacttcctttttgagtctccggatggcagaagatacctcaattttacttttggttgccctcttgtcgagacagtggttgacaagttgattgtaaaagttgtgctgccagagggatccaaagatcccacagttgagattccttttgaagtgaagcaacatctagagatcaagtattcatatcttgatgttgtcggcagaactgtggtggttctagaaaaaagaaatgcagttcctgagcataatgctccttttcaggtgtactacagttttaaccccatattcatgcttgctgagccattgatgctggtatctgcatttttcttgttttttgtggcttctgtggcatatcttcacattgatctttccatacgcaagtgatgaacacctagctagtttcttgaaaggcagtgactgagcagatccaaggttccttatttttgaaggtcatattgcattttggcaattttgtatggagttaagaggattaattgcagttatagatatacttgtttgtacattttttcccaggcaatttgatcttgtgccattcatccaactagcttaaaaccatttcttccatttaagaaaacataggatatgttcgttaaaggccatcctaaaggcacgtaatgggaagaaacttgtaagatcttgcttactaggtattagaaatatttatgtgatacttagcaatcaatatacaaactttaaatgaaatcaaaaaaaaaaaaaaaaaa

SEQ ID NO: 4113 - DNA, 1763 bp, Glycine max
tcgagtcagctacgtaggccccccccccccgaattaactgcaactttcttttcttaatttctctctattagtctgcatgctctgcaaactgagcatggctcctctcgcattttccttcttcttcatccttatcacattcttttcttcatcatctgaagcgggatccgttggaataaactatggaagggttgcgaacgacctacctacaccagcgaaagtggtggagcttctgaaggcacaaggtctgaaccgtgtgaagctctacgacaccgacgccaccgtcttaaccgcgtttgcaaactcgggaatcaaggtcgtagttgccatgccaaacgagcttcttgccaacgccgccgcggaccagtccttcaccgatgcgtgggtccaagccaacatctccacctactaccccgccacgcaaatcgaagccatagccgtcggaaacgaagtcttcgtcgaccccaacaacacaacaaagttcctcgtacccgccatgaagaacgtccacgcttctctaacaaagtacaacctcgacaaaaacattaaaatctcctcacccatcgcactctccgcgctccagaactcgttccccgcctcatccggttccttcaaaaccgaactcgtcgaaccggttatcaaacccatgctcgacctgctccgccaaaccggttcctacttaatggtgaatgcgtatccgtttttcgcttacgctgcaaactctgataaaatctctttagactacgcgctattcaaggaaaaccccggcgtggttgattccggtaatggtttaaaatacacgaacttattcgacgctcaaatcgacgccgttttcgctgccatgtcagcactcaaatacgacgacgttaagatcgcggtttcggaaacgggttggccttctgctggggactctaacgagattggagccagccccgacaatgcggcgtcgtataacggaaacttggttaaacgcgtgttgagtgggagtgggacccccttgaagcaaaatgagtcactcgatgttttcctcttcgcgcttttcaatgagaaccagaaaacgggtcccacgtcggagagaaactacgggctgttctaccccactgagaagaaggtttacgatattccgctcacggcggaggaaatcaaggaggcgccgccgtcaggagtagggaagagccaggttccggtgagtggtgaggtgtcaacgacgacgtctaagggccagacgtggtgcgtagctagtggcggttcttcggagaagaagctgcagaacgctcttaactacgcttgcggagagggtggggctgattgcactccaattcaaccaggtgccacgtgttacaatcctaacaccttggaggcacatgcttcctacgccttcaacagttactatcagaagaaggcacgtgcatccggcacgtgcgattttggtggcactgcttatgtcgtcactcagccccctaagtatggtaactgcgaattccccacaggatactgaatggaccacggagatggattgtttctggtgaagccttgatttggatttaactgggatttgccggagtttttaggagcttttctcttctttgttatccattcgtagcacgtgtttaggctttgagaaatatgcgtttactgtttgtaataaatcattatgattactttggagggttattgatttctttgactcatttattttgtaattatctctatttatttatttttaaatgaagagaagtatagaatacatttcttttaaaaaaaaa

SEQ ID NO: 4114 - DNA, 1743 bp, Glycine max
ccacgattccacaccctcctccccccaacaaaataactgcaacctttctgaaacagagcatggctcctctcacattctccttcttcttcatccttatctcttacatttcttcatcatcagaagcgggatcaatcggaataaactatggaagaattgcgaacgacctacctacaccggcgaaagtggtggagcttcttaagagtcaggggctgaaccgtgtgaagctctacgacaccgacgccaccgtcttaaccgcgtttgccaactcaggaatgaaggtggtggttgccatgccaaacgagcttctcgccaacgccgccgcggaacagtccttcaccgacgcgtgggtccaagccaacatctccagctactaccccgccacgcaaatcgaagccatagccgtgggaaacgaagtgttcgtggacccgaacaacacgacaaagttcctcgtacccgccatgaagaacgttcacgcttctctagtcaaatacagcctggacaaaaacattaaaatctcctcacccatcgcactctcggcgctccaaaactcgttccccgcctcatccggttccttcaaaaccgaactcctcgaaccggttatcaagcccatgctcgacttcctccgccaaaccggttcctacctaatggtgaatgcctatccgttcttcgcttacgctgcaaactctgataaaatctctttagactacgcgctgttcaaggaaaaccctggcgtggttgattcgggtaatggtttaaaatacaccaacttgttcgacgctcaaatcgacgccgtttttgctgccatgtcagcagtcaaatacgacgacgttaagattgcagtttcggaaactggttggccttctgctggggactctaatgagattggagccagccccgacaatgcggcgtcgtataacggaaacttggttaagcgcgtcttgagtgggagtgggacacccttgaagcccaatgagtcactcgacgttttcctcttcgcgcttttcaatgagaaccagaaaacgggtcccacatcggagaggaactacggcttgttttatccaagtcagaagaaggtttatgatattcagctcacggcggaggcgccaccgtccggagttgggaagagccaggttccggtgagcggtgacgtgacgacgtcgtctaagggccagacgtggtgcgtggcgaatggcggttcttcggagaagaaactgcagaacgctcttaactacgcttgcggagagggtggggctgattgcactcccattcagccaggtgccacgtgttacgatcctaacactttggaggcacatgcttcctacgctttcaacagttactatcagaagatggcacgtgcatccggcacgtgctattttggtggcactgcttatgtcgtcactcagcctcccaagtatggtaactgcgaatttcccacgggatactgaaatgatggagatggagtgtttttggtgaaaccttaattgatttggatttatctggatttcgcgggagtttttaggagcttttccattggtagcacgtgtttaggctttgagaaatatgcgttagcgttactgtttgtaataaatcattatgatgattactttgtggggttattgatttccttgactcatttatttgtaattatctctattttttaatgaagaataatatagaatacatttcttttgaaaaaacctggagttacccaacttaaatagccttgtaaaaaatacccctttt

SEQ ID NO: 4115 - DNA, 2512 bp, Glycine max
gcgcccacgcgtccgtacggctgcgagaagacgacagaaggggggttaaacaaggaggtaccaaatattgttagtgaatttgttgggggcaccagtttagaaattcaggagaggtacaaaactatcaaggaaaagaacattctcaggttggaggagccttctcaaaactcaggagaatatgaatctactattggcatatgtgtcgcgcgtcccctgagtagctgcattagattcttttgataatcttttttgtcgccgttgcctgatttttgactgtcgtctgcatggctgttctcaacctttaatatatcatagtgaaaagcagacagtttggtctgatcctgaaggagacaggaaaccttgcagtgatcagtgttaccttcagttaaaggtagtaaaaaatgtgacagaagattcaacttctgggtctgatcagaataagagaactacaattacagaagaggcagatgtgatattggctccctccattatagaggaacctagtaatcagagtatagcaccttttccaacagaaggtgattgtcttgggatctctcaatttaaaatggtcctatctcaggctcgggggaaaaatggaaagtcccaaatcagtcagacacagcactccgtgactcatcactccctcctgatgattctcagcattcttataaaaagctgaagacaatatctgatgatgtagttactggcaaatagtgattctagcaagaacataaattttggtgcatgtgatgaaagtatacatacaattactagtggacttttggacaaatctgttaaagataattcaaataaattaatagattcttctagcacttgctgtagtgatgagcaggacaaaagtattggggatggaccaaaagttcctacaaataagacagaatttaagaagttgtccaattcaatggaagggaaagttgatgggatgctaaggggtttcagattggaaacctctggaaaaagaattatacttaaggggagtagaaatgtttggcagaaacagttgcctcatagcaaggaacttactttctggcctgaagacttgtatggaaatatctagttacatgcattctggaggagtgtcaatgccccatggatctactgttgctcctagttcaatcatggaagacaagggaaaatttgatgctgactgcacagaccaggagatgccatctaggtcacggttgctgaggaaaaggggcaaaacaaggaagtttaaatattcttggaaatctgctggccacccatcaatatggaaaagaattgctgatgggaaaaaccaatcttgcaagcagtatacaccatgtggatgtcagtcaatgtgtggaaaggaatgtacttgtattaatggtggaacttgctgtgagaaatattgcggttgttctaaaagctgcaaaaatcggttcagaggatgccattgtgccaagagtcagtgtagaagtcgacaatgcccatgttttgctgcaggacgggaatgtgatccagatgtctgtcggaattgctgggttagttgtggggatggttcgttaggggagccacctcggcgtggagaagggcaatgtggaaatatgaggcttctattgagacaacaacaaaggattctcttggcaaagtctgatgttgcaggatggggagccttcttgaagaacccggttaacaaaaatgattacttaggagagtacacaggagaactgatctcccaccgagaagccgataagcgtgggaaaatatacgatcgcgccaactcatcttttctttttgacttgaatgatcagtacgttcttgatgcttatcgcaaaggagacaagttgaaatttgcaaaccactcatcaaaccccaattgctatgcaaaggtgatgctggttgctggagatcaccgagtaggcatatttgccaaggaacacatcgatgctagtgaggagctcttctatgattatcgttatggtcccgatcaagcaccaccatgggcacgtaaacctgagggttctaagagagacgaatcaacagctcctcaaggcagggctaagaaacaccagtctcattgatgagcctgggccaaagtctagcgcatacaaatttttggcttctacattatatatcctatgcataaacaaatttgtgatatcccatgggatagattcaagatcaacggtcacaaaaggagataattagtggtttgctgatgctaatgtgcctttaaataggcaagagaagcaggcatgaagcaaattaatgttagcggcaacaagctagtagaaacaaacctagcagttcgtttcggatgctaggcgtgacatttcggcgaacttgttctgttcaaacttggttttgctcttcattatgtgattgtgagacatccaagttattattaaatggcttggtattcaatttggtttcttagtttaatttaaatacttaattaaaaaaaaaaaaaaaaaactcggcaattaggttattttgttttctaattttatccaattagatcattttcgtc

SEQ ID NO: 4116 - DNA, 1382 bp, Glycine max
tcagctacgtaggcccccccccccaagattttattctcgaacgtccaccaacctcaatttcaatctcatccacatctcaaaatctcaaatcaaaaatcgaatattcgaatttcaccgcttcgaaaccctttctttatcgccagaaaattttcaaaccctaaaatccgaatttcgctgatgatctttcctaatcgtcatcataccaaacaatttttcttcatatctgtctccgggagagtcgctttgacgggaaacaagggttttcgctgcaattctaatcggtcaaattggaatcgtcggatcaatttgtcatgaagttcctggagtgttctgctttagatcggcttaatgatttcttgggtaatttgaatctgggagaacgtactatcaaaggatgccttgaagcttatagttgcaaacatgctggatcggataaaaaactctccatcagtttggagacagagattcttgattatcttgggaaatcatccgacactgattcctcctcaccagatcaaaccttcttaaccagaaccagccgaaagacattggtttacctggttctaaccctgtatcacatgtatcccgattatgacttcagtgcagttaaggctcaccagtttttcacagaggaatcacgggacagctttaagcagatttttgatacctacatgcatgaagcttccaaggaatgggctgaaactgttgggggtgcttctttgctggacaccttgttcaaggcccttgatgaggtggtgaagttagtggattgtgatatttacggttatgtccctgattttgaagcagatccattactagagagtggaggaacaatatggtcctttaatttcttgttttacaatagaaagcttaagcggattgtatcttttcgattcagttgttttagtaacttgattgctgacggactgcttattgatgatatacacaatgagtacgatgaagagatatttgctgacatggatatatgagtcgcttctacctcgattagttagcatatgaagacttctgatcctcccatgtgtagttctgtaatataagatggtttcagatgcgtagttctgtatatcaaagaccgtttcagtgtggcctgagtcgtagatatagcatatgtatccgatccgtatcaatatagtagatttaacatctgtatcttcctcctatgcacatcgtaggtttggattctgtatcatactcgactgttaggacacacctctggtgtaatattatcaaaaaacatatttgaaattggtagagtattgttacattcatctgaaaatgatgcttcttttcctccgtaattttgattacggagggttaaggcaagggtgccccgagccacacagaatttttgatcaatagtt

SEQ ID NO: 4117 - DNA, 1400 bp, Glycine max
cctacgttaacgttaacataaacattaacaacagcagctacgtaggccccccccccagagctggatttggcgttgtccatagggggtagtttcgggaaacacacggtggagaagcccgcaccggattccgaagcgcgtgtttcaaattcggatagtcgcgatggaatgcgcgtggtggtggagccgagcgacaagctcgacattcaggcgttaaggagaatggaggcgaaaaagaagacagagcagaagagggagcgcgtgagggaaccgtccgagcccgaattgaaacgggatttcaagagggagaaaacagaatacgggaacggcgttagtggcgcgtggaatgcgacgacgacgccgtttgacctgcaccaattcccgacggtgcagtacttgccgttgaataacgggtctccgttaccgtgctgggtcggaggggaaaagattgtgggtgctggagttgacggcgttaacggcggaagaggaggaaatatcaaagcccagtcgaatgggtcttccaggtgcagttcttctgtggtttcggattaccaaagctcttctggtgaagatggaggcagcacagacagccacagccattcagttcattccttggcagaaccaacccaattaaacacttccaaggaaacaataagcataggaacccaacctgaagaaagtgttgtttctgcttcatctcaccccatcatgagacccaaacaaggaaacaacaccatcaccaccatccaagagatgaagcacattgcaaaggaaaaaactcaagaaccaataatattgccaattattgatctcaaacctttgtccaacgaaaacataaccaaagttgaaataatgggaaagactccaaagcctctctctcaaacctcttcttcactccctcaaatgccctatgtgttcacaaaaggggacaatgggagaacggttaatgggtttctctacagatacacaaaatctgaggtcagcattgtttgtgtctgccatggaagcacattttcacctgcggagtttgtgcagcatgcagggggcactgacaccacgcaccctctaaggcacatcactgttattccttctgcatttgggtgatcttaattccctttttttgtgtgtaattaggcctattctcggttctgcgtcgtatagcgtgtttggaaatacgttgagatgtaagaaatcacgttgagacgtaaaaaatcatcaattctgggatgtggaagttataaccattaggtgaaacctagcactctataagatagagcagcggaagaatttgattcaggtgtctacgttatgtgatatctttaatttaggcagggtatatattttacaggagttttttgttaactacgctaactgcattaacaaacaatctccaattgagattg

SEQ ID NO: 4118 - DNA, 727 bp, Glycine max
aacaccacaccaccaccaccataaatcaatccttgttcactcttatttcttatagctccaacaacatccctcatataaaaaaatggcctctctccgttttctcttcttagcttctttcttcattgttttgtcactttccatcaacattggtgaggtccaaggggcaaatagaaaacttttggcaccaacatttcctgacctagggaacattcctggcctggaatatcctcctctccccccaatcaccaattggccagaatacaggttgccatcatacttaagacctaattaccccgcaattcctgcaagttattaccgttacactccacctgcgaaaacaaccacaatcacatcttccaagccttgatggccacatgcatgcaatttggtatatacatattattgttatgattgttagcatttcaaataaatcggttcatcaatatggccatgcacaagcattcgatctctctccaagtttaattattactttgtggtttatttaatctgtattccttagattaatggggtgaattcaatttgcgaaatccttgttgatcccgtgatgtttctctccccattatatgttgttcacaatatttggtgaatgaatgaaaaaaaatgggcttgtttctttaatgttactagaaattaatgtatcatcactgacgagtgtgttgaagtaaatgaaaggctggtttctgcgcgctgaaaaaaaaaaaaaaaa

SEQ ID NO: 4119 - DNA, 2367 bp, Glycine max
aagctcggaattcggctcgagggctgattaaaaaaaaaacaaagagactcaaaaaagagttctccgtcaactgaatctccatcatctttcccctttcccccctttcgcttcttcgtgttttttcttctctctcacttttgcttcttcttcatttcttcacgatccactctctctcgtagttgtggtggtgctggtcgcgtgcgctcatggtgatcgagcatgacattgagagttgcgggagcagagcgatgcaatctttgcacgcgcatcaccctcgccaccaccggcagaagctggaggtgtacaatgaggtgcttcggcgaattcaggaatcggattgcgaggaggggcatgttcccggcttcgacgatcagctttggctccacttcaatcgccttcccgctaggtacgcgttggatgtgaatgtggagagggcagaagatgttttagctcataagagattgcttaagttggcggaggaccctgcttctcgacctgcatttcaagttcgcttagtacaggtatatccttttggtggtgcaaattatgctgattccatacatttagatccttctgagaaagaagatgcacaaagttctcttaactattctttaaagcagggaattcatccaccacctacatttggttcatcctctaaccttgaagctcttgcacttcaaacaaccaaaaataacattgaagacgggggaagtgctatgagcgtaacaccttatttccggcccatgcacgagattaccttttcaacagttgacaagcctaaactccttagtcagttaactgcaatacttggtgagatgggactgaatattcaagaagctcatgcattttccaccactgatggattttctctggatgtctttgttgttgagggatggcctaatgaggaaactgaggagctgaaaggtgtgttggaaaaggaaattttcaaggttaaggagcaaaatttgtcaaatcagggtatacattatgctaccaacgaacaataccaggcaaggatggaaccctcccctcattgcattcaaataccatctgatggagctgatgtctgggagattgataccaaccagctgaaatatgaaaacaaagttggctctgggtcatttggtgacttgtacagaggtacatattgtagtcaagatgtggctatcaaagttcttaagcctgagcgcataagtacagatatgctgagggagtttgcacaggaagtttatatcatgaggaagattcgacacaagaatgttgttcagttcattggcgcatgtactaggcccccaaatctttgtattgttactgagtttatgtctaggggaagcttatatgactttctgcacaaacaaagaggtgtatttaagcttccatctttgctaaaagtagcaattgatgtttccaagggaatgaactatttgcaccaaaataatataattcacagggacctcaagactgccaatcttctgatggatgaaaatgaagtggtcaaggttgctgattttggggttgccagggtgcaaactcagtctggagtgatgacagctgaaactggaacataccgttggatggctcctgaggtcattgaacacaaaccatatgaccagaaggcagatgttttcagttttggaatagctctttgggagcttttaactggagaactgccttactcttgcctgaccccattacaagcagcagttggcgtggtgcagaagggcctgcggcctacaattcccaaaaatacgcacccaagactttctgaacttcttcagcggtgctggcaacaagatccaacgcaaagaccaaatttctctgaaataatagaaattcttcagcagatagcaaaagaggtcaatgatcacaaagataaagcatcccatggctttctctcagctcttagacgggcccatcattgatattgatataagagtattacgcgacagtatagcctttttgtcctgtatagtagtcagactctgactaaatatctattgagttcgttgtttataatactcttgaaagattccgttgtattgtgtttgccttaaatttctgttacaatctgcgtctttctcccatttgtctgtcaacttattcgcctgtgaataggatggattcaagtttagcgaaagtcgaaaattgaaggtatcattcacccattaattctttggtaattgactattgtattccatgctttttgaatgggatctttttcggtgtactcccctgcacccaaacccctgaagttgactagtagaggcgttatatgatgagacctgagatgtacaaggtttatttgtaataaaattggtatgttattatgccatttgattcaaaaaaaattaagacacaagtgtcatc

SEQ ID NO: 4120 - DNA, 1904 bp, Glycine max
  misc_feature (101)..(105): n is a, c, g, or t
  misc_feature (139)..(143): n is a, c, g, or t
ttgcagaatctgcaaaagctcaagcagaatctgagctttcgaatgcgaagaagacagcaaaccatctttcttctatgattgaggagtcaaattacaaggcnnnnncacaaatgagagatgtagaaagactagagaagtnnnnnaagcgcctacgtggcacacttgctgtcgcagagaagtgagaattatgagtatgcacaagtcatgagagagttggaatatctcaaaaaggaattgttcaagcttaagcttgatgtggcttctgtgatggatcagaaatccagggcagagaaggaaattgaagcatcgaactctaagatgttatcatctgcaccgctgcgagaagacgacagaagggagattgaggaggccaatgaggagcaagtacttgctgaactagctaggatcgaggcttcgaaagaacttgcagatattgaggcccagagagaaaaggaagcaaatcaattttcattcaatttggaaattgcgaggagaaagttgaaggaggccattgaagagattgatgagtcaaaggagcttgaaatgaaattggctgtgacaatatcagatgttgatttcttgcagaacgagttaaagtcagttaaggatatgaataaaagggttcaaggagatgggagtgtaaagcaattggaaggaattttcaggaaaggggaggaaccagaatactctatagtgttgcaaactataacggaagaattggaggcagctaggaaagaattagctttggttagagaagaaggttttcagtttatggcctctatggatgtcataagaaatgagttgaagcatgtcactgctgagacagatcggttgaagaagaaggaagggaaagtggactcaacagttcaaaatctcaatttcaagattttgagagcaaagtctaaattagaagctgtgtctgctgctgaggaaaaggccagatccatagtcatgagtctgtctcatactcttgaaaagctgaagacagaaacagaagaagcaaaaaaaggaaaatgaggatgtaagccaagaggttgcagccagcaaggaagagattcaaaaagttgagtttgagatagacatgacagaggaaagattgcaaggcatcatgcaagagctggaagtagccaaagcatcagaagctctagccttagagaagctgaaaactcttactgagaccaccatgagagaaagagctttaacaacacagcatagttccatgatcactatctcaaaatttgagtatgagtatctaacaaatcatgcagcctcagcacaagaaattgctgataaaaaagtagcagcggctgaggcatggattgaagctctcaaggccagcgagaaggaaatactgatggaaacaaaaatagctcaaagagaactcaaagaaacaaaactggagcaagaacaggaggtttacacgaaagagaagatgctttcaagaagagtagttagtagtagtgaggagtttgacaattggccaagaaaacgcgagaagagttcatccaagaacttccagagagccatgtctagaaagagcatcaaacttaatggcactataactcctgcaaggggagcaaagtttcagaagactgcttcacctgcagctcggcatatcagtccttttactattaagaagagaaagaaggtaataccaaatttgacaaagctttttaggggaagaaaaacactagggatacatagtgaaattaaatagaaaaagtgataattatggctcttgatatttatcactgctaaaatttagaagcagggaagagtgtgtgtgaggcaacatatctattagtgagtgtcatgtaattcccatcacagaacccatgttctcactatgtcccttcttcccttccttttaatattatcattcccacctggctcgagtgtttttc

SEQ ID NO: 4121 - DNA, 1276 bp, Glycine max
ggtttaatttgattaggtgtgtgttaatatgggtgctagtttttcgattctggtgtgtggaattgaaaagttcaggttccatatcaagttttgagttcagttcatattctgggggtgtggaatttagggaaaggaattcaactttggggggtgcaaaggggtttactttggtttggtgtgtgttaagtgtcaacatgggtgctagtttttcctcttgtgtttgtgatggtgatgctaccccttcgaggccaaggcttggggacatacccgagagttgtgtggcattggtgttgatgtatttggacccaccggatatttgcaagcttgcacgattgaacagggcgtttcgcgatgcttcggtggcggatttcatttgggaatcgaagttgccttcgaattataagttcattgtggagaaagctttgaaggatgcctctgtggaagaattggggaagagggatatttatgccagactctgcaggcctaattcgtttgacaatgggaccaaggaaatttggctggataagaggacaggtggggtgtgtttggcgatttcttcccaagctttgaggattacagggatagatgatcggagatattggagtcgcatttcaactgaagagtcaagattccacacagttgcttatcttcaacaaatttggtggcttgaagtggaagatgatgttgattttcagtttccacctgggaaatacagtgtgttttttagactccagcttggcaggtcatccaagagattgggtcgtcgtgtttgtaagacggacgacattcatggctgggatataaaacctgtaaaatttcagctaacaacttctgatggtcaacgtgctgtatcccaaagtcatttggataatcccgggcactgggttctctaccatgcaggaaactttgtttccaagagtcctaatgatctgatgaagatcaaattttcattgactcaaattgattgcacgcataccaaaggcggtttgtgtgtagattctgtatttatatgtaatagcgatctaaaaaaagaggtgtaggtttggttttgtaggaaggaaatctgtatatagtggaaatgagctgaggcacctgagtcctgagttgacttttgtcatttgggttacaggggggagttaagtagagttgattcttccaaatatgccccaacaacactcccctttagatttttttgtttctttgatattcatagtccctttagatgttttgtttcttcaacaggacaacgtttaagaggtgcacagaaatttacacc

SEQ ID NO: 4122 - DNA, 628 bp, Glycine max
aaaaccctagccgccgccgccccctcctcttcgtcctgcaagcagcgccgccgccttccaccggcccgagctccagccttcccttcaaccatggctgacgttgatgtcgaccccgaggtggcggccgccggccccaagaagaggacgttccgcaagttcagctaccgcggcgtggacctcgacgctctcctcgacatgtccagcgaggacctcgtcggcctcttccctgcccgcgcccgcagaaggttctcgaggggtctgaagaggaagccgatggcgctcgtcaagaagctgcgcaaggcgaaaagcgaagcccctgctggtgagaagcctgagcaagtgaggacccacctccgcaacatgattatcatgcctgagatgatcggaagcgtcgtgggcatctacaatggcaagtgcttcaaccaggtggagatcaagccggagatgattgggcactacctggcagagttctccctgtcgtacaagccggtgaagcacgggaggcctggtatcggtgccacccactcgccgaggttcattcctctccagtgagaatatggccaggaaaatcgtctgagatgcctggaatccagtgttcttatcctagacaaatgtagcacctggtata

SEQ ID NO: 4123 - DNA, 1789 bp, Glycine max
cggctcgagaacagcaacaattttcatcttatgagttactactttattagagtctagcaatcaataatttattcttgatcatcggctccagcaaccaccacatgaaaatgaaactctctctctctctctcacacacacacactgtctcagactcaactcaacataaacactactgatcactgatcaccacaaacacttccaccacctcaacctaacatgtcatcgcagggttacctccaccgcataggcttcaccaggaagagagaaaggctcatcaacccaatggaccgaacctcaccactgccaccatcttcggttcagaaacaacaaggcatgtcagagtcacttccactaccctttctccctgatgaactcgttgttgaaattctctcgaggctcccagtgaagtctctgttgcagttcaggtgcgtttgcaagtcatggatgtcccttatttatgatccttacttcatgaaaaagcaccttcacctgtcatctcgaagcacccacttcacccaccacaggatcatattgagtgccacaaccgctgagtttcacctcaaatcatgttctctgagttccttgttcaacaacctttcaaccgtttgtgatgaacttaactaccctgtgaagaacaagtttcgccacgatgggattgttggctcttgtaatgggttgttatgttttgccataaagggtgattgtgtgcttctttggaacccctccatcagggtctccaaaaaatcaccacctttggggaataattggaggccagggtgtttcactgcctttggccttggctatgatcatgttaatgaggattacaaggtggtggctgtgttttgtgaccctagtgagtattttattgagtgtaaagtgaaggtgtatagcatggccaccaattcatggaggaagattcaggatttccctcatggtttctcaccctttcaaaattcaggaaaatttgtgagcggcactctcaattgggctgctaatcattctattggttcaagttccttgtgggttattgtttccttggatcttcataaggaaacatatagggaagttctgccacctgattatgaaaaggaagactgttccacccctggtttgggtgttttacaaggatgtctttgcatgaattatgattacaagaaaactcattttgttgtgtggatgatgaaggattatggagtgagagagtcttgggtgaaattggtgagcattccttatgtgcctaatcctgaaaatttttcgtactcagggccttattacatttcagagaatggtgaagtgctgttgatgtttgagtttgacttgattctgtataacccaagagataactcgtttaagtatcctaagattgagagtggtaagggctggtttgatgcagaggtctatgttgaaactctggtttcgccaatgaagcatttaggttgttgaatgttgatgtgccacgcgaagcaagtgtaaggaagaataagatgtgtaaaatattttaagtcgtgtgattttatcgctggttcatgtatgttggcattaaatgtgtaatatgtatatgcagaagggaggggccaagcattgtatagatgttaatatttgatgaagctcagttatgtgttgttacttgtgtcgggttatgtatccatcactgatgtaaaaaaacactgcttcatctatttgttagtatatggaaattggtatatgctttcttgtattattgtgagaagcatatatttaatgactcaaaaaaaaaaaaaaaaaagcttatcgataccgtcgacctcga

SEQ ID NO: 4124 - DNA, 1566 bp, Glycine max
  misc_feature (16)..(16): n is a, c, g, or t
  misc_feature (1553)..(1553): n is a, c, g, or t
ttacctagaaacatcntatcgaaaaactgcctcagtgttctccataacaccataaaacactgacccaatctttctcctcctcctccctcacaatctgacacactaacacaccaaaattcaaattacattaccaaaaaaagaaaaatggtgggtacatatgcatatacatatacatatagactactatagagtgaaagtgatatacttcttgctattcaatttttatgtctgttttgaagttaattctgttcactctcctggcgcaaacacagatcaaaattcaaattgcaaagtaaaaaaaaaaaaccatgttcgtttcttcttcatcgcatgttccccgttggctccaagttctcctcacggagaagttctacaacgtttgcataattcacgaagaggcaaagaagaacgagaagaacgtttattgcttggattgttgcattagcctctgccctcactgtttgtccccccaccgctctcatagactcttgcagattagaagatatgtgtatcacgatgttataaggttggatgatgctgcaaagttaattgactgcaattccgttcaatcctacacaaccaacagcgcaaaagtggtatttttaaaccaaaggccacagacaaggaacttcagaggctccggcaatttctgcagcacctgtgacagaagcctgcaagacccataccacttctgctccctctcttgcaaggtctttcctttggtcactcccattttcgccctctcaccaacgttaccattattctttattcttattatatatattattattattactattctttttttctcttatttatgtaatgtgtgtcttctaataatgtttatgtttatgtttatttcctcaatttttttttctcgtttttgtttttgttttaaacagataaattatctcgtcagaacaacggactctctctgcggctacctcttcgagtgcaactacctgccgctactggaatctgggctcgacgatggtctaatgatgactcctgattcggttctcgaaccgtctggttcaggggggtacggaggggtggattgtaggaccaccttggcttgcactgccaccaccgagattgtgaggaagaagaggaccggcggtgccgctttccggcttccgttccggccggcgtgctcgccggtctcggaaatctcggcgtgtctcatgaaccggaggaaagggaacccccagcgggccccactccattgaagaacttgagagagagggtgagtttttttttatatgaaaagagaaaaaaaaacgtttattaaatattaatattctaaatactgttattattattatggagtttaaatctggggttggaacttactatacctttacagggagaaaaaaataacctcctagttttgtagagattatcaccctctgctttgttgctgctgtgtatctatctacccggattgttagaatttattgaggtttattactgcttctgttatagtactagtatatataatttgataatttgaaaaaaaaaaaaaaaaatcattcccggccccccccgccgcnagggggggcccgg

SEQ ID NO: 4125 - DNA, 1404 bp, Glycine max
acgcgagaagacgacagtaggggtccacggctgcgacgtggcgacccccccccgaagatacggaggctgctgctatcgaatactcggataaggaggaacatcttttcaatggcgtcccaaattacccgtgagtggtctggaatcaatacattcgcacctgctacccagactaagttgcttgaactcttgggaaaacttaaacaagagaatgtgaactccttaactatacttgtgatgggaaaaggtggtgttggaaaatcttcaactgtgaactccatcattggggatagagtggtttcgattaatcctttccagtcggaagggccaagacccgtgattgtgtcgcgatcaagggctggttttacattgaacatcattgacactcctggtctcattgaagggggatacatcaatgatatggcacttgatataataaaacgtttccttctgaacaagaccatagatgtactgctttatgtggatcgcttggatgtgtatagagtggacaacttggataaggtagtcgccaaagctataacagatagttttggcaaaggaatatggaacaaggccattgtaacactcacacatgcccagttctctccaccagatggattgccctatgatgaattcttttcacaaagatctgagtctctcttgaaggttcttaggtcaggtgccaggataaagaaagaagcctttcaggctgcttcaattcctgttgttttggtcgagaacagtgggagatgcaacaaaaatgacagtgatgaaaaggttcttccaaatgggactgcttggattcctaatctagtccagacaatcacagaaatcgcattgaacaaaagtgagtctattcatgttgacaagaatttgattgaagggccaaatccgaatcagagaggaaaattatggattcctctcgtgttcgctctccaatacttccttatcatgaagccaataaaaggactgatcgagaaggacattgcaaatgagagaaagccaacatgggagagacgcgatgctgcttttcggaagagagatttatattagttgtgcatttctgtgcccatgaaattccattgatgttttagcttcctttgctgacacattttagtttttgtctgttctatgagtgaaacttggatgattttccttatactgtaattgctagtagtctgccataggaatttgtttgtgcctgagaggattgcatgtatgctggtaagtttttggcttttgcatgattcagtttgttaatgttagtatttagttgtcttgtaaacatagctctagatgtggctactatcgataatagcttgatattctaataaaattagcccgaagtatcgatattaaaaaaaaaaaaaaaaaataattactgcagggcccaacagggattacgtg

SEQ ID NO: 4126 - DNA, 722 bp, Glycine max
attccttctttgtcaatattcgtactagaaattatgaataaatcaaagacatgaagtagatagacccttggcatttgtgtatttatatagaatattgtttcatccatccatctctcgtgttctaagaaatacatatccgattgaaagaataagtagcaactctgtagcctcttttcccatcatctccttacctcctcttttttcaaattagtcctgcagaagaagatcatcatgaggcgcttaaagtcaagaacaacaccacttttgtccaagtttgcgccgttgttggagccatggccaaatgatgctataagaaaggaactataaacctgatcaggacatttgacctgaggaaacatgccctctaggcaagtctgatgcttggcttttcatctctgctgttgagaatcaaataaggcatggctcacgtcatgaaattatttagcatatcatatctgtttgatattagtataagtttttctgtttactacctctcctccttcctttcccagttgggacaatgatatgttatgtatatccttctctgctctacaacagctgcttttgtaatactacttgtatgaaagttttattatacctcagtttttctcttaactgtttgttcaattggattcttagtttattgtattgattatgtgcaactggcatggccaggtaagaaaaagaactaaaaagcttactgttttctctaaattaattaa

SEQ ID NO: 4127 - DNA, 2442 bp, Glycine max
  misc_feature (3)..(4): n is a, c, g, or t
  misc_feature (14)..(14): n is a, c, g, or t
  misc_feature (27)..(27): n is a, c, g, or t
  misc_feature (52)..(52): n is a, c, g, or t
  misc_feature (59)..(59): n is a, c, g, or t
  misc_feature (69)..(69): n is a, c, g, or t
  misc_feature (2429)..(2429): n is a, c, g, or t
acnngctactctantgacattattatncgagatgtgtgtttgaataaatacnaattgtntggaacatcntcattgcatatcataatctttcagctacgtaggccccccccccccaagggtgattcccctgtaaatttttatctaaaggagaaaagtctaactgcattttgtggtttgagagtatgctagagctatggagttgagtatcatgttcatgttggtgtctagcatgaaatataaaggttgagtaattgttgatgatgggaaatttggttgatttttccaagagaacttttttaggacggccccactcctgaaacctatgtaggcatgtggaggaaattagactttggcagctgctgggtatagaatggtttgaaagttcacacaatttgacgttagcaatatttattgtttatcttttattctcccagaaaggagaaattagaaatgtagtttgcttgcctgacttgtaaagatgttgctgttatttctgtaagaaatgcattgtgttttatagtaaacagtaatgcctagattataataattcttgttcagggaggactattgatctctcctggaagttgattttatctgtccttcagtacacaccagcaattgatgtatggagcattggatgcatttttgcagaggtgttgacaggaaaaccactgtttcctggtaaaagtgtcgtgcatcaattagatttgattactgatcttctcgggacaccatcacctgaaactattgcaggagttcgaaatgacaaggcaaggaagtacttgatggaaatgcggaagaaatctcctgtgccatttgaacagaaatttcagaatgcagatccattggcacttcgcctattacaaaggcttttagcatttgatccaaaggatcgaccaactgctcaagaggcactggctgatcccttctttaagggtttgtccaaagttgagagagaaccttcttgtcagccaatttcaaaattagaatttgagtttgagaggagacgagtgacaaaagatgatgttagggaactaatatatcgggaaatactggaatatcatccccagttgcttaaagattacatgaatggaactgaaggcactcacttcctttaccctagtgcagtagatcaattcagaaagcactttgcttatcttgaggaaaatcatggtaaaagtggcccagtgattcctccagaaaggaagcatgtctcccttccaaggtccattgttcactctagtacaattcctcctagttcacaaccatcttttacttcatacgagaacaagcaaatggcattagaggcatcaaaggtttcgagatcagtagaatcaaattccagaagtcaattaaggagctcgtgacctccgccaagagtgccagcagccaaagcaggtcgaatcacagggccagttttgcactatgacaatgggagaaccataaaagacgcttatgaccaaagggtcgcttcctcaattcgtctctccacattgtttccatagagtgcagcaacccactaacataaaaactacctcagaaacatataagggtatttcacaacaagacaaacatccactcccatcccagcagtgtagcatgcaggggaagagcgatcacttaaatgatcctgttgcttccattgatgcgaaactgctgcaggcacaatctcaatttggtgctgtcgatgctgctgcagtagctgttgctgctcacaggcattcaggggcctttcagtatggattgtcataggttgtgaggttttagagagatgcatacaataaatatgcatgctttatgtaattgcctggggttggaaggaaggaaggaaggaagttgatcaaatttaagacgggtttaggtctggtaaggcttttccacttttgcattcagattaccatccttgtaattatatgtacatcatttaattgattaataaaaaaatgattgtttctctccaaaaaaaaaaaaaaattttctgaggaaaaaaaatagaaattgtaaataaagttctatcttgacaatgtttggtcaataaaatttgacaacggagttttaataagttattgccttctgcacaatcttgtgctgtaaacgagataacatgacaaattgtcaatgcataccagaaattgtaaaaccatgacaagttataaagcaactgatttttcaaacgcatgttgtttcgtaatggtaccctcccgaaaatcttgttgtagcatctgatcccatatcgagcataagccatgaatatttagatgtcttcatcaacacatggcggaagactcagctttctttacccacttcattgtctaaaacaagtcacaaaataataagaggtgtcgttcatgtgagcaactactattgcagcatcaacattgaagtcttatgaccaataaaatcttcccctcatgatcactcttgccttntgactcgcgtccg

SEQ ID NO: 4128 - DNA, 942 bp, Glycine max
  misc_feature (838)..(838): n is a, c, g, or t
ctaatacggcgccgggcacgcagcagcacgcgagcccaattgaatcaacgaatcaatcatcatcacatcacgacgacgcatgattctggtcttgctctgttccaaaactgaatcccaatcacgaagaaaagaatccctcgcttggatcttgcaacgtcgcgagagggatccatgatactcctgcagtctcattctagattcctgttccagaccttgttgaatcgggcccaaaatctcgaaaaaggagttgaactggatcaccactgggttgagtttgatgatgttcgatatcatattcaggtgtcaatgaagaatcctcatgttttgttgctatcagtatcgttgcctactccttcttcagaaactatttttgtctgtggacttccttttggagccatcgaagcaatcaaagctgcatatggtaatcttgtgcaaattcttgatcctccaagggatggctttaacctcacattaaaaataaatctgtcaaagcttccggcaaatcaagagcaaaaacatgcttttttggtaaaagttgcatcaataagggaggttgtccttggtgcaccattgagagtaattttagaacatcttgctgccagaactgttgctccagacctggatccgcttgttgcccttgttcatcggcctaacgagtctttctttctttttcctcaggctgataaggtgactgtagtgtatcctatgagattcaacgattcaatagacattgttctcgcaacttcattcctgcaggaatttgtcgaagccaggcgtacagctggacttaataatacacctccttgttcatggtctcttactcctccactggaactanaagaagttcccgctgcgaatgcaggatttgtgacatttgttatcttccctcgtcatgtcgaaggccagaaactggatcgtacagtatggaatctgtcacttttc

SEQ ID NO: 4129 - DNA, 1466 bp, Glycine max
acgagtataaatcactttgtcaccttttttcagatacctaatacatcaaatgtttctatgctgcctattctttcatctatctagatgaaagggtgattcagctacgtaggcccccccccctgataatttatgtctcatcttcaggggtatgatccttcatgtctgcgagagtttatattggaaatccttggcagaagttccccttatggaaatgctggattacaaatacttgataggaactggggagctggttggcaccttttatctttattgcttgctactaaaccttctcaaaggataagttgtttggatgctcttcgacacccattcctttgtgggccaagatggcgagtagtcccatcaatggatattatccgatggggtctgggttctactgcaatgcgtattagggagaagtacatctatcgtcagcctcagcaaagcaggcttgcccacttcattgacttaatggagatgttgaatccccatccacagccaaggaactggttggagctgcttccaggcaaatggcgtctattatactccactgggaagcatgtaggcctgacccttcgccaacctcctctccgtgtactcgtcagcgacgtgcatttaaccgtgacaagagaatcaaaattgaaagataatctttcatttggctctgacattggattctctgtaatgattggtcaggactggcctcatgacaaagctggtaagagtggaagattgcaggtgaattctttatttacactaagatctgggagacggttatatctgaaacaagacaagaccacagagaagttcttctttggcccttccagcaatgtggaggctttagctcagaaatttaagggcaagaaatggagaaagatagtccctttcaaggagtttccatcaagtcttccagcagccaagcttgcatctggtgatattgatgtgagaatgaatcttgatgatccattaaatcgaaacgttgatactgcgagaaatgttctacaagaactaagaacacaaattccaccagaaatatttgatttgtcaaggcttgtgtgtggaacatatgtggactcaagaatgcttgtcctacgaggtgttaatggatccgcgctcctatttacaaggtcttttgtggatagaaacggttctagttagttgttgctgtagcagattcaaaattattatttgaatgcatatttttccttttcgattagcttggtcgattgtgatctgaaatgaacgatttcctcccatgccccaagaagtagttgtccctcctcaagttcgtttcaacgttagatgtaaaattgtattttttatattagttttgtctgtaattataatattctttcaaaattactctaagttattattaagattaattatatccttttttttacttaattatttttcacctaaataattaatgtacggagagagagagagtaatagtagtgtttttttaa

SEQ ID NO: 4130 - DNA, 1761 bp, Glycine max
ctctttgtctgcccgcgcggccggcggttcatttatcctagtacatgggtatcatggtagtttttctttgagacactggcttcaacaatcagattggcttccaactttagaggccactcttgcactggatgaagagtctgttaggcagctacgtgggccccccccccgaggtcctgcagtttctaggcagttgcgacttgttcgaatattgatgagggatcttcttattggggtaaattacttgcacagccatggtcttgcccatacagagttgagactggaaaatgttcatataagtccaatagacagacatattaaagtaggtatattgggtaatgctgctgacttttacaaggatggttcgaatggtagctctttggacaacttggacaggagacagatgatgattgcatttgacatgagatgcatgggcttcataatggctaaaatggtaatgcgggaacttatggatcctttgatttttgcaaagttcaaatcgttcctcacaaaggggtatgatccttcatgtctgcgagagtttatattggaaatccttggcagaagttccccttatggaaatgctggattacaaatacttgataggaactggggagctggttggcaccttttatctttattgcttgctactaaaccttctcaaaggataagttgtttggatgctcttcgacacccattcctttgtgggccaagatggcgagtagtcccatcaatggatattatccgatggggtctgggttctactgcaatgcgtattagggaggagtacatctatcgtcagcctcagcgaagcaggcttgcacacttcattgacttaatggagatgttgaatccccatccaaagccaaggaactggctggagcttcttccaggcaaatggcgtctattatactccacagggaagcatgtaggcctgaccctccgccaacctcctctccgtgtaatcgttggcgatgtgcatttaactgtgacaagagaatcaaaattgaaagctaatctttcattcaactctgacactggattctctgtcatgattggtcaggactggcctcatgacaaagctggtaagagtggaagattgcaggtgaattcttcatttacactaagatccgggagactgttatatctgaagcaagacaagaccacagagaagttcttctttggcccttccagcaatgtggaggctttagctcagaaattcaagggcaagaaatggagaaaagtagtccctttcgaggagcttccatcaagtcttccagccgccaagcttgcatcaggtgatattgatgtgagaatgaatcttgatgatccattaaatcaaaacgttgatactgcgagaaatgttctacaagaacttagaacacaacttcccccagaaatatttgatttgtcaaagcttgtgtgtggaacatatgtggactcgaggatgcttgtccttcgaggggttagtggatccgcgctcctatttacaaggtcttttgtggatagaaacggttctagttagttgttgttgtagctgattcaaaattattattcaactgtatattttttcttttcgattgtatagcttggtcgattgtgatctttaaacattagatgtaaaaaatgtattttttttattaaattgtattttattcaagcagtaattgcattaaatttgtctataataattgtaatattcttcctaccctgccgcccgggaatggtaactgtatagatcgcgagcgagggctctagatcttc

SEQ ID NO: 4131 - DNA, 1055 bp, Glycine max
ctgagttggagtttactcaggaggaattggatgctgttcctaaaccagatgatacttctgattcttcaaaaacgattgatttcttggttagccatagccagcctcaacaagaactctgcgacaccatttgtaatttaaacgctatcagtacctcttcgggtcttggcgcgaggcatttggtgttattcaaggttgaagggaaccaccggttaccaccaaccactctttcacctggagacatggtttgtgtgagaacatatgacagcatgggtgcaattacaacttcttgcatacaaggatttgtgaacagttttggggatgatggctatagtattacagttgctttagagtcacgccatggtgatcctacattctctaaactatttgggaagagtgtgcgcattgaccgtattcaaggactggctgatacacttacttatgagcgcaactgtgaagctttaatgctgcttcagaagaatggtttacgaaagaagaatccttcaatttctgttgttgctacactgtttggagatggggaagatgttgcatggcttgagaaaaatcatttggctgactgggcagaagaaaaattggatggaagattaggaaatgaaacctttgatgattctcagtggagagcaattgcaatgggtttgaataaaaagaggcctgtattggttatccaaggccctcctggtacaggcaagactggtttgctcaagcaacttatagcatgtgctgttcagcaaggtgaaagggttcttgttacagcacctactaatgcagctgttgataacatggtagaaaagctttcaaatgttggattaaatatagtgcgggttggaaatccagctcgtatatcaaaaacagtgggatcaaagtctttggaagaaattgtaaatgctaagcttgcaagttttcgagaagagtatgagaggaagaagtcagatctaagaaaagatctaagacattgtttaagggatgattcactagcttcaggcatacgccaacttctgaagcagctgggaaggtccctgaagaaaaaggaaaagcag

SEQ ID NO: 4132 - DNA, 885 bp, Glycine max
tttgtttttttttttttttttttaggcttgaaaggattcaaatccacatatattgatgcaaaatggaagctgtaaacaacataagcactcaatgaaaatccaatatcagttctcaaactgttcccaatcgagaatggagcaaaatgctgttccatcaacatatatcactaacattaggtacaaaaattaacaagagagaaacaaggtgtcaaattaaactctacttgaatccctgccaaatatgaatcttcttgtccaatcagacatgaccaagaccctggtgcgccagctcacttgcttgcttgcatatacagaataccaaagccattgagtgctgtgacccatggaaacccagtctccaggaagttctgcagctgcctgctccccacccagtggagcaaattgccccaaatgcctataccggaaggggagaaacctatgacgtccagatccgctaaatcgtcgaggaccttcaggattctcttcagtatgatccctgcgattaaagcacctagctagatatgcaccctgttgggcagcaacctgagcagttgctggcagactcttcacctgtgaatctgcatgagaaagggccagcttaaacgcttggatgtctatttccttgctttcattcccttgcaaatctttccacagagtggtaaaatcacgcagatgcttctgctttagatattgctcaacttgtggatatcttaagataatgtcatccatcacctcctggaattcttcaatagttaaggtgccggagttatttttgtctgcagcctcaaatatggctgtgatatcatccatgattttacgttgagttatgctagaacagtcaccaatggcatcccctgcgcctcatccattcacacgcaacctggt

SEQ ID NO: 4133 - DNA, 1709 bp, Glycine max
gcacgcgtacagtctagactaggaatgcggcccgagtgttgctgggctgggtaaaattcggcttgaacttgaggagattgtcaagttctttactcacggagagatgtaccgaaggaggggagtgaaaataccaggtggcatacttctttgtggccctcctggagtgggaaagacattgctggcaaaggcagtggctggtgaggcaggggttaatttcttctctatttccgcttcacagtttgtggaaatatatgtcggtgtaggggcttctcgtgtccgagcactttaccaagaagccagggaaaatgccccatctgttgtcttcattgacgagctggatgctgttggaagggagcgtggcttgattaaaggttcaggtggacaggaacgtgatgctactcttaatcagctcctggtgtccttagatgggtttgaaggcaggggagaggtgatcactattgcatccacaaaccgaccagacattctggatccagcacttgtgaggcctggcaggtttgatcggaaaatatatatccccaagcctggccttattggccgcatagaaattctaaaggtccatgctcgtaaaaagccaatggctgaagacgtggattacatggctgttgctagtatgactgatggaatggttggtgcagagctagccaacataattgaggttgctgccattaatatgatgcgtgattcaaggactgagattactactgatgacttattgcaagctgcacaaatggaagaacgaggaatgctagatagaaaggaaagaagcagtgagacatggaaacaagtagctataaatgaagctgcaatggctgttgtggctgtgaactttcctgatcttaaaaatatagagtttgtcacgattgctcctagagctggtagggaattgggttatgttcgggtgaagatggattcagtcaaatttaatcaaggaatgctcacacgacaatcccttcttgatcatattactgttcaactagctccccgtgcagctgatgaactttggtttgggagtggtcagttgagtacgatatgggctgaaactgcagacaatgctaggtctgcagcaaggacatttgttcttggtgggctttctgagaagtatcatggaatgtccaatttctgggtgtcagaccgaattaatgaaattgattcggaagccatgcagattgtcaactcgtgttatgaacgtgcaaaagagatcctggagcaaaatagaacgctgatggatgctttggtgaatgagcttgttgagaagaaaagcttaaccaaacaagagttcttccatctagtagagttgcacggctccctaaaaccaatgcctcccagcatacttgacatacgagttgctaagtgtagagaattccaaaaattgatcggtagtggaaaggaaacgagtttgagtagccacgcataacaaattgcaggggcaaatgccccatcaattttggagaatatttatactatatgctgatttcatgtaccttgttcctgtattatattctttaccacaactctacggagtatggacataattgtgtcgggtctaagctaggtagcctttgctagctcgtgagggggacatgtaaaccttgttttcctacgtttcggtgtaaagcctgaattaaagccaagtgtagacattcctaaactattgtttaagtgcctcttatttctgttcaccctaacac

SEQ ID NO: 4134 - DNA, 1723 bp, Glycine max
atcaccttattttgcgtgcctttccgtcgtgctttttattaaaataccctccttccttcctaccataccatactgcccagtttcttctccatctaccacttggctttcacgtttaccttcgcagcgctctttctctctgaaccctaatttacacacactccctttattcgatccctctctccaaccatggcgatcaactcttccaagaatccagatggttctgtccaaaatgcaatgccttcgtatttttattctccaccactagatgtttctgctgcatttccacaagcaacaccagcatcaacgtttcctccttgtgcttcagattattttcaattggacaacttattgacaacagaggagcaagccattaggaagaaagtaagagagtgtatggaaaaagaaattgctccaataatgaccgagtactgggagaaggccaagtttccatttcatgttattccaaagcttggtgcgttgcgcattgctggtggcacaatcaaggattatggttgtcctggtctttctatcactggaagtgctatagctgtggcagaagttgcaagagttgatgcaagttgttcaacttttattttggtccattcatccttggcaatgctcactattgcattatgtggatcagaagctcagaagcaaaagtatttgccttctttggcacaattgcaaactgtagcatgttgggctttgaccgaacctgactatggaagtgatgctagtgctttgaagaccactgccacaaaggtggagggaggttggatcctggagggtcaaaagcggtggataggaaacagtacatttgctgatgttttggttgtctttgctaggaatgcatcaactaatcagataaatggatttattattaaaaaggatgctcctggtttaacagtcacaaaaatagagaataaaattggactcaggattgtacaaaatggagacattgttatgaggaaagtttttgtccctgacgaggacagaattgcaggagtaaactcttttcaggacacaaacaaggtacttgctgtttcacgcgtaatggttgcttggcaacccattggtatatcgatgggcatctacgatatgtgtcacaggtacctaaaggagaggaaacaatttggagcaccattagcagctttccaaatcagccagcagaaacttgttcagatgcttggtaatattcaagctatgatacttgttggttggcgcctctgcaaattgtatgagagtggtaaaatgactccaggtcaagctagcttgggaaagtcatggatcactttgagagcacgagaaacagctgccttggggcgagagttgctaggtggcaatggaattttggccgatttccttgtggcgaaggcattctgtgatttagaacccatctatacctacgaaggcacgtatgacattaacaccttggttacaggtagagaagttactggttttgccagctttaagccagttgctcaaagaagtcgattgtaaaagtgaaacacattacatgctccttttgtagactccattaggcaacttcaatgtatggcatgtgactgtgactgtgtattggttaatgttttgtattttgagaaatgagaagcatttaatttaataattatacaaatgctcgtgttgatggcaacagaatgagaaaaaaattagcgttcttgaatccaaaaaaaaaaaaaaaattacatctattctttgttgt

SEQ ID NO: 4135 - DNA, 1750 bp, Glycine max
gaataccataaaaaagaaaaacacgcacaaccttcttttctgctacgtaggcccccccccctctgttttttggagtcagcttcactgcacaggatttatgtgatcgcaacatgggagtttgtttgagcgcccaaattaaagctgaaagcccatataacactgggttcaattcaaagtatgtgagtacggatggaaatgatttcggcagcacaaacgataaggtttcagcaaactcaattcctcaaactcctcggagtgagggtgagatcttgcggtcatccaatttgaagagctttcccttgtcagaacttaagacggccactagaaatttccgtccagatagcgtgttaggagaaggtggttttggatcagtttttaaggggtggatcgatgagaattcattgactgctaccaaacctggcactggcattgttattgctgttaaaagacttaatcaagatggcatccagggtcacagggagtggttggctgaagtcaactatcttggacagctttctcatcctcatctagtgagattgattgggttttgccttgaagatgaacatcgccttctcgtctacgaatttatgccacgtggaagcttggaaaaccatttgttcaggagaggctcatattttcaaccactttcttggagcttacgtttgaaggtagctcttgatgctgccaaagggcttgcatttctccacagtgcagaagcaaaagtgatatatagagattttaagacttcaaatatcttgctggattcaaaatataatgcaaaactttctgattttgggctggcaaaggatggaccaacaggtgacaaaagtcatgtctccaccagggtaatgggaacctacggatacgcagcacctgaatatctagccacaggtcatcttactgctaagagcgatgtctatagttttggggttgtcctgctggaaatgttgtctggcaagagggctgttgacaagaatagaccatctggacaacacaatttggtggaatgggctaaaccttacctggcaaacaagcgtaagatatttcgtgtgttggacacccggctcgaaggacaatattcaacagatgatgcctgtaagctagccacccttgccttgcggtgcctatcaatagaatccaagttcaggccaaacatggatgaagtggttacaacattggagcagctgcaagttcctaatgtaaatggaggccatcaaaatgggtctcgtgttcgtagaagaagtgctgatgtgaatagaggctatcaaaatccttctgttaatggatctcgagttcgtagaagaagtgccgatgatattagccctatggagactcccacagcttatccccggccttctgcatcccctctctatacttgatattgcaaacttatcatcatgcatctgttgctggtgatctcatccaccaactcagtcacctcagtagctattagcctattgcactctagtattgtacatatcttatttcacataatgtattcagtattgctagtccaccaattaatattttcggagttctgttttaagtgtttgtaactactaaactagatgcgaaggcaggtacattatatttgtatgatagctctgattagctcatttttgttcttgttgtctatattagggtgctgtggttccctagtctattttgtaacacctagttgccttatgtgacttctacatcaaacataccaaatagtagtacattttaaaggcttgtgctgtattctatt

SEQ ID NO: 4136 - DNA, 2498 bp, Glycine max
ggctcgaggaaatcaaagacattgaatctcacaaaaaatgggtccaagctcgaagaaagcttcacctaaatcaggtgtgacaaagcacatgaagggcttcagcctctgcaactcaaccctaaaagtaaatgggcaagtcatcctctcccaagtccccaagaacgtaaccctcaccccatgcacctacgacactcacaccaccggatgcttcctcggtttccacgccacctccccaaaatcccgccacgtggcacccttaggacagcttaaaaacataagcttcacttccatcttccggttcaaggtttggtggaccactctctggaccggctccaacggccgcgacctggaaaccgaaacccaattcctcatgctccaatcccacccttatgttctcttcctacccatcctccaacccccatttcgcgcctcgctgcagcctcactcagacgacaacgttgcggtgtgtgtggagagcggctccagccacgtaacagcctcatcattcgacactgtcgtctacttgcacgcaggggacaaccccttcacgctggtcaaggaagccatgcgcgtcgtccgggcccacttggggagcttcaagcttctggaagagaaaaccgttccgggaatggtggacaagttcggttggtgcacgtgggacgccttttacctgacggtgcaccctgagggcgtcagagagggcgtgaagggcctggttgacggcggttgtcctccgggattcgtcctgatcgacgacggctggcagtgcatcagccacgattccgatccggagaaggaggggatgaatcagacggtggccggggagcaaatgccctgcaggttgattagttacgaggagaattacaagtttaggagctataaggaagggaaggggttgaaggggtttgtgagagaattgaaggaggagtttgggtcggtggagtacgtgtacgtgtggcacgcgctgtgcgggtattggggaggggtgaggccgggggtggcggggatggcggaggcggcggtggagaagccaaagctgacggaggggttcaacgctccgaccgagcgtcccgcgcgggcccattcggctcgagatggggtcggggtggtgccgccggagctggtgggggaaatgtacgagcgccttcacgcgcacttggagagtgcgggtattgatggggtcaaagttgatgtcatccacttgctagaaatggtgtgtgagaaatatggagggcgagtggatatggcgaaagcatattacaaagctctcactgcttccgtgagaaaacattttaagggcaacggcgtcattgccagcatggagcattgcaacgatttcatgttgctgggaactgaagcaatatcccttggtcgtgttggggatgatttctggtgcactgacccttatggtgatccaaatggtacattttggctacaagggtgtcacatggtgcattgtgcatacaacagcttgtggatgggcaatttcatccacccagattgggacatgttccaatctactcatccttgtgctgccttccatgctgcctcaagagccatatctggtggccccatttacatcagtgacacagttgggaaccacaactttgagctgcttaagaccttggccttgccagatgggtccatcctcagatgtgagcactatgcactcccaaccagggactgtctctttgctgaccctctccatgatggcaaaacaatgctcaagatatggaacctcaacaagtacactggagttcttggggtgtttaactgccagggaggaggttggttccgtgagattaggtccaacaaatgtgctgctgagttttctcatagggtatcaaccaagaccaatatcaaagacattgaatgggatagtggaaagaatccaatttccattgaaggggtgcaacttttcgcttcgtatttcagccaagccaagaaactcatcctctcagcaccatctgatgacagtgaagagatttccttggagccattcaatttcgagcttataacagtttcccctgtgactgtcttgcctggcaagtcagtgaagtttgctcctattggtttggtgaatatgctaaacactggtggagcagtccagtctttagcttttgatgagggtcagaatttggttgaagttggtttaagaggcactggggagatgagagtctatgcctcagagaaaccaagaacttgtagaattgatggcaaagaagttgattttgaatatgaagggtctatggtcaacattcaagtaccatggcctggttcttcaaaattgtccactgttcagtatgtattttaagcctagaagtgatttctttttaacttttgaatggttgtccacagtgaatgatgtgaaagggctttttctcccttactaccgagtgaaataatagagtgatctaataattgtatcaagagctagattcctttttattcaatgaaagccagtttttcttgagtgtaaaagtaacctgttaagctaa

SEQ ID NO: 4137 - DNA, 1258 bp, Glycine max
tcagctacgtagccccccccccccccggccatttggaaacactattttcaccccttttccaatgctagtggttttctctctcccacaaatagagtcatattcattcatcatgtcacacccaaagggataaaagaaaaaacttaatagtacatgggagttgatgatgaacaagagatggaggaggaggaggaggaggagagagaagaagagaaaaagaagcataagcaggctcctccttctctcttccctattagtgtgagaaaggggtttagtggtgaaagagtgaagagagatgagtggagtgaaggggcagtgtcaaccctacttgaggcctatgaggccaaatgggtgctaagaaacagagccaagctcaagggccatgactgggaggacgtggcccggcacgtgtcatcacgtgccaactgcaccaagtcaccaaagacttcaacgcagtgtaagaacaaggtggagtccatgaagaagaggtacagatcagaatcagcaacagcagatcatgcatcatcatcttggcctctttattcacggcttgatcttcttcttaggggaactgggcccgtcttctcgtcgccgccggggccgctgatggtggctgcgcccatgccgcctctgtcgccggtggagccgtcgcaaccgctggctccttcagggccacttgctaatgcacaaaactcgcatggatccaatggggttgatgagaagcttgctaaggaagatgggttaggaactaagtcatctgatcaagtatctagcaagaatccattggacacagatagcagcacgccagcactttatagccagaaggaggagttaagaagcaacaagaggaagaagaaaacaattgatcacaacacaggacgaagaaggaaagaatatgtggagatagcagaaagtttaagatggctagctgaagctatgataaggtcagaacaagcaagaatggacacaatgaaggagatagagaggatgagagttgaagctgaggccaagagaggggaaatggacctcaagagaactgaaattattgccaatacacaattagagattgctaggatctttgcaagtgtcaacagtaaaggtgttgattcatctctaagaattggaagaagttaattaagggtaggttgtggaagctaattaataaaatgttattattgtaagtgcacataaagttaacaaataatgctattaattaatataataaaatttgagtaaatagtttaaaaaaaaaaaaaaaaaa

SEQ ID NO: 4138 - DNA, 1209 bp, Glycine max
cccacgcgtccgcccacgcgtccgcccacgcgtccgcccacgcgtccgggtgagttgaccgaattaaccaactgttctgtgaagaagaccttctcctctatgatgttaatcatgcatgagctgcaaagtcatgccttgcaaacaagggagagcctgtgtggtgaaaacttgcaaggtgtcatgaccaagctagagagagagatggatgcttcatttgtttggctcttccagcaggttttctggaagaccccagctctcatggtctatgtgatggtcctcttagctaactttttagtgttctctatgaatgataacactgtcaaggtaatcactccttcttccatgatcacaaaggctctaaccttgaccagcaatgagagtaaagtacagcattcgcatgttgatgttgatcaaggtgagtatgtgaatagggagttgacagaagaggagcacatgttgtggaactcctttctagaggaggcttcaatgttgcaaaaggaattgagtggtgaggttttggaccatgagacaaggcaaaggttagtggccccagtgtctgtggagcttgaaggggatcagtacgaggaatatgtcaaaactgagctttattacaaaaagcatttgttccggacacctcattgttcccttctgctgtctaactatgcacagtttctcttccttgtccttcatgatattgatggggcagaagagtactacaagaaatcagtgctagcagaatcatcggaagctgaggcattcagtcgctacgctgacttcttgttgatggtaagaaaggatgtttgggcagcagaactgagatatctgcaaacattggaagcagatcctgggaacgcctattatttatcaaagtacgccagtttcctttggaacaccggtggacaagatactaatagctttcctatgatggtcatatgattcatcatggctaagtgatggtactttttggtacaatgttccgaccaactgttacatcccacttgcatttaagttgtatcccttgatttatggtttttcctggatagttgttactacagtttttcttttttccattgtagtaagtaattcgtggaacaactatctttattcatatttaaatatgaagatgtgtttagcctgagtgatgtttagctcaaagttcatttcatgaaggaaggaggcatgagtacccaactctaactttgggccctt

SEQ ID NO: 4139 - DNA, 1882 bp, Glycine max
tcgagtcagctacgtaggccccccccccccccaaaagaagcttcctcgggatgaggataaaggggcttgccggaaaatataaaaaagaaagaaagaggtggtaacacgaaaggcgcgtggcagccgctggtttaaccgaaaagaaagcaactttgtcctacatcagaggcaacggaaaagaggatcctttctgcttcttctcttctcttccacacaaagacatcgtttcattgctctctctcttgtgcggacacaatttttgatggggatatacctcagcactcccaaaacagagaaggcctctgaagatggtgagaacgacaagcttcgcttcggtttgtcttccatgcagggctggcgtgctaccatggaagatgctcatgcagctcatccatgtttggacgagtccacgtcatactttggtgtttatgatggccatggaggcaaagcagtttcaaaattctgtgccaagtatctacacctgcaggtgcttaagagtgaagcttacttagctggagatttaggcacatctttacagaaatcttttctcagaatggatgagatgatgcgtggacaaagagggtggagagaattagcaatcttgggggataaaatagaaaagttgtctggtatgctagagggctttatatggtctcccaggagtagtgaagccaatgaccgtgttgatgattgggcttttgaggaggggccccattctgattttactggaccaaactctggaagcacagcttgtgtggctgtcgtccgaggaaacaaacttgttgttgctaatgctggagattctagatgtgtcttatcaaggaaaggccaggcacacaatttgtccaaggaccacaaacctgaacttgaggctgagaaagacaggattctaaaagctggtggtttcatccaagttggacgggtcaatggaagtttaaacttggctagagcaattggagatatggaattcaagcagaataagtatttgcctgccgaaaagcagattgtaactgctgatccggacataacttcagttgagctttgtgatgatgacgagtttcttgtaatagcttgtgatggaatatgggattgtatgtctagccaacagcttgtagacttcatacatcaacagttaaaaacagagaataaactttctgcggtttgtgagagagtatttgataggtgcttggcaccaacagctggtggtgagggatgtgataacatgaccatgattttgattcagttcaaaaaaccttccagcagcccagatgcatcatctgtcatgaaccagcctcaatcgtctgctcaatcatctgaagctgatagaagttcggagacagtagaatcgaagtgagagaatttcgaacctgacttgatgactaatagtcatcaatttcttactgcatgttgaagcattggtgagctgaggttcttgccttcttgggtactattttatatccaaatttcaggatgttaattctcaatagggggattgtaaattggtgacaaactaattcatggggctagtattggcttttgtacataagtgtgggtgttcagaatatgaaggaaaaaaaaggttcaacaagcatactgatgtacactgaatgactaaaatcacctttgtgaaacttacccaatgccaatgagtgccgaccggaagaatgtgtagaaagaacatgtctggatactggagttatatccatgatccatcagtagcagttccttaaggatttagtgcgatgcacggatttgcagaggcattttttgtttctgcaccccctttatcctttatgggttgatgcatccgtgatgctctattgttatttttctcgttttggaaattacaaatcctcgtttacttaaaaaaaaaaaaaaaaaa

SEQ ID NO: 4140 - DNA, 1463 bp, Glycine max
  misc_feature (1375)..(1375): n is a, c, g, or t
gtcagctacgtaggccccccccagatacattgttttctacacccaaggcttatgtaaagattgatttcaattgccatattctggaaactctcctgaggctgaagttttgacgcatattttcacaggctctttgatgggctcgtgcttgaatgaatatgcttattatgctcaggttgctggtttatattacagcataagtcacacagatggtggtttcgaggtgactctccgtggttacaatcacaaattaaggattctacttgaaactatagttgaaaagattgcgacatttgaagtgaaaactgacaggttttcagttatcaaggaaatggtaaccaaagaataccagaatttcaagtaccaacaaccttatcaacaggctatgtactattgttctttgatcttacaagatcaaacctggccttggatagaacagctagacgtacttcctgctcttcaagttgaagatcttgctaaatttgtaccagcaatgctctccaggacctttttagagttttatatagcagggaacattgaaagccacgaagcaccgtcaatggttaagcacatagaagatgttctctttaattgttcaaaacctctgtgcaagcctttattctcatctcaacatttggcaaatcgggttgttaaacttgaaagtggcatgaattacttctacccttcagaatgtcttaatcctgaaaatgagaattctgctcttgtgcactatatacaggttggtcgagatgactttaagctgaatgttaaacttcagctttttgcccttgttgcaaagcaaccaacatttcatcagctgcgatcagttgagcagctggggtacattactgtgctcatgcagaggaattattgtggtatacatggactacagtttattatccaatccacagtaaagtctcctggaaacattgagcaaagggtcgaggcatttctccaaatgtttgagaccaaactcctcgagatgacagttgatgaattcaagagtaatgtaaatgctttgatagatgtgaagctagagaaacacaaaaatttgattcatattttattttgttttctggaattgtttcctaataatgattcaataaagaatgcttcttccccatatttttggtagatatgcctgacttactccttgtgttgtgtgagttttgagttaaattctcaccagaagaagtacaaacatagattcaatttgaataataaaagatatctacatgttcacttgatgggaatgtgcaagtatgtacatataagacattatgtacatcatcatttataagcattaagcaaggaccacgatatttacacatcatttgtagcatgtttgggaattactaatgtcggtaaataatcacanagctgcaagaaaaaaaagaagatattttcccaaaaaaaagcaaacccaatacatttcactatttactatcaattatcaatgtacaggg

SEQ ID NO: 4141 - DNA, 1280 bp, Glycine max
agtccgatttgttgttttttcaaattgcttggggaaacaaacgagggacaaatagaaagaaggaaaaaagccttcaccatttgttgttctgcttcctgagaccgtgttccatggcatgctctccttctacaactcttgtgtcaaattctcttctccttaacaaaacgactagtcagtgtcggcttcatgttcatcccaccctttcacttaatcaaaaccttccaatatattctaataacctactcaaactctcaacaattcaataccatgcaacaaccacaccctttgttgctgcttctgcaggagttgagtctccggtgttgggtgaggataccacgagttcactggattcggtgaaagtgtttgatttgaatggaaacgggattccaatttctgacttgtggaaagataggaaagccgttgtggcatttgcacgccactttgggtgcgtgttgtgccgcaaaagggctgattatctttcatccaagaaggatataatggatgcatctggtgtggcacttgtattgattggacctgggagcattgatcaggccaaatcctttgctgagaagtcaaaatttgaaggagaaatctatgcagaccccactcactcatcatatgaggccttaaattttgtttctggagttttaaccacatttacccccaatgcaggtcttaagataatacagctatatatggaagggtatcgacaagattggaagctttcatttgaaaaggataccgttagcagaggaggctggaaacaaggaggaattatagttgcaggcccgggtaaaaacaacatctcataccttcacagagacaaggaggcaggggatgacccagaaattgaagatatcttgaaagcatgttgctcgtgaagaaagaagagagggagcccctctttctctgctttatttagcctgctactgaaatggaactcgcattatacggcattgtacatcatatttaagctgcttcttacgctgaacagtggcttttcttcgagtttcagttaaaagatataacgttattacccgccatttatccaatgacaactcacaatttggaacctatcaaaaaaaaaaaaaaaatttaagattctattgattatttcaaaatgttcttcctaccgatggaatggtcgaatggagaaataggttacatcagtgttgtatcattttatttcattttccaatttgcgatggaatggacgggacttctaaaacagacctgttgcttaatcactttcattaaaaagactgtttagtgtcgaaaaa

SEQ ID NO: 4142 - DNA, 2143 bp, Glycine max
aattcggctcgagattggaggaaatagacttgtcccataatgaattgagtggctcaattccacccggatcaagcaggctcttggaaactctcacccacttggatctttcagataaccatctccaagggaatatccctgcagaaaccggtcttctatcaaaactaacacatgtgaatcggtcttggaatgatcttcattcacagatgcctccagaatttggcctccttcagaacctggcagttttggatcttcgcaatagtgccttgcacggttcaattccagcagatatatgtgactcaggcaatttagctgtcctccaacttgatggaaattcatttgaagggaatattccgtccgagattggaaattgtagctctctttacttgctgagtttgtctcacaataatttgactggttcaattccaaagtccatgtcaaagctaaacaagctcaaaatcctcaagctggaattcaatgaactaagtggagagataccaatggagcttggaatgcttcagagtcttcttgctgtaaacatatcatacaacaggctcacaggaaggcttcctacaagtagcatatttcagaacttggacaaaagttccttggaaggaaacctgggtctttgttcacccttgttgaagggtccatgtaagatgaatgtccccaaaccactagtgcttgacccaaatgcctataacaaccaaataagtcctcaaaggcaaacaaacgaatcatctgagtctggcccagtccatcgccacaggttccttagtgtatctgctattgtagcaatatctgcatcctttgtcattgtattaggagtgattgctgttagcctacttaatgtttctgtaaggagaaggctaacatttttggataatgctttggaaagcatgtgctcgagctcttcaagatcgggaagtccagccacaggaaagcttatcctgtttgattcccagtcctcacctgattggatcagcaatcctgagtccttgctcaacaaggcatctgagattggagaaggagtctttggaacactctacaaggttccattgggatcacaaggtagaatggtagcaatcaagaagcttatatccacaaacataatccaatatccagaagactttgatagggaagttagaatcctcgggaaagcaaggcacccaaatctaatagcattgaaaggatactattggactcctcaactacaacttttagtaactgagtttgcaccaaatggtagcttgcaagccaagctacatgaaaggcttccttcaagtcctcctctttcttgggctataaggttcaaaatcttgcttggaacagcaaaggggcttgctcatttgcaccactctttccgtccaccgatcatccactacaacataaagccaagtaacattttgcttgacgaaaattacaacgccaagatctcagattttgggttggctcggcttctgacaaagctggaccggcatgtgatgagcaacaggttccagagtgcactaggatatgtggcaccagaattagcatgccagagcttaagggtcaatgagaaatgtgatgtgtatggttttggggtgatgatccttgagctggtgacaggtaggagaccagtggagtatggagaagacaatgtgctgatactgaatgaccatgtgagggtgctgcttgagcaagggaatgtgttggagtgtgtggatcaaagcatgagtgagtatcctgaagatgaggtattgcctgttctgaagctagcaatggtatgcacctctcaaattccttctagcaggcctactatggctgaagtggtgcaaatactgcaggtcattaaaaccccagttcctcaaaggatggaagtattttgatgagatatgcttctctgttgaactagcttgacatatagaaaatctgtgactgatgagatttttttcttttcttttttcctttatgttgtgtatcctttttaatttccttggctatttggtttatgtagactcttgttttatgtccaagtagattttcctcgtataaatggaaatcactatcatataaatccgttattcgcaactcttgttttctcttttactgatttcagtttatcgattgtattatcaaattttaataatattacaacttacaaact

SEQ ID NO: 4143 - DNA, 1848 bp, Glycine max
  misc_feature (30)..(30): n is a, c, g, or t
  misc_feature (211)..(211): n is a, c, g, or t
ccccgcctgttgcagaggattcgggaccgngtgcaaaaatggtaccatgatgaaggctatgcctgtgcccaggtcgttaatttcggcacccttaacaccaaggaggtttgtttgtgaggttgttgaaggcgatatcacacaattggatattcagtttcaagataagcttggtaatgttgttgaagggaacactcaagtccctgtcattcanagagagcttccccggcagctgcgcccaggttacaccttcaatattgaagcagggaagcaagctttaagaaatgtgaactcccttgctttgttttcaaatattgaggtgaatccgcgccctgatgagactaatgaaggaggtatagttgttgaaattaagctaaaggagttagaacaaaagtcagctgaagtcagtaccgagtggagtattgtccctggacgtggagggcatcccactctggcttcccttcagccaggtggcactgttagttttgaacatcggaatctgcaagggctgaatagatctattaacggttctataacaacaagcaacttcttgaatcctcaggatgatcttgcatttaagctagagtatgtgcacccatatctggatggggtgtactattcacgcaaccgtactctccgtgtaagctgcttcaatagccgaaaactgagtccagtattcactggggggccaggcgtggatgaagtgcctccaatatgggttgatcgtactggtgttaaagctaatattacagagaatttcacacgtcagagtaaattcacatatggacttgtaatggaagagataacaacgcgtgatgaaagtagtcatatctgtgcaaatggtcaaagagtattacctagtggaggaattagtgccgatggacctccaaccactctcagtggtactggcattgatcacatggcatttttacaggcaaatatcacacgtgataacacacgttttgtgaatggaactgttgttggagacagaaatatgttccaggtagaccaaggccttggcattggcagccagttccccttctttaaccgtcaccaactaactctgacacgatttatccagttgatggcagtggaggaaggggctggtaaaccacctccaccagtgcttgtcctccatggccactatggtggttgtgtaggtgatctccccagctatgatgcttttactcttggggggccctattctgtaaggggctacaacatgggtgagataggagctgccagaaacatccttgagcttgcagctgagttaaggatacctgttaaaggtacgcatgtgtatgcatttactgaacatggcaatgatctagggagttcaaagggtgtcaaaggtaatcctacagaagtctacagacgaatgggtcatggttcatcctacggtcttggtgtcaagcttggtttagtgagagcagaatatgctgttgatcacaactcaggaactggtgcattgtttttccgtttcggagagaggttttgaagttcaaattactgacgtcagtatattgttcactggggtttcttttcgttagcggaagaattcttgagcggggaagggagattatagatacttgaaaattacattgtactagactagcagactcggtgtttttgtttgtttcccgtaaaattggtatagggttctttggaaatattaagatgggagataatcttgatgtctgttatgaaatggatttagtttatctttgcggctagtgatcactgcacagttcatgagaacaaatggatccttataatcttttaaatgtttttttttgttaaatatgattgtcaaattattagaggttaaaatgtcgatcttttgtttgtgtt

SEQ ID NO: 4144 - DNA, 1045 bp, Glycine max
tcagctacgtaggccccccccccgagataagaaaaggttacaaaaaatcaaacaagttcacatttgcacatcacacagcagtcagcacagtgccgccgccgtagtgggaagccatcgtcgtctcggcgaagagtcctacaagatttgggaaatggctgctgcacgagggttggtactgtcacgtcctgttacttttgtaactgccaatgccaaaaagcttgaagaagttcgtgccatcttgggcaattccattccttttcagtccctcaaacttgacttgccagagttacaaggagagcctgaagatatatccaaagagaaggctcggatggctgctgttcaggtgaatggacctgtgttggttgaagacacttgcctctgtttcaatgccttgaagggtcttccagggccttacatcaaatggtttctgcagaagcttggtcatgaaggtctcaacaatttgctgatggcatatgatgataaatcagcttatgccttatgtgtattttcgtttgcagctggttcaaacagtgaacctatcacattttctggaaaaactccggggaagattgttcctccaagagggcctaatgattttggatgggatcctatttttgaacctgatggctatgaccaaacgtatgcacagatgcccaaagaagaaaagaacaaaatttcccaccgctccaaatctcttgcattggtaaaatctcattttgctgaagctggatatacttttgacatcaagaacgtctgaaagctgaatgtggtaaattataggcaacatgctctttattaaatttcccttgaaattgaagggaaattgtttctagcagtagcaatgtgggaattattttgaacttaaatgttgcttttgtttacaacttatccagcaagagagaataaaaaaccaaaattagaaaaatataccaaaaaagggcgtagactacagtggttaagtatgtgaatttgtgtatgatgtacaattttttttaaccattagataagatttattcacaaaaaaaaaaaaaaaaaaaaaaaaaaa

SEQ ID NO: 4145 - DNA, 1457 bp, Glycine max
tgggaccgggccagtcagctacgtaggccccccccccccccccggtaaagcacccgaaagagaagaagtgaaagaaagcatcagccgcggcggtgttaggtaggcggagccatggcggcgcctgaatcccctctctgttacgtcggtgtcgccaggcaatccgctgcttttcgcctgatgaagcaaatggggtgggaagaaggagaaggtcttggaaaagagaagcaggggatcaaaggacacgttcgagttaaaaacaaacaggacactattggtattggccttgagaagccaaacaactgggccttcgacaccactcagtttgataatattcttaagagattgaaagttcaagcaccgcaatcccatgacatagaggaaaaagtggaaaccaaggctagtgttcctgttgataatgaggaggattctgtccccaaaactacaagaccacaaggaagatacgcgagaagagagagggggaagcttgtctcgcaatattccttgaaggatctggaaggaattcttgttaaaaagggtgacgtatctgggagtactgataattctgatggtgaactggacatgttaaagacatctgaaattcaaaaatttgaagatgaaggaagcaaatatcctgctatacctccagattggtggggctacaagtatggttttgtctctggtggatttcttggagcagaatcaaagaagaaaaagtccatgatttctggtaaggcagagaggactgcatttttcgaagaggatcaagaaaacctttataatctagtccaggagaaatccacaacggggaagcaaggactaggcatcaaggacagacccaagaaagtagctggctgctattttcagggtaaaaagaaatcctttgatgatagtgatgaagattctgctgataacgattccctggaacaagcagcaaatgatgacttaattaaagtagaaaagattgttgaaggcaaagtgaagctgaaaaagttgtgcaaacagattttacaacaggtgcctggagaatcattgaaactgaaacagctcaaagttcttattgatgaacattcatcttcaattttgtctgatttttcttcaagaagagagtctgttgcttacttgaagcaaaagctgacaggtagtaggaagttttatatcgaagggaaaagagtgcgattggcatcaaagagaagctgaaattttgatacttctttttcttggcctcttctaattcattatattttaggagagaaagggggcagtttggaatttagtctaaggtaaatttgcattggttagctttatcaacgtatgttgtagtattaaatagcattttatgaaatttaataattttttcttttaagtttaaattttaaaagtgcatgtgtatcctggattgaatattgaaattatctgtttactcgtatagaaaataatgaatggacatggacatgtcc

SEQ ID NO: 4146 - DNA, 1712 bp, Glycine max
agttcgtccgcgcgtccgatgagatcagcggggggattcgttgcttactctggagaaaaaaacaatctgaacccaaattcgcaggtcgttgaaagttgaaatccaaggagaaacacaaaagaagaagaagaaaaaggaagaaaccagcgtcacatcatcgtggttctgcaaaatatatttttctttttgggtgaataaataaagggttgtgcgtggtggtgttttgttgtgtttgtgagtatctgaatccgcgcagttaggtttgtgattgattgattgatcaatcaaagagagagagagagagagagggaatgggagatcaagtggagggaacggtgcagaacgttctggaacaggagactctgaagtggatcttcgttggtggcaaaggcggcgtcggcaaaacgacatgcagttcaatcctctccattctcctcgccaccgttcgctcctccgtcctcatcatctccaccgaccccgcccacaacctcagcgacgccttccagcagcgtttcaccaaaacccccactctcgtcaatggcttttccaacctctacgccatggaggtggatcctactgttgagcatgaggacatgggtggcgctgatgggatggactccttgttctccgagctcgccggcgcgattcccgggattgatgaggccatgagctttgctgagatgttgaaattggtgcagacaatggattattctgttattgtatttgatactgctcccactggccatacactcagactattgcaattcccatcggttttagaaaagggtcttgcaaaagtgatgtctttgaaaaataaatttggtggtttgtttaatcagatgacccgcatgtttggcatgggtgatgattttggagatgatcaaattcttgggaggcttgaaggcatgaaggatgtaattgaacaagttaataagcaattcaaagatccggacatgacaacctttgtctgtgtgtgcattcctgaattcctttctctatatgaaacagaaagattggttcaggagcttacaaagtttgaaattgacacccacaatatcatcatcaatcaagtaatctttgatgatgaagatgttgaatccaagttacttaaagcaagaatgaaaatgcaacagaaatatctggaccagttttacatgttgtatgatgactttaacattaccaagctgccactgctcccagaagaggttactggggttgaagctctgaaagcattttcaagacattttacatcaccatatcaagccttatgcagtaaaggagatccagtagaacggttggagagtaaagtatcagcattacagcgccagttacacgaggctgaagaagagttggagagactcaaaagtggcaattaggtttgatggtatccattcatgaataatgtcattgtatgcctttttggttcacattattttttagcttaaatttgataaagcatctttttctttgttgggctgccaacacaagtcattccctatatgctttttatttaattattgtcacagtgagctttcttataaccccccaaaaaatattgctgaggttagtctaatttgtttcatgaatattctttacttgtatctttcatattatgagtagaatagtttcttatcaaaaaaaaaaaaaaaaaaaaaaaaaaaaaaaaaaaaaaaaaaaaaaaaaaaaaaaaaaaaaaaaaaaaaaaaaaaaaa

SEQ ID NO: 4147 - DNA, 1968 bp, Glycine max
atatttatttgagtaattgatgagatcaagatttggattcctgagaaaacatcaaataaaatcaaaacccaaattcgcaggttattgaaaattgaaatcctaggagaaacacatccacagcaaaagaagaagaaggaagaaaccagcgtcactcatctcatcgtggttctgcaaagtcttcttttcttttcggtgaattaataaagggtttttgcgtggtgattgtgttgtgttgtgctgtgctgtgtatctgaatccgcgcaattaggttttgtgattaattcattgattaatcagagagagaagggggaataatgggagatcaagtggagggaacggtgcagaacgttctggaacaggagactctgaagtgggtcttcgttggtggcaaaggcggcgtcggcaaaacgacatgcagttcaatcctatccattctcctcgccaccgttcgctcctccgtcctcatcatctccaccgaccccgcccacaacctcagcgacgccttccagcagcgtttcaccaaaacccccaccctcgtcaatggcttctccaatctctacgccatggaggtggatcctactggtgagcatgaagacatgggcggcgctgatgggatggacaccttgttctctgagctcgccggcgcgattcccgggattgacgaggccatgagctttgctgagatgttgaaattggtgcagacaatggattattctgttattgtctttgatactgctcccactggccatacactcagactattgcaattcccatcggttttagaaaagggccttgcaaaagtgatgtctttgaaaaataaatttggtggtttgtttaatcagatgactcgcatgtttggcatgggtgacgattttggggatgatcaaatccttgggaggcttgaaggcatgaaggatgtaattgaacacgttaataagcaattcaaagatcctgacatgacaacctttgtctgtgtgtgcattcctgaattcctttctctgtatgaaacagaaagattggttcaggagcttacaaagtttgaaattgacactcacaatatcatcatcaatcaagttatctttgatgatgaagatgttgaatccaagttacttaaagcaaggatgaaaatgcaacagaaatatctggaccagttttacatgttgtatgatgactttaacattaccaagctgccattgctcccagaggaggttactgggattgaagctctgaaagcattttcaagacattttacatcaccatatcaaggcttatgtggtaaaggagacccggttgaacggttagagcgtaaagtatcagcactacagcgccagttacatgaggctgaagaagaactggagagactcaaaaggggcaactaggtttgatggcctccattcatgaataatatgtcattgtattcctttttggttcacattattttttagcttaaatttgataaagcatcttttttctttgttgggctgccaacacaagtcattccctatatgttttttatttaattattggcacagcgagctttcttatgtaaccccccaaaaatattgctgaggttagcctaatttgtttcacgaatattcttttcatattatgagttggataatttcttatcaaaaaaaaaaaaaaaaaaaaaaaaaaaaaaaaaaaaaaaaaaaaaaaaaaaaaaaaaaaaaaaaaaaaaaaaaaaaaaaaaaaaaaaaaaaaaaaaaaaaaaagggggggcccccccattagggaccttctcaccccggaaattatttcgggcccggaccctgggggggacccatttttccttaaagggggccttttaaaacttggggaaaacaagggaaaaacttgttccctggggaaaattgttttcctttaaaaatcccaacaaaaataaaaccggaaaataaaaagggtaaacccgggggccccaaaggggggcccaacccccatttaattggg

SEQ ID NO: 4148 - DNA, 1590 bp, Glycine max
tcgagtcagctacgtagggcccccccccctagtcttcccagtctttactttgctctttgcacctcagcacagtttcccatcgaaaactagcccatctttttccctcgtaccttttgcttcagcaacaacaacatcgtcgtcacaaatctagagatagatagatagatagagagaaacggttgaattgaagatgaaaatcactgtcatgactgctgatgaacaaatcatcacgttagatgtggatccccacgaatctgtggaaaacgtcaaagcattgctcgaggttgagacaagtgtgcctcttcaacaacagcagcttctgtttaatgggaaggaagtgaggaattctgagaagttgagtgctcttggtgttaaggatgatgatttgctaatgatggtgtctggtgctggcgctactgcttctagtggatctacgaatgatttgagcttaaatgctgatggatctgctgtcaaccctggttctttccagcagcacattagacatgattctaatttgatgagtcagctctttcagagtgatccagagttggcacaagctattttagggaatgatctgaacaaattgcaggaagttttacgattgcgtcatcaccaaagagatgaattaaagcgtcagaaggaagaagagcttgctcttctttatgctgatccttttgatgttgaagcacaaaagaagattgaagctgccatccgccagaaagggattgatgaaaattgggctgctgcattagaacataatcctgaagcttttgctagagtggtcatgttgtatgttgatatggaggttaatggtgtcccattgaaggcatttgtggatagtggagctcagtctaccattatatcaaaaagctgtgctgagcgtcttggattgttgagacttttagatcagcgttacagaggaattgctcatggagttggccaatcagaaatattgggtcgtatacatgtagctccaatcaagattgggagtatattttacccttgctcattcttggtgctggattctcccaatatggagtttctctttggactggatatgctccgaaagcaccagtgtataattgatttgaaagaaaatgttttgcgagttggtggaggagaagtttctgtaccatttttgcaagagaaagacataccatctcggtttctagacgaggaaaagtatgctaaggaagcttcaggctctggtggtcaagttgcatcaggcagcaataatccatcaacaggaggccactcttctggtggagcttctggtgacaggactaaggattctgagtttgaagccaaagttgcaaagcttgttgaattgggatttgaaagaaatgcagttatacaagctcttcaattattcaatggcaatgaggaacaggcagctgggtttctttttgggggctagaaacaacgtttattttggaaattgattgatttattacttgaaacaatttttacttttagccaattcaattacaaattctaaattatagacatgatggcatttattgtgtgagttgttcatactttaaggaatgtttctattcaattgaaaaaactaactcattggttcctttt

SEQ ID NO: 4149 - DNA, 1813 bp, Glycine max
tacggctgcgagaagtcagctacgtaggcccccccccccacaagcaccagtgtgaataccctaaatcggagtttcagtttcacccctcttttctcatctctaacatcatagtcctcagaggctagtcttcctattatcacaaacaatgtctgacagtcaagaatctgacaagaacattgagatatggaagatcaagaaattgatcaaggctctggaagctgctcgaggtaatggtaccagcatgatttctctgataatgcctccacgcgatcaaatttcccgggtcactaagatgttgggagatgaatttggaactgcttcaaacatcaaaagtagggtgaaccgacagtctgtgttgggagccattacttctgctcagcagaggttgaaactatataacaaggtccctccaaatggtttggttctttacactggaaccatcgtcactgaagatggcaaggaaaagaaggtgacaattgattttgagcctttcaaacctatcaatgcatcactgtacctctgtgataacaagtttcacacagaagcactgaatgaacttttagaatctgatgacaagtttggtttcattgtgatggatggaaatggcaccctttttgggactttaagtggaaacactcgtgaggtgcttcacaaatttactgttgatctaccaaagaagcatggtagaggaggtcaatcagctttgcgttttgctcgacttaggatggaaaagcggcacaactatgttaggaaaactgcagaacttgctactcagtttttcatcaatcctgccaccagtcaacctaatgtttctggacttatacttgctggttctgctgacttcaagactgagttgagtcagtcagatatgtttgaccctcgattgcaagcaaaaatattgaatgtggtagatgtttcttatggtggggaaaatggattcaatcaagctattgagctatctgcagagattttatcaaatgtgaagttcattcaagagaaacgcttgatagggaaatattttgaagagatcagccaggacactgggaaatatgtctttggggttgaggacactttgaaggcactggagatgggtgctgtggaaacactcattgtatgggaaaatttggatattaataggtatgtgctgaaaaatggtatcactggtgagattgtcattaagcacttgaacaaggaacaagaggctaatcaaagcaacttccgtgatttggccacttctgcagagttggaagttcaggagaagatgcccttgctcgagtggtttgccaatgagtacaaaaaatttggatgctccctggaatttgtgaccaacaaatctcaagagggctcccaattctgcagagggtttggtggcattggtggaattcttcgttaccagcttgacatcagatcatttgatgagttatctgatgatggagaagtgtatgaggattctgattaagttcctgttactgcagaacccttactttgttttggaagattggggccttcaaaaatgatttggatattattgattatggttctaagacttagactttgccctttggtttttgatccataagatgtgtatcattcactttttccctttcctatgcttcatacattttgcatttttgctattagtccatgtatgcatatggcaactctgccagattgtgcgctgattcttcaagaaatagctctcaggaggtcatgattcgaagtgttttattctagatgaaggtggcatctggattttatactatttcttggttacatgattgatgattcaaataaaaaaaaaaaaaaaaaagtt

SEQ ID NO: 4150 - DNA, 1820 bp, Glycine max
  misc_feature (1815)..(1819): n is a, c, g, or t
cccacgcgtccgtacggctgcgagaaggccccggaaggggaatgtaaaaaatagaggttgaagaagcaagcaccaacgtgaataccctaattcggagggtttcagttttcgccctcttttctcatctccaacatcttcgtcgtcacggaggctagtcttcctgttatcacaaacaatgtctgacggtcaagaatcagacaagaatattgagatatggaagatcaagaaattgataaaggcattggaagctgctcgaggtaatggtaccagcatgatttctctgataatgcctccacgtgatcaaatatctcgggtcactaagatgttgggagatgaatttggaactgcttcaaacatcaaaagtagggtgaaccgacagtctgtgttgggagccattacttctgctcagcagaggttgaaactatataacaaggtccctccaaatggtttggttctttacactggaaccattgtcactgaagatggcaaggaaaagaaggtgacaattgattttgagcctttcaagcctatcaatgcatcactgtacctctgtgataacaagtttcacacagaagctctaaatgaacttttagaatctgatgacaagtttggtttcattgtgatggatggaaatggcaccctttttgggactttaagtggaaacactcgtgaggtacttcacaaatttactgttgatctaccaaagaagcatggtagaggaggtcaatcagctttgcgttttgctcgtcttaggatggaaaagcggcacaactatgttaggaaaacagcagaatatgctactcagtatttcatcaatactgccaccagtcaacctaatgtttctggacttatacttgctggttctgctgacttcaagactgagctaagtcagtcagatatgtttgaccctcgattgcaagcaaaaatattaaatgtggtagatgtttcttatggtggggaaaatggattcaatcaagctattgagctatctgctgagattttatcaaatgtgaagttcattcaagagaaacgcttgatagggaaatattttgaagagatcagccaggacactgggaaatatgtctttggggttgaggacactttgaaggcactggagatgggtgctgtggaaacactcattgtatgggaaaatttggatattaataggtatgtgctgaaaaatggtactactagtgagattatcataaaacacttgaacaaggaacaagatgctgatcaaagcaacttccgtgattcagccacctctgcagagttggaagttcaggagaagatgcccttgcttgagtggtttgccaatgagtacaaaaaatttggatgctccttggaatttgtgaccaacaaatctcaagaggggtcacaattctgcagagggtttggtggcattggtggaattcttcgttaccagcttgacatcagatcatttgatgagttatctgatgatgaagtgtatgaggattctgattaagtgcctggtactgcagaacccttactttgttttggatgattgcgtcctccaagcatgatttggatactattgattatggttctaagacttagactttgccctttggtttttgatccataagatgtgtagcattcacttttttcctttcctctgcttcatacattttgctattttgttactcaatgtatgcttatggcaactctgccagattatgcgctgattcttcaagaaatagcactcaggaagtcatgattcgaagtgttttattttattctcttgtgatatctagatgaaggtggcttctggattttatagtatttattggttannnnnt

SEQ ID NO: 4151 - DNA, 825 bp, Glycine max
ggaaatggtcaggcaagataataggcggcaactgagtgctaaggtagagcaactagatgaagaggttgctcagcttcaacaggcacttgctgataaacaagaacaagaaactgctatgcttcaggtcttgatgcgggtggagcaagagcaaaaggtgactgaggatgctcgtaggtttgctgagcaagatgcagccgcacaaagatatgctgcgcaagtccttcaggaaaagtatgaagaagcaactgctgcacttgctgaaatggagaagagggcagttatggcagaatctatgctggaggctacattgcagtaccaatctggccaagttaaagtgctacaatctccacgatcttcacagtcagattctccggtatcgagaaacaatcaagagccggatatccctgctaggaggataagtttgctttctcgtccatttggacttggatggcgagatcgaaacaaggggaaacccactaatgaagagccagctgagggaaatcccagcgttgaggaacaaaatacgatcagtgaacaagacgtcaatggccttaaagtacaggatgagagtagaaaagaagtcagtgcctagattttctttatatcctactcaagacaatttgacgagcaagaagttagtttcttcttccttgtctgtaagttttgtttagggtgaacatataatttcatattcattaattgtttgttctttattatgtaatagaataatagtaattggaaagtaagtgaacggtcgaggtcaactgtaatacatctctctcgtttattccatggttttagtataaactttatgatggcgacgaa

SEQ ID NO: 4152 - DNA, 1413 bp, Glycine max
aaaccctaaaaacgaaaccaactatggcagcatagcagccggcccgacgccgccgcaacccagtagaagaagcaaaacaaaggaacacagaagcaggaacgaggaggagcactgtgtagaagaaatggggaagaagcagaacgagatccagaaaacggggctaggtcgagccctggtgaagcagcacaaccagatgatccaacagagcaaggacaagtctcgcttctacaggaagaagttccttgaatccttcaccgaagtctccgacatcgacgccgtcgtcgagcaatccctagaacccctccccgaacttgccgctgccgcttcaaccactctcatcagccttgaaccaggttccgtgcccgatgaaacgacgacgccggaagaagcgaggaagcagcagaagcaagaggaggcgctccacgccagcagcctccgcgttcctcgccgcccgccgtggactcccgacatgtccgccgacgagctgaacgccagcgaaacccaagctttcttgacctggcgccgcagcttggcgaggcttgaggagaataagaagcttgttcttactccgtttgagaagaatcttgacatctggagacagctctggcgggttgttgagcgcagtgatctgcttgttatggtcgttgattcgcgagatccgctgttctatcgttgtccagatcttgaggcttatgcacgggaggttgatgagcataaacgcacattgcttttggttaataaggcagatcttttacctgtttctatcagagagaaatgggcagaatattttcgtgctcatgatattctcttcatcttctggtcggctaaagctgctactgctgccttggaaggcaaaaaacttggttcatcatgggaggatgataacatggggagaactaatagcccagacacaaagatatatggaagggatgaacttttggcccgcttgcaatcagaggcagaagagatagttgacaggagaagaaattcaggctcctctgatgcaggaccatctaatattaaatcccctgctgaaaatactgctggtagttcatcatcgagtaatgtaattgtgggatttgttggatatcctaacgtggggaaaagttcaactattaatgctctggttggtcaaaaacgcactggtgtcacctctaccccagggaaaacaaagcactttcagacattaattatctcggatgagctgatcctctgtgattgtcctggattagtttttccatccttctcaagctcaagatatgagatgattgcttgtggggtgttacctattgataggttgtctggacacagagaatctgtccaagttgtagctgatagagtcccaagacatgtcatcgaggagatttataagattaggcttcctaaagcctaagtcatatgagtcccaatcgc

SEQ ID NO: 4153 - DNA, 914 bp, Glycine max
attcaatttgataaattagggtttcttcactgtcctatatatacaaagcctaacgcaaaaccctagttttgtcttgcaggcgaagagatggccaccgttccagggcagctcgtgtgggagatcgtcaagaaaaacaattccttcttggtcaagcagtttggaaggggcacccagagcgtcgaattcagcagagagagcaacaatctctacaacctcaattcgttcaagtactctggtttggcaaacaagaaaactgttactgttcagcctgagggcaaagatcaggctgtgttgttggctacaaccaagacaaagaagcaaaacaagcccgctgcattgctccacaaatctgtgatgaagaaggagttcaggaggatggcaaaagctgttgaaaaccaggtggccaaaaattactacaggcctgatctcaagaaggctgcccttgcaaggttgagtgctgttcacagaagcctcaaagttgccaagtctggtgtcaagaagaggaatagacagggcgtgagagtcgctggtaggaagtgaaagggaattgagaaagaatctgctgttcaatcttcgtttttgccctctctttcgtgtttttagaactccaatctagatttctcgagtttgttttgcaatgcagttatttattaagtattcaatatgaaaacttgaactaccatgttatagatttcaccttgatttgtgtctcggtatattcgcctcatgattgttgctttaaaagtcgctcttccgacaaaatagctggctattattgcctcaaaggagggatatgattagtgtgtttagcattgaaaccctcgatttaaaagatatttttatttctacctttcttttatcatcctatcataatgaacgtagttgtgtagaactcgaaagttgaaacaatagtt

SEQ ID NO: 4154 - DNA, 924 bp, Glycine max
  misc_feature (737)..(737): n is a, c, g, or t
  misc_feature (744)..(744): n is a, c, g, or t
  misc_feature (748)..(748): n is a, c, g, or t
  misc_feature (752)..(752): n is a, c, g, or t
  misc_feature (754)..(765): n is a, c, g, or t
  misc_feature (767)..(770): n is a, c, g, or t
  misc_feature (774)..(779): n is a, c, g, or t
  misc_feature (781)..(787): n is a, c, g, or t
  misc_feature (789)..(789): n is a, c, g, or t
  misc_feature (791)..(793): n is a, c, g, or t
  misc_feature (798)..(800): n is a, c, g, or t
  misc_feature (802)..(805): n is a, c, g, or t
  misc_feature (807)..(808): n is a, c, g, or t
  misc_feature (810)..(812): n is a, c, g, or t
  misc_feature (814)..(815): n is a, c, g, or t
  misc_feature (818)..(818): n is a, c, g, or t
  misc_feature (820)..(835): n is a, c, g, or t
  misc_feature (837)..(841): n is a, c, g, or t
  misc_feature (845)..(852): n is a, c, g, or t
  misc_feature (854)..(856): n is a, c, g, or t
  misc_feature (858)..(860): n is a, c, g, or t
  misc_feature (862)..(862): n is a, c, g, or t
  misc_feature (864)..(866): n is a, c, g, or t
  misc_feature (868)..(869): n is a, c, g, or t
  misc_feature (872)..(873): n is a, c, g, or t
  misc_feature (878)..(879): n is a, c, g, or t
  misc_feature (883)..(885): n is a, c, g, or t
  misc_feature (887)..(887): n is a, c, g, or t
  misc_feature (890)..(890): n is a, c, g, or t
  misc_feature (892)..(918): n is a, c, g, or t
  misc_feature (920)..(924): n is a, c, g, or t
cgattgggtaccggcccacgcgtcctacggctgcgaggagacgaccgaggggggtcttgcaggcgaaagagaagatggccaccgttccagggcagctcgtgtgggagatcgtgaagaaaaacaactcctttttggtcaagcagttcggaagggggacccagagcgtcgaattcagcagagagagcaacaatctctacaacctcaattcgttcaagtactctggtttggcaaacaagaaaactgttacggtacagcctgagggtaaagatcaggctgtgttgttggctacaacaaagacaaagaagcaaaacaagcctgctgcattgcttcacaaatctgtgatgaagaaggagttcaggaggatggcaaaggctgttgaaaatcaggtggcagaaaattactacaggcccgatctcaagaaggccgcccttgcaaggttgagtgctgttcacagaagcctcaaagttgccaagtctggtgtcaagaagaggaatagacaggccgtgaaggtcgccagtaggaagtgaaagggaatcgagaagagttagattgcattcaaccctcgttttttgccccctttttgtgtttttagaactccaatctagatttctcgagtttgttttgcaatgcaattatttattaactattcaatatgaaacttgaactaccatgttatagatttcaccttcattgatttgtatcttggtaaaacgggagatccaataaattctaaaacngttcccncccntgtngnnnnnnnnnnnntnnnncctnnnnnngnnnnnnntntnnnttttnnntnnnntnngnnnanntgntnnnnnnnnnnnnnnnntnnnnntatnnnnnnnntnnntnnncngnnntnnttnntgttnntttnnntntgntnnnnnnnnnnnnnnnnnnnnnnnnnnntnnnnn

SEQ ID NO: 4155 - DNA, 1442 bp, Glycine max
tccatcgcgtccgacggctgcgagaagacgagggaagggggaaaattgattaggtcacgcgcttcttccggaattagtcggtgtaatttacatttatccattttttgaaccttcccttcccacccctgaactttcaaatttcaacaaaatcgcagacatggcttctgcggtgcccgcgacggggcgagagttgtcgaatcctccatcggacggcatcaccaatcttcgattctccaatcacagcgatcatctgttggtgtcctcatgggacaagagcgtgcggttgtatgatgcgagtgccaatgtgttgagaggagagtttatgcacgctggtcccgtcctcgattgctgcttccacgatgattcctccggcttcagtgtcgccgccgacaacactgttagacggcttgtcttcagctctaacaaagaggatattctgggaaggcatgatgcacctgttcgttgtgttgagtactcatatgctgcagggcaattgatcactggtagttgggacaaaaccctgaaatgttgggaccctagaggtgcaagtggccaagagcgcacacttgttgggacatatccacaacctgagcgtgtctactctctctcactggttggacatcgtctggttgtagcaacagctggaagacatgttaatatctatgatttgagaaacatgtctcaacctgaacaaagaagagaatcttctttaaaatatcaaaccagatgtgtgcgctgttaccctaatggaacaggatatgcacttagttctgttgagggccgggttgcaatggaattctttgacctctcagaggctagccaagcaaaaaaatatgctttcaagtgtcacaggaaatcagaagcaggaagggacattgtctatcctgtaaatgcaattgcattccaccccatatatggtacatttgccacgggaggttgtgacgggtatgttaacgtatgggacggaaacaataagaagaggctataccagtattcaaaatatccaactagcgttgcagctctttcgtttagcagagatggacgcctgttggctgttgcatcaagttacacattcgaagagggacctaaaagccaagaacaagatgctatcttcgttcgtagtgtaaatgagattgaggtcaagccgaaacccaaagtctatcccaaccctccagcatgactcctgatggccattttgaaaataggaatttcttcgtttattcatttctactgttgcactttctctttgtgaactccaaaaactacttgtaaaatgttgtgaagcgctaggtaaattgttggatacaggttgctgtcggaaatgactttcctattgtgtctttattcccgtcaaaagtaaactgaaattgatagacattatcagctcaggtgcaaaatatgaattgagtgtgctggtttctaacaaaaaaaaaaaaaaaaaa

SEQ ID NO: 4156 - DNA, 1390 bp, Glycine max
cctcgtgccgaattcccacgtcagctacgtaggcccccccccccccagtgtctgtttctgctggcggtgctttctttccgtctctgggcttcacaacaatgaaaggcttccaatccgatttatcctccgccgttcgcctcaacattggaggcaagaaattttgcaccaccaccgatactctcactcagcgcgaacccgattcaatgcttgccgctatgttcagtggccgccacacgctgtgccaagatcctgacaaggggtatgtgtttgttgatagggatggtaaacactttcggcacattctcaattggttaagggatggtgtggtgcctactctcgaggagtctcagtactcagagctgttgagggaggctgagtactatcagctacttgggcttattgatggaatccattctgtccttaataagaagaatgaagacgatgagttccatacagagttgacacgaacagatatcatcaagtgtatacaatctgagaaagtaaggtttcgaggggttaatctttccggccttgacctctctaaactggatttatcttatgttgatttcagctatgcttgtcttaaaaacgtgtttttttcacgagcaaaccttcaatgtgcaaagtttcgagatgttgatgccgagggctccatctttcacaatgcaactttgcgtgaatgtgaatttactgcggcaaatcttcgtggtgctttattggctggtgcatgccttcagagtgcaaatctacaagatgcttgcttagtagactctagcttctgtggagcagatctgcgtactgcacatctacagaatgcagatcttaccaatgccaatctagagggagccgtcctagaaggagctaatttgaagggtgcaaaactgaacaaagcaaacctgaagggtgcaaaccttcaacgagcttatctttgtcgtgtcaatcttcgagatacagaattggaaggtgcgaggctcgatggtgcaaatttgcacggagcaattagataatgtttgtgctgacaatgaaaaaattgggaagttgcaatatgcttatagaatgtcaataccagatgagtggtgaacttgagaagttgaacgtcgaaagctatcttgtgtttgagagtaatcattagtgctgctcgtgaagttgctcaattgggcgttgatattgtggttatgcctgctgatgatattctccaacatgctgttgatattgagaaaagccgtttaggctgttcttgctcatattttgtattcattgtggtttgttgcttttctaatgtatccagcgattgaaaattggaatattactatttatattatatgaatcttcttgtgtaaaatgcatggttgataaaacttggtaataatcaagtgtgattagcatgtcc

SEQ ID NO: 4157 - DNA, 1639 bp, Glycine max
  misc_feature (1617)..(1618): n is a, c, g, or t
aattttacatgggttaattctagtccccgaatcagctacgtaggcccccccccccgaaaaagacactcccttaggcaaaatagacacagccatagctctcaagcacaaagagtttctcccaccattgcctgaaccgattctctgaagtcatcagtggtgcctcacctgtgcatcagactttaactacttcaccatagccagcactgtgaattgtgaggggtctttttccaaaaccagaaagaaacccttccatttttcaccttggttcaccactaaagtgctgtcgtagcttctgctccatcgttctctcagttcactgttcaatctctccttgctcagtataaaagttcctcattttgttgcaaaaggttcaggtttacttcaaatcaatggctgtttcatatgttcacatgcttcaatgcaacaggggtttccacaagggtaacctctcctatcctaattgcagttacaaggcgaggaggagccaccgtttagtttttgcttctatgcacacaccagaacctaaggtagactcattactggacagtgtaaaatgggataccaaaggtttggttgtggcaatagctcagaatgttgacacaggggccatattaatgcaaggttttgccaacagagaagcaatagctacaactatatcttctcgaaaggccacattctatagccgatcacgatctacattgtggaccaaaggagaaacctctaataattttatcaatgttcacgatgtctttattgattgtgatcgtgattctataatatacctgggaaaacctgatgggcctacctgccacacaggggcagaaacatgctattatacatcagtttttgacttgttaaagcagcaagaggctgaggaaaataaattggcattaacctctttgtatgcattagagtcaacaatctcgcaacggaaaacagagttaataggagaaaatgaaaagccttcatggacaaagcgattattgcttaatgataagttgctatgctctaaaatcagagaagaggcaaacgagttgtgtcaaactctagagaacaatgaggacgagaaacgtactgcttcagagatggctgatgtactctatcatgccatggttctgttggcaaagaaaggtgtcaaaatagaagatgttttgcaggttcttcgtctgagattttcccaatctggtattgaggagaagaaaagtcgtgtatcccagaaatcagtggatgattgaatgttctgtcaactctatatctcaagcaatatatttagctttcggccacatagccagatgcaccattcgtgttcttatcggtgggactatgctgaatagggtaacattgttaaatagtgtagagaatgtcgagaacaccatgtaactgttatcctctcatttttgcagaattcagttttacactttaaataaaaggtttagttaattgtattgcttgcatcatgcttatgcgtagcaaactgcaagtctgtaatgcactaagcccttaatttttgtctcttagttatttgctcaagtatcttttaaagttgagtagaattgattttgaaccgttaaatgtagttagatgcgttagaactatattagtacccattgcacttanngaatagatgttctagaatata

SEQ ID NO: 4158 - DNA, 804 bp, Glycine max
attgtcaccggaaagggtccattggagaacctcgccgatcaccttgctgaccctgtcaacaacaacgcctgggcatatgccaccaacttcgtccccggaaagtgagcgtcaaagaacgaaatgaccctcgtgccgaattcagctacgtaggccccccccccccaaagaattccaaaaggattacataaagaaatgtgtggtagttgttggagaaagaagtgtgagtaagatcataagcaaaagcaacggtgaactgaagatgccggttctcaccctttctactaacgttagccttaatgatttagacgcctcttcgatactctcccaagtaatctccaccgtcgccagcatcatgcgcacacctgagccttttgtgatggtttcactggaaggatcaacaaccacatgttttggtgggactgaggagccagctgcctatggtgaactggtgtccatgggtgctcttaacccagaattgaacaaaaaactgagtgctggaattgcctgcgttcttgaaaccaagttgttggtgccaaagtcacggttcttcttaaaattctataacacagagggctataattgtgcattgaacgggtctatcatggtagtcgagtccaaatgatggaaagagaaaacctgttactttattgttattgtaattttgacatgctatgaatagtaagtatttcattaattccttacttattaataacatttttcttttataaaacggcaactcaaattgtatttaatttttgttagtcaagtcttattctgtctataaaaaaaaaaaaaaaaaaaaga

SEQ ID NO: 4159 - DNA, 1298 bp, Glycine max
tcgagcggctgagagaagacgacagaaggggaccacactcatttctttttctctatcttttgttctgctcagctcgatctacctaccttggttcttctctgttctgttatttcagtgcagcagcagaaaatgaccatcctcattgagcaacctgcccttgagttacaagttgaaggcaacaatgtgcatgctgaagaaaccaatgagcttgtattggatggtggatttccattgccaaaggatggatatatggccccagaaatcaattcatttggccactccttcagagaatatgatgctgaaagtgagaggcaaaaaggtgtggaggaattttataggttgcaacacatcaaccagacatatgactttgtgaagagaatgcgggaggaatatgggaaattggacaaagctgaaatgggcatttgggaatgttgtgagctgctgaatgaattggtagatgagagcgatcctgatttggacgaacctcaaattcaacatttgttacagtctgctgagaccatcagaaaagactatcctaatgaagattggctgcatttgaccgcactcatccatgatcttggaaagattcttgcgcttcctagctttggtgagcttcctcagtgggctgttgttggagatacatttcctctgggctgtgcctttgatgagtcaaatgttcatcataagtatttcaaggacaacccggattacaaatgccctgcttatagcactaaaaatgggatctacacagaagggtgtggattagacaacatagtgatgtcatggggacatgatgattacatgtatatggttgccaaggcaaatggcaccactttgccatctgcaggattgttcattatcagatatcattctttctatccattacacaaggaaggtgcatatactcacttcatgaatgaagaagacgttgagaatttgaagtggctcaaaatttttaacaaatatgatctctacagcaagagcaaagttctagttgatgtggagaaagttaagccatactatgtgtcactcattgagaagtatttccctgccaaggttagatggtgaaccatttgaattcaagccaaggttttgaggagattgatagataattattctggcgagcgagcaatgtatcaaataattttagttctttttttcttttatacaaggattcagactgcaccttattatattgaattcacctgcaaaattgcaatcttcaaatagtaaaatttcatatccagtcaagaaataaataaatgatttcatattacgatgaccgaaaaaaaaaaaaa

SEQ ID NO: 4160 - DNA, 2179 bp, Glycine max
ctaggatccacattagagcgcctcctccaatttcctacgttcactgcctccacattcctcagctacgtaggccccccccccccccaatattcaccgaaagttctcaactttcgaagattccatgacgaggttaagtttctaaaccttattttcagggaactcaaactgtgtctgaacctgttatttgctttgttgcacataaaatacatgtggggtgttgattttagtgtttgttgaggaaaaaagagagagagtataagtgagtgtagcactagcattgttcaaaatgccttctgaggatagtttaaggaagaagctaagaaagaatgccactaaacctgtagtaagcacttctaggaactttattagagctaagaaggatgaaaattcttttgagaaaaatggggcttttggcagaggaaatgagtctgagggaaagttgaagaaaagggggaattttaaaggaatgcgatcgggtgaagaagttttggagaggggaaagttgaggactttggattctggtgggaagaagaagaggatatatgctaagaaaggaggggataaaaatgtgaagttagagaatggtatggaagtatctaagaagagaactttgattaggaacggtgagaagcgagtgaaagatgtacccgttgaaggaaatgatggccaccatacaatgtgggatcatgataagacaaggaatggcggctttaaagtgaagcgatcgactcaaatgaggaaggaaaggaaggaagatgttgtgttggctattgcaaagcagaaaggcaaggcggaggatgcggggaaaattggattagttgggacagaagatcaaggaagtggttcggtgaagagaagtagagacaagaaaactgaattgagcaaagggaaaaaccaagaagttgtatctggttcaagttttgccaagaaaaaagccagagatagaacagggttggatgatgatgatgctgagatgctacatgatcgtccgaagaagaagaaaagggtgataaagattgacccacatgatatctcaaacaagagactagatgatggcattggtgttaatggaagtaaagaggagaaggagaaagaaaaggagtctgagaaagagcctaaaatgtccaagaatgcccagttccgtgcaatacagcctagccctttgatactttcctttgtggaaaaaaatcttttgggcaggagacgcatgattgacttaaaaagggcaggttacaatatagatctttctgcacccttagataatattcccttctctagcagttcagaaagagagaaaattgaagaaaatatttttaggaataaattggatttttttgctgctgcaaaggtctcatcatcatttccacctcctaatcttccagagattgcatttgctggaaggtcaaatgtcgggaagtcatctcttctcaatgcactcactagacaatggggggttgtgcggacatcagacaagcccggccttacccagacaatcaacttcttcaatctgggaacaaagcattgcttagttgatttgccaggatatggatttgcttatgcaaaagaagaagtgaaagaatcttgggaggagcttgtgaaggagtatgtgtccacaagagttggtctcagacgagtatgccttctgattgatacaaagtggggtatgaaaccaagagatcttgaactaattgaattaatggaaagatcaaaaactaaatatcagattgtattaattaagacagatgtggtctttccaattgatgtggcaagacgtgccatgcaaattgaagagagcctcttccagaacaagtctgtagttaagcctgtgatgatggtaagctcaaaatctggagcaggaattcgaagcctgagaacggccctagccaacataactcgatttgccagaagattgtagtaagatgttttatattcaagacatcacataggcttggtgaggtgaattcctttgtttgaagtgcagacttcatttgccacgtggctggccaaaccttttttttttttttttgcctcccatctaaattttagtggcattgcaagaaattattttatgattttttgggtgtttctttttataataactcatatagttttttggtcaaaaagagtgggtgcatgcatgacatgcttaccactttagtttaaaaaaaaaaaaaaaaaa

SEQ ID NO: 4161 - DNA, 1256 bp, Glycine max
tcagctacgtaggccccccccccattgaagaaagcggagagtgaggaagtggaaagggttgatctctctgggtcccacttgaggattctccccgaagcgttcgggaagattcgtggcctcgttgtgcttaatttgtctcagaatcagttagaggtgattcctgattcaatagcaggactacagaggcttgtggagctggatgtttcatctaatgttttagagtccctacctgactctattggattgttggttaatctgaagatctttaatgtgtcagcaaacaagctaactgctcttcctgaatccattgctctttgcaggtcactagtcgaattggatgcaagctttaacaacttaatgtgtctgccaacgaacatgggttttggacttgttaaccttgagaagctcttgatccatttgaacaagatacgatttcttcccgcctccattggagaaatgaaatctctcaggcatcttgatgttcatttcaatgagcttcatggcctacctcaatccattgggaaactcacaaatctggaatatctgaatgttagcagtaactttagtgacatgacagagctacctgaaacacttggtgatctggtcaacttaagggagcttgacctcagcaacaaccaaatccgagctcttccttactcgttcggtaggcttgaaaaattgacaaagctcaacctggaccagaatccaatcatagttcccccaattgaggttgtaaatcaaggggctgaggctgtgaaggagttcatggccaagtggtggctcgatctcattgaagaagctcaacagaaaagcatgtccgaaacacaaaatcagcaagcacagacaggatggctcgcatggggagcctcattgttgaataatgttgctgaagtttctgaaagtgttgcagaatattttggcgctaaaaaagctcctagagacccatggttggatcaacagctgtgatacaagaatatctggactctgcctacatacactgggtttataatttcgtgggatgtatagtttgtgatatagcttttggactcttgttacccctgtaatcaatacttttgtttttcatctttttttttttttttacttgcagttatacttacacggtataatttgtttggcattactgtctgatcagcacgtggtttgtatgagatggtagagaagtacgttgcttgacctgtacctaattttgtttaaatgcaaaattccctcttatggtcattgagaaaaaaaacaaa

SEQ ID NO: 4162 - DNA, 1714 bp, Glycine max
tcagctacgtaggccccccccccccccatggtcaattaaatagttcaaactttgtatgataatctgcaatgcacaacttcatctagctccctccttaatcatgaagtcaattcacaaacctatcaaaaccaaacccctgatgaaattcattttagtctcctcttcattttgtgccatttctctgtgtgtatcagtgttactcctagccacaccaaagatagtagaggtgggttcttcaccacaatatgtgtctgatcccaccactgttgatcatcttgtgtttggaattgcatcaagtggaatttcatggcctaagaggaaggaatacagcaagatctggtggaattggaaactcaataaaacaatgagaggatgtgttttcgtagatacacttccacatgaagaaaatgccaacaacaacaatgatggttctcgtcctcctctctgtgtctctgaagacacttcacagtttctctacacttacaagcctggtggtctccgatcagcaatccgcgtggcacgtgttgtgaaagagactgtggctttgaaccattctggtgttagatggtatgtgtttggggatgatgacaccattttcttccctcagaatttggtcaaaactctttccaaatatgatcataggctttggtactacgttgggtcgtactcagagatttatgagggctcccaggtttttggttttggaatggcttttggtggaggtggttttgccatcagttcctctctagcacaagtcctagccaaggtttttgattcatgcatacaaaggtattctcatctatatggaagtgatgccagggtgtactcttgcataacagaactaggtgtgggattaacacatgaaccaggttttcatcaggttgatttgaggggagatatatttggcctattggcagcacatccattaactcccttggtgtccctacatcacccagatcacactgatcctatctttcctaacatgacaactacaaaatctctgcaacatttatttgaagccgttaatgttgattccgagaggatcctacaacaaacagtttgttatgaaaggaggttttcatggacaatttcagtgtcatggggctatggtgttcaagtgttccagaacaacatgcttttgccagatgttctaagagtggaaaaaacattcaagcaatggaaggaaggaaatgttttggcaggaatatatactttcaatacaagagaacttcacccagaccaatgtaaacgacccaccattttctatctagataaagtgtcttctggcaaagatggcatcataagcagttacaggaaatattctcaaaattgctcatacaaggaaccaatgaagaaattggaggtgatcaaagtgtttacaaataagttataccttgacaataaacagattccaagaaggcactgttgtgatgtgttgccctctaacgctggtgactcaatggaaattgcaatcagagaatgcaaatatgaagaaatgatttacatgcactagaacatatactttaaatctctttcaccttgctcaagcagcaggtatccttgatgagtgttgctacttaggtagtgtatatagaaagcaagagattgtgtaagaaaattcccaatataaatttgaactttcatatatctaagatagcaatttacagaagcataaaagaatgcttctatcgggtttcctcttgtgtattccaaa

SEQ ID NO: 4163 - DNA, 2016 bp, Glycine max
caatctccttttgtccaagaaaaacacaacaatggggaaccaatcctcttcaaacaagatagaaactcttcccatcgacacaacatttaagcttccagcaaatataccagtttggccacaaggtggtggatttgctactggaaccatcaacataggagggctaaaattgtttcaaatttcaacattcaacaaagtttggaaaaccttagaaggtggaccaggtgatgcaggggcagctttctttgagccagcaggaatacctgagggattcttcacactaggccactacagccaacccaacaacaagcctctttttggatcaattctggtggcaaaagatgagacatcatcaggtgacaataatggagctttgaagaaaccaattgattacacacttgtgtggagcagcaagtcccaaaagatcaagcaagacaaagatggctatatttggctaccaacagcacctgatggctacaaaaccttaggccatgttgtcaccaccacacctgagaagccttcacttgacaaaatcaggtgtgttaggtcagatctcacagaccagtgtgagagaagctcatggatttggggaccagacaagagcagtgatgagaaaggtttcaatgtttatgaagtgaggccaagcaatagagggactcaagctcctggtgtgcttgtaggaacattttttgctcataatggtgaaattccttcccctctccctattgcttgtttgaagaacaccaacatgaacttctcctcctccatgcctaatttgcctcaagttaaggcacttgtccaagcctattctccattcatgtacttgcatcctgatgaagagttccaacctgcttccaccaagtggtatttcacaaatggggcattgcttgttaagaaaggagaagagtccaaacctgtgccaatagaccctacaggttctaaccttcctcagggtggcaacaatgatggtgagtattggttggaccttccttctgacaaagccaacaaggaaagggtgaaaaagggtgatttcaagagttgccaagcctatgttcatgccaaacccatgtttggtggaacattcactgaccttgtcatgtgggttttctacccattcaatgggcctggaacagccaaagtagggctcatagatattccactagggaaaataggagaacatattggagactgggagcatgtgacactaagagtaagcaatttcgatggagaactaaaaaaggtgtatctctcacaacatagcaatggtcaatgggttgaagcttctcagctcgagttccaaagtgggaacaaatcagtgtgctattcctccttgaatggccatgccatttatccaaaagcaggacttgtcatgcaaggccttgatgggattggaataaagaatgaaactaagaagagtgagaaggtgattgacatgggtgttggttttgaagttgtttctggtgagtatttggggtcagcaattgtagaaccaccttggttaaactttttgaggcaatggggtccaaaaatcacttatgacattgcaaaggagctggacaatttggcgaaggtgttccctgctttggaagcccttgaagatggtttgccaaatgagttgttgggacaggagggacccacaggacctaagctcaaaagaaattggcaaggtgatgaggtttgaaatggaagacttggagaatggtggcattattgacaccatgcaattaaaaaaggagactttaatttggttggtttgcactatctgttttgtatttttatagggttcacaacaaacatgtatttcttaataataactgacaaagttgtttcttgtttgtatttgcatgccagctttttcgggtgttcccacaacattaaaaagcatgtgatattgctcttcaaatagtaggtagatggaggacagaagaaaattgaaaagatttttgtgtgcacttggcttataatgattatttttcccaaagatataaatattttatcactaaaaaaaaaaaaaaaaaa

SEQ ID NO: 4164 - DNA, 1307 bp, Glycine max
tccattttcttgtgttctgcctccatcgagtaccaagaaaacagaacaaactaaaaatgggactcttttcttctacaaaactgcttccaattgttgtgctgttttctcttcttttcacatcttatgccacaaattcagctgaaaacaactttgttcactgccttgtgaaccattctgagccctctcaccccatatccgcagcaattttcacacaaaacagttcctcattctcttcagtgctgcaagcctacatcagaaaccttcgtttcaacacctccacaacccgaaaaccattcctcatagtgaccccatttcatgtttcccatgtgcaagcatccattgtttgtgccaaaaagcacaacttgctgatgaaaatccgaagtgggggacatgactacgaaggggtgtcttatgtggcctcacagccattcttcatccttgacatgttcaatctccgatccatcgagatcgacatggaatccgagaccgcgtgggtcgaagccggcgcaatgcttggtgaagtttattatagaattgctgagaagagtaagactcatggttttccagcaggggtttgtcccactgttggtgtgggaggtcacattagtggtggtggatatggcaatctcatgagaaaatatggcacttcagtggacaatgttgttgatgcacaaatagtggatgctcggggaaggttgctgaatagaagaaccatgggtgaagatctcttttgggctgttagaggtggtggtggaggtagctttggtgtggttcttgcctacaaaataaggctagttcgagttcccgaaaaagtcactgttttccaagttgggggaaccttggagcaaaatgccacagacatagtttacaattggcaacatgttgcgcctagcattgacaatgatcttttcattaggctcatcttggaggtggtaaatggtacacaaactgcaacaaagactgtgagggctaccttcatagcactcttccttggtgactccaaaagccttgtttctctcatggatgagaagtttcctcaattgggtttgaagcaattcgattgcattgagacaacctggcttcgatcggtgctgttttgggacaacatagacattgcaaccccagttgagattttgcttgaaagacaacctcagtcttttaagtacttgaaaagaaaatctgactatgtgaagaagccaatttccaaggagggttgggaggggatttggaccaagatgattgaattggagaaggcaataatgtacttcaatccttatggtggaagaatggctgagattccatcaaca

SEQ ID NO: 4165 - DNA, 2496 bp, Glycine max
ggaaaaggaaaaatccaaaatatattcttcctaatgactcatgcggtgttctctgaactttcctctttctttgtctgtttcctctttccttccacccatcttccttttctaattctgcatctctcagtctcataataataaatcatctctctccaaaaccaactcttcttcttcttactccactcttctcacttccactatcgccatggcctcccactcaaaccaaccaggtcccggagctgaagggctaggagagaaggaccccccaacaagtttccagaacccgctttctgagatatccccgtcgccgtctccgtcgtcggcgccggcgccggcgctggtgctgtcgaactcggggaagcgaatcgaccaggcggggaagaagaagtacgtgaagcaggtgacggggcgccacaacgacaccgagctccacctggcggcgcagaggggcgacgtgggcgccgtgaggcagatccttgaggatgttgattctcagattatgggaactctgagtggcgatggcgatgaggatgatctgaacgcggagattgcggaggtgcgtgcttgtcttgccaacgaagagaacgagctcggtgagacccctctgttcacagctgctgaaaagggtcaccttgatgtggtgaaggagttgcttaactattccaccgctcagactgtttccaagaagaaccgatccggatttgatccattgcatattgcagctagtcaaggccaccaccccattgttcaggttttgctagattatgactcaggattgagcaaaactattggtccctccaactccactccgcttataaccgcagcaacaagagggcacacggaagtggtgaatgagctgctgtcaaaggattgtagcttgttagagattgctagatccaatggcaaaaatgcgttgcatttagcagctcgtcagggtcatgtggagattgtgaaagccttgctcagtaaagatcctcagttggctcggaggaccgacaagaaagggcaaactgcattgcatatggctgtaaaagggcagagttgtgatgtggtgaaattgcttcttgaggcagatgctgctattgttatgcttcctctcggtttgggtaactcagctttacatgtggcaaccaggaaaaagcgagtagagatagtgaatgagttattacatctgccagacaccaatgtgaatgcattaactagagaccacaaaacagctcttgacattgctgaagatcttcccctctccgaagaggcatcagatataaaggactgtctttctcgatatggagcacttagagctaacgagctcaaccaaccaagggacgaactgaggaaaactgttactcaaatcaagaaagatgttcacacccaacttgaacaaaccaagagaaccaacaaaaatgttcacaatatttccaaagagctaaggaaactccacagggaaggaattaacaatgccacaaactcagtgacagtggtggctgtgctgtttgctacagttgcttttgctgctatattcactgtgcctggtggggatcacaatgacggctctgcagtggtagcagcttatgctgcttttaaaatcttctttgtctttaatgctatcgcactttttacatctttggctgttgtggttgttcaaatcactttggttagaggtgaaactaaagcagagaaaagggtggtagtggtgatcaacaagctcatgtggttggcttctgtctgtacttcagtgacgtttattgctgcttcttacatagttgtgggtaagaagaatgagtgggctgcaattttggttacattagttggaggggtgataatatctggagttattggcactatgacttactatgtagtgaggtctaagagaagcagatcaatgaggaagaaggagaagcaagctgccaggaggagtggatctaactcatggcatcattctgaattctccaattccgaggttgatccgatttatgcgctttgagtttgaacttgcaaccttcaggggatcatgaagaacaaattgttgtgaaaaagatgacaggtttttaggtttgctacttgctccatgttaccactttaagagttcttcactgtacaggaaattgttctcttcggcttagctgctgcttttctaggatcttatatacaaattggaatgaagcatgcatcatcattggaatgaagcatgcatcatcccggtctgtgatttttaagaacaaaatccaacattgctttaattctcaattatgtattgatgtattagcaaaatgtctcccttccctgttcgttactgttttttttctatcactagaattgtcttcggggcctaatctacacaattgacccttgataatgctgcatgctgagttctgatagagaatgaaatagtaatacgtgttaattgtattttttttatttgttgatatattttgtgttgtgaaaactaaggcttgcaatttgcagataagggtacaaattgaaattttgataaaa

SEQ ID NO: 4166 - DNA, 1163 bp, Glycine max
ccccccccccgcattaaccagagaccacaaaacagcccttgacattgctgaaaatcttcccctctctgaagaggcatcagatataaaggactgtctttctcgatatggggcacttagagctaacgagctcaaccaaccaagggacgaactgaggaaaactgttactcaaatcaagaaagatgttcatacccaacttgaacaaacaaagagaaccaacaaaaatgttcacaatatttccaaagagctaaggaaactccacagggaaggaattaacaatgccacaaactcagtgacagtggtagctgtgttgtttgctacagttgcttttgctgctatattcaccgtgcctggtggggatgatgatgatggctctgcagtggtagcagcttatgctgcttttaaaatcttcttcgtctttaatgctatcgcactttttacatctttggctgttgttgttgttcaaattactttggttagaggtgaaactaaagcagagaaaagggtggtagaggtgatcaacaagctcatgtggttggcttctgtctgtacttcggtggcgtttattgcttcttcttacattgttgtgggtaggaagaataagtgggctgcaattttggttacattagttggaggggtgataatatctggagttattggcactatgacttactatgtagtgaggtctaagagaagcagatcaatgaggaagaaggagaagcaagctgccaggaggagtggatctaactcatggcatcattctgaattctctaattccgaggttgatcggatttatgcgctttgagtttgaacttgcaaccttcaggggatcataaagaacagattgtggtgaaaaagacgacaggtttttagggttgctaccttctccatgttactactttaagagttcactgtacaggaaattgttctatacggcttagctgctgcttttgtaggatcttagacaaattggaatgaagcatccattatcattgtaactgttaaatggtgcactgcagggcctaagtaagcacctgtatcttaatcccagtttgtgaaacaaattgaacattgttgtattgatgtattatcaaaatgtgcctgccttccctgttcgttactgattttttacttacatatatactggacccttgattatgaaaccc

SEQ ID NO: 4167 - DNA, 994 bp, Glycine max
aatgctatatctttatgttaaaacttcaaaatataaaatgcaataatatctttatttatagtagctaagaagatatttatgaaaatgttattgtgtatgctaaaagagtgagtgttgtacttaaccggctcccacaatagcaaacattgacacggaacactcagaagtgttctggcattcggtaaaataaaaatctctcgaaacataggcctataaaatgccaaagattgggccattttggtaatttcatgttacaagatatgttttctgagttcctcttttgcctatataaatgctagtatgtagagtgagcccgccactaactcaattagaattctccaaacactctagaatttgcatgcactgttcttcatacaatggcattacgcgagcttcttatgatggggatattgctgctggtatgtcttgctaaggtttcatctgatgttaacatgcaaaaggaagaagatgaagaacttcgctttcctaatcaccctcttatcgtgagagacgggaacagaaggctaatgcaagacatagattgcggaggattgtgcaagacaaggtgcagtgcccattcgaggccaaacgtgtgcaacagggcttgtggcacgtgttgtgtgaggtgcaagtgtgttcccccaggaacttcaggcaacagggagctctgtgggacctgctatactgatatgatcactcacggcaacaagaccaagtgtccgtagagcccggcccattgaaggtcagccctatccaattgggcccttcacacaccgagttgattacaccaagcaaagttagtctagtttagtaaataataaatatgggttatgtacacttttatggatttggattttgcatcttaagatcgtgttctagtttttacctttgttataatgtatcgtattgttggagccaagtttataaattttatatatattttttaattcgggtctcaaaaaaaaaaaaaaaaaaaaaaactcgagactattcc

SEQ ID NO: 4168 - DNA, 574 bp, Glycine max
gttagacaggttttgtgatgctcttatttccattcgacaagaaattgctgagattgagaaaggaaaggctgacattaacaacaatgttctaaagtgtgctcctcatccaccaccagtgctcatgggagatgcatggacaaaaccatactctcgagaatatgcagccttcccagcttcctggctccgtgtttctaagttctggccttccacaggacgtattgataatgtgtacggtgatcgcaacctcgtttgcacccttctcccaacatcacaggttgttgaagaacaagctgctgcaacggcctaatcttttcttccattgacaagtattttcattttttaaattgtacataaactcttcctatcattcaggcgttgctgcttgacctttgcttcattatatcataatgatgatgatgtaagtttcattcagccacataaccatacctaaacacagcaaagaaaggtatccaaaaaagaaataaactgttgtgacttgtgaaaaaaaaaaaaaaaaaaaaaaaaaaaaaaaaaaaaaaaaaaaaaaaaaaaaaaataaaaaaaaaaaaaataa

SEQ ID NO: 4169 - DNA, 1314 bp, Glycine max
ttttgcttgggaaatgacactggtatagttgaggctgtttatactgtactgagagaacctgggcccccccccgttgctccaattccagtctgggagatcccaatatggaaagacatatcaccacgtctaaggaaggttaatgcagctctcaaattcatcaatgatacgcttgatgatctgatagcaatatgcaagagaatggtggatgaagaagagttacagtttcatgaggagtacatgaatgagcaagatccaagtattctacacttcttgttggcgtcaggagatgatgtgtcaagtaagcaacttcgtgatgacttaatgaccatgctcattgctggacatgaaacatcagctgctgttttaacttggaccttttatcttctatccaaggagccaagagtcatgtccaagctccaagaagaggttgactctgtacttggagatcaatatccaactattgaagacatgaagaaactcaaatatacaacccgagtgatcaatgagtcattgaggctttacccacaaccacctgtgttaattcgccgctctcttgaggatgatgttcttggagagtaccctataaagagaaatgaagatatctttatatctgtctggaacctacatcgcagtccaaaactgtgggatgatgctgataaattcgaacctgaaagatgggcattagatggaccaagtcctaatgagacaaatcaaaacttcaaatatcttccgtttggtggcggaccacggaaatgtgtaggtgatttgtttgcttcctacgagactgtggtagcactcgcaatgcttgttagacgattcaactttcaaatagcagttggagctccaccggttgagatgactactggagctacaattcatacaacacaagggttgaagatgactgtaactcacagaataaaacctcctattgtgccctcattacagatgtcaactttggaagtggatccatccataagcctttctgatcaagatgaagtaagtcagaaaggcgaagtttaccaggctcaggctcagtcctaattgctgctgtataacaaatcataaaccatacaatgagtgcaaaggggggaaaaagtagtattctttatattcttttagctgcttgagtgaaatttgtagtatggtgaggcttgatatccccaacaatcccccaaacccagctcctttgcaaggaagagggcaaaacttcaaatccttcacgcctttacaattcttattaaaaagggtggaatacacaaattataaatttataaatacaacctaaaataaatttgacaagaggttgaaaaaaac

SEQ ID NO: 4170 - DNA, 1592 bp, Glycine max
tggggggggaggtttttcaaaacagagtcagctacgtaggccccccccccgtgattgtgacagagagagcaggagaggcatttgatgtgatgtcttctttgacaaatgtggagcttaactcatatgatggtgttgttgctgttgtttaaagctccctacccaccaactccatcagattttgttcatttggttaaagataatgatgattccttggttcttgatgaagatgaaatagttgatgagacttcaagtcgaaatgaagaccagtttcctctgatttcaagtccaaaacaatctgggtctagaatctcaaattcaaattctgaagataaggctgctgaatttcctcttcctaatgaatggtttagatttgggattattcctgcaggttcaactgatgcaattgtaatctgtacaactggaactcgagaccctattacttctgcattgcatattgtccttggtaaaagggtgcaccttgacatagctcaagttgtacggtggaaaagaactcctaaatctgaggttgagcctcatgtgcgctatgcagcttccttttcagggtacggattttatggtgatgtcatcacagagagtgagaagtatcgctggatgggtcccaaacgttatgattacgctggaacaatggtatttttaaagcataggtcatatgaggcagaaataacatacctagatgttgaatcagatgaaaccaatttgacttccagaagggatcatgagggtaatctgttacaggcaataaggtctccacaaaaatcagaaagatgtatctgccgaattaattgcaaggtttgtaatgaaaagccaaatcatgcatccgttggagtttgcagcctcacacctcatctgaattcagaagaaacaagatgggcaagatccaaaggacgctttcttagtgtaggagctgctgtaatctcttgcagaaatgaaaaagcaccggatggattggtggctgatgcacacctgtcagatggtttccttcatcttatattaattagagactgtcctcatgtatcttatttatggcatctgactcaacttacaagaagagggggaagtcccttgaattttaagtttgtggaacatcataagacccctgcgtttacttttacttcttcgggcaatgaaagtgtatggaatgtggatggagagatttttcaggcacaccaactctcagctcaagtgtttagaggccttgtatgcatgtttgcatctggtcctgaagtttaattgtgaacatagctattttgtgtaaattgttttggctatgccattaacaggaaccgtgatgaagcttatttagcttcaaggaattgcgtataatgtatctatttaccaattcctaactaccaattaggtggaaggtttgggacttgtaatcatggaggggaaatttgctacatttgaatgtatatctttttgtgatttgtacatgatttactattgtagatccaacgaagtgcaagaaggcttgaatgtagatcatggttttctatatttagtagcaggataccgtgcgattgcaggggttgtaaaaaaaaaaaaaaaaaagtgttcctgcagcccggggg

SEQ ID NO: 4171 - DNA, 1995 bp, Glycine max
aacaaacactattgaaaatatataaaagtctgaagttgtaacccaaaccaatctggtattctgaattaaattacattgccctgaatattgtgtcagacaacattcccctttgaataagggtaaggttaaggcaccagatgagagatggtgcagatatcacaaggggaaaaaaatggtttgaaactgtacacatttaaaaaaaatgaaaaaagggtgaaaaggtgtcaagactcgactattatagggaaaggaacagcctctgatgaatacaacagtttccggaagctcttgtagagatgatgaagccttgagttgaaaaaagaaaaattccttatcgaaggatttaagaagcatcactgagtgagagaaaaagaaaataaaaattgttcactctgtacttaatctatgtgttgtggtgagaatggtagttgtttggctcctctctccaatgcatctctccacattctgtatctcaccccaagcttgtcgtaggctactgggaaattccatacgtttgcaccattgttcattctctcttgctgccccaccactagccgtagatcctcatttaaaacctgttctgcaaaatgcctccatagatatttcattaaaggtatatgcttaagcagaggagcaaaatccagtgacattctgtatagcaatcttgtcttttgttttgaagatggtaagcagacatgaagttggtgcaggtgcgttgaacattccctggtactttgtccctccagtttcccaggctttgaaattccaatggttgatagtaccatgcagggtggtcgaaactccatatcgataggatagggatcccagtatccttgcaggccagatgcaggtgtcaaaaaattcaccaagctgggaacactccatcccttagcaaatgttgaggtgtgcgtaaaaggggcatgtgcaagatccaaaagattgtccaaaagtaagccgtgttcaattggaagttccatcacaatctcagcgtggatttcaaatccagaaggaggtagtatagatggaagtgtggctgctggggggtcattgccaggccaaatccagatcattccctccttttcaaagcatggaactgactttattttcacatttagctgtcgagtagatggcattttctcacattttccatcagtagtatattcccagccatggtagggacattggatacgaccctcatttactgaaccaaggtgcagagggcaggctctatgtgcacaggtgttctgcacacatccaggcttcccatctttccctcgaaagataacccatggttcctcaaaacattctattgggatcatggtatcatcctttaggtcattagaaaaagcaacaggataccagaaattcttcaaatggggatggtatgactgaactggacccgatacattcaagcttttccgtggctgccttctcttttctgtaactaaagaatttgcagaagtactgggagaagaggatgtttgggcaacatcagtcgtgcttcgatcttgcaacagcctatcatttaccaattcttccatgtaagcaagtttatctaaagcagtggtaacccttgcttcagatatatgaacctgtgtgtgtgcttgtgctaattcatcctgcaactcggctagctcctttttcagggtgccaattgatttatattcgcgagctagaggattaagaacttcgaccaccttttcatgggggtgcatgattgttagcacatcttgccgagctcgccaatctcggtcccgtgggtcgtcccgggcctccgctcctgcttgagatatatccaaaaccttccctttattctgtggaaacttagatctcggatcctcaacatcaaaaagcgcaccccatgcatttttcttctcttcttctccaaatacagcaaacactctaaatctacctttcaaatcccttttggtgtcaagcttcccagctctaagaaaaatcggaagagagagagcagaagcagtggctataacattc

SEQ ID NO: 4172 - DNA, 727 bp, Glycine max
gtcagtagagaaagctcaagggtaccagcatttctcatagtgtgcatggtatgactgactgggacctgatatgtccaagttttttcgtggcgatcttctgtattctacatctacaggtttaaaagaagtactgggagaagaggatgtctgggaaacttctgtggtgcttctttcttgcaacaacttatcgtttactaattcttccatgtaagctagtttatctaaagcactggacacccttgcctcagatatatgaacctgttggtgtgcttgtgccaattcttcctgcaactctgctagctcctttttcatggtgccaatggacttataatcacgagctaaaggattaagaacctccaccaccttttcatgaagaagcatgatggtaagcaagtcttgcctagctcgccaatcacagtattgaatatcatatcttgcaacttcaagggcttgatatacatccaaaaacttccctttatactgcggcactttagatcgtggatcctccacatcaaagagggcactccatgcattcttcttatctatctcttctccatatacagcaaacactctaaaccttccttttaaaccctttttggtgtcaagtttggatgatttggagaaggagaaagggagagagagaactgcagcagttgcaatagcgttcatggcggggcgaagctgacagtctctgtctgaagggggggggcctccgtgccggactcga

SEQ ID NO: 4173 - DNA, 841 bp, Glycine max
cagaaaaacaagtagttgagaactaagaagaaggaaatggcttcctcaatgatctcctccccagctgttaccaccgtcaaccgtgccggtgccggcatggttgctccattcaccggcctcaaatccatggctggcttccccacgaggaagaccaacaatgacattacctccattgctagcaacggtggaagagtacaatgcatgcaggtgtggccaccaattggcaagaagaagttcgagactctttcctacttgccagacctcgatgatgcccaattggcaaaggaagtcgaataccttctaaggaaaggatggattccttgcttggaattcgagttggagcacggtttcgtgtaccgtgagcacaacaggtcacctggatactatgatggacgctactggaccatgtggaagctgcctatgtttggctgcactgatgcttctcaggtgttgaaggagcttcaagaggctaagactgcataccccaatggcttcatccgtatcattggatttgacaacgttcgccaagtgcagtgcatcagcttcatcgcctacaagcccccaggcttctaagtcattgaaaaatttgcaaagcatctgtagccaccccactttgtttgttgtacttaaactacattcccatttgtttttgctttatgagatttcatcatcctgtatttttggtttctgttttcggacttcaatggaaattaatggatgagaactaatgaataagctattgtgttgtgttgctttgtttccaaaaaaaaaaaaaaaaaaaaaaaaaaaaaatttccaaattgtgggttgaaattagtctcttctaaatttaaaaaaaaaa

SEQ ID NO: 4174 - DNA, 1023 bp, Glycine max
  misc_feature (12)..(12): n is a, c, g, or t
gcatcagtgcanccaaacataggcagcttccacatggtccagtagcgtccatcgtagtatcctggtgacttgttgtgctcacggtacacgaaaccgtgctccaactcgaattccaagcaaggaatccatcccttcctaagaaggtattctacttcctttgccaattgtcccccgcggccccctgccgagggaagaacaagtagttgagaactaagaaggagaagcaaatggcttcctcaatgatctcttccccagctgttaccactgtcaaccgtgccggtgccggcatggttgctccattcactggcctcaagtccatggctggcttccccaccaggaagaccaacaatgacattacctccattgctagcaacggtggaagagtgcaatgcatgcaggtgtggccaccagttggcaagaagaagtttgagactctttcctacctgccagaccttgatgatgcacaattggcaaaggaagtagaataccttcttaggaagggatggattccttgcttggaattcgagttggagcacggtttcgtgtaccgtgagcacaacaggtcaccaggatactacgatggacgctactggaccatgtggaagctgcctatgtttggttgcactgatgcttctcaggtgttgaaggagcttcaagaggctaagactgcataccccaacggcttcatccgtatcatcggattcgacaacgttcgccaagtgcagtgcatcagcttcatcgcctacaagcccccaggcttctaagtgtgaaaaatttgcaaagcatttgtagccgccaccccactttgtttgtttgtacttaaactacattcccatttgtttttgctttttgagatttcatcatcctgtatttttggtttctgttttcggacttcaatggaaattaatggatgagaactaatgaataaaaaaaaaaaatgtgtaaaaaaaaatcaaaaaaaaaaaaaaataaaaaaaaaaaaaaaaaaaaaaaaaaaaaaaaaaaaaaaaaaaaaaaaaaaaa

SEQ ID NO: 4175 - DNA, 1599 bp, Glycine max
  misc_feature (1597)..(1597): n is a, c, g, or t
gttgatggtggtgttgatggtgatgatgaagtggagaagaaggaagggagaaacagtggtggaactcaccactaccctgcgacgccggccccccccccccgtgcattttatatgaaaactgggaattgcaagtttgggtttaattgcaagttcaatcaccccattaagaggaaaagctaaggctgttaaagagaaggcaggagaaagagaagaaaccacagaaagatcgggcatgacagaatgcaagtattatcaaaggtctgggggttgtaagtttggtaaatcttgtaaatataaccacacaagaggaaaaatttcaacagcaccagcaccacttttggaacttaactttcttggcctgcctattcgtctgggagagagagagtgcccctactacatgcgcactggctcttgtaagtttggagcaaactgcaagttcaaccatcctgatcctacagctgttggaggaggaggaggtaatcctccttcagggtatggtaatggagggtctatttcattacaaggtgtatcacaaacatctgtaccctcctggtcttctccaagaacattaaatgaagcatctccttttgtgccaatgatgctttcacctactcaaggagtttctacccaaagttctgattggaatggatatcaggcatctgtctacttacctgagaggagcattcatccaccttctacatttgtcatgaacaacccagcaattgatacaaatgtttacatgcaccatcaaaagcagatgcctgttgatgagtttccagaaaggcctggtgaacctgaatgcagctacttcttaaaaactggggattgtaagttcaagtctaattgtaaattcaaccatccaaagaatcgggttgcaagattacctccatgcaacctcagtgacaagggtctgcctttgagacctgaccaaagtgtctgctcccattacagtcgctatggaatttgcaaatttggaccagcttgtaagtttgaccacccgataaacttgcagcccgtgatgattcctggacttggtcagcaatcctactcaaactcagctagtgttgaagtggctgggatatttggaagtacaggtgttgtaactgatgcgacaattcagcaatctgtgtaaacatgtttgtctgaggatctttttgctttgaggatcataacacccgaaatttgtagttttcttcttaaacatgataaatttattttacttttcctagcactgtccaatgcagcacaagctttgcaaggaatatcaacacacacacacatcaaacagtttttatgcatttattacaagtaacaacatctgcatatgtagattatcttttgtttatgatcagttggatcataattgttttgaaatggttgtcaatgtgggtttttttttttttttccagctgccaacggggttatgaaccttggcaaaattggcaactagtcaatacatctgatggatagaataaattgataaaccaatccatatggagatcattttttttgtttgcttgcaaaaagattgaccttacatttgctaacaaaatttgtattaatgaaggagttatcttgcctgttggtctgtttttanac

SEQ ID NO: 4176 - DNA, 1307 bp, Glycine max
gagggagttaagggtgagaggagcagtggtagagctcaaccagccccgttggccccccccgctgaagactgtgcattttatctcaaaactgggacttgcaaatttggattcaattgcaaattcaatcatccgcttaggaggaaaaaccaggctaaaaaagagaatgcgggagaaagagaagagcaggcagaaagatcaggccagacggaatgcaagtattatttaaggtctggggggtgtaagttcggaaaggcttgcaagtttaatcacacaagaggaaagagttcatcagcatcctctactgcagagcttaacttccttggcctgcctattcgtgtgggagagaaagagtgccattattacatgcgcactggctcttgtaagtttggagcaaactgcaggtttaatcatcctgatcctacagctattggaggaggtgattctccttccggttatggtaatggaagttctatttcgttgcaaggtgtatcacaatcatctatatcctcatggtcttctactagaccattaaatgaacctgctccttttgtgccggtgatactttcacataatccaggggtttctccccaaagttctgaatggaatggataccaggcacctgtctatctatctgagaggagtctgcatccaccttcaacatatgtcatgaacaacccagctatggaatcaaatgtttatatgcaccatcaaaaacaaatgctggttgaagagtttccagaaaggcctggtgaacccgaatgcagctatttcttaaaaactggggattgcaagtttaaatctaattgtaaatttcaccatccaaagaatcggatagcaagattacctctatgcaacctcagtgacaagggtctacctttgagaccggaccagaatgtttgcacatattacagacgttatggaatttgcaaatttggaccggcgtgtaagttcgatcacccagcgccctcaactatggctggacatgatcaacaatccacatatataaactcagctggtgttgatgtggctgaaaatggaggtgccgaagatgggaatcagcagtctgtgtaaaacattttctggctttgaatatgcatatcacccataatttgtaatcttatctaaaaacatgataaatttatttaatttcactagttatgctaatgtggcacaagccttacagaatagcaatatatacggctaatagaagttttattacagtaacatgtagattattatctttttaaaaaagaaatgatttctttaacttggatcattattaccttactatgattttgtgctggtgt

SEQ ID NO: 4177 - DNA, 1120 bp, Glycine max
ctctccatggttatgtgattcatttgtgatgaatttcacattgcaggggcaatgaccaaaatggactggtttgagctggattttcccaaggctgaagtgttgatcattaatttcacatccactgaatactttttgcctccctttatcaataaaatgccaaatttgagggcattgataataataaaccacagtacctcacatgcccgccttcaaaatgtttcagtttttaggaatttgaccaacttgaagagtctctggcttgaaaaggtttccatccctcagttatcaggcactgtcttgcaaaacttgggcaaattatttgtagtcctctgcaagattaataatagtttggatgggaaacagttccctaacctctctgagctcactcttgatcactgtgttgatctaactcaatttccctcaagcatttgtggaataaagtcactacaaaacttgagtctcaccaactgccacagtttgagtcaactacctgttgaatttggcaaactaagatcactagagatcctccgtttatatgcttgtccatatctagaaacacttcctcctagcatgtgtgacatgaagagattgaagtatattgatatttctcaatgtgttaacctcacatgcttccctgaagagattggtagattagtatgcttagagaagattgacatgagggaatgccccatgattaggtatttaccgaagtctgcagtgtcattgcaatctctgcagcttgtaatttgtgatgaggaggtacaagatatgtggagtgatgttgagatgtccaactcaaatgttcttattcaagtagcagaacaacactatgatctagactggcttcaagagtgacccatgtgtgtctacgttcttgggatgttttacttcccaattctttgtacttgtatattcttgttcatagcctcaattctgaaaaggaatttttcttatttccaaaagctaattcccgtgatggtgaaaatggcacaatattttcactgtagttcctagaattaatgctagcagtagccagtgattaccccaatttagttattattaggagtttaacgttgaagcagtaaactaattttacacacattcaaaaaaaaaaaaaaaa

SEQ ID NO: 4178 - DNA, 2815 bp, Glycine max
tcagctacgtaggccccccccccgagagaaaatagcagtagttggcgcaaaaccatggcgctaacggagttcttccacggcgagatctcgtcggagctatggaaaatgctggtttcaatttcccgaaaagccctccgctgcaagtcgagcgccgagagcctcatcacctacgtccgcgagctccttccgacgatcgaagagatcaaatattccggcgtggagctgccggcgccgcgccagtctcagctcgaccgcctctcggagatcctccgctccggcgtcgagctctcgcaccaggccctctcctcctcccgctggaacgtgtaccgcaacttccagctcgccaaaaaaatggagaagctcgagaagcacgtgacaaggttcttgcaggttcccatgcaggcacatatattggcggacgtgaaccacgtgcggttcgagatggcggagcggttcgaccgggtggaggcgtcgaaccggaggatggagcggttgattggggagatgaagattggagtgaacgggggagggtgggtggaggaggctgtgaggagtatgcaggaggatgagacgtgggttgaagggtgtaatgggaataataataacggttttggggttgggttggagttcgggaagaacaaggttttggagatgatttttacgaggagtggtgatgtttcggttgtcggtatttgcgggattggtgggtccgggaaaaccactcttgctagagaggtctgcagagatgaccaagtgagatgttatttcaaggagaggatcttgtttttgactgtgtcgcagtccccgaatgtggagcagctgagagagagtatctgggtacacatcatgggcaaccaaggtttgaatggcaattatgcggttccacaatggatgccacagtttgagtgtaaagtggaaactcaagtacttgttgttttggatgatgtgtggtcactctcagtgctggacaagcttgtgttgaaaattcctggctgcaaattccttgtggtatccagatttaacttcccaacaatttttaatgccacttatcatgtggaattgctgggtgaacatgacgccctttctttgttctgtcaccatgcttttggacagaaatcaattcctatgggtgctaatgtgagtttggtgaagcaggttgtggctgagtgtggaaggcttccactggctctgaaggtgattggagcttctttgcgagaccagaacgaaatgttttggttgagtgttaaaagcaggctctcccaaggccaaagcattggtgaaacctatgaaaccaatctgattgatagaatggcaattagtactaactacctgccagaaaagatcaaggagtgcttcttggacctgtgttcttttcctgaggatagaaagattcctctagaagttttaatcaatatgtgggttgaaatctatgacatcgatgaagctgaagcatatgccattgtggttgagctttcaaacaagaatcttctcaccttagtacaagaggcacgtgtcgggggcatgtatagcagttgctttgagatttctgtcactcaacatgatatattgagggaccttgctcttcatttgagcaaccgtggcagcattcatcaacaccgaaggctagttatggctacacgaaaagaaaatggactactccccaaagaatggtctagatacgaggaccaaccctttgaagcacagattgtttcaatcaacacaggtgaaatgaccaaaatggactggtttgatctggattttcccaaggctgaagtgttgatcattaatttcacatccactgaatactttttgcctccctttatcaataaaatgccaaatttgagggcattgataataataaaccacagtacctcacatgcccgccttcaaaatgtttcagtttttaggaatttgaccaacttgaagagtctctggcttgaaaaggtttccatccctcagttatcaggcactgtcttgcaaaacttgggcaaattatttgtagtcctctgcaagattaataatagtttggatgggaaacagttccctaacctctctgagctcactcttgatcactgtgttgatctaactcaatttccctcaagcatttgtggaataaagtcactacaaaacttgagtctcaccaactgccacagtttgagtcaactacctgttgaatttggcaaactaagatcactagagatcctccgtttatatgcttgtccatatctagaaacacttcctcctagcatgtgtgacatgaagagattgaagtatattgatatttctcaatgtgttaacctttcatgcttccctgaagagattggtagattagtatgcttagagaagattgacatgagggaatgccccatgattaggtatttaccaaagtctgcagtggcattgcaatctctgcagcttgtaatttgtgatgaggaggtatatggtatgtggagagatgttgagatggccaactcaaatgtccttattaaagtagcagaacaacactatgatctagactggcttcaagagtgacccatgtgtctacgttcttgggatgttttaccttcccaattcgttgcacttgtatatacttattcatagcctcaattctgaaaaggaatttttctttttccaaaaagctaatttccgtgatggtgaaaactgtggcacaatattttcactatagttcctagaattaatgccagcagtagccagtgataacccatatttagttattattaggacttcaacggtgatgcacgtaaactaatttatattctcatttaattataaaaaaaaaaaaaaaaaaaaaaaa

SEQ ID NO: 4179 - DNA, 1780 bp, Glycine max
tacggctgcgagaagacgacagaagggtggaaatagaagagaaaattaacaaaatcaaatggtgccaaacagccaatggtgctttgttccttctatccacaaatgataaaaccatcaaattttggaaggtaaccagccatgagaccagtttgatggctcgatgccgtagagtatatgcccatgctcatgattatcatattaattctatttcaaataacagcgatggcgaaactttcatatcagctgatgatttacgaataaatctttggaacctggaaattagcaatcaaagttttaatattgttgatgtaaagcctgcaaatatggaggatctgaccgaggttataacatcagcagaatttcaccctacacattgtaatacattggcatatagcagttcaaagggttcaattcgtcttgttgacttgcggcagtcagcattatgtgattctcatgccaaactatttgaggaacaagaagcccctgggtcacagatcatttttcacagagattatcgcctcaatctcagacataaaatttgggaaggatggaagatatatacttagtcgtgattacatgaccttaaagttatgggacatcaatatggattctggtccagttgcaacattccaggttcacgagtatttaaggccaaagctttgtgatttatatgaaaatgattcaatttttgataagtttgagtgttgtctaagtggtgatggattgcgtgtttcaactggctcttacagcaatctattccgtgtgtttggttgtgttcctggaagtactgaggctacaactttggaagccagtaaaaatccaatgagacgccaagttccaaccccttcaagaccatctagatcattgggaaacagtataacaagagttgtaagacgtggagcagagagcgccggtgttgacgcaaatgggaattcttttgatttcacaacaaagttgctgcacttagcatggcacccaactgagaattcaattgcttgtgctgctgcaaatagcttatacatgtactatgcttgaggaagaaagatgattgaagaacatgtatttgcttttggttgacctgtttttggggttgctgtggagaaggcttctttccccttcttaccaaccaatgagttggatgctacatttaactcacactacaagtgcccttcaaaatctttagcaggagcttttagaaaaaaagatccagaagtggctgtttcaaaattcctggggtgggcagaccttattttgtttctggatgatgatgggcagcatctcttttttttgttcaatttttccaccttcttccaaccctaatattctttctccccttttttctgtatcttcttataaaaagagaaggtgcagtcaatgcttcatattgtgttttggcttgcaaatgaagaagaaaatgtgattgtagctctcctacaacaaatactaaaggatgttcaatatctgccactaggataaaaagataaaatgtagttcttttctttttacccagatagatgtcttgtgggatggagcagtggaaacctgcagtgcatcattttttcattgattatttttgtgttgggaattaatttgacactgtttcaaactccaatttttgctgcacttggtcaatttttgtgtaaaatgtcaaaagaggaagtaataattctaggttgcaaggatgtacgataaactggattgtctcttcctaccaaatttttatggttctatcacttattggattttttccttttttgccttgtgactaactgttcttaat

SEQ ID NO: 4180 - DNA, 2312 bp, Glycine max
acgctaagcaaggcggctcgaggttggtcttttttgtgttccaatggttcaactgggaacccaaagagaacgagaaaaagaaattttatttcttttttagacgggtctttgtgaacctatgatcttgtgaaaacccagaaagcgatctttgatgcactcataggattggccgattcagttgcgtgttcggtggccgttgatttcgtgacaaatgaacggtggcgatgaggtcgtggcagctccggcgggtccgccgcaccctctggagtggaaattttcgcaggtcttcggagaacgcacggcaggggaagaggttcaggaagtggacataatttctgctattgaatttgacaagtccggtgatcatcttgctactggtgatcggggtggtcgagtggttctctttgagagaacagatacaaaagatcatggtggatcaagtagggatttggagagggtggactattctattggtaggcatcctgagttccgttacaaaacagagtttcagagtcacgaaccagagtttgactatcttaagagtttggaaattgaagagaaaatcaacaaaatcagatggtgccaaatagctaatggtgccctcttccttctttctacaaatgataaaacgatcaaattttggaaggttcaagaaaagaaggtcaagaagatttctgagatgaatgttgacccttcaaaatcaatggggaatggatctattgctagttcaagcaattcaagtagttctaggccatatcttgtaaatggaggatctccagatagatacaattatataagcaatgacttttcatttccaccaggaggcctaccatcactaagattacccatggtagtaagtagccatgaaaccagtttagttgctcgatgtcgtagagtgtatgcacacgctcatgattatcacatcaattctatttcaaataacagcgatggtgaaactttcatatcagctgatgatttgcgaataaatctttggaacctggaaattagcaatcaaagttttaatattgttgatgtaaagcctgcaaatatggaggatctgacagaggttataacatcagcagaatttcaccctacacattgtaatacgttggcatatagcagttcaaagccctcgcgtccgcttgttgacttgcgacaatcagcattatgtgattctcatgctaaactatttgaggaacaggaagccccagggtccagatcatttttcacagagattattgcttctatctcagacataaaatttgggaaggatggaagatacatactaagtcgtgattacatgactttaaagttgtgggacattaatatggattcaggccccgttgcaactttccaggttcatgagtatttgagacccaagctttgtgatttatatgaaaatgattcaatcttcgataagttcgaatgttgtctaagtggtgatggattgcgcgtagcaactggttcttacagtaatctatttcgtgtgtttggttgtgcccctggaagtgctgaggctacaactctagaagccagtaaaaatccaatgagacgacaagttccaaccccttcaaggccttcgagatcactgggaaatagtataacacgtgttgtaagacggggagcagaagcccctggagtggatgctaatgggaattcttttgatttcacaacaaagttgctgcacttagcatggcatccaagtgagaattcaattgcttgtgctgctgcaaatagcttgtacatgtactatgcgtaaagagagatgattgaaggcgcaatgtgtatctgcatggtcacatcatattgctgtggagaaggcttcttcttttcccatcttaccaaccacactgggttggaggatacatatacactattaactctcacactacaagtgcccttcagagagcttttagaaaaaggatccagaagtggctgttttgaaattcctggattggcaggagaccttattttgttactggatgggcagcatctctttttttttcctcttcccctcctttcaatcctaatattctttccctctatttctgtatcttcttctgaaagagaaggtgcaatcaatgtttcaaattgtgtttggcttgcaagtgaagaagaaaatgtgattgtagctctcctacaacagatactaaaggatgtttcaatatctgccaccaggattcagattaaaaaatgtagtttttcttttctttttttgcccagatatttctgtgggatggagcagttgaaacctgcagtgcatcatttttttattgattaattttgtgttggaatttaatttgacatgtttc

SEQ ID NO: 4181 - DNA, 2679 bp, Glycine max
gagagagtagagagagaagagtgtgcgtgcgtgcgtgtgtgtgttgtgttttttttttcatctccaaacccaaatagaaccgtttactcggccattttaatcccccaaaaattcccattttactccttttagagagagaaaagattgagctttcaggagagagaaagaggaaaaagacttggaatttttttttttggggtgttccaatggttgaactggaaatccaaagaagggtgtgaaaaaaattgcatctttgtttggtgggtgtctctgaaactatgatcttgtgaaaacccagaaaggaaaccttcgatgcgcgttggtagatagagattgctgttgggattttcagagaaccgttgattgacaaatgaacggtggtgatgaggtcgtggcagctccggcgggtccaccgcagccgctggagtggaaattctcgcaggttttcggggaacgtacggcgggggaggaagttcaggaagtggatataatttctgctattgaatttgacaagtctggtgatcatcttgctactggtgatcgtggtggtcgagtagttctctttgagcggacagatacaaaagatcatcacggatcaagaagggacttggagaggatggactattctattagtagacatcctgagttccgttataaaacagagtttcagagtcatgagcctgagtttgactatcttaagagtctggaaatagaagagaaaattaacaaaatcaaatggtgccaaacagccaatggtgctttgttccttctatccacaaatgataaaaccatcaaattttggaaggttcaagaaaagaaggtcaagaaagtttcagacatgaatgttgatcctaaattaatgggaaatggctctattgctagttcaagtaattcgggtagctctaaatcatatcttgcaaatggagtatcttcagatggaccatataattatttaaacaacgatttctcatttccaccaggcggtgtaccttcactaagattaccattggtagtaaccagccatgagaccagtttgatggctcgatgccgtagagtatatgcccatgctcatgattatcatattaattctatttcaaataacagcgatggcgaaactttcatatcagctgatgatttacgaataaatctttggaacctggaaattagcaatcaaagttttaatattgttgatgtaaagcctgcaaatatggaggatctgaccgaggttataacatcagcagaatttcaccctacacattgtaatacattggcatatagcagttcaaagggttcaattcgtcttgttgacttgccgcagtcagcattatgtgattctcatgccaaactatttgaggaacaagaagcccctgggtccagatcatttttcacagagattatcgcttcaatctcagacataaaatttgggaaggatggaagatatatacttagtcgtgattacatgaccttaaagttatgggacatcaatatggattctggtccagttgcaacgttccaggttcatgagtatttaaggccaaaggttagattcccatgtttggatgagcaatgaatttctgctgctttatcaagttatagtaactggctcttttttttttggccagctttgtgatttatatgaaaatgattcaatttttgataagtttgagtgttgtctaagtggtgatggattgcgtgtttcaactggctcttacagcaatctattccgtgtgtttggttgtgttcctggaagtactgaggctacaactttggaagccagtaaaaatccaatgagacgccaagttccaaccccttcaagaccatctagatcattgggaaacagtataacaagagctgtaagacgtggagcagagagcgccggtgtcgacgcaaatgggaattcttttgatttcacaacaaagttgctgcacttagcatggcacccaactgagaattcaattgcttgtgctgctgcaaatagcttatacatgtactatgcttaaggaagaaagatgattgaagagcatgtatttgctttggttgacctgtttttgggttgctgtggagaaggcttctttacccttcttaccaaccaatgagttggaggctacattaactcacactacaaagtgcccttcaaaatctttagcaggagcttttagaaaaaagatccagaagtggctgtttcaaaattcctgggtaggcagaaccttattttgtttctggatgatgagcagcatctctttttttgttcaatttttccaccttcttccaaccctaatattctttccccctttttctgtatcttcttataaaaagagaaggtgcagtcaatgcttcatattgtgtttggcttgcaaatgaagaagaaaatgtgattgtagctctcctacaacaaatactaaaggatgttcaatatctgccactaggataaaaagataaaatgtagttcttttctttttacccagatgtcttgtgggatggagcagtggaaacctgcagtgcatcattttttcattgattatttgtgttgggaattaatttgacactgtttcaaactccaatttttgctgcacttggtccatttttgtgtaaaatgtctaaagggagtaataattctaggttggaatgatgtaggataaactggattgtctcttcctaccaaatttttatggtttaatc

SEQ ID NO: 4182 - DNA, 1725 bp, Glycine max
aatagctaatggtgccctcttccttctttctacaaatgataaaacaatcaaattttggaaggttcaagaaaagaaggtcaagaaaatttctgagatgaatgttgacccttcaaaatcaatggggaatggatctattgctagttcaagcaattcaagtagttctaggccatatcttgcaaatggaggatctccagatagatacaattatataagcaatgacttttcatttccaccaggaggcataccatcactaagattacccatggtagtaagtagccatgaaaccagcttagttgcccgatgccgtagagtgtatgcgcacgctcatgattatcacatcaattctatttcaaataacagcgatggcgaaactttcatatcagccgatgatctgcgaataaatctttggaacctggaaattagcaatcaaagttttaatattgttgatgtaaagcctgcaaatatggaggatctgacagaggttataacatcagcagaatttcaccctacacattgtaatacattggcatatagcagttcaaagggttcaatccgtcttgttgacttgcggcaatcagcattatgtgattctcatgccaaactatttgaggaacaggaagctccagggtccagatcatttttcacggagattattgcttctatctcggacataaaatttgggaaggatggtagatacatacttagtcgtgattacatgactttaaagttgtgggacattaatatggattcaggccccgttgcaactttccaggttcatgagtatttgagacccaagctttgcgatttatatgaaaatgactcaatctttgataagttcgaatgttgtctaagtggtgatggattgcgcttagcaactggttcttacagcaatctatttcgtgtgtttggttgtgctcctggaagtgctgaggctacaactctagaagccagtaaaaatccaatgagacggctagttccaaccccttcaaggccttcgagatcactgggaaatagtataacacgtgttgtaagacggggagcagaaacccctggagtggatgctaatgggaattcttttgatttcacaacaaagttgctgcacttagcatggcatccaagtgagaattcaattgcttgtgctgctgcaaatagcttgtacatgtactatgcgtaaagagagatgattgaagacaacatgtatctgcatggtcatatcatattgctgtggagaaggctgcttcttttcccatcttaccaactacactgggttggagaggctacatatacactattaactctcacactacaagtgcccttcagagagcttttagagaaaggatccagaagtggctgttttcaaattactggataggcaggagaccttattttgttactggaaaggcagcatctctctcctttttttttttcctcttctcctttcaatcctaatattctttccctctatttctgtatcttcttctgaaagagaaggtgcaatcaatgtttcaaattgtgtttggcttgcaagtgaagaagaaaatgtgattgtagctctcctacaacagatactaaaggatgttcaatatctgccactaggattcagattaaaaaatgtagtttttctctctcttttttttgctcagatatatctgtgggatggagcagttgaaacctgcagtgcatcatttttttattgattaattttgtgttggaatttaatttgac

SEQ ID NO: 4183 - DNA, 1242 bp, Glycine max
tcagctacgtaggccccccccccaaatttgagcacgggaataggagcagataatcagaaaacaatggccgtagcaataggaagaagcttctccattcagcccggctctttattcaacaacaagagcttggatagaggttcaccagctggaagattatcgtggcttggggatggtgctgctgccactccacgttataggcaaacttgtgttggggcgcaacagcgacctacatggctcccaggacttgatcccccacctcatcttgatggaacgtgaggctgtacacttctcttgggcatcttgttctgctattgctactgtctcttttcaagtttttgacataaacagtatgcttttcagtcttgctggagattttgggttcgacccacttggacttgcagaggatccggcaagcttaaggtggtatgtgcaggcagagctggttcattgtcgctttgcaatgcttggggtcttcggaattctagtgacagatctacttcgcgtcacaggaattagtaagataccggtttggtttgaagctggtgcggtaaaatacgactttgccaatacaaagacactcttccttgttcaactagttctgatggggtttgtggaaactaaaaggtatatggattttgttagtcctggatctcaagctaaagaggggtccttctttggattggaagcttcactgaaaggcttagagccagggtaccctgggggtcctctgctaaatcctcttggcctagctaaagatattaataacgctcatgactggaagcttaaagagattaagaatgggcgactcgcaatggtggcaatgcttggcatctttgtacaagcttcagtgactcatgttggaccaattgataatcttgtggagcatctttccaatccatggcataaaacaattattcagacccttgccaattctagctcttagttctagaaagtactgtatgaatatgtggcttgggcttgagcttatccataaaatgaaattactttttatttttccacctcgatcatactgtggtcaaggatcaagtttagatgtaagggtcttgaagcacattctattacattttcaattgatttaattatttgtttaagctttggggaaaaaaaaaaaaaaaaaaaaaaaaaaaaaaaaaaaaaaaaaaaaaaaaaaaaaaaaaaaaaaaaaaaaaaaaaaaaaaaaaaaaaaaaaaaaaaaaaaaaaaaaaaaaaaaaaaaaaaaaa

SEQ ID NO: 4184 - DNA, 1165 bp, Glycine max
ggctcgagattaaacagaaacaaaaagtggcattgagaagaacagaacatcatcaacacaaacacaacaaaaacacccaaagaggaataccacaacggaacttcctcgttttggcctttaccctcttttttctctccttgcttttacccttaaacaacggagcgagtgtttttcctctatcgatctggtttcgttggatttggattgaactctgataatgtggtgtgcgatgggagattccggtggccattactgtcctaagaagaccgatgatttatgcggcgacgtttgtggccaggagtcaagtcaagtattgggcatgtcaagagtgcgctgcattttacgcggcttggatgtaaaaacctgtatttttctttttgctgttgtgccaatgtgcatctttggaatatacttgcatggacagaaaatctcctacttcctgcggccgctatgggagaaaccacccaagcctttccatgtcattccacattactacaacgaaaatgtgtcaatggggaatctctgcagacttcatgggtggggagtccgtgagttcccaagacgtgtgtatgatgctgtgttgttcagtaatgaattggaaatacttaacttgcgctggagagaattgtatccttacataacacagtttgttctcctcgagtcaaattccacatttactggtaggccaaaaccttttgttttcaaaggcaatcgggagcagttcaaattcgtggagtctcggttaacttacggaactattggtgggaggttcaagaaaggagaaaacccgtttgttgaggaggcatatcagcgggtggcattggatcaactccttaagatagctggtattactgatgatgacttgttgattatgtctgatgttgacgagattccgagtgctcacactattaacctcttgaggtggtgtgatgatgtgccttcagtccttcatcttcagctgaagaactatctatactcctttgagtttctcttggatgataacagctggagagcttctgttcacagatatcagagtggtaagacaaggtatgctcattaccgccagtctgatgacttattggcggatgctggctggcattgcagcttttgcttccgctatatcagcgatttcgtctctaagatgaaagcctacagtcttaatgac

SEQ ID NO: 4185 - DNA, 782 bp, Glycine max
gttcaaaagaaacaaaacgaatgcgcgtgtagaacaggtgttttactagaaatgagttttgggtttagctaatggctatttcctccgcgttcctcctcgcgtccgcccggtgattaattggaattgaaacaaaaacaagtggcattgagaagaacagaaacatcatcaacacaaacacaacaaaaaacagccaaagaggaatacctcaacggaacttcctcgtttggctttcagtgtctgtctcactccttaccacaaaaccctacgcctttaccccttgcttttatttatccttcaacaacgcccgttccttgttgcttctcgccagaagaggatttggatcggagcgagtgtttttcactatcgatctggtttccttggatttggatttggattgaactctaataatgtggtgtgcggtgagagattccggtggccattactgccctaagaagaccgatgatttatgcggcgacgtttgtggccaggagtcaagtcaagtatcgggcatgtcaagagtgcgctgcattttacgcggcgtggatgtaaaaacctgcatatttctttttgctgttgtgccaatgtgcatctttggaatatacttgcatggacagaaaatctcctacttcctgcggccactatgggagaaaccacccaagcctttccatgtcattccacattactacaacgaaaatgtgtcgatggagaatctctgcagacttcgcttctcgtgccggcttctcttcccgagacgtgtgtatgacgctgtgttgttcagtaac

SEQ ID NO: 4186 - DNA, 2157 bp, Glycine max
ttcttacaaacttatttttttaatcaatttatgagattaatattattgtcataaattaaaaaaaaaattaaatattcagttattcctttgcttaccgaagcacgtcattgtcgtgtgactgcttgaggctttgagccaaacaagcttacacaatacacttttatttaccaaaaatctcagctacgtaggccccccccccgaaaaaagtaaaaacaaaaatcaaatctaaatatacaataataagttaaacgcacgcaaacccaaattggcttttgcgagtgatgaaaaacacagaatcgcgtttgcgactgaggaatgagtttcctgcagggtatcgttgattccttcaactccatcttcatacccgataacaacaattatcacgacaccaattctccttcttcttcttcttcctcaacgaatcgaatggaagcttctcctcctcctcctcctcctctttctccttcggtttcgaacgagcgcgttgcctacaagctcaaaggctacttcgatttggcgacgcaggagatcgcgaagggcgttagggcagaggaatggggcttgatcgacgatgcgcttctccactaccgtaacgcgcactcgatcctcctcgaagctaattcaactcccgttccgtcctacatcacttccagtgaacagcagaaggtgcaatcttatcgagagaagatatccaaatggcagagtcaggtttctgagagattgcagactctcgctagacgagctggtagctcatctgctaatcagagcacctcaaaacttgcccaaactgtggcagttccgattaagccatcgagtactagaaaaaatgtgttataaaagccccctcaaagaacaggtcaggtgaataaagttggaagcccaaaatctagtcaagggtctggtgtaaattatgatgacaaactagttgaaatgattaacactgccatagtagatagaagtccttctgttagatgggaagatgttgctgggcttgaaaaggcaaagcaagctttaatggagatggttattttgccaactaagagaagagacttgtttacgggtcttcgaaggccagccagaggtttgcttctctttggtccccctggtaatggaaaaacaatgcttgccaaagcagtggcttcagaatcacaagcaacattttttaatgtcacagcagcttccttgacatcaaaatgggtgggtgaaggtgaaaagcttgtccggacactattcatggtagctatatccagacagccatctgtaattttcattgatgagattgatagtataatgtcaacaaggttggcaaatgagaatgatgccagcagacgattaaaatctgaatttcttatccagtttgatggggtgacctccaatcctgatgatattgtgattgtaattggtgcaacaaataagccacaagaattagatgatgcagttcttaggagactggtaaagagaatatacgtacctttaccagatgaaaatgttcggaagcttctgctgaaacacaaactcaagggtcaagcattctccttacctagtagagatcttgagaggcttgtaaaggagactgaacgatattctggcagtgatctgcaagccttgtgtgaagaagccgcaatgatgcccattagagagctgggtgctgacattcttactgttaaggctaatcaggtaagaggactgaggtacgaggattttaagaaggcaatggctaccattaggccgagcttaaacaaaagtaagtgggaagagcttgagcgttggaatgaggaatttggctctaattgaagtcatattctgatgcatatatatgcatcaaattatttttttaaaaaaaaactgtgtacataactgaaattagactagacgaaggcatcaaggttagtagctaaaacaatgaatcagggtgcttcttattttgttaatggctatcctgaaatcctattctagccgcttgtctcaaatgactgcctttatttatttttattctttgtatatctttctgattactatatcaagtgattgtaaatcccttcccccgggggttttctgggaagaaaaaagattgataaattgccccggaaatgaggggagaaagacattgaaaacaaggttttttaaacatggcagtatatgaattttaaagctttt

SEQ ID NO: 4187 - DNA, 1212 bp, Glycine max
actcactttacactgcatcaaccaaacaaacaaataaagcaaaaggcctttttattccaaagcaaggaaggaagaaataaaccgaatgagagcattaacctcttcttcttccactttcattccaaagcgttattccttcttcttcttcctctccattctcttcgctcttcgatcctcgtccgggggctgctccgaataccaccaccaccacgcgccgatggccacgataggaggcttacgcgactcccaaggctctcagaacagcgtccaaaccgaggccctcgctcggttcgccgtcgatgaacacaacaagaagcagaattcacttctggagttttctagggtggtgaggacacaggaacaggttgttgcgggaaccctgcatcaccttactctcgaggctattgaggcaggtgagaagaagctctatgaagccaaggtgtgggtgaaaccatggttgaatttcaaagaactccaagagttcaagcctgctggtgatgtaccatcatttacctctgctgatcttggtgtcaaaaaggatggtcaccaacctggatggcaatctgtgccaacacatgaccctcaagttcaggatgcagcaaatcatgcgatcaagactatccagcaaaggtctaattcactagtaccctatgagcttcatgaggttgctgatgcaaaggctgaggtcattgatgactttgccaagtttaatctgcttctcaaagtcaagaggggacagaaggaagagaagttcaaggtagaggtacacaagaataaccaaggtgggttccatctaaatcagatggaacaagatcattcctaattctgatcggaagtttggccacgctagcagtataggcctgggtggcacctaaaatataccttttttttctgtggggtgtatgaatcttattatctatgctatacataattatatactaatcgggtattgttcttatctctgtctcagcaagtatgttagtgcttacccctttctctaagccttggcagataagttttcctatgtgtattggctttattaactgggaagctaccaagttacattagtacctttgtaacgtaaatatttacttaacataaaaatgtggatgttgaccatttgcatttaacgtatgcctaaagaatgtgaattattttttacctttaaaattaaattttaacatttaatgtgaataattctttttggctgag

SEQ ID NO: 4188 - DNA, 1169 bp, Glycine max
tacggctgcgagaagacgacagaagggggacgcgtataaaaaaataaaatcgagatgctgctacgacgtggcgtccaaactaagccacacggctaataaatacggccggcacactttcactgcatcaagaaaggaagaaacataccgaatgagagcatcaaactcttcttcttcgatttccattgcgaagcgttactttttcttcttctttctcttcattttcttcgctcttcgatcttcgtccggggactgctccgaataccaccaccaccactcgccgatggccacgatcggaggcttacacgactcccaaggctctcaaaacagcgtcgaaaccgaagccctcgctcgattcgccgtagacgaacacaacaagaagcagaattcgcttctggagtttgctagggtggttagggcacaggaacaggttgttgctggtaccctgcatcaccttactcttgaggctattgaggctggtgagaagaagctctatgaagccaaggtgtgggtgaaaccatggctgaatttcaaagaactccaagagttcaagcctgctggtgatgcaccatcgtttacctctgctgatcttggtgtcaaaaaggatggtcaccaaccaggatggcaatctgtgccaacacatgaccctcaagttcaggatgcagcaaatcatgcgatcaagaccatccagcaaaggtctaattcactagtaccctatgagcttcatgaggttgctgatgcaaaggctgaggtcattgatgattttgctaagtttaatctgcttctcaaagtcaagaggggacagaaggaagagaagtttaaggtagaggtacacaagaataaccaaggggggttccatctaaatcagatggaacaagatcattcctaattctgatctgaagtttggtcaccctagcaatattgttcttatctatgtctagtgcttacccctttctctgtgccttggcaaataagtagttttacaatgtgtgtatccctttattaactgggaagctaccggtgatgttacattagtaactttgtaacgtaaatattactttagtatcataaaaaatgcggatgttgaccatttgtatttaacgtagcctaaagaatgcgaattattttttttacgtttataaagttgttattgtcaagttttaacatttaaa

SEQ ID NO: 4189 - DNA, 1448 bp, Glycine max
  misc_feature (11)..(11): n is a, c, g, or t
gagcttgacgncgcaagcaccgcgtgccttagcctggaattccgcttcaagtggccttttccttatttgtttttggtttaagaaaaggtgagggaggagagtggttcttttctttggctcgttaaatcgattgatttgaatcagctacgtaggccccccccccgacagtaaaaaagggtttagttgtgttcgaaattcgaaattccaatcgcaaagcataagaaaaattaagaaaaaatgacggtgaaaccaatccatcttcagatatgtggattggttagtcaacgatggagttggaaaccccgcacagtctcatccctctcctcattttccccaattccataccctaacccttattccaaactgcctcccaccaacaccgtcgctcgcagggttcgattcgcgccatttcacgcttcctcgtcgccgcttccttctgccggtattgttcgaaacatcaagttctgtcagtggtgtggtggttccacgaagcatgatattcctgaaggggaggaaaggttgagagcaatatgtacggtttgcgggaagatcgcgtatcaaaatccgaagatggtagttggctgcctcattgaacatgataacaaggtccttctttgcaagaggagtattcaaccatctcatggcctttggacccttcctgctggttatttggaaattggagagtctgctgtggaaggtgccattagggaaacaagggaggaagcaaatgcagacgtagaagtaatttctccatttgcccaattggatattcctttaattggccaaagttacatgatattcttagcaaagctgaagaagcaccatttttcacctggtccagaatcatcggcatgccaactttttccacttgatgatatacctttcaattctttatccttttcatcaatggtggttaccttaagtttgtatgttgaggatattaaggctggaaagctcaaattccattatggaaccattaacaaaaggccgggtacaagtccttctgatattcgtgcctatacactggatcaccatatgcattcatgagtcgtgataagcagagtataagaagattgtaagttgaaaattttcttcggccagccagaagattgtaagttgaaaattttcttcggccagccagaagattgcatgtcttctgcaaagaatttccgtgttactggcttgaactcacgcttgtcacaagcttaaattcaacattgtcccaaggtagatgagcagtgttctaattcaagaagggcatgttagaccaatggtcatcattacctgcgaattcctcagctgctcttgtggacctaccatatcaaattggtaggtagttgcgttgcagaaagaaagattgagacttgttttgcaatctgcattggaattgtaaacataaacactcattgagataaatgtaattctttttgaaaaaaaaaaaaaaaaaa

SEQ ID NO: 4190 - DNA, 1292 bp, Glycine max
  misc_feature (1243)..(1245): n is a, c, g, or t
cgaattggggtcccgggccccccctcgagtcagctgcaggcccccccccccccaacagcactgagtaacggcaaagtccttgctggttgcttccattcgcgatggcgttgcaggagaggctagacaagttcaagaaacagcaagagaagtgccaaacgacactttcgaccattgcagctaccaaggccgccgcggcaacccaaaagtccgccacacatgcctcggcaaatggaagaaacgctgcccctgcggttaagttttccaacgacaccgagaggcttcagcatattaatagcattcgcaaggcccctgtgggtgctcagatgaagcgtgttattgatcttcttctagagacacgacaagcttttacaccggagcagataaatgaggcatgctatgtcgacatgaaggctaacaaagatgtctttgagaatctgaggaaaaacccaaaagtgaactatgatgggcaacgattatcttacaagtcaaagtatggtattaaggacaaaacagagcttcttcaactggtacgaaagtatcccgagggccttgctgttattgatctcaaggatgcttaccccactgtgatggaagatttgcaggctatgaaagctgcagggcagatttggcttctgtccaacttcgattcacaggaagacattgcctaccctaacgaccccaaagtacacattaaggtggatgatgacctaaaacatcttttccgcagtattgaattgcctcgtgatatgattgatatagagaaggatcttcaaaagaatggaatgaagcccgctaccaacactgcacagaggaggagtgcagctcaaattcaaggcatttcttccaagccaaagcctaagaagaagaagagtgaaatcagcaagagaacgaagcttaccaatgctcatcttccagagctctttcagaatttaaacagttcctgattaactctcatcaagtggttgtgtagttcaaatagatactttatcagccagtctaaactagattagcattgtgaaatattcaggaggttcttgctgctgtgccctacttttatttgtttttttattttatttttttttatttctgtacatcgaggctgcagctaatggactattgtactcgtcctaatttgtgaatccttgtatattatcatcatgttgcatttaaatttttagtcttgcaagtttataaaaaaaaaaaaaaaaaagaattcctgctgccctttcagagaaaagtcttnnnctgcacccctgttgatgaaccctatcccataaattttatctcggcaa

SEQ ID NO: 4191 - DNA, 1280 bp, Glycine max
  misc_feature (18)..(18): n is a, c, g, or t
  misc_feature (20)..(20): n is a, c, g, or t
tcgagtcagctacgtagngnccccccccccgagtaacggcaaagtccttgtccttgcttccattcacgatggcgttgcaggagaagctagacaagttcaagaagcagcaagagaagtgccaaacgacactttcgagcattgcagctagtaaggccgcggcaacccaaaaatccgccgctcatggctcggccaatggaagaaacgcggcccctgcggttaagttttcgaacgacacagagaggcttcagcatattaatagcattcgcaaggcccctgtgggtgctcagatgaagcgtgttattgatctccttctagagacacgacaagcttttacaccagagcagataaatggggcatgctatgtcgacatgaaggctaacaaagatgtctttgagaatctgaggaaaaacccaaaagtgaactatgatgggcaacgattctcttacaagtcaaagtatggtcttaaggacaaaacagagcttcttcaactgatacgaaagtatcctgagggcctcgctgttattgacctaaaggatgcttaccccaccgtgatggaagatttgcaggctttgaaagctgcagggcagatttggctgctatccaacttcgattcacaggaagacattgcctaccctaacgaccccaaagtgcacattaaggtggatgatgacctgaaacagcttttccgcagtattgaattgcctcgtgatatgattgatatagaaaaggatcttcaaaagaatggaatgaagcctgctaccaacactgcacagaggaggagtgcagctcaaattcaaggcatttcttccaagcccaagcctaagaagaagaagagtgaaatcagcaagagaacgaagcttaccaatgcccatcttccagagctctttcagactttaaacagttcctgattaactctcagcaagtgttggtgtagttcaaatagatactttatcagccagtctataaactagattagcagagtgaaatattcaggaggttcttgctgctgtgccctacttttaatttctatacatcaaggctgcagctaatggactattgtggtctataacaactcgtcttgtgaatccctgtatattaaaatcatgttgcatttagttttctagtcttgtaactttttatacataaattattagattggaagttcaatttttttcttcaacttaaaaaatgagcttaagcagctgtatgtttaacatgggatagtaacctacccaatgtttcaaaagtggacttggttaaaaataccccgaattcaacgt

SEQ ID NO: 4192 - DNA, 1303 bp, Glycine max
ttttttttttttttttatcaaacaaatcatcaatactttgtttatatctaatctatatatataaaatccataataggctagcactaatgtgtaattccacccctaatttgttccggtctcctagggttctattctaacaaagatggcagcgatactcagtgaggacctgatagtggaaattctaacatgggttccagtgaaatctctgatgcgtttcaggtgcgtttccaagtcttggaattccctcatcttccatcccgcattcgtcaaattgcaccttcaacatcaaagggcttccaaaaacacccacctcctattaaggtgccgccgagatagcatgcttaatctgtctgacgaattcatcggaccctgttctattcgcggtttacttgagaacccatcgtccactgttgatgatgcttgccaccaattacaccccggatactttttcataggttcctgcaatggcttggtttccttgctttatcattctcgttctcttgttagaaatggatccatagaataccgggtccggttttggaacccggccacaaggatcatgtccctaaatttgtctcacttaactttccattcatcccaggatcatgatcctggctttgggtttggttacgatgatttgagtgacacttacaaggtggtgcttctccttttggacattaaaacaaacaattgggaggtgagagttcactgcttgggtgacactgacacttgttggagaaatactgtaactgtaacttgccctgatttcccactttggggaggacgcgatggaaagcttgtgagtggcactcttaactggttagcagttcgctgggaaaccgatactgtgaatcagttggtaattttttcgtatgatctaaacatggagacatataagtatttgttgttgcctggtggtctttctgaacatgctgataaccctagtcttggggttttgaagggttgcctgtgtctttatcatggtcaggagcaagtcagaacccgttttgttgtttggctaatgagggaatttggagttgaaaactcttggactccgtggctgaatatgagttttgagcttgttcaactctttccaccttggcaattattggcagcgcctttgtgtatgtttgaaaatgatgatgtcatgttgctggcaaactacccgcgttcccaatacattttctataatcggagagataatagaatagtccgtactgaagatttcaacgacaaagtgccgctgttctcccatgatgattatgttcaaagcttggttctaccctatcgaaaaaaatttttt

SEQ ID NO: 4193 - DNA, 582 bp, Glycine max
  misc_feature (15)..(16): n is a, c, g, or t
  misc_feature (555)..(555): n is a, c, g, or t
  misc_feature (557)..(558): n is a, c, g, or t
  misc_feature (566)..(576): n is a, c, g, or t
ggccgcttcgaggcnncggccgggtaaagcaacaaccttttaagcacaacacatcacacagtgagagaggtatacgtacgaggatgtctgacattgctatgttggtggcggaggagtatgagaggagggtcaagagtttaagaaaggccggtggtggtggaaccggagcgggggaatttgacatggtttcttgtgtttcggtgatggtgtctaggctcaaggaaaagaagcagcttcttcaatgggtttgggagcccaagacccaagttgccatggctgcttccaacagcttcttctctgcttaaacaactcattcatcaactcctctggactctgacgtgcttggtgattgattgttgcaaccaattgttatctagtttttccatattctaattttcatgaaatattgtacatagctatgttttgaatttaaatcaaaggcaaagcattattctgtttccttagatgttaaatttagaaaacaacatcattgcaaagtatttatctgttttgatgatatttattggaaaacttgagtgtagtcttttcttcctnannaaaaaaannnnnnnnnnnaaaaag

SEQ ID NO: 4194 - DNA, 1670 bp, Glycine max
atttgaagcaattggttttgatcgatgttgaagacaattggctatgtacttcctcctttctctatttgatgcactagtaataattaacttatattcaactttccagccaactttaatttggtcaaaggtatcacatatagttaactaaaatataatgttgttaatgtaaattattaaaccaatgaacaataatgaggctggatggcttgtgggtaccttgtaccttcactttatataagtcctttcttttgttagcaatgttttgtaacacccaaacatataacaagatggcttcttttcatatccaatattcattccttgtgcttgtgcttgctatggtgatcacattgatgaaccctaccaatgcaaccctctctccccatttctatgataaagtttgccctcaggcattgccagttataaagtcagtggttcaacgagcaattatccgtgagcgacgcatcggagcatctcttctgcgcttgcatttccatgattgtttcgtaaatgggtgtgatggatcaatattgctagatgacacccgaaacttcactggcgagaagactgcattgccaaatcttaattcagtcagaggtttttctgtggttgatgaaatcaaagctgcggtggacaaagcctgcaaacgccatgtggtctcatgtgcagatatcttggccattgcagcccgtgattctatagccatatatgggggtccacactactggtaccaagtattgttgggcagaagagatgcaagaactgcaagcaaagctgctgcaaactccaatcttcctcctccaacattcagcttctcacagcttgtttccaacttcaaatctcacggcttaaacgtgagggaccttgtggccctctctggaggccacaccatagggtttgcaaggtgcaccaccttcagaaacagaatctacaacgtaagcaacaacataatagaccccacgtttgcagcatctgtgaggaagacatgtccgaaaagcggaggagacaacaacttgcatccacttgatgctacacccacaagagttgacaccacatactacacggatttgctgcacaaaaagggtcttctccattctgatcaagagctgttcaagggaaaaggcacagaaagtgacaaattggtgcaactatatagtagaatccctttggcttttgctagagattttaaagcttcaatgatcaagatggggaacatgaagcctctcactgggaggcagggagaaatcagatgcaattgcagaagggtcaactagttggattgcaaggtctggattacaataatggcatatacagtggaaagaataagaaactgtattgttttataaggttagtcatgtcagtttttatttttgctataaaaaagtttaagtgggttggattcggaaacttatcaagactcaatgagtttaagtgagttggattccgaaaaagtttaagccgttgggttgagatgctgagtttctatgttaagattcaattgtatttttatgttgtatgtgttggtttcaatccaaaaggaattactcttttcaagtactaagcaacttcatatgtatcgtgaattgaactcaaatggttattacatcgttaacttctaagcccaatgttatgcatgcaaaccaatactacttataacttatttgtttaaaaaa

SEQ ID NO: 4195 - DNA, 1515 bp, Glycine max
ctctacaaagactttctctgtccacaaccatcataccattataccttaccacccttcccttctctcttttatacacacacaagtcagctacgtaggcccccccccaaaaaaacaaaaacaaaatcaaaaggtggtagatgcatgagccacaacacaacacacattatctcttaccacactcaccaccttgtattccccaaaattcacataattctccttctcttgccttttccctcagatttctcaccccttctctcttctgtgttcccacccttttcaggtactcttcctgctaaattgatggaaaaagttggtatcataggaagttaatcactgtgctttgatgacttggtaagaaaacttgaactgacaatggtaagtttgagaaggcgcagacttttgggactgtgctcaggaaacagttcctttgtcacaccacttcctctatattgtgagaatctttctggttttgaaaattcaaaccagcaagctaaacctaagagtgaacagcctgcgctttctgatgatgcaaccaacccggacagtaataatgttgtgcaagaagaaccgggatcatcaaatgcttctggttctagctcatcgaaagagcagcttattcaacaaattacaggacctcctattaaacgcagaaagcgacatagaagaaagaatttgcacaatcaagaacaatgcataatgaggggtgtctacttcaaaaatatgaagtggcaggcagcaataaaggtggacaagaaacagatccatctagggactctcgggtcacaagaagaagctgctcacttatatgatagggctgctttcatgtgtggaagagagcccaattttgagcttcccgaggaagagaagcgggatttgagcaaatttaaatgggacgaattcttggccatgactcgccaagcaatcacacgcaaaaaacacaagagaaggcttagtcccggaccaggtaatagtcatgatatgcttccactgtccaaagatgattgggacactaagcaaggagtgattgaagatgcagagcaggaaacatcagtgtcgtgaaaattatgattctggaaataacccaagagtgaagatggaaagcctctagtcctaacacttcaactctaatatcatgctagatccatttttattgtagaaaaatgcagcattatgtcagaccttgatagaattgattatccttaatttatgcaaattgctatacctaaacccaataaagagtccattcaatgttagacgtgtcaactaccaactgttgaactctatatcagtttcatcaaactagtgcaacgccattttcttcttccacttggtgggaatatatgaatttttctcaagcagttaattgaattgttttttcaaaaaaaaaaaaaaaaaaaaaaaaaaaaaaaaaaaaaaaaaaaaaaaaaaaaaaaaaaaaaaaaaaaaaaaaaaaaaaaaaaaaaaaaaaaaaaaaaaaaaaaaaaaaaaaaaaaaaaaaaaaaaaaaaaaaaaaaa

SEQ ID NO: 4196 - DNA, 1411 bp, Glycine max
cccaagaattttcctctcgtcattgcagcattatgttttactaactacgattccaatacgtattgttcatcaactttggtgccacgtatgtgaagtataaccacccaaaatgtaatctgactctaacagtacacaacacttttaatagtcaagggtccatttcaagtccaccactgagcacctattatatagatgctataagtagtgtaaatcacaagacaagtaggaatctgaagccataaattgccaacaccaccagagatgacattagcattgtcccaattccccgctcttgaagtatatgcaaaactcggtgggaacgcaagacatggcgtagtgctgagttcataaagacaacaacaaacacttcaccaaataatattcagctcccactttcctagttcctttccccttgtactcaatcaatcacacccctttcctctttctttgtccttattatttaaggccaatcacttatccctctaccgcaaaaactattctctaattactatgaccttcataagggaggatgatgatgatcaagttgatgatgatcatgatcatgatcatgtggatggtggtggatcacaaaacagtgccagcaacatcactgaaattgtgaccaccccagaaggggaaaacttaggagaatggctgagtctaggcctcaaaggagacatcaacatgccagcagaagaacaaaactcatcatcaaggcctctccacagcaacaacaacaaggtattctcatgcaacttctgcatgagaaagttttacagttcacaagccttagggggtcaccagaatgcacacaagagggagagagaagctgctagaagctaccaccaatctcatcatcacagaattgggttttcttacactacttctctggcaactaggtcactgggaattaagcctcactctcttgtgcacaggcctaacagagaaaggtctgctatggtggctagattcagtagtagtgatgccattaatgttggggttggatcagtggcatcatcatggacaccctttatgcttgaacaagctgtggatttctattggccaggtagctttcgtggggacttattgccaaagcaagaatcatcagatgttaagaagattgacttagatcttcggctctgatacattaatttggtccaacttctatgctcagagtcctggtttaaaccactactgctgctgctttttcttaatggtttccccctatgctatatatgatgccacttgtgctaataaaatgtcaaggatattgttgtaattcagtagttgtacttgtactaattggtttgagaatggaaacaattccatgtcaatgtgtattaattgcaagtttgctacattaagagtgtgtgtatcatttccatgtttaaaaaataactttgtggttttg

SEQ ID NO: 4197 - DNA, 689 bp, Glycine max
agctacgctaggccccccccgaaatggaacaaagggagcccgacgcggcccccccccccaaggtgttaccaaggttgtcataggagtaggagcgggaatgttattctattggtggggacgacctcattgtacttgatataccagaaaaagaaactcaacaaactcagagagaaatactttcagcagaatggtggttccattttgctacagaaactctctacaagagaaaactcctcccaaattcaaattttcacagtggaacaactaaataaggccaccgacaactttgacgagagcttaatcattggcaaaggaggttttggcacagttttcaaaggacacctagcagataacagaattgttgctatcaagaagtccaaaatagttgataagagccaaagcgaacaatttgctaacgaggtgattgttctatcccaaatcaatcatagaaatgtggtcaaactcttgggatgttgtttagagacagaagttcctttactggtttatgaatttgttaacaatggtaccctttttgattttatacacaccgaaagaaaggtaaataatgaaacttggaaaacgcgtgtaaggatagcagcagaggcagctggagctctaacatatctgcactcagaagcctcaatagccattatccacagagatgtgaagactggtaacatcctcttaga

SEQ ID NO: 4198 - DNA, 1118 bp, Glycine max
  misc_feature (1096)..(1097): n is a, c, g, or t
aagggccaaagcgaacaatttgctaacgaggtgattgttctatcccaaatcaatcatagaaatgcgggcacactctcgggatcccgctcgagacggcgcgagaagacgacagaaggggaatttgttaacaatggtaccctttttgattttatacacaccgaaagaaaggtaaataatgaaacttggaaaacgcgtgtaaggatagcagcagaggcagctggagctctaacatatctgcactcagaagcctcaatagccattatccacagagatgtgaagactgctaacatcctcttagataacacttacactgcaaaagtgtctgattttggagcttcaagattggtaccaattgatcaagcagaaatagccacaatggtgcaaggaacttttggttacctggatccagagtacatgcgtacaagccaactaactgagaaaagtgatgtctacagctttggggtagtgcttgtagagctgctaacaggggagaaaccatattcttttggcaagccagaagagaaaagaagtctcactaaccactttttgtcttgcttgaaagaggatcgcctatctgatgttgttcaagatggcattatgaatgaagaaaataaaaaggagatcatggaggttgctattcttgctgcaaagtgcttgagactcaatggggaggaaaggcctagcatgaaggaagtggctatggagttggagcgaatgaggctaaccgagaagcatccttggataaatacattccaaaatccagaggaggctcagttgcttcaaaagggatcatctagcctgtgtgtatcaggtgatagcggcagccatcaatacactgggtatgacagcattaatgatcatgcacaaattgctttcgatgatggaagataattaattatggctaagcagcatacgctccagtttgcttcaaagttctgttacaaccttctgtattcatgatgaaaaatccattgagttgttttcatgagtgtgtatttgtgtgtatttatgtattgaactatgttatgtagtaaagttaaagacttaaaattatatatatgcaatgcgcttacttcactcgaaaatattttaaaanngataaaaaaaaaaaaaaaaaa

SEQ ID NO: 4199 - DNA, 811 bp, Glycine max
ccagcgtccgatttgatacgacgtcgtgcagggtttgactgggaggttgtttgcctttgccatttttcttcgaatccctggctgaacttgagacttgggagtgaactgaaaaagcataaagtatggcttcgacggcagcgtaccttgctcggcgcgcggcgcagaaggagagggttcggatcctctaccgccgcgccctcaaagacactctcaactgggccgtacatcgccacctcttctacgacgacgcttcaaacctccgcgaaaggttcgaggagaacagacacgtggaagaccctgataccattgacaggctcataacggatgctgaagcttcctacaacaagtggcgccatcccgatccctatattgttccttgggctcctggtggttccaagtttactcgcaacccaactccacctcaagggattgagatagtttataattatggccgtgaagataatgactgaaatctgattttatttttttttgcacccttgcaatgaataaaggtctgcaatcaaactgttctgtattcacaaattgataccgattgagtccatccatgcttatgatgttgaaaaatttgatgtcctccgaaccagatggtacctggattttactgtttttaagattctgtcattggtacttgttagtgagtctgaatttttttacataaagaaaaccagttgcatatattggccgcaaactctgaattattgggtcttccagatatcatttcaacctaacgttaactgttgagctacactatcacgctattacaatggttaatgagagctagtttagtagt

SEQ ID NO: 4200 - DNA, 976 bp, Glycine max
ttgacttggaggttgtttgcctttggcattttttcgccaatccctgaggagaactgaaaaaagcagaaagtatggcttcgacggcagcgtacctggctcggcgcgcggcgcagaaggagagggttcggatcctctaccgccgtgccctcaaagacactctcaactgggccgtacatcgccacctcttctacgacgacgcttcaaacctccgcgaaaggttcgaggagaacagacacgtggaagaccctgataccattgacaggctcatagcggatgctgaagcttcctacaacaagtggcgccatcctgatccttatattgttccttgggctcctggtggttccaagtttactcgcaacccaactccacctcaagggattgagatagtttataattatggccgagaagataatgactgaaatctgattttttcttgcatccttacaatgaataaaggtctgcaatcaaactgttctgtattactagattgtggattaaatgaccttcatttatgtgatgagcataaattgatacagattgaggagtccatccctgcttatgatgttgaaaaattttatcacctccgaaccagatggtaccttgatttgaatgtttttaagattctgtcattgatacttgttagtgcgtgtctgaaattttacataaaactagttgcataaattgtctgcaaattctgaatattgggtcttctcgatatcattttaactttgttaactggtgagctacactatcaccctattacaatggctaatgagagctagtttagtacttattttgagttctcagaacaaccatatacacaaggtatggaaagaaattggttaaataataaaattctgactccatggcaagtgcagaggaatgcctcatgaaaagaatagttgacaatcccgtgcagaattgaatatccaataggaacgaaactccacccagtcgtcttcaaagtaaatggagg

SEQ ID NO: 4201 - DNA, 1802 bp, Glycine max
tcgagtcagtacgtaggcccccccccccataaatccaagtcagctacgtaggccccccccccacttccattttcattctctttctctaactaatctcatttcacttctctctccaccaatgacttactttaattgacttcagaaatgggctttctccggcgacttttcggcgccaaaaaaccctccgattgcaaatccggcaagaaaagatggaccttcctcaaacacaccgtcagaaacaagtcactcccgccgccaccgataccccccgcactcaacactcactttgattcctcaactcccttggatgccaacaagcatgcaatcgccgtcgccgccgccaccgccgcagtagcagaagctgctctcgccgccgcccacgccgctgccgaggtagtcagactcacaagcggcggcgtcgccgccacaagtaccagctccagaaccgctgtcacggcggcgcgtgttggcaaccttgagaccgccgccgttaggatacaatcggcgttccgtggttacttggcaaggagggcattgagagcgcttaaagcattggtgaagttgcaagcattggttaggggccacattgtgagaaagcaaagtgcagatatgctgaggcgcatgcaaacattggtgcgacttcaggcccaggcacgtgcaagccgtgcgcacttgtcagataatacgccttctttcaacttcaactcttccctactttctcactatcctgtccctgaagaatatgagcacccacctcgtggcttcagtacaaaatttgatggatcttctatccttaagagatgcagttccaatgccaattctaggaatgttgactcggaacgagtcgggttcgattccaactggttaaaccgttggatggaattagataacaagtgtagccaaactggagatgcttcattgaaaaataatggacgccctgatgatgataaaagtgacaagattctcgaagtggatacttggaggccacacttcaagtcccaccacaacagtagcagctcctctcaagcagcacattattatctgaatgctgattacaataatgagaactttgcggcggcacacgagtctccatcaaaacgttcagcaaaggctctaaaccaaagcttctcatcaagggaggtgttgcagctaagatcattgaagtttcacaaaggaaaagaagaagcaagttcaagaactgctgacaatagtccacaagcattttctgccaattctagaaacggaagtggtgcaaggagaggaggaggaccctttacacctactaggagtgagtgttcgttgggtttcttcagtggctacacgggtcaccccaattacatggcaaacactgaatcttttagagctaaggttagatcacaaagtgcacctagacaaaggctggagtttgacagatacggttccactaggaggcctgttcctttggtggggcctaattcagaccatgattcagatttaaggaacaaagtcttacctccctttaaccaaacgaacagaattgggagtagcaatttaaggtgacattgagtgtgttacaagacaatccccactttttttccacaaaaaagaagagacatattatttccttttgtttgagtttcttgtgtgtggcagcagttgagaatgtaattattattttttacatgtattattatagtccatacacgattgttgtcattgttgacgttttcagtgagtgtggatttgtaaatcatgacttggtttgactgtttgcttagtggagtgcatgtttttaatcataactcaaaaaaaaaaaaaaaaaa

SEQ ID NO: 4202 - DNA, 1060 bp, Glycine max
  misc_feature (989)..(989): n is a, c, g, or t
  misc_feature (1002)..(1002): n is a, c, g, or t
  misc_feature (1026)..(1026): n is a, c, g, or t
ctgatagttacaagaaacagtgctcggccattgagcttctgaagatgttgctgaaaacagtagggtttagtaattttacaccattagtggatgtggttaaagatggctcaaagaatcagctacgtaggccccccccccaaattcatggaatgcagccacagctacagcaacaacagcagagttcccttcggctgcctcaacaacttcaaatgcagaggcaaatgcatccgcagatgcagcagatgattcattcccaaaatatggcttttcatcagcagcaacatcaacaacaacagcagcagtttgagagattgcgaaggcgtgcagcagcagctactcctcgccctgctatggatatagataaagaaagaccattggttcaagtcaagattgaaaaccaagacttaccacttgatggtaataatgccttcacttctagacatcctcaaattcagcagtttaggcagcagcagcagcagcaacagatagctgcaatgtcaaatttccatcctcaatctggcactcagttcagacacatgggttccttacagattccttcaattcagtcaccgaacactagcatggttagagccccgcctgtgaaggtggagggcttctcggaattgatgggtggggattctacatcgaagcatgatctggaggaaaataggctgacttctcccaacgtgctggctccttgagttttgccttggcttgccactggtgaattggggagatatgagggggtgaaggagtttcaatgacaaacagagaagcaaaaggggaaatatgaagcatgcccaagaagtttgcttgatttatataatgaattgtgttggaactacaccaataaaattgaacgacatggaccaactatgtatgtggttggattatgttgtaatggaaaattgaagcatgaccaaaagttgtttgatttataatattgtgtcggaactagaccaatgaaattgattgacatggatcgactntgtatgtcgtcanattatgttgtaatggacaattganataggtttggtatgaaaaaaaaaaaaaaaaaaaa

SEQ ID NO: 4203 - DNA, 1376 bp, Glycine max
gattaaggcgcgggaccaaaagaccgtcccgcgcgagtgcactactccgttcggcggtggtagcagcggcggcaatggctatgctgggggaggacggtcgcggctacgaactggcacggaagcttgacacgtgcggcgtgtggcgaacctggctcggcgacgccacctacgccaacttcgcacccttcctctcttccccttccgcctgggactccttcatcacctccaccactcacatccctctccaactcagagtccgcgccctcctcttcgacaaagccaccgcttccctctccccaaaccctaatccctctctctctatccaacgcctcaaccctagttacctccaactgcacgccgacgacatctacttcaccctcgacgccgactctaagaatcaatccaagccttcttcctcgactggatccaggtatgttgaatctgaacttccggaaacgtggtataatctagtaattgaaaagtacaaagctaataagaacttggtttccggcgagtcgcgttcgccggcggatatggcttcttatattaactacgttactaatcataagaagcggcgcgtggcgtttaaggaagatgtgaactccgttacggatcacgcgctgcaaccgaacggtggtggtggtttagttgctgatgatgattccccggtttttccggagatagcgtacgcgttgaactgcgtgcctgatagcgcgcttccgttgagtgagagagtggagaataatagtagtaaccagaaggttgtgaaggtgtttagtgttcttgataccttgcctcctattgcggcgacaaggagttccgttatgatggagaggctcgttgttaggcctgatattggtagtgtggagcatggaggaggggtgtcgagtgggaaatttggagctgaagggaatgggaaagttattgggcctgagcaagcagcgaaattgtcgcagaaggcggtggcacggattttgttgggcgtggggtttgaaggtgccatggaaggttcagttgaggacttctctgaagtgttgagtaaacggataagtaaaataggatcaaatttgagagtgcttgctgatagttacaagaaacagtgctcggccattgagcttctgaagatgttgctgaaaacagtagggtttagtaattttacaccattagtggatgtggttaaagatggctcaaagaataatgtacaacagagtcagcaacaaattcatggaatgcagccacagctacagcaacaacagcagagttcccttcggctgcctcaacaaaggcaaatgcatccgcagatgcagcagatgattcattcccaaaatatggcttttcatcagcagcaacatcaacaacaacagcagcagtttgag

SEQ ID NO: 4204 - DNA, 1386 bp, Glycine max
tcgggcccgcgcaagtaggccccgacccccccaatcatagatcaaggtttgataaaatattgtacacataaatctagctccaattcctaatcacctggttaatttcttcacatagagctatcaagatccaacgttaacatgaagaatgttttagtaaggtcagctgcgcgagctctgcttggcggcggtgggcggagctactaccgccagctctcaacggcggcgatcgtggaacagagacaccagcacggtggcggcgcgtttggaagcttccacttgcggaggatgtccactcttccagaggtaaaggatcagcactcagaggagaaaaagaacgaggtcaacgacaccagtaacgccgtcgttacgagttactggggaatcacaaggcccaaggttcgtagggaggacgggacagagtggccgtggaactgcttcatgccatgggatagttaccactctgatgtgtcaatagacgtgaccaagcatcatacaccaaagtcattaacggacaaggttgcttttagggctgtcaagtttctaagggttctctctgatatctacttcaaggaacggtatgggtgccatgctatgatgctggaaacaatagcagcagttccaggaatggtgggagggatgctgctgcacttaaagtctctgaggaagttccagcacagtggtggatggatcaaggcactgctcgaggaagcggagaatgagaggatgcacctgatgaccatggtggagcttgtgaagcccagctggcacgagaggctgttgattttcaccgcgcagggtgttttcttcaacgccttcttcgtgttctacctcctctcgccaaaggcggcacatagatttgttggttacttggaggaagaagctgtgatttcatacactcagcatttgaatgccattgagagtggtaaagttgaaaatgtccctgcccctgccattgctattgactactggaggcttcccaaggatgcaactctcaaggatgttgtcactgtgattcgcgctgatgaggctcatcacagggatgttaaccactttgcttctgatattcatcatcaagggaaggaattaaaagaggctccagctcctattggttatcactgagtcattgttgtaaattttttaacaaaacgatatctagcctttgctgtctcgagactttctagctatttttaccatctggttcaataaaatttattttcagcgagcactttaaaaccagaaagtttattgagatcaatagacaatagtaggtgatactttggagacatcatacacacaacttgtacttcacctgcacaccttacccgtttcataagatcacaaaagggaacaggaaataagcaataaattcacctagattctatagtt

SEQ ID NO: 4205 - DNA, 1489 bp, Glycine max
  misc_feature (1424)..(1424): n is a, c, g, or t
  misc_feature (1484)..(1484): n is a, c, g, or t
tcgagtcagctacgtaggccccccccccccaagtatcacttaagcaaaacaatgatggctggtgttagtggcagtagcactactcccttattgtgctctttgttctttatttcttccttactttttgcttcctgcacccatgcctcctcccaggcacctcctccaattgtggatggactttcatgggatttctataggacgagctgtcccatgcttgaagggatagtgagcaagcatctccagaaggtgttcaagaaggacaatggtcaagctcctgccttactcaggatcttcttccatgactgctttgttcagggttgcgatgggtcgatattgttggatggaagtccaaatgaaaaggatcaaccggcaaacatagggataaggccagaggctttgcagaccattgaaaatcttcgatctcttgttcacaagcagtgtggaagggtcgtctcttgcgctgacctcgttgttctagccgcacgcgatgctgtttctctgtcaggggggccaatatttcccgtgccactgggaagaaaagatggtctaactttcagcatagacggcacaggaaaccttccgggaccgtcttcccgaaccggccagctcctcgacagatttgccggcagaaacttcgacgccaccgacgtggtcgcgctctccggcgctcacaccttcggacgggcccactgcgccacattcttcagccgcatcaaccagacggacccacccatcgaccctaccttgaacaacaacctcatcaaaacttgtccctcttcccagtcccccaacacggccgtgcttgacgtgagaacccccaacgtgttcgacaacaagtactacgttaacctcgccaaccgacagggtctgtttacctcggaccaggacctgttcggtgatgcccggactaagggaatagttaactcctttgctgaaaaccagaaactgttctttgaaaagttttcaaatgctgttgttaagttgagtcagttggatgtgttgaccgggaaacaaggacagattcgcgccaaatgctccgtccccaacaagaagaaggtggtcacctctgtggtggaagaagagggagtggatttaagcgctcagatgtgagattaattaaggaatgtttgtttgttaataaattaatgaccatgtttcgtagtagactagtaatgtgatgtacgtcagttacataaaaggagtttctcccgtgttactacctgcattcctgcaatccttaatttctatgtttagaatgttttttatgacatgttattgtgttcaaggacagttttataaaatgagcccctcttggttaagggtttggattgtctccacctattggatttttcaataagagagaaagatacaatcaataaaaaaaaaaaaatcctaggttagctagcttgcatgaccattggttnttaagtaaattgcacttgtatctagtgttttttttttcaaattacactcgatactctttntatac

SEQ ID NO: 4206 - DNA, 1169 bp, Glycine max
atactttccctgcatccctctccctcttctccttttcctccataattataaaaaccgcacccaaacaccccccttcctctgccacccaaccaaatcctcgatctcgccgaacaaccccaccctttcaaaatccgattttccgatgccgaagaagcgaaagtctatcgccaccagtctcgacgaggtggatcgaaccctctacgcgtcgttttgcaccgccgccaactccctctcgcagctctacacgcactccatgaaccaccagaagctctccttcaacgccggggaacgacacgccctcgaaaaactttatcagtggatttttagacaacaagaaggaggatcacgggttggaacagttgatgtacttaattacattcagaatgagctggattattgtggagaagaaccatctatgtcacctagagcaccactgcaacaccagtcacaagcagcattgcatgtccctagttttccagtcacttcagcatcttctggtcaaacaatagctgcacaaggactccgctcggaccactgtgaaaatcaatcaaagaattctgtgttttcaaatgctttgtcaagtccagtacgtcgaagccttcaacattatcaaattggtgagggaggatgctacaccaatggtctctccatggggaatggaaaccggaacactgaacctggctttcttaatcagcaaagcagggattcaaatgcagtgagctccaatgattctgccatggatatgcatgcagactagttctgtctattggtttattaattgggaattcttaactcaccagcctttgcaacagctacaaaagaagctaacaaccttcggaattccgtatctgggtttgctcattggatcctgcaagaaacgacaggaggatggaaccaattctgttaaccttttactatgcttacgtcaaccgagtgattggtttggggtcttaagtggtttttgtaaagttttctattcattagctttaaagcattttattttgtaccttaaattgttttaccccttcgccccttcacccaaaagactaatttttaaaatgtaggggttaattctatctgaagtttcgtacgtaaatctgttcttctgcagattttctctaatggcaatctacagcttccgtcttcctttttaaaaaaaaaaaaaaaaa

SEQ ID NO: 4207 - DNA, 1987 bp, Glycine max
tcagctacgtaggccccccccccaaaaataacgttagtaccgcgattatggcctgggaagaacattggaagtgataagtgataaaacagagtttcgttgaatctgcactaaaaccctacgcacacatcttggtgtaagtccaatcgatatagcagcaatgtctacgcttgaaattgaagctcgagatgtcatcaaaattgtgcttcagttttgcaaagagaattcgttgcatcagacttttcagatgctgcagaacgaatgccaggtttctctgaacactgttgacagcattgaaacctttgttgctgatattaatagtggaagatgggatgcgatattgcctcaagtttctcaactcaagcttcccaggaataagttggaggatttgtatgagcagattgtattagaaatgattgaacttcgagaactggatactgcacgtgctattttaaggcaaacgcaggtgatgggtgtaatgaaacaagagcagcctgaaagatatttgcgtcttgatcatctcctagttagaacttattttgatccaaatgaggcttatcaagactcaacaaaagagaagcgacgtgcacaaatagcccaagctattgcagcagaagttactgtagtgccaccatcccgattgatggctttaattggtcaggctttgaagtggcagcagcatcaagggttacttcctccaggaacgcaatttgatttgtttcgtggaacagctgctatgaaacaagatgtggatgacatgtatccaacaactctttctcacacgataaagtttgggacaaaaagtcatgcagaatgtgcttgcttttcaccagatgggcagtttcttgtatcatgctcagttgatgggtttattgaggtgtgggattacataagtggaaagctgaagaaagatctacagtaccaggctgatgaagtgttcatgatgcatgatgatgctgtgctttgtgtagactttagcagagattcagaaatgcttgcatctgggtctcaagatggaaagattaaagtctggcgtattaggactggtcagtgcttacggcgtcttgaacgtgctcattctcaaggtgtcacaagtgtttccttctcccgtgatggaagccagttattaagcacttcatttgacagcacagcaagaattcatggcctcaaatctggaaagatgttgaaagagttccgtggccatacatcttatgtgaatgatgcaatttttacaaatgatgggagtcgtgttattactgcctcaagtgactgtacaatcaaggtctgggatgtaaagactacagactgcatacaaacttttaagccacctcctcctttaaggggaggtgatgcttctgtcaattctgttcacattttccccaagaatactgatcacattgttgtttgtaacaaaacgtcatccatatatatcatgacacttcaaggacaggttgtgaagagcttctcatctggtaaaagagaaggcggagactttgttgcagcctgtgtttcacctaaaggagaatggatttactgtgttggtgaagacaggaatatgtactgctttagctatcaatctggcaaattggagcatctaatgaaggtccacgagaaggaagttataggtgtcactcatcatccccataggaatcttgtcgcaacatttagtgaagactgcacaatgaagtcgtggaagccatgaatcttgtctgctttaagtctatttctattctatcttgttaacataattgagcatctgtgtagtttgtgcaatgtatatattcaggagtttaattttaatgtattgttggtaaaattattttatattgttgacgaatgatatgttggtagaaaaccgatgctgaggtgagttattgacagattgaaaattcaaaatgtttatttacaatttttacttcagttttaaatttatttttagaaaaaaaaaaaaaaaaaaaaaaaaaaaaaaaaaaaaaaaaaaaaaaaaaat

SEQ ID NO: 4208 - DNA, 1057 bp, Glycine max
atactccatcttcctccactcccctattcctttcgctttcacctttcacctccctctttccctggctttatttagaaaaaaaacccaatcccaaccccaaaccccccttctctctctatctctcttgatcctaattcatcattgttccacaatttccacaatgtccagcagtggcagtcacggtacagaaggctcatcaagcaacattcccatagaatatcagcagcagcagcagagtccagtgacacttagccgctatgagtcacagaagagaagggactggaacacttttggacaatacttgaagaaccagagacccccggtacctctctctcagtgcaattgcaaccatgtgctcgatttcctccgttatctggaccagtttggcaagaccaaggtccaccttcaagggtgcatgttctatggccagcccgaaccccctgcgccctgcgcctgccctcttaggcaggcctgggggagtctcgacgccctcataggcaggctcagagctgcctatgaggaaaacggaggctccccagagactaacccttttgccagcggctcaatccgcgtctaccttagggaggtcagggagtgccaggctaaggctagaggtatagcttacaagaagaaaaagaagaccacaaaggaaaatgctgaagaatcatcaaactcttccatccacttctcttgaatattcttctctggaagttgtgtttcacctaatattggataatggggcatatatatataaattaaattggaggagttctttacttttaaagcacagtttatgcgaggtttcgtttctatatattcggtaatttgatggcaccccagtacttttaaagtttctgtttagtttgttaattacctgagaatttgtaattaagctcttagcagtacccaaagctcgtgacacagtcgtttgcttatgcctcagtgtatcttatattcttacatgatttgcatatttgcatatatagttgttcccctttctgcatgcatcggttcctttaaaatgtaagacgtattttaatacatttggtttcatata

SEQ ID NO: 4209 - DNA, 1518 bp, Glycine max
atatgcaccttaccttgagcactttcccaagttttctctctcacacccttcatttacacacaacggaatcattctcctttctgctaacacttttgctttttcttcatggctttctttctctttgctattttaatcttgatggtcccttctagtaatgcctattggccaccttcacctggctactggccaagttccaaattcaggtccatgagtttttacaaagggtttagaaacctctggggccctcagcaccaaagcctagaccaaaatgcattaacaatctggcttgatagaacctcaggaagtggattcaagtcagtaaggccatttcgatccgggtactttggtgcttccattaaggttcaacctggatacactgcaggtgttataacagctttctatctctcaaacaatgaagcacatcccggtttccatgatgaagtggacattgagtttctagggacaacatttggaaagccttacactttgcagaccaatgtttacataagagggagtggagatgggagaatcataggcagagagatgaagttccatctctggtttgatcctaccaaagattttcatcactatgctatactgtggagtcctaaggaaataatattcctagtggatgatgtgccaattaggaggtacccgaggaagagtggtgcaacatttcctctgaggccaatgtggctatatggttcaatatgggatgcatcatcatgggcaactgaggatggaaagtacaaagctgattataaataccaaccttttgtggcaaagtataccaatttcaaagctagtggttgctcagcctatgcccctcgttggtgccatccagtttcagcctcaccatataggtctggtgggttgagtaggcaacaacatagtgccatgagatgggtgcaaagataccacatggtttataactattgtcaagaccccaagagagatcacagcctaacacctgagtgttggggttgaattgaagaattgaagtattcaacatttggaaattggaacacttaggccaattgggtatattatgatgctgatttttggtccccaaaaccaaaacactgttctcttgtgatttgttttgtcttttttctttcagaaagtttcatttactttatgggggtcacttgagatggggggccccagcttggcagatacattatgcaagtgtacggggttgtgcatccaaggctctcaagacacgagaatatttggaagattgtgtgtgtgtgtgtgtgtgagttttctttttagacaaaggaaaaaaagaaaacaaagggaagagcgagggaaaaggaataatgatatctatgtccaatggaaaagcaaagtggccaaggtgtatgggttggtgaatgtggcaccattgagtgcgaatactaaaaagcacacttctcttttaagaaaaaaaaaaaaaatttaatgctggctgaaaaacattattgtggaagtgaagaacaaatttgtgaactgcatacgaatatttatcaacgagaa

SEQ ID NO: 4210 - DNA, 1570 bp, Glycine max
catcattctgcttcctgcttacactttagcttactcattttttcttcatggctttgataactccctttgctattttattctttatgcttatggcctcttcaagcaatgcctactggccaccttcacctggttacaggccaagttccaaattcaggcctgtgaacttctatagagggtttagaaatctttggggccctcagcaccaaagcatagaccaaaatgcattaacaatatggcttgatagctcctcaggaagtggcttcaagtcaaatcgaccatttcgatccgggtactttggtgcttccattaagctccatcctggctatactgcaggagttataacagctttctatctttctaacaatgaggcacatccgggcttccatgatgaagtggacattgagtttcttgggacaacatttggaaagccttatactttacagaccaatgtttatataagagggagtggggatggaacaattattggcagagaaatgaagttccacctttggtttgatcctacccaaaactttcatcactatgctatactttggagtcctaaggaaataatattccttgtggatgatattcccataaggagatacccaaggaagagtgctgaaacatttccactgaggccaatgtggctttatggttcaatatgggatgcctcatcatgggcaacagaagatgggaagtacaaggctgattacagataccaaccttttgttgcaaagtacaccaacttcagggctggtggttgctcagcctatgcctctcgtcggtgccgcccggtctcggcctcgccatatcgctccggtggcttgaccagacgccaatattgggccatgagatgggtgcaaaaataccacatggtctataactattgccaagaccccaaaagagatcacagactaacacctgagtgttgggggtaacacgtccaaaaagtgaatttctactataaagttatgcaatatttggtatgctaaatcatttgttggttcatataaatagaataattatgttttttgttacactaaatccgagtaatgtgatgtgtttgtggtaaagtaaatttgaaagtcagatcggatttggcgtataaaaggtgcatgattgttttttacttatatatggaactataagtgatttttcacttgaagtgttgcataattttagagcagaagaaccaagctctctctaatcactactttgtgtgatttattatatatgttgtgctatcttttagaaagttaatttttttttatatggagatgacttgagatggggcccatccttgacaacaacattgttgcaagtgtacggattgagagtccaatgagggagggtcctcctagagaagaaatttggtaagattgtgtggatttttcgctttgttacatttctctttcgggttagaacaagcaaaaaggaagaaaagagaaaaaaaaaataacatcaatgtgtaatgaagagagattaggccgagtgggattggccatgttggtgagtgcgaatattataagcacactcttcattttataataatgtcattgtgattttatta

SEQ ID NO: 4211 - DNA, 738 bp, Glycine max
  misc_feature (694)..(694): n is a, c, g, or t
  misc_feature (700)..(700): n is a, c, g, or t
tgcgtttggagcgaaacagaacagaacagaacagaggaaagacattgatagattgatcatcgatgaagagggagaaggagaaggagaagggcgtggctgtgacaagccctgtgagtggcgaagacagcgatgataagcaacgcccttcctttccctccgtcagattctcttcccgcaacgcttcctccaaatacgatttcgtcaaggtgaaggtgtggttgggtgataatgcggatcactactatgttctctcccgatttttgctcagcagaatgctaacggtaaccaagattccaaaccacgttgctatcaaaattgctctcgaattgaagaagctgctcacagataacagccttctagatgtctctcaatctgacttggaagtcaacctatttaagcttatggagcggcggggatatggagaagagtacataaatcgttacaagatgatgacgagatttcatcatcaaagagttccgttagtaatccttgtttgtggaactgcttgtgttgggaagtctactattgccacccagcttgcacagaggctaaatttaccaaatgtattacagacagatatggtttatgaattgttgcgcacatcaacagatgcaccattggcatcgactccagtatgggctagagacttcagttcatcagaggcgttaataactgcattttgcagaaaatgcanggttgntcgcaaaggtttggctggtgatctgaaaaagcaatgaa

SEQ ID NO: 4212 - DNA, 2318 bp, Glycine max
tcgagtcagctacgtaggcccccccccccatttttcttcatcatcttcttcactcttgattcttatctctcacactgaacactcttgtagttaatcgaatttctcattccgcagaaaccttcaacgatggccgctgaaacgattccctaccagaacggcgtcgttgccagctccaacgattccaccgccacgggcaagaaatcgcgggagaacgaccgccgccgccgccgccggaagcagaagaagaacaacaaggcatctgaggccccggttcctaactcttccgaagagagtgacgatgcgaaagagaacaacgattcaaaacagcttgttgaacaaattgaaattgagtacgtaccggagaaggcagagttagttgaaggcatggatgaagagtttagaaaaatctttgagaaatttactttcactgatgccactgctttggaggatactgataagaaggatggttcagaagaaaatgcagcaactaataagaaggctaattctgattctgaagaggaagaaaacgataatgagcaaaaagagaaaggcatctcaaacaagaagaaaaagcttcaacggaggatgaaaattgctgaactgaaacaaatttgcttgaggccagatgttgttgaggtgtgggatgctactgcatcagacccaaagttgctggtgttcttgaagtcttatcggaatactgtacctgtacctaggcattggtgtcagaagagaaaatttttacagggtaaacgaggtatagagaaaccaccctttcagcttcctgatttcattgctgccactggaattgagaaaatcagacaggcttatattgagaaagaggatagtaagaagctgaaacaaaagcaaagggagcgcatgcaaccaaaaatggggaaaatggatatagattatcaggttcttcatgatgcattctttaaataccaaacaaagcctaaactgacctctcttggagacctgtatcatgaaggaaaagagtttgaggtgaagttgagggagatgaaacctggcatgttatcacatgaattgaaagaagctcttggtatgcctgaaggttctcctcctccttggcttattaatatgcagagatatggtcctccaccatcatatcctcatctgaaaatccctggactgaatgctcctatcccccctggagctagctttggttatcatcctggtggatggggcaagcctcctgttgatgaatatgggcgtccactgtatggagatgtttttggtgttcaacaacaagatcagcctaactatgaggaagagccagttgataagaccaagcattggggagacttggaagaggaagaggaagaggaagaggaggaggaggaggaggaagaagaagaagaaatggaggaggaggaacttgaagctggtattcagtctgttgatagtctgtcaagcactcccactggagtggaaacacctgatgttattgacctccggaagcaacagaggaaggagcctgagaggcctctttatcaagtactcgaagagaaggaagaaaaaattgctcctggaactttgcttggaaccactcacacttatgtggttggcactggcacacaggacaagtcaggtgctaaaagggttgatctgcttagaggtcagaagacagataaagtagatgtcactttacagcctgaagagttggaagccatggaaaatgttttgcccgcgaagtacgaagaagcaagggaagaagagaagttgcgtagtcagcgtgaagatttcagtgacatggttgcagagaacgagaagaagaggaaaagaaagatgcaagaaaaggagggcaagtcaaagaagagagacttcaagttttagggtgcgcctagttcgtttcttttgctggaagatgggggggctgctacccttttctactgggcaagttctaacattccatgagccatgagttgagaatttgttgttagcaggggtctcaattgataagaatatataattatatacgactatatataatacaatgaagactccatgcagagaacgtggtagtcaagctttagttgaaaattcaatacgatgaatcctaccaaggctttacggattctggccgacatgaatgcatgttacttagaggaataagttattcttactactatatttgtagttttcatttccttttgttctttaaatgacattttatggtaatattttctgttttcttttggaagacaaaaacttttgaatcaagagtggtaaaatctgtttttttctttcttggtaacatgtaaagaaaaaaaaaaaaaaaaaaaaaaaaaacaagaaaa

SEQ ID NO: 4213 - DNA, 1086 bp, Glycine max
tcagctacgtaggcccccaccgttaaacgattctctttctctttctctgttctgaaaccactctcgcgtcgttaccatgccgcaaggggattacatagaacgccacagaagagactatggctaccgtctcgatcacttcgagcgtaagcgcaagaaagaggcacgtcaagttcacaagcgctctgcaattgcccagaaggctctgggtattaagggcaaaatgattgccaagaaaaattatgctgaaaaggcgcagatgaagaagactttggctatgcatgaagaatcatcgtctaggcgcaagactgatgataatgttcaggatggagctgttcctgcatatcttcttgatcgtgataacacgaccagagcaaaggttcttagcaacaccattaagcaaaagaggaaggagaaggcagggaaatgggatgttcctctacctaaggtacgtcccgtggctgaagatgaaatgttcaaagtggtccgaactggtaaaagaaagaccaagcaatggaagaggatggttacaaaagctacatttgttgggcctggttttaccagaaaacctccaaagtacgagcggttcattcgtccgacaggattgcggttcactaaagctcatgtcactcacccagaacttaaatgcacattcaatctagaattaattggagtgaagaaaaaccccaatggccctatgtacacctctcttggtgtcattaccaagggaactataattgaggtgaatgtcagtgaacttggtcttgtcacgccggctgggaaagttgtgtggggtaaatacgctcaggtcacaaataacccagaaaacgatggttgtataaatgctgttttgcttgtttaaggtcgcatcagggttccaacttgatttcagaggcagtggtctggtacctctcctatgatttttttttgggcacaggttctaaaattcttgtttggattgtcaatgcaatgatctgatcttgcactttgacatttgagataactattgtacaagagttaagccaaacaaatctcataaatttatatagttcattcgcaagacacaaaaaaaaaaaaaaaaaaaaaaaa

SEQ ID NO: 4214 - DNA, 1268 bp, Glycine max
ctcgtcgtcaccatgccgcaaggggattacatagagcgtcacagaagagactatggctaccgtctcgatcacttcgagcggaagcgcaagaaagaggcgcgtcaagttcacaaacgctctgcaattgcccagaaggtttaaatcaaaaattttgtttttaattggtttttgtttaacctagttctattgtcttaattctaattattcgatttttgttaagtcggcttcgtcggcccccccccattaagggcaaaatgattgccaagaaaaattatgctgaaaaggcacagatgaagaagactttggctatgcatgaagaatcaacttctaggcgcaagactgatgataatgttcaggatggagctgttcctgcttatctccttgatcgtgataacacgaccagagcaaaggttcttagcaacaccattaagcaaaagaggaaggagaaggcgggaaaatgggatgttcctctacctaaggtacgtccggtggctgaagatgaaatgttcaaagtggtccgtactggtaaaagaaagaccaagcaatggaagaggatggttacaaaagctacatttgttgggcctggttttaccagaaagcctccaaagtacgagcgattcattcgtcctacaggattgcggttcactaaagctcatgtcactcacccagaacttaaatgcacattcaatctagaattaattggagtgaagaaaaaccccaatggccctatgtacacctctcttggtgtcattaccaggggaactataattgaggtgaatgtcagtgaacttggtcttgtcacacctgctgggaaagttgtgtggggtaaatacgctcaggtcacaaataacccagaaaatgatggttgtataaatgctgttttgcttgtttaaggtcatagcaaccatcagggttccagcttgatttcaaaggcagtggtcaagtccctctcctatgatttttgtggtcttcaaccccaatcttcaagggaaaatcttacaaactttgttggtaccagagagaagattgtctgagaaaatagtgaagcatttttgttttcttgtttggatagtcaatgcaattatctgatctagcacttaacatttaagataactattgtacaacaagagttaagacaaacaagtctcataaatttatgtaatttatttacaagacacagcattttgagtagctgtattttttttatggttcgggtattatgtactgcgaaatctattatctaaataacatgatgtacaattgaaatt

SEQ ID NO: 4215 - DNA, 2315 bp, Glycine max
cgaagctcggaattcggctcgagctttcttccccccttttttctctaacccaacaaacatggatgattctggaagtaaaactaaactactgaatccatggatgctccactttcagaaactcgctctcgaactcaagtgccctctctgtttgagtttgttcaagaggccggtgttacttccatgcaaccacttgttctgcaattcatgtttggctgattgcataacggctgggtctgaatgcgctgtttgcaagacaacgtatgctcaaacagatgtaaggcacataccttttgtggaaaacgtggtggcaatatatagaagcttggatgccactttttgtgctagtttgtttcagtcgcgttcttctggtgatgggagggttttggagccgtgccaaacaattcttaattcaacttctagtagtttaaaaactggcaagcttcctcggaacttaactaatttgaatgaggttggggttggccaaactttcaaatccaagagtgtggtgcatgataaagctgaggagcttgagttgtcttgtgggagagggaagcccaatccaatgcaatcttccctgatgggacttgggggccgagaacagtgtggagttatggaaatggatgtgaatcaagtaacacaatcagcacctgatagcccgcccttttgtgataccaaaggttcagataatgactgcagtgatcaagatagtgagcatccattacctcctggcagattggaaaattcttcactaaacagagcaagcgcaggaaatggaaatttgaaagaaagaatgggacagcttaggtctgaaagttcggcctctgaaactgagggtctggcaagggatctcaagagacagaagaatctggactttaaacctggaaaggaccctggcgcaccattgcccacaaatgcttcaattgacttgtgtccaattggaaggatctgctcattttgccaatcctctaaaatctcagaggttactggaccaatgctgcattatgcaaatgggaacttagttaccggagatgcagccatgaaaccaaatgttgtacctgtgcatagaatttgcattgactgggcaccacaagtgtactttgatggtgaagtggttaaggatttgaaggcagaggtggcaaggggagcaaaacttaaatgcagtaaatgtaatctaaagggagctgcgccgggctgctatgtcaaatcctgtagaagaacttatcatgttccttgtgcaatggacatctcagattgccgttgggatcatgaggattttctcttgctctgtcctgtccattcaaatgtcaaatttccatgtgagaaaattaggtccaagaaacaggcaacacagaagcatcccactttgtctcatctgccatctcaccactcaaatcctcttgaagcttcccatgatgatgatgtaaaattagtattttgtggatctgctctatcaaatgaagaaaaggtacttttgatcaattatgcaagcaaggttggtgctactgtgaccaagttttggacctcaaatgtcactcatgtaattgcagcaactgatgcacatggagcatgctccaggacattgaaagttctgatggcaattctaaatggacgatgggttctaaaaatggattggataaaagcatgcatggaagaggtaaatcctgtggaggaagaaccatatgaaattaatcttgacaaccaaggatgtcaaggtggcccaaaagctggcagacttagggcattggccaatgagccaaagctattcaatggcttaaagttttatttttctggggattatgtgtcaacttataaggaagatctcgaagaattaattgaagtgggaggaggtactgttttgagaagcaaggaagaattggaatcacaaagacatgaatgcaaaggagattcttcacagttgctgattgtttacaacctggatcctcctcaaggatgcaaattgggggaggaagtttcaattctttggcaaaggctaaacgatgcagaggatttagctgctaacactttacaagtcattggtcacacatggattcttgaatcaattgctgcatgtaaattgcagccttttgttaactaaaatgcattaggtagctgatattttgcctatcacttgatagggtgttcgttctccagaagaattggtcaattgtgtacatgatatagcttgaatttattttgtcttactctggtcactggatgttagggtgtaatatttatgtaacattagttttgtctgctcttttactaacttggttttgtttgctcttgcctctaatctcaaagaactttgaataggt

SEQ ID NO: 4216 - DNA, 2433 bp, Glycine max
ctttcttccccccctttctctctatccaaaaccaaaaatggatgattctggaagtaaaactaaactgttgaatccatggatgctccacttccagaaactcgctctcgaactcaagtgccctctctgtttgagtttgttcaagaggccggtgttacttccatgcaaccacttgttctgcaattcatgtttggctgattgcataacggctgggcctggatgtgctgtttgtaaggcaacgtatgctcaaacagatgttaggcatgtgccttttgtggaaaacgtggtggcaatatatagaagcttggatgccactttttgtgctagtttgtttcagccatgttcttctggtgatgggagggttttggagccgtgccaagcaattcttaattcaacttctagtagtttaaaagctgccaagcttcctcggaatttaactaattcaaatgaggttggggttggcaagaatttcaaatccaagagtgtggtgcatgacaaagcagaggagtttgagttgtctcgtgagagagggaagcccaatccaatgcaatcttcccatatggaacttggtggccgcgaagagtgtggagttatggaaatggatgtgaatcaagtgacacaatcagcaccagatagcccaccctttttgtgataccaaaggttcagataatgacttcagggatcaaggcagtgagcatccattacttcctggtagattggaaaattcttcactaaagagagctggcacaggaaatggaaatttgaaagaaagaatgggacagctcaggtctgaaagttcagcctctgaaactgagggtcttgcaagggatctcaagagacagaagaatctggactttaaacctggaaaggaacctggtgcaccattgcccaaaattgacatgtgtccaaccggaaggatctgttcattttgccaatcctctaaaatctcagaggctactggaccaatgctgcattatgcaaatggaaacttagttacaggagatgcagcaatgaaaccaaatgtcatacctgtgcatagaatttgcattgactgggcaccacaagtgtactttgttggtgaagttgttaagaatttgaaggcagaggtggcaaggggagcaaaacttaaatgcagtaaatgtaatctaaagggagctgctcttggttgctatgtcaaatcctgtagaagaacgtatcatgttccttgtgcaatggacatctcagattgccgttgggatcatgaggattttctcttgctctgtcctgtccattcaaatgtcaaatttccatgtgagaaaatcaggtccaagaaaaaggcaacacagaagcatcccactttttctcatctgccatctcatcactcaaatcgtcttgaagcttcccaggatgctagtaaaaaattggtattttgtggatctgctctatcaaatgaagaaaaggtatttttgatcaattatgcaagcaaggttggtgctactgtgaccaagttctggacctcaaatgtcacccatgtaattgcagcaactgatgcacatggagcatgctccaggacgttgaaagttctgatggcaattctaaatggacgatgggttctaaaaatggattggataaaagcatgcatgcaagagataaatcctgtagaggaagaaccgtatgaaattaatcttgacaatcaagggtgtcaaggtggcccaaaagctggcagacttagggcattggccaatgagcccaagctattcagtggcttaaagttttatttttctggagattacgtgtcaacttataaggaagatcttgaagaattaattgaagtggggggaggtactgttttgagaatcaaggaagaattggaagcacacagacatgaatgcaaaggggattcttcaaagttgctagttgtttacaaccttgatcccccacaaggatgcaagttgggggaggaagtttcaattctttggcaaaggctaaacgacgcagaggatttagctgcgaacactttacaagtcattggtcacacatggattcttgaatcaatcgctgcatgtaaattgcagccttttgtttactaaaatgcattaggtagctgatattttgtcgatcacttgatagggcgttctctgcaaaagttgatcaatcgtgtacaggatttagcttgaatttatttgaagtcttgttcgagtcactggatgttagggtgtaatgcttatgtaacattaagtagttatttacttagttttgtctgctcttgcctcgtcttaatgacttcacgctgaatgtacttatgttttaaaattaaccggatcctcagagttgagattgaccatgatgcctcgtacatgctaaggcaaattctaccacgcaacaagctagatgaggtgcatcggtgtactaaactatttatcattaattaaatgagtaatgctatgttttcgtatt

SEQ ID NO: 4217 - DNA, 1625 bp, Glycine max
cctcgagccgaatcggctcgagtcaccctctattcacttctctctctcaaaacaagttatggtagtatttgtcattcatttcacaaaaccggttcacctttggacccatggcttctaaaacccctaccttattccactctcgtttcttcctcttcggcttctattgctgggactgggaatttctcaccgctctcctcctctttagttcttcttcctaattaattaaattacatacaccttttcttttttttttttttacctaaatttctcattactacaacatcaacaaaagaggcataggttttttttttcttttcttcttttattaaaataataatagtttctgtgaggtaggtggagggtagatcgggaagaaaaaaaaatgtcacagcagcagcgttcgacgccggcgccgttcttgacgaagacgtatctgctggtggatgaccccgccaccgacgacgtcgtttcgtggagcgaaggtggcaataccttcgtcgtttggaaacacgccgatttcgctaaggacttgcttccgaagtacttcaagcataataatttctccagcttcgttcgccaactcaacacctatggattccgaaaaactgttcccgacaaatgggaatttgccaatgagtatttcaagcgaggacagacggatcttctcgccgagatcaggcggcggaaggtggtgtctccggtgaccggaaaatctaccggcggtggcgttaacatctcggcgtcccactccggcggcgacgacatggggtcgacatcgacgggatcgatggaggcggcaacggcggcgggcgctgatatatcgggcgagaacgagaaattgaagaaggacaacgagaaattgagcggcgagttagcgctggcgaagaaacaatgcgaggagttggtggcgtttcttagagactcgctgaacgtgagccccgatgtgatagagcgcatcattcggcaaggaacgtgtgtgtccagcaacaatgatgcggtgcgttttgatgctattattaataatgatcttgatgacgacgaaaatgcggtaggtgagtgtgaaccacaacaaccaccacccaaaggtgacaatggagaaagtttgaaactatttggggtttggttgaagggtcaaaatgggaaagagaattcaattggtaaatgccgcaagagagggcgccaagactaccctattgctgccactgccaaggaattgaagaccctagtctagtacaacatatcatattcttgttaattaattaccttttaagaaacaactattgtagccagatctagaacacaaagaaaaatactctcttagtcatcatggaaaatgtatggctctttcatggtatttcgttgtttggtttgatggtgcaagggacctaataaaggatactaatgatgatgattaagattatgtttatagacattaatttgtatgattggaaataaatgtgtcttgtttaaggaatttgacattgacggtctcattattacgtgggacagagctattgtagtaccatgccaattttaattactgtatgactgtgtatgtttgatttaccgttataaatagatgtcggtagcaaaaaaaaaaaaaaaaaactcgagactagttctct

SEQ ID NO: 4218 - DNA, 1218 bp, Glycine max
tgtccagtttccttgaatataaattatgttgactctaataggtggttgggtgattttatcctctcaaaggcctcaaattcctcatttttgtccccatcaacaacaaaaaattcctcagaggaggtaatggaagaaacatattctggtatcactaccaacatcaacaacgagcttcatagtaaggccaatgatttctttaattgccaattgtcataatgacacaatgttgccaagcatatactgcaactctgcaaggcaagcatacccaaagcccaggattgattatactctgaaagctattggtggaagtttaacggctattcctggaatctcggatatgattgatgatactgtgaactcaattgttactcacatgctccaatggcctcataggattgtggttcaacttggtggcattcctattgataccagtgaattggagcttaaatcccagggaaaacttgcactgactgtagtgaaagcagctgctttaaagaatatggaaatgattggaaagtcaaatccttatgtagttgtgcatattcgaccattatttaagtataaaaccaaggttattgataacaacctgaatcctatttggaatgagaaatttaagttgattgcagaagacaaggagacccaattactcattcttaggttcttgataaagacattgggcaagataagcgattgggaatagcacagttaccccttattggtctagaaatacaaactgaaaaggagatcgaattgaggctactgccctcacttgatacacttaaggtgaaagataagaaagattgaggaaccttaacaatgaaggtcatgtattatcaatttaacaaggaaggcagctggttgcgctagaagcagaaaagaagatactagaagaaaggaagaaactgaaagaagcgggagtgataggatgcacaatggatgtactagatggagcagtatcagtggtagggtctggtgttggactggtttggtgaattattctgcatagccatatttgtttttatcaaatagcccttgatttgtgtttttttttgttttgttttttgtaccaaatataaaataattctagaaagtattgcaagaggctctgtgatttcatttcgctatttgtttcttatctcctataggaatggaacatattttaatcattctttgaattgagacgctcatgtttttataaatatcataaagttgatgtgg

SEQ ID NO: 4219 - DNA, 1097 bp, Glycine max
  misc_feature (679)..(679): n is a, c, g, or t
  misc_feature (830)..(830): n is a, c, g, or t
  misc_feature (884)..(884): n is a, c, g, or t
  misc_feature (964)..(964): n is a, c, g, or t
  misc_feature (988)..(989): n is a, c, g, or t
  misc_feature (1000)..(1000): n is a, c, g, or t
  misc_feature (1021)..(1021): n is a, c, g, or t
  misc_feature (1064)..(1064): n is a, c, g, or t
  misc_feature (1086)..(1086): n is a, c, g, or t
acaatgttgaagatgtggagaccctacagctcagctagaaaggctttaatgctatgtttttaatcctgtggagggagagaggatgaacccacagcactgaaagtaacgttagaaacgagaaagtttgcattattcacaatttcgaaaactcactcaaagtggagaagggagtcccacacatcctagcattaacaagaagaagaaaaaaaaatcaacgctttgggtttttctcttggctgcaacttttggtctctccgcagaatctcgttccaattggagttcatcctctaaaggggaaggtggtgtttggaatctgggaaaatgggtttgttttctgggatttttatgggggtgttgttcggcatcgcattgatggctggatgggcgcgcatgatgaagtaccgaagtgccaaacgaattgcaaaggcagctgacattaaactccttggatcccttaatagagatgatttgaagaaaatttgtggtgataatttgcctgagtggatatcttttcctgtatatgaacaggtgaaatggctaaacaagaaactgaccaaactttggccatttgtagcagaagcagcaaccatggtgataagagaatctgttgaaccactgctagaagagtacagacctccaggaattacttcatttgaagttcagcaagctgtcacttggnaaatgtggctccgaaaattgaaggtatttcgtgttcagagcttaaccaaaggtcaaatcataatggatattgatttccgttggggtggtgatcctagtattattttggctgttgaactgcacttgttgcatcaatccctattcagttgaangatctacaggttttcaccattgtccgtgttgatattccaacttgctgaagaatnccttgcatttctgctgttgttgtactctgcttgctgacccaagcccaagattgattataccctgaaactgttggtggaantttacggtatcctggaatctcaanntgaatgaaganactgtgacccattgttctgantgccccatggcccctagatgtggtcccttggggctcctgtttnaaccatgaactgacttaacccngggaacttgcc

SEQ ID NO: 4220 - DNA, 1541 bp, Glycine max
ttaaattgaaggtattcgtgttcagagcttaaccataggtcatatcataatggatattgatttccgttggggtggtgatcctagtattattcaggctgttgaagctacacttgttgcatcaatccctattcagttgaaggatctacagttttcaccattgtccgtgtgatattccaacttgctgaagagatcccttgcatttctgctgttgttgtagctctgcttgctcagctacgtaggcccccccccccccctctgaaagctgttggtggaagtttaacggctattcctggaatctcagatatgattgatgatactgtgaactcaattgttactgacatgctccaatggcctcataggattgtggttccacttggtggcattcctgttgataccagtgaactggagcttaaaccccagggaaaacttgcactgactgtagtgaaagcgactgctttaaagaatatggaaatgattggaaagtcagatccttatgtagttgtgcatattcgaccattatttaagtataaaaccaaggttattgataacaacttgaatcctacctggaatgagaaatttgagttgattgcagaagacaaggagacccaatcactaattcttgaggttcttgataaagacattggacaagataagcgattgggaatagcacagttaccccttattgatctagaaatacaaactgaaaaggagattgaattgaggctgctgccctcacttgatacactgaaggtgaaagataagaaggatcgaggaaccttaacagtaaaggtcatgtattatcagtttaacaaggaagagcagctggttgcactagaggcagaaaagaagatactagaagaaaggaagaaactgaaagaagctggaatgataggaagcacgatggatgcactagatggagcagtatcagtggtaggctctggtgttggactggttggtactggtgttgttgctggtgccggtcttgtgggaagtggtattggtgctggagccgggcttgttggaagcggcatcggtgctggagttggtattgttgggagtggtcttggagccgttggtagtggactgagcaaggcagggaagttcatgggaaggacaatcactggtcatagtggctccagaaagagtggttcttcaacaccagtcaacaatgcactggagaatggtggtggtgcaaagcctctttgattccttcctttgtattgtaagactaatgaatggacctttgcaggttcaagctttgctaatagatagatttcctgtgtatgtgttgctttctttttttaccataatgttttctccaaggctgtgttaatctactagattggcaaaatggtagcagaaatatcaagttagttctgttgcatcatctttgtaattatgcttaacctcaagttgtgataaaactcatcaaattgtaaacattccttatttaattcaggtgcatgatgcaacttgtatcatccttatttataaaagaaaaaaaaaaaaagttggatttgtaataaaacatgaaaattgtt

SEQ ID NO: 4221 - DNA, 1551 bp, Glycine max
ccacgcccccgcgtcagctcagctaggaaggctttaatgctttgttttcaatcctgtggagggagagaagatgaacgcacaacactgaaagtaacgttagaaacgagaaaactttgcattattcacagttttgaaaactcactcacagtagtagaagggagtcctacatcttctagcattaaacaagaagaaaaaatcaacattttgggtttttcatttggctgcaacttttggtctctctgcagaatctcattccaattggagttcatcctctaaaaggaaaggtggtgtttggactctgggaaaatgggtttgttttctgggatttttatgggggtgttgttcggcatcgcattgatggctggatgggcacgcatgatgaggtaccgaagtgccaaacgaattgcaaaggcagctgacattaaactccttggatcccttaacagagatgatttaaagaaaatttgtggtgataatttgcctgagtggatatcttttcctgtatatgaacaggtgaaatggctaaacaagaaactgaccaaactttggccatttgtggcagaagcagcaaccttggtgatcagagaatctgttgaaccactgctagaagagtacagacctccaggaattacttcattgaagttcagcaagctggcacttggaaatgtggctccgaaaatggaaggtatttcgtgttcagagcttaaccaaaggtcaaatcataatggatattgatttccgttggggtggtgatcctagtattattttggctgttgaagctgcacttgttgcatcaatccctatacagttgaaggatctacaggttttcaccattgtccgtgtgatatttcaacttgctgaagagatcccctgcatttctgctgttgttgtagctctgcttgctcgagccgattcggctcgaggattatactctgaaagctgttggtggaagtttaacggctattcctggaatctcagatatgattgatgatactgtgaactcaattgttactgacatgctccaatggcctcataggattgtggttccacttggtggcattcctgttgataccagtgaactggagcttaaaccccagggaaaacttgcactgactgttgtcaaagcaactgctttaaagaatatggaaatgattggaaagtcagatccttatgtagttgtgcatattcgaccattatttaagtataaaaccaaggttattgataacaacctgaatcctatttggaatgagaaattcgagttgattgcagaagacaaggagacccaatcactcattcttgaggttcttgataaagacattgggcaagataagcgattgggaatagcacagttaccccttattggtctagaaatacaaactgaaaaggagatcgaattgaggctgctgccctcacttgatacacttaaggtgaaagataagaaagatcgaggaaccttaacagtgaaggtcatgtattttcagtttaacaaggaagagcagctggttgcgctagaagcagaaaaggagatactagaaaaaaaaaaaaaaaaaa

SEQ ID NO: 4222 - DNA, 2062 bp, Glycine max
aactgtaatgtcgtgcgtgctaccccaaaccaaacagataaataaacagatatcacgccccactggtgaaatagagaatggaagcgctaaaactgtgcaatctaacatggagcccgttgaagcacttctttcactctcacgcatttcgtcgaacacctcccgtgctcgttcttcgcgcgtgctcttcttccaccgccgccgccgacaccagggccgccggtcgcggacgccggagctcggagtcgtcgtccaccacttcgacttccgatagggacgccattcgagccattcgcttgaagaaggttgaagaattgagaagcaaggggcttgatccgtatgcttatgaatggaacaaaactcacggtgctaatcaactgcaagatatatacagagatctaggaaatggtgaggaaaaaaatagtgagaatgaccatgtatctgtcgcgggaagaattgttgctaggagggcatttggaaagcttgcctttctgactctaagagatgattcagggacgattcagctctattgtgataaggagagactcataggtgatcagtttgaacagttaaaggcccatgttgatattggtgatatattaggtgtaagaggaacaataaaacgaactgaaaaaggagaactttctgtgtctgttctatcttttgcaatcctttacaaaatctctgcttccactgcctgacaaatatcatggactaactgatatagataaacgttatcgtcagaggtatgtagatatgatcgcaaatccagaggtagcggatgtattccgtagaagagcaaaggttgtatcgcacgtgcggaggacaatggattctttaggttttgttgaagttgaaactccagttctgcagggagcagctgggggagcagaagccagaccatttattacataccataattctcttggaagagacttatatctgagaattgcaactgaattacatcttaagagaatgctggtgggtggttttgaaaaagtatacgagattggtcgaatatttagaaatgaaggaatttcaactcgacataatcctgaatttacaactatagagatgtacgaagcatactcggattatcaaagcatgatgaatttagcagaggagatcgttactcgatgtgctcttgcagttcatgggaagcttaccattgattatcagggagtcgagatatgtctggaaaagccctggaggagggagactatgcacaatcttgttaaagaaactgctgggattgatttcaatgaattggcaaatgatcttgaggttgcaaagcgagttactctggatacccttggaaagaatcttgataacaaggataaaggttccattgaagcatgccaatccgttggtcacctccttaatgaggtttttgagagttttgtagaaccaaagctcatccaacctacatttgttttagactatccaattgagatatctccactggccaaaccacacagaagatccacaggtttgactgagagatttgaactcttcatttgtggtcgtgagttgggcaatgcattctctgaattgactgatcctatagatcagagaggacgcttagaagatcaaattaggcagcatgaaaagaagagagcagctgtttcaacaaatgacgataaaaaggaaggaacggaagatgatgatgattcatatgaagtgactcttgatgatgactttctcacagctttggaatacggaatgcctccagcttctggaatgggacttggaattgataggctggtgatgcttttgacaaattctcccagcattcgagatgttattcccttcccagtactcaaggtccagcaatagtgataggtttggagatcactgtgccgtccatcatcactatttgctcttttctaaatgtcttaattatatttgagttcatttgtacaacatgtatcatgataaggttattttttattccctcctcaaattatctatttgggagttttgatttgtggaaaaatgtcactttagaatatcaataaaggattaattgttcttcaacaaaaaaaaaagatcccttatcctatca

SEQ ID NO: 4223 - DNA, 2036 bp, Glycine max
tcgatcagctacgtaggccccccccccgttctgttttggtttgggatcccaattcacggaacctactctctaccctccagggttccttctttcacctctgcaatttctactccgccacgccctacgacattgttcgtcgtaaccctctcttcgttccacttaggagaaaagggtttgtttggatatggaaggtgacgagcacatgaacgaggttccatcagagaacagcaacttgggaagtgattctttggaaaaggagaacattttggaagatgaaaaggaggatttgcaagatgggttgaagttgaaggtggtcactgaggaagtgagtggaggattgctcgctgagaatggttgcatttctcttgaggatgggagtctcaaaagaagccttgagactgttggaacatccgtatcaggtgctaaaagagctcgaattacagttgatgaatatcaaccttcagttcattttacgtataattccctaacaagagctagtagacagaagcttcaggaacttctacagaaatggtcagcatggcatgctaaacatgtttcgtcatccagtgatgctagcgaagtgttggaatccggtgaggagacattttttcctgctttgcatgttggacttgaaaagacttctgccgtgtcattctggatggagaaccaaacaagaaatgataagaacaaagatttcattcctttagctgataatactgtgcctctatatgatcgtggatatgctttgggattgacttcagctgatggctcaagtaatgtggatggtggtctggagattattgatgctgctgctaggtgtttcaattgtggttcttacaaccactctttgagagagtgtccaaggccccgtgacaacattgctgtcaataatgctcgcgataaactcaagtcccgacggaatcagaattcttcttcccggcatccaactcgttattatcagaattctccagctggaaagtatgatggtttgaggccaggatctctggatgatgcaacacgtaaacttttgggcttgagggagcttgatccacctccgtggcttaacagaatgcgagaactaggatacccacctggatatcttgatgtggacaatgaggatcagccttctggcattacaatattcactgatagtgagattgctgaccaagaggatggggaaattatggaagctaatgcttccaaaccaaagcgtaaaaagactgtcaaatttcctggaataaatgctcctattccagaaaaagcggatgaaagattgtggggcactagggctggaccctcgagttcagatatatcaagaaacttgtcattgccacagcacaggtcgaattatagtactgattatggcagtcgaggatatcatcgcgaacatagattaggggatcttagggatgaaggtccaccaggggacccaggacatagttcatttatgttcagttttcatcctaggtttggtggccatgattctgcactaagaagtccttcaatggcaaggtctcaatctgacaggagtagaagtcctatgcatgatgaagaatcctcaatgcctttttctttccattctcttcattattcatcttcagagaggcatttttcgcccttggaccgagattctggtagactagggagctggacctctgaaagtatgtattatgacagggaccgtgttttttcgtctcgatttatggacaggttcgacgatcgtcactaccgcagttggaggtgaggatggcacaaacaggatcaatcatattggtaggttctgaagatgcattcctgtcattcatacattgaaattatttaccctcacttatattaaggactggggttatgcagagttctagcgaagttagcagctttaaccatttttctggtatagctttatttgcactctgctttatgttattagggtttatagcctactcctaactctgactttgcttgtagaatgaaactttagctcatgtttaaatctttgcaatagaatatggttatttgtgaaaaaaaaaaaaaaaaaa

SEQ ID NO: 4224 - DNA, 1698 bp, Glycine max
  misc_feature (10)..(10): n is a, c, g, or t
tcgagtagcnacgtagggcccccccccatataaccttgtcggctgcgggcagttaccaggagagagagagagagagagagagagaaagtgtaatggcaatggcaacaatgggagagagtccacgaagcccagaagcgaagttggggatgcgagtggaggatctttgggacgttcaggagccacagttgagtcccactgagaagctcaacgcttgttttgaaagcatccctgtctctgcttttcctttggatccttcaaacacagaaattgagattaaatcagacgcgaccctagcagatgctgttaagatattggcgcgacacaacgtattcagcgcacctgtggtggatgttgaggcgcctgaagatgctagttggatggatagatacatcggaattgttgagtttgctggaattgttgtatggattttgcatcagtctgaacctacatctcctaggtgtccatccactccatccagtgcaagggctattgcagctgcagctaatggagcggcttttgctctagaacttgaagccttaggccttggatctgctgcaacaactgcagggaacttttttgaggatctcacttcttctgaactttataagaataccaaggttcgtgatatttcagggacattccgctgggccccgtttcttgctttagagagatcaaactcatttctaaccatgctcttgctgctttctaagtacaagatgaagagtgttcctgtgttggatttaggctctggtgcaattgataacattattacacaatctgctgtgattcatatgctggcagaatgcgctggacttcagtggttcgaaagttggggaaccaagaaactatctgaagttggtcttcccctggtgacaggaaatcaaatcatcaaggtttatgaggatgaaccagtcctccaagcatttaaagtaatgaggaaaaaaagggtcggaggggttcctgtaatcgaaagagagaccaaaaaagcagttggtaatataagtttgcgagacgttcaattcttgctaactgcaccagaaatctatcatgattatagaggtattacagtaaaagacttcctaactgaggttagaagctacttggagaagaataaaaatgcatccccaatgttaaatgaatatgtcacatgcaaaaaggactgtacaatcaaagagttgattcaactacttgatcaagagaagattcacagggtctatgtggtggacgatgatggggatttgcaaggactaatcacactaagagatatcatctcaaggctagtacacgaaccgcgtggctattttggtgatttctttgatggtgttctaccgctgcctgcaaacagcagagtttaacaggcaaggttacaagggagaataacctgctggtgcagcttttttttttttaaaaaaagaaaaatttaagtaaaaagggaaaaaaaaaatacaaatagatcaatgcgcttctcttcagggttgaagacgtgtgcttgggtctttgtataacgagtaggcaatttgcaagttaattgcatccgttttattaagtgttagagtgagatttgtgtgtactgtaaattctggtggaagtgtaagtaaccataagttttgttaacttttgaaatgtaatttcttttctcttcatcctgtgtttccattattttgatttgccaaatatatcacccctcatcttaataag

SEQ ID NO: 4225 - DNA, 2090 bp, Glycine max
gaatggggctcgagctcactgttagtagcagcaatggcgaagggtgaagacgctttgattcgaaagaagaataaaaagcttcgaaagaagaacagcagcggctcttcctctgtctccgccaaggttgccgccgttatcgccgccaagaagcgccgcaaggccggtaaacgccgcatgtgccaggggatgtgctttagtctacctactctggatgatcccttcaatgatcgaggtgggaaagaggaaaccaaaacaaagggtcctaaaaagaaatcccattcaaaaccaaaagacaagatggatcatcttaatgggaagagtgcagatggaaagaaaggcgcagttggtgggaggaaaattgcaagggaattgaatgatttacaaagggaaaatgagtctgtcacagccagcaataatcttactcataaatgtatcattaactcagaaaggaaaaatattgatatgactgagatggctcatctttgcggtaccaaacagcgtgattgtgacatttcagagttcccttctaagtttattttttggtgtttgagttccattgaaaatgcattgcgacatggtgatgcctacactgatggagagggtaactctttctttttgaatccatggggattagaatttttgaagtgttattctacagggaaagatctgatagaaaccagtggaacctctgctactgctgagcaaattgcatggatggtttctggtgcagctgatacttttgtcagaaaagagaaagaagggttgtcctttcccgggccttttcttttattccttgtaccctcccaagaaaaatctacccaggttcgaacagtttgcaagcctttaaaatctgttggaatacatacagtgagtattcatccaggtgcttccttagatcatcagattcaaggtctgaaaacttgtgagcctgagtttcttgtttctactcctgagaggctattggagcttgtttctacgaaggcaattgatatttctggggtatccatgctggttattgatgggcttaatactatctgtagtgctggccacgctgatacagtaaaatccatcaagaattgtatttctggcaatccccgtgttgtgattttcaatgattgtgtcagccacatgtcgatcccaatggttcgatatcttctgacaggatcaatttgtagagtctctctcaataattcaattaacagcctaagttcgtacattatccaatctgttgaagtgtgtacgtcagaagaagataaagttgttatgagcatcgaagccctggatcaatttcagagcaacagtacacagaattcaaacatgctatatattttaagcaaagatgtcaagtgccataaattggtcaagactctcaaatccaagggttattccgtttcacttgattctgatgcagcaaatattaatgatagggtggattcagaccgcagagcagcggtttctttgattgatttggtgcaaatctctactacggatatagggacgtatgatgtggtagtcctacctagttttgtaccctcaattgacacttacgtgcatattttgacaaagatggctcgcacaagtgtcaatggtgtattgcacagtttcttaacaaaaagagatacagaacttgctgcaccgttgattgcggttcttgaacaatgcggtcaggaagtgcctcagacccttcaggatctgaatcatacatcgaacatgttggaagattgaatgttgaaggtgcttagtcatcaatttttttatgttcattccgtctctgcggctcatgatatcaaaagatcaattccttttactttggaatttgggctgggagctgagtggtagggattgtaggtttcctatgcttggaatttggaaaccttcacgttaagaatcccattaagaaattttttgcaatattatctctgcttctgtttcaagactgtattttactgtaatcgaatgagcttctttgtcgcaacatcattttgttgcttttgtagcagcatagaaacaaacatttaattctttagatactatcttttattaaaattaagattttattttagtaacttaagaaaaaaaaaaaaaaaaaa

SEQ ID NO: 4226 - DNA, 858 bp, Glycine max
cccacgcgtccgcccacgcgtccgacggctgcgagctcacgtccgggcggggaggaactaagcaaactagaattgtcaaagaaaactgggaagaccaagaaaaatcgtctcttcaggaaagaactttatctcgcattaattttgttgactgcctcagttagaagcttattatctgcccaaggaattcacttctacttcctattatttcaagggataagttttctggttgttggtcttgatttgattggagagcaggttagttgatgtccagattttggatttttagtgcatacaaaacctctaagatcctcattgataaaggtcagaatggccaaaccataaacccatccctgaacacattgatttgagcctaagctgttcagtgtggtttttggctcccaattaaagcaaatcagttgctgcttgacgccaaacttgcagttttgtttttggtataagacttatgcctcattgttgttgccgagtcatatgccttaagttacataacagttgtttcagttcctaatggcaaaacgtatcaacactttggaaaaaagataaaggggtttaacattcctgtcctataatgcaatgccattatagaattacttgcctgcctgaattgaaaaggtggagattgttaagattataacatttgttattctttttttttttttctatattgacatactgtacaatcacataatttcattgtgtcgttgctcaatttgtatttgttatcaggcagagaggtttttggcacacctgtcagcaaacatattttcatcttttaccattaattttaactgttgtctttatcatagttaattttgcacttaaacaaaaaaaaaaaaaaaa

SEQ ID NO: 4227 - DNA, 1244 bp, Glycine max
gtgtatttctcaatgatgttaagtgtctttgcggcctcgcagagaccccccccccatataagaaacaacaacaccgctggcattctggtccaatgcaattgtttcgcttgtgttttcttgatatacttcgttcaaaggttagttgggtaaagaaggtcaatttgatatttcttttcttcctcctgaggaagcttatcctgccattttattcattcacgctattctgcatcattcttcctttgaccatgttccttcctgaagccgagctcccagcctgggttgtttgttacattcctggaatcatgtccctcctaagtgttctcccagctccacggtcatttccatttatagttccttaccttctatttgagaacactatgtcggtaactaaatttaatgccatgatatctggattattacgctttggaagttcttacgagtgggtggttacaaaaaagttgggaaggtcatcagagacagatttggttgcctttgagaaagaagctgaacctctaatgcgatctactagtcttcatagatcatcctcagattcaggcattgaggaactaagcaaactagaattgtcaaagaaaactgggaagaccaagaaaaatcgtctcttcaggaaagaactttatctcgcattaattttgttgactgcctcagttagaagcttattatctgcccaaggaattcacttctacttcctattatttcaagggataagttttctggttgttggtcttgatttgattggagagcaggttagttgatgtccagattttggatttttagtgcatacaaaacctctaagatcctcattgataaaggtcagaatggccaaaccataaacccatccctgaacacattgatttgagcctaagctgttcagtgtggtttttggctcccaattaagccaaatcagttgctgcttgacgccaaacttgcagttttgtttttggtataagacttatgcctcattgttgttgccgagtcatatgccttaagttacataacagttgtttcagttcctaatggcaaaaggtatcaacactttggaaaaaagataaaggggttttaccatttcctgccctaataatgcaagcgccattatagatattacttgcctgcctgaattgaaaagagtggagatttgttaagatatataacatttgttattcttttttttttttcataaagttgacatacgtgtccaatcacaataatttcaattgtgtcgttgc

SEQ ID NO: 4228 - DNA, 1584 bp, Glycine max
ggtcagctacgtaggcccccccccccagaaccctcgctcctcgccagaaattgtattgcagaggaaagaccgagaaaaaagaagaaggaattttgatggtaaagtaatattctaatttccaaaattcgattttgttgccgaaggaagaaaagaaggaaatgggaggttcatcggatacgaagctcctgcaagacctgttgttgtacgcagcgagcgcagcgctgagttgcttggtactattcgcgggtttgagacacctggaccctaatcgcgaagcatcgaagaaggctctcgagcacaagaaagagattgcaaagcgtcttggtcgtccccttattcagactaacccttacgaggatgtaatagcctgtgacgttataaatcctgatcacatcaatgtggagttcaactctattgggggactggaaacaatcaagcaagctttgtttgagcttgttattctgcctctaaaaagaccagacttgttttcacatggcaagcttcttggaccacaaaagggggtcctgttgtatggaccgcccggcactggaaaaaccatgcttgccaaagctattgccaaggagtccagagcagtttttattaacgtgagaatatcaaacctgatgagcaagtggtttggggatgcccaaaagcttgttgctgctgtatttagcttggcttataagcttcagcctgccatcatattcattgatgaagtagacagttttttgggtcagcgtcgtggaacagatcacgaggctatgttaaacatgaaaactgaattcatggctctgtgggatggatttacaacagatcagaatgctcaagttatggttcttgcagcaactaatcgtccttcagaacttgatgaagcaatacttcggcgtcttcctcaagcctttgaaattggaattccagaccaaagggagagggctgaaatattgaaggttgtcttaaagggtgagagggttgaagacaacatagactttggtcatatagctggtttgtgtgagggttacactggttcagatctatttgatctttgcaagaaagctgcctattttcctattagagaactactggatgaagagaagaaaggaaaacaatctcatgcccctagacctttgtcccagttagattttgagaaggcccttgctacttcaaagaagacaaaggttgctgctagtgaatacggtggattcagccttcagtcaccttcaagatggacagtgcctggtgagtcagagtaaagcttaagactcatcaagatgatgcagtgtgtcaagttgccaacagccatcaatcattgagacctcggagaaataactgccattggattgggttcggcagggttataattttaagcagtgggtcagttatcatccttatgtttttgttgtctttatgatccacccgtatatgctgatgattaaatcaaacccttgaaagttgcgagttcttcccatcacattcattcattatgtagttaggaccacaaatttgttgtttttccacttttaatgttaagaggaaaaaaaaaaactagtgtcaaatgccgtataatttaaaaaaaaaaaaaaaaaa

SEQ ID NO: 4229 - DNA, 645 bp, Glycine max
attaatatgttccttccttcttgttgagattccttttgatttgttttatataataaaattccatgttatgtgggtagagccttaatttccttgcttgctattgtaattgtatgctatgctttgactttatcgttctgaatcttcttctataaaccttaattgttattttttcaggccttcaatgggttactattattgtaaacccaggccttgtgatactcatactcccaatgttgttctgatcttggccgtggccttgattcttctatgtgccccaaagctcttctcaggtgaagcagaggaagaagaagatgaaacgaataacacctcaccttttcaggtaccaataatcatagtactcatcctgcttttgttgtcctttttgggaggttcaagaagaagggtttgtgtcaagccaccatattgtcagtgtacgtatgcctgctactgttacagatagtgttattgatgtgatcatagcttcaatctctatgttcgtgtgcatgaaaaaacatcaatggctttcagttgcgatgacacaaaaaaaaaaaatcttcaacaccttaccgcttgatgagaatgaatggtattgtgtttaatcaagtatcatctgttatctttatattgtccttataagataatgta

SEQ ID NO: 4230 - DNA, 1123 bp, Glycine max
attatttttaaaaaactcgagccgattcggctcgagacaagtttctcgaggaaggatccaaagcccaatgaatgaatggttatcgttttgaagaagcttttgatggcagtgctctgggactgaacaactgaaactattagattcaatttattcgctcctttcttcactgaaccaaaattggattgaatggatgctatcagaaagcaagcctccaagcttcgagaacaggtcgctcgccagcaacaggctgttctgaagcagtttgggggtggcggttatggaggttcagataatgtggttactgatggagtggagctccagctacaccagagacttgagaaactttatatatcgacacgtgcggggaagcattatcaaagggatattgttcgaggtgtagaaggttatattgttaccgggtccaagcaagtggaaataggaacaaagttgtcagaagacagcaggaaatatggtgcagaaaatacatgtaccagtggtaatacactgtcgagagctgcactaagttttgcgcaagcccatgctcaaattgagaaggagcgtggaaacttactaaaagctcttgggacacaggttgcagagccattaagggcaatggtggtgggagctccattggaggatgctaggcatcttgctcaacgttatgacagaatgcgacaggaagctgaagcccaggctattgaagtttctaaacgccaggcaaaagtaagagaaatgccacccaatggagagaatgctatgaaattagaagcagctgaagctaagctgcaggatctgaagacaaacatgaccatactggggaaggaagcagctgcagctttggctgctgttgaagcacagcaacagaggttaactcttcagcgtcttatagctatggttgaagctgagtcgtgcctatcatcacatagtcctacaaatacttgatcagcttgagggagaagtgacatcagaacgacgacaaattgaatccccttgtactcctagtctggataacaccatgcaaccaccttgctcatatgaagaagtgagtgatgtatatgctgatacggaacaaatggatcagcagatagcatggtggctgcttggcttaggggaaatattatat

SEQ ID NO: 4231 - DNA, 1689 bp, Glycine max
tcagctacgtaggcccccccccaaaaatattcaaaacaagtctaggggaagaagcgaaggtccttctaagctctaattctatagtgtaataatttgcaacgcaattttgaaaaacctgagtgtcccttttctctcttccgatacaaaagcccgttgttgttggtgtttcggtctgaaatcaaatcaaaatcaacactgtgcgctgcggttagaagagattcaatctgaatctgaatggaagctatcagaaagcaagcctccaaacttcgagaacaggtcgctcgtcaacaacaggctgtgcttaaacagtttggggctgggggatatggaggttcagataatatggttactgatgaggtagagcttcagcaacatcagaaacttgagaagctttacatatcaacacgtgctggaaagcattatcaaagggatattgtccgcggtgtggaaggttatattgtaactggatccaagcaagttgaaataggaacaaagttatcagaagatagcaggaaatatggtgcagataatacatgtaccagtggtagtactttatcaagagctgcgctaaattatgcacgtgcccgtgcacaaatggagaaggagcgtgggagcttactaaaagctcttggcacacaggttgcagagcccttaagagcaatggtgatgggagctccattggaggatgcccggcatcttgctcaacgttatgacagaatgcggcaggaagccgaagcccaggctattgaagtttccaaacgccaggcaaaagtaagagaaacaccaggcaatgctgagaatgctatgaagctggaagcagctgaaacaaagctgcaagacctgaagactaacatggcaatattgggaaaagaagcagctgccgcaatggctgctgttgaagcacagcaacagaggttaaccctccagcgacttatagctatggttgaagcagagcgtgcctatcatcaaagagtactccaaatacttgatcagcttgagggagagatgatatcagaacgacaacgaattgaagcccctcctacacctagtgtggatagcagcatgacaccacccccatcatatgaggaagttaatggtgtatatgcttctcaagcacataatggctcaacagatagtatgggttacttcttaggagaggttttatttccctaccatgctgagtctgaagttgaattgaatctatcagttggggattatattgtcattcgaaaggtgacaaacaatggatgggctgagggtgaatgcaaagggaaagcaggttggtttccatttggttacatagaaagaagggagcgagtcctcgcaagcaaggtggctgaagtgttttgaatgtttctgtttggttgagttggtggtttcctgcctcagggattatgtatgtgcgtatgttttggttttgtgcttaatggataacgtgtgcttactgcttagcatacaacaatcgatttgtgatatatagatgacatgttttttcttttcttgtgattatcgatcgctttaagattctcttttgtattagaatgataataggtatggtttagttaaaagtattacatatttatattcaccgtgttaaaaaaaattaatctaaattgagtatgcaattttgcttttattttatctcaataaaaaaaaaatccatgtttgaataaaaaaaaaaaaaaaaaa

SEQ ID NO: 4232 - DNA, 1671 bp, Glycine max
tacggctgcgagagacgacagaagggggagccgcgactttcaaattccttgttcttcttcatgtgtgtctccctctcgtataaatacactaccatcttccatttcctcaaaaaatccaattcaccaaacatggttgatctagattggcaaacaaagatggttcactccaacatgcctccaaagtcccccaaactctctctcccggataataacattccaatcccccttcgccagaacgacatcaccgcagcgtcgtctccaatctgcgctgcctacgacaactacctccgcctccctgagctcagagccctctgggcctccaacgacttccctaattgggccaacgagcccatcttaaagcccaccttacacgccctcgaaatcaccttccgcttactcgcaaccgttttatccgacccgaggccgtacataaacaagcgcgagtggacccggcgggtggagtctctcgccacggcccaaattcagatcatagctatgctgtgtgaagatgaagaagaaaaccccgagacacgtggcacgacgccaccggtgagtgacattaacggcttcatcgctcaaagcagaagctacagcgaggagagcctgctcccgcgcctcgccacgtggcacaaatccaaggacgtggcgcggagaatcctcgattcggtagagtaccagatgatgaggtgcacgtacaccttaggtttaggagaggcgaatctcgcgggtaagaagatattcctttacgacgccgtttgcaggccgagcgagattcactcgttggagacgacgccgtttgattacgtggggaactgcgagaacaagacgctgcacgcgacgcagcagatcgcggagtgttggacgcgcgcggtgaggaagctgctggagagagtggtggagtcggtggagagaaaaacgttggagaaggcggcgagggagtgtcacgcggtggagcggatctggaagttgttaacggaggttgaggacgtgcacgtgatgatggatccggaggatttcttgaggttgaagaaggagttggggatgatgagaaattgcggggaaatggtggcgttttgcttcaggtcgagggagctcgtggaggtggcgaggatgtgtagggatctgaggcagaaggtgccggagatattggaggtggaggtggaccccacgggtgggcccgggatgatggaggcggcgatgaaggtttactcggagaaagagaaaaggaacgggttcgagaaggttcatgttttgcaggggatgcaggcgattgaggtggcgatgaagaggttcttctacgcctataagcaggttgtggcggttatgatggggagctccgaggccgataatgggttcactcagatattccttgaacccacttatttccctagcttagatgctgccaagacctttctcgcttattattgggaaaataataatcaaaatggggttccctgctagttaattaaaaaattaatcaattaattcctagtcatatatacttactcacacaaacgggaaaacaaagagaaaaaaaaaaaggactaaatttttgtaataggttggtgtaaacaaatctttgtctgtaaaataatatttatttgactattcttttggatcatgttctttcggctgctttaaattatgacctgatccccgcttttgaatttt

SEQ ID NO: 4233 - DNA, 1473 bp, Glycine max
acggctgcgagaagacgacagaaggggttttggacttgttctttggtggaggcacaaacataatcaacaagcattctttgatgttaaagaccggcaccatgaagaagtctaccttggaaacttgaagaggttccaattcagagaactccagattgctactaaaaacttcagcagcaaaaacatactgggaaaaggtggttttggaaatgtctacaaaggaattctccctgatggcactcttgtagctgtcaagaggcttaaagatggcaatgccattggtggagagattcaatttcagaccgaagttgaaatgatcagcctggcagtgcaccgaaacctcctcagactgtatggattttgcatgacaccatcggaaaggcttttggtttatccatacatgtccaatggcagtgtcgcttcccgtctcaaggggaagccagtgctggactggggcacaaggaagcacattgctttaggagcaggaagaggactactttaccttcatgagcagtgtgatccaaagataatccatagggatgtgaaagctgccaacatattgcttgatgactattatgaagctgtagttggagattttgggttggcaaagcttttggatcaccaagattcacatgtcacaactgcagtgaggggcactgtggggcatattgccccagagtacttatccacaggacaatcctctgagaagactgatgtttttggatttggcattctcctccttgaattgatcacaggccaaagggctctagagtttggaaaatcagctaacaacaaaggagccatgcttgattgggtaaagaaaattcatcaggagaaaaagcttgatatgctagtagacaaggatctcaagaacaactatgacagaattgagcttgaggaaatggttcaagtggctctcttgtgtactcaatatcttcccggccatagaccaaaaatgtctgaagtggtacgcatgcttgaaggtgatggactagcagaaaaatgggaagcttctcaaagagttgactcaacaaagtgcaaaccacaagagtcctcttcatcagataggtattctgatctcactgatgactctttgttgttagtccaagccatggaactctcaggacccaggtgaattaattgtctagtagaacatttttatttttgttttaaaggtttttaaaagaaagcatatgaaattcaagagcatatgatagttgaatctttgttataaatcccttgaagaagattataatgttgtatgatagagatctaccgaagctgataaaaaaaacggctttggtaatgtttactttcaaatgtacagaatctgattcgttgaatgttaattttgtaatgcaaattttgtaatattgttgaaaatgaatgaagcctgtattggttttgcactgccaaaaaaaaaaaaaaaaaaaaaaaaaaaaaaaaaaaaaaaaaaaaaaaaaaaaaaaaaaaaaa

SEQ ID NO: 4234 - DNA, 1493 bp, Glycine max
gttcagctacgtaggcccccccccccccgacaactccttttcccaatttctctctcctctctctctctctctctctctctgagttctcctttctctctcttgagttaccatttctcattcattcataatgcactaatcataacaacaccgttcagctcaacaacaaaaaataaaataaatcataacaccgttcgttcatcaatggcggttccgctgcattcctagattgctctctttttcaccaattttcattcgttgcgtgtgtttgttcgctgagtgcgttagttattacagcaatggagttcgagcaccccaccgcgacgcctctcaactccgccatgacctacgacgaagcctccatggagcgcagcaagagcttcgtcaacgccttgcaggaacttaagaacctgaggcctcaactttattctgctgcagaatactgtgaaaaatcttatctccatagtgaacagaaacaaatggtacttgacaacctgaaagactatgctgtaagagcccttgtgaatgctgttgaccatctaggaacggttgcatacaagttaactgaccttcttgagcagcaaacattggatgtctcaactatggatttgaaggtcgctaccataaatcagaaacttcttacatgccaaatttacactgataaagaaggcctacggcagcagcaattgttggctttcattcccagacatcataagcactacattttgccaaattctgtcaataaaaaggtacatttcagtcctcacatacagattgatgcaagacagaatccatttcaaaccagaacccgttttcaatcttcaggtacccctgcagccaaaactctttcatggcatttagcatcagagacaaagtctaccttaaaagggtcttcacatgcttccccttccccaaacattgagaacccaaagttttctggcaaggcctctggagttttccatctcttagataatgaagagaacacctggatgaaatcctcaccagcacaaattcactttccaaatggagtttctacttctagtacacccatgcatactttaggtggtacacgcaaggatgcattggaaggttccaaaccattcacaacattcaggtcatttgacaaccaaaatcggcgagagacggtccaagttcctactcgtagcaaaagtatgctatcagctttctttgtgaagcagaaaacaccaaagttgaaagccagttctttcttatgaatacctctaaagccatcccctcccctatgcaaatgctcagaattaattagtttctgaatcaagcctttaaataatgatcctgtaagtagccggttccctggcaatgaaaatggttgggatcttggtcttataatcgctttatgttactcttgtgaattgtgatctatagagttcaggcaccagtaaaatgtatatttttcgtatgctatgcaaaaaaagtttcgttattttttcttgtccttgaaaaaaaaaaaaaaaaaa

SEQ ID NO: 4235 - DNA, 1366 bp, Glycine max
attcattatgcacctaccttggcaacaacaccgttcagcttcaccaacaataaataaataaaaaatcataacaccgttcatcaatggcggttcggctgcattcctagactactctctttttccgcaatttttcattggctgcgttcgttcgttcgttgcgtgctttagttgttacttttccgttacggcgatggagttggagcacccgaccgcgacgccgctcaactccgccatgacctacgacgaagcctccatggagcgcagcaagagcttcgtcaacgccttgcaggaacttaagaacctaaggcctcaactttattctgctgcagaatactgtgaaaaatcttatctccatagtgaacagaaacaaatggtacttgacaacctgaaagactatgctgtaagagcccttgtgaatgctgttgatcatctaggaacagttgcatacaagttaactgaccttcttgagcagcaaacatttgatgtctcaactatggatttgaaggtcgctaccataaatcagaaacttcttacatgccaaatttacactgataaagaaggtctacggcagcagcaattgttagctttcattcccagacatcataagcactacattttgccaaattctgtcaataaaaaggtacatttcagtccacaaatacagattgatgcaagacagaatccatttcaaaccagaacccgttttcaatcttcaggtacccctgcagcgaaaactctttcatggcatttagcatcagagacaaagtctaccttaaaagggtcttcgcatgcttccccttccccaaacactgagaacccaaagttttctgccaaggcctctggagttttccatctcttagataatgaagagaacacctggatgaaatcctcacctgcacaaatttactttccaaatggagttcctacctctagtacacccatgcatactttaggtggtacaggcaaggatgcattggagggatccaaaccattgacagcattcagatcattcgactaccaaaatcggcgtgagactgtccaagtccctactcgaagcaaaagtgtgctatcagctttctttgtcaagcagaaaacaccaaagttgaaagccggttctttcttatgaatacccctaaagccatcccctcccctatgcaaatcctcagaattaattagtttctgattcaagcctttgaataatgatcctgtaagtagccggttccctggcaatcataatggttgggatcttggtcttctaatcgctttatgttgctcttgtggattgtgatctagttcaggcacctgcaaaatgtatatttgttgtatgctatgcaaaaaaagtttcattaaaaaaaaaaaaaaaaaa

SEQ ID NO: 4236 - DNA, 2022 bp, Glycine max
  misc_feature (1427)..(1427): n is a, c, g, or t
tgtaattcctgagtttccatttcaggtgtggagtttgagacctcgtgaccgtggcatgctggggaaagcggtttcagtagggaccccccccccaactagttgttggaacaatggagatgagctatctgttgtgtgcttgaagaacctaaatcctgtgctgccagcaatgccacgcctccactaaatacatgcacttatagagcattatggtcctactgttttctttcatcctgaggaagtttacttgccttcttctgttgattggtttttcaataatggagccttgttgtaccgaaagggcgtgtccacgggagaggccattgatgcagctggctcaaatttgccaggtgggggaagaaatgatggggagttttggatagatttgccaagtgatgataaaagggattttgtcaaacatggggacttgaagagtgctaagctttatgttcatgtgaagcctgctcttggtggaacttttactgatattgctatgtgggtgttttgccctttcaatggaccctccaccctgaaaattggaattacaagtagggcttttagtaaggttggagagcatgttggtgactgggagcattttacacttcgtatatgcaacttctccggagaattgtggagtatatatttctcacagcacagtggtggtaaatgggtggatgcctatgaattggagtatattgatggcaataaagctgttgtctactcatcaaaaaatggacatgcaagttacccccaccctggaacatatctccaaggatcttcaaaacttgggattggcattaggaatgatgctactcgtagtaatttgtatgtggattctagcgttcaatacgagcttgttgcagccgagtatctaggagatgttgtcagagagcctcaatggttgcagtttatgagagagtggggtccaaaaattgtttatgattctaaaactgagcttgataagataataaatgctcttcctggcgggcttcgcaattcatttggtagcttgattaaaaagcttccggtagagctgtatggtgaggaaggtcctacagggccaaaagagaaaaataactggataggagatgaaagatggtgaatttatatatatgatacttaaacacaataaagtgggatcgcgcacgaattaattggtcaaatcggcaagttctttttctaggccagaaatgttgtaataatatgttgtatattcatcccgcgcccaattgtttttggctagtattatagttttgggtggtgcttatgtatattgtttattgggtttggaatagggagcaaggtcaaatttaggatttgttgtctgggaattagtgtattacatgagagttcttgtactgtgtctgatgtcccagtgtgatttgttatccatgccaaaaaataatttagcatgagtgtaaatgattccnaaaaaaaaaaaaaaaaaaaaaaaaaaaaaaaaaaaaaaaaaaaaaaaaaaaaaaaaaaaaaaaaaaaaaaaaaaaaaaaaaaaaaaaaaaaagggaaaaaaaaaaaaaaaaaattttccctgcccccgggggaacccctatttttaaaagggcccccccccggggggaacccccattttttttccctttaaggggggttaattttcagtttggggaaaacctgggcaaaattttttcccggggaaaatttttttcccccccaaattccccaaaaaaataaagccggaaaataaaaggggaaaacccggggggcccaaggggggggccaaccccctttaattggggtgggccccatgccccttttccaagtggaaaaacttgtgggcccgtttgtttaaataattcccccaccccgcgggaaaagggggttttgcatattggggggtttttcccgttttcccgaaaaaaaaaccccctgggccccgggcgtttcgggtgggggggaggggttattccttccctcaaggggggaaataaggtttttcccccaaaatcggggtaaaacccccgggaaaaaaacttttgtatccaaaaa

SEQ ID NO: 4237 - DNA, 1534 bp, Glycine max
caggactcaggaacacctgttgcttcctcttctattcctgccccatctgtacaaacaggacctgaatcaaatggttcaaaaacagttgattctacagctatcggcttgcaagtagacccccccaaagataaacaaaaagatactaatggtgatgcccgatgtctctgatacatcctcagattctgaagatgaagataacgggccttcaaaggaggagtgcatcattcaatttaaggagatgcttaaggagcgaggagtggcaccattctcaaagtgggagaaagaattgccaaagatagtatttgatccacgctttaaggccatcccaagttattctgctaggagatccttgtttgagcattatgttaaaactcgtgcagaagaagaacgcaaagaaaaacgtgctgcacagaaggctgcaattgaaggatttaagcggttactggatgaagcctcagaggatattaattacaatactgattttcaaactttccggaagaaatggggaaacgatccacggtttgaggcattggaccgcaaggaacaagagcacctattgaatgaaagagtgcttcctttgaagaaagctgctgaagaaaaggctcaagcaatgcgtgcagctgctgctgccagttttaagtcaatgcttaaagagcgaggagatatgtcttttaactcccgttgggccagggttaaagaaagcttaagggatgacccaagatataaatctgtgaggcatgaggatagggaagttttgttcaatgagtatatatctgaactgaaagctgctgaacatgcagcagaaagagagaccaaagctaaaagggaggagcaggacaagctcagggaaagagaacgggagctgcgcaaaagaaaggaaagagaagaacaggaaatggaaagggtgcgactaaaaattcgaagaaaggacgcagttactttatttcaagctttacttgtggagacaatcaaagaccctctggtatcatggacggaatctaagcctaaattagaaaaggatgctcaaagacgtgcaactaatcctgatcttgatccattggacacggaaaagctctttcgggaacatgtcaagatgcttcaggaacgttgtgcgcacgagtttagagttctcttagctgaagtgttgacttctgatgctgcatctcaagaaactgacgatggaaaaacagtgcttaattcttggtctacagctaaacgtcttttaaaatctgatccaagatataacaaagttccaagaaaagaaagagaagcattgtggcgccgctatgctgaggatatgctgcggcggcaaaaggcatctcatgattccagggaagagaaacatacagatgctgaaggtagaaattatctagaatcttccaaacctccatttgaatctgggagatcgtacgagcgaagataattcttttcgaaattcttgttatctcttctctcctatgccagagattaggtttccttagtttgaagccctgacattagaacataattatattaccttttttaagttcttaat

SEQ ID NO: 4238 - DNA, 2050 bp, Glycine max
tccattcaaacattgtcaggcagtccctgtctcaccaactcttgatgtaaccagaggccttacaaacacacccatatatatgcatacatgctagcaccaccttcaagcaaagtcgcgcaaattctcctcctacaccaacaaaaatggcaccttctccacaagaaatcatcttccgatccccactccccgatattcccatccccacacatctcccattgtactcttactgcttccaaaacttgtcaaagttccatgaccgtccatgcctcatcgacggcgacaccggcgagaccctcacctacgccgacgtcgacctcgctgctcgccgcatcgcctccggcctccacaaaatcggcatccgccagggtgacgtcatcatgctcgtcctacgcaactgcccgcagttcgccctcgccttcctcggcgccacccaccgtggcgccgtcgtcaccacagccaaccccttctacacgccggcggagcttgcgaagcaagcgacggccacgaaaaccaggctcgtcataacgcaatccgcgtacgttgagaaaatcaagagtttcgcggacagcagcagcgatgtcatggtgatgtgcattgatgatgatttttcttatgaaaacgacggcgttttgcatttctcaacgctcagtaacgccgacgaaacggaagcccctgccgttaagattaaccctgacgagctcgttgcgcttccgttttcttctggcacgtctgggctccccaagggcgttatgttatcgcataaaaacttggtcaccacgatagcgcagttagttgacggcgaaaacccgcaccaatacactcacagcgaggatgtgctactctgtgtgttgcctatgtttcatatctatgcgctcaattccattttgctctgcgggattcgttccggtgcggccgtgcttattttgcagaagtttgagatcactactctgttggagctcatcgagaagtacaaggtgacggttgcgtcgtttgtgccgcccatcgttttggcgttggttaagagcggagagactcatcgctacgacctgtcgtctattcgcgctgtggtcaccggcgcggcacccttaggaggggaacttcaagaagccgttaaggctaggctaccacacgctacttttggacagggatatgggatgacagaagcaggaccacttgccattagcatggcatttgcaaaagtaccctctaagattaaaccaggtgcatgcggaaccgttgtgagaaacgccgagatgaaaatcgtggatacagaaacgggtgattcacttccaagaaacaaacacggtgaaatttgcataagaggcacaaaggtcatgaaaggatatctaaatgacccagaggctacagagagaactgtagacaaagaaggatggttacacacaggagatattggtttcattgatgatgatgatgaactcttcattgttgatcggttaaaggaattgatcaaatacaaaggattccaagtggctcctgctgagcttgaagcattgttgattgcccacccaaacatttctgatgctgccgttgtaggcatgaaagatgaagctgcaggggaaattccagttgcatttgttgtaaggtcaaatggttctgagatcgccgaggatgaaatcaagaaatacatttcacaacaggtggttttttacaagagaataggtagagttttcttcacggactctattcctaaagcaccctcaggcaaaattctgcgaaaggtattaactgcaagacttaacgaaggtttggtggtggccaattaggtccataattgtgacagaggaaaatcgtggctgttttacttaccgtaccacaggcccttcctgttgtggtttttgttccaattttatatctcgttatcaatatatatatataatatgcaagtattgcatgaatttattcttgtgtaacttataatgttgtatatattggagaccagactctgaattacagcatgaacacattaaaattcagcaagttgttacgatctgtatactaaattagtactaaagtaaaaagaatttaattc

SEQ ID NO: 4239 - DNA, 2541 bp, Glycine max
gaaaaatgaactgttgaagcttacgtgactgagaaaacctacttactcgcgttgtgtgccgcctcagctacgtaggcccccccccccctttctttttctttcgttttctcgggaaccaaacacgtttgccattggaacaatgcacggaagggcgcgagagaagcgcggtttggattcggcttccgctgaagaaggtcagcctgatcggaaacgacctgcgttggctagtgtaattgttgaagccctgaaggttgacagtctgcagaaactttgctcgtcactggagcctattctacgcagagttgttagtgaagaagttgagcgtgctttggcaaaactaggccctgccaagcttaatactggcaggtcttccccaaagcggatagaaggccccgatggcaaaaatttacaattgcacttcaagaccaggctatcccttcccctctttactggtgggaaagtggagggtgagcaagggacagccatacatattgttttgattgatgcaaattctggccatattgtcacatcagggccagagtcatgtgtcaggctagatgttattgtactagagggagatttcaataatgaggatgatgataattgggacgaagaagagtttgatagtcatattgtgaaagagcgggaaggaaaaagacctcttctaactggtgatctgcaagtcacactgaaggagggtgtaggaacacttggtgagcttacatttacagacaactctagctggataaggagtaggaagtttagattggggctgaaagttgcctcaggttgttgtgaggaaatgcgtatccgtgaagccaaatcagaacctttcacagttaaggatcatcgtggagaattatacaagaaacactacccgcctgccttgaatgatgaggtctggagactggagaagattggcaaggatgggtcatttcacaaaaggctaaataaagctggaatatatatggttgaagacttcttaagacttgtggtcagagaccctcagagattgcggaatattcttgggagtggcatgtcaaataagatgtgggatattcttgttgagcacgcaaagacttgtgttctcagtggaaaactttacgtatactatcctgaagatgcaagaaatgtgggtgttgttttcaataatatttatgaattaagtggcttaattgccaacgaccaatattactcagctgattctctctctgagaatcaaaaggtttatgtagacacattggtgaagaaggcatatgataattggatgcatgttattgagtatgatgggaagtctctgataaatgacaacgaggataaggctttggataccactcatcctcaggctccaatgacttcccatgaatattcaaactcacttcagcagatatccatcccagctttgccacttccagtacatcctggccagccttcaatggattcaggagtaacagttggaggttatcatgatgggacagcttctagattctccttgcaaccacatcctaatcttaattcttccattcagtttgatgataatgcatttccactacaaaaccagttgatgagtgcttcacaccatgcccaacttccaagaaatgaaaatgggcagactattggtcctccacaatcatccacgcacggctttgagcctgtaagcatttcaaatcctacgtacagaggagttgaagagtacttcccagaggaggaaattcgtattagaagtaatgagatgctagaaaatgaagatatgcagcatctactccgtatttttaacatgggaggccaaccacatcccacctttaatgctcaggatgatggataccctagttcatctacatacatttctgcaaaccccatgggctacaattttgatgatgaaccaaaccgttcctcaggcaaagctgttgtgggctggctcaagctgaaggcagctttaagatggggtatttttattcgaaagcaggctgctgagagacgggcacaacttgttgaattggatgacccatagagatcttggggggcattactgatctttagtgatctgaacaataatttttctggttatagcatccaaggcttcttagtctttcctgacattcagaattggtgtcatgctgaaatctcatagcaggagcaaggatatgaaatctggactgaattatttggtgcagacttaactcaaagattcaactgtcccttgatccataaacagttgggcatagactttactgctttgcttgtgatgttttcactaagcattcctgtatccaagttgtaaagtctctgatggtctacttgtttttaaacttggcaagctccaagtgaaattcacggggagctactaggatcgttactacatttatcaggttgtatttaattctgtatagtaagctagctagatgattttcaacccaactgaagtttaatgttttatagttgctgtggcattataattaatttgaactttttatgtgctttcagaaaaaaaaaaaaaaaaaaaaaaaaaaaaaaaaaaaaaaaaaaaaaaaagaaaaaaaa

SEQ ID NO: 4240 - DNA, 934 bp, Glycine max
  misc_feature (6)..(6): n is a, c, g, or t
tcgagnagctacgtaggccccccccccaactaactacaacaacatcatctacatcaccaaataaaactaacttgggtagtgccttttttctttctctctatcgattctcgaaacaaaccctacccttttttagtcttcgaatttttcataatcgtaatgggttccgaaggatccagcgttgtcgttcctaggaatttcagattattgcaagagcttgagagaggtgagaagggaattggggatggaactgttagctatggaatggatgacgctgacgacatatacatgcaatcttggactgggactatcattgggccccctggtactgttcatgaagggcgtatccaccagttgaaattgttttgtggcaaggattatccagacaatcctccatctgttagatttcaaacaaggattaacatgacatgtgtcaatcaagaaactggagcggttgagccacatttgtttcctatgcttgctaattggaaacgtgagcatacaatggaagacgttttgattcaattgaagagagaaatgatgtctcctcaaaataggaagctaactcagcctcctgaaggcaatgaagaagccagggttgatcaaaagggcctggtggtgagatgttgtattgtgtaattccatggagaatccaagcataataataataataataataataataataataatgtaaataactatattcaatagatgatccaagttcacggacttatgcataatgcatttataatgtaattatggaccacttccgtatgttacctggagcaatccaagatatagtagttactatatgtcttatgaaatttttattgtactgaagctgtttttacagcggactctaatttcgaattttaagatcctttttaaaagtgcttttgttttgaccccaaaaaaaaaaaaaaaaaaataaaaa

SEQ ID NO: 4241 - DNA, 2106 bp, Glycine max
  misc_feature (1768)..(1768): n is a, c, g, or t
  misc_feature (1819)..(1819): n is a, c, g, or t
  misc_feature (1833)..(1833): n is a, c, g, or t
  misc_feature (1842)..(1842): n is a, c, g, or t
  misc_feature (1872)..(1872): n is a, c, g, or t
  misc_feature (1874)..(1874): n is a, c, g, or t
  misc_feature (1877)..(1877): n is a, c, g, or t
  misc_feature (1902)..(1902): n is a, c, g, or t
  misc_feature (1919)..(1919): n is a, c, g, or t
  misc_feature (1921)..(1922): n is a, c, g, or t
  misc_feature (1924)..(1926): n is a, c, g, or t
  misc_feature (1928)..(1928): n is a, c, g, or t
  misc_feature (1934)..(1934): n is a, c, g, or t
  misc_feature (1940)..(1940): n is a, c, g, or t
  misc_feature (1947)..(1947): n is a, c, g, or t
  misc_feature (1950)..(1950): n is a, c, g, or t
  misc_feature (1953)..(1953): n is a, c, g, or t
  misc_feature (1956)..(1956): n is a, c, g, or t
  misc_feature (1963)..(1964): n is a, c, g, or t
  misc_feature (1967)..(1967): n is a, c, g, or t
  misc_feature (1973)..(1974): n is a, c, g, or t
  misc_feature (1976)..(1976): n is a, c, g, or t
  misc_feature (1981)..(1981): n is a, c, g, or t
  misc_feature (1984)..(1985): n is a, c, g, or t
  misc_feature (1989)..(1989): n is a, c, g, or t
  misc_feature (2001)..(2001): n is a, c, g, or t
  misc_feature (2007)..(2007): n is a, c, g, or t
  misc_feature (2015)..(2017): n is a, c, g, or t
  misc_feature (2024)..(2027): n is a, c, g, or t
  misc_feature (2030)..(2030): n is a, c, g, or t
  misc_feature (2036)..(2036): n is a, c, g, or t
  misc_feature (2039)..(2039): n is a, c, g, or t
  misc_feature (2043)..(2043): n is a, c, g, or t
  misc_feature (2052)..(2054): n is a, c, g, or t
  misc_feature (2062)..(2062): n is a, c, g, or t
  misc_feature (2064)..(2064): n is a, c, g, or t
  misc_feature (2068)..(2068): n is a, c, g, or t
  misc_feature (2073)..(2073): n is a, c, g, or t
  misc_feature (2076)..(2076): n is a, c, g, or t
  misc_feature (2079)..(2079): n is a, c, g, or t
  misc_feature (2082)..(2082): n is a, c, g, or t
  misc_feature (2088)..(2088): n is a, c, g, or t
  misc_feature (2092)..(2092): n is a, c, g, or t
  misc_feature (2097)..(2097): n is a, c, g, or t
  misc_feature (2101)..(2102): n is a, c, g, or t
ggcttatttaaacagcgaataaccaaagatgggcaggaggaagttgctgatgattggcttgagatgggcaatccctgggagattatttgaaatgatgtttcatatcctgtaaagttctatggcaaggttgtttcagggtcagatggtaaaaaacattggattggaggagaagatataaaagctgttgcacatgatgttcccataccaggatataaaactaagactacaatcaacttgagactttggtctacaaaagctgcatcggaagaatttgatttgtctgcttttaatgctggaaggcacactgaagcatctgaggctctagcaaatgctgaaaagatatgctatatactctaccctggggatgaatcaatagagggcaagatccttcgtctcaagcaacaatatactttatgttctgcttctcttcaagacatcattgctcgttttgagagaagatcagggacaaatgtgaattgggaagagtttcctgaaaaggttgcagtgcagatgaatgatacacacccaaccttgtgcatcccagaactgatgcgaatcttaatagatgttaagggcttaagttggaaggatgcttggaatattacacaaaggactgtagcatatacaaaccatactgttcttccggaggcattagagaaatggagcttggatcttatgcaaaaactgcttccacgccatattgagattatagaaatgattgatgaggagctgattcggaccataattgcagaatatggcacagagaattcagacttgctggagaaaaaattgaaggaaatgagaatactagaaaatgttgaattgcctgcagaatttgcagatatagtggttaagtccaaagaggccattgatattcctagtgaggagctgcaaagttctgaccaagcagaagtagaagaaagaagagttgcctgagccagtaccagaaccaccaaaattggttcgtatggcaaatctgtgtgtcgtaggtggtcatgcagtgaatggggttgcagagatacatagtgaaattgtaaaagatgaagttttcaatgcgttttataagttgtggcctgagaagttccaaaacaaaacaaatggtgtgacaccaaggagatggatcaggttctgcaatccagatctgagtaaaataataaccgagtggataggcactgaggattgggtcctaaatactggaaaattggcggagctacggaagtttgtagacaatgaggatctacaagtgcagtggagggaagcaaagaggagtaacaaagttaaagtggcagcattcatcagagaaaaagcagggtattctgtcagtcctgatgcaatgtttgacatccaggtgaagagaatccatgaatataagcgacaattattgaacatatttggaattgtttaccgatacaagaagatgaaagaaatgagtgctgcagaaaggaaagcaaattttgttcctagagtttgtatatttgggggaaaagcatttgctacatatgtgcaagccaagagaattgtgaaatttattacagatgttggggctacagtaaatcatgaccctgaaataggagatctacttaaggttgtttttgtccctgattataatgtcagtgttgccgagatgcttattccagcaagtgaattgtcacaacatatcagtactgctggaatggaggcaagtggaactagcaatatgaaatttgcaatgaatggctgcatattgattggaactttagatggggccaatgttgaaataagggaagangttggtgcagacaacttcttcctctttggtgccaaggctcatgaaattgcntggcctgaggaaanaaagagcanagggaaagtttgtgcctgatcccgatttgnanaanttaaacgaatttgccagaagtggcnttttttggatcttacancnntnnncnaattgntgggancccttanaanganatnaagggtnntgngtctannanaatcnttnncctngtagggaaagantttccncgctcccnnnaatgccnnnnganggtggngcncttnccccggccnnncttaaatngnctangctcntcnatntgngccccnccangggcntccnnctct

SEQ ID NO: 4242 - DNA, 1865 bp, Glycine max
gtcgaccgcgcggccgcttggatcttatgcagaaactgcttccacgccatattgagataatagaaatgattgacgaggagctggttcggaccataattgcagaatatggcacagaaaattcagacttgctggagaaaaaattgaaggaaatgagaatactagaaaatgtcgaattgactgcagaatttgcagatatactggttaagtccaaagaggccattgatattcctagtgaggagcagcaaagttctgaacaagcagaagcagaagacgaaaaagatgatgatgaagtggaagcagttgctaaaaagaatggaacagatgaaagttccattgaggatgagaaagaagagttgcctgagccagtaccagaaccaccaaaattggttcgtatggcaaatttgtgtgttgtgggtggtcatgcagtgaatggggttgcagagatacatagtgaaattgtaaaagatgatgttttcaatgcattttataagttgtggcccgagaagttccaaaacaaaacaaatggtgtgacaccaaggagatggatcaggttctgcaatccagatctgagtaaaataataaccgagtggataggtactgaggattgggtcctaaatactggaaaattggccgagctacggaagtttgtagacaatgaggatctacaagtgcagtggagggaagcaaagaggagtaacaaagttaaagttgcagcattcatcagagaaaaaacagggtattctgtcagtcctgatgcaatgtttgacatccaggtgaagagaatccatgaatataagcgacaattaatgaacatatttggaattgtttaccgatacaagaagatgaaagaaatgagtgcggcagaaagggaagcaaattttgttcctagagtttgtatatttgggggaaaagcatttgctacatatgtgcaagccaagagaattgtgaaatttattacagatgttggggctacagtaaatcatgaccctgaaataggagatctacttaaggttgtttttgtccctgattataatgtcagtgttgccgagatgcttattccagcaagtgaattgtcacaacatatcagtactgctggaatggaggcaagtggaactagcaatatgaaatttgcaatgaatggctgcatattgattggaactttagatggggccaatgttgaaataagggaagaggttggtgcagacaacttcttcctctttggtgccaaggctcatgaaattgctgggctgaggaaagaaagagcagagggaaagtttgtgcctgatccacgatttgaagaagttaaagaatttgtcagaagtggcatttttggatcttacaactatgacgaattgatgggatccttagaaggaaatgaaggttttggtcgagcagattatttccttgtagggaaagactttcccagctacatagaatgccaagagaaggttgatgaagcataccgtgaccaaactaaatggacaagaatgtcaatattgaacacagcaggttcatacaagtttagcagtgaccgcacgattcatgaatatgcccgagagatatggaacattgaaccagtccaattgccatagaggagtatagagaatcggtgccacgtggttgtgatgatcactgcatagcttaattcctcgtagcagagaataaaatataacttcgcgtagagacgcgctttaagggtgcgctcatagtcaaaataagcttgcagttctgtaatatatatgttttatgggtacttcgtcggtgtaaatcaaacctttgtcttataataataaatatcaaattgttttggcttcaaaaaaaaaaaaaaaaaaaaaaaaaaaaaagcggccgctctagaggatcca

SEQ ID NO: 4243 - DNA, 1477 bp, Glycine max
tacgtatgctcggatcagctacgtaggccccccccccctcaagttgcggcgtgtgggctttgtctgaactcagtgaaccacaccacacaacacagacgatttctcagtctcaatctcagtgttggagacttgatcttaagagaaatcatagtttgtttaatttcaattctgagcaaaggccaacatgcaagtttttcccagtgaaggcgaaagtgctttgtcagttgttggtccaaggccaatggaatggtctactgttccatacaatgcccctcaagctcctgggccaaatggaaagcagcggacctcaagtttagaatcaccaatcatgttgctgtcaggtcaccagagtgctatatataccatgaagttcaatccagcaggatcagtcgttgcatctggatctcatgacagggaaattttcctctggaatgtgcatggggattgcaagaacttcatggttctgaaaggtcacaagaatgcagttttagatcttcactggactacagacgggacacaaatagtctctgccagcccggacaaaacagtgagggcatgggatgtggaaacaggaaaacaaatcaaaaagatggtagaacatctctcatatgttaattcatgttgtccttcccgaaggggaccacctcttgtggtgagtggctctgatgacggaactgctaaattatgggatatgcgtcagaggggttccatccaaacattcccagataaataccagattacggctgttggcttctctgatgcatcggataagatcttcactggtggtattgataatgatgtaaagatttgggatttgcgtaaaggtgaagttaccatgacactacaaggtcatcaagatatgattactgctatgcaattgagtcctgatgggtcctaccttcttacaaatggcatggattgcaagctttgcatttgggatatgcgtccgtatgctccacaaaatcggtgtgtgaaggtgttggaagggcaccaacacaactttgaaaagaacttgttgaagtgtggttggtctcctgatggaagcaaggtaacagctggtagttctgatcgaatggtttacatctgggataccacttctcgccgcatcttgtataagcttcccggtcacaatggatctgttaatgagtgtgtttttcatcccaatgagcctattattggatcttgcagcagtgacaagcagatttatcttggggagatatgaagcacaacgtttaggaaatgaaatgagcatgttggtgcttttgaccaccattagggagtggtaaactttagaaatgctgaattccttctcttgtttcctggtcgatcaattcagtgactatataatgttcttgcaaaaatattatataatgttggtgcttttgtgatttgacgttcgtgagaatgcctccattcatccattctgaatttcaggtcaaaaaaaaaaaaaaaaaaaaagaaaaaaaaaaaaaaaaaa

SEQ ID NO: 4244 - DNA, 2602 bp, Glycine max
cccacgcgtccgccaattttcatggaacccctgtctctccctcctctcccagtcatggacgacgccgaagacccttcctccatttgggacttctcttacctcctcgacttcgacctcgacgaccaagatattattattaataacaacaactctctccccccgcccttcggcgcccgccccgctccaaacgagatccctcaaaacgacagggtccgaaagcgcgacccgaggctcacatgctccaacttcctcgctggtcgggtcccctgcgcctgccccgaactcgacgcgatactcgaggacgagggtttgcctggcaagaaacgcgcccgcaccgcgcgtgcatctgcatccgctcgctgccaggtccctgcctgcgaggtcgatatctcagagctgaaagggtatcaccgccgacacagggtttgcttgcgctgcgctaatgccgccaccgttatgctcaacggcgaggccaagagatactgccaacagtgtggaaagtttcacgttttgtcggatttcgacgagggtaaacggagctgtagaaggaagttagagcggcataacaccagaaggagaagaaagcctacggcggattctggaggggctactcatagtgaactacttcaacctgttgccgaaaacgaggaaaacaattatgatgtggaagctggaaaagattgttcgaatttgagtaccgatatcaacgacgttggagtgtctctggatcttgaagatgaaccggctcccattccgagctcggctcctgaagcccagaatattaatagtgatagtgttgtgtctttggctgtttctggtgaaacgcgagtgaatagtgggacccccgcccgcgcgccctcgtgtggggccgctcgggtacggctgcgagaagacgacagaaggggtcggatttcttttaagctttatgattggaatcctgcggaatttcctagaaggctacgacatcaaatattccaatggttggcaagtatgcctgtggagttggagggatatatccgccctgggtgtacgatcctgacaatttttattgcaatgcctaacatcatgtggataaatttactgaaagaccctttggagtatgtgcatgatattgttgctcctggaaagatgctatctggaagaggcactgcactagttcatctgaatgacatgatcttccgtgttatgaaagatggaacttctgtgacgaatgtcaaggtaaacatgcatgcaccgaagcttcactatgttcatcccacatactttgaggctggcaaacctatggagtttgttgcttgtggaagtaacttactgcagcctaagtttcggcttcttgtatcgttttctggaaagtatctgaaatgtgagtattgtgtgccttctccacatagctggactgaagacaacatttcttgtgcttttgacaatcagttatacaagatatatgttcctcatacagaggaaagtctctttgggcctgcatttattgaggtggagaatgaatctggtttatcaaactttattcctgtactcattggggataaaaaaatttgtactgaaatgaagacactgcaacaaaaattagatgtatctctcctttctaaacaatttcggtctgcatctggtggttctatctgtagctcatgcgaaacttttgcacttagtcacacatcatcatcagacttacttgtagatatagcatggttgcttaaggacaccacttcagaaaattttgacagagtgatgacagcttcacaaattcaaagatattgccatttgttggactttctgatatgcaatgattcaacaatcattttgggaaaaatattaccaaatttgataatcttgacagaaagcatgaaatccaatgttgtaattaataggacaagtgatgttgacataatgcaactcctgaatcacatacataatgctagaaatgccgtatatcagaaacatccgaaaagtgaaagtataattgtgcactctgaaatgaaaggctttatacttgctcagggctgctcccaagataacaagctatcagttgcaattaacagccagggtatccagtcgagagcagatgagaagtggggagtactgaaagtgaaaagtccaacttctaatgagaaaatggaaagaataccacttttgaagagggatattataatgagtatggaagagttgcctgaaagatacgggcgtcgatgtttgggcaggggattcttgacctttcggccagctatttttgtgttggtttcggttgctgtatgtcttggggtatgtgttgccgtccttcatcctggtagggttagtgagttagcagtatccgttagaaggtgtttgtttaactattagtatttttttgtacttgtcttcgagttggtacatatttgttgtaacactaaataaactggtgttattgggatgattaggtagtttattacattggaaagcttaatccaaggttgctaatttgtgcattaccaattttatcggatgtccagagggacttgcagttgcaggtgctgtgactgcaacgagtctgatcattaatagttaaaatttgtaattcatgttaccattattacaattgggtgtttatgct

SEQ ID NO: 4245 - DNA, 1878 bp, Glycine max
aacaccgtgttaaagagggaaattgcattcttacttgattttaaaatgggcaaccataatcgtgcccatacaatttcatgtatgactgaatggcattatagattcaaatcaggaggaggcttgattatggagcttatatgaaagaatacaaaacaaatcaatcatcatgtttcatttttgaggggtaaaatcatcattttttttttattctttttttctccccgcacttcagcaatagaaatacatctcagatggcacaaattaacgcataatggcattattaggtcattgacaaatctgtatcaatgaataagatattcatcccaaactgcatgcaaagtcaggtcaagctggctcttctaagagaatctccgaacagctcattcccaggcaaagacgggagaaactgtcaatttagaatagatgaacgtatctggaaaccttcatcaccttcagaaagcagcgggaatcttgtcaagaaattgccacaggtttgttcccaggtgggagtttacttagggtatcagtgtcagatactttggatggaggccagtagcgaaacatggacctaccaacaatgttctcaactgggagagggccccagttatgagaatcaaagctgttgttccgattgtctcccattacaaacacatatccttctggcacaaccattggatccatctcataagctagaggctctactacaaattgccgttcttcagcagcaccatttaccagtagtttcccatcacgcacctcaacagtgtccccagccttagccacaatcctctttataaacacatcagacgaactaaaaccaaactcctctaaacaaggaggcgctttaaaaatgactatatccgaaacatcaggctttctaaagaagaacgaaaccttctcggttagaacacggtcacctacttcaagagtagggtacatagaagaagagggaattgatcttggttcagccaaggacgatttaaagagcaaactaacagtaacagcagtgaacgcagccttcgcgtcttcggaacacacgttcatcaaccgcgaaagccaactagtcttggcaaaattggattcggtgtccgaaacgacgcgtcgcgtgccacctttgtcgacctcccaggaagtggtggggtcgggaacggactcgttgcaaggaagccacttcgaaccaggcaagaagggaacgatcgaagtggttttgaagggcgaaataccgaaaatacccgcagccgccgcggatgacccagacacacccgccgttgacttcatgatcgaaatcaggcccaatatgattgggctcttgcagccgtcgccgaggaactccccggtgagggtggagtaagtggactgggcccagcagttgggcttgggcccggcaaaattgcggactccgccggcggaggaatctagatccgtcttctgggtggcgccagagaggcgcgtacggatccagcattcctggacgcaacgcgaattggcgacgcgcacgccggcggaggaggcgaggctctgggcgacatagcccgaaaaggaaaaggttacacgaatagccatagcaaagaagttgattagtcggaggaataaaaggtacagggtgctttccgaggaggagatttgggagagggaaaaccctagcaagcgatcggaagcattttgaaagagggaatcagtgaagcgaagacgagagggttgaattgaagggtggagagggaaccggaggggggaatcgccggcgacgccacccccagaacgccggaagagagagggtttggtttgggaattgggggaagtgtgagaaggaagaaaccaaatgaaaacaaaaaaagtcgcaggaagtgggttttattaatatacggcggctctcgagcc

SEQ ID NO: 4246 - DNA, 948 bp, Glycine max
gagagagagaactagtctgtcgattccttggtccttggttccaggttaagcctttagtttgggtggaagcacaagttgaaaaacattcaaaaagccggatcgagattatggtaaaagctaggagtcaatttaaggaacgcagtactgccacaaatgttgagattgagttgcctgttcctgctgatgcaaccaatccaaatgttcggacttcaatgggatctgcatcatatgcacctgaaaaagatgcattaatctggaaaataagatcatttcctggaggaaaggagtacatgttaagggcagagtttcatcttcccagtatagtagatgaggaagcaactcctgagagaaaagctcctatacgtgtaaaatttgagataccatattttactgtgtctgggatacaggtaagatatttgaagattattgagaaaagtggttatcaggctcttccatgggtgagatacataacaatggctggagagtatgaactgaggctcatttgagatttgtgtctttgtttggtattcacaaaataattgtctcatttaacgatcgtggatggaagagggagtctttaatcgatttttggctgaccgcatcaaattataagttactcattgtctagaaagttgtcagctaaatctaagctagaaactcttgcaagtccctttggtcaaatctgttttgataggaaaaatgattggttcttcctcttcattctcaggccttttttgtaatcacaatctgtccatctttttctatcgtcttcaaattgtagtctgatcttcattttacagagaattctagggttttgtataattggtcaaattgtagtctgaccaattatagatagggaaataattgtccctcaaccatgtatgcacgataaaatatacatgtatttttcaaatatctattcacagttttacagataaaaaacaaaaa

SEQ ID NO: 4247 - DNA, 2340 bp, Glycine max
acgcggactactttctgagacaacgacgacgttgtatagcagtccttcttcttctttctgtgttgacggtggcgttgatctgattggaattcaggatcaatggcaggggcagcctctgctctgttcctcctcgacatcaaaggccgcgtcctcatctggcgcgactaccgcggcgacgtctccgccctcgacgccgaacgcttcttcaccaaactcatcgaaaaacaggccgatccgcaagctcaagatccggttgtgcacgacaacggcgtgacctacatgttcatccagcacagcaacgtctacctcatgatagccaccagacataactgcaatgccgccagcctcctctttttcctgcaccgcatcgtcgatgtgtttaagcactactttgaagaattggaagaggaatcgcttcgggacaatttcgtcgtcgtgtatgagctacttgatgagattatggactttggctaccctcagtacaccgaggcgcagattcttagtgagtttattaagactgatgcttatagaatggaagttacgcagagacctcccatggctgtgactaatgccgtgtcgtggcgcagcgaagggataaactataagaaaaatgaggttttcttggatgtggtggagagtgttaatatacttgtcaatagcaatggacaaataattagatctgacgtcgttggggctttgaagatgagaacgtatttgagtggtatgcctgagtgcaaacttggtttaaatgatagagtattgttagaggcgcaaggtagaacaaccaagggaaaggctattgacttggaagacataaaatttcatcagtgtgtgcgtttggctcgatttgaaaacgatcgaacaatttcctttataccacctgatggatcgtttgatttgatgacatacaggctcagtacacaggttaagcctttaatttgggtggaagcaaatgttgaaaagcattcaaagagtcggattgagattatggtaaaagctaggagtcaatttaaggaacgtagcactgccacaaacgttgagattgagttgcctgtgcctgttgatgcaaccaatcctaatgttcgaacttcaatgggatctgcatcatatgcacccgaaaaagatgcgttaatctggaaaattagatccttccccggaggcaaggagtatatgttaagagcagagtttcatcttcccagtataacagatgaggaagcaactcctgagagaaaagctcctatacgtgtgaaatttgaaataccatattttactgtttctggaatacaggtaagatatttgaagattattgagaaaagtgggtatcaggctcttccatgggtgagatacataacgatggctggagagtatgaattgaggcttatttaagaatttgtatctttctttggtgctggaattccaccaaataatcgtgccaacttccatgatcaatggttttaaactggtggatgggagagggactcttgagtaaaattagagtttatttggcctgatcatatctcctcttgcgtcatgatagttttggcaacagatcgtaaattgctcattgtccgtaaagttcataacttcaagtcaggaattggcaagtgtaaggctgtatcttctgtgtaagtcctttttgttcaaatctgtttgttgggaaaatgtctgatttttttttcctcttgttttcttttcttttatttacgatctgtcaatctttgccattgtcttcaatttgatttatttgtaagagaattattagcttttgtattactaagattgaatattttccccatctttatttgtattcataacctgacccatcttgtgtattaatatggtgccatatccctccctttctgaacaaaaaccatgtatttttttaccattcattcaaaaagttgattgcaggtcaatggcagaaaagaaaaaaaaaaaaaaaaaaaaaaaaaaaaaaaaccaaaaaaaaaaaaaaaaaagcttatcgaatcccgtccaacctcgaggggggggcccggtaccccaattccgccctaaagtggatccgattaacccgggtttacttggccgcctttttaaaacctcgtggatgggaaaaaaccctggcggttacccaaatttatatccctttggaaaaaattcccccttttccccagttgggggaaaaaagaaaagagccccccacccctatcgccctttcccaaaattttcccacaccttgaaggggaaagggaaatttttaacgcgtttaattttttttgtaaaattccccgataaatttttttgttaaaccccgcctctttttttttacaccaaaggccgaaaatcgcggaaattccc

SEQ ID NO: 4248 - DNA, 1985 bp, Glycine max
acctcgtactcgcgctccggagtttcaaccccgcagaccgaatcgaatcctccaacatacgtttccaacgatagatagacaaaacaaaatccgaagctccaaaattcctcctaagtgcagtaaccgaaacccaatgacccacctagccatggtttggcttcaaacatggctccctgaaccctagcgtttctccctcttcgccaacaacgctgatccgatcccgatctgtttctgattccgatccgatccaatccaatggctggggcagcctctgctctgttcctccttgacatcaaaggccgcgtcctcatctggcgcgactaccgcggtgacgtcaccgccgtcgaagctgaacgcttcttcaccaaactcatcgaaaaagagggggatccgcagtctcaagatccggttgtgtatgataatggtgtgacctacttgtttatacagcatagcaatgttttcctcatgatggctaccagacaaaactgcaatgctgctagcctccttttcttcctacaccgtatcgttgacgtgtttaagcattattttgaagaattggaagaggagtctcttagggataactttgttgttgtgtatgaattacttgatgaaataatggactttggctacccgcaatacactgaggcaaagattcttagtgagtttatcaagacggatgcctatagaatggaagttacacagagacctcccatggctgtgacaaatgctgtatcctggcgcagtgaagggataaactacaagaaaaatgaggttttcttggatgtggtggagagtgttaacatacttgtcaatagcaatggacaaataattaggtctgatgttgttggggcattgaagatgagaacatatctgagtggtatgcctgagtgtaaacttggattaaatgatagagtattattagaggcacaaggtagaacaaccaagggaaaatcaattgacttggaagacatcaaatttcatcagtgtgtgcgtttggcccgatttgagaatgatcgaacgatttcatttatccctcctgatggatcatttgatttaatgacatataggctcagtacacaggttaagcctttagtttgggtggaagcacaagttgaaaaacattcaaaaagccggatcgagattatggtaaaagctaggagtcaatttaaggaacgcagtactgccacaaatgttgagattgagttgcctgttcctgctgatgcaaccaatccaaatgttcggacttcaatgggatctgcatcatatgcacctgaaaaagatgcattaatctggaaaataagatcatttcctggaggaaaggagtacatgttaagggcagagtttcatcttcccagtatagtagatgaggaagcaactcctgagagaaaagctcctatacgtgtaaaatttgagataccatattttactgtgtctgggatacaggtaagatatttgaagattattgagaaaagtgggtatcaggctcttccatgggtgagatacataacaatggctggagagtatgaactgaggctaatttgagatttgtgtccttgtttggtattcacaaaataaatgtgtcattccgtgatcgtggatggaagagggagtctcgagtcattaattttttaccaaccccatatgagttactaattgtctagaaagttgttgcagctgaaaattctgagttggaaagtgtgagccgaaactcttgcaagtcccttcggtcaaatctgttttgattgggaaaatgattcgttctccctcttcatttttaggccttttttgtaatcacaatgtgtcgatctttttccaacgtcttcaaattgtaatctgatatacattttaaagagaatcatagggttttgtattagcaagtaaatgatttctacagacaaattatagatagggaataattgtccctcagccatgtatgaacgacaaatttttaaatatttattcacagttttacagataaatgcata

SEQ ID NO: 4249 - DNA, 2176 bp, Glycine max
gaaaggtccagactcttctagacattaaatacctctccgaaggaagccaaccgaccaaacaacaataaaatgaagaaagaaaaaactctgcattcaattcgattgattcacaaattgcaactccttctcggcttttcctaatcagcacgaacacaacacaaacacaaacacagagagagacatggattttgaactgagaagagcgagagagaagctagagaaagagcagagggagaggaaggaaagagcaagactgaaacttcagaaggaaaagaaggccaaagaagaggctcagaagcaaaaggaagccatcgaagctgttcaaagatctcgtcgtattgatgccgcccaagctcaactcaaggctgcccaacagatgcaagaaaacctacttgctggcagaggaatagtgttttaccgactactagaggcttttttttatgaaggcggtggagataagatcaagctacctccttcttgctttgcagaactgtctgagcagggtacttttgataagagacagggacccttatactttcagttgtcgttagttcatgaagaaagcacttcaagcatccaaactactgataaagtgaaacaggggaggaccacccattctggagttttagaattcactgctgatgaaggttcagtgggtcttcctcctcatgtatggaataatttgttttctgaaggcactccaaaacctcccttagttgaagtccgctatgtttggcttccaaaagggacatatgcaaaacttcaacctgaaagagtaggattttccgacttgcccaatcataaggctatcctcgaaacatgtcttcggcagcatgctactctttctcaaggtgacattttaactgtaaactatggagaacttgcttacaaattaagggtccttgagttaaaaccttcttcaagcgtatctgttttagaaacagatattgaagttgacatagttgatcctgatacatcttcagaaaagacagatgagcatgttttaatgccacttgtattcggaatgtcacaaattggaacagtagaagaaggaaagtttgtgtattacaaattttccgtagacaatgtaacttgggagaaactttcttctgggaattcttgtgttgagttaaaattagaatcagagacagatgggggggacactgatcttttcatctccagacatcctctcatatttcctacacgacaccagcatgagtggtcttctcatgatattggctcaaagactttgattcttagctctaaagataaaaacatgggtgcagggacttacagcattggtgtatatggcttcaagggaattaccaggtataaaatatcagttgtggtccaggataacttcaaccaaaatgttggtcagcaagcatcatcttccgtgtcatctatggaactggacactgaacaatgtaggaactgcaagcattatatacccagtaggactattgcactacatgaagcttactgtagcaggcacaatgttgtttgtcagcatgctggctgtggagttgttcttaggattgaggagtccaagaaccacattcactgtgacagatgtgatcaggcgttccagcaggtagaattagaaaagcacatgaaagtttttcatgagccacttcactgcccttgtggaataatcctcgagaaagagcaaatggtggagcatcaagcttcagtttgtcccctgcgtcttattacttgccggttttgtggtgatatggttcaagctgggagttctgccatggatgtccgtgacagattaagaggattgtctgaacatgagagtatttgcggttctaggactgccccctgtgattcttgtgggcgttctgtgatgttgaaggacatggacattcaccaggttgctgttcatcaaaaaggctaattctgatattttcatcttaacagcaacttgtgaaagattgcatctaggtaataaatagaaaattaaaagaaactggaggaaattgaaagatacaagcagattgatggtggagcagaaacatctctatgttctactgtggacaactggctggatatatcaccctgttgttgatcttgtcattcattatgtatgaaattatgattatgaatttaagattgtgatttacctcgctatttcgttatggaaattgtttggtttgtggtaaaaaaaacc

SEQ ID NO: 4250 - DNA, 2771 bp, Glycine max
ctctctctctctctctaaggcctaagctaccaggagctccctatctacagtgtttccctctctttctctctctctctctctgcaaaagctacgaagctgtgttctgatccttcaaattaggttgtttgctttttttggggagttaaatggatgctaggccgtggatttggtcaatttgatctcaattgaaattttttagtatttctgatggactcgaaaactagttctagagctctcccaaaacaccatcagaagacggctgggattcaaacccttgaggcaaaagacacagggtcttctttgcagaagggggagaaaacagagctggctgctcctgtggatttgtctatgtatgcagcgaacgcatccaagcagaataccggggaaactgctgaaatcaagaagttaggaggtttaaccctaaaggggtctgctgattccatgagcattaaaagtggttctggtgcttcctcatctgttctcgacaaagtagttcatgctgctaatgagaacataggctcacaggaaagctctattgatctagacaaaaagacgtcggaagatggaagtgtgaagaacagttctgtttctgccaaagttagtgatggggccagcagtcttgcaaagacaagtggaagtgccaagatcagcaaccgggctgattttgttgagagtggtaagagcagtatttgcagaggaagcacaagcagtgatgtgagtgatgagagtacttgtagtagctttagtagcagcataaacaaacctcacaaggctaatgacttgagatgggaagctatccaagcagttcgaagtagagatggggtgttgggtttaggtcactttagattactgaagaggctgggttgtggggatattggcagcgtttacctctccgagttgagtggaactaaatgttactttgcaatgaaaggtaatggacaaagggtcccttgcaagtcgtaaaaagctacttcgtgctcagacagaacgagaaattctgcagtctctagatcacccttttctcccaactttgtacacccattttgagacagagaagttctcatgcttggttatggaattctgcccaggtggtgacctccatactcttaggcagaagcaaccagggaagcattttcctgagcaggcagtaaaattttatgtggcagaggtcctactggctttggagtatcttcacatgcttgggattgtctaccgtgaccttaagccagaaaatgttcttgttagggatgatggacatattatgctctctgactttgacctctccctccgatgtgctgttagtccgaccctcgttaaaacctcgtccacagattctgagcctttaagaaagaatgctgtttactgtgtccaacctgcatgtattgagccaccttcctgcatccaaccatcctgtgttgctcctactacatgcttttcaccccggcttttctctagcaaatcaaagaaagacaggaagccaaaaaatgaaatcggcaaccaagtgagtccgttacctgagctcattgcagagcctaccgatgcccggtccatgtcatttgttggaactcacgaatacttggcaccggagatcattaagggtgaaggtcatgggagtgcagttgattggtggacttttgggatctttctatatgagctgttgttcggtaaaacgcctttcaagggatccggtaaccgagctacattgtttaacgttgtcggtcagccactgcggtttccagaagcacccgttgtgagttttgcggcaagggatcttataagggggttgcttgtaaaggaacctcagcacagattggcatataaaagaggcgctactgagatcaagcaacaccccttttttgaaggtgtgaattgggcattgatcagatgtgctaccccacccgagatccccaaggctgtagagtttgagaagataccctcaccagcttcatcaagtggtggtgaaaaggctgttaaccatatgtcaatagctaatcagaaaggttctgataattatctggagtttgatttcttctagagagagggtagagacaatatattgattgcaaatggtttctgttaagagggggaggaactgtttttcaatgtttcaggaacagatatgatgaggaattgtatgtttgtttttgttggctatttgcagtttcaaatttgtatggcataattaatgcatagcttctctgtcatctcaaaaaaaggcttataaaaacaacatttcaacactgcctgccaatgcactactaggaattccaaccagccaatggtggtgatgatgctcttaaggtcccaatggtattggtaagtatgtaattgtggaaaatggagcacatgggcatcaaacaaaatgaagatttagtatatttttatttgctttgtaaacaagtgtcatgtcatcacaaaaggacttttttccgcttagaaattcaccattgcctgaatgcactgtcatagaatctaaatccaaaaatcaattaaaatgcagaattagtctgtttatgtgtttttatttatttgttatggcaatataattagtaagatttttctttccatgagcattactattggtcgttggacactgtaggattacgtttagttgagaaatttgtatcctctcctcttggtaaagttcctccaagggatgaatgtaatgtaagacattcttagctaattgaacgttttattttagacagtataagcttatccagccaaaccccgatctgtgattggatactgtaaatttgtacattgacatt

SEQ ID NO: 4251 - DNA, 2207 bp, Glycine max
cccacgccctcgcgcccgctctctaagctaccagtaccaggagctccctatctacagtgtctctctctctctgcaaaagcaacgaagctgtgttctgatccttcaaattaggttgtttgttatttttggagacttaaatggatgctaagccgtggattaggtcaatttgatctcaactgaaactttttagcatttctgatggactcgaaaactagttctagatctctcccgaaacaccatcagaagacagctgggattcgaacccctgagacgaaagatgcagggtcttcttttcagaagatggggaaaacggagctggctgctcctgtggatttattgaagtctgcagcgaacgcatccaagcagaatactggggaaacggccgaaatcaagaagttaggaggtttaaccctaaaggggtctgctgattccttgagcaataaaagtggttctggtgcttcctcatatgttctcgacaaatctgttcgtgctgctaatgagaatataggctcacaggagagccctatcgatcaagacaaaaagacgtccgaagacggaagtgtgaagaacagttctgtttctgccaaagttagtgatggggccagcagtcttgcaaagacaagtgggagtgccaagatcagcaaccgagctgattttgttgagagtggtaagagcagtatttgcagaggaagcacaagcagtgatgtgagtgatgagagtacttgtagtagctttagtagcaccataaacaaacctcacaaggcaaatgacttgagatgggaagctatccaagcagttcgaagtagagatggggtgttgggtttaggtcactttagattactgaagaggctgggttgtggggatattggcagtgtttacctctccgagttgagtggaactaaatgttactttgcaatgaaggtaatggacaaagggtctctagcaagtcgtaaaaagctacttcgtgctcagacagaacgagaaattctgcagtctcttgatcacccttttctcccaactttgtacacccattttgagacagaaaaattctcatgcttggttatggaattctgcccaggtggtgacctccatactcttaggcagaagcaaccagggaagcattttcctgagcaggcagtaaaattttatgtggcagaggtcctactggctttggagtatcttcacatgcttgggattgtctaccgtgaccttaagccagaaaatgtccttgttcgggatgacggacatattatgctgtctgactttgacctctccctccgatgtgctgttagtccgacccttgttaaaacctcatccacggattccgagcctttaagaaagaattctgcttactgtgtccaacctgcatgtattgagcccccttcctgcatccagccatcctgtgttgctcctactacgtgcttttcaccccggctcttctctagcaaatcaaagaaagaccggaagccgaaaactgaaattggtaaccaagtgagtccgttacctgagctcattgcagagcctacggatgctcggtccatgtcatttgttggaactcacgagtacttggcaccggagatcattaagggtgaaggtcacgggagtgcggttgattggtggactttcgggatctttctatacgagctgttgttcggtaaaacacctttcaagggatccggtaaccgagctacgttgtttaacgtggtcggtcagccactgcgatttccagaagcacccgttgtgagttttgcagcaagggatcttataagagggttgcttgtaaaggaacctcagcacagattggcttacaaaagaggcgctaccgagatcaagcaacaccctttttttgaaggtgtgaattgggcattgatcagatgtgccaccccacccgagatccccaaggctgtagagtttgagaagataccctcaccagcttcatcaagtggtggtgaaaaggctgctaaccatatctcaatagctaatcagaaaggttctgataattatctggagtttgatttcttctagagagagagagagagagggtggagacaatatattgattgcaaatggtttctgttaaagagggggaggaactgtttttcaatgtttcaggaacagatatgatatgatgaggaattgtatgtttgtttttgttggctaatttacagtttcaaatttgtatggcaaaataaaggaagaaggaagag

SEQ ID NO: 4252 - DNA, 1240 bp, Glycine max
gaccctctcggttgaacaatccacacccaacattctcacaagtcacagccaaacaccatttcattaattcttgcagaatattgcttagttttgttttatctgaatttggaaacagcttttgaatggctttttcaagagttgcactgctaatatgcacggtcgggtattttgtgattgcctctgccggcaatttccaccaagattttgatatcacatggggagatggtcgggctaagatactcaacaatggagagcttctcactctgtcacttgacaaagcctctggctcgggtttccaatccaagaacgaatacctttttggcaaaattgacatgcaactcaaactagtccctggcaactctgctggcaccgtcactgcctactatttgtcttcaaaaggagcgacatgggatgagattgactttgaattcttgggcaatttgagcggcgacccatacatccttcacaccaacgtgtttagccaaggcaagggaaatagggagcaacaattctacctctggtttgacccaactgcagattttcacacctattccatcctatggaaccctcaacgtattgtcttctcagtggatggaagtccaattagggagttcaagaacatggagtcaaagggtgttccattccccaagaaccaggcaatgaggatatactcaagcctgtggaatgcagatgattgggccacaaggggaggtcttgttaagacagattggacacaggctcctttcacagcttcttacagaaacttcaatgccaatgcctgcactatgtcctccggaacttcatcttgcggttcaaacaacccttcctcttctaacaataatgtttggctctcagaagagttggattcaactgatcaggagaggctcaagtgggtgcagaagaattacatgatctacaattactgctctgacactcaaagatttccacagggccttccttcagagtgcaacacagcctaaagatatttagtttccctgtggattgatccagactccaattttcggctctctttggagtttcctttttttcttttcttttgtaattttcataatgataaattctttgattctttcttgaaattcttgttatatagtgttcaattcaagtggttcatattcagcaaaaacattcaaatgttttactctttctttttgaattttccttgaagacgtgcgttagatacaagagttgtgctttgcgaaaaaaaaaaaaaaaaaaa

SEQ ID NO: 4253 - DNA, 1295 bp, Glycine max
tcgagccgcctccgtggcccccccccccccagtgcccattgcatcaaaatctggaattcttcaaggaatgatctcatctgatgagcagatgaagaaaatgattgtagcctttttattagcttaactgccggattcaatttatttcttaaaagaggatgcagtgctaagttgccttgctatgtcttacagaaaaaaatcatgaaatagggttcaagctaattgttgctttttattttactatttcatgtgccatgttcgttgagtttttcatgctattggttgttcctttgctgtgcatgttgaaaagtattttgatgtccagtcattaaaatgaccacattccctctgaatgctgattttttgaattatagcctttgagtctgttgtgtcttgaagatggacaagcataacatctttgacttgcttaaatcatgataacttgcataatttgaaattaaagatgttaagatccacatatttacttttgtgatattgctaacttcataattggtgttccgaattgttttttacagataagatggtggagtatcctctgcaatatagggagaaagggagcatagcttgtgatgctgatgtagagggtcaggaacaccgaaaagtgtcattgcaacgatatcttgaaaagcgtaaggacaggggaagattgaaaggcaagaaattgactgggataacttcatctaacttcgagatgtatttgaaccttccagtgaaggtccattcctcaaatgggaattcaagccgtagcagtactagctctccaccacaacctagactgcctctagtttccagtggttcagatcagctaaaggttgcccttcccattgatctcaatgacaaagatgttcaagaatgctaaaattcaaactagatagattatgcagagttgggactcgtagatgattgaagagagatgacgaaagtattataactgaagagaccatagcgtctagcagcctactgcaagaattggattgctcttagactggtcaattttagtatatttaactgtttgggcaaatttcttttgtttaggatagtggagtgtcctgcctacctgatcaattttgtaatctaatttcatccttcgggaatatcttgttactgaagttttaaggttttatgagttgaaatgtagagccaggagcagctattttcccaggaatatatgatatgtaaattcatcggcgctgcctcttgttaaatgttaatagcttttgggcaaagcccaaccactctcttactcttcttctatcttatgtttgttcactctagcc

SEQ ID NO: 4254 - DNA, 758 bp, Glycine max
acgagggaataaccaattgttcagcaattctgtaaatgactaaatgcttgcttgtcattgtggagggttttcgtttttttaaaaaaaaaaaaaaaaaacgcgagactagttctctcctcgagttttttttttttttttttaagagacaattgagagttgtttatttgattaaagaactatatataaaagtacattcagatgaactcaatcgttatgcgttgtgagaaaaaatttaaatgttggcaagggtttggatttggtcctcaaatgaccaaattctttatcacaaaaataaaactaaaaccaacaaggaaccaagcaattacaaacttcaacttttgtttcaggccattcaaattttaactcgatcgccaaggattttctccataataaaaggcagtgccaaccatgagcgccactgttgcaccttggacaaccacacgagccctcattaacttctggcctaactgagaattaccttgtctaaaactgattaagccagccgttagcacaccagcagtaacaagtgcaccaatggggacaaaagggttccgaactcgcttcttctcttcttggagataatcttcagccatgttgagcagaaaagaaagcaaggttgaagttgaaccctaattggagaaccaagaagaagatagatggcacgaaatcaatatatggaaattaatggcggtggggtcggtgcttggacaatgctctgccacatacctgataatattaatagcagcatatatatgagg

SEQ ID NO: 4255 - DNA, 733 bp, Glycine max
  misc_feature (703)..(703): n is a, c, g, or t
tatcgagccgaaccgattcgtagccaattcttattctttttctctctttctctctgcttgcggtgcttcacaagccaaatctaacttgtctctgttttctccgatctagtactactatcaatggccggaaaaggagatggtcctgctatcggaatcgatctcggcaccacctactcctgcgtcggagtgtggcagcacgaccgtgtcgaaatcatcgccaatgaccagggtaacagaaccacgccgtcttacgtcgctttcactgattccgagcgtttgatcggtgacgccgccaagaaccaggtcgccatgaaccccgtcaacaccgtcttcgatgctaagcgtttgattggaaggagattttctgatgcctccgttcagagtgacatgaagctatggccatttaaggtcatccctggtcctgctgacaaacctatgattgtggtcaactacaagggtgaggacaagcagttctccgctgaggaaatttcttccatggttctcatgaagatgcgtgagattgccgaggcttatctcggttccacagtgaagaatgccgtggtcactgttcccgcttacttcaatgactcccagcgtcaggccacgaaggatgctgggagtcattgcgggtctcaatgtcatgcgtatcatcaatgaacccaccgctgctgccattgcttacgggtcttgacaagaaggccancaggtgtgggtgagaagaacgtgttgattt

SEQ ID NO: 4256 - DNA, 1608 bp, Glycine max
gtacctcatattgattgattcccctttatactccaacaacaccctcttctcgcgttgtctccaaagcacgccaaattacccacacgcaaacgacaacaaccgcgcgcgtttcacacctccataactcggagtagcatacgcagcgtcgttgactcgcaactcgtaacttggcctcgcgcgccgatggcgtcggtccccagcaccgtcgctccccgcaccttcctgccgtcgattcccaagccgagagctcctcttcacgccgcgaaatccgtcgccagcgccgcgcgcaacttcccgagactttcgcacaacctcattctctccggaaacaaacgcgcggtggcggtgaactcggcgtcggaggagttcgacgtgatatcggtgcagagcgaggacattaccgaccagcaggagggcgtcgtggtgagccgcgtcgagatggaaggtggagacggcgaattggcgacgcaggtgagccgattcggcgcgaacgagggtttgctgtcgttggaagggttttcttcttcgtcttcgccgtcgtcttcgtctctgatcgggagtgagagcgtggacatggagaagctaattgatagaactatcaatgctacgattgtgctcgcagctggcactttcgccgtcaccaaacttctcaccattgatagtgattactggcacggatggacgctatatgagatactaagatatgcacctcagcataactggtctgcttacgaggaagctcttaagacaaatcctgttcttgccaagatgatgattagtgggattgtttactccttaggggactggattgcgcagtgcgttgaaggaaaacctctgtttgagtttgaccgtgcgcggatgttcagatcggggcttgttggttttactcttcatggttctctttctcatttctattatcagttttgcgaggagctatttccttacaaagaatggtgggtagtacctgccaaagttgccttcgatcaaactgcatggtctgcactttggaacagcatatattatactgttgttgcattactgcgtcttgatcctcctatgagtattttaaatgaattgaaggcaacgtttttccccatgttgacggccggatggaagctatggccatttgcccatctcattacttatggtgtgataccggttgaacaaagactcctctgggtggataccattgagcttatttgggtgaccatactttccacattttcaaatgaaaaatcagaagcaagaaactctcagtctatggtgccttcagaggtgaaatccaccacatatgttcatcctcctgaggagtaacgagtggagatatgaccagaagcagtgggagaaaaatgactttgctaaatcaaattttgtccttgatatggacatagatttttgatgcggaatgtgaaaaagctaattatatatacgttgcatcccgcggaaattcatgtatgttaggtaacatcaactttccagtaaacagtacacataatgtaattaaatttaatgagtaaataatttatgtccaaacttgccttccaataattataatcttatgtgttaaaatttttgtcaataaaaaattaataattgatatttatcaat

SEQ ID NO: 4257 - DNA, 1104 bp, Glycine max
tcagttgtactaaacactccttgtctcccctgaccctcagttttgccttttttgtgaaaaagtgtctacagagaacaaaacagaacggaacagagagagagaggagcttctctacttgactttctggagagacatggagggtgcaaactggaggataacagatgaagaagcagggccatcctcttcttctgggattgcttcaactaaacaacaaaacccacctgaaacttttcatcataggaaggaggcagaagaagaagaagaaaccgaggaagaggaagaagaagacgtttgtcagcataaaaatatcacctttgttcctggtcctctcctttctctcaaggatcagatcgaaaaagacaaggaggatgagagcctaaggagatggaaagagaagctgttaggatgcatggaaagtgatttggatggtcagatacatcctgaagtgaaattccattccattggaataatctctgaggattttggtgaagttattacttctttatctgtggatgaaagccaaaatggtcatattctgtttactctcagggagggctctcattatcagcttaaggctcaaattcagtgttctgcacaacatcgtgtctggcttgacatactgcaacactgtgtggaaaggagggcttcaagttgaccagagcaaaggaatgttgggtacctttgctccccaaaaagaaccatatgtacatgccttaaaagaggacatcactccatctggtgtgcttgcaaggggtgtatactctgctaagattaagtttgaagatgatgacagaaggtgtcacatggaactcaaatattcgttagagataaagaagaggtagtccgggtttatggcacattgtgacattcatcatgcatcttttttgtatttttgaattctttttataattttgaaactatttgttaattatgctattcagtactcaaattttcatttaaaaaaaaaaaaaaaaaattttattttgcttgctaatcatacaaaatggttgttttgccgttggcaagtcatgttcaaagccataacatttgtacgcaaacatgagttttcaaagctctaaggaaatgttaaattcagcatttgtg

SEQ ID NO: 4258 - DNA, 1566 bp, Glycine max
  misc_feature (1563)..(1565): n is a, c, g, or t
tcgagtcagctacgtagggccccccctcgatcagctacgtaggccccccccccccaattgcatttgtgttgagtttcttcttctgttgcgttgtgtgtgagtgtgggcacggtaagatgcagaccattgctaggcgcttagggcagcaatcgctgaggccatcgacgtcgctcaagtccatctatccaatttccgatcaccattatggaatggatcacgagcgttacgtttctaccctcgccaccaagggagttggtcacctcgttcgtaagggcactggtggacgatcctccgtcagtggcattattgctacagtatttggggcaactggattcttaggtcgttatgttgtccaacaacttgctaaaatgggatctcaagtcctagttcctttccgaggctctgaagataatccccgtcatctcaaattgatgggggatttgggacagattgtacccatgaaatacaatccaagggatgaaagttcagtaaaagctgtgatggctaaggccaatgttgttatcaaccttattggaagggattatgagacaagaaactacagctttgaagaagtgcactatcacatggctgagcaactagcaaagatttccaaagagcatggtggtatcctgagatttattcaagtttcttgtttaggtgcatctccttcatctccatctaggatgctcagaactaaatcagctgctgaggaaatgattttaagggaactacctgaggccacaatcttgaaacctgctgtaatgattggtacagaggatcggattttgaatccatgggctcattttgctaaaaagtatggctttcttccgttgtttggagatgggagcacaaagatccaacctgtttatgttattgatgttgctgctgcactcacttcactcttgaaggatgatggcactagcatgggaaaaatttatgaactgggtggtccagagatctttactgtgcatgaattggcagacgttatgtttgatacaattcgagaatggcctcgatatgtgaaggtgcctttccccattgcaaaggcattggcaacaccaagagaaatattactaaacaaggtcccctttccactacctgttcctgagatattaaatctggataagatccaggctttgactacagataccgttgtttcagaaaatgctttgactttcaatgatcttggaattgttcctcacaagctgaagggataccctattgagtttcttatctcatataggaaaggaggcccacaatttggttctactatcagtgaaagggtcactccagattcttggccgtaagattctttggatgtttgatcctgaatcatttttctgtcttgcttgtactaccaccatttaatttcactatttaaaaaaatctgaaatgcttttatatcttcctttcataatctgtagaatatgtgatcatggttgatgatgataataaaatccagatacttgttgatttccgaacgtagacgtctttggatcaaattcaatgtcattctatacgatataaaaaaaagacacattaccaaaaaaagtgttctctttnnnc

SEQ ID NO: 4259 - DNA, 1341 bp, Glycine max
  misc_feature (1211)..(1211): n is a, c, g, or t
  misc_feature (1228)..(1230): n is a, c, g, or t
  misc_feature (1259)..(1259): n is a, c, g, or t
  misc_feature (1262)..(1262): n is a, c, g, or t
cgagccttcattctctctctgtatatctctatatatacatgtggttgtagttgtagtcgtacggctgcgagaagacgacagaagggggttgcgtgtgtgcgtgacgacaaaagcaaaaggaaagaatatcaacaaggtaaagtagattccttactagacatggcgttgaaggacacattctacatatctcatggatcaccaactttgtccatagatgaatccattcaggccaggaagttccttcagtcatggaagaaggacgtgtttcctcaaagaccctcttcaattcttgtcatctctggtcattgggaaaccgcagttcccacggtcaacgtcgttgactccatcaacgacaccatctacgatttctatggcttccccaaacaaatgtaccagcttaaatatcctgcacctggagctccacaattggcaaggagggtgaaggaactactcaagaaatctggtttcagccatgttgatgaagatacaaagcgaggacttgaccatggtgcttgggttcctctctttttgatgtatccagaagctgacatccctgtttgtcagatatctattcaatctcagcaagatggaacttatcattataacttaggaaaggcattggcccctcttaaagatgaaggtgtattgatcatgggttctgggagtgctgttcacaacttgagagcacttgagcctcactccactgttgctccctgggctctagagtttgataattggttgaaagatgctcttcttgaaggaagatatgaagatgtaaatcattatgagcagaaagcaccacatgcaaaaaaggctcatccctggccggatcacttttatccgctgcacgttgctattggtgctgctggtgaagatgcaaaggccaaacttatccacagcagtattgaattgggcagtctctcttatgcctcttaccagtttacatcagccgctagctgaatttcttaatacagaatagcttctgttcagttgcataccctggctcaaaacacagttattcaatatttatgaagatgtttggcttgctagtttaggcttatgtttctgtggtatattgcgaagaattgacttgtaataaattaattgctgttaataaatgaagtttattttgaggaaaaaaaaaaaaaaaaaaataaaaaaaattaaaaaaaaaaaaaaaaaaaaaaaaaaaaaaaaaaaaaaaaaaaaanaaatacataaaaaaaannnaaaaaaaaaatataaaaaaaaataaaaanaanaaaaaaagggggggcgtgtttaaaggatcaaggtttccgtccccggggttggaaagtttttttttttttaaggggaacc

SEQ ID NO: 4260 - DNA, 2217 bp, Glycine max
tcgagcagctacgtaggccccccccccgcgaacaaacgaagagtgcaagtgtccgcaaagccgttactcttactcatcacatgaacccctaaatcctaattgctttgttttcccccaattcccaatggcgaacgactcgtcgtttttgttcgccggcattcgtttcgatagaaagaagttcggcgccgatattgccaggttccagaaaaaagacagtgatactgattcggcgatgattttgagcgccgccgaagacgaaggcgagaaaacaatagaacctctggaagaagagaaagtcgcggcgtcaacgacgaagaagaggaagcgcaagggaacctcttccgaaacggtcgaaggattcaatgtgttcagaagttcgacgtctgtggcgcagtcgaatgatgaagtccgagtcattgaggagtccgttgagctgtataataataataagaaggaacaaaataagcaactcgagcgggacgcaatattcagaaagcaacacaacattcatgtctctggttataacgtgccgtctccgcttcaaagctttgatgagttgaaatcaagatataactgtccttcatatttgttgcgcaatctgaaggaacttggatttagagaaccaacacctatccaaaggcaggctataccagtacttttacaaggtcgtgaatgctttgcttgtgcaccaactggctctgggaaaacccgtgcgtttgtgtggccaatgcttatgaagcttaaggatccggaaaaaggcagcattcgagctgtgatcctttgtcatactcgtgaattatctgttcaaacatatcgagagtgcaaaaagcttgctaaaagaaaaaaatttcgcattaagttgatgactaagaatcttttaagaaatgctgatttttcaaaatttccatgtgatgtactaatatccacaccacttcgattacgcttggctatcaagaggaagaagattgatctcagcagagttgagtatcttgtcctggatgaatcggataagctatttgagcctgaattattcaagcagattgattctgttatcaaggcatgctcaaatccctcaataatacgctcactgttcagtgctactttacctgattttgttgaagatcgagctcgagaacttatgcatgatgctgttcgtgtaattgttggcagaaagaatatggcttctgaaacaataaagcaaaaattggtttttactggaagtgaagaaggaaaacttctagcaattcgtcaaagctttgccgagagtctaaatcctccggtattggttttcctccaaagcaaggagcgtgccaaggagctgtgcagtgaacttgcatttgacagcattagagttgatgttatccattctgatttgtctcaagcagagcgagaaaatgctgttgataacttcagagctggaaaaacatgggttttgattgctactgatgtagttgcccgtggcatggatttcaaaggtgtgaactgtgtgatcaattatgatttccccgattctgctgctgcttatgtccacagaattggtcgttctggcagagcagggaggactggagaagcaattactttttacacagaagatgacattcctttccttcggaatgttgctaatcttatggcagcatcgggctgtgaggttccttcctatctcatggagttgcgcaaaaagaagtggaagaagcacaggccaaaaagagattcaatctcaacaaaaccagacctataacactgtaacagcatagaatggcaacatgcttttaaccttgaaatttccagtagtgtttatttcttaaaataggccaggcagcctagtggcaagattttgttgttgcccattcccaaatgcaacccgatgaaaagggaagggagagggtaggcaattgtgaccaagagagaatcgcgttttagctaatgcaataggctgctggcagtgttgcctaaatttaaaccatgattgtcgtcatatactcctcagccctcactgtaagccccctaaagtgtaatctcatgtgaaatgggtattcttttgcctctagaaactagaatgtttatttgataaacatttaagaaattcattttcattattattttcttttattgcagggggtgatacggatcactttattttgcttatcaactgctgtaagaatttttattatattttgtaagttagtttttgcccaaaacggttaatttgatatgctt

SEQ ID NO: 4261 - DNA, 1190 bp, Glycine max
tctcgagccgattcggctcgaggctgcgagaagacgacagaagggggtggatgggtgtttgtttcaattcgatttcttctcttctctgcagaaaatcgaatcaatcgatggatgctttaatttcgtgtggttattgaggaaatttcatatccgcaagggcagagagtagaaggaagaagagagaaagagggaagctgctgctgaatcgtaatcgatcttatatctacactctaccatggacattgatgatgatttcacattttgtcaggtcagtgcacctgttgatgttgaaacaaacaagcttgcttcagatatagctgatatttccattaaagaagaatcttcaaatgcatctaatactgctcaggataatgctttacccaatcagaaggaggctaccgttggttctttgtctttcactgtaactagcacagcttctagtcggccaaatgaatccaccacaaaattagtaccaactcaggctaacatttcgtctctaaagtcaccggcacagaagaattccgttaagaagccaacggttcgggccaaagttccttttgagaaaggctacagtcaaatggactggctcaagctcacccaaacacatcctgaccttgcaggtctgaaagggcagtcaaacaagagacttatttctatggatgaagttagaaaacaccagacagagggccaaatgtggactgtattaaaaggccgtgtttataatatatctccatacatgaagtttcaccctggaggtgttgatatgttgatgaaggcggtgggaaaagattgcacatctttattcaataaataccatgcttgggttaatgctgaattcttattggaaaaatgctttgtgggtaccttagatgaaggtcagtgaagatttcattctaataatgcataaacacatgaagatggcttggctccaatccgttatacctcttcatgggccctctctatttactgaccaggggccatcaagcaaggaggaataaattctgtaggtatacacgtttctgtttaaagatctcaatgggagtttgttctacaattatggatgagtacagttatcttgtaaactagaaatttggattaacaatgtaacaattctctgtgtgatgcttggccctgttaacttatatgaaatcagagctcaagggtaagatggtaaaaaaaaaaaaaaaaaa

SEQ ID NO: 4262 - DNA, 1760 bp, Glycine max
ttgagacatttcagcgatgcatgctggtatagcagaagttgctgctgcaaaggctcgcatgtttgttaacaagccagatggaatggttagagaaaagagaggcccatatagtgatccacagcatccttacttttatgaagaagaggatgtgtggatggcacctggcttcattaaccagttttatgaagttcctgcttcctgggccccccccccccatgaagttgatcaagaaagagaaatgtggttaaactctttttataaagctcctcttaggttacccatgccagctgagctagagcactggtggtcaaaagaggagaatcataagattcctgaatttgtccttattaacaaggaaccggagcctgatcccgaagatccttcaaagcttatatatactgaggatcctctcatcctccatacaccaactggaaatattatcaattatgtcgaggatgagaaatatggaatacgtttattctggcagccacctttgggaaaggatgaggacgtggatcctgaaaaggctgtattcctgccccttggttatgatgatttttatggaatagagaaggaggaaaaaaaggagagcatatggatgcgtactatacttgcaattgaaaatgcatgcaagccgtggtttgataagctagataaatggactgaagagcagtcagaaattaatgaagaggaaaaaaaagcaattgaggaagatcttgaactgatagaagctgaaattggtctagaagaggccattgaggatatggaagagttattgcgcataagagagaaagaagaggaaaagaaggcaaagatgggtttgctggatgaagatgatgatgatgatgacaatgaaggtgatggtgattatatgacttctgtaaccaaacaagatgaaaaggctcctgcaaaggttgaagaagttctggcagaggtggaagaggaagaggaagatgatgatgatggggatgatgaagacgatgataatagtgcacaatcaagttttgggtctgttgagcagggacagacaacagatcagcagaagggaaaacctgggaaatctccattttctgcatcttcacttgcatttgcttctagcagccttatctctgctgttccagccaagctgcaactatcattttcattctggaacaaggggagatcaaaaccggagtcagttcctccgccatgcactgatcgtttgagtaatatgaaaacagttgattcagtcaatttccgtcctgtgaccagccagaacggtagcttgaaggctgtgggcaaaacacatgggaaagtcaagacgagaagctctttaggtgggaaatttcttggggtgcactctcagactcgatcacatatgttggcttctgcaaattccagaagcaacttgaaggagccaagagtgagcagtgacatgtggttgcatgcagcaccagagagggatttagacagcatactgtctttgcattcatcattgtattattttgaataacatagagagactatttcgtgatcatatcctgtccattttttcccaaataagagaggttcccttgaaatacaagttttgagagccgttttgttgttgttgccctttctgtagcaaaaaggagcacacgtaggattttggtgagggcagagacataacaaaatttgttattttattttattatgtatgtcattctgaatctgaaaagcaacaactgatagaattgttgaatgctgtttacaaaaaaaaaaaaaaaaaaactcgagactag

SEQ ID NO: 4263 - DNA, 882 bp, Glycine max
ggaggatgcatggatgtggtgtatatgaagttaatgagcgtatcttatatattttattttggagaatatgtggatgaggtttcaggtcggctcgaggacatttcagcgatgcatgctggtatagcagaagttgctgctgcaaaggctcgcatgtttgttaacaagccagatggaatggttagagaaaagagaggcccatatagtgatccacagcatccttacttttatgaagaagaggatgtgtggatggcacctggcttcattaaccagttttatgaagtccctgattactggaaagtatatgtgcatgaagttgatcaagaaagagaaatgtggttaaactctttttataaagctcctcttaggttacccatgccagctgagctagagcactggtggtcaaaagaggagaatcataagattcctgaatttgtccttattaacaaggaaccggagcctgatcctgaagatccttcaaagcttatatatactgaggatcctctcatcctccatacaccaactggaaatattatcaattatgtcgaggatgagaaatatggaatacgtttattctggcagccacctttgggaaagggtgaggatgtggatcctgaaaaggctgtattcctgccccttgggtatgatgatttttttggaatagaagatgagaaaaaaaaggagagcatatggatgcgtattatacttgctattgaaaatgcatgcaagccatggtttgataagctagataaatgggttgaagagcagagaataattaatgaagaggtaaaaaaagcaattgaggaagatcttgaactgatagaagctggaattggtctagaagaggccattgaggatatggaagagttattgcgcataagagag

SEQ ID NO: 4264 - DNA, 1377 bp, Glycine max
agaattattgcttgcattccaggtttcaaatccagaaaaagagagaagaggaaagacactgagtaagcaatgaaatttccaaattctcaattgtttcttccattcttgttgttgttgttcttcgcgataactccctttcgcggttcagggcagcaaacggattggaacagcgaagagactcaacatggaaatggggttcgccgcagagttcttctgagtttcaaagagaagccctcaggaagtaacgttacctttgaatgtactccttcgggtccttgtgtgccctgtctctactctgagaagggtgatgagaaatatcgatgcagtgagactggctaccgaattccattcaaatgtttagagattaaagattcaacgaaggatgcaaagaaaacaaagtctcaaaaaggtcggttgtctttggaaatttctgatggtattgcagaatctcatatagtgtcacatgtcgctggagagatcaatccttcacaatcacatagaagattagtggatgattcattgtcttcagataatagttcacaggcttatatcacttatagaagctgtataaccccagttaatgaagaaaagttgtcattgcttaactttgaggggttggtgatttttttgttactaatcagtggatcaatcatatacttgagaaaaaaaaaggctgcatccatgtctggttatgtagcaggaaggggtcaaaacaactctcgattctgaaattgacgcctaatgaatgatgacatttgtactccatattgattgtaatatagccctaatgttggtatttagtggtctcctttgtatttttgtagtgatttaaatgtagtatagttttactggcctacggcatcttttgctcttatcaagtcatggatggaccacgttagtcattattatttattgtattttgaggccatatagtttgggtcaattttggctaatttattggaagataggatttttaggattttatttttttcatcaaatcagaacttgtcttgtataagtattttatatttatttttatgtcttctcaaaaaaaaaaaaaaaaaaaaaaacgccatggggggcccgggacccccgttttggtccctttaaccaagtttaattgccttcttggcggaatactggccataatgggttaccgtgggaaattggtgatccctgtgcaatctcgccatccctcccaacctggaaccttaagtggaaaccccggggatccttagtggacgaattaactcccctttattggggttgcgtccctggcccgcttcccgctggcaacctggtagggccgctggaataatggatggcccatgctccgggaaacgggggatggcgatttgggggttgttcgctttctcg

SEQ ID NO: 4265 - DNA, 803 bp, Glycine max
tctcactctctctctctcctcagtctgacccaaatggaacatctctagagagagaaactaagggttggatttttttggttcagttgccaccacagcctctgactgtctagagggacattggctccccacggatgtgcccagagcaagattgttgcacctactgtaagcacaaatcaaatgccatccctaaaaatgaagagcaaagtaagcgtgagctgtttaacagaaacaaaggatcttcatgtgtgtccgaaatcaaaaataatttccaaaagcccgtgttctaaaatcatgatttctacacaaaaggctgaaatagacaccactgttcaaaattgcctagatgtttcctcaaggacgcagcccaaagacattgcatgtgatcaatctattgataacaaagaatttctggataaagaaaactctgaatctgagcaccaattttctgtttgttcctctgtcctgggaaaaatggaactaaccaacacctgcacagcaaacttagaaacaattttttctcctgcttttgagcccattgaagtccattcacaacattatactgagaaagatgcagtgagcattggtgatacaaacatggccgaagtgggagctgatgaaggaagaagcatatgtggttatgaaacatgcgatgtatcagacttctacatttctgacatgatcattacaaacttaccctttggggggaattcctttgatgatgatatcagtgaaaccaactgcctatctgattatggatctactgagccatctatgtttactgcatctgaacagtacatgatcct

SEQ ID NO: 4266 - DNA, 1407 bp, Glycine max
tgtgttgcttattctttttcagctacgtaggccccccccccttgaatgtttaccgccccgccggataaggagaaggagaaggaggatctgcgtcgcaggcactgttcatcgccatgtctcgggttgataacagaaattcctcagccaccaagcgtgctaggactgatggtagtcgtagggaagatgattggacatgccccagctgtggcaatgtcaatttctctttcaggacaacttgtaacatgcgtaattgcactcaaccaaggccggctgatcataattcggtatgatattatatgtaatgtcattttttttttaaaatgtgattttcatttcgttaatgatttatggttaacatttatttgatgatttctttttatcaatttctctctttttgcttgtgtttcttattgtgctttcttttatattcctattttctgttcactcgtgttccatgagtttttttcccaaataatggggagtatagagggtatggaaatcaaatgttcatacatacataaaggactgaggtgtagttatattatgcttcctttagagctacttttatcatcaaatctctatgtattcatttactactatccagaaatctgctgccaagcctctacaagctccgcagggttattcatcctcagctccttatttaggttctaataccccctcttcaatatatcttggtgttccaccatatggatcttctctgttcaatggatcatctgttcctccctatgatgttccattttctggaggatcagcatatcactacaattatggtagtcgcctttctgctggcagtccttatagaccattgcatttatctggaccaacaccctacacaggtggaccagtgattggaaatggtgggatatatggaatgccccaactgttggatcggtatggcctgggcatccctatcggacctgggacaatgggtgctaggcctggattttttcacgatgacaagtcacagaaaaaagatgcaactcgtgacaatgactggacatgtccaaaatgtggcaatgtcaatttttcattcagaactgtctgcaacatgagaaagtgcaacacacccaaacctggatcacaggcctcaaagtcggacaaaaattctaagcaaaagatgcctgagggaagctggaagtgcgaaaagtgtaacaacataaactatcctttcagaaccaagtgcaacagacagaattgtggtgctgacaagccggctgagtctgaagaatctccttcatcagctgcagatcaaaatgatcaggtttgttgtgtaaaatattttcatgttgaccttcattccttgttgctacagttgttggttttccaagagcaggtttgtaacataatgaacattttcatttggcaatcaaaaaaaaaaaaaaaaaa

SEQ ID NO: 4267 - DNA, 1359 bp, Glycine max
tacggctgcgagaagacgactgttggggatcgttattgtgttgcttattcttttttccacaaccttgaatgtttaccgccccgccggataaggagaaggagaaggaggatctgcgtcgcaggcactgttcatcgccatgtctcgggttgataacagaaattcctcagccaccaagcgtgctaggactgatggtagtcgtagggaagatgattggacatgccccagctgtggcaatgtcaatttctctttcaggacaacttgtaacatgcgtaattgcactcaaccaaggccggctgatcataattcgaaatctgctgccaagcctctacaagctccgcagggttattcatcctcagctccttatttaggttctaataccccctcttcaatatatcttggtgttccaccatatggatcttctctgttcaatggatcatctgttcctccctatgatgttccattttctggaggatcagcatatcactacaattatggtagtcgcctttctgctggcagtccttatagaccattgcatttatctggaccaacaccctacacaggtggaccagtgattggaaatggtgggatatatggaatgccccaactgttggatcggtatggcctgggcatccctatcggacctgggacaatgggtgctaggcctggattttttcacgatgacaagtcacagaaaaaagatgcaactcgtgacaatgactggacatgtccaaaatgtggcaatgtcaatttttcattcagaactgtctgcaacatgagaaagtgcaacacacccaaacctggatcacaggcctcaaagtcggacaaaaattctaagcaaaagatgcctgagggaagctggaagtgcgaaaagtgtaacaacataaactatcctttcagaaccaagtgcaacagacagaattgtggtgctgacaagccggctgagtctgaagaatctccttcatcagctgcagatcaaaatgatcagtgagtactaggacatgtttgagggttgagaaggtccagagttgtcatcaagcattgctcagtctgggtgtctgacagtcagtcttgtcgtcttctatgttgcagcagttgtcaagtcactcaccttctcaatatgtgtcaagttgttgtattaactgagatggtattttggtctttgtggattgttatgacgcatgtgtcagccaactttcctggtataaaggttattgcatgttccagttttaagttttcttttggttcttgactgtctgtgtttaagtataattctagattaatagatgacttaaaagaaaaaaaaaaaaaaaaaaaaaaaaaaaaaaaaaaaaaaaaaaaaaaaaaaaaaaaaaaaaaaaa

SEQ ID NO: 4268 - DNA, 1684 bp, Glycine max
aaaaagtactagttccttccttttgctttcttcaacaatccaaggtatataaagagagtccacccaattataacacacagaatatcaaagtattaaattccaactcttacaagcttttaccaatctttcacaactcttgttcaaggcgaaacagcttataggatgaagagcaaaatcttgaaggcactaccaaaagcagttgcagcagtcaccgtgacatttcaaaaccatccattcagcccaggcagggatcacaaatcaaagcctatcgtatctatgattccccatgaagctagaagaaaaacccacgatagaggcaataacggcattgatgaaatttattcccaagaacccacttcaccaaaaatctcctgcatgggacagatcaagcacaagaagaaacaaatcaaaaaatcaaagtcaaagagcaagtccatgacaaaagaagcgaggaacgttgctagcaaaaaaacatcctcagcttccagagacatagaggtaaaaaagcacgtttccacgtttcacaagatgttattattccatggggcaaagccaaaatctgagggaaggaaatccaacgcttctgcgcctggagatattaacaaggatcttgctcttgcggacgcagcacgcgcaccgcgcgtgagtcagatgagaaggttttctagtggacgtgacgctcttgctgaatttgattggaaggtgtcgccagatgaagaggaaattgattactattcggatgaatacagagtggatagtgatggcgaagaagaggaagagattattatccctttctctgcaccccttttggttggtggtggagttggtcatactcgtgggggtgtgcttaatttgaagccacgaaaagaaattaacctgtggaagagaagaaccatggctccacccaggcctcttcaattggacagagcaaactgattatttgttcattacaaaaatgaagattaatttgatttttcgattttttttaatggctatgttttggttctgaaacattttctgtgcagaactgctgatagatttaattaggtacagcaaaaaaatggtgttggcaacatgttgtgataggcaagtatcatattgtgaatgaatatatagcatcaaaattacgatctgtatcctagtctaatcaaaagttaagatacaaatgccattcgtcaaaattacttccaaaaaaaaagctgggaagaagctcgagactagcgaaccctaaaacttgttcgtagagctgccgaacacaaatgcttgaaaagaggagtgaaggaggtcgttaaaagtataaggagaggtcataaaggattgtgtgtgattgctgggaacatatcaccgattgatgtcatcactcatgttcctattctttgtgaagagtctgacattccttatatttatgtcccatctaaaagaagatcttgcagggcgctggagcttgcaggcgcaggagcaacaaagaggcctacttgctgtgttctggtacagacaaagcctgcaaagggtgaaatagagcaaggggaacaagagaaactaaagtcacattatgatcaagttgtagcggaagttactgagcttacaacttcactcttttgaattaagcacacatgtatctactgtttgtttcagctggattaacatgtggtattagtgtgccttacaatcaatagatgtatga

SEQ ID NO: 4269 - DNA, 804 bp, Glycine max
aacctaaattaaaccctagcttctgcggctgcgagaagacgacagaaggggaagcttctttcttcttcgccaattcagatcgcagacagacacagagagtgagagagggagatggggagcgacagcgaggcagagaagtcggtgcagaaagagaaggagaagaagaagatgttggccctggctcccattgctaaacctcttgctgggaagaagctttgcaagcgaaccctaaaacttgttcgtagagctgccgaacacaaatgcttgaaaagaggagtgaaggaggtcgttaaaagtataaggagaggtcataaaggattgtgtgtgattgctgggaacatatcaccgattgatgtcatcactcatgttcctattctttgtgaagagtctgacattccttatatttatgtcccatctaaagaagatcttgcaggcgcaggagcaacaaagaggcctacttgctgtgttctggtacagacaaagcctgcaaagggtgaaatagagcaaggggaacaagagaaactaaagtcagattatgatcaagttgtagcggaagttactgagcttacaacttcactcttttgaattaagcacacatgtatctactgtttgtttcagctggattaacatgtggtattagtgtgccttacaatcaattgatgtatgaattttattatttttctatcttgcttattattttcttgtcatatagtctaccactgccttatcatttgcataatttgccttgtccaccttcatgattttcccatgaggatgcccgaagcaatcttgatttgaatttgg

SEQ ID NO: 4270 - DNA, 871 bp, Glycine max
cccacgcgtgataaacatttgataagtcacgcgcggcgccatagcgtgtgatcctaaattaaaccctagctagaggagagggtttaaagctctgaagcttctttcttcttctccaattaagatcgcagagagagatggggagtgacagcgaggcagagaaggagaagaagaagatgcttgcgctcgctcccattgctaaaccccttgccggaaagaagctttgcaagcgaaccctaaaacttgttcgtagagctgccgaacacaaatgcctgaaaagaggagtgaaggaggttgttaaaagcataaggagaggtcataaaggattgtgtgtgatagctgggaacatatcgccgattgatgtcatcactcatcttcctattctctgtgaagactctgacattccttatatttatgtcccatctaaagaagatcttgcaggcgcaggagcaacaaagaggcctacatgctgtgttctggtacagacaaagcctgtaaagggtgaaattgagcgaggggaacaagagaaactaaagtcagattatgatcaagttgtgtcggaagtaactgagcttacaacttcactattttaaaacaagcacacatgtatgtgtacagtgtgttctagctggattaacatagtcagcaacctgggcctatattttgtaatttttattcaaagagcaaagaaccaaatgaagtgccatgaactcattatttagtgtaactcacaatgcagacaagcaagttgacgaagaatttttgaaccacattaaaaataaaaaataaaaaaaataaaaaatatataaaaaaaaaaaaaaataaaaaaaaattatcgggcgggcgttctatatggttcatgctttttgacccc

SEQ ID NO: 4271 - DNA, 1190 bp, Glycine max
acatagcacgctcaccgaggcgcatccttcctcttctctttctttgtcacaccccccgcccgacggctgcgagaagacgacagaaggcgcttctctttctttgtcacaaacacaacacagcacccttcacacactgcacagtgcctcctttctagtttctactatctgcttcttcttcttcaattagggttttccccttctccgagatcagcgccaacatcatgaacatgaatatcttcaagaagaaaacctcacccaaagaggctctgcggtcaagtaagagggaaatggctgttgcaaccagaggaattgaaagagagatagcatcacttcagatggaggaaaaaaaattggtggcagagattaaaagagaagcaaaaacaggaaatgaggctgccaccagaatcttagctcgtcaacttgttaggttacgtcaacagataaccaatttgcagggaagtcgtgctcagatcaggggtgtagcaactcacacacaggcattatatgcaagcacttcaatctctacaggaatgaagggtgcaactaaagcaatggtggcaatgaataagcaaatggcaccggcaaaacaggttaaagtgatcaaagaattccaaaagcaatcagcgcagttggacatgacgattgagatgatgtcagaatctattgatgaaactctagacaaagatgaagctgaggaagaaacagaagagctcactaaccaggttcttgatgagattggagtggatattgcatcccagttatcttctgctcccaaagggcgtattgcttcaaggaatactgaaaatgttgctccaagaccagcagaatcccaagatgtcgaagaacttgaaaagagattggcttctcttcgaagaatttaaatctctgctacagcctgtacccatatatatgtttcttaatgtacaaatcattatatatagcaatggagagattgtactattggcacctcttttaattaccaattttatgctgtgatgtgtgtttggatataaagaactagtaaaaatagttttagactggaatatatattactatcccaaacatttatttcgaagaacttgaaaagagattggcttctcttcgaagaatttaaatctctgctacagcctgtactcatatatatgtttcttaatgtacaaatcattatatataacaatggagagattgta

SEQ ID NO: 4272 - DNA, 843 bp, Glycine max
aattcggctcgagctcgcgccgcgcgtgtgtctgcgttgcgagtgtcgtcgttttgattcccctctctctctctctctctccaccttcactcactctgcatgcttcttcttcttctctcactctgattccgcgaaatcaaatcaaaatcagcttctcggaatcgaatctcagatctcggagatcagaaatggtggatccaactggaaaaggatcggagattgaagtcgaggactcaaactcaaaccctaacgctccttcctcagggaacagtccaagcagcaacaatgagcagaagaaaacctgcgccgattgcggcaccaccaagactcctctctggaggggtggtcctgcaggacccaagtctctgtgcaacgcgtgcgggatcagaagcaggaagaagaagagagcgatcttgggaataaacaaggggagcaacgaggacggaaggaaaggaaagaggaccggcggcgctttggggaaggaggtgttgttgcaccgatcgcattggaagaagctcggagaggaagagaaagctgcggtcttgttgatgtcgctctcttatggatccgtttatgcctgaactgaaccagaattaatcaattattattattattctagttctagatgaacaattattgaggagaattctagattttgttttaggatgttccttcccctaaccctttcccgaagtgtatatgtttagttttttttttttctctgttgaatgagtgtgtgggttggatgtcaacaacagttgtaagaaatgaaattattcaagtccaattttggtaatggagttagtcctttattttcaaaaaaaaaaaaaaaaaaaaaaaaaa

SEQ ID NO: 4273 - DNA, 2258 bp, Glycine max
cctaattcatgtctaacatggcctataatggtatattggtttcagaccaaaaatccaggaaataaagcttgttcagacaaaaaatacaagaaataaaagcatgtttttatctaatttggtcgtttacaatacgataacaaaccaaaatgtttgtagcttgcgaatctcaagatcactctgtgcaaacatggaaatttgtaaaccacaataataaccctaagcccaaatgagcgtaatacaattttgaaagatattactgctttggtggttccacttaaatatgctaaggtctgtaaatcataaacagctgtagcatagaaaaaaaacactaagaagttttgctttaaacttttggtccaaaaggaacatcacatattgcaaaattttggccgacaaataagcagtgttaaagaaaatttatccgagtacgatctttttttccaaatgaacggccatcaactccaataaaaaaatgacctttttaagcttgaccatctatctgcttatcttccacgtcattagttgtagtagttgcctctcccccctcagcaccctctgatggaggctgaacttgttcatcctccggaagtggctcctccacgtagtcattttcaaaagcatccgcaggaacctcgtaaatcctaacctggggcttagatggatctttcacaagaacatacttcccctcattcaatttcatgcacaaatccacaatagacttcacaatcccccacatattcgtcgtgttcaaattaatctgtgccgcaaagtccctgggtttatatccaaccacagccaaaatcacatgattgaaatgatcacggggatgaatcctcgacacataccccaacttcatcgtatccgcgctcgccaaaagagcctgagcagtccacttagccaacttatttgcattgttcttaagctcagtggccaacacagcacccctctgagtctccaacttctgcctccagtccacacccgaatacttgggatcaaactcattcaacgcattcaaagtaaggaacgacctctgcttgttcacgtcaacaacactatgaacctcacacctcgcaacaagatacatatcatcatcaagcttccacctcctatacctataagcgacagaagcaacctcctcaccttcattagcaaaagggttagcctcatcaaaagtaaccttattcccatccctaataagcacctgctgagagaaattctggttgatataagcagcctcaacgctcaacgaatgggcagagttaatatcatccttcgactcaggcaatggctcctgcgaggtttcatgaacagagagcaaatcgagctgcgacccatcgcgcttatcaaagaaaagcttgtttccgacacgctggacgacaatgtcccaggaataaacagaacgaggggcacacatgagagtggacagaatcgtgtcggtggcgaaaacggtggccttgtcctcgttggcgagtctgcgaataatggggtcgtcggtggtggtgactttgaagaagtttcgattcttgaagcgttcgaggcggcgttcgtttttgggcgtgatgcgatcgtaagtgcggtcgtagtattccagagcgccgcagaggagaaggtcttcgggttcgggaacggtgaaggagagcttggagaaggtgctgaaggggatctggtcgtgcatgttccattcgggttggatatcgacggaggatttgaaaacagcggcttcacggcgctgctgattagggtttgagcggttcatgtggtagagacgatctcggcgggcgcgttccttctcctgctcgcgcttcttcgcctcgacttcttcgtcgcggcgctgagggagctggcgcggctgctggaagcgccacttgggaccaaatttggggcgcggcgggggcttggggtcgacgaggcggaagggggcgtcgtcgtcggcggatgcggggaaggagtcgtcgttcgtgaagtcaaagacggcgtccgccgggttcttggagcgggtcgggttgttgaagttgcgagtccagtcggcgatgcggcccaatttgtcggagcgggagaagggggcgaaggggacgcgcacgcgggaggtcgacccggtgaactgccggtggtggtgctgtccggcggaccccacccctcggcgttgaacggaacggctccgatgtcgaatgcttttcccattggcgcaacgcaccctgcccctgaatctgaggaacagagtggaagtgtgaacagagagcagagagagggctcgagcc

SEQ ID NO: 4274 - DNA, 652 bp, Glycine max
aaagaaataaaagcatgtttttatcatactaatttggtcgttgacaatagagcgcactataacaaactaaattaatgtttgtagcttgcgaatctcaacatcactctgccaacatggaaatttgtaaaccataaaataataaccctaagcccaaatacaattttgaaagatgttgctttggtgcttccacttaaatatgctaaggtctgtaaatcataaacagctgtagcatagaaagaaaaaaaaaaactcaggttttgctttaaacttttggtccaaaggaacatcacattgcaaaattttggccgacaaagcagtgttaaagaaaattattctgagtgcgatctgttcacaaatgaacggccacatctactccaataaacatctgaccttttaagcttgaccatctatctgcttgtcttccacatcattagtagtagcggctgcttctcccccctcggcgccttctgctggaggctgaacttgttcatcctccggaagtggctcctccacatagtcattttcaaacgcatccgcgggaacctcgtaaatcctaacctggggcttagatggatccttcacaagaacatacttcccctcattcaatttcatgcacaagtccacaatagacttcacaatcccccaaatattc

SEQ ID NO: 4275 - DNA, 1399 bp, Glycine max
gagagagagagagagagagagagagagagagagagaggctcgagggcagaagcgagatctcctagaaagcgagtttctcttttctctctctctttcaattttcacatagtcagcgaaaacaaacaaactattggagatttggagcacgaaacacaacacaagcagcagccacctcgtttcattgttttgaattcaactgagaaaaacgacaacgaggatgtttcaggagagcagcgtgacgcggtggccgactcagtggactcgctaccacgacaagctattcgagcgggcccttctggtcgtgccggaggatctgccggaccggtgggagaagatcgccgaccaggttcccggcaagtcggcggtggaggtaagggaacactacgaggccctcgtccacgacgtcttcgagatcgactccggccgagtcgaggtcccgagttacgtcgatgactcggtggcgatgccgcccagtggcggtgctggaatttctacgtgggacaacgctaatcagatctcattcggttccaagcttaaacaacaaggcgagaacgaaaggaagaagggcacgccttggactgaagaggaacacaggctgtttctcattgggcttagtaagtttgggaagggagattggagaagcatttcaagaaatgttgttgtgacaagaacaccaactcaagtagctagccatgcccagaaatactttcttcgccagaattcggtgaagaaagagaggaagagatcaagcattcatgacataacgactgtggacagtaactcagcgcctatgcccattgatcagacttgggttcctcctccgggtggttcactgcagcagtcacagcaatacccatcaagcaacatgcatgatcaaatgggtacgtttgggtattcaaactatggctttgacatgtaaagaatgctagaagcagtgtgttctgtatatagtgctgtagctttgattcataaggttcccctctttgtaaagttttatggttttgctagctgacaagggtgattgggagtattgctagttattgaatttttatcagtgtaggtttcgtttgaatacctttgtgaatcctataaatgaaccatgaggatgaaagggtagtgaatactaatagtgaacctttaggaatgaattcaacaggaatggaaattctttgtatgtgtccaattcaattactgctttgcaattcggatttaagtattgaaatgaaaccataaataaaccttggccatttgttcagtcagtttcacttgagtcaaagctgcttactatgagtatgcattcaatcagcaaccaaagcctgttttggttgctatttcttgatggctactttattatggtaaaagcctgtaatcttattgaaggtaatgaaaagagttgcag

SEQ ID NO: 4276 - DNA, 1811 bp, Glycine max
cccacgcgtccgggactcgaaagtgacctttaaaacctccgtcgtcgttgctttcttctctctccccccgtccccggccgcgggggcttttcgttctgaaatttccttcacatccaacccactttccttttctctctccctctcttattatttatttattcattcattcatttcgctctctctctcccccttctcctttcttcctctgcaaccaaaatctgaatcttagggcaccaacacctttgatccaatgggttcggttgccgcagaagaactgaacttagatttaagatcctccttcgtccccaaaaccatcaccgatttcctccgccacctctccgccaacaacaaccaccctgccaccctccgcgatttcctctcccgcctcgaagacgagctccgcaagatccacgccttcaaacgcgaactccccctctccatgctcctcttaaacgacgcaatttccgttctgaaggttgaatcgcagaaatgctgcagggtggcgcgcgattcgccgccggtgctggaggagttcattccgttgaagaaggagcttggtgatcagagcgaggaggaggaggagaatgatgatgacaaggacgataacgaatgcagggataagaggaattggatgagttccgttcagctctggaataacaacactaccaccactactactaataacaacaacaatgcctctgatcgcaaacaactacttcataaattacaaaccaagaaaagtgaagaagggcagtctgtggctgaggatccttttcagacttgtagtaatagaaatgggggaagaagggcatttatgcctttctctaggtactcttcttcatcatcatctgtgccggtgacaacagtggggctgggggctgcatccaaagaagagaaggaagagagtgttaggaataggctttctcttctgacgccttctgtgaaagaagggtgtggttcaaggggatcaaggagcagttctaacagggctgtttcttcttctcctcccacggctcagccgggtttgcgtgcgacttcgcttcagcagactgctaggaaacagaggaggtgctggtcccctgagttgcacagacgattcgttaatgccttgcagaagcttggaggttctcaagcagctacaccaaagcaaattagagagcttatgcaggttgatggcctaactaacgatgaagtgaagagccatttacaaaaataccgacttcatacgcggagagttcctgctgcaagttctaatcagccagttgtggttcttggaggtttgtggatgtctcaagatcagtacaatgactcttcaaaagttagcagttcagggtcaggttctcctcaaagtcctcttcatttggctgcagggtcccggggagggacatctcctactgaaggtgacagcatagaagatgatgaagatgcaagatccgagagttatagttggaaaagtcatatgaacaaaccaggaaaagttgatgtataggatactactctccaccatgaattttgcagataaaagtatacatgggaggagttttaccactacataagaataatactacatgatacataaaaaagagggtcaacgataagaggcagttgtagtttttttttaaggtttagctttgccttatatactgcgtgagttttgatatgagactccgaattaaaatatcattttccttcgctttaagaagctggatatttttttttctctatcataaaattcttttatttcgttttgtcatgggaactctctgatccccccagaagaaattaattactagtccaatatttagatggtc

SEQ ID NO: 4277 - DNA, 1989 bp, Glycine max
ccacgcgtccgaggtttgtacagcgtttgctttgggggcgaaaaattcagccttttccgatttgcaccaaattcaacagagaacaacaccatttgtggattgctgtaaactgcattatttggctgttagctaatggacaagggggtgccacctagcctcttcgtcaatgacggttctttcatggagaggttcaagcaacttcagcaagagcaggagaaagggaagaatgtcaaattggaggattctaaaccaattaaggttaattcagggtctttgtctcccaatcactccattaccaaaacgcccgtggacttgaaggttaatgacacaagaaaaacatctcagggtggttccagtggcaagctagctttcagtttaaaacaaaagtcaaagctggtgccaccccctgttaagttaagtgctgatgaggatgaagaaactgaagctgggtatgtttcaaatgatgcaccactaaaacggcaaaagttaggccaggaggaaggcattgaccaatcatcaagacaacttgatgttgcttattccccaagtacctatcaagaaatggtgtattggcaggcctgctacaagactaatttgcattcccttgttcatgctctcggtattaatcagttttataagtgatatatgcagcacctcattccccaagtgatcctacagtgaagaaagttgctgacaaattggcaagttttgtggctaaaaatggaaggcaatttgaggatgtaacacgtcaaaaaaatcctggggatacacctttcaaatttttgtttgatgagagatgtgctgaatacaagtattatgaatatcggcttgctcaagaagaaaatgctcttgtgcaatcaagggaatcacaggtgcctcgtaatgggggtacaagcacttcatcttccaaacagactaatggtcatcagagatcatctcagcagcatacataccaaattcctgcatctgctttatatgaaagtgctgacaatccaagagcttctggattttcaattcaaacatcatcagtaggaagcagtgaagagcccagtggttcatcaaatgctgattctttggcactaatggagttctacatgaaaaaagctgcacgggaagagaagtataaacaacctaagcattcaaaagatgagatgccccctcctgcttctcttctaggcaaaaaaggccatcacatgggtgatttcattcctccagaagaacttgaaaagttcttggctacctgtaatgatgctgcagcgcagaaagctgctatggaggccgcagagagggctaagattcaggctgataatgtaggccacaggctcctgtcaaaaatgggttggaaagaaggtgagggtctgggtggatccaggaagggtattgcggatcctatcatggccggtaatgttaagaagaataacctgggggttggggctcaggaacctggagaggtgagtgctgaggatgacatatatgagcagtacaaaaagcggatgatgcttggctaccgttacagacccaatcccctgaacaatcctcgcaaggcttattactgaacttgacattgggtgctttgtgcaactcttcaggaaaagttaacttttacaaagtgggatgaactggtgtgttgatagtagggtttttattgtgtgctgcagtgcttgtagtcttttgaaactaagatttgggggagaaaagagggggaaggggtaatgttcacttcaatcgcatttttatccgccaaagaataatgggtttttggttatttttacttgtcagagcttttggaacatgttttttgtatcgcaagcatattatgaagtggtacagggatattatggtgtatatggtttgtttaatccgggaaacctagtcttggatattgataataaatggggaacttggctttattgtccgaaaaaaaaaaaaaaaaaaaggggcgcattaagatgttttatcaaatgtaatacaagatgataaataaaaaaa

SEQ ID NO: 4278 - DNA, 863 bp, Glycine max
ccacgcgggcgaaattaacaatgggggttggcttctacttacaataccgagattatcattcatcgttcattattcattctgggcgcaggaacaaaacagaatcagtgaatagtgaagagtgtggaattggatcagatccgttatagagagatgtcacgggggagatctgattcgggagggtggttgaggggctgtttggtggtgtttgcagtggtctcagcgttgggtgtgtgtgggcctgctctctattggcgattcaaaaacgcaatcactcttcgcaattcccacagcagcaaactctcttgccctccctgcctctgtgattgccctccccctctctcgctcttccaactcgctcctgggttggccaatctctctgtctcagattgtggaagtaatgacccggatctgaaggaggagatggagaagcagtttgtggaccttctcagtgaggagttgaagttgcaagagtctgttactgaagcaaacacccggcacatgaacataactttggctgaagcaaaaagagtggcttctcagtaccagagagaggcagataaatgcattgctgcaactgaaacatgcgagcaggcaagagaacgtgctcaggccatacttaccaaggagaaaaagatgactttggtgtgggagaaacgagctcgtcaaatgggttgggaaggagaataactgcataagttttgttatttatattctttatggctataatcatgatcgtggttttatacaagtatacaagcaaaatgcttgagttgtcaaatttaggttaaagttgatatccttactgtctaactgtatcccttatatgctagtatcaaacaatttttacaaaaaaaaaaaaaaaa

SEQ ID NO: 4279 - DNA, 877 bp, Glycine max
tttattcagatcgacttatacgcctggttgttgagcatggtctaggtcatctgcctttcaccgaaaagcaagtggttactcccacaggatctgtttataccggtgttgatttctgcaaaaaattgtgtggtgtttcaattgttcgaagtggtgagagcatggaaaatgcacttcgtgcatgttgcaaaggtattaaaattggtaaaattttgattcaccgggatggagacaatggaaaacagcttatatatgaaaagctccccaaggatatttcagaacggcatgtcttgcttcttgaccctgtcctggccacaggtaactctgccaaccaagcaattgaattactcattcagaaaggagtaccagaaagtcacattatattcttgaatctcatttctgctcctgagggaatccactgcgtgtgtaaaaggtttccatcattgaagattgtcacgtctgagattgacattgaaataaacgaagagtatcgtgttatcccaggattgggggaatttggtgatcgatactttggtaccgatgattgatcctgctgtttgtgtgtcttaaggtgcagacacctcttgggtagcagctgccttgattaagaatatgagaatcagctaactacattgtattcagatattaaggattctgcaaaaatcagcatgattgtgatttgaggcaggccgattacaattatcaatgcaaacctactccaaggttgatatgcacgaataaatattaaatgtagagatcattcttagcaagatgatgatacctgacacaattctaccaatcttgttctccaaagttggttatgtggaaaatatttcctagttatcaatgcaatctataaccaaccagatcaatcgtcaat

SEQ ID NO: 4280 - DNA, 1990 bp, Glycine max
atattcgacgcattccaaatttcttccatctactactaccagtctcccatttcttggttgttacacacaaaaaagcagagtctgcagcactcaaacgaaacgacagtgaccaaaacagaaaaacgacattacccagagagcgacgatgccggaagaaacgacgtcgatcgactacgtgatggaggctgcatctgggccccacttctccggcctgagactcgacggccgggtcccgtcctccgccaccgccgcgtcctccactcccgattcaaccctaaccctcgattcccttcccaatcaacccttcgtcataggagtttctggaggtactgcctcgggcaaaaccaccgtctgcgatatgatcattcagcaactccacgatcaccgcgttgtcctcgtaaatcaggactcgttttatcgcgggttgaatcctgaagagttggaacgtgttcacgagtacaatttcgaccaccctgatgcttttgacacggagcagttgttagagtgcacgaggaagctcatcagcggccagggagtgcatgttcccatttatgacttcaagaagcaccaacgctcttccgatagttttcgccaggtgaatgcctctgatgtgattatattggaggggattcttgtgttccatgatcagcgcgtgcgggatctgatgaacatgaagatctttgttgacgcagatgctgatgtgagacttgctcgtagaattaggcgtgacacagtggagaggggcagggatataaactctgttcttgaacagtatgcaaaatttgttaagcctgcatttgatgattttgttctaccatcaaaaaagtacgctgacgtgatcattcctcgtggaggtgataatcatgttgccattgatttgattgtgcaacatatccgtacaaagctcggccaacatgatctatgcaaaatatatccaaatgtctatgttattcagtctacattccagatcaggggaatgcatacgttgattcgtgaccgagacatatcaaagcatgattttgtattttattcagatcgacttatacgcctggttgttgagcatggtctaggtcatctgcctttcaccgaaaagcaagtggttactcccacaggatctgtttatactggagttgatttctgcaaaaaattgtgtggtgtttcaattgttcgaagtggtgagagcatggaaaatgcacttcgtgcatgttgcaaaggcattaaaattggtaaaattctgattcaccgggatggagacaatggaaaacagcttatatatgagaagctccccaaggatatttcagaacggcatgtcttgcttcttgaccctgtcctggccacaggtaactctgccaaccaagccattgaattactcattcagaaaggagtaccagaaagtcacattatattcctgaatctcatttctgctcctgagggaatccattgcgtgtgcaaaaggtttccatcattgaagattgtcacatctgagattgacattgaaataaatgaagagtatcgtgttatccctggattgggggaatttggtgatcgatacttcggcaccgatgattagtgtgtcttaaagtggatacacctcttaggtagcagctgccttgattaagaatatgagaagcagctggctacattgtattgagatactaaagattcagcaaaaatcagcatgattgtgatttgaggccaggcagattgcaataatcaatgcaaacctactccaacgttgatttgcatgaatgattgtcatatcgaatgtagagatcattcttagcaagatgatgataccacacacaattcacaattctaccaatcttgttctccaaagtttgttatgtggaaaatatttcctagttatcaatgcaatctataactaaccagatcaatcgtcaatatatgcaaactgtgttaatagtgttattgtatttcatacatagtatctgataatctgaagcaaataagctgtgaagtttatgttttt

SEQ ID NO: 4281 - DNA, 1617 bp, Glycine max
acaacgtggcctccttcttccacagcaaaatcccattttccaaaacccctctctctctctctgacacacactaccatggcggcactgaagcttctcctctcccaagctcgccgccattccctccccaaatgcgctttctctatgacctctcacagatccctctgtgcttcttcggaatcaaactcaaaccctccccgaagacccttcgaacccatccccatccaacccgtctcctaccccgtcaagcccaaacccgcaccacccgaacctcaaccttcacccgaacctcaatcacaatccctccccccttcctcgccggactcgcaacgcgcttggacgcgcgaggacatccgctacgtgaaggacgtgccgtcgatcgcgccggtggcgtacgcctcgcgcggcggcgtggcgcctctccccgatgacagagctcccgtggaggacgcggcagagagcgagaggaggatgatcgaggcggagaatgaaatgaggttgcgaatggccaaggccgtcgaagaggaaagaatgaaggtgccgtttccgctgctgattaagcccaagaagaacgagaagcctcctccgcttgatttgaacgaagccattcgccaagttaaggccaatgccaaggcaaagtttgatgaaactgttgaagcacatataagattgggtgttgattcaaagcgaacagaaatggcagttcgtggtactgtgattctgcctcatggtgctccaaaggctgtcagtgtggctgtttttgcagaaggggctgaggcagaggaagcgaaagctgcaggagctgatatagttggtggtaaagagcttattgaggagattgctagcggtaaaaataagctcaaagttgacaaatgcttctcaactcctggaatggcacctaatcttggaaagatagcacaatatcttagaaagcgaagactgatgccagataagaaactaggtactcttactagtgatattgctgggcagttgaaagagctaagacaaggccgtgtagagtttaaaatggaaagtaaatcaattttgcatgtgggacttggaaaggtaagctacaaagaagaggctttacgggagaatattagtgcatttatgaatgctgtattgcttgcaaagcctgctggcttaaaaaagacttccaaatatgctgggtatgtgttgtctgtccatataagcagcacgatgggcccaggattacctgtatctatacaatcaatatccaaagcagcagataactacaagaaaatgcatatggtttgaatcatgtggacgtggccaatgtgggcatttttctacatgaatccaagtttagatgaacatatgttgtcgtaggtttttgttcattaccattgattatgtaaactttgtttagtcatatatgtggcaataagtgaaaattttgacaattttttgtgagcttgttgaattttctggtcacctaatggtgtatcatgttcctcattgcaacacagaaaattatgccttagtttattatttttaagcaatagccgctaaccctttgatatctggatttaatggttgagaaatgtcagcaacactttcttttaccctcaaaaaaaaaaaaaaaaaacacaaaacccg

SEQ ID NO: 4282 - DNA, 893 bp, Glycine max
cccccccccagatcaaacagtcagctacgtaggccccccccccccggtgcatctcattgaagttggtggacaccaattcagtgaaagtgactgggacacactacttaaaagcataagagatgcttcgtatactacacaacctctagaactgcttaatgtgttaagttttgaaaacctgaggaaccatggaagcattattagtgattctgaaggcaacgcaggtgacagtgggaccacaaggtctattgacaatgaggtaattggtgaccgtcaacttgatgtcaatagtaatgggaaattgtctccactggcatcctcaaatacaaatgctgatggagtggaagattctatatcacagacaaatgtagatcagtctgaaggccttccatctccatcaggaagaactcccaaagctgcagatggagaaggtttccagcggagccaaaccttaggtcaacggattatgggaaatatggaaaatctcttccttcgaaatctcacaaaatctaaaagccatatatctgatgcttctcaatcatcttctccaattaaggttgctgatgctgtagagcctgataccaagaatgaggagagtcctttgctggtaactgtcaggggaaagtgcattacacagttattgcttcttggtgcaattgatggtattcagaagaaatactggacaaaattaaaatcccaacagaaggtttctataatggacattttgctgtctttgttggagtttgctgcttcatataactcatccaccaatcttagaactcgtatgcaccaaattcctgatgaaaggccaccaaataaatcttcttcgccaggaattagctggtactggcatatatctggacatctacaaaagcaccttatggttttgaaacaaa

SEQ ID NO: 4283 - DNA, 2085 bp, Glycine max
ctgatacattgatactaacatttcaccacactctcaccatcttcatcactacttattttttcccttcaacctaatgaatcacctccctcatttttattttgactgaaagttctgaagaagaaagatatgagtctttttcagtcttctcttttacttccttctacatggttgaagcatagccattccccatttcatcaatagctataaaaatataaccccttgtttcagcaacctgcaaacttgtcaaagttgaagtcttcaagcacttagtttcttaaagttaactcctttaaggttcattcacaatcttctcagagagaaagagagtgatccattcgttctgatcatttggggtgtcagaaacgttcacattcacatctgggtctgaagttgtgaattcagcaaccttcatctggtgccactaacaaagtgaccctttggataagaatccaaaagggtatctgaggatctcacaaatttgttgaatttctctggttctatgttgcataaggtgtgcaagaggtacagaatcatggtgagtggaaatggtttgttttaccccgttgtggggtttgcatcgatcgtgttgttcatttacatgtcttttggggatgtgaggtttggttttgaggaagaagctgaattggcttttgtggagagaaatgggactcagtttatggtggatggaaaagctttctacattaatgggtggaactcttattggttaatggttcaatctgtggatgagtattccaggccaaaggtacgtgaaatgctaagggctggggcaaagatggggctaactgtgtgtagaacttgggccttcaatgatggtgactacaatgcccttcagagttcccctggtgtgttcaatgaacaagctttcaaggccttggactatgttatagcagaagcaaggcaacatggaattaggctgctccttagcttagtaaataacttgcatgcatatggtgggaagactcaatatgtcaaatgggcatggcaagaaggggttggcttaagctcatctaacgattctttcttctttgatccatcaatccgtagttatttcaagaattatgtcaagacaattttgacaaggaagaatactataactggaattgaatatagaaatgaccccaccatttttggttgggaattgattaacgaacctcggtgcctaactgatccttctggtgatactctccaagattggatagaggaaatgtcagcttttgtcaaattgattgacaagcgccatcttgtgactgttggacttgaaggtttctatggtcctaatgatccgaaaagattgactgtgaaccctgaggattgggcatctagacttggatctgactttataaggaactccaaaatctcaaatattgacttcacctctgtccatatctatcctgatcactggtttcatcatcaggtatttgaagactacatgaaatttgtctccaagtggatgctttctcacatcgaagatggtgataaggtattgaacaagccagtcttgttctctgaatatgggttgtcagacataaattttactatgcctgaacgaaaaacaatgtacaaaacaattttagatataagctacaaatctgcaaagaaaaacaggtctggagccggtgctctagtttggcaattcttagttggaggaatgcaggagtttactgatgattttgggatcatcccatgggaaaagacacctatcccttcactatttgttgaacaatcatgcagattggccaaggccaagggatggcctcacaaggacacaagttttaaacaattttgttaggaaaagatgtggaaataaaaagcccttgatttgaatggggggagatatatgggttcttttgtggtttaagactgctgaataggtgcatgactagttttgtacaatatgctcttgttttcatcaccaatgataaagttggttagaggcgtatatatagtgtggtaacatagattagatattactttaaacagttgttttgaatttaaagattgtaatccacatgaacaaaatcaaccatgaagtcttttaagatgtgtcttgaagttcgctctgcc

SEQ ID NO: 4284 - DNA, 1192 bp, Glycine max
gcacgagcctaatcctgctcccgtgtcagctacgtaggccccccccccccctgcaaaccctgctgggtttcctgaattctattatttcccaacgctacaatttgaaccctttgggggcatgccatttttcacacatgcacctcctcctgcaatgttcttcccagttgcagaaactcctctcaccaatacaatagccaaccaaattgattattactttagtgatgctaatttagtgaaggatgagtatttaaggtccaacatggatgaacagggatgggttcctattactctgattgcaagcttcccaagggttagaagtttgacaagcaacattaagttgatattggattcattgagaacttccactgtcgtggaagtgcagggggacaagttaaggaggtgcaatgagtggatgaagtggcttccctccgcccagcttcgggccaactctggttcaatatcccctagcggatcaagttctaataacctagcagctgattttgaaaagatcacagtggatgaagctatttcacataaagttaacactgagcctaccacaaatgaagatgctgcaggagagtcctcaactcagtcccaagtcccaaatgatgctactgtgagcagcaattaaaactcaactcagtttatcttcctcatcccaaaatacttggcccattctagtttttggccctgtgcgactcttgattttgaaagggtttttttggaggggatggtaggataggttgattcctttctacggtgactgagatcgattttggtagcaattgaatcaaatagggaaataaataagaattctttggaattattatggcctaaaaagataaagaaagttaacgagacacaagaaatctagaattttgatggaggtgaattgagttttgggttttgtatagtttttttttgctgcggatgatttattctttattttctggtggcttatggtggtatgtgtgggtaaagtatttgttatgaattgaattgaattgaattgagcacttgagttcgcttgtgccaagttgccctgccattttaacaaattaggccttgatgtttgctctgtcacctctgtgtgctcacataaataggtggtagattgtttgatggtcttgcccgtttatacttgttgccctaagtaatttcttcgttcgttacgaaaaaaaaaaaaaaaaaa

SEQ ID NO: 4285 - DNA, 1393 bp, Glycine max
ttttttaggtgttgaaagtgttctcgtttcttcttttccatacacaaagcttacacataaaggatttaggctccatcggcatccactgaggtctgaggccaatacacatgtaggtaaaataaagtctaatttaaaagtacactacgatatccataaatttggaaagacatagcaaattataacttgagaaggctccctatggaaattactcaaattagttactaataaagctgataaatataatattccgtaccaataatatgataataaaaaaaaacttgaaaaggtgttgcccgcatctagctatgctttggtggagtattagcaaacttccacgagcagcgcataaaagtatcaacagtccgatcccctaccacctcagatattggtattgcctctgtaatttccctcaaatcatcgttgctcaacttcacttttaatgagcctatgttgttgtcaagattttttatttttgttgttccagggatgggtaccacatcgttcccttgatgaagaagccatgcaagagcaagttgtggtgttgtacatccatgcttctctgctaacttttccatcctaaaataaaaggtcttgttcttgtcgagcttctgcccctgaaaccttggctggattgccagataactgtctgcaggtatactttctatgacccccttaccaccaaaaaatccacggccaaggggactgaatggtactattccaattccaagttccctgcaaagtggaaggagttgatcttcaatttcacgagaccaaagggaccactccatttgcagagcagtaattggatgaatagcatgcgcccttctaattgtgtctgggctagcttccgacaatcctatgtattttacttttccctcttcaaccaactttttaagctctcccatagtttcctcaattggtactgttgtgtcaatcctgtgcggataatagagatcaatatattccacaccaaggcggcgcaggcttgcctcacaacacgaccgaacatattcaggatcacctcttacaatggcatcattggactcaactttcacaatcccaaattttgaggcaatctgaatttgatctcgtggcaactccttcagtgcctttcctacgagaacttcattagtgtagggaccgtaaaaatcggaagtatcaaagaaagtgattccattactgaatgcatacttgattagagagatgacaacctcgtcaggaacagggccgtcaaacactccactaagccccgcacaaccaaatcccaacttggaaacctccaggccttgggttccaagtttcagacgaggtatatccattttcgcttttcaacgatgaacgccggcgcctatttcacgcgtcaaaaataacttcagccaatatgttttcctca

SEQ ID NO: 4286 - DNA, 1115 bp, Glycine max
  misc_feature (1050)..(1050): n is a, c, g, or t
cgagaagacgacagagttacagtgttgggaatggcgggcaaaggtggatcaactccggccacatattcgccgtctccgacgaccgataagaagaaaccatcgcttttcaatgaggatttggctcgacctgatggccgcagtttccaccagtgcagacccgcatttttcaggactggtgctgtgaatgctgcatctggatctgcttatgctgaggttggaaataccaaggtcattgtatcagtatttgggccaagagagagcaagaaggcgatgatgtacagtgatatagggcgtttgaattgcaatgtcagctttacaacgtttgcaactccgattcgtgggcagggttcagaccacaaagagtacagttcaatgcttcataaagctttggagggagcaataatactggaaacattccccaagacaactgtggatgtctttgcattggtgctggaatctagcggcagtgatctcccagttgtcatatcatgtgctagccttgcccttgcagatgctggaataatgatgtatgatatagttgcctcagtttctgtgtcatgttttaataagaaccttgtcattgatcctattttggaggaggaaattggccaagatggcagcttaatgattacttgcatgccttctcgctatgaaatcacccaactcaccgttactggggaatggtccaccacaaagattaatgagggaatgcagctgtgtttggatgcttgtgcaaagcttgcgaagattatgaggtcatgtttaaaagaagttgcttcggattcccaggagtagaatgacagttctaaattaacacagatcgccttatgtgctgttgtgttggaggaaggtagggaaaggtgccttgaatgccctgaaaattttgtgctcatgatcttgtcaaagacaaagtaaattactctgaatttcgaaattgacaaccaccaacttgagtaaggtgaattgggttgaccctcctattatttttctgaaaaaaatccaaaagatagtaaaaccccaaaaaaaaatacaaatgcatgaattttttgntggttacaaaaaaaaaaaaaaaaaagaattcaagaaagtgggaacgggaggggggaaatgagttt

SEQ ID NO: 4287 - DNA, 1573 bp, Glycine max
tgccaggcaaaattcaattagaaaaccaaaacatgtctagtttcaattttctatgataatagataagctccctgagatatgataccacaacatacctttctgaagcgtttaaaatttggaacactgctgtttggtgcagtacttatgctagtacgaatgtttgtatctcgaacaattaaatattggctataaactatatctgaatttccactttcatcatcattaactttgtctttctttactttgataccatcattatcattcctgaagctggtagaatgtgatctgacagaagcaccatccaaggatgtttcagtttttgcacgtttagtgtcatgcaaaacatcatcagaggatgcctctattctctcatgttttctcttatccaaagggtcagaatcaaccgatcacgcttttgttttttctttttttacattattgtcattgctgaatgcatcatttgagcggactgatgtggctgtttcaacttcaatatctgaatctgctacaattgtctcatctgtcgagcatgatgatgaaactagtacgcatggtgatttcaaaatagacagatctaactgtccactgaaagcagcacatattacatccatctcattcactctaagcaaggaacttagtttattgaagagattagacttgcatgctggtcctcctgggatgacacaaaccacatgattatcctctccataatcagaaccttggctatttgaagaaaaatcttcagaggaaacaacttttgcaccagccacttccaataaaggttttagctgatccccaaatttatacaaatgctcagattccaacaaaaaagtgtatcctttcaagcaatcttcacgcattctggggtcagcaattttaatagattctccttctgctgacactgttggaatatatgaatgacagctaggaatttccgtgctaatgttcttttcagcaaaaaactcaagccaatttttgagaacacaagattttttggccacaacagcatcaacaagatctttcttcaatggcatgagttgatccaccagaacatgtgtgcacccttcacctaaggtatgagtaatactagcaccaattgatgaaattttctcttcaagggattgatccactttatttgacgaacagatgaaaaaaaacgaggggtacatggcaaaacttgtaggtagcagtaccagtgccaaaagaaacaaggtcaccattctctaatgctgtttctttgtttggtagctcatgaacttttttcttggcccccccattcttgttaataaatgtcccatacttggagcaatctctaatatgtatactgcttgacaaatgagagcgttcatttggtaaaggatttaccgggttcactgtattaacaactatttctgcgtgaacccgagacactcctttatctttagtgattattacatcacaaccttttcgaccaactttgtaaagtccagtcttgaaaatgtagtacttatcttcacctgaaagaggatcgacggggaagagtccccacaccatgattcttcttcttctctctgaagtcaaaactcagcactag

SEQ ID NO: 4288 - DNA, 1818 bp, Glycine max
tacggctgccgctcagctacgtaggcccccccccagaaaggaagaaaggtaatagagagagagagaaagagaagaggagagagaaacaaagaagagtgttcccacattacatggcctccttgcccttggggcaccaccaccatcaccaaccggcggcggcgactatacacccgtcgcaaccgccgcagtgtcagccgcaacccgaagttcctcgccggagctccgatatggagaccgataaggatatgtcagctactgtcattgaggggaatgatgccgttactggccacataatctccaccacaattggaggcaaaaatggggaacctaaacagaccatcagttacatggcagaacgtgttgttggcactggatcatttggagttgttttccaggcaaagtgcttggagactggagaggcagtggctattaaaaaggtcttgcaagacaggcggtacaaaaatcgtgaattgcagttaatgcgcttaatggatcacccaaatgtaatttccctgaagcactgtttcttttccacaacaagcaaagatgaactttttctaaacttggtaatggaatatgtccctgagtcaatgtaccgagttataaagcattacactactatgaaccagagaatgcctctcatctacgtgaaactgtatacatatcaaatcttcaggggattagcatatatccataccgccctgcgagtttgccatagggatgtaaagcctcaaaatcttttggttcatcctcttactcaccaagttaagctatgtgattttgggagtgccaaagttctggtcaagggtgaatcaaacatttcatacatatgttcacgttactatcgggctccagaactaatatttggtgcaactgaatacacaccttctattgatatctggtcagctggttgtgttcttgctgaacttcttctaggacagccattgtttcctggagaaaatcaggtggaccaacttgtggaaattattaaggttcttggtactccgactcgagaggaaatccgttgcatgaacccaaattatacagattttagattccctcagattaaagctcatccttggcacaaggttttccacaagcgaatgcctcctgaagcaattgaccttgcatcaaggcttctccaatattcacctagtctacgctgcactgcgctggaagcatgtgcacatcctttctttgatgagcttcgcgagccaaatgcccgtcttcctaatggccatccactgcccccacttttcaacttcaaacaggagttagctggagcatcacctgaactgatcaataggctcatcccagagcatattaggcggcagatgggtctcagcttcccgcattctgccggttcatagatgcaaagggataatgaaacgatgagtcaaccgatatagtgatcaatgtgaatcaacagacaggctgtttgtggcctatatataactttttcgtcccccttgtgaagatgtatacatgtgcttgctgctcggctaagcatggaagtttgtgattctgtctagtatttcattctagttaaagcatacttatccctgcatctgtatattgttttggtcagatttcagaaagctaggagtacaaaatgatagcaatcatgtcttcataggtagaggggcccacctgaattgaggggcccctgtagtagtttggcttgctttttatgagattaaattcaggatgtcctttatattatgtttatgacaatctcttgattcaaaacaaaaaatttcctcattgttcaaaattctaaaaaaaaaaaaaaaaaaaaaaaaaaaaaaaaaaaaaaaa

SEQ ID NO: 4289 - DNA, 1643 bp, Glycine max
aagcactactattcccccgaaggagagcctcgaaggagagagaaattagagagagaaaggtgtgagtgtttgttttttagagagagaaagagtgtgagtgttgtgttgagtgcagtttctttctcacatggcctctatgccgttggggccgcagcaacagcttccaccgccgccgccgcaacaaccgccgccagcggagaatgacgcgatgaaagtggactctcgcggcggctccgacgccggcaccgaaaaggaaatgtcagctcctgtcgcagatggtaatgatgcactcactggtcacataatctcaaccacaattgcaggcaaaaatggcgaacctaaacaaaccatcagttacatggccgaacgtgttgttggcactggatcatttggcattgttttccaggcgaagtgcttggagactggcgaggcagtggctataaagaaggtcttgcaggacaggcgatacaaaaatcgtgaactgcagttaatgcgcgtgatggatcacccaaatataatttccttgagtaactatttcttctctacaacaagtagagatgaactttttctgaacttggtgatggaatatgtccctgagacgatcttccgtgttataaagcactacagtagcatgaaacagagaatgcccctaatctatgtgaaattatatacatatcaaatctttaggggactggcgtatatccatactgtaccaggaatctgccatagggatttgaagcctcaaaatcttttggttgatcgactcacacaccaagtcaagctctgtgattttgggagtgcaaaagttctggtggagggtgaatcaaacatttcatacatatgttcacggtactatcgtgccccagagctaatatttggtgcggcagaatacacaacttctgttgatatttggtccgctggttgtgtccttgcggaacttcttctaggccagcctttgttcccaggagaaaatcaggttgaccaactcgtggaaattatcaagattcttggcactcctactcgagaagaaattcgatgcatgaatcctaattatacagatttcagattcccccatatcaaagctcatccttggcataaggtttttcacaagcgaatgcctcctgaagcaattgaccttgcatcaaggcttctccaatattccccaaaacttcgttacagtgcagtggaagcaatggcacatcctttctttgacgagcttcgcgagcccaatgcccggctacctaatggtcgtccactgcctccacttttcaactttaaacaggaattagatggagcgccccctgaactgcttcctaagctcatcccagagcatgtcaggcggcaaacccaaatgtaaagagatagtaaaacatagagtgaactgttctagtggattagtgtgaaatacatgagagcttgcttgtggtcaatagaacaggggttaggcccaaatatgcagtttttctcccccttgtgaagatgtatacatgtgctggaaaactcagtgtaacccggaaatgtagattatgtctaatgtctaatatttcattctagttaaaccgtgcttgttttaaagaaatacgctgtttttcttcttcgcaaaaaaaaaaaaaaaaaaaaaaaagaaaaaaaaaaaaaaaaaa

SEQ ID NO: 4290 - DNA, 1075 bp, Glycine max
tgacttatgtcgatggatctttaatgcaaacctttattatgcagatcaccatggtaaaactccaaattctgatcagaaaacaacactcgactacatctaagtttgcgtttcatattctttatccagttaatttcaaatctaatcatggttactttgagacatgcaggtggtcaagaattgctcgcaagttaccagggcgcactgacaatgagatcaagaattactggaggactctgatgaggaaaaaggctcaggagaaaaagcgaggagaagctgcatcgtcatcaccaacaccctctagcgttgattcctcaatatcctcaaacaaccatgcagtggatccacatgcttccaagaaggcaggagaagagagcttttatgacacaggaggtgataatggtgtgatagccgcaacccaagatcagggtcaaaaaggtgatcaacaagggttgttctctatggatgatatatggaaggatattgacaatatgtcagaagagaacaacactactcttcagccagtgtcagtgtatgatgggcacagtgaagagggttgcaacttctcttgcccaccacaagtgccttctccatcatcatgggaatattcttcgtctgaccctctatgggtgatggatgaggaaagtttgttttgccctttgagtgaagaaccatatttttcctgctatgcacagggcaccgtttttttaaccggctaatattattattcttttttccgatcaatattttgttcatagcatatcatcatgtgtgccaccttataaagtctaacctgtatagcattgcatctttaaggcttttggaagggttcacccctagctagtgtgacccagctgtaataatttcattttcaggcataactctagtctatgttccttgtttcagtggttttactttcgaaaaacatccaataggatagcgagttggtatgttctgaatgtaaaatatcaagcacttgtttgcatctaagagtttttaattttaattttaatcccatctacccttctcccccaaaaaaaaaaaaaaaaaaaaaaaaaaaaaaaaaaaaaaggacggc

SEQ ID NO: 4291 - DNA, 1200 bp, Glycine max
tcagctacgtaggccccccccccgaatctgagtctcttcctaaattatctgagctagctaagtgtgaaaatttgcaatcatcacaagattttcaagttgaacatacaatgtcacaagacaatgctgaagtatcatcagataaacatgttgacagtaatatgatgaataaccaacagaaggaatctcatggagaagaaaatttagtttatgatataaagcgtgatgaccaagatgctgcacttgaaaattctgttggaacttctggaactaatactgatggtagacagcactctgcattatcttcagatagttcacatgctgtagaatggattggtgatgtagtacaacttgtagatgagaaaaagtattaccaatcttgctgtgttgatggagtaacatataggctgcagggtcatgctcttttccccaccggccatgggaaactaactccttctaaactccagtctatgtgggaagattgcaaaactgggttaaagtgggttaaggtgacaaactgctactttcctgatgatttgcctgggaatattggtcatccgtgtatatctgaagtcaacgaggtttatgaatctaatagtgatagaactgaaatggctagctctattcgagggccatgtgaagtcctcccatctgataaatttaaacaagaaaatgacatgcgatgtcagttaggaattgaggaaacttctaaagtgcagcccattttcctttgcaggtggttttatgacgaattcaagaagttatttcaacctgtaatcagttgattatgtcttggacgtatatgttttgtgattcctacatggcgcaatttttgtggtatttggtggggtttcgaacaggatatttattgtatgggtaattgagcatgcattaagattcacttgagacccattataaggcacattgcagcaacattgcctcctcgtacaagaatgttctatcatttcagcataaattgcttttgatgtaaaatatgtagctgagtctgtggactgcttagtttagctttcgctttggtagtttttttttttttccgatagatattcattctgtataattcttttttgggcattaggctctttaggcccaataattacattattatctttgaattagatcagtgtagttcccttagtttgctgaattgtaagatacttcatttgtacaaaagccatttttttt

SEQ ID NO: 4292 - DNA, 1225 bp, Glycine max
attgctgttgcgcgagagaagagaggaacgaagactgaaaaatggcgtcatggaattcatttccgcttcaagttacctacgaggctctgggttggttcgccttcgtttcctggtccatcagtttctatcctcaagtcatcttgaattttcgcaggaagagtgtggttggactcaacttcgatttcgtggtgctaaatctgaccaagcacagttcctatctcatatacaacgcttctctctacttcagctctgctattcagaagcagtactttgagaaatacggttatggagagatgatacctgttgctgcaaatgatgttgctttctcgatccatgctgttctactgacagcaattacattgttccagattgcaatctatgaacgtgggagtcagaaagtgtccaaggtttctattggaattgtctctgttgcatggcttgttgcagcagtttgtttctttattgctttgccgaataattcctggctttggcttctctccgtcttcaacacaattcaagtagttatgactactataaagtacattcctcaggcagtcatgaacttcctgagaaaaagtactgatggcttcagcattggtaacattctacttgatttttctggaggaatagcaaattatggacagatggttgtgcaatcaatagatcaagattcatgggtcaacttctatgggaatataggaaaagtgttgctatctttggtatctgtattctttgacattattttcattattcaacattatgttctgtatcgtggtaaaaaatcctccaaattggagatcactacagagcaagaagatcaaatcagagagcaccttgtcagacattctgatcaatcatcaccagagaatgtgtaagatatgacttacttcataatgtatattaaacttcccattgtatgttatttgtatcaaaatccaattaggatgtttttcttatcccatacatcaggggcaccattttgatgggagcttcaataaatattgtataagttttaagaattttaggccagcattcttttatactattttgtattacaaatttgtatatgaccaagtgactggcatgtattatcaagctactcaattacctactggtgtttgtggccgtttgaaattttcccaaaaaaaaaaaaaaaaaaaaaaaaaaaaaaaaaaaaaaaaaaaaaaaaaaaaaaaaaaaaaaaaaaaaaaaaaaaaaaaaaaaa

SEQ ID NO: 4293 - DNA, 1033 bp, Glycine max
ccagcgtccgccctctccctcgctgtccacagctgtagtactagctactagaatccctttattacctctgcctgacgacgacacacaaaaattaagaatggtgtttaagctttatggtctaccaatgtccacaaacactacacgtgccatgatctgtctccatgagaaagaggtcgattttgaacttgttccggtcaatgtgttcgctgctgagcacaagcagcctccttttctctccaagaatccctttggtttcattccagtactggaagatggtgatctcactctttttgagtccagggccattaccgcatacgtggctgaaaaattcaaggaaacagaacccgatctgataaggcacaaggatgcaaaagaagcagcactggtgaaggtatggacagaggtagagtctcattactacgagccagcagtgtcgcccattatctacgagtacttcgtggcccctttccaaggcaaagaacccgacaagtcagtgattgacaccaacgttgagaagctgaagacggtgcttgatgtgtacgaggccaagctgagcagcaccaagtaccttgctggggacttttatagccttgctgatcttagccatgtttctgaaactcactacttgatgcagaccccttgtgcttccatgatcaatgagcttcctcatgtaaaggcttggtgggaggatatctcttctaggcctgctttcaataaggttgtgggaggaatgagttttggtcagaatcattgaggaatgagtgtgttttgtgaggttcaattactacctaatttgttgcagtatctagtcaagcaaatgtggtgttgggtgttcttgaaacttgtttcatttcttataactagaattaattaggaaaacgaatcaatttttagaggggtctttaagaaaaaggactttaatagttccttttgtcttatttgattaatttaaaattttatgttgtagtgttttgatgatatgttttaatatcctatttcatcaggtgttttaaatcaaaaaaaaaaaaaacaa

SEQ ID NO: 4294 - DNA, 4402 bp, Glycine max
  misc_feature (2931)..(2931): n is a, c, g, or t
  misc_feature (2940)..(2940): n is a, c, g, or t
  misc_feature (4315)..(4315): n is a, c, g, or t
  misc_feature (4383)..(4388): n is a, c, g, or t
tcagctacgtaggcccccccccgatcacaattcatttcacaactcggagttgttgttgttcatcattctcttctcttcactggcacttgatagatccctctctcgcagcttccattcgtaatccagattctctttgatcggatgcatcttctgggttttgaacctgttactcctcatcaacattatttgtagagggaaaggaggtgtcctttcagtttgaacagctttagattctcaaacaattaaggaaatcagttatggctccttctaggaaatctagaagtgtaaataagaggttttctactgttcgtgaggctgcatctagtaaagacaaaattacagagaatgctagcaaaaataggctgaagaagagaaaattggctgacatgttagggccacaatggaataaggaggagcttgagcatttctatgaagcttaccgtaaatatgggaaagattggaagaaggttgctcttgcagtgcataatagatctgtggaaatggtagaggccctgtacactatgaatagggcatatttatctcttccagagggtactgcttctgttgttggactgatagcaatgatgacagatcattatagtgttctgggaggaagtgacagtggtaaagaaagcaatgacgatgcagaaatatctaaaaagtctcaaaagcgtttgcgaggaaagcatctaagtgacagtaaagcattagaaggccacttttcagatcattctcagtcacattctgttgcatcaggtgatggttgcctgtcattgttgaagaagagacattctggaattaggcctcatgctgttcgaaaaaggactccccgtgtccctatttcatattctattggtaaagataatggggataggtttttttcatctgccaggcagggctccaaacaaatggttgatactaatgatgttgctcataagattgcattagcattgacagaggcttcacaaagaggtggctcttcgaaaatttctggatcaccagacaaaaaatttgtgccttcactgggtctgaaaagtgggaagaagcatcctaaatcagaaatagctggagcaaacttttgcagttctgatttggatgatggtagttctgagttgagtttaggaagcccagaaggaaataatgaagattattctagaaaaacaattcatcggagtggtagagaaaatactggaagagaaaggaatcaagaaaagaaaattaaaaaatatgggaagaattttgagacgggagagaatttaaacaagcatttgaatgacgtaaaggaagcctccagtggaacagatgacggtaaaaatcttagttttatcaaatcggattttgtcacagattttgcagatgcgaaaaatgcaaggtcctcttacaagggttccaggacgaaaagtaaaaagctacggttagagaaagatgaaggttctgctttatgctctgaaaactttggctgatttatctttgatgctgccagtaacgaaccctgataccgagtcatctgcacagttcaaggaaggaaaccatgatgctgttgatgaatctaaaatggaaacacataaagtatttcctaggattgaaagcactgcttcaagtaaattgggcaaggttttttctgataatggagttgctgttcctgaagcagaaggagcacaccagcttaatgcaggattcaggaaaaggaaacaaaaatcttttaacttgaaatacgatgaaattcatactggttctcatttaagtggttcccagaaatccaaggctactgacgaggtgaagaaatccattgttaaaggtaagcggtcatctgtttctacagcacattcaagacaactaaaaggggtgaaatcgttaggaaatctgtcttcaagcgctaatgacaaaggggaaaaggatgattcatctttttagctgatgaaggtttcctcaactaatcaaggtggtccattaaacagaggaaagccaagaagaaagatggaaaaaccaaaaccaatggtacaacaagatttggtggtgtccagaaatatttttagcagtcaacataagaaatccattgcctcactccaagatggctcttatagtcaaaagggaaagcttatcaattgcctgtcttcatatcaaatgcggcgatggtgcactttggagtggttttatagtgctatcgattacccatggttttcaaagagagaatttgtggagtacttagaccatgttggattgggtcatgttcctagattgactcgtattgagtggggtgtcattagaagttctcttggcagaccacgaagattttcagagcaatttttgatagaagaaaaaaataaacttaatcaataccgggaatctgttagatcacattatgctgaaattctttctggtaccaaggaaggacttcctactgatttggcccagccgttaattgttgggcagcgtgttattgctattcatccaaagacgagagagattcacgatggaagtgtactaactgttgaccactgtaggtatagggttcagtttgaccagcctgaacttggggttgaatttgtcatggatattgactgcatgcctctgtatccatttgaaaatatgcctacgtctctgatacaacacaatatctcttctgctccaataaaccaggactttattgagctcccccccccccgaaaactgaaacagagaaaggttgctgggcacacaatattgtcccctactgagaacacagatgccatagaaaatcttcatatatcttccactatgcatggaagaagtactttatcaaaacaggtttcttcttcaagttccaaatcacaactgaaagttgtgtgcagtgagattgggattggtaatgcccaactagcatcaagctctcgaccttcccttcttgatcatgtccattcaaaagaagctgacatattagctatttcaganttgaattgngctctagacaaaaaggaacgtgtattgtctgaactgaagcacatgaacgatggggtatcagagagccagaaatatggagacaactcagtaaaggattcagaaccttttaagaggaattatgcttcagtactaaagcaattaactgaagcaaatgaacaggtttcttctgccttgttttgcttgaggcaacgcaacacatatcaagcaagctcctctgttttgtcattaaagcccatggctaattttgatgatcctagtggtcaggccagctcttccaattgttcggcttgccacaaccaagaatctatatctcaaagtcatataactgagattgttgaaagttctagaagaaaagcaagaatgatggttgttcaagctacacaggctatgtcaaatttaagaaagacagaaagtaaggttgaaagaattgaggatgcaataaattttatcaataaccagctttcagtggacgaacctactgcttcagccacaacatttcttcctacagattctttttctctggcttctcaggatcaattgactgccagcgtattaaaccccttggcaagttgtcatgtacaagatgctgaacttaacagttcatctgatcaaaatgaaatgaaaattccctcagaactcatatctcattgcctagctacattgttcgtgattcagaagtgtacggaacgacaattccccccagctgatgttgctcaggtactagattctgctgtcaccagtttgcagccattatctttaaagaatcttccaatatatggtgagatacagaaatgcatgggcattataagaaatcagatattggctctcataccgacatagctacgactctttcctcctctgtaaatctgcaatactcaggtatttggctggttcaactcttgctggtgtgatctctatggaggctcgtgagacatacctacctccactgggacctagatatttcctattaacatttgagagagggggcactatttataaactgtttatacaattgtagccggaagaaaagggaaggttatatatcttactcttttcagatgtacatatttttaaagatcaaatcatagtgagggactagcatgtagcatgtcctattcagaaccagtaatgtgtattgtcatcatgttaaatgccgtaaagtttatgtatgctattgccaaatgttaacaggctgattagtgtacattcccaaactgcaattgtaatctttatattttctttcaccgccttgatggccttccacatctcgaattcagattgataacaattcacgtgttgttgcaaaatttggtatcgaacttggtaggtgcagctacaataaatctgtcacgtatggatgggtgccattttttcnaaaaaaaaaataacaaaaaaaaaaaaaaaaaaaaaaaaaaaaaaaaaaaaaaaaaaaaaaaaaaaaannnnnnaaggggcggccccc

SEQ ID NO: 4295 - DNA, 1102 bp, Glycine max
tcggaattcggctcgacgtaattaaagtggtgtgactattgagttctatgaaatgatgccaccaacaaccacacccactcattgattcatttggttccctcactttccccacttcctttgtctccatataaacccttcaccctgtgacccttttcccactcccaaacccctctcttcattccaattttggcaccacaccatgccaaccctcaaccatgtcctcacattcacattcttccttctcctctcttgccattgccacctcctcaatggccaagaggacacctcatttggccgtgccatagacagaaaattgttaggcctaaagagaaaagaaaagctcagccacttcaaattttattggcatgacatagtgagtggccgcaaccccacttcggtggcggttgttccgccaccgccgaaggtgaacacgaccacagcatttggcttggtgaacatgattgacaaccctttgacgttggggccggaattgagctccaagcttgtgggaaaatctcagggtttctacgcgtcggcctcgcagactgagattgatcttctaatggctatgaactttgctttcattgaaggtaagtacaatggcagcaccatcaccatcttggggaggaactgcgtcttccacaaggtgagggagatgcctgtgattggaggaagtggactcttcaggtttgctagagggtatgctgaggctaggactcattggcttgatctcaagggtggggatgctattgttgagtacaatgtttatgttatgcattattgattgatgatttaataattatgttatatagaagagattatacttttagcttttgctttagcaattggcaattggcactctttgtttcttttttttttctttttttctttccatttgttgcttttgattcttaattagctttgccttttctagaggtggggtttgttcttgtaagcccatcttaaaatttgttccctatttaattatgtatttgtggctggtgtgataattggaataataatttatgatgcaattggaaagtaaaaaaaaaaaaaaaaaaaaaaaaaaaaaaaaaaaaaaaaaaaaaaaaaaaaaaaaaaa

SEQ ID NO: 4296 - DNA, 2491 bp, Glycine max
gccgtgagggagagagcttaagcgtgtcagctacgtaggccccccccccctcacactctttcttcctttcttcttcttcttcttcttcctgtcttcacctaaccaaatgggcgcctccaccacctgatccacctctgtttcttcttcctttcatccgttcatacgggggttagatgatggagtcctgtgattgtatagatacgcagtatccgccggatgaacttcttgtgaagtatcagtatatctcggatgtgctaattgctcttgcgtatttttcgattccggtggagctcatctattttgttcagaagtctgctttctttccgtatagatgggtgcttatgcagtttggtgcctttattgttctctgtggagcaactcatttcataaacctgtggacattctctccgcactctaagtctgttgctgttgtcatgacgattgccaaagtttcgtgtgctattgtgtcatgtgcgacggcactgatgcttgtacacattattcccgatctgttgagtgtcaagaggcgcgaatcgatcctcaagaacaaggctgaagagcttgacagagagatgggacttattcttactcaggaagagacgggaagacatgttagaatgttgactcatgaaattaggagcacacttgacaggcatacaattttaaagactactcttgtggagctggggaggactttgggcttggaggagtgtgcattatggatgccttcgagaagtggtctgaatctgcaactttcccatactttaacctatcatgtgcaagttgggtctacggtgcaaacaaacaatcctattgtcaatgaagttttcaacagccctcaagctatgcggataccacccacctgtccattggccaggatcagacctcttgtgggaagatatgtgccccctgaagttgttgctgttcgggtgccgcttttgaatctgtcaaattttcaaattaacgattggcctgatatttcagcaaagagctatgcaatcatggttctcatcctccctactgacagtgttagaaaatggcgagaccatgagttggaacttgttgatgttgttgcagatcaggtagcagttgccctttcacatgctgctattttggaggagtctatgcgtgcccgtgatcaactcatggagcagaatgttgctttagatttagcccggcgagaggcagagatggcaattcatgctcgcaatgattttcttgctgtcatgaatcatgaaatgaggacaccaatgcatgcaattatagcattgtcatcacttctcttggagactgaactgacgccagagcaaagggttatgatagagacagtgttgaagagtagtaatgttttggcaacactcattaatgatgttctagatctttctcgacttgaagatggtagcctcgaattagaaatgggaaaattcaacctccatggagttttgggagagattgttgaactgataaaaccaatagcatccgtgaaaaagttacctatcaccttaattctgtctcctgatctgcctactcatgccattggtgatgaaaagcggcttacacaaactcttttgaatgtcgtgggtaatgctgtcaaattcactaaggagggctatgtttctgtaagagtatcagttgcaaaaccagaatcttcacaggattggcgacctccagagttttatccagcatctagtgatggccatttctacattcgagtccaggttaaggactctggatgtgggattctcccacaagatattccgcatctctttaccaagtttgcccagtctcggagtggaccagctcgacctagcagtggtgcaggtcttgggcttgccatttgtaaaagatttgtaaacctcatgggaggccacatatggattgagagtgagggccttgacaaaggaagcacagctacatttatagtcaaacttgggatttgtggcaatccagatccatccgatcatcaagctgcaaacagaagccaagcatatagtggaagtggtggcctcgctagatttaaacccttcatcacagatgaaaacgacactggtttttctactagacgcaatcaaagaagtttctaatatccaagacaccaaaattgcatacctctcaatcacagtcgacaagatggagtaaacctcctactttcattttgcatgtgctaaattgtataatttgcagtttgcggctgtagaataggattactatgtcaggcatatttctaacaaacaggttttatgcgaactcctgttgtattaactagaatacaatacaacaaaacaaagttgagagacgatctgttacttaatttgacttgtagtatatattgtcagtggcttttgccgtttagcgttcataaaaatgacagtattggcatgaaaaaaaaaaaaaaaaaacccgtgtcccgtgctccctctctcttggtgtctgtcgtttgtgctaaacttaaactgttttgtgaaagaaacataggataagtggacggatc

SEQ ID NO: 4297 - DNA, 1283 bp, Glycine max
taggttttcttttcctccaactgtttcctccaacactacacctacttttctttacttctcttctctccaactcaaacatttatttcttccttctccgacaagttctatatcttccttcctttcattcatctctcgttaatcaatctttactcttccctctttggtttggtatcaaccgtttctttcgtgttttctctagtgctacggaacccaaccaagttagtttgaaggttattgtgattggttgagtatgacttctcagctgaggaatggaagtgggagttcgagctcaagtttgaacagcatatttctggaaacagaggatgaccaaacaattgcaagcatattaacagaggacgaaaatctcagggcagagaacaagcttggaaagagactttcacatttagattccattccgcacactccccgcgttaatggacaaattcctgatgtaaacgatgcaacagcagatcacgagaggctgtctgaaaggttagttacatatggtttggcagaactacagatggagggtgatgggaattgccaggttttttcctttatgggaaattttttatatgccaccttacagtttcccagtcatttggtacttttgttatatgttccttttccttaatatctgcaaaatcttactggacagttttgagctttagctgatcagctatttggcaatcctattatcacaagcatgtaaggcgacaggttataaagcagctaaagcatcacaaaaaattgtatgaaggttatgtaccaatggaatacaaaagctacttgaagaaaatgaaaaagttagatatcaatcaggggagtggggagatcatgttactctacaagcagctgcagaccgttttgatgccaaagtttgtttagtcacctctttcagagacacttgctacgttgagattcttccaactgacaaaagtcccaccagagagctatggctaagcttttggagtgaagtgcactataactcattgtacactaccggagacgttccttcgagagtgccaagaaaaaagttttggctcttctagactgatggcaatcggcagatatctgaatcacgtgaagaactgacttataatgggcgaaatgtttttttaacttattgttcttttatactgagtaagcccgtcattagtccccctctcctttagggataaaccatagtttatgcataatatttaaaaattaccttgtacaaatcacgtaagtataactaaactctgatttattattgtacagttcttattttctaccaaaaa

SEQ ID NO: 4298 - DNA, 1333 bp, Glycine max
tcagctacgtaggcccccccccccaagacacggtagtagaaaagctaagcggtgaatagccatagactgaagactgagaagaagaaaagtgaggattgcaacgatgtggctcgagattatcttcggtttggtcatttacaaattgttccgacgcttcttctacgacgacgacgttttggacattgaaggatccgattcttctgctcttttcttcgtcgcagataggcttaagaaactctacggagcaaatgtgtatgtgggtcttcggattcccgatgccgatactgcttctcgacagagcattgatatggttcttctcaccaaacaagagctatgggtgatatctgtgaaaaacttctctggaattttgacaattggtggcgatggtagttgggtctgtgaaaagccagacaaacataaagcagagcgtcaccctgatcctgtggaagaagcaaggaagcaagcttcaatcgttgaatcatatcttgaacagagaggggttgctctgcctgaaggatacatttcttgcaaagttatacttccaaatcctaaattatgtaccattcctgctggcagttttccatctgaagttattacccatgatcaatggatgcaactgaagccagaaccaaagaggatgctgtctagttgggtgaagagtgcctttcgtagtgggaagaaggatatgcaagaatctgttaatcagaatcttgattttgtccttggctcagctccaatatgggatagggtggagcttaaaggcaacaagtatgtattgggggagttcctggaatttaagggcaaacaagaagatgttgaggctttaagacctattagaagatcaaaagttggtcgtatgataatccaaaagacaagcatgtttggactagctccttctaggcttcaagttctatacagcttgcgtgactatagaactgaaggggcatcaggaccagagtggaaagaagtaactgtcagatcaagtactgagatagcctttcagcctgaaaatgcttcaaaagttcgaaagtttaagctctcttcagtgagctctatgcttcttagcgcttgaagttgcccaaactaaggaaaggtattttagtgctaatgtttgccgatgtcatccatcgctcgtccatttatattcctcttcaagcatgtatattcttcgttaagctacatgaaatggatgtatacattactagccttagaaaatatcaatacagtcaaatgtctttttcgcgagattgtattatgtatattttaatataattaaaagttttatttacgtgtgaggtttaaaaaaaaaaaaaagaaaaaaaaaaaaaaaaaa

SEQ ID NO: 4299 - DNA, 2039 bp, Glycine max
tcggctcgaaggcggaaataaaaaaatcccaaagaaattcaatcttcttcatccccaaaccaaagacttgagatctcagattacaccctttcttcctttgttttctcattcctgtcctttctcagacaacaccatctctctctctcttgttccctttttagggtttttgtaatgggtctcggtaacgacgaagaagaggataacaataacaatgataaggttgtggatgacggagatgttggaggaggaaagtctttcggttcagtgtcgtgttccatttgcctcgaggttgttgccgataatggggatagatcctggtctaagcttcaatgcggtcatcaatttcacctcgattgcattggttcagcattcaacataaaaggagcaatgcagtgccctaattgtcggaagattgagaaaggtcaatggctatatgctaatggttgtcgctcatatcctgaatttagcatggatgagtggactcacgatgaggatctttatgatcttagctactctgagatgtcctttggagttcattggtgcccttttggcaacctggcacgacttccatcatccttcgaggaaggggaattttcatcatctgcgtatcatgatgtattgggacaacatgccatatttgctgaacatacagctgtgtcatctgccagccatccttgcccgtatattgcttactttggaccaatacatccatcctcctccaattctggtggaactgtatcagaagcttcaaacttcaaccattggaatggctcgtctgtgcccagtgacatgccaacttcctacacatttcctgctgttgatcttcattatcgcagttgggaacaccactcccctcctttctctacagcaagtagtcgtctagttgctgcagatcagccatcagtatcccctggtagtcaaaggccagccaggggtggttcggatgtaccaagatcaggatcttttatgcatcccttccttgttggtcacagttctgctgccagagcggggagctcggttgcttcctcaatgatccctccttatcctggtagcaatgctcgtgcccgtgatagagtccaggctcttcaggcatactatcaaccacagcaacctcctaattcaaccacaatgcggacacctatcgcttctggcacccgaagatccagtagtcataatggaccagctcaattagctccaatggccacatcgccagaccaaggtggtggcttctttcttatcccatcaagttcatcaggacgcaattttcaagaagaaaatcatcatctaccaaatcacttccatgcttgggaaagagaccacttgccttcattatcattgaaccatgttgatagagattcaggttggagagcataccaccaggctaccagccggtcagacccagctaccaggtccagcagctttcgtttaaggcacggatcagatagaatgccttcacaaaatcggtaatacacttgtatcctgttcactgtgaagcaaactaccattactatggaaagttatgtatgctttgaaaaatgttacatattgctttggcacttcggcctttgggtctgtcctgttatgacagactatatactctggctggccttggaattgatttttccatagccaccggtgtgatggacatttgcttcctctagtttatttgccccggtgggcataaaataagatggtatatctagttggggaaatcaggttttggaagaaatactgggacgttgtgatttcaagtggtgaatcaagtggacgaaagcagctgtggctggatttgtagtgggtcaactatttatgtttgataacaacgctcatgcaaatgctgtgtattgagaatacaattttacttctactccatggcaagagtgatttgtaaactgttgtgcaagaattgagccaaggtatatggtaatggaactcgcatgagaactaccatacctcggaataataggagttcaaaggctggttttaaaacaatcgtataactggtttttttataaaatattatttcaaaaccaattact

SEQ ID NO: 4300 - DNA, 1948 bp, Glycine max
tttgttttctcatccctgtcctaactccatttcatttaaacgccgtcgttccctctctcgctcttgttccgattttagggtttttctaatgggtctcggtaacgatgaagaagaggacaataacaacaacaataataataataagaataacaatgataaggttgtggatgacggagatgctggaggaggaaagtctttcggttcagtgtcgtgttccatttgcctcgaggttgttgccgataatggggatagatcctggtctaagcttcaatgcggtcatcaatttcatctcgattgcattggttcggcattcaacataaaaggagcaatgcagtgccctaattgtcggaagattgagaaaggtcaatggctatatgctaatggttgtcggtcatatcctgaatttagcatggatgagtggactcacgatgaggacctttatgatcttagctactctgagatgtcctttggagttcattggtgcccttttggcaacctggcacgacttccatcatcctttgaggaaggggagttttcgtcatctgcatatcatgatgtattgggacaacatgctatatttgctgaacatacagctgtgtcatctgccagtcatccttgcccgtatattgcttactttggaccaatacatccatcctcctcgaattcgggtggaactgtatcagaagcttcaaacttcaaccattggaatggttcatctgtgcccagtgacatgccaacttcctacacatttcctgctgtggatcttcattatcacagttgggaacaccactcccctcctttctctacagcaagtagtcgtctagttgctgctgatcagccatcagtatcccctggtagtcaaaggccagccaggggtggttcggatgtaccaagatcaggatcttttatgcatcccttccttgttggtcacaggcacgtggggagctcggttgcttcctcaatgatccctccttatcctggtagcaatgctcggacccgtgatagagtccaggctcttcaggcgtactatcaaccacagcaacctcctaattcaaccacaatgcggacacctattgcttctggcacccgaagatccagtagtcataatggatcgcctcaattagccccaataaccacatcgtcagaccaaagtggtggcttctttcttatcccatcaagttcatcaggacacaattttcaagaagaaaatcatcatctaccaaatcacttccatgcttgggaaagagaccacttgccttcgttgtcattgagccatgtcgatagagattcaggttggagagcgtaccaccaggccaccagccggtcagacccaggtaccaggtccagcagctttcgtttgaggcatggatcggatagaacgccttcacaaaatcggtaatacacttgtatcctgttcactgtgaagcaaactaccattactatggaaaattatgtatgctttgaaaaatgttacatattgctttggcactttggcctttgggtctgtcctgttatgacagtatatactctggctggccttggaattgatttttccatagccaccagtgtgatggacatttgcttcctctagttttatttgccctggtgggcataaaataagatggtgtatctagttggggaaatcaggttttggaagaaatactggggcgttgtgatttcaagtgatgatgaatcaagtggatgaaagcagctgtggttggatttgtagtgggtcaactatttatgtttgataatgacactcatgcaattgctgtgtatttgagaatacaagtacttttacttctaccccatggcaagagtgatttgtaaactgttgtgcaattgttgagccaaggtatggtattgaaactcgcatgagaaggaccatacctgggaataatggaagttcaaaggctggttttaaaacaatcatatatgggttttcttt

SEQ ID NO: 4301 - DNA, 936 bp, Glycine max
agcgtggtcgcggccgaggtacgcggggacctcatcactacttcgaagcatttctatatactattactaagaaatttatcaatggctttccttcgatccaccttggcgacctcaatggttcttttagcaatgctagccattgtctccgcaactgactattatggatatggtccaacaccaaagcttgagaaccccaaacccaaaacagattacaaagttgacaaaccacaccccagaataccagattactatgcagtgcccaaaccaaaaggaaacgatgaactacatctgcttcccacaatcattggtgtccaaggtgttgttttatgtaaatcgggttccaattatttcccaattcaaggagcggttgcaagagttacatgtggatgggagaatgagcttgggtacgagacaggtcctatatcagtgttgagtcatgtgacagatagtaaaggctatttctttgctacattgtcacttggggaacttggatcgaaattgaagatcactgagtgcaaggcatacttggagagttctccattggagacatgtaaagttcccaccgatgtcaactacgggatcagtggtgctcgtctttcttcttatcgcctccttgagaataagatgaagttgtacactgtgggacctttcttctgcacctcccaacctgctaaaccactccctaacggttattaattaatgaagccaccttctatatgacgtccgttgaaatggctgcaaagtggaaatcatcatttttttttatattcaatttctatttttgtgtttttttttgtctgatgttttgttaagtgttggtttcatatgtaattcattggtagggggaattgattaagcctccttgccctttaagagatttatgttaagttttaatatgttatgatattggttcctaaaccaaaaaaaaaaaaaaaa

SEQ ID NO: 4302 - DNA, 1467 bp, Glycine max
gtgcccacagacacgggaagttgtctccttctctttctcttaagccctaaaaccctatacccacattagttccacgcgtcccttagcggaaacctcaccaaacattgcctccaagatgaattttaacaatgtgaatgtcccaaaggttcctggtggcggagtcgctgctttgcttaaagttagcattattggtgggcttgttgtttatggggctgcaaacagcttgtacaatgttgagggaggtcatcgagccattgtcttcaatcgtgttgtcggtgtcaaggataaggtttatcctgaagggacacatattatgattcctttgttcgagaggcctgtgatctacgacgtacgtgcacgacctcatttagtagagagtacatcagggagccgtgatctccaaatggtgaaaattggacttagagtccttacccgccctgttcctgaccagttaccaacagtttatcgaaccctgggtgagaattataatgaaagggtcctgccttctattatacacgaaactctcaaagctgtagttgcacagtataatgccagtcagctcattactcagagagagaatgttagtcgagaaataaggaagatattgactcagagggcctcccagtttaacattgctttggatgatgtgtcaatcacaagtttgacgtttgggaaggaatttacagctgctattgaagccaagcaagttgctgctcaagaagctgagagggctaaatttgttgtagaaaaagctgaacaagacaaaagaagtgctgttattagagctcagggtgaagccaagagtgcccagttgattggtgaagctattgccaataatcctgcgtttatcaccttaaggaaaattgaagcggcaagggaaatcgctcacacaatttcaaattctgccaacaaggtttacttgaattcagatgatctcttgctgaatcttcaggagttaaatttggagcccagtgggaagagatagttgtgaggctgaatttacttaattacttaaacctctttttcccagtatcattcattttcacctgcatgtgcgttttatcaactgttcaactatgagattcagcgtcacacaaactgatagtcattatcattaaatggagcacgtgagataagggaggttcaatccgggtttatccattttcagtggttctgaattctgatcttgaataatgaatagtggctaactttgtcggatgtcaaggattggatttgatattgatttgttgaggctcaattatgttccactgttgacttgatttgttgactttatatacctcgataagttgcatacttgccctaattgcggtgctctcgcccctgctaaaaaataaaattatcctaaaaaaaaaaaaaaaaaactcgagagagagagagagagagagagagagagagagagagagagagagagagagagagagagagagagagagagagagagagaga

SEQ ID NO: 4303 - DNA, 2293 bp, Glycine max
ttctcgagccgattcggcagaatctgagttctttgaactcaaaccctaaaaaaaacgatgtatcgttttttgtcttccattcgccatggctgtggatcttccctcacatcacttctcgcgccgaaacccacccttccattcgacgccgccctacgatctcgccgtttacctcaaaacgacggtactcttcgaatccctctgctttcatttccgccgttttcgaaatggaaaacaaatttgaagtttagatggcgtcgtttcgatgtgtggatttactcgagactgtggaaatagaaaatcgtgtatgcttataattttttgacggcgtcgtttcgatgtgtggatggatagggattagaggcagtgtttactgttttcaaagagagaaaagagagagagagagagagagagagagagagagaggaaattatgacaaagtgaatgttcgattttggttgctgacttgtgttgtttcgtttgtgtgagttggtccctgaagttgttaatttgttatggagttcactttgctgaagctgttgactatgctgagaagttgttcattaggtctgaaattgtgtgtttagtgtgtgatcctttttaaaatagtatgtgatatgatgttcaatttgtgcatgagtgatttgcccattgtttcctgttatatgcgggtccaccgccttcggcccccccccccgactttttggggactccgtgaccgcaattgtggccgcatcgtttctgaaagtctgtcttttccatgacaaataataatttgtggactgcatttgatgggccttaattttttttagttaattttattactgatttcctttcatttttgtagagagattggggcggtggtgatcggttgatttatttatttgggtgttcctgaattgtgtgttttcggttctgagctaaattgtttgagatcagcacttgtatacgttatcatcaatatatgttatgatcaatatctgaatcctaaatggttgaaatcagaaaagtagttgtggcagtagtaatggatgcattgaataactctgtctctatcatctaattttgcaagtagaggttttttttttccagcttatctcaacaatgtttataaggggtcttgttcaattttctgaaactgcaggacatgttagaggattttcaagctcgaattttgattggaggaatcttattgtgaacgagaatgtgaatgcagatgattctatgcaggatgcagagaacagaaactccgaaaagtggaataatatgaggctgaatatgattgcagatgcaaaagctcctccaaattttgtgcagaatagagggaacataaactccagaagctggaacaatatgcgacagaatttgaatgctcctccaaattttatggggaatagagagaacataaactccagaagccagaataatctgggccagaatgtggatgcaaatgcagatgctcttccagattttatgcaagataaagagaacataaacatcggaagcaagaatgatgctgagactggctggaactctaggcctatggactttgtaagaggaattatagatgaagataattttatgaagggttctccctttcatcagtatcaatatgagcaggatgctgattttgttcatataaagatgttgcgtaataatacctttgttactgtaacagattctcaaggaaatataaaactcagtggctctgctggtccattgaaagacctgaaatcagggcaaaagctttctaggtatgcagccgaggcaactgcggaagttgttggccgaaaggctaggggtttgggattgaaatctgttgtcatgaaagtgaatggatttactcattttaggagaaaaaggaatgcaataatgagctggaaggagggctttactgctggttctcgaggggatagaaatccaattgtatacattgaagatactacaagaaaaccccataatggttgcagactcccaaagaaacgacgaatttaggtgtttgcaattgaggtggttgaagaaagcattatttaactgggatgaagacacaatttaggtgctgttttgggcacatgatgatatttttgtttagcacatttcattatgattctagttgttacttgtagactgcgttttctgcctcttgtttacagtttgtacaattttgaagattcaataaccagaattttctgtaacagtatgtactgaatcactattctcaactgaatggggctcatacttgttcttgtgttaaaaaaaaaaaaaaaaaaaaaaaaaaaaaaaaaaaaaaaaaaaa

SEQ ID NO: 4304 - DNA, 780 bp, Glycine max
gaagtgaggttgtctttcaaagatggaagaggagacatttgaaaaaccattgttgaagaaaaactatcatgagaattgtcctggttgtaaggtggatcaagccaaggagctcaaaaaggatgtttcctttagaaatctttcttatatatggctggcggtgttatgtggcactttgcctgtagcatcattctttccctttgtttacttcatggtgaaggattttaatattgctgaaacagaggaagacataagtacctatgctggatatgtgggatcatcaatgatgcttggcaggtctttgacatccatattgtgggtgtcattttcaacacattatttggtcttagcacgaatctttggatggctgttagcatgcgatttcttcttggatgtttaaatggtttacttggaccaataaaggcttatgctactgaaattttcagagaagaggagcaggctcttggactctcaacagtttagtcattggtccagcattgggaggttatttggctcagccggtgttgaaatacccacatatatttccaaagggttccttttgggataggtttccatatttcttgccgtgcttcataatatcagcttttgcgtttgcatcagcaattgcttgcatttggcttccagtatgtatatcagttcatctaccctcttcgatttttattacttttattctaaacatcaatatgattgacatataatctacattctgatgtatgtatgaaatctttcaactcaggtcctggtttatccagtacctgttgt

SEQ ID NO: 4305 - DNA, 924 bp, Glycine max
cggtccggaatcccgcgtcgacccacgcgtccgcaattttgcccatttgggaactcacacacacaaacgaagaaagagtgaaacaaaaaaaacatcaaccaacgacatcctcgtcttcatcttcttcttcttcttcttctttgttcagcttccctaacgttaacgtcgtcgtcgtttatcccaaaacaaaacgatggacttcacccccacgcgtccgtccatatcctcttctcatgcaattcctccaatacacacttatcgccttcaaccctctccttttcctctccacctcccattttcgaatttaaagcgttcaggtttggttaagaatcggcttattgctcgttgcacttctatgtccgatgaatttggttctgttaatgggttgcaattcacgcccaataagctttttgtggaggaggctattggggctgaatatggggaaggctttgagacttttagggcagatggaccactaaaagttgatgtggactatttgaatgagaaattgcaagatggttttcttcagcgcatacgctatgctatgaaaccagatgaagcttatggactgatcttctcttgggacaatgtggtggctggtacacgagctctaaaaaggaaggcatgggagcagctggcctttgaagagggaaaggatattccggaagaaggtgatatgcacaaattactgttttatgcaggtgctgattatgtgttgcataagttttttctctcagataaggcggaaaatgagctgaataggctaaagttaaggttttctcagatatattatgataatcttgtcagacttgaaaaaccaatggatggcctcaatgactggttggaagcagtttgtacagctcgcagcagtttatacagctcgcatcccctgtgctgtggtttcagtcttgatagaagaatatg

SEQ ID NO: 4306 - DNA, 1322 bp, Glycine max
  misc_feature (146)..(146): n is a, c, g, or t
tctcaacaaaatcaaagaaaccccaaacgacgacctttagcgccctctgaatatgtgtataagaggggcacttaggcttttattcgaagatattttgtccactttatcaatttctactatcattaattttcccatttaaaaattgnaattttcagctctcatttacatttttttcaattcctccacacacgccatccaatttctgtctttgatatttttaattagagagagaaaaagaaaaagaaaaaacaaagagagaaagagagaagagagagggtgtgtttctgggttttggaaatttcagccaatatcgaaaaacaagaagccccatcaataataatcatcgaaggaatttgaaaggtcgaaacttgagcatctgggatcgcgaaattggggtttttggttaaaagggtattatcttcggaactgattgatggcaaacctgtacgtgaaggcggtgccaccggcggatctgaacaggaacacggagtggttcacgtaccctggcgtttggaccacatacatcctcatccttttcttttcttggatcctcgtactctccgtcttcggttgttcccctggcatcgcttggaccatcgttaatctcgcacactttgctgtaacatatcacttttttcactggaagaaaggaactccatttgcggaggaccaagggatctacaatagattgacttggtgggagcaggtagacaatggaaagcagcttactcggaacaggaagtttctcacagttgttcctttggtgctgtacttgatagcctcacacacaacagactatcagaatccaatgttcttattcaacactgttgcagtgattgtgctggttgttgcaaagttcccccacatgcacaaggtcaggatatttggaatcaatgctgataagtgaaatgttgctgtggccatgacacttggttaccactccttacctgctcaagagcctcttgtccttttgttctggaaaaaaaggtcacacctttgtatagaaggcagaactggaaggatactcaagtaatgttttgttgccaactgctttttaagctgcttctaaaagtattattaaacaaataaatatgttgagttatttctgtacagtagagaagtatatgtatctgactatatcggtgcttttaaaatgtacatttcttttctagtcttttttcctttatttgatgccttagaactgtgagatatacaatgatgatcctttccgttggtattaactttttcttttggaaataatagtccttctttttgataactcataaaagcataaattgaatacttacattagacgtcacctg

SEQ ID NO: 4307 - DNA, 1680 bp, Glycine max
aattcggctcgaggaaagatggcacaagttgttaagccacatgaacctaagacacagtcatttaaacttttgagtggtcataccataccggctgttggattgggcacatggaagtctggttcacaagctgccaattctgtgatcaccgccattgttgaggctggttacagacacatagacactgcttcgcagtatggagttcaagaggaagttggacatgcactccaatctgccatgcaagcaggagtggaaaggaaggatctatttgtcacctccaaactttggtgcacagacttgacccctgaaagagttagacctgctatcaacaatactcttcaagaactccaacttgactaccttgatctttacttgattcattggccatttagattgaaagatggtgccagcagaccccccaaagaaggagaagtgttggagcttgacatggaaggggtgtggagagaaatggagaagcttgtcaaggaaaaccttgtcagagacattggaatatgcaatttcactcttacaaagctagataagctgatgagcattgctcaaattatgccttctgtctgccagatggaaatgcatcctggatggagaaatgacaagatgcttcaggcttgcaagaagaatgccatccatgttactgcttactctccactgggctcatcagacggtggaagggatctgatcaatgatcaaaaggttgataggatagccaataagatgaacaagaatccagggcaggtgttggtgaagtgggccatccagagagggacaagtgtcatccccaaatcaaccaagccagataggatcatggagaatgtcagtgttttcaattgggaacttccagaaagagactttaagacccttagcaacatgcccgatcagaggcgagttctggatggtgaagacctctttgtgaacaagagcgctgggccattcagaagtgttgaagatatttgggaccatgaagattagtccacacttcacacatgcacctaaccacactttgtttatctctttttcaaggcactatgtaataacttgcatttctcgaatgttctgtatgtgatttgatacattagaaggttttttgagtctaaagttattatgtaagtggacaaaatttaagagaaatgtttttgaaaccaccacaattaaccaggatggacactagtgcacactgaccaagggcattagacacttcaagaaaaagcaatgaaatgaagccaaggtgtgttcctatgactcataggcgtaggcaaaaataccaaaaaagggtcacttttacattttatttaccaaataggggctattttgcaattatttacttgggggtttgttttttttattacaaagcgtctcccagacaggcgcttccatggagtacgcgaccggtggcgccctgcaccaagcgcctagggaacaagggcctgccccacccccacaccctagcctcttcccacaccccgtctctttcttgtcacaccccccggcctcttccccccaaaattgtatatttttttttaatttgtttatcaaaaatttaaattttgtttcatttttgttattaatattatttgttattttttatattcccacacccccaccccaaaatttcaataagattattttttataccctctaaaaaaaaaaaaaaaaaaaaaaaaaaaa

SEQ ID NO: 4308 - DNA, 1519 bp, Glycine max
attttttcccctagctttctctctctccctctccttcatccttatatttccaacggaaccttctagaaccaccataacatcattctgcccttccctcgcgtttcaacaccgataacccgcaaaaatctccattgatctgcgcctcctgttccatggcaaagctgcctgtggaatacaacggcgactgcgccaccaccgcctcagcatccgcctccgcagccgcggagtctcagagatccattcccacgccgtttctcaccaaaacctttcaactcgtcgacgaccaatccatcgacgatgttatttcctggaacgacgacggatcaacgtttatcgtctggaaccctaccgtcttcgccagagacttgcttcctaaatatttcaaacacaacaatttctctagcttcgttcgccagctcaacacttacggattcagaaaagttgtacctgatcggtgggagttctcgaacgagtatttccgccgaggcgagaagcggcttctgtgcgaaattcagcggcggaagatctcctcgccggcgtcgtctccgacggcgccggcgacggtttcggtcactgcgccgatgccgttgactgcgataccgatcatatcgccgtcgaactccggcgaggagcaggtgacgtcgtcgaactcatcgccggcggagcttctcgacgagaacgagcgactgaggaaagagaacgttcagttaacgaaagagctcgcggagatgagatcgctctgcaacaatatttattctctcatgtcaaattatgcaaacgccaacggaaaaggaaacagcaacggcagttacaaaactaaaggcggcgccggtgtcgcgcacggaagtttagagtccggcatgacggcggtgaagctgctggatttgatgccggtgatgcgaagctccgatgaggacgcggcggagatggcgccggaggagatgaatccgaagctgtttggtgtggcgattggagcgaagcgagcgagagagggaggaggtggtggagattgtggaggtggaggagaggaagatacgctgctgcgcctgcatcacgcgggttctgcggacgtgaaatctgagccgttggatttccagaaccatcgcgagaatcagaaaacgccgtggttgagtccgtgttacaggacaaatcaaagagtgtgcaactgacacgcggcgacggttaagcaaaggaaacattttagattagattacgtagtggcgtagggaatccgagaccggcacgcggagacgtcacgtgcgtcgtttaaccgtttgggaccgattcccagaagtttctcagaagtcggaggaaaacgatactttgtagtccttttttcttctctctctcttttttttttatataaatatattttttttgttgcatgaaattggacttggactgtagctatgcctttgagggtagtgttaaatatttcatttagttctataaattattttacttgccagggaaaactcaagattcatattcatgtgaatatatttaatagttttatact

SEQ ID NO: 4309 - DNA, 1029 bp, Glycine max
gatcctgatgccaattaactagccacctgcttccttccttctccgaattttgctgttgattaaaatcgtgcagggcaagaatatttgttagccttattaaccaaagtagtattcatgaaccaaaagggtcatgagaagaaaattgaaaaaccagatgatgagtcagagagctatggtcggagttggaggctaacggttgaagcaaacaatgcgcgtccatggaggattgttccagacaactgctacaaccaccttcagaactacatgtctggtggacaataccagcttgaccttaacctcgtcgtccaacatatcttgtcctatgcccatgagattcctcttgctgccgacggcatggatgcctggattttggatgttgatgacacttgcatctccaacattgattattacaaaggaaggcgattcgggtgcgacccatttgactcagcgatattcaaggcatggattatgaagggaaagtgtcccgcaaatcctgccgtgctagaactgtttaacgccttgataaagaaaggattcaaagtgttcttgcttactggtagagaccaagcaactctcgctcaaatcaccactaacaacttgcgtaaccagggattcatcggctaccaacgtcttattctcaggagtgctcagtacaaaggacaaagtgcagtgagatacaagtcagcaattcggaaggagatagaaggagaagggtacaggatacggggaaatgtgggagaccagtggagtgatcttcaaggagagtgtttgggcaatcgtacattcaagctccctaatcccatgtatttcatttcttgatcaacaaaatctcgctatattatttactagtattttccttcaacttaatttctatctatctgcattctcccttcttctaagccttagggaacttattttcgacttagcttgtactcaagaaaccaataaatgcattggctacgtactcaattcaaaaaaaaaaaaaaaaaagcttatcgagcccgccgacctcgagggggggcccgggac

SEQ ID NO: 4310 - DNA, 906 bp, Glycine max
tacctagaacatcctaatcgaaaaattttctgtgactgcatcttcaacgtctcgcaacccaccgcgaccggagctccgctctgccgcgtccgagctcgcctctgttctgaaccagttttgttttgttcctttgcggcttgtttctctgcttgtgcgagctattgttccgaaaagcaatggcaagtgcattgagtagcagagttgaatctgttcgaaactccccctttctaagattttcgctcaacttcatcagagcccttagctcttcttcgtcttcttcttctgccgtttcttctgctgagaaccttaagaaatcaaagcgaaggaagaagaagaatttgttcgaggtggctcagttcttacctaactggggaatcggctaccacatggccaagactcactggaatgaggtttcttacgaaatcactaaaataaatctctacaaggatggaagacatggaaaagcatgggggattgcttttaaaaatggcttgccgttagcagatgctcccaaaaagattagtggagttcacaagcgctgttggaggtacataccaaatgtagtaaaagcattagaaagctcaacaaacttaacgagctcaacagacagtggcttaaaagttgaaactgaagcaagttgatgctttctagtgactttgggtatttaggtcatcgacattataccatgccttagagttgattttcaatcggcattgttgttttcgaccatggttgcattttttagtcgaccatgaaatgtgctctgagggagtaatctagttggatttggttctttctttgtgtttgtctttgacccatattttcgaagttggtattaccatcttcaagaaacataacgaaacgaggatttgagaatcaaaaaaaaaaaaaaaaaaattatactat

SEQ ID NO: 4311 - DNA, 1395 bp, Glycine max
tcagctacgtaggccccccccccaaacaaaaacggaagcagcttaagccaataattgaaagcccattccattattcccaacccaaaaaaacaaaaccatttgatccaacagacacactccctctctctcttgatcattctctctcagtgctctcgatctccatctgcaacttccttgtctgacagatcctgtgttccggagaaaggaaaggaaaggaaagatgtcggggcaaacgcagcgtctgaacgtggtccccaccgtgacgatgctgggagtggtgaaggcccgattggtcggcgccacgcgcggccacgcgctcctgaagaagaagagcgacgcgctcacggtgcagttccgccagatcctgaagaagatcgtctccacaaaagaatccatgggcgacatcatgaaaacgtcgtcgttcgcgcttaccgaggccaagtacgtcgccggcgacaacatcaagcacgtcgtcctcgagaatgtgaaagaggcctccctccgcgtccgctcgcgccaggagaatgtcgccggcgtgaagctcccgaagttcgactacaccgccgacgccgacgccacgaaaaacgacctcaccggactcgcacgcggcgggcagcaggtgcagcagtgccgcgccgcgtacataaaggccatcgaggtgctcgtcgaacttgcgtcccttcaaacatcgtttctgactctggatgaggccatcaagaccacgaatcgtagggttaacgctctggaaaacgtggtgaagccgcggttggagaacacgattagttacatcaagggagagctggacgagctggagagggaggatttcttcaggctgaagaagattcaggggtataagaagagggagattgagaggcagatgctgcagcagaacaactccaagcttgacactaatctccctttgcgcaaaggtctttcctacaattctgctcacaacttgttgtctgtgggtgacaaagatgaggatatcattttctgaatgtgctgctgctgctgctgctgatgggtgagactgagactactctgctattgtttaggtctcagttgagtgtatcatgaataaaggatgatactggttagtatatgtttatttatttctttgttcatttaattcagacattcatcgtttttaagtatgtgatcttatggaagatttttgaagtttttgtgattagctgtattttcgtttcgaaatatattacatctcaaaagagttatgagacttgtggaaagaaaggcatattttttgaagttaccttttgagaatagttattactttagcttatcatcacttatatctgtatatcaatgacggcagatgttttaaattttggttcggtatgaagaatgggtttatacaaaaaaaaaaaaaaaaaa

SEQ ID NO: 4312 - DNA, 1851 bp, Glycine max
ttttttttttttttttttgaaaggcaaagcaaaaggaatttattgcattttctttgtggaagatgaaaatgttagaaaattacataatttaacaggatttttatgtacaatttgttacacagctgtacaattttcatagccccttgccacgacaatgatgatgatggatagctgcaatatttatacacagtgcccgtacaaccctacctgttacccctgaatttccatacacaaccttgggaaatcttggaacaatatggagaagattgagtaaccaaaagcgccatcatcatgattggaagagagttattgttgcaatataaccattcttcatgacctcaaaggcaatattttgataaccatatacaagagtagaaccaaaggggttacttgccgagccttgtgtttggatggcagctcgcccacaatccccaagtatttccttaacttgttcccatttggtgctaggtgtaataaccctctgtttgctattatttacttcctggaaagatccccctactgaatctgagccatggataacaaagttacacttaatgtaagaattgaaatcagcatgaccagggaagttggtgtgtaacacaaacttcttgattttgtgagtctgtccatcaaataagatgtccagaccacgagtaaaataattataaaagtaatcaccacagagagttgtccgtggccgaaaatctgaagcagaatgaataaccatttgatctacctgcttttgatgaatgccacagggacgtccaagctcagtccacacatcctgtggagatgcaccaaaaggaatgtgttgtgagccaacagtgaagtacaattcttcccctagcttcacatggacctcttccatgtaaatgctgccagcaggtaatggaggagcagaagccttatccattaaggcccccacaccaaccttcttaccagaggagctatcatatatagaaacacgacatgtaactggggtggtcccatcaggaaactccaatggcaattccactcccccatcatgacagcaatctgtaaattgacttggaataggaaatgcaaaggaaagccccggatagaatagggtgtaaatgcctctatccttgtcaaaaattccaggatatgtgggcccaaacagtgcatatacagcaacaaaagtagctaaagttgatggtcccccaatcaaggaagtagaatagcgcatctgaagtcgctttacatcaaatatttcaataagccgcagtctctgagaccacggatcgaaacgaagatggaatccatgatcaggaaagctaataacaatatccaacttcaggggttcctcatcaaaatacttcacatgcaccacatcgtataagttgggttgctgctctatctgagcaaatgcttcacatataggcatcccgagggagaagggtccgattccgagaccgggacggagatcgagaacgatggcgcccatggcagtgccctcgcaacggcgtctaggtctctgcaacatagtggttggtgagagagagagagagagagagggtattttggagtttgcgggttaagttactttcgttcggtgaggaaagcaagccaaacgacaacacgcagcgcaggtgaggtgttgaatgcttatatagggttgtatccaatccaattcgattcgcgattttgattaagacggaaaaacaaaccaccttcgttatgctttttcaacaccgcaaacgcaaaagatgcccctctcgcacgccacggaaacccaactttattctatttctttttctcttttcataaactgttacgccctgcttatgtacacgttgtcattttccggggggggggggcctacgtagctga

SEQ ID NO: 4313 - DNA, 1035 bp, Glycine max
  misc_feature (906)..(906): n is a, c, g, or t
  misc_feature (908)..(908): n is a, c, g, or t
  misc_feature (913)..(913): n is a, c, g, or t
  misc_feature (920)..(920): n is a, c, g, or t
  misc_feature (924)..(924): n is a, c, g, or t
  misc_feature (941)..(941): n is a, c, g, or t
  misc_feature (946)..(946): n is a, c, g, or t
  misc_feature (953)..(955): n is a, c, g, or t
  misc_feature (961)..(961): n is a, c, g, or t
  misc_feature (976)..(976): n is a, c, g, or t
  misc_feature (984)..(984): n is a, c, g, or t
  misc_feature (1009)..(1009): n is a, c, g, or t
  misc_feature (1014)..(1014): n is a, c, g, or t
  misc_feature (1016)..(1017): n is a, c, g, or t
  misc_feature (1026)..(1026): n is a, c, g, or t
  misc_feature (1028)..(1028): n is a, c, g, or t
  misc_feature (1030)..(1030): n is a, c, g, or t
  misc_feature (1034)..(1035): n is a, c, g, or t
ccacgcgtccgtgcaaatattgtgaagctgaaggaagttatacgagaatgtgacactctgtgccttgtttttgagtacatggaatacaacctgtatcaacttgtgaaaaacagggaaaagctgttttctgaaaatgaagttagaaattggtgttttcaagttttccaaggtttagcttacatgcaccagcgtggatactttcatcgtgatcttaagcctgaatccgggtcagctacgtaggccccccccaagattgctgattttggcctagccagagagatcagttcactaccaccctatactgagtatgtctccacacggtggtatcgtgctcctgaagtcctgcttcagtcccatctatatagctctaaagttgatatgtgggcaatgggtgctataatggctgagttgttcactctccgtcctctattccccggttccagtgaagcagatgagatttacaaaatatgcagtgtgctaggtagtccaaccactgaatcttgggcagatggactcaaacttgccagggatatcaactatcagtttccacagcttgctggtgtacatctctctacactgatcccatccagaagcgatgatgcaatcagccttgtgacgtcactttgttcatgggatccctgcaagagaccaactgcagcagaggttcttcaacatcctttttttcagagttgcttttacatccctccatcccttcgcaccagagctgtaaccagaactccaccatctgctgggaccaggggatcactggatcggctgggcctcaagagatactctggtgctttgcctaatacaaaaatcaccaacaattttacttccccaaaagtacaagcttctatagcttcaggtgtgcaaaggaagctgcagccggctgttgaggatggaatnanaacanaaacttngagntactacaatcaaattgntacangaaaggnnncacttnttacagggagaccgncggggttnaaacactgaaattggcatagttacnggctnannttctttganancncccnn

SEQ ID NO: 4314 - DNA, 2466 bp, Glycine max
gacgaagctcggaatttggctctgtgttaaaacgctttggttatatgccaccagcgctgcatctttagggaatatatttaatgcattcctgtctcaacatcaagtagaaacatttgaaagatccgcttctgggggatgaagtatataaattgatgtgtgaattttggatgctgcctgcttctcaagtattagataagcgattgcattgaaacagtgcagacagtacttattgaccatcattgtgttgttgcttctaatggatattggtggcgacaaaatattatttaccagaaaattctgaaaaatctatgtagcttagatgaagtggatattattgaagtcctcaagtcttgggtcatgatgaatttagctgaagattaatgttgctttgatcaatcattttttgttggacctgggaattgttagtatgttctccaggacttgtttgattctaccacatgcatcctgctaccactacgaagctgtggatctattaaataataaggctatgctgcccttacatcagaaagtttatgtttcttattttattgccatgacagagaattgacggcagaatttgctggacaatttaatatctgttgacattttctacacatttcttggcatcgtctgctagagataaatgccatctatcttttgtttgtttgcaattgctttttgaataagagctgcattgggttctgtgggaaaatggagaggtacaagttaattaaggaagtaggtgatggaacatttgggagtgtttggagagccattaataagcaaagtggtgaagttgttgcaatcaagaaaatgaaaaagaaatattactcttgggaggagtgtgtaaacctgagagaagtcaagtcattacggaaaatgaatcatgcaaatattgtgaagctgaaggaagttatacgagaatgtgacactctgtgccttgtttttgagtacatggaatacaacctgtatcaacttgtgaaaaacagggaaaagctgttttctgaaaatgaagttagaaattggtgttttcaagttttccaaggtttagcttactcgagccggttcggctccagcggctcgagtcttaagcctgaaaacttgctggtcaccaagggtgtcatcaagattgctgattttggcctagcccgggagatcagttcacaaccaccatatactgagtatgtctccacacggtggtatcgtgctcctgaagtcctgcttcagtcccatctatatagctctaaagttgatatgtgggcaatgggtgctataatggctgagttgttcactctgcgtcctctattccctggttccagtgaagcagatgagatctacaaaatatgcagtgtgataggtagtccaaccactgaatcttgggcagatggactcaaacttgccagggatatcaactatcagtttccacagcttgctagtgtacatctctctacactgatcccatccagaagtgatgatgcaatcagccttgtgacatcaccttgttcatgggatccccgccggaggcccccccccccagaggctcttcaacatcctttctttcagagttgcttttacatccctccatcccttcgcaccagagctgtaaccagaactccaccatctgctgggaccaggggatcactggatcggcagggcctcaagagatactctggtgctttgcctaatacaaaaatcaccaacaattttagttccccgaaattacaagcttctatagcttcaggtgtgcaaaggaagctggatatggcaaatgaggatggaattaagagcaagaaatcattgaagactactcaacaatcaaaatatcgattaccaggaaaaggcagcccaacttctataaacaaggggaggactgctcgtggggtttcagaaacagctgagaagttggctaatatgtcgattggtactcgaagacaatccttaggacaaacccgtccgcctcccatgaaggctggagtcaattggatttctgaatctggaaatttcatgctcaggtccggacaacaaattccatctgaaagaagtttgacaagaaaagttgccgggtgagatgatgagaagtatttgctgactttggagattctttgatgatcaatatttttaagtcttctaatgatgatattgggtttgcacctctgcccctgatgcgtttggtgatgatttttgtttctattacgggtttgatatgttttttttggggagatactgtcagttttacatttggctaaagttgtgcggatgcgtctgtctcataagaaggttttcatttatgtggagtgctcaacaggttgtaatgacacaataaaggggaaatgtcatgtttttaattcgaactttgccacccttgcagagtaattactttagtactccttactattgtttaatgtattatactaattgtgaaatatttaattaatgtaaatagttttatattttgactaaaaaaaa

SEQ ID NO: 4315 - DNA, 2039 bp, Glycine max
ccaaaatgttcctgcttccgctgggggtgagaccagggttgaagagaagaaaccaacacgtgaggatgtcacagatgagaggaaatcagaatcaacttctgctataattaatgcatcagaacttccacctcatgtccttcttgaaatgccagctttgtcaccgacaatgaaccaaggaaacattgctaaatggaggaaacaagaaggagacaagattgaagtgggcgatatattatgtgagatcgagacagacaaagctacacttgaatttgaaactcttgaagaggggtacctggctaagatacttgctccagaaggttcaaaagaagtggcagttggacatcctattgcaataacagttgaagatgcaagtgatattgaagctataatgaactctgttagcagaagttcaacaaaccaacagaaggctccccaacgtgacactaaaagcgaggccaaagctcagaaaaacaatataatacgaattagtccagctgcaaagttgctaattacagagtatggattggatgcgtcaacattgaatgcaactggtccttatggcaccctactgaaaggggatgttctttctgcaattaagtcaggaaaattatctccaaaacctgcttcatctaaagaaaaggtatcatcatttcaaagtcatcaacaagttgcagcttcccaagagtcaaaatctgacttaaagctgtcagatgcttatgaagattttcctaatagtcaaattcgcaaggtgatcgccaagagattattggactcaaaacaaaatacaccacacttgtatttatcatcagatgtcgtactggatcctcttctttcccttcgaaaggatcttaaagagcagtatgatgttaaagtttctgtgaatgacattattgtcaaagttgtagctgctgctctcagaaatgtaccagaagcaaacgcatactggaatgttgagacgggtgaggtggttttaaatgattctattgacatatgcatagcagttgccactgagaaggtaattgatggtgtttaactgtcggtatgatagtatcattatacaaaatactcaaaccttttgtttgactatagggcttgatgactccaataataaaaaatgctgatcagaagacaatatctgctatctcctcagaggtcaaggaactagctgcaaaggcacgtgctggcaaattgaagccacatgaattccaagggggaacttttagcatttcaaacttaggaatgtttcctgtggataaattttgtgctattataaacccccctcaggcttgcattcttgctgtagggagaggcaacaaagttgtggaaccagtaattggaactgatggaattgagaagccatcaattgccactaagttgagcttaacattgtctgctgatcatcgtgtttttgatggcaaagttggaggtgcatttctctctgctttgcaatcaaacttcagtgatataagacgacttcttttataatgacacaacacaaattttcacgttacttgattggacttctcacgaccaattatgtggatccaccacaaccaggatcaaacttgcatagcatccccatttttgtctttttcacttttatctcatcatctgaaacagttttcgattgttgtgcctcattagtttttgtataataatatcttgggtctaattactaaatatcctgagaaaatacccaccaaggtaccatctaacattaggttttcaacaattgagattcaagcacgttggaatttttgttcattaggcactttgctgctctttgatgggtagttttgtatgaagagctttgtatagacagtcattcaaataccaacatttggatgaataaatattcttttcatgtgctgcatatctgtcatccgatttaagcgatggcatgatttggcacaatggtacttttggttcaatgttcatctataagcctggtctggctctttctccccagcattttatctttaacttttgtactaggatttggcctagtggttggattaataatgggaaatttggttaaa

SEQ ID NO: 4316 - DNA, 1859 bp, Glycine max
gaagaaaccaacacttgggggtgtctcagatgagaggaaatcagaatcaacttctagtgtagttaatgcatcagaacttccacctcatctccttcttgaaatgccagctttgtcaccgacaatgaaccaaggaaacattgctaaatggaggaaacaagagggagacaagattgaagtgggtgatatattatgtgagatagagacagacaaagctacacttgaatttgagagtcttgaagaggggtacctggctaagatacttgctccagaaggttcaaaagaagtggcagttggacactctattgcaataacagttgaagatgcaagtgatattgaagctataaagaattctgttagcagctcaacaaaccaacagaaggccccccaacgtggcactaaaagcgaggtcaaagctcagaaaaacaatataacacgtattagtccagctgcaaagttgctaattgcagagtatgggttggatgctccaacattaaatgcaactggtccttatggcaccctactgaaaggggatgttctatctgcaattaagtcaggaaaattgtctccaaaacctgcttcatctaaagaaaaggcattgtcatctcaaagtcatcaacaagttgcagcttcccaagagtcaaaatctgacttaaaaaagtcagatgcttatgaagattttcctaatagtcaaattcgcaaggtgatcgccaagagattattggactcaaaacaaaatacaccacacttatatttatcatcagatgtcatactggatcctcttctttcccttcgaaagggtcttaaagagcagtatgatgttaaagtttctgtgaatgacattattgtcaaagttgtagctgctgctctcagaaatgtaccagaagcaaacgcatactggaatgttgagacgggtgaggtggttttaaatgattctattgacatatgcatagcagttgccactgagaagggcttgatgactccaataataaaaaatgctgatcagaagacaatatctgctatctcctcagaggtcaaggaactagctgcaaaggcacgtgctggcaaattgaagccacatgaattccaagggggaacttttagcatttcaaacttaggaatgtttcctgtggataaattttgtgctattataaacccccctcaggcttgcattcttgctgtagggagaggcaacaaagttgtggaaccagtaattggaactgatggaattgagaagccatcaattgccactaagttgagcttaacattgtctgctgatcatcgtgtttttgatggcaaagttggaggtgcatttctctctgcattgcaatcaaacttcagtgatataagacgacttcttttataatgacgcaacacaaattttcatgttacttgattggatttctcacgaccaatcatgtggatccaccacaacctggatcaaacttgcatagcatccccatttttgtccttttcactttcatctcatcatctgaaacagttttcgactggtttgactcattagtttttgtataataatatcttgggtcaaattactaaataccctgagaaaatacccaccaaggtaccatctaacattaggttttcaacaatcgagattcaagcacattggaaattttgttcattaggcactttgctgttctttgatgtgtagttttgtattaagagctttgtatagactgccattcaaatacctacatttgggtgaataaatattcttttcatgtgcagcatatctgtcatccgatttaagtgatggcatgatttggcccaatggtactcttggttcaatgttcatctataagtctggtctggcactttctccccagcattttatcttc

SEQ ID NO: 4317 - DNA, 1345 bp, Glycine max
ctcagctacgtaggccccccccccccaacgcgtctattctatttgcatctcataacagagagctgagaaaggaagaaaaaagcgtgtgtcagagatacttaacaatggttgtagaagatacccaaaagtcagtcatcacggaggaccaataccctagcagggtcgtcagcgacaacaacaacgacgacgacgacgatgatctcgaagagggtgagatccccgtcgacggcgaagatagcggcgccaccgccacaacgaagcctccggccgccctcgcccgaaacccccaccctctggagaattcctggaccttctggttcgacaacccttcctccaagtccaaacaagccgcatggggcagctccatccgacccatctacactttcgccaccgttgaagagttttggagcatttacaataacattcaccacccgagcaagttgggtttgggggcggactttcactgcttcaagcacaagattgagccaaagtgggaggaccctatctgcgccaatgggggaaagtggactatgaccttcccaaggggaaaatctgataccagttggttgtatacgttgttggcgatgattggagaacagtttgatcacggagatgaaatatgtggagctgttgtgaatgtcagaagtaggcaggataaaattgctatttggactaagaacgcttcaaatgaagctgctcaggtgagcattggaaagcagtggaaggagtttcttgattacaatgacacaattggctttatatttcatgaggatgcaaagaagctggacagaggtgctaaaaataaatacgttgtatgaagtgtatagcgtttttaactgggtagcaaatgaaggaaggcagtacattccttgcatgaagtcgcattttgatgcctggtctttcctctcttacatgtagcttagctgaattcgtagcccttttggccccatctttgtagtacttgcatatttgttgtggatggaggatatttgactggattggatataaagggagaatccttgatcacaagtttgtttgttataaggcaaatgaaatcgaaaagatgttttcttaatgaaaaattgtttgccgtttgaaggcgtttgtgtcaatcataataatatcttgtaaagattggcctgtaaacaaacgtttctccttctcctacgactttattagctattaatatttgtcaaatgttctaaatgttctgtaaccaatggaatttagtttaattagatgaataatgtgttataaacctctttagtattatgttcaattctaccaaataaaaaaatagtgcatattagtcatgatttgtcattcgaaaaaaaaaaaaaaaaaa

SEQ ID NO: 4318 - DNA, 1041 bp, Glycine max
atcagtgaaatactaaccaacgcgtctatactatttgcatctcataaaacacagagctgagaaaggaagaaaaaaagcgtttgtgagtgtgagagagtcataacaatggttgtggaagatgcccaaaaatcagccatcacggaggaccaaaaccctagcagggtcgccaacgacaacaacgacgacgaagatctcgaagagggggagatcctcgacgacggtgacgacggcgcctccgccacatcaaagcctccgtccgccctcgtccgcaacccccaccctctcgagaattcctggaccttctggttcgacaacccttccgccaagtccaaacaagccgcatggggcagctccatccgacccatctacactttcgccaccgtcgaagagttttggagcatttacaataacattcaccacccgagcaagttgggtgtgggggcggactttcattgcttcaagcacaagattgagcccaagtgggaggatcctatctgcgctaatgggggaaagtggactatgaccttccaaaggggaaaatctgataccagttggttatatacgttgttggcaatgattggagaacagtttgatcacggagatgaaatatgcggagctgttgtgaatgtcagaagtaggcagaaaaaaattgctatttggactaagaacgcttcaaatgaagctgctcaggtgagcattggaaagcagtggaaggagtttcttgattacaatgacacaattggctttatatttcatgaggatgcaaagaagcttgacagaggtgctaaaaataaatacgttgtatgaagtttatagcgttcttaactggaagcaaatgaaggaatgcagtacattccttgaatgaagtcgcattttgatgcctggtctttcctctcctacatgtagctgagcttcttagcccttttgacctcatcttattagtactttcatattcgatgtggacggagaatatttcatactgagatgtttcatcaataatatagagtgatttagctaaaaaaaaaaaaaaaaaaaaaaaaa

SEQ ID NO: 4319 - DNA, 654 bp, Glycine max
  misc_feature (526)..(526): n is a, c, g, or t
ggcattcggctcgagcttgttatcatggaatcgaaagtctgcgtttagggagaagccggcttatatcttccgtaaacatcgccttcttcgattctgaacaacgcaaatacaaaatactaccactctcccactcttcagatccgtgcttgtggctgaatcgccatggccatggcgattagggtttttctcatccttctactctctctctcatctactcatctcagttactcgctttacgaagatcaagttggcctcatggattggcatcaacagtacattgggaaagtaaaacacgctttgttccatactcaaaagtctgggcgcaagcgtgttttagtgtccaccgaagagaatgttgtagcttcactcgaccttcgtcatggagagattttttggaggcatgttcttgggaccaacgatattgttgatggacttgacattgccctgggaaaatatgtcataactctttcctcggatgggagcatattgagagcatggaaccttcctgatggacagatggtttggngagtctttccttcagggatcagtggcatcaaagtcaatattatacattccaaaaaacctgaaagctgataaggatgaatttgatcccttgtttttggtaaaaggttgtctccatgctgtttccagcat

SEQ ID NO: 4320 - DNA, 1641 bp, Glycine max
  misc_feature (1627)..(1630): n is a, c, g, or t
ttgtttcgtgggccttcatcacaacaaaaagaaagaaagaaacaaagatcgttcattgctttgtagtaagatcagatcatcaaaaatggttttgtcttggtcaagaaggaacgttttccgccgtgccaagaaggagaagtcacaaactcaattggaagtggaggttgtgattcccaaccactttcactgcccggtgagtctggagctgatgacagacccagtgactttatcaaccggcatcacctacgaccgtgtgagcattgagaagtggatcgagggagggaacagaacctgccccgtcaccaaccaggtgctgacaaccttcgacatcatccccaaccacgccattcgcaggatgattcaggattggtgtgtcgaaaatagttcttatgggattgatagaatccccacacctcgtattcctatctcggcatacgaggtttccgacacgtgtaccaggatcttgtcggcttgccagcgtggagatgacaagaggtgtcaggagttggtcgggaagattaaggtttggagtagagagagtgagaggaacaagaggtgcatagttggtgctggtgctggtgctgttcttgcatatgcctttgattgtttctcaagtaactctattgaaaaacatgtggtgcttttggaggaggttttggaggtgatgacatggatggtcccacttggggaagagggtgtttctaaattgagttcaggagcttctttgaattcgttggtatggtttctagaggggaaagaccttgcatcaaggcaaagtgctgctttgttgcttaaagaagtgtgtgttcaagaattggccaaggttggagaagttgttgaagctttggttaagatggttagggagcctattgggagcacttccaccaaggcttgtttggcaacaatttttaacttggtgtcgttggctgcgaatagagagggaattgctcaaagatttgtggagttgggtttggtttcacttttgctagaggctattgttgatggagagaaaggggtgtgtgagaaggcacttggggtgttggattgcatttgtgattgcgagaaggggaaggaggttgtgaagagcaatgctctagccttgcctcttgttgttaggaagcttttgagggtgtcaccattggcttcaggttttgctgtgtctattcttaggaagatttgtgacaagagggaggaagggattctgattgaggcacttcaagttgggctttttcagaagctcttggttctgctgcaggttgggtgtgatgagagcaccaaggagaatgctaccgggttgttgaaactgttgaatggttacaggaacaaagcggagtgcactgactcatcattgaatttcgagcatcttaagaagccattttaattagtgatgaatggcaactagattcatttattctttttttttttttgtgtaggtcaatttattgatacagaattctttgctgtaaaaagatacacacatcaattgattctttgaattcattctttggaaaattgattcgaagtaattagttagatataataatcatggttgtggcaaatacagacaagtatcctcaggtcattgtcttccatgatggtatgtagtagtatcgtttgacgagtgatnnnnaagcaggaaca

SEQ ID NO: 4321 - DNA, 1733 bp, Glycine max
ctcacgcgtccgaagctaactactttgacccatcctcatctcctccgcacacccatctatatatataccaaccacgcaaccttcccttccgcctatcctcgtctctcattcacctcacaacttcatcaaaccaaaaaacacaacaaaagaaagaaagaaagaaacaaagagttccttgctttgtagtaagatatatcatcaaaaatggttttgtcttggactagaagaaacgttttccgccgtgcaaagaaggagaaggaacaaagtcaactattagaagttgaggttgtgattcccaaccactttcgctgtccggtgagtttggagctgatgacagatccggtgactttatcaaccggcattacctacgaccgtgtgagcatcgagaagtggatcgagggagaaaacagaacctgccccgtcaccaaccaggtgctgacaaccttcgacctcatccccaaccatgccattcgcatgatgattcaggattggtgcgtccaaaacagttcttatgggattgaaagaatccccactcctcgtattcccatctccagctacgaggtatccgacacttgtacgaggatcttgtcggcttgccagcgtggggacaatgagaggtgtcaggagttggttggaaagattaaggtttggggtagagagagtgagaggaacaagaggtgcatagttggtgctggtgctggtgctgttcttgcatatgcctttgattgtttctcaagtaactctattgataagcatgtggttgttttggaggaggttttggaggtgatgacatggatgatcccatttggggaagagggtgtttctaaattgagttcaagagcttctttgaattcattggtttggtttctagaagggaaagaccttgcatcaaggcaaagtgctgctttgttgcttaaagaagtgtgtgtgcaagaattggccaaggttggaaatgttgttgaggctttggttaagatgcttagggagcctattgggagtagtacttccacaaaggcttgtttggcaacaatttttaacttggtttcttcagcggctgcgaatagagaggggattgttcaaagatttgtggagttgggtttggtttcacttttgcttgaggctattgttgatggagaaaaaggggtgtgtgagaaggcacttggggtgttggattgcatttgtgattgccaaaaggggaaggaggttgttgaaagcaatgctcttgccttgcctcttgttgttaagaagcttttgagggtgtcaccattggcttcaagttttgctgtgtctattctaaggaagatttgtgacaagagggaggaaggggttctggttgaggcacttcaagttggggtttttcagaagctcttggttatgctgcaggttgggtgtgatgagagcaccaaggagaatgctacccggttgttgaaactgttgaatggttacaggaacaaagcggagtgcactgactcatcatcattggatttcaagcatcttaagaagccattctaatttgtgatgaatggcaactagattcatttattctttatttttattatttgtataggtcaatttattgatacaaaattctttgctgtaaaaagatacacacatcaattgattctttgaattcattttggataattgattcgatgtaattagttagactactaataagtaataaccatggttgtggcaaatagccaaatacagagaagcatctttttatatcc

SEQ ID NO: 4322 - DNA, 617 bp, Glycine max
atagacttgtcatttgtcaatgtaatcgtgaaaaatgcatgttctaattccgcaactaacctgaacgcagcagctccgcttctgagcgaaaaaaggacatttgcttcaaattttcagtcacattcagattcaggtattcaatatttgtcgaaaatggcttcaatttctccttcttcaagcaatacttcgccgagtgctgctgatctgacgaagcaattgaggctccatgaagtcgccatcgccgagctcaacaaccagccttcttccagagctgtgtaccagagagatgggaacatattttttcgtacaaccatccaaacagcaactgcaacggagcagaaacaacttgaatcagcccaagcgaagctaaaaagtctgaattgatggtttgggagtaatgaagcagttgtaataaggatatattttagtttgaaacttcatttttgtaaattgtgacccgatagcttttgtaaattgtgacctgattgtgtgggcacttgacgatcccaataagacattaatgaagtctaattgtcgttataccaaaatattgtacgtttattggttaatttagttattaatattaaatttgtttataatcaaaaaaaaaaaaaaaa

SEQ ID NO: 4323 - DNA, 660 bp, Glycine max
ggctcgacacgagcgactcgagcccacgcgtccgcgccgctaatcactatgaaacaaaatcacgattctcatttcgaataaattgaaaagcaaggaaacgaactctcaactgaactataagcaaacccttcagatcgagggtgagagttgctttcgcttgtctcgcttagggattagtcaaatcaaactctaagttccgaagatgaaaacagtatccgattggatcgattcgtgttcgaaagagcaattgaagacttaccaggaatggttcaacttagccgactcagacggagatggccgcatcactggaaatgatgcaaccaaattctttgctctctccaacttatctcgctctcaactcaagcaggtttgggctattgctgatgccaaaagacaaggatatttaggttttcaagagtttgttatggcaatgcagctcgttgccctggcacaggtgggacacgatatcaactcagatatccttaaaactgaaattgacaaggaaaatattaaatctccagtaatggaagggcttgatgctctaatagcaaaaacaaagagtttgacaataaatgcacaacctgatatatttgggactgctcaacctcagcctttcccactcaattcatgggctgctccaaaatctgcaaaaaaaaaaaa

SEQ ID NO: 4324 - DNA, 2359 bp, Glycine max
  misc_feature (2330)..(2334): n is a, c, g, or t
tcagctacgtaggccccccccccccggtcggtcgtaactgcgtttttctcttcttcttcttcttcgcataatagcagcaacaatggtgaagcactacagacccccggggaagaaaaaggagggaaatgctgccaaatttgtcattaggtcacaagcaatcaagcagcttcaaatcagtctaccccttttcaggaaactatgtattttgaaaggtgtaactccaagggagcctaagaaaaagttcaagggaactcatcagacttattaccatgtcaaggatgtttccttccttcatcacgagcctttggttgaaatacatagagcaatacgagtgcatgagaggaaaataaagaaagccgaggcaaagaaaaaccatgaacgtgcaaacaggctgcgccagaaaacacccaaacccaagatcgataggattattcggcagaggtacccgagatttgtggatgcacttggagaattggatgactgccttacaatggtgcacctttttgcagcattgcctgcatcagagagtaaaaaaattgacgtggagtgtgtccataaatgtcgaagattggcacatgaatggcaagcattcgtatctcgcactcacaagttaagaaaaacatttgtatctgtgaaaggcatatactaccaggctgaggtcgagggccagccaataacatggttaactcctcattcactacaacaggttgtatccgatgatgttgacattactaccatgctaaactttctgcaattgtatgagcctcttcttagttttgtcaatttccgcctctaccattctataaatttgaagtatccccccatacttgatcctcggttggaagctttggcagcagatctatatgctctgtcaaggtatgccagtgccaataccagaccctctgtactgaattctgaagcttctcaagctgaatctgaacaagtggagaccaagcaaaaggaggcagagactggaaatgaaacatctgaactaagacttgctcaacttcagcatcaacttccttctaatgaacctggtgcactaatgcatcttgttgaggaagtgactggtgaagatgaagaggatcaggatacaaaagactgtaaaaagctctttaaaaatatgaaattcttcgtaagcagggaggtaccaagggaatcgatgctttttgttattcctgcttttggtggcatagtttcctgggagggagaaggggcaccttttggggaatctgaccagagcatttctcatcagattgttgacagggaagcacaaggacatcggttcctctcaagagaatacgttcaaccacagtgggtatatgactgtgtgaatgcacgaattattttgccaactgacaattatttggtgggaaggactcctccaccacatttgtcaccttttattaactacgacgaagaaggagcatacattcctgattatgcaaagaccattaaacacttgcaagctgctgccagaaaggaaatccttccacttccaggtgttgggaaggatgctctggaagatcctcaaaatcttctggttgaaggtatcattgatcgagcagaggctaatgatgcagctcagagaaagcagaagatgatgattctggagcagcaataccgtgatgatttgaaaaaagaacttcaaggtattacatgtacctcagcaggttctatagaaacatctactgaagtggtacagactggagaatcaactaccagtgttcatgaaaatgttgatcatgatgacatgggtaaacttatgttgtcacgtaaaaggagggggctagtgaaagccattgagaaatctagggaacggaataaagctcagactgatctcattaaacaacggaaaaaaaaaaaaaatgaagagcaacggcaaaggagttgaagagatgccgcattcacaaggattccagcattgacttcattctgttttgtaaggccaaatgaaaagaaatcatttgttttagcactggatgtttttataacatctcagataagattaaactatggttagagactaggggtatttaaaatcgaattaaattatatattatattgtcaaagtgataatcttgtattttaaaatgagcagattacctgattgagttcggaaagtgtaatcgattttacaatcatcttcttttgttagggtccttttgatttaaagatatgaaagtgaattgggatgacaaaagaggaaatgtttaaattaaaataaagtgttgaggaatgagatttgtctttttttgaaacttaaatgtactcaagtgtaattaaatcaaatttattattaggggtgtaagtggtttttggccaaaaannnnnaaaaaaaaaaaaaaaaaaagggccg

SEQ ID NO: 4325 - DNA, 1134 bp, Glycine max
  misc_feature (1130)..(1130): n is a, c, g, or t
ggctcgaggaagaggaccaggctgctacggaggccccccccccccccaaaaatatgaaattcttcgtaagcagggaggtaccgagggaatcaatgttttttgttattcctgcttttggtggcattgtttcctgggagggagaaggggcaccttttggggaatctgaccagagcatttctcatcagattgttgacagggaagcacaaggacatcggttcctctcaagagaatatgttcaaccacagtgggtatatgactgtgtgaatgcacggattattttgccaactgagaattatttggtgggaaggactcctccaccacacttgtcaccttttattaactacgatgaagaaggagcatacattcctgattatgcaaagaccattaaacacttgcaagctgctgccagaaaggaaatccttccacttcctggtgttgggaaggaagatctggaagatcctcaaaatcttctggttgaaggtatcattgatcgagcagaggctaatgatgcagctcagagaaagcagaagatgatgattttggagcagcaataccgtgatgatttgaaaaaagaacttcaaggtgttacatatacttcagcaggttctaaagaaacatctactggagtggtacagactggtgaatcaactgccagtgttcaagaaaatgttgatgatgacatgagtaaagttatgatgtcacgtaaaaaaaggaagctagctgaagccatgaagatatctaagaaactgaaggaagctcagactgatcgcattaaacaacggaaaaagaaaatagatgaagctcaaaggcaaaggagttgaagagatgctgcattctcaaggattccagcacgacttcattgtgtcatagctgatgatttgaaaggttaagtcatttttgttcggagtataggcagttgaacttattctagtcttgttctctatgttttgtaaccgatatgtttctaggccaaaaagaaaaaatattttgatttagcaccggatgtttttataacatctcaggtttgagcctttgaaagattaaactatggttaagagactaggggtatttaaaatctaattaaattattctttattgtcaaactgataaaaaagaattgagaatcaatncaaa

SEQ ID NO: 4326 - DNA, 1363 bp, Glycine max
aaaaaaagaaccatggggggccgggccccccctcgagtcagccttctgcgtccaccacctcgtcatttcttcctttccattttcatttctcggtgttgttgttcttcatccatggcttttcctcagcaccacttccaacagcactaccaaacccaacagcaacaacagccacaaaacaaatccttcagaaatctgcaaacaatcgatggtcagatgtcacagcaggtggcgttttacaaccctactgatttgcaagatcaatcccaacatccaccctacattcctccatttcatgttgttgggtttgctccgggtcctgttcctcctgctgatggcagtgatggtggagttgatttgcaattgcaatggaattatggtttggagccagagaggaagagactaaaagaacaggattttttggagaacaattctcagatatcttctgttgatttccttcaaccacgatcagtgtcgactgggttgggcttgtcactagacaatactcgcctgacatccactggagactcagctttgttgtcactcatcggtgatgacatcgagcgtgagttgcagcagcaggacgcagagatagatagatttctcaaagtgcagggtggacgtttgcggcaagcagtcttggagaaggttcaggcaacacagcttcagagtgtctcactaattgaagacaaaatccttcagaaacttcgcgagaaagaagctatggtagaaagcatcaacaagaggaacattgaactcgaagatcaaatggagcagttgactgtggaagctggttcgtggcaacagcgagcaagatataatgaaaatatgattgctgctctcaagttcaaccttcagcaagcgtatgtccaaagcagagatagtaaagaaggatgtggtgacagtgaggtcgacgatacagcttcttgctgcaatggccgttccctcgattttcatctgctttcaagggagaacaccgacatgaaagagatgatgacatgcaaggcttgcagagtcaatgaagtgaccatggttttgttaccttgtaagcatctttgcctctgtaaagattgtgaaagtaagcttagtttctgtcctctatgtcaatcctccaaatttatcggcatggaggtctacatgtaactgcaaagtatacttctacttgtgaaatctctaatttcatgtttttattatgtgtcctttcatgtagcttgtgtctcaaggaccatgacaccttgtaactagtttttaagatgtatttgaccataatgaatttcacttgcttgagaacagtgaattttgaaaggatgtctaataaaaaccatcaatgcatcgaagcacaaagttaaaacgcaaaaaaaaaaaa

SEQ ID NO: 4327 - DNA, 1441 bp, Glycine max
tcgagcagctacgtaggcccccccccccgaaattgatgacaagtccaagcagcttgaaaatcagaagacgcacgaggaacaagttagtagggatttctctgaagagatcctgattctaaaagcagaaaatgaaaggcttaaagtggagatatcatgcctctctcagcaagtagaacaaaaagaaatgttaagaaatgacttggagcttatgaagaaatcacttgaggaatccgaggctcggttacaaactcaaacagtggaaagaaatgagctggtgagtgaaattgctttgttgaagaaggaagcagaaaggtcacttgatgagctaaataggatgaagaatctcaaggatgaaaaagagatggcaggtagagtgttgcagtcagagttagaagcacttagagctcaatacaatgacttgaaaagttctcttattgaggatgaggctgagaaagaaaatctgagaaagcaagttttccagctaaagggtgaactaaagaagaaagacgacgcattaaccaacattgagaagaggttcaaggatagcaatggacgcacacagctttctgagggaactaaaacaaactcaaagaacaaaaaaaggtgcttcaattcctcagagttcaaaagaaatggcaaatctgagggagaaaataaaaacacttgagggcatgataaagtccaaggaaactgctttggaaatgtcaacttcttcatttttggagaaggaaaaggagctccaatccaaaattgaggaactggaggacaaagtggaggaattcaaccagagcatagctttgcaaaaggttgttgaggacacgaatactattacttcaaatggtgttgcagtgtcattattcaagagtgatgtacatttgtcggagaaagaagcagaaatatccacaatagatagtaatgggggtggcaacctttgtgacactttagctgaattatcgttgctgaaggaaagaaacaactcaatggaaacggagctgaaagagttacaacaaagatactcagaaatgagtctcagatttgcggaggtagaaggtgaaagacaaaagcttgttatgactgtacgaaacctcaagaatgccagaaaggcccaaatgactactagttcatgatatctgctgtggaaatagtataaggtgaataaattaatgtgtacactggcaagatatgtatgtattttcttctccttttcttagggttttttctccctcccttctgaatcgtaaatgcgtgccataatagtgctcattttacagagttatcctagcagtttgtgatgttttaagttctatagttaccaatagtgctcatcagttctttgattgtatcttttcttttctttttcttatgcgtttatacacatattcttttattgtatgctttaactgatatatgatataatacaaatgagcatttattttattgg

SEQ ID NO: 4328 - DNA, 747 bp, Glycine max
aaacaaggtcagcgcttaaaatgtctgagcatctcaaaagaaagtcaaggttagatgatgaggtggagctagattcagaaggacgcctgattatccatgaggaagtggaatggaggaaggaaaaacatgcagatgaagattttgattctaggagtgagcgtgatagtcacatatctgcaaagtctggaactaaagcccagaagaagagaaaaacatcagattcaggttgggcttacacagggaaggaatatgctagcaaaaaggcaggtggagatgtgaagaggaaggacaaacttgaaccgtatgcatattggccacttgatcggaaaatgatgagtcggcgaccacaacagcgggctgctgcaagaaaaggtatggctagtgttgtaaagatgaccaaaaaacttgaaggaaaaagtgcctctggtgtgttgtccataaacagcttgaaactaaaaagggctcacaagaaaggcagcaaggaaaataaaaaaacagctcgagcgtaggttgattttccctgatttgcaagtatatttgataatcataatgcattcgcattatgccaattttgaaactaccctgtgctgtatatcgaagataaattaaattgaatcaaatgcttgtctttttttttttttctattgtttatttgatgagaattttggtttgcagtttcctttgcgaaatcaatttagagttctgatattaacattagctaaagatggacggtagaaattctgttac

SEQ ID NO: 4329 - DNA, 2143 bp, Glycine max
  misc_feature (754)..(754): n is a, c, g, or t
aaaacaactcctcactttcatttcatggctaactattcccactctcatatctgccaatgtctgagtggcttgctgaacttccggcgacatttttcagtcataattgccgaaaagcgccacaagaccggccaagagttggcggaggaagtgttgtccttggcacaaggcctactccaccttgggctcacacctggtcaagtggttgccatctctgcttacaatagtgaaaggtatctggagtggttattagccattgcatttgttggaggaatagctgctcctctgaactatcgctggagttttgaagaggcaagattagcaatcaatgcagtgaacccattgatgttagtgactgatgagagcagttacgcaaggtactcaaaactccagcaaaatgatgttccatctctgaagtggcatattttgttggattccccttcctcggattttactaagtggaatgtgttaactgctgaaatgcttaagaggcatcctgtaaaacttctaccatttgactactcctgggcgcctgaaggcgctgtcataatatgctttacttcaggaactacggggaagcctaagggagtcacccttagtcatggagctttgatcatacaatccctagccaagattgccatagttggctacaatgaggatgatgtatgtcattctgtgttacacaaggctatcaatattaagattttggatttggctcctcttaagtgagcaaagataaagtctatctgcatactgnctccattattccatattggtggcttgtcatctgccatgaccatgcttatggttggaggttgccatgtcttgatgccaaagtttgatgcagaatccgctgttgatgccatggagcaatatgcggtgacatcttttatcacagttcctgcaataatggctagtctgatttctataattaggcacaaagagacctggcaagggggagacactgtcaagaaaattcttaatgggggtggaagcctctcacatgagctcatcaaggacactagcatattcttccacaaagctaaacttatttcagcttatgggatgacagagacatgttcttcattgacattcctgacactctatgagccaatgcatgaaacaacaagccagtcccttcaagcatttggtgtggcaggatcaaagctcattcaccagcaacaaggtgtttgtgttggcaaggctgcaccacatatagaactaaagataagtgcagatgcttctggtcacattgggagaattctaactagaggaccacatataatgctaaggtattgggaccaaactctcacaaatccattaaatccgaataatgaagcctggcttgacacaggtgacattggatcaattgatcattatggtaatttgtggctccttggtcgaacaaatggtcgaatcaagagtggtggggagaacatttaccctgaagaggttgaggcaattctacaacaacatccagggattgcaagtgttgttgttgtgggaatcccagatgctcacctgacagagatggtagcagcatgtatccaactaagggaaaattggcaatggtcagagcagttgtctgcttcaaatgaagagtttctcctatctagaaagaatctttatcaatattgtttagaaaatcatttaagcaggtttaagataccaaaaacgtttattgtatggaggaagccatttcaactcaccacgacagggaaaataagaagagaccaagtcagaaaagaagttatgtctcagctgcaatctttgcatagtaatctttgaatataccatacttccattggcccttaaacaaccaatgcatgcttcaacatatgtttcttaatgccaaagatgaagaatggcttgaatccataataccaatattgcaatgattcctcaggtatacggcctcatgtgaaaatgttgatcaattcattgagtgacacattaattgagtacaattttgtatctctgaaaatttagtaaccgcacacattctttctccccctctcttgttcttattctttattcaacatgctgtcttcttcgtgtactttttattttatccgcaatgttaattgttagtttgtaagttttagttagtggaagaaatcgaaccctaagtaaaaaaaaaaaaaaa

SEQ ID NO: 4330 - DNA, 1644 bp, Glycine max
ttcatcaaaatattccgttgtcatttaagctaagtgccctgtgagacatcaagtagaattttcagtgtctttggaccgtaaggtgagttggatggttaagagaaaagaaaaatggtaaattttaaatcccaacaagtttgggttattgtttctttgctgtgtcggagaattgataaagtatagcattcttaatggaaaaattgttatacatcatctactgtgaatgtgattcatgtgtttctttatataccttacagcttattatatatatatatatatatatatatatatatatatatatatatatatatctttgcctgaaaaatttaaagctcctaatatatacttctacctatttctatttccaattatggccacaagttctgtaattgccattccaatcatataccatgtagctgctgccagggtacactgcaaccaagagctgttaacaatttgcagagctagagaaccagccacatgttgttgcagtttacttgttgactcaactgtgtgcatttgaactgtaaccactgcagtcaatgcagtaattattggtaatccccatctgatagggctatttcgattctcatatgtttcatgatcactttcatttgtttttttctgtcctgtggtcgtaactgaaggcttttcaagtggggttggagtagttgtacttctagttgaagatggaagagcatgagttgatggagtccaatactcctcaggatgaatgaaatttaatggggtttgatgtttggtccttgtcctatctcgtactttcttccttgcaaccgcgtctctgagcttgctgatatcaggttcaggcaatttatttacaactcttggcgggcgtgtctctgattttgatgagctactacttgatctaggtgtttgccagtataaccaattggaaattgatcttattgcctgaattgctgacattcttgattctctttggaggtctgtttccttagaacacttattagccttttccattgcttcctggaatctagtctgaaatttctccacatctacaaatatattagagacacgagcaccggctgtgtgagctgcacctactcttacattgccacggtggctgcttggacatcaagaactcccaaagctgcaaggttggacctctcaacaaccgaaatgcaattgacaggaccagattctattgcctcatcaattttgtttggggaatcagcccactgagcaacaacccttgctcttccataaactgattcaacagcaaaagtcttttcagctaacaatgcacatttcaggcaaccaacacatttgatttcatcaacaaatatggcccgctgctcactttctgacccacaccagaccgagtatatgggtctgccagtgaagcctttgaattctgaactttttgcttgctccttatcataggcaaggcgtgcatttgggtcagagagaatggcataggcgtcattgagtatgatggccatgtcatggccagcagggccagcaatgtcagggtggcagcgcttctgaagagagcgatacgcgactttgacttgagactgatcacaggagttgtcaatgcccagaaggtcatacaagtcaaagtccaccatggacgatgatgggggggggggcctacgtagctga

SEQ ID NO: 4331 - DNA, 1001 bp, Glycine max
ttgcctgaattgctgacattctttgattctccttggagggtctgtttccctaagaacactttaataggccttttcccattgcttccctggaatcttagtctgaaattttcttccacatctaccaaatatattagagacacgaggcacccggctgtgtgacctgcacctactcttacattgccacgtggctgcttggacatcaagaactccaaagctgcaaggttggacctctcaacaaccgaaatgcaattgacaggacaagattctattgcctcatcaattttgtttggggaatcagcccactgagaaacaacccttgctcttccataaactgattcaacagcaaaagtcttttcagctaacaaagcacatttcaggcaaccaacacatttgatttcatcaacaaatattgcccgctgctcactttctgacccacaccagaccgagtatatgggtctgccagtgaagcctttgaattctgaactttttgcttgctccttatcataggcaaggcgtgcatttgggtcagagagaatggaataagcttcgttgagtatgatggccatgtcatggccagcagggccagcaatgtcagggtggcagcgcttctgaagagagcgatacgccactttgacctgtgactgatcacaagagctgtcaatgcccagaaggtcatacaagtcaaagtccatcatggttgatgacgataatgccttgcatgtgagagtggaggtggaggcattggacttagagaaacacttgttgtggaggtttgaagggtgaaatccaagtggttttttgatgatgtaggaaggaagacatgcagatgcaatagttgccttgttgttgatgatggaataatgagtgtaagaggaagaagctaagggaaaaagataagacatcatcgtatcatatggtagagtttgatcacgttcggctcctatataattctatgacccacaacacaacaatgatgcaagatattttgcagttctcacatc

SEQ ID NO: 4332 - DNA, 1229 bp, Glycine max
  misc_feature (1219)..(1219): n is a, c, g, or t
tcgagccgcctccgtggccccccccccccccagagtgagctctcactgatggaaaggaaaatccatctatcagttgttggctccagttatgtgcatgatactatggatgaatcagcaaatgataatgatgttaaattcatgcataactcagatcaggaaattagatccaatttggattcaagaactgggaaatgttccacttctggaaagcagtcatcaaaagaagagcttagtagatgtaaaaatatctgtgcctacccgtcttataagatttccaaagcattctggccccactgggcgtatcggatgtttgactcttattcgcttgcacaaagggctgcagatatgtggaagcgaatagttgggatgcctgacatggatagtctcattaagaagcctgatattttatcatttcacatagccagtaaaatacctgtgtctgagtctacaaggcaggagcttttggatattgatggcattgcatataggctgcgcagggaaattgaattactagagagcattgatcttatccggtgtaaaagctgcgagactataattgcaaaaagaagtgatatgttggtgatgtcaagtgagggtcctcttagtgcatatgtgaatccaggtggttatgtgcatgagataatgactctttacaaggcaaatggtttagctctcgttggatcagcagcaacagattacagttggtttcctgggtatgcatggacaatcgcaacttgtgcaacatgtaaaacacaaatgggatggctttttacagccaggaacaaacaactgaaacccagctatttctgggggattcggagctgtcaacttgcagaggaaatacgccaaaacctttagtttgatatgtatgcagtcatctatccaaagcttagtgaaagccatgttcaagtaacactgcatggttatgtatataatgcaactttcttgtagcacttcgcatgttggtatacttatattagtaaaatatgttgcaacagcttggaagaaataaagtcacacctgaagatatttttagatgcgaatttttgcgaaaaattgtagcggtgttgttttcacagttagatgaagaagctgcctatttcgtttaaaagagctagatgccttgttaagagttttttggtctggtctggtctggctacaccgctagctaaaattggtttgggggaataatgtaaatgtacgaattaactaaactatntatatttttt

SEQ ID NO: 4333 - DNA, 1329 bp, Glycine max
tcagctacgtaggccccccccccggcaggatgcagctgcagccaataatgttgctactgataaggttgtaaagctctgccattgctgcgaagaaaatgttggcaccaaaaactcacacgtgcgaggctctttccctttctctgccacaaccgtcatctcctcctccggagcccgtgaacatcctcttccgccgccgccaactcctcagcgccaccgcatccaccatttccttcaatttcactgtccctttcacaacctctctgtccatgtcagagccggtagccagtgccggcggcctcttccaaatgcccccaccacgcctcatcaaccggtattttctggtgagagcgggtgagtcggagttcgagagcatgggagttatcaacacaaacccagtggagaagacttctgtggatagcggcttatctgaaagagggaagaaacagtctataaaagcagcttttgatttgaaagaaatgggagcgtgtgacaagggctgttggatctggtctgctattactcagagagcttaccagactgctgagattattgcttctgttaatggagttacccgtagttatatagtcccagaatacagctttctggatgcccgtggattaggtgcctttgaaggaaaaaagttggaatatgtttcagaaggaattttcaaatgctccaggtgtatgcatcagatggtatatctccgaacatcaagcctcctcccattaatgacggaactccgaatgagagtgttgcagatgtttttgttcgtgtgacacagctcatgtcaattcttgaaactcagtattcgggtgacaccgttattattgtgtcgccagattctgacaacttgacaatccttcaggcaggtttgataggactagaccttcgaaggcacagggaactgtcttttgcacctggtgaagttcgctttgttgatcccaatgacattcccgtatataagcagcctgcatctgctatatataaatgttccaagaacccaccaaattgtaactaactgttttcttttggttcaaggtataacaggaatatggatatcgattaataatagttcaagttgtactgatgtttaattataaattaaaaaaacttactatcttaatacaaactaaagatgattagatggatgtgagttcatatatgtaagtgaaaacctaaagattaatttgagttttgtaaaagatgatttgggccttggggtatccctgtcctgtataatggatatagttatccctgactctctttgtacttcaatttttccaagttgaagcatacaaagatggaaatttaaccatcaaatcttggggc

SEQ ID NO: 4334 - DNA, 1546 bp, Glycine max
tcgcccacgcgtccgcctaacactctgtcccccacgtgacgttaaaccatggaaccgccatcgcagcaacagcctccgcaaccgcaaccgccatcgcgcactgccaccatcctcggaaagtaccagctgacgcgcttcctcggccgtggcagcttcgccaaggtctaccaggggcgatccctcgtcgacggtgccgccgtggccgtgaaaatcatcgacaaatcgaaaaccgttgacgccggcatggagccacgcataatccgcgagatcgacgccatgcgccgcctccaccaccaccctaacatcctcaaaatccacgaggtgctcgccaccaaaaccaagatccacctcgtcgtggagctcgccgccggcggcgagctcttcgccaaaatctcccgccgcggaaagcttccggagtccaccgcgcgccgctacttccagcagctcgtctcggcgctccggttctgccaccgcaacggcgtggcgcaccgcgacctgaagccgcagaatctcctcctcgacggcgacggcaacctcaaggtctccgacttcgggctctccgcgctgccggagcagctcaagaacggcctcctccacaccgcctgcggcacgccggcgtacaccgcgccggagatcctccgccagagcggcggctacgacgggtccaaggccgacgcttggtcctgcggcctcatcctctacgtcttcctcgccggacacctcccattcgaagacaccaacattcccgccatgtgtaaaaaaatttcccggcgagattataagttcccggagtggatttcaaaaccagcccgttttgtaatccataaattactcgacccgaacccggaaacccgaattagcctggaggccctgtttgggaatgcgtggtttaaaaaatcactaaaaccggaaaacggcggaagaaaacgcgttggggttcagctacgtgaagagtagttataattacgaagggagtaaaagttcgggtgtgacagcgtttgacataatatcgatgtcttggggtttggatttaacgaggttgttcgaaacgaagtgggattcggggagtaaaagaaagaagaggttcacttcgagtgcaagagttgaggtggtggaggagaaggtgaaggaagtgggagggctgttggggtttaaggttgaggttgggaagagcaacggtgcaattgcgttgctcaaagggaaagtggctttggtttttgagctccttgagattgtgcctcatcaacttcttttagtggcggttaaggtgctggagggtgctttggagtttgaggaacttcattggggggattggaaacatgccttgcaagatctcgtgctctcttggcacaaccaagaatcatgattcatcaatcaaacaagcttgatgatgcttgtttttgtgaaataacactacctactcttgctttgattaatttctgttgtagcttagttataggtgagttaattcatataccatgctttgaaaaataaaacttgtttttatgtatacgtgacattaatggttatagtttttgttcttgtt

SEQ ID NO: 4335 - DNA, 1890 bp, Glycine max
tcagctacgtaggcccccccccctcttttcaatggctcctttccctctctaataagggttcctctttccttctctagcacaatttacaatctcaatggctggaatttgctgtggtgttgttggagaaggtgacactccggctccactcgagcccactcctcgcccctccaggcgccggagtttggacatcttacctttaaaatatatcgccgacatgcccatgccgccgccggaggctttacggaagcgtcccaagctcaacctcagggactgcgataacgcaattgaaaattgcgacgaatccactggacacaaggtgacgaagaaggaatccaaagtagactacgacgacgacgtcgtttcggaaactaagaacgtaactgtttcggaagttgaagaagaatctcccaagttcggcgtgacgtccgtttgcggcaggagaagagacatggaagattccgtctcggtgcggccttgcttcacccaaggcttccactacttcggcgtcttcgacggtcacggttgctctcatgttgcgactatgtgtaaggagcggctacacgagatcgtgaatgaagaaattgaaagcgcgcgcgagaatttggagtggaaactgacgatggagaacggattcgctcgcatggacgacgaggttcatcgccggagccagagcaaccagaccttcacctgcaggtgtgagctccagactcctcactgcgacgccgtcggatccaccgccgtcgtcgccgtcgtcacgccggacaaaatcgtcgtctctaactgcggcgactcccgcgccgtcctctgccgcaacggcgtcgccatccctctctcctccgatcacaagccggatcgacccgacgaattactccgagtccaatccaagggagggcgcgtgatttactgggacggtccgagagtgcttggtgtgttagcaatgtctcgagccataggtgacaattatctgaagccgtacgtgatttcagaaccggaggtgatggtgacggagcggacggaggaggacgagtgtttgatactggcgagtgatgggttgtgggatgtggtatcgaatgagaccgcatgtggggtggtgaggatgtgcctcaaggcgcagaagccgccggggtctccggggagtgacgtggcggctgacggttccgaccgtgcttgctccgatgcgtcgattctgttgaccaagttggcgctggcaaggcatagttcggataatgtgagcgtggtggtggttgatttgaggagggatcaacgacaatcatcaaactacaacgacgttaattaattgattgattaacggagacgagaaaccaaaccaaactaaggaatcacaaatgaatgagatcgcccttttaaccataatgggcacaccctttgttttcaggacttcgttaaggacgggaagaccaaatcagagggaggaggggcgtgtggcttttgcttaatcaaatgttgattgtaatgtaatgggattttaggttttaaaaaaaaaaaaaaaaaagacggaggacacgcataactccgggacgccgaattaaaaatataggaaaattttactgtagggaaaatttgtgtcgacaaaggtatcaatcggccggtcgacaccccttttctttttgtccataatcgaatctataaattggattttcctttggttcgtgtctccaccaattcagattataagattaatcttgaaaatattggatcaaagttcatcattcgatttgcaaggacttatgtacaactctcccgatattattccagttggataaatattcacatcatttgttctgtagttttgcatccagaacaacattggatatggacaacgtgaatcatctgcagttccactctagagtatcagcgtgtccgtgcttg

SEQ ID NO: 4336 - DNA, 1568 bp, Glycine max
tcagctacgtaggcccccccccccgcagtgatttgaaagatttagagagttgggggaagaagaagaagtgtgattgaaacatgcttcagattcggcttagtaaggctcctgcatcagaaggttcggcagggttgaagctgtcgccggttgagactgttacagttgcgtgccccgatcatcttgtccttgctgatcttccagttgcaaagggcattggcgccgccactgttgcctcccttgttaagactttgggccgtagatctcgccgccagcttggcgagcgagtccatttctgtgttcgctgtgatttcccgatcgctgtttatggacgcctgagcccttgtgagcatgccttttgtctggattgtgctagaagtgattcaatgtgctacctgtgtgatgatcgaatccagaagattcaaacaataaaaatgatggaaggaatcctcatttgtgcagctcctcactgtctcaagtctttcttgaagaaagctgattttgaatctcatatccaagacagccacgccagccttcttcgacccaatgcagataaagaagatggaaatgagtcggaggcacagagtgttaggcaatcgacagcctcagattccactgctcgaggtccccaaagaccagttttttctcctggttcaaattcccagcaacatgatctggaagagaaatctcgtagacagacacctagagagcaaccaccttcaaggcaaaccatgcagccaaagccaccatattatagtcaacaacaacacccttccgataccatgtctggctctgttggaggtggacaacagggctttcatcaacaaagttttgacatacagcatcccccacaagaatcttcccagtttgctgacagacaacaagcagttggtccagagaccccatttcctgagtatccaacaatgcacccagcacaaccttccaatgttccctcactggttacttcaaacccaatgctgaaccctcccatgccatttggttatcccccatacccaaacgaacgagctcagccattttatggtgctccatatgatatgcctaggcaggactcgggttctgatataggtggggaccaaagttcattactgggtttcccacaaggtgtcccaagtggcccaaattttccaggaaattatctccagccctggaattcaggaatgggtggtgtgccttttgaacaagcgcagggtggtatggtcgtggatccaagggagggcaaaggtatattggcaccacagcccatgcccctcccaccgccacctccacctccatcccacatgtcacatgggaaacagaactactattctggggaggttgggcatgatggtcagggttatgggtggcagcatgataaccgtgataactttggtaaccaagtctagtagtgaggtttccaacagatactttcttggattaggtttagttacttccgaggatgtttttactagcatatttgtcctcatgcatcattcaaatctctaaacagctattaaactattttacttttggtccgaaaaaaaaaaaaaaaaaacgatcgaaaaaaaaaaaaa

SEQ ID NO: 4337 - DNA, 1765 bp, Glycine max
ggtgcatgcaagccgtttgtagcaatacttttgcaatagcagagatgctagaaatatttacataagcatggaataggtgtctgagtgtctttatttattcatttccacgcgtccccttgtgttttgggaacttgaggactgaggtatgtctactgccagataaaactattcatgagctttcatcccacactgtaagcttttgggatatttagttaatggcatggtgttgccaactctctgacctttatagtttgattaatactgctcccattatttgaataaaaaattgaattttaacactagtcaaggtgggcttgtgcatactttacactccaagttcaaagacttttgtgtgaggaggaggcatgttgggtataaaactgttcatgtgctttttttacccaatggcttaagctttcgtgatggttggttcataatagactttattattgacccaagggaatttgtttttcaattaatagcttccatatcatgtatagaagttctctttcttgtatagtatctgatgtttttgtaaaaaatggtttccttggagcacaggtgtgacgatcgaattcataagattcaaacaattaaaatgatggaaggaatcctcatttgtgtggctcctcattgtctcaagtctttcttgaagaaagctgattttgaatctcatatccaagacagccacggcagccttcttcgacccaatgcagataaagaagatggaaatgagtcggaggcacagagtgttaggcaatcaacggcttcagattccactgctcgcggtccccaaagaccagttttttctcctggttcaaattcccagcaacatgatctggaagacaaatctcgtagacagacacacctagagagcaaccaaagccaccatattatggtcaacaacaacacccttcagataccatgtctgcctctgttggtggtggacaacagggctttcatctacaaaattttgacatgcagcatcccccacaagatccttcccagtttgctgacagacaacaggcagttggtccagaggccccatttcccgggtatcctgcaatgcaccctgcacaaacttccaatgttcccttgctggttacttcaaacccaatgccggacccacccatgacatttggctatcccccttacccaaacgaacgagctcagccattttacggtgctccctatgatatgcctaggcaggactcaggttctgatataggtggggaccagagttcattagtgggtttcccgcaaggtgtcccaaatggcccaaattttccaggaaattatccccagccatggaattcaggaatgggtggtgtgccttttgaacaagcacagggtggtatggttgtggatccaagggagggcaaaggtatattggcaccacagcccatgcccctcccaccgccacctccacctccatcccacatgtcatatgggaaacagaactactattctggggagcttgggcatgatggtcagagttatggggggtggcagcatgatacccgtgatagctttggtagccaaggctagtaaggcttccaatctttactttcttggattaggtttggttactgttcaggatgtttctgcaaccatatttgtctcatgcatcattcaaattgctaaacagcgattagactatttacttttgggccaatttgtattttgtatattttaatcgaattttgagtttttccattatcatttaccaaaggtaatgaaaagttttatgtcttgtttggtgaac

SEQ ID NO: 4338 - DNA, 818 bp, Glycine max
  misc_feature (797)..(797): n is a, c, g, or t
cggggaacagaaacaagaaaaaaaaactcccacaatagggatgaggagtgccgacaggattaattgaggtcagggactgaaagggggtgttctgttctgatcggatctgaaatcatcgggaaaatgtcgtcgtttctgcaccagagaagcagtctccagaacccattctcgaatccattcccggcatcaactccatcatcatcgaattcgaagaaatccctgtccatcatgggccccaccaccctcctagccctaatctccctcatagtcatactcggcgtcttctgcccctgggtgggctttccccagggcttccccttcactcccactcccacttccaaatgggctcactacactttagaacaagcgctctccttcgtcgccaaaaacggttcctccgtcatcgtctgcattgtgagccaaccctacttgcccttcctcaacaactggctcatcagcatttccatgcagaagcgccaagacatggtccttgtcatcgccgaggactacgcttctctcgacagggtcaatctgctttggcctggccacgccgtcctcatccctcccgtcctcgacgccgaagctgcccacaagtttggttctcagggtttcttcaactttacagcaaggcggccaagccatctgctgaagattttggagcttggatatagtgtgatgtacaatgatgttgatatggttttggttggcagatccatttccctatctgcagggaaccatgatgtgtactttacagatgatatgactgcaattaaaccattgaaccattctcatgattnaccaccaccaggaaaaggggc

SEQ ID NO: 4339 - DNA, 2007 bp, Glycine max
ccacgcgtccggaaacaactcctctctactcaaacccttcttcctcacacccacaacaacaacaacaacccctttcccccaaaccctagaatcgccccacacagatcctcatcgctcccatccaattcccaaccattttttttctatcccaaacaccgttgaccacacacactcgaggttttatccattaaagttccgctttttattcctgggtcctttttttttttcttctctttttattgggcataggaatgttgggtactgggttgaacttcgggcgcgctcgcggcgaggatcggttctattctccggcaaaggctcgccggtcgcttctaactatggagaatgacaagctgcgtagggcccaaagcgacgttgccgcgtctcgctccgttagagacaaatcggtggattcgggtaaccggataccggagaaccgggtcgggtcggacgaggcaaagaagagtggcgcggttccttcgtgtgaaccggtggcgaaccggttgagtaatctggagcggttcttgcaggcgatcacaccctccgtgcctgctcagtgtctgcctaagaggacgacaagaggactcagggcgtgtggggcggagtttcagccttacttcgttctcggggatttgtgggaatcctttcgggaatggagtgcttatggcgcaggagtgccacttgtactgaatgacaaggatagtgttgttcagtactatgttccgtatctgtctgggatccaaatttattcccagaatgtgaagccaactgtaaagtcaaggcaactcggggaggatagtgacagtgattttagggactcaagtagtgatggtagcagtgatagtgaacctgtacatggaaggggattgaggaatcttccccatctgttagaagaggtgcctcaatggatgggcggattatctttgagagatcaccattcccttccaccagatgggttttctagtgatgatggagaatctgtcaattctcagggttacttgatttttgagtatcttgaacgggaccctccttacagccgtgagcctttggctgataagataatggatcttgcttttcaattccctgaactggtgacccttagaagttgtgatatactaccatcaagttggatatctgtagcctggtatccaatttacaggataccaactggtccaacattaaaagatctcgatgcttgttttctgacataccattctctttatatgcccatgggaggttcacaaagagtccaggctcccatgccacatcctactgagatggacaatgtccataaaatgtctttacctgtttttggtcttgcttcatataagttcaaaggatctctgtggactcctaatggtggacacgaatgccagcggtctcttttgcagggtgctgatgactggttaagactgcatcaagtcagtcacccagattttcagtttttcagccgttgatgacgttaaggtgactgtaatattatactttggccatttaagaatagaacattagcatttgccagtgcctcttggttcatttcttagatggccatacttgatgaagttggagttaataacataattgacagaaggaagatgaaaaatggagaaaagatgtttagcactgtccttggtaattttctgtatcgtttccttccgtaataagtgaaagaatcagaaaagcaataatggtaataaagcagtgaagctttggacaagaggcagtgttgaggcttaaatgtgttcatggtggatgtacagattaacaagcagcttctctagtgctagctgatttgtttgtttgctaacatcaatgagtcctccatcagttgcttatctgttgttgggttatgttaaaagagaacaggctacattttttctgtcctggtgatgttctataattggactttagctttaatttattggagaaattttactggatatggtgttagatgcattcatgcttgaattgcccccatctctattttaagtgttacaaatgtttatc

SEQ ID NO: 4340 - DNA, 1839 bp, Glycine max
ttcgcgcattcacacatctatgcaatctaaaccgtcaatacagatcaaacgcttcagaatttctacgaacagaatacgcatccaaaataaaataccattcgatcttaatccaaggatcacaatcgatgaacgtatatatccgtaaacacacggaatccgtctgcgtttgaaggaaggttcgacggaagaatcttctctgactcgcccaaaccaaacgctttttttttctttccacgcgcagactaacaccctttccttcttcttcgttcggatcagattcttggaattctgaatcaaaattctcagaagaaggagatgtatagcaatttcaaagagcaagcaatagagtacgtgaaacaagcggtagatgaagacaataagggaaactatgcgaaagcgtttcagctttacatgaacgcgttggagtatttcaaaacgcatctcaagtacgagaagaaccctaagatcaaggaggccatcacgcagaaattcaccgagtatctccgccgggccgaggagatccgggcggtcctcgacgacgggcccagcggcccggcctccagcggggacgccgcggtcgccacacggcccaagacgaagcccaaggacggagggaaagacggagacggcgaggatcccagctacgtaggcccccccccccggctcaactccgcgatcgttagggaaaagcccaacgtgaagtggaacgacgtcgcggggttagagagcgcgaagcaggcgctgcaggaagcggttatcttgcccgtgaagtttccgcagttcttcactggtaagcgacgaccttggagagcgttcttgttgtacggaccgccggggacggggaaatcgtatttggccaaggccgttgccacagaagctgattctacgtttttcagtgtttcttcatcagacctggtttcaaagtggatgggagaaagtgaaaagctggtctcaaatcttttccaaatggctcgcgaaagtgcaccttctataatattcgttgatgaaatagattctctatgtggtcaacgtggagaagggaatgagagtgaagcttcaaggcgtattaaaactgagcttctggtgcagatgcagggtgtgggacacaatgatcagaaagttcttgttcttgcagctacaaatacaccttatgctctagaccaggcaataaggcggcgtttcgataagcgtatatacatacccctacctgatttaaaggctcgccaacacatgttcaaggtgcacctaggagatactccccataacttggctgaaagtgattttgaacatttggctcgcaagacagaggggttttcaggttcagatatatctgtctgtgtgaaggatgttttatttgaacctgttcgcaaaacccaagatgccatgtttttctttaggaatcctgagggtatgtggatcccatgtgggccaaagcaacagggttcagtgcaaactacaatgcaggatattgctgcgaaaggacttgcttctaagatcctcccacctcctatatcgagaacagattttgacaaagtacttgctagacaaagacccaccgtaagcaagtctgaccttgatgttcatgagagattcacaaaggagttcggagaggaaggataattctgacggaatttttcttcaatcatctgcactagcttaaacatgttatgatttgtaatttacagtgctattggatcaagtgaaatgcatatttttactaatcataatttgtgtataagaacagactgatgaaataatcagaaaaataaatttgatgtgaaaaaaaaataaaaaaaactcaaaatagtcttcattttgaatgtaggtgtcctaaatttt

SEQ ID NO: 4341 - DNA, 1824 bp, Glycine max
tcagctacgtaggcccccccccccccccgaccaaaaccagaacattgggttttctcttttttctcttttccccttctgtcctcgaatttccgatcaattccgatttcaacaacagctagggtttcgaaatcgaccacaccttctcctccctctttccccaacacacacgatcgcgatgcacctctagggtttctccctctccctggttcgaaatttcgattcccgtacatgccatcggtggaggaagaagatgtatagcaatttcaaggagcaagcgatagaatacgtgaagcaggccgtgcaggaagacaatgccggaaactacgcgaaagcgttccctctctacatgaacgccttggagtacttcaagacgcatctcaagtacgaaaagaaccctaagatcaaggaagccatcacgcagaagttcaccgagtacctgcgccgggccgaggagattcgggccgtgctcgacgacggcggccccggtccggcctccaacggggacgcggctgtggctgcaaggcccaaaaccaagccaaaggacggtgaaggcggtggcgacggcgaggaccccgagcaggccaagctccgggccgggctcaactcggccatcataagggagaagcccaacgtgaagtggaacgacgtcgcagggttggagagcgccaaacaggccttgcaggaggctgtgattttgcctgtaaagttccctcagttctttactgggaaaagacgaccctggagagctttcttgttgtatggacctcctggaacgggaaaatcatatttagccaaggcagttgcaacggaagccgagtccacgtttttcagtgtttcttcatcagaccttgtttcaaagtggatgggtgaaagtgaaaagctggtttcaaaccttttcgaaatggctcgagaaagtgccccttctatcatatttattgacgaaattgattccctgtgtggtcagcgtggagaaggcaacgagagtgaagcttcaagacggattaaaacagagcttctggtgcagatgcagggtgtaggacacaatgatcagaaagttcttgttcttgcagcaacaaatacgccctatgccttagaccaggcaataaggcgtcgttttgataagcgcatatatattccgctaccagatttgaaggctcgccaacacatgttcaaggtgcatctaggagatactccccataacttgactgaaagtgattttgaatacttggctagcaggacagagggtttttctggttcagatatatctgtctgtgtaaaggatgttttatttgaacctgttcgcaaaacccaagatgcaatgttcttctttaagaatcctgagggtatgtggatcccatgtggacctaagcaacagggtgcagtacaaacctcaatgcaagagcttgctgcaaaaggacttgcttctaagatccttccgccccctattaggaggacagattttgagaaggtactcgctagacaaaggcctacagtaagcaaagccgaccttgatgttcacgagagattcacgaaggaatttggagaggaaggttaatactgatggaatttcactttgaaggtccacactggtttcaaatatattgttataatttgtaatttattagccgttggatgcaaatgaaatgcatctttttcatttttggggatgtaaaggccccttttgtaccgaggtggatttataaaggtcgatactcatttttcttcttctaaattgtgtataacagaatctgaaatgatttgaaaaaataacttgtgtgatgctggatttttaaaaaaaaaaaaaatggattaagggcgcccgcc

SEQ ID NO: 4342 - DNA, 1771 bp, Glycine max
atactctattttttctcttttcccctcgcgtcctcgaatttccgatcaattccgattccaacaactagggtttcgaaatcgatcacaccttctccctctttccccaacacacacgatcgcgatgcatctctagggtttctccctctccctggttcgaaatttcgattctcgtacatgccatcggtggtgaccggaggagcaagacgatgtatagcaatttcaaggagcaagccatagagtacgtgaagcaggccgtgcaggaagacaatgcgggaaactacgcgaaagcgttccctctctacatgaacgccttggagtacttcaagacgcatctcaagtacgagaagaaccctaagatcaaggaagccatcacgcagaaattcaccgagtacctgcgccgggccgaggagattcgggccgtgctcgacgatggcggccccggcccagcctccaacggggacgcggcggtggctgcaaggcccaagaccaagccgaaggacggggaaagcggtggcggtggtgacggcgaggaccccgagcaggccaagctccgggccgggctcaactcggccatcataagggaaaagcccaacgtgaagtggaacgacgtcgcagggttggagagcgccaaacaggccttgcaggaggctgtgattttgcctgtgaagttccctcagttctttactgggaaaagacgaccctggagagctttcttgttgtatggacctcctggaacgggaaaatcatatttagccaaggcagttgcaacagaagctgagtccacgtttttcagtgtttcttcatcagaccttgtttcaaagtggatgggtgaaagtgaaaagctggtttcaaaccttttcgaaatggctcgagaaagtgccccttctatcatatttattgacgaaattgattccctgtgtggtcagcgtggagaaggcaatgagagtgaagcttcaagacggattaaaacagagcttctggtgcagatgcagggtgtaggacacaatgatcagaaagttcttgttcttgcagcaacaaatacgccctatgctctagaccaggcaataaggcgtcgttttgataagcgcatatatattccactaccagatttgaaggctcgccaacacatgttcaaggtgcatctaggagatactccccataacttgactgaaagcgattttgaatacttggctagcaggacagaggggttttctggttcagacatatctgtctgtgtaaaggatgtgttatttgaacctgttcgcaaaacccaagatgcaatgttcttcttgaagaatcctgagggtatgtggatcccgtgtggaccaaagcaacagggtgcagtacaaacctcaatgcaagagcttgctgcaaaaggacttgcttctaagatccttccgccccctattacgaggacagattttgagaaggtactcgctagacaaaggcctacagtaagcaaagccgaccttgatgttcacgagagattcacaaaggaatttggagaggaaggttaaatactgatggaattttcactttgaaggtccacactggtttcaaatatattgttataatttgtaatttatttagctgttggatcaaatgaaatgcatctatttcattttgttttggggatgtaaagtccccttttgtatcgaggtggatttataaaggtcgatactcatttttcttcttctaaattgtgtataacagaatctgaaatgatttgaaaaaataacttgtgtgatgctgggttcttattttaaaaaaa

SEQ ID NO: 4343 - DNA, 1691 bp, Glycine max
tttagccctcgccccccgccccaaccgagcccgcttctctttccacgcgcaaacaaaacaccctttccttcttcttcttcttcttcttcgttccgatcagattcttcgaattctgaatcaaaattcatcgaagaagaaggagaaggagatgtatagcaatttcaaagagcaagcaatagagtacgtgaaacaagcggtagatgaagacaataagggaaactacgcgaaagcgtttcaactttacatgaacgcgttggagtatttcaaaacgcacctcaagtacgagaagaaccctaagatcaaggaggccatcactcagaaattcaccgagtatctccgccgggccgaggagatccgggccgtcctcgacgatgggcccagcggcccggcctccagcggggacgccgcggtcgccacaaggcccaagacgaagcccaaggacggaggcaaagatggagacggcgaggatcccgagcaggccaagctacgggccgggctcaactccgctatcgttagggaaaagcccaacgtgaagtggaacgacgtcgcggggcttgagagcgccaagcaggctttgcaggaagcggttatcttgcccgtgaagtttccgcagttcttcactggtaaacgacgaccttggagagcgtttttgttgtacggaccgccggggacgggtaaatcgtatttggccaaggccgttgccacagaagctgattctacgtttttcagtgtttcttcgtcagacctggtttcaaagtggatgggagaaagtgaaaagctggtctcaaatcttttccaaatggcacgcgaaagtgcaccttctatcatattcgttgatgaaatagactctctatgtggtcagcgtggagaagggaatgagagtgaagcttcaaggcgtattaaaactgagcttctggtgcagatgcagggtgttggacacaatgatcagaaagttcttgttctagcagctacaaatacaccttatgctctagaccaggcaataaggcggcgtttcgataagcgtatatacatacccctacctgatttaaaggctcgccaacacatgttcaaggtgcacctaggagatactccccataacttggctgaaagtgatttcgaacatttggctcgcaagacagaggggttttcaggttcagatatatctgtctgtgtgaaggatgttttatttgaacctgttcgcaaaacccaagatgccatgtttttctttaggaatcctgaggatatgtggatcccatgtggaccaaagcaacagagtgcagtacaaactacaatgcaggatcttgctgcgaaaggacttgcttctaagatcctgccaccacctatatcgagaacagattttgacaaagtacttgctagacaaagacccactgtaagcaagtctgaccttgatgttcacgagcgattcacaaaggaattcggagaggaaggataattctgacagaatttttcttcaaccatcttcactagtttaaacatgttatgatttgtaatttacagagctattggatcaagtgaaatgcatatttttactaatcataatttgtgtataaaaacagactgatgaaatgatcagaaaaataaattttatgtgaatatgtgattccagttactcaaaaaaaaaaaaaaaaaaaaaaaaaaaaaaaaaaaaaaaaaaaaaaaaaaaaaaaaaa

SEQ ID NO: 4344 - DNA, 1013 bp, Glycine max
actggttccgtctgtgacgtggcgtctcgtgcagaaagacaagacctcatagctagagtctccaatgagtttaatggcaaactcaatatccttgtaaacaacgtgggaacaaacgtaccgaaacatacccttgatgttacggaggaagacttctcatttctgataaatacaaatcttgaatctgcttaccacctaagccagcttgcacatcctctcctgaaagcttcagaggctgcaaacatcatttttatatcctccattgctggtgtgctatcaataggtataggatccacttatggtgcaacaaaaggagcaatgaaccaactgactaaaaatttggcatgtgagtgggccaaagacaatataaggactaattgcgttgcaccagggccaatcaaaacccctctcggtgacaagcattttaaaaatgaaaaacttcttaatgctttcatttcgcaaaccccccttggacggattggagaagcagaggaagtgtcttcattggtggcattcctctgcttacctgcagcctcttacataacaggacagaccatttgtgttgatggtggattaacagtgaatggtctctatataaattagagaagtactaccaacacactctctaacacacttctcttgacacatattctaccataagttacaaataataaaaaattacaaaatcatgaaaataagatctaggacccatatatttttgtgatatctaaaaaatttcaagcaataaaaaaaatgtattgaaaagagtgtataagataatgtgttgttagcatttttatataaactatgttaagagcaaggtctgatgcatacgttgctagtttttatattagtattgagaataaatagctgaaagtcccttggttcaatctatatcatttgggagggggaatttgttgggaataaatttgtatgtccacgatccaatcatcatgtaatcaattttaattttaataataaagtattattttattttcaaaatcaaaaaaaaaaca

SEQ ID NO: 4345 - DNA, 1189 bp, Glycine max
cccgcgtccctcgtgccaatatggtgttcacaatgtggttgaggcctctgatactagcctctgtttttgtatgggcagtggcaactccttctccacaaggatgtgatttttctcatggcagatggatcattgatgaagcttccttacaccctctctatgatgcctcaagggactgtcccttcattgggtttgattgctcaagatatgcaaggcctgataaggattatctcaagtatagatggatgccctctggttgtgatcttccaaggtttgatggtaagaagttcttggagagaagcataggaaagaagataatgtttgtgggggactccataagtaacaacatgtggcagtcactcacttgtttgctacacattgcagtcccaaactcaaattacactttaacaagtcaaacacaggaacttttggtgttctcagttccggaatataaagcttcaatcatgtggttgaaaaatgggttcctagttgatttggttcatgacaaagaaagaggtagaattttgaaattggatagcattagttctggggaccagtggaaagaagtggatgttttgattttcaacacctaccattggtggactcacactggacagtctcaagggtgggattactttcaagtgggcaatgaattaagaaaggacatggatcacatggaagctttcaagattgggctgagtacttgggctaaatgggttgattctaacattgatccttcaaagactagagtcttgtttcagggaatcgctgcttcccatgttgataaaaaggggtgcctaaggcaaactcaaccagatgaaggaccaatgccaccatatcctggtgcggacattgtgaagagcgttataagtaacatggcaaagcctgcagaattgctagacatcactctgctcacacaactgaggagggatggtcacccctctatctacacagggcgtggcacttcttttgatgactgcagtcactggtgtctggctggtgttcctgatgcttggaatctcgagccgattcggctcgagtttggaaattattagtatcttcatctcatttgtcctttatttatgttatccttggttatttatttattgcccttgaggaaatagggctctcataaatttgaatatgagcttttaattaaattcgaaatattaaaaaatgccatgtttaaaaa

SEQ ID NO: 4346 - DNA, 1680 bp, Glycine max
  misc_feature (1596)..(1597): n is a, c, g, or t
  misc_feature (1604)..(1606): n is a, c, g, or t
  misc_feature (1616)..(1616): n is a, c, g, or t
  misc_feature (1619)..(1619): n is a, c, g, or t
  misc_feature (1622)..(1622): n is a, c, g, or t
  misc_feature (1630)..(1630): n is a, c, g, or t
  misc_feature (1634)..(1634): n is a, c, g, or t
  misc_feature (1638)..(1638): n is a, c, g, or t
  misc_feature (1640)..(1641): n is a, c, g, or t
  misc_feature (1644)..(1645): n is a, c, g, or t
  misc_feature (1647)..(1647): n is a, c, g, or t
  misc_feature (1653)..(1653): n is a, c, g, or t
  misc_feature (1655)..(1655): n is a, c, g, or t
  misc_feature (1659)..(1659): n is a, c, g, or t
  misc_feature (1663)..(1663): n is a, c, g, or t
  misc_feature (1665)..(1665): n is a, c, g, or t
  misc_feature (1667)..(1668): n is a, c, g, or t
  misc_feature (1673)..(1673): n is a, c, g, or t
  misc_feature (1675)..(1677): n is a, c, g, or t
  misc_feature (1679)..(1679): n is a, c, g, or t
tcagcctccgtggccccccccccttgccattcatctagaactcgtattgaaaattcacaaccctctaatttgatgcaagggacaagctttatttttccagttaccgttcagagacagacactgccaactatatcatcgacagatggtatagaaaccaagggaatagttggtggtaatatggcttccaaaagaaaaagaaaggcatggtcagaagaagaggacatgcagctacgagctgctgttcaaagatggggcgaagggaattgggcaaccatggcaaaaggagacgactttcctattaagagaagtgctacacagttggcccagaggtggagcattttaagaaagaaagatggttgtacaaatacagtaactgtaaccagcacacagtatactactgctgaacaactggcaacacgacactctttatctttagcccttgacatgccattcaaaaagttgactgctcctggaatgactgatgttaagccatccacatcagttaaaaatcaagtgcagattagaaatactacagagaaggttgccagtagttttgtaccacctcaacaagctttgttgggatcttctgatttgcatgcaaaatccaaattagcagatgaaaaaccagtcttgaagggtaatctaatttcagatcctgtggtaaaatctgccacagcaactttggggacacgaattgatcccctttcaaatactatatcacaaattaaagttgctcaagtaaaaaatgccatagataccaagccagcagtcagctctttgacaaagccatccatttctaccaatttgccttctgatccaaagaacaaacatgttacccctttggctgataaaggtgctcaagtaaaaaatgccgtggatactactgagcctgctgttagctctttgacaaagccatctatttctaccaatttgccttctgacccaaagaacaaacacgctacccctttggctgataaagttccattgaagcaagatgttaatcccacaaaagagttacaagtttctaatccgagcaccacaccaaaagagaagttacaagaaaatgagcctcctaaagttaccactggaagccaggttgatagcaacccagagaagggaagattagaaaaaggtcaagagacgagcatacctcttgttaaaattagtggtggtgaggaagtttcaaaagataaagcaaatcaaggagtagtgtgtgaagagcaaggaagtgttaagaaggctactgagaaaaacaacattgacaaggggagtcaaagtttagagcaagacaagaagataaattcaattaatcaaagttcaaatgatcaaaacgggaatgataaacatgtaaatttgccagtacaagatgaactcagccaaagtgccaaggtagtaaaaagtgatggggaatgttgagtgatttagtttgtgaagatgagtagattatttattgaattctaacttaaaagtttggatgaaattttaagttattttaggaatctgtagcacattaatgtgttgtaatattttattaaattcttctttagtggtaaatatattttgatgacttgcaaatttctataaatatatggatcnnttgcgtnnnctttttgttnatnttnttgggtgntttngggntnnttnntnttttangnttgngttntntnntttcntnnntnt

SEQ ID NO: 4347 - DNA, 2340 bp, Glycine max
gttttggaataagaagagaagagaagagtgaagtggtgtttggaactgaaaatttgaactctctctttaacgaaacaaaagcactttccacgtgcttcgatggcttccgttcccggatctcgatccggcggcaaaatcgtccgaacgcgccggagcgccgccgcgaggagccacaccccctacgaccgacccgctcctccgccggagcctccgagccctaattggctctcgcgtttcgttatctctccctcgcgtttcattgcttctggcgccggaaaaatcttctcctctgttttggatctcgacaattctccttctgattcttcctctgctacttgttctctctcctcttcggctaacgattctcgagtcagctacgtagtcgcccccccctccgatgctgaggaagttggtactttcgatgatgaaaatgataacccttctgaaggtgatgtggcattgagcaagccatgtgttgggaatagcaaaagcaagcatatgattgagcaactacttatgaaggagtcattctcaagggaagaatgtgaccggctgataaaaataatatcagctacgtaggccccccccccaaatgatgatgatggggataagaggccaacggatatacccaacaagatttttggaagtgattcacctgagctccatagtgctgccattatggaggcaaagaaatggctgcgggaaaagaagtcaggtttagatacaaattcagatataggttatggaagtcctagtttgaatttggttgcattaccacaagaccccaaagatgaaggatcaccagtggatgtggctaagttgtatatgcgcacacgccctccatgggcatcaccttccatagaccatactaaacctcaaacaccatctggaattcagctatttaaagaagaaacaccatatctatttggcaacaattctacaccaccctccaagttgaaaagggattctgctgctactggttcatggagtattcaggatgaaatacgaagagtaagatccagggcaacagaggatttgcttagatcacttccatcctcaaaaattgattggtctgcatttgccatggagaataaaaataatgtaaactcttcagctattgaaaatattggagctagtttgggagagagagtacacaattcaacaaatttagtggatgcatctgcgaacttggccagaggattaggttctcaggtctctccagatttggatagtaaactagatgagttccaacctgagtctgtgctgtctaatccagttaacactaattttgaacagaatcagggctctgttgctgttcagcagaccagaggtacagaagatggcagcagagaaataactacttcaggactaagagatgggtcctcggatgatatgcacagggatggcagtctggttaaagtcaatggcatcagtgacacaaatgggtctggtcatcagctagactcagttgaagaaactagagatgctataaattctagattacaagatagtaaccacttagtaatcaaagagaaggttggagccgaagatgcattggcaaatgggtttccctcttcagggccaagtttcaatgcagggcaggttattgaacagaacacaaaaacattggacaacaaacccaatacaaccgattcaagtcaggaaaggacagcacaaggtgttcttgagcaagaggagtgtcagacgttgcgtgaatcaacggaggtgcctgatgtgattggggatgactctgttgctgaccgtgttgcctctggttcacagaacagttccagtatgtatgaggttcaacatgatacttctcagccgggtgtagaattaggtttgccagccacaccaactagcattgctaagcaaaagggaagaagaattacaaccagatacaacagaaggggcaggagcaagggtgtcaaatgatgcctgttgtattatgtatgttaaattgtaagtcactgttagcttagaaagtagggattctgccaggtcatttgttgtgagattaataatattcacgaatgagtctacgtcaacttaggtttattttttctttcatctgttctttcttcttttttgggcgattacgttcagggaaatcaggttcaggttcaggaattggaatgtatttgctgtataaaatggttaaattagcgacatgttctttttttcttttttagctggttaactagcttacacggatttatgggacatgtacgaacttgtgcagcctgaatgaggctcctccaggaatcataacattttgtaacattccagtactcgaaataatttaaattagttaactagaaaggttttttgtaaaaaaaa

SEQ ID NO: 4348 - DNA, 2322 bp, Glycine max
  misc_feature (2124)..(2126): n is a, c, g, or t
tttgagtcttagtgggagtttatgtccttctgttgcgaacttgggttctctcgttgagattaggttgggggggaatgatattagtggtgtggtgcctggtaattggactagtttggcatctttgaaatcgttggatctgagtgggaacaacatttatcctccactgcctgactttaagactggattgaaacctgttgttgtggggaatcctctgttaaatggtggagcgaaaactactccttcggggaacaataacccgtcaactggatctgggaatgttgacccttcagggaacactaactcgaattctagttcaagtgattctcatgaaactaagaaatccaaaaggaaacagttggtttcgattgttgctccgattgcgggtgtggcagctgcggcttttctgctcattccgctctatgcatactgtttcaggaggaggaacggtggcttccaggctccaacttcactggtaattcaccctagggatccatcggattcggacagtgctgtgaagattgctgttgctaataataccaatggaagcatttccactttgacagggagtgggtctgggagtaggaatagtagtggaattggggactctcacatcattgaagctggaaatctaaggatatcagttcaggttctgaggaaagtgaccgagaactttgcgcctgagaatgagcttggccgtggtggatttggggttgtttataagggggagttggatgatggtactaaaattgcagtgaaacgaatggaagcaggtgtgattagtagtaaggccttggatgaattccagtctgagattgcagttctatcgaaagtccgacaccggcatctggtgtctcttttgggttattctacagagggtaatgaaagaattctagtgtacgagtatatgccacaaggggctctcagtaagcatcttttccattggaagagccatgatctggagcccctctcttggaagaggagactcaatattgccttggatgttgccagagggatggagtatctccatactctggctcaccaaagcttcattcacagagatcttaagccgtcaaatatcttgcttgctgatgatttcaaagcaaaagtctccgattttgggttggtaaaacttgctcctgaaggggaaaaagcatctgtagtgacccggcttgcagggacgtttggatatttggcgccagaatatgcagtgacaggaaaaatcactaccaaagcagatgttttcagttttggggttgtgctaatggagttgttgactggattaatggcacttgatgaggatagacctgaggaaagccaatacttggcagcatggttctggcatataaaatcagataagaagaaactaatggctgctatcgatcctgcccttgatgtaaaagaagaaacatttgagagcgtctccatcattgctgagctagcagggcactgcactgcaagagaaccaagccaacggccagatatgggtcatgccgtgaatgtgttggcaccgcttgtcgaaaaatggaaaccctttgatgatgacaccgaggagtattccggcattgattatagccttccccttaaccagatggtgaagggatggcaagaggcagaaggaaaggacttaagttatatggaccttgaagacagtaagagtagtatccctgcaaggcctactggatttgcagattcttttacttctgctgatggccggtgaaacaaattgtttggtgtacccgttttccttttgattttccaatagatgtagatagatagcatgctcttttctttctgtctgtcttaattggcaaagtgtctagtgccagtgttataatagtgtttgagtaaagagatttcacatgcacttgaaatctcagttgcatgctttgtattttccaccaagacatttaagtgttaatggttgtagatattgcgccacgatcaatcatcaatgagaatgcttgtttttttgttcaaaaaaaaaaaaaaaaaaaaaaaaaaaaaaaaaaaaaaaaaaaaaaaaaaaaaaaaaaaaaaaaaaaaaaaaaaaaaaaaaaaaaaaaaaaaaaaaaaaaaaaaaaaaaaaaaaaaaaaaaaaaaaaaaaaaaaaaaaaaaaaaaaaannngggggggccccttttaaaaaaaacaaatttactgaccgggggctggaaagtaaaaatttttttttgggggccccaaaaaaaaatttccgggcccgcgttttaaacccgggggggggggaaaacccggggggcccccaatttaatgggtttggaaaaaaaaccctttttcccagggggggaaaaaaaaaaagggccc

SEQ ID NO: 4349 - DNA, 1942 bp, Glycine max
  misc_feature (1938)..(1938): n is a, c, g, or t
  misc_feature (1941)..(1941): n is a, c, g, or t
gtgacagacactcacacacacagcacaacaaaagcgttttatcttccgttccatgtctatacactgaaatggcgtccatgtctacgtgcatcactgtgatccccacttgtgggctaccgcggcggctactttccttcaccccgaagcagccaatatcactcccttgcgtgattggaggagtcccgaaaagagtatgggattctagggttttggtggcgaggccggggggcgcagtggaaagcgacaagttgccttcggatgtgagaaagcgaacgatggatgcggtggatgggtgtggagggagagtgaccattggggatgtggctagcagagctggcctcaacttgaatcaggcccagaaggctctccaagctcttgctgctgatgcggatggcttcttagaggtttctgaggaaggtgacgttctgtatgtatttccaaaagattatcgatcaaggcttggtgccaagtcatttaggattaaagctgagccattttttgaaaaggccaaggccgcaggagaatactttataagggtttcttttgggacagcacttattgcatccattgttattgtttacactacaataattgctcttgtaactagcagtagaagtgaagaggacaatcggggaaggcgtggaggcaggtcatatgattcaggattcactttctactttaaccctgttgatttattctggtactgggatccatattattataggaggcgaaggctacaagctgatgatgacaagatgaacttcattgaatcggtcttctcctttgtatttggagatggtgatcccaatcaaggaattgaagaagagagatggaagttggttgggcttgaggactgaattcagtgattgggcaatacatagcatctaatggtggcgttgttgcagctgaagaacttgctccatatcttgatatagattccacagagggaattaaggatgatgaatcctatattttacctgtgctcttacgatttgatggtcaacctgatgttgatgaggagggaaatattctgtataggtttccatctttgcagaggacagcttctcaaaagagtaagagaaaagaatatgttggaaggagatgggcagattgggttggaattgagaagtttttcaaggagaaaaaatggcaattcagtaaaactggcacgccagagagagcaatggtcattggcctgggtggcctcaatctgtttggagttattattcttggaaccatgttgaaagatatggcagttgcacccagtagcttcattaaatttgtagccgacatatttcctcttcttcagatttatgctggttccttctttgcaattcctcttgttcggtggttttttattcggaaaaagaatgctgatattgaaaagagaaacaaagctaggcagcagtgtgcacaagttcttgaattacctgacacttcactaaggcagaagcttttcagtgctcgggacatggcccaaaagacagtcataggacaggatcaaattgtgtatagtactgacaaggacttacttgagcaagagtatgaagctcgcgaatgggataaaaagtttcgggagctagagaggtctgattaagggtcaactattaatctgttatacagggcgttgagctctcattttgccatcattgacaactttagcacagcatctaggctgccttctgtgaaagcattgggtagccctggtttattgcaggcatttactggtccatgtatcaatcttaattcgtttctcttaggtccagcaatttaagtgataaatttgtaatgtgatctataaaaaaggaatagtgaaagtttctataggacaaacaatgtaacttaataggcattacctttgtatttatgattttatacgccagagtttcgaaatttattagcgcgtcgaagtaacatgaacctttatcaatttagcanaana

SEQ ID NO: 4350 - DNA, 2939 bp, Glycine max
tccgcgcggcattgctctgcgagttttgacttttaagcgtggtttgcttttcaattcagcattttgtcgcttcttctattaattctaccaagcttcgctgattgatccatcttcgtcgacgaattgtgcattcctgtgctgtgctggtgatgggtatggtttggatttcaaatgtctttcttctcgggtaatgagatgcatcaagttttgaagtacagtgagcagggatggacattgctgctcttttaacttctgctggaattaatattgctgtgtgtgtggtgctcttttcattttattctgtattaagaaaacaacccagcaatgttaatgtgtactttggaaggagactagcctctcagcattcaagacgcattgatctctgcttggaaagatttgttccctcccctagctggatattgaaagcatgggaaacatctgaggatgagatactggccattggtggcttggatgctgtggttttcgtgaggatacttgtgttcaggggaagagttttcaggagaaacattcttcacattgagttttcctcgaagaacttcaaatcatgatgcagaaagaggcttggtgagaatatcagcccactgatctagagctggaacgtggacaatatattcaagtgttttccattgctgctgccatatgcactgttatggtgcttcctgtaaattacaatggtatgggcggaatgcgtaagaatatacctttcgagtcgctggaagtatttaccattgagaatgtcaaagaaggatcaaagtggctttgggttcattgtcttgcactatacatcataacattatcagcttgtgctcttctttactttgaatataagagtattactaatttgaggctactacatattattggatcacctccaaatccaagtcattttacaattcttgtccgatcaattccctggtcttcagaagaatcatactgtgaaaccgtgaaaaaattcttctcatattaccatgcatcaacatatttgtcacaccaaatgatttataagtctggtaaagttcaaaaactgaaggatgatgctgaacatatatgtaaggtaattagagatgcttcattggaaaagacttgtaagcctagttttacgaaatgttgctgttatggagcaccaacattttcttttaagaagatttctactgaaacgggtagtacacatgggagaacatgcaacaatgacttgcatttagatacaggaaaaaaggaatgtcccgctgcttttgtgttctttaaaagtcggtatgctgctcttacggctgcacaggtactgcagacatcaaaccctatgttatgggtgacagacgtagctcctgaaccacatgatgtatattggtccaatatttgcataccatataggcaactttggatccgtaagatagctacccttgtggcctcggttgccttcatgcttgtgttccttatccctgttacatttgtacaaggcttgactcaactagacaaacttcagaaaatgttcccttttctgacagggatacttaaagagaaatttgtgaatcaggtggtgactggttacctgccaagtgtgatattggttttatttttgtgcgcagttccacctgtgatgattctattgtcttctgtggagggttctatttcccgtagtgaaaggaagaagagtgcatgttttaaagtcttgtacttcacaatctggaacgtgttttttgttaatgtatttactggttctgtaatcagccagctcttagtcttttctagtgtaacagatctgcctgcccagcttgccaaggcagtgccactgcaggctactttcttcacaacttacattttatcatctggttgggcaagtttggcagttgaagttatgcaaattttccctctactacgcaatcttttccagagattcatactcaggcttaaagaagatgcactggatggcagcctatcttttccgtaccatacagaagttccaagaatcttactgtttggattcctcgggttcacttgtgctattctggcacccctaatgttgcccttcttgttggtctactttttcattgcttaccttgtttatcgaaaccagattatcaacgtatacattacaaaatacgatagtgggggacagtactggcccattgttcacaacacaacggtcttttcgttgctattttctcaacttatcgcgctaggggtgtttggactcaaacgctcatcagttgcatctggattcaccattcctctgctgattggtacgcttctatttcaccagtattgtaggcaacggtttctcccagtatttaggaacaattcagcacagattcttattgacttggatcggagagatgagcactgcggaagggtggaagaaatttatgaacatttgtgttcagcctacaaccagtccagtttaatgccacattccacaagccaagccaaatgtgtcagtcttcatgaggacaaggatagcagtccatcttcatcagaagatatggagaaaggcaatgaaaaggaaattaatcaaaaagatagaccacggcctgtccaacgctcattgagtttgagttcagataaatcggtacttggtgtaaagcaatgagtactcagaattgtacattgtataagaataagaatatcatggtgtgccgatgcatgaacagttaatcaattatagatgaagatgaaagtctcttgatatattgttcataaatttttttagttgtaattattttttaaaatgattttcaattagttgtaattgtccttttggctgtgatgtggttggatctatccatcatattctgtctgtatgcccgaaaattttatgcatttggtggcagtggtattctctcttaaaaaaaaaaaaaaaaaaaaaaaaaaaaaaaaaaaaaaaaaaaaaaaaaaaaaaaaaaaaaaaaaaaaaaaaaaaaaaa

SEQ ID NO: 4351 - DNA, 1150 bp, Glycine max
tcagctacgtaggcccccccccccccaatagaatgcaccctcgcgtgtgcttcttcctctctacccttatatataaagccacgcacccacgacactttcatcaattaaccgctcattcatccaaatttctcaaactcaagctagcctttgggggatatgatagagaagaagacacagtgtgagaaaaaggaaaaaatggaaggtgaagaaactgagatgaaacaacaatccaggttcaaaaggatttgtgtgttctgtggcagcagccctgggaacaagagtagctataaggacgctgctattgagcttgggaaagagttggtgtcaagaaatattgatctggtttatggaggaggaagcattggtttgatggggttggtttcccaggctgtttatgaaggaggtcgccatgtaattggagttattcccaagacactgatgccaagagagattactggagagacagtgggggaagtgatggcagtagcagacatgcatcaaagaaaagcagagatggctaagcactctgatgcctttattgccttgcccggtggctatgggactcttgaggagcttctagaggtgataacttgggctcagcttggcatccatgataaaccggtggggttgctgaatgtagatggatactacaattccttgttgtctttcattgacaaagctgtggaagaaggcttcattagccccaaagctcgccacataattgtatctgccccatcaacaaaagagcttgtaaaagagatggaggaatatttcccacaacatgaaagagttgcctctaagctaagctgggaaactgagcagatagattactcctcaaattgtgacatgtctaggtgattagagatgattatggaagaaatcgtgtagagacagttgttagtttaatggtttaagagactactactatgattatggccacaatttcctcaagccagaattcttttattatgctattgcatttacttgttagtgtaaactacagagctgacttcaatctagctgtgaagcctaactactcttctgctcaatgtgaattctggtttttttttcttttcaaagcaaaacacaaacaaaaaaaaaaaaaaaaaaaaaaaaaaaaaacataaaaaaaaaaaaaaaaaaaggaaaa

SEQ ID NO: 4352 - DNA, 909 bp, Glycine max
cttcattttctttcaggaactggctaaacaatcgtctacaatatttggatgaatgatagtgagataattcagtctcccagttttcgccattcttctctcctctcatatcttcattttctttcaggtaaggatttgagaagattttgtggaacctggaggattcggccctacagggacagttaatgaacctacataggaatacaacgtgaatctattaatacaaggttttatcttcaatggagaacaaaccagataaaatgcttcatgataatgaggagtgcattgacagcacatcaactaacaccaatcatccagagattggtgtgggcaaaggtgttttgaagaattttacaagatcttcgggggatgttgcagagacaaagatagcagctgattggaaaggtggagaaaattgcccaaagggtacacgtcctgaggaaattgatgcatctggggatgtaaacatggaggcatcaataacacctgatgatgttattcgggctggaggatttggtgccagggatgatatcagtagctttcttcctgttgcaagtgattctaccgacttcgaagcttcaatccgagatgcacgagattatgaagaaccacagggtcaagtaagcaggcccggccttggttggactggtgctactaagggggaatgaatgttgttgctgttatgtgctccagtattagcaacttttgtttttagctgggaggaccatgtgtttgtggctaatattttttaaaatcaaagtcatatatgatgccaaagaaaattttgttagtaatatcactaaatgatttacttgtataaatagttgatccgttgcctagtgtttggtttgtctttgttaagtgggatgtcatatgtaaaaatttcgtttcctgagaactcatccttgaatt

SEQ ID NO: 4353 - DNA, 1709 bp, Glycine max
cccatcagctacgtaggcccccccccccccccgataggttgagtcacccgctgcaaatccaactcgtgcatttgaagaaagaaaaaaaaaaagggttggtttttggttttggtttggttaactccttccacttccacccatggtctccgaatccgaactcatcggccgcctccgcgagttcctccggagctccgacctcaacaccaccaccaccgccaccgtccgccgccagttggaggccgatttcggaatcgacttatccgaccgcaaggcattcattagggaacaggtcgacttgttcctccagactgagcacaaccaatcacaacaagaagaagaagaaaaggaagaaaaacaccaaaacgaccacgtagaggaacaagaagaggatgcgcctaataatcccgaacaaagccaaccctccgattccaaggaagtaaccgatgaagacgaagaagaagaagacgaagaagaggaagaagataaacctaaacacgccaaaaaggccaagaagaataaaggacgatcgaacacgttaggtgatgaggtagtaaagaaaagaggtggtggtttttgcaaattatgtagcctgtctccacaacttcaggaattcatgggagctccagaaatggccagaactgaggttgttaagcaattatgggcctatattagggagaaaaatttgcaagacccgaacaacagacggaatataatttgcgatgagcgattgcgttccctttttaatgtcaattccatcaacatgttccaaatgaataaagcattgtcaaagcatatctggccattggattcagatgatgttgttcaggtgaagtccacaccaaaggaaaagcagaagaagcaagagagagatgatgattcagatgaaccaaaaaaaaaggaaaaacggcagaagggaggagggaaatcaggttttcttgctcctcttcagctatccgatgcccttgtaaacttccttggtactggagagagcgagttagcgagaactgatgtcataaaaagaatgtgggattacattaaaggaaacaaccttcaggatccttctgacaagaggaaaataatatgtgacgagaagctgaaagaactctttgatgtcgacaccttcactggcttcactgttacaaaactgctggctcctcattttataaagacagagcagtgagttgcttgtacattgttattcggtcaagcatgggaaggttggggaattttgtttatcaagttagttttttaaggttctttttgtgtcctgttggcaatagaaattagcaaaatgacacattttcagtaaatttttctcgaagattttttatgttatgtgaccttttattttgttttaaattatcctgttttgccacttggcagttgaaaattttgtatatttggttcctgaagctgcaagcacaatattgacttcatattctactctgctgtcatttggcaaaataggagaatactgatattgtatgaagaaaccatgtattttacttttgactcaaagttttaacatgttttaccaaagaaaaaaaaaaaaaaatggcacacaataaaaaacggggggcccctttgaaggagcccagcttatgcgtccgcgcacgggcaaccaaaaatcttttatataggccccccaaaataaagccctggccgggacaatacaaaacggggaaaaggaaaaacccgtggcaaccaaa

SEQ ID NO: 4354 - DNA, 1953 bp, Glycine max
tcgagccgcctccgtggcccccccccccccttttgcatgtagacttggataccttacaaagtgcatagttcagtaggccaggctgtctgataaagacagaaacctttatatcataagggcggtgcccttcacagacatcaggtccatccggaggcataatcctgcttttgggtggcaatatgtcattgttgttctatcatcaggacttgctcatcctccattatatttttatagtggaggagtcaaagaattccttgctacaataaagcaacatgttcttcttgtgagatctgaagaagatgccaacgtattccttgtgaatgattttcagaatacactgcagaggactttgtcttccttggagatgcccagagctgttccccttacatgtggaccttcaaatacgtcagttgatgaatccattttgattgagaaccaagaaagggctgataatggtgccaatgatggaagatttagtgttaatcagttccacgggaagccaagacataaagtagatcctgctcgagacctctctattcaagttctagagaagttttctcttgtcacaagatttgcccgtgaaacaacttcacaactttttggagaaaaccagagtaatggatttagtcccattgacaggaggacccatatccagactaaccttgatcaccctaagtcttccaatgttgaggaaaatacctctgttgaaagtcctgttgtcttggattctcaggagttcgataatttatcgttagtatggggaaaaccaaggcaaccccctttgggttctgaagagtggaatgccttcttggattctgaaggacgagtcacagattcagaagctttgagaaagagagtattttatggtggacttgaccacgaattacaaaatgaggtatggggtttgcttttgggatattatccatatgaatcaacatatgctgagagagaattcctgaagtcagttaagaagttagaatacgagaacataaagaaccagtggcagagtatatcctcagcacaggctaaaagattcacaaaattcagggaaaggaaagggcttattgagaaagatgtggtgagaactgatagatcactcgctttctatgaaggcgatgataatccaaatgtaaatgttctgcgagatatcctgttgacatattcattctacaactttgatcttggttattgccagggaatgagtgatcttctatctccaatattgtttgtgatggataatgaatcagaggcattttggtgttttgttgctctaatggaacgtctcggacccaattttaatcgtgatcaaaacggcatgcattctcaactttttgcgctatctaagttggtggagctgctggatagtccattgcataactattttaagcagcgtgactgcttgaattatttcttctgtttccgctggattttgattcaatttaaaagggagtttgagtacgagaaaacaatgcgcttgtgggaagttttatggacacattatccgtctgagcatttgcacctgtatgtatgtgtggcaatcttgaaacgatatcgtggtaaaataattggagagcaaatggacttcgacacccttttgaagtttattaatgagttaagtggtcacatcgatcttgatgcaaccctcagagatgcagaggctctatgtatatgtgccggtgagaacggtgctgctcgtataccccctggaaccccaccgtcgttgcctcatgaagatggttctttttacgcccaacaagaacaagatgaaatattgtaaataaattcatatttatcataaattttttggtgatacttgaatatatcaacctaattttgtatttcctgattgattcacagtttaaatacgttgttagcatatttaatgcatttctttaatcatatttgttgtaaatttgattctaagcgcatcatttgtcgctccatctagctctc

SEQ ID NO: 4355 - DNA, 1367 bp, Glycine max
tcagctacgtaggccccccccccgtttttcactttttccgtgttgatgcagtaagtgaatgtttcagaaggtgggtttaagcgcacatcagaaacagacattttctcaaaaaccagtgggcgtttcattgaatcttcttcatcgttgccaaaagcgacaaaccaaaattatataaaaaaaaaatacttaaactccatttttctctttcacacacactctctttttctctttcaatttcaacactctcattatcctaagattcccaccgaaaaacctctcacaccatggtttctcgccatttggcttcttcgctcttcctctgtttcctctgtttcgagatctctgtttcgtcccttcgattgcccggtttggaccaagacgccaaggccacgcatggatcggtgctaaggttgaacagaggtggctcttcagtgaagtttgatcccacacgggtcactcagctctcgtggagtcccagggcttttctgtacaaggggtttttatccgaggaagaatgtgatcatttgatagttctggccaaggacaagctggagaagtctatggtggcagataatgattccggtaaaagcataatgagtgatatcagaacgagttctgggatgtttctcaacaaggcacaggatgaaatagttgctggtattgaagcccgaattgccgcatggacattccttcctgtagagaatggtgagtcgatgcaaatattgcactatgagaatggtcagaagtatgaaccacattttgattacttccatgacaaagctaatcaagttatgggtggccatcggattgccactgtattgatgtatttgtctgatgttgagaagggtggggaaacaatttttcccaatgccgaggcaaagttgttgcagccaaaagatgagagctggtctgaatgtgctcacaaaggatatgcagtaaagcctcagaagggtgatgccttgttgttcttcagtctccatctggatgcaagtacagatactaagagcttgcatggaagctgtccagtcattgagggcgagaagtggtctgcaaccaagtggattcacgtgagtgactttgaaaaaccattcaagcaagtggataatggagagtgtgttgatgagaatgagaattgccctaggtgggctaaagtaggtgaatgtgacaagaatccactttatatggttggtggggaaggagtaagaggaagctgtatgaagagttgcaatgtctgcacttcttaaggagtctattaccttttgtttgctctgaaatgcatgtagagccataaatacattgtcaaatatattgtatataacattcatttttgttgaacttcgatatggaactctgccagtacattgcat

SEQ ID NO: 4356 - DNA, 1067 bp, Glycine max
caggaaactccaactcatttgtttttacacctttctggctccattggctttccccaaagtccatatccatctatatatatttgcacaattgttcaactatccttatctctctctctctctctctcaccactaagtttattagtattattatcactagctacctgctatcaaagcatcacaaatggcttctacagacaagcctggcggcgaccctgaatacagaacatcttcaactccagctcctgctggtgttgattactttaaatttgatgtcatcctaaggtttctattgtttgcagcatcactggtagctgttgtggtgatcgtcactgctaatcaaacagaggttattcgtgttccacagcctgtgccatggccagccaagttcagatactcaccagcctttgtttattttgtagctgcattgtccgttactggcctctacagtatcattacaacacttgcatcactctttgccagtaacaagccagccctcaaaaccaagttgctcctctactttatcttatgggatgcgctgatattggggataatagcctcagcaacaggcacagctgggggtgtagcatatttgggtttgaagggaaacagacacgtggtgggttggaataaaatttgccatgtttacgacaagttctgtaggcatgttggtgcctccatagcagtggctttgtttggaagcgttgtgacagtcttgctcatttggctttcagcttacagcattcatagccgagtccccaagtagatggaaggaacatggatcatgcattctgcatatttatgcatacatcttcatttattgtttataaagttagtgtgctcagtaattgttaagagtgtgtagatgacttaatgtgttgcttcagttgtgttgactgttttttgtaaatcagtgttttcccctccaaggacctaatttgtactattttacaagacatttgtgccataaattgaaatttgtaattatatatgttcccacaaaaataatattgaataccatgttattgatgcattaaaaaaaaaaaaaaaaaaaaaaaaaaaaaaaaaaa

SEQ ID NO: 4357 - DNA, 2355 bp, Glycine max
cccgcgcgccccaaaccccaaaaacactctgacacaacaaacacaaacacaatcgtcaattaaaacaacaacaatatcgaagctgcacaaattaatatccaacactctcaagctttcgagtttcaaactctgggcgctgaatttggttcatttttctaagagttatatatacttttattgaaattgttgcggttcaagtctgaactaaaacattaagtttgcggaggctggtgcttttctgatttgccagtcaaattattaaatcacttgttcacatagatcagctgatgccatcatcttagtatggattcacaacagctcttcagtttcggtggtgttactagtgcaggattaccttacatgtcttcttttcccactgttccatcgctacccaacagtctacttagatccttgaaatatgacacaggaaactcacctaattcacccttttccacttattttgattctgatactctttcagcattgagtgacggccaggagcaatacagcccaggagaaatcctctctggtgtcagctcttcactggaaaccaaccattatatgtataatagatcaatctccactttggacagtttcccattatattctgatcggaactctcttctacagaatgcgagttctaatcagaaaatccaacatgctttgctggagctagaaactgctttgatggccccggatgacgatcaagttaccacaccgaatacattggccgagagacacaggtcctggaacaatgagaaccatgtgtcacaacataatactcaagctcagccatcatatgctaccggcaataggcagtcaagtgaagttgtgcatgtagagaaacggcaaaagttgatggaagaagaagcaacactgggagctttcccaccaaacaatttgaagcaattgctgattgcatgtgcctaagccctgtctgaaaacaacatgaatgattttgatcaattggtaggaagggccccacgcgcccggtccatcaatggggagccaatccagcggcttggtgcttacatggtagaagggcttgttgcaaggacgcaagcatcggggaatagcatctatcatgcccttaggtgcaaagagcctgagggtgatgaattgctcacttacatgcaactgctgttcgaaatctgcccctacttaaaatttggttacatggctgccaatggagccatcgcggaagcgtgcagaaacgaggatcgcatacacatcatagacttccaaattgctcagggaactcaatggatgactcttcttcaagcgcttgccgcaagacctggcggtgctccccatgtgcggatcacagggattgatgatcctgtttccaaatatgctcgtggcgacggaccagaagttgttggcaaaaggttggccttgatgtctgagaaatttggcatcccagttgagtttcatggggtgccagtttttgctccagatgtgacaagggaaatgcttgatatcaggccaggagaggccttggctgtgaacttccccttgcaactccatcacacagctgatgagagtgttcatgtgagcaacccaagggatggacttttgagattggtaaggtcactttctcccaaggtgaccacattggtggagcaggaatcaaacacaaacacaacccctttcttcaacaggttcattgaaaccttggattactacttggcaatctttgagtccattgatgtcaccctcccaagagacagcaaggagaggattaatgtggagcaacattgtctggccagggatattgtcaatatcattgcttgtgaaggcaaggaaagggttgagagacatgaactgttcggcaagtggaagtcaaggttaaagatggccggcttccagcaatgtcctttgagttcttatgtgaattctgtgataagaagccttctgaggtgctattcagaacactatacactggtggagaaggatggagccatgttgttagggtggaaggacagaaatttgatatcagcttcagcctggcattgctaaaacatagactgtgtagtagtagaaatattatgatgatgggggaagctgaccacggtttatgtttcattgccagtgctatctcatctcatgtactagtgtagtagtacattgattcttttataaaatgtcacgtatgttaactgttcttgttctataaatatttcgatcttgtgcctgatccctatgaactatgggaatcacaaaattttgaactgactgtctcaataaaaacattctttagggggtagacttcggtgcactcttatcttgtatgataaaattgcttgcataagctggttaaggtgatgtggttttcgatatctaaagaaagaatga

SEQ ID NO: 4358 - DNA, 1095 bp, Glycine max
ttaggtctccgctggcaccttatgagaaatcaaagtctttgggttccggggggagtatggtcgcaaggctgaaacttaaaggaattgacggaagggcaccaccaggagtggagcctgcggcttaatttgacccaacacggggaaacttaccaggtccagacatagtaaggattgattgccgattccacccggcaactatccttatctgttatatctcaccactaagtttattattatcaaaaccaaaagctagcaagctaccttgcaaagcaacacatggcttctacagacaagcatggcgacactgaatacagaacatcatcttcaactccagctcctgcgggtgttgattactttaaatttgatgttatcctaaggtttgtgttatttgcagcatcactggtagctgttgtggtgatcgtcactggtaatcaaacagaggttattcttgtgccacagcctgtgccatggccagccaagttcagatacacaccagcctttgtgtattttgtagctgcattgtccgttactggcctctacagtatcattacaacacttgcatcactctttgccagtaacaagccagccctcaaaaccaagttgctcctctactttatcttatgggatgcgctgatattggggataatagcctcagcaacaggcacagctgggggtgtagcatatttgggtttgaagggaaacagccatgtggtgggttggaataaaatttgccatgtttacgataagttctgtaggcatgttggtgcctccatagcagtggctttgtttggaagcattgtcacagtcttgctcatttggctttcagcatacagcattcatagccgagtccccaagtagatggaaggaacatggatcatgcattcacacatcttcatttattgtttataaagttagcgtgctcagtaattcagtaattgttaagagtgtgtagatggtttaatgtattgcttcagttgtgttgattattttttgtaaatcagtgttttcccctccaagtacctcagttgtattttactacatgacattcgtgacataaattgaaatttttaattaaaaaaaaaaaaaaaaaaaaaa

SEQ ID NO: 4359 - DNA, 716 bp, Glycine max
  misc_feature (134)..(134): n is a, c, g, or t
tatgaccccatgatacgccaagcgccgcaattaaccctccctttaaaaggggacaaaagctggaggctccaccgcgggtggccgggcgcttctagaacttagtggatccccccgggctgccaggaattcgcacngagaccatttacctagaaccatcctaaccccacgcgactttgagttcgaactaaacaattcaattcaatctgcctcgatcatggagaggaaaacatttgggtttttgttcttgctcctccttgtcttagcttctgatgtgacggtgaagagagcagaggcgaaagattgcttgacaaggaggcacgggttccagggtagatgcttattcgacaggcaatgtgcacatgtgtgcaggagcgatggtttcatcggtggtcagtgccgaggccctcttcgcaaatgcttttgcagcaggccatgttgatcgaaattactactgccaaagaggccatgaaataaacaaacaaacaaataaataaatagctctaaccgacacatatgtacgtagtgtcggggttctagctagctaggtaggtacgtgtgtcttttgttatcgatcctagtttggtggagcaagtgtggcatcatgatctagttatatatatatgtcgtgatcatcttgctctgttcagcaataaattataatggaaattaataaattagttatgcctttgcaaaaaaaaaaaaaaaaaagcttatcg

SEQ ID NO: 4360 - DNA, 876 bp, Glycine max
gcaccagattcaaatgattcaagcaccggaattgccaaaggaagaaaagccagtggaagaagcacctgtcgtcaagaaggcaaatggaactcgtaagaaaagacaggggcccaaggttcccaaatctcccaaggctaagaagccaaagagggtgcctcgtgcgccaaaggatgagaatgctcctgcagttcaacgtgcaagggttccgaagaaaactactgatacgggcgtgaaggcgactgatggggatatttctcgcattccaattccagtttgttcatgcaccggggcaacgcaacagtgttataaatggggatctggtggttggcagtctgcatgttgcacaacaggcatgtcggtatatcctttgcctatgagtaccaagcggcgtggtgctaggattgctggaaggaaaatgagtataggagcatttaagaaagtgttagagaaactcgccgccgagggttataacttttctaatccgattgatttgaggacttattgggcaaaacatggcaccaacaagtttgtcaccatcaggtagatctagtctgtggccatctggcctgttatgtcttttagcctgtttgtgatgtatatacatgcgtatttggccagagacagactttttagctggtttgtagtacaacaattttcaaattcattagacatcttgttttgtcttctaactctctttgttagtatcttcactttattggatgtagtacatgggaactcatctatcggttggttggttcagattgggaactacctgatgaggtcttgttttattaatatttagtaggagaatttaattggttcgcaaacctactggtgattgaccattatttccaactctttttttacttgcaaaaa

SEQ ID NO: 4361 - DNA, 952 bp, Glycine max
  misc_feature (778)..(778): n is a, c, g, or t
  misc_feature (799)..(799): n is a, c, g, or t
  misc_feature (806)..(806): n is a, c, g, or t
  misc_feature (815)..(815): n is a, c, g, or t
  misc_feature (849)..(849): n is a, c, g, or t
  misc_feature (947)..(947): n is a, c, g, or t
tcgagtcagctacgtagggccccccggcgtgcagaccactgtctccccttttgctctcttcattttccattcgtagacgccaagaaccctaacaggagaatgcagtggacctggataatttgtgaggatatttaacatcgtgtacattgtgctcctttaattattttcatcagttggtgttgtgatggatggtgataatggtcttaacatacgtaattggggttactatgaacccgctacgtcgtttaagagccacctggggctgcagctgatgtcatccttgccggaaaaacctttaattggagggcgcaatgctgtggttttagctggcactgatggggcatttcaccatagggacattggtggtatgccccaagctacataccctatcgaatacatgagggatacatggattagtcagagagacaaatatatgaatatgatacctacaaaccataattatggtggtattccggagacatcttcagcacatcaaattcaaatgattcaagcaccggaattgccaaaggaagaaaagccagtggaagaagcacctgtcgtcaagaaggcaaatggaactcgtaagaaaagacaggggcccaaggttcccaaatctcccaaggctaagaagccaaagagggtgcctcgtgcgccaaaggatgagaatgctcctgcagttcaacgtgcaagggttccgaagaaaactactgaaattgtaataaatgggattgatatggatatttctcgcatttccaattccagttgtggtcatgccccngggcaacgccaacagtggttntaaaatnggggatctnggtgggttggcaatcttgcattgttgcacaacangcattgtcgggatatcccttggcctatgagtacccaaaccggcgtgggggctagggattgcttggaaaggaaaaatgagtttttggagcccttttaanaaaag

SEQ ID NO: 4362 - DNA, 1576 bp, Glycine max
tcagctacgtaggcccccccccaccgtaaaccacttcttcaactttccttcccaattctaaactcattcaaactatggcagcgtcttcgctctgttcctctttcacctccaaaacgtggaacccgcacgcgcgctatcaccacaaaaccctagcacctccctattccgcctttcttcgcggagacctccagctccatccaccttcggtttccggaacgcggcggagaaggcgccgccgatcgggttcggtggcgtccctcggaggcttgttgggcggcatcttcaaaggcgccgatacgggagaagccacgaagcagcaatacgctgcgaccgttaacataatcaatggattggaaccggagatttctgctttgtcggattcggaactgagggacaggacttttgcgctgcgagaacgcgcgcagcatggccagtctttggattcgctcttgccagaggcgtttgctgtggtgagagaagcttcgaagagggttctgggccttcgtcccttcgatgtccagctcataggaggcatggttcttcataagggagaaatagctgaaatgaggaccggagaagggaagacactggttgctgttttgccagcttatttaaatgcattgagtgggaagggagttcatgttgtaactgtcaatgattatctagctcggagggattgtgagtgggttggtcaggttcctcgctttcttggattgaaggttggcctcattcagcagaatatgacaagtcagcaaagaaaggaaaattactcatgtgatataacatatgtcactaatagtgagcttggttttgattacttgagagacaatcttgccacgagtgtcgaagatcttgtcataaggggtttcaattactgtatcattgatgaggttgattcaatccttattgatgaagctagaacaccgcttattatatctggacctgcagagaaacccagtgatcaatattataaggctgcaaagattgcagaagcctttgaacaagacatacattacactgtagacgaaaaacagaaaacagttctactttctgagcaaggttatgaagatgctgaagaaattttagctgtcaaagatttatatgatcctcgagaacagtgggcttcatatatcctaaatgcaataaaagcaaaagaactatttcttcgagatgtaaactacatcattcgtggaaaagaggtcctaattgttgatgagtttactggtcgagtcatgcaggtatttagagattctacttggcctcatggaaataaacaatttaactagccaaggcaaggagaatagtagtgccatcaatagcagttcttgatctacatttgatttcaagtgcttgaagagcatatcttccgaagtaaatatgattcccttgataggatattcccttcattcttcctctatgttgtttatgaaatctggttctttgggggttataattatcattattataatctcagccctttaatgtactaatttttattgtatgtagctctatcaagatttaagattatggcaaaactttgcttcagattatggctgagaaaaaaaaaaaaaaaaaa

SEQ ID NO: 4363 - DNA, 2511 bp, Glycine max
gtgagcttggttttgattacttgagagacaatcttgccacgagtgtcgaagatcttgtcataaggggtttcaattactgtatcattgatgaggttgattcaatccttattgatgaagctagaacgccgcttattatatcaggacctgcagagaaacccagtgatcgatattataaggctgcaaagattgcagaagcctttgaacgagacatacattacactgtagtcggctacctaggcccccccccactttctgagcaaggttatgaagatgctgaagaaattttagctgtcaaagatttatatgatcctcgagaacagtgggcttcatatatcctaaatgcaataaaagcaaaagaactatttcttcgagatgtaaactacatcattcgtggaaaagaggtcctaattgttgatgagtttactggtcgagtcatgcaggggagaaggtggagtgatggccttcaccaagcagttgaggcaaaggaagggttgccaattcaaaatgaaactgtaacgctggcttctatcagttaccagaatttctttcttcagttccccaaactttgtggtatgactggcactgcagcaacagaaagtacagaatttgagagcatttacaagcttaaagttacaattgtgccaacaaacaaacctatgataagaaaggatgaatctgatgtagtttttagggcaacttcagggaaatggcgtgcagttgtagtagaaatctctaggatgcacaaaaccggtcgcccggtgcttgttggcaccactagtgttgagcagagtgattctttgtcagagcaattgaaagaagctggaattccgcacgaggtacttaatgcaaaaccagaaaatgttgagagggaagcagaaattgtagcacagagtggtcgtcttggggcagtgacaattgctaccaatatggctggtcgtgggacagatataatccttggtggtaatgcagaatttatggcacggttgaagcttcgtgaaatattgatgccaagagttgttaagccatctgaagaaggctttgtatcaataaagaaacctcctccctccaagacatggaaggtgaatgagaagttattcccatgccaactatcaaataaaaatgttgacatggctgagaaggctgtgcaattggctgttgaaacatggggcaagagatccttaactgagcttgaagcagaggagcgcctatcctatacctgtgaaaagggtcctgctcaagatgaagtcattgccaagctgagaaatgcatttctggaaatcggaaaagaatataaagtcttcactgaggaagagaggaagaaggttgtggaagctggtggactacatgtagtaggcacagagcgtcatgaatcacgtcgaattgataatcagctgcgtggtcgaagtggcagacaaggagatccaggaagctcccgctttttcttaagtcttgaagataacatatttcgtatttttggtggagatcgaattcagggcttaatgcgagctttcagagttgaagacctacctattgagtccaagatgttgaccaaagcattagacgaagcccaaaggaaagtggagaactatttctttgacattcggaagcaattgtttgagtatgatgaagtacttaacagccaaagagatcgagtttatacagagagaagacgagcccttgaatctgacaaccttcagtctcttcttattgaatatgctgaattgacaatggatgacattttagaagcaaacattggttctgatgctccaaaagacagctgggatcttgaaaaactaactgcaaaaattcagcaatattgctacttgttgaatactctatcccctgatttgctggggaacacgtgttcagattatgaggaattgcggaattatctccgtcttcgtggtcgtgaagcctacctgcagaaaagggatattgtggagcaacaagcagcaggcttaatgaaagaagcagagcggttcctaatcttaagcaatatcgatcgcctgtggaaagaacatttgcaggcactaaaatttgttcagcaagccgtggggttacggggatatgcgcagcgggatccacttattgagtataagcttgaaggctataaccttttcttggatatgatggcacaaataagaagaaatgtcatatattctgtatatcagttccaacctgtgctggtaaagcaagatcaggacaaaacagagaatcggaaatcaggaaaacgtaatattgcacgcactcaggttaatccaaactctgatccagttggcactgtcgagccttcaacatcaagtactacttcctaatacggcactcaagactaatgtttctggagttccagcatattgagctagaaggaacaacaaagcctcagttgatcctccatgtttgtagcaatttattgtagagagattgtcatatggtcaaacgttgtaaagatttacaaatgtatagcaagctataaaaagcttcagttgatcctccaaaaaaaaaaaaaaaaaa

SEQ ID NO: 4364 - DNA, 862 bp, Glycine max
cccgggtcgacccagcgtccgtacgcgcggtaagagacagaggggaatgaaagaaagaggcacatttcagcccttattcaatgctttaccaaactcactcatcatcctccagtctttcaatttcatcccttcacttctttccacaaccccatcatcttttccctcttttcttctctctcaggcggagaaagaaatggagtgtttggaagcagcgttgaagagcagtttcaggaaagacatggccctcaaacaaacgttgttcctagaggagttctcgtcctcctctaacgttcaaaacgtcgtcgcttcctccgacgacttgttcgttgacgacctcctcaacttttcactcctcgaaaacaacaccaacaacaataacaacaacgaagaacccgaccaacaactcaacaaccacgactccaccacccctcagaacaaccaggaaaattacaattataacccctccgtcaacgacaacaatttcaacaccgaactcaccgttccggcggaggaggaagttgcggacttggaatggttgtctcgtttcgtcgaagattctaatttctcggaatattctcttcccttccccgcaaccgtgactgagaaagtgaaagtgaaatcaccggaaccgggaaataccgctttcactttcaaaaccccggttccggccaaggccaggagcaagcgaacgcgaaccggtgtccgggtttggccgctcaagtcaccctctttggccgccgcgtcttcaacaacaacctcgtcctcgtcctcgtcttcgccctcgagtccgcaacgtgcggactcgagggcaagaagcgtgccgctgcggacggcggcgccgcgcgacggtgcagccactgtg

SEQ ID NO: 4365 - DNA, 2049 bp, Glycine max
  misc_feature (2047)..(2048): n is a, c, g, or t
acgaacatagtagcacataagatagaaagcacgctttgcaggattatagatgaattacagagagtagctgtttgcaatctagtcatcgtgctggatgaagttgacaagccaggctctgaatattcgtgcagatccagcttcagcactgctacaggttcttgatacagaacaacatcaatcgttcaatgatcactatttgaatgttccatttgatctatccaaggtagtttttgtggctacagcaaataggttgcaacccattcctccaccacttcgtgatagaatggaagtaattgagcttcctggatatacacctgaggaaaagctccacattgccatgcggcatttgattccaagagttttagaccagcatggattgagttctgagtttcttcagattcctgaggcaatggtgaagcttgtcattcagagatatactagggaagctggtgtgcgaaacttagagagaaatctagctgccttggctcgagctgctgcagtaatagttttagagcaagaacaagtagttccattaaacaaagggatgcagggacttgctacaccacttgtggaaaacagacttgctgatgggactgaagttgaaatggaagtgataccaatgggtgtcaatagtcgggacatctcaagcacgtttaggattgcctctccattggttgttgacgaaactatgcttgaaaaagtgcttgggcccccaagatttgatggcagagaagctgcagaacgtgtggctacccctggggtctctgttgggctagtttggactgcttttggtggagaagttcagtttgtggaggctacagctatggttgggaagggtgaactgcatctcactggacaacttggtgatgtaataaaagaatcagctcagattgcactgacatgggtaagggcaagggctactgatcttaggcttgctgctacagaaggatttaatattttggagggccgtgatgtacacatacattttcctgcaggcgctgtacctaaagatgggccctcagctggtgtgactttggtcacagcattggtatcacttttcagtcagcaaagggtgagatcagacacggctatgactggagagatgacattgaggggtcttgttctacctgttggtggtgtcaaggataagatattagctgcacatcgttacggtattaagagagttattctacctgaaaggaacttgaaggacttggttgaagtaccatcgtctgtgctatccaatttggagatcctgcttgctaaacgagtggaagatgtgttagaacatgcttttgatggtgggtgcccttggaggcaacactcgaagttatagcagcatccttgatttgcaggacgagttagtaaacctttgtctttcaatcagtaatggcttctatatcaattcaacatacataccgtcccctcctgatctatcattgtcatcgtgatatcgggtccgagtacttcgacttcaactgatcgtaattaagcaaaactcaagaaaccaacaatttggatgggagctgagctgacatctacatttatcaatgggaatccactccacctcaattatagtgtgtaaatgctttagcttgagaccaactattgtggaaggtgagcaactgcatcctttgagtgctctccatacaacatctccgggtcacacttttgtaaattatttaccctgtcaccacatatatacacttttaacatattgcgcatagatcataacaagagagggcttcctctctttaatgtggttccttcttcctgcctgccaatccttttccttatgttttagtcgttttagtcagtaaggccgagtttcataatatggtgtcaactgcatagttaaccttattcatgcaacacacctggacttaaattacagaggtacttacatttacctcattccaacgagatgagtaagggttcaaatccacgacatgttacacgcgagatcctatcttgtttcactcgaccaatctcttgggatttattgattgatcatataagaaataaatgattgaatcattttatgaanna

SEQ ID NO: 4366 - DNA, 1247 bp, Glycine max
aattcggcaccaggaactatatggggaaggaaaaggaacacatattaattcggctcgagattttcttgccccaatcccaatcccaattccaaaccctaaccaatttccatggcttcctcggagatcgaggtggtttcatcatcatcatcggtctccaaacccaacaacgaccagcctccaatcctcgacgttttcaccgcctctgctcacggcgacttcaacaaattgagaaccttcgtcgaacaagacggtgcctccgtctctcttcccgattttagcggctattacgctcttcagtgggcctcgctcaacaactttcacgacattgcgcactatctcattcagcatggggcggatgtcaatgctaaagacaacatgcaacaaacggcattgcactgggcagcggttcacggttcaactctagctgctgatgtgcttgtggagaacggtgctcgggtcgaagctgcagatgtaaatggataccgggcagttcatgttgctgcacaatttggacagacagctttcttaaatcatattgtagtaaagtaccatgctgattttgatgtgcctgataatgatggaaggagtcctcttcattgggctgcatataagggatttgctgacacagtaagattgcttctatttagagatgcaagtcaaggaagacaagataaagatggttgtacaccgttgcactgggctgcattaaggggaaatgcagaggcatgtgctgtgcttgtacatgcaggcacaaaggaagaactgatggtgaaggacaatgctgggaacacacctgtacagcttgcatatgataaaggtcatcggcatgtcgctcctttcctttcaaatcaacaacgggctcatagcaactactggaaagggaaactgtgtagtgggatagtgacagatattggttatgctcccatcttattctgtactataatctttctctcgatcctcttcatcaactcagtcgttgcagctcctaaccttaaaaagattactgctgttgttggactttgggcatggacagcgctttcttcggctgttggttccctgattatgttctataagtgcagtagtaaagatcctggttatataaaacgactgggagaattgggtactcaaagtgatacagaggtatgcaaagtgctttcgagtgatgattgttttgaagaaaagacttgcacccccaaatcggattttatcagggaaactatcatattacatgggtcctctttttcttt

SEQ ID NO: 4367 - DNA, 1393 bp, Glycine max
aattcggcaccagagaaaaagaaaaaaaaaaaaactgctgggttaaacaagtttgactaccttaaatagatgtacctcaacgagttcgggcaagagatacccggttaaaccagatgtatatcatctgattggaaagaaaaaactttttcgttttatttaaggaaaattttctgtccttagagttttggaattgtggacacagaatgaactcgttttttggactttccgtagagtatcttccttcatagataataaatagcagttaagaatctctcgttttagtcatggactattggagcgccaccctctcacatggcggcagcaaccacaatttgctacggtccctcttctattgttctagggtcaaatttacttaaacgaagacacttgaaaaacacttcgtttgctgatcgtttttctccttcaagatcattactttgtagcggatttgttccaaggaagcctgctttgggaagaaactctttctgggtatcaaaaatcatggatgaatccgtgggaacttctgctttcagagatgcaaagggggatgaaacgatccaagtgtttgaacaagaagctttcatcgatggctcatcaccgtttcggttcaagtttttgtcccctgaggtggaatacaagctcaatcgactgagcaaatggatagtaactgccctctttggcagtttcattctttggaggcatgatgcagaagccttatggtttacagcagggtctgttttgaatgctatgctttctgttttgctcaaacgtatactgaatcaggaacgaccttcaaccctgaaatctgaccctgggatgccatcgtcacatgcacaatcaatattctttactgtcttctttgttattttgtcaggtgtagaatggcttgggctaaatggattcaccattgccatcagtggattggtcctaacatttggttcttttttgtcgtacctgagggtggtgcaacagcttcatacggtgagccaagtggttgttggagctgctattgggtccatttcctctattttatggtactggctatggaacggctatatgctggatgcatttgtatcttctctgtgggttagaatcattgttgttttggggtctgcgggactttgcataggttttgttttatttgtgattcggcattggcttcaagacgactagaacttcaagacgtgtacaacattgcaataatggcacatctcattttgtttctttcaaggttgaagtctttatgttgcctagtaatcaaatgaaaattgtttaggacaatgctgcctgaagtaatgataatttgaatccgacatcaaaaaaaaaaaaaaaaaaaaaaaaaaaaaaaaaaaaaaaaaaaaaaaaaaaaaaaaaaaggaaaaaaaaaaaaaaa

SEQ ID NO: 4368 - DNA, 1168 bp, Glycine max
tccgcgccgggccccccctcgagtcagctacgtaggcccccccccatgaagcttatattgaacagcagaaacgagaaaagatggaagctgagcgcgcctcacgaatcacggtcaggaaaaagttacccaaagttaatcgggcccttgcagctcgcctcctagaaactgaagaagctgaaaatgagaagagggatgaagatgctgatgatggtgaaactaaaaaggcatccaagaaaaagaaagggctcagcatgcaagatcttcaggacgatcgatttaaagcaatatttacaaatgaggaatttgagattaaggattcctcacaagaatatctggctttacatcccatgggttctaagaagcaaacatccttgttaaaggaacattttgaacctgtcatgtcagatgatggtcaaagtctaagtgattctgatgcatcaacatcatcacaagatgaacctgcgaatggaatgaaagacaaatctcgggttccaagaatgtatgaaatcaagaatgagcagcatgcggaggcattctggagccaaaaatcacttgcaggggaggactcacttcctatgggagacagagtagcagctctaagagatgaccaacaatcttctcgtgttccaaaaggtattaagcagggtccaggaggatcacgagaaatcactttcgccacaagaagctcagctaagtacaaggaagacgaggaggataaagaagtgccaaacaggaaaaagaggggagttcaatccttggggcttaagcccaatagaccagtgtttcgtggtcaagggagagggaaacgagggaatggcagaagaggacgtcgataatgacctttacataatgtaaatggcatttgattcttcttagatcttgcttgcttgcttgatccttatggctcagttttccatccatggatagtcctgtgactgaagtcgcacaggatacgtgatctatgatgcatcatcatatgtagcttaacatctttttttacatttttgttctttccccctatttttggacactatcaagataaactattttgtgtggaacctaccttaattgttgcagttttgttcccaaaccaaggattttttttcttaaaaaagcaaatatactataactatatatgaataaaactggtaccagaagtacctaagag

SEQ ID NO: 4369 - DNA, 2168 bp, Glycine max
gcacgagattgttgctcacgttgaccatgggaaaaccactctcgttgatgccatgctcaaacaaactaaggtatttcgtgataatcaatttgttcaggaaaggataatggactcgaatgatttggagcgcgaaagaggaattacaatactgagtaaaaatacatctgttacttctaaaggtccggagattcccgcgatataatagatactccgggtcactctgattttggtggtgaagtggagcgcatcttgaatatggtggaaggaatccttctagtggtagattctgttgaagggccaatgccacagacaagatttgtcttgaagaaggctttagagtttggtcactcagttgtcgtggttgtgaataaaatagataggccatctgctcgcccagaatatgttgtcaactctacttttgaactcttcattgaattaaatgcaacagatgaacagtgtgactttcaagtaatatatgcaagtggtataaaagggcaagcagggttgactcctgaaaatctggcagaagaccttggtccattgtttgaatctatcattagatgcattcctggaccacgtattgacaaagatggtgcccttcaaatgttggttacaaatattgagtatgatgaacataaagggcgcatagcaattgggcgtgtgcaagctggagttttagaaaaaggcttggatgttcgagtatgtacttcagatgattcatgtagatatggaagagttactgagctttatgtgtatgacaaattcaatagggtccctgcaaataaggtggaggcaggagatatatgtgcagtatgtggaattactgatattcagatcggggagacaattgctgataaagtatctgggaaaccactaccttcaatcaaggtggaagaaccaacagtgaaaatgtctttctccataaacacttcaccttttgttggccgtgagggaaagtatgttactagtaggaatttaagggacaggctttatcgtgaacttgagcggaatctggctatgaaagttgaagatggtgaaacagctgatacatttgttgtcagtgggcgtggaactttgcatatcaccatacttatagaaaatatgcgaagagaaggatatgaattcatggttgggcctcccaaagttatcaacaagaaggtggatgaaaaactgttggaaccgtatgagattgcaactgtggaggtaccagaagagcacatgggagctgttgttgaacttcttggcaagagacgaggacaaatgttcgatatgcaaggagttggattggaaggaactacactactcaaatataagatcccaacccgtggccttcttggattgcggaattcaattttaactgcctcccgagggactgctattctcaacactgtttttgatagctatgggccttgggctggtgaaattagtactcgggatcaaggctcattggttgcttttgaggatggaacaagtacttcttatgcaatctctagttcacaggagaggggacagatgtttattggtcctggagtggatgtttataaaggtcaaattgttggcatccatcagcgacctggggacttgtccttgaatgtttgcaagaagaaagctgcaaccaacatacgttccaacaaggaacaaacagtgattcttgatacgccattggactatagtctggatgactgcattgaatacatccaagaagatgaactagtagaggtcacccccgcaagtatccgaatgtccaagaatccaaaaattacaaacaagaaaacaaggtagactttcaccgtgaagctgtaacttgcaaatgctttttgagttaaccagttaccgctggtgtgctgaagcgcataactcattaatgtgttgctgctaaagtgacgaagaagtaaatcattaccattgatgtaatgtcacatatattcttccaaagatgcagacagtataggagctggctgaaagccgtattcattatagatattggtcatcacagttgattaaagggatgaagttacactgaattttgttcaatttgtaaagtctatatattagcagtaaggaacaagatattaattcttcatcatatggttattgattggagaatagcaatgcaacaccttggttaaatttccaatgagatttctaatgcattctctgattttttt

SEQ ID NO: 4370 - DNA, 2742 bp, Glycine max
ccacgcgtccgggaggcttgcttctttaaaaagaagagagaattgaaggctgctggaattgatattaggcagcggaagagaaaaaggaaaggaatagattacaatgcagaaattccatttgaaaaaaggcctcctccagggttttttgatgttacagatgaagatagaccagtggaacagccccagttccctactacaattgaagaacttgaagggaaaaggagggttgatgttgaggcacaattaagaaagcaggacattgcaaaaaataaaattgcacaaaggcaagatgccccatctgccatattgcatgccaacaagctgaatgacccagaaacagtaagaaagaggtcaaaattgatgcttccaccccctcagatttcagatcaggaattggatgaaattgcaaagttgggttatgctagtgaccttgcaggaagtcaggaacttgctgaaggtagtcgtgcaacacaggctcttctgactaattatgcacagacacctggccaaggaatgactcctttgcgaacccctcagagaacaccggctggtaaaggtgatgctatcatgatggaagctgaaaatctggccaggctgagggagtctcaaacaccattgttaggaggagagaacccagagttgcatccttcagatttttccggtgtcactcctaagaaaaaggagattcagactccaaacccaatgctgactccttctgcaactcctggagctgcaggtctcactcctagaattggcatgacaccaacaagagatggtttttcttttagcatgacaccaaagggaactcctcttagggatgagctacatattaatgaggacatgaatatgcatgacagcactaaacttgagctacagagacaggctgatatgagaagaagtttgcgttctggtttaggaagccttccacagcccaaaaatgagtaccagatagtgatgccacctgttctagaagatgccgaagagcctgaggagaaaattgaagaggatatgtctgatagaatagctagagaaaaagcggaagaagaggcaaggcagcaggcattgcttagaaagcgatcgaaagtccttcaacgggaacttcctaggcctcctacagcatcattggagcttataagaaattccttgatgagaactgacgtggacaagagttcctttgttccaccaacctctattgagcaagctgacgagatgattagacgggagcttctaagtttactggagcatgacaatgctaagtatccacttgatgagaaagtgattaaggagaagaagaaaggagccaagcgtgctgtaaatgggtctgctgtccctgtgatagaagattttcaggaagatgaaatgaaagaggctgataagttgataaaggaagaggccctgtatctttgtgcagcaatgggtcatgaagatgaaccccttgatgaatttattgaagcacacagaacctgtctcaatgatcttatgtactttcctacccgtaatgcatatggtctctctagtgttgctggaaacatggaaaaactagcagctttgcagaatgagtttgagaatgtgagaaacaaattggatgatggtaaggagaagatggtacggcttgagaagaaggtgatggttctcacgcaaggttatgagatgagagtaaagaaaagcctgtggccacaaattgaggccactttcaagcagatggatgtagctgcaactgagttagaatgctttaaagctttgcaaaagcaggaacaattggcagcatcacataggataaacaatctgtggggtgaagtacagaagcaaaaagaacttgagaaaactttgcaaaataggtatgggagtctaattgaagagctggaaaagatgcaaaatgtcatggaccaatgcagattactagcacaacagcaagaagaaattgaagcaaacaaccatgctcgtgagtcaactgagatcattgagagcaaggctggtgaaactgatgtacagagtacagaaaattgtgaaactgtacctgactcagtagagcatggacatgctctagcagttgagtcatctgatgatggaactgctgaccagcaagtagatattgtgcatgaccaggctacttctagcgttagccatgacatggatgtagattctgataaattggctaatcctacaccagctgcagagaatgtcgatggaaaactggaagttactgctactgccagctatactgatgatgggaagaccatgctagaaatgggtgctgcagtggaagtaagtagcagccccaatcatgatgtagttgcggatgctgtaaactcacatgataacagcatggaagaaaccaatgctgttggggaggagacaaattaggccggacactgcatagcctgttctgattaagtatggggacgttagactggatgctttaactgaataaaatgcatggatagtgagtcctccgttgttggaaggtagctaaagagcttagttgatgccaagattttgtaatgatccctactcgaagtttggaacatattatgaactgataaattgcatgagcattgagatggttgaccgtatttttttttttctgaatttttgtcctcttccatatgatggatgttgataatgtgctctttacattttaagaatgatacatgattttatatcaatgaattagagctcggtaactattgtaaaattgtgtactatatttgttacataaattagaaaaaaaaaaaaaaaaaa

SEQ ID NO: 4371 - DNA, 1862 bp, Glycine max
tgcgttcatcaatatggcgaaatgtcatagtcactctgacccatgctgcctctgctcctccagacgggccatcaggtgccccattgagttatgatgtatttgttgctcaaagatctcacatagttcaacaaaccattggacaagctgttggggacctacgtcttatgaatccgagcttaatgaatccagtttctcttgttgaaaatcatccttcttgtcggaaaaatagagatggccagaaggtgcttcctaatggtcaaagttggaggcctctcttgttgctcttatgctactcaatgaagattctttctgaagccagtaacgtttcaaaaactcaagaatcaccatttgaccagcgcaggctgtttggttttcgtcctcgctccccaccacttccatacttgttgtcttggttattgcagacacgtacctacccaaaactccctgctgatcagggtggggctgacaatggtgattctgatattgaaatggctgatttatctgattctgatctagatgaagatgaggatgagtatgaccagctcccaccatttaagcctatgaagaaatctcaggttgctaagcttactaaagagcagcagaaagcatattttgaggagtacgattatcgggtgaaacttctacagaaaaagcaatggagagaggagttgagaaggatgagagagatgaagaaaaaaggtaacactaaagaaaatgactatggttacacggaagaagatgatcaagagaatggaagtccagcagcagtgccagttccattgcctgatatggccctgccaccatcctttgacagtgacaatccagcctatagataccgtttcttagagccaacttctcagctcctgacaaggccagtcttagacagccatgggtgggatcatgattgtggttatgatggtgtaaacattgaacagagtctagccatcatcaataaattcccagcagctgttactgttcaggtaacaaaggataagaaagacttcagcatgcacttggattcctcagttgctgcaaaacttggagagaacggatcagccatggcaggctttgacattcaaaacattggaaagcagctagcttacattgttagaggagagaccaaattaaaaaatttcaaaagaaataaaacttctgctggtgtgtctgtgacattttttggtgaaaatgtgtctactgggctgaaagttgaggatcagattgctgtcgggaaacgcgtggtattagtaggtagcacaggggttgtgaagtctcaaactgattctgcttatggtgccaatgttgaagtgcggcttagagaggcagattttccaattggccaggaccagtcttcactgagcctttctcttgtgaagtggagaggagacctggctttgggggctaatcttcagtcccaattttctgttggacgaggttataaggtggctgttcgcgctggattgaacaacaagctcagtggacagatctctgtgagaacaagtagctcagaccagcttcagattgcccttattgctattcttccgattgccaaggctatctacaaaaacttctggcctggggctagtgagaattattctatctactagattgtgtctttttgtttgcgttgccagcaaggaaaagtagactacgagtttatcatatcatgttgcttcttttcgttactgtcttattataatgagtttttttttcttagtttcgtctagactattgaattcctgctatattagtgcttttatgtgcctgaaaattgtactgcaattgagatggaacctacaagaaattgattcataaattttgttagcatctataaaattaatgttgatgtcagattatgctgttat

SEQ ID NO: 4372 - DNA, 1365 bp, Glycine max
ctcgagacggccgggcgggtcgctacttagcgtcgttattcataataacgcccacgtcgcccccccccccacaataaatccctattccaattccaaattttcagtttcttcctcgcttttctgcaaaatcatctaaatccgtttctgatcctgaatcatcagtttttcccttgaaagatgggaggtggcaaggacaaacacaatgaagaagagaaaggagttttctcacatctggctcatggagtagctcaagctgctcatggttaccctccaggggcataccctccacctcctggggcataccctccttaccaagggtacccacctgctcatggctaccctccacaaggtggctatcctccggctggttatccccctgctggctatcctcctgctgctggtggttacccccctgctggttaccctccacatggttatcctggatcatctgctccacatggatctcatgcgcctgggcacggcggtatgggggcattgcttgctggtggtgctgctgcggcagcagctgcgtatggggctcaccatgtttcccatggccatcatggatatggtgcatatggaggatatggacacatgccccatgggaaattcaaacatcatggcaagttcaagcatggaaagttcggcaagcatgggaaatttaagcatgggaagtttggcaagggtatgttcaagaagtggaagtgatgatattatattaattttctgtacatacaaaccgcgattctggatgctgctgcacattgcttttataataaactctactttgtttgatgtccatctatattttggtggaactctagtatttttttttatagtcaaagatgtatcatcccgttcatattctattattctagaaagtgcttattctagaaagtgaacgtcaaatagatgatgctctggatattatgtgcgagcttgcagttgctttagaaaagcattgacttgttcatgccttttctgtttttttgctttgtataccatttttagttttaacctttgttggctttcttagacagaacggagtcatcacattcattgtctttatagtctatacaagtctccaaatacacgtaatataatacacgtaatatgttttatagtcgttcatataaagactttacgtgtatttggagacttggatgtatagactatagtgttctggtgaaaatatttttttgttggagacagtacactattggttcatattcaacataaaaaaacttggatgttgggctaagtgacaagtcaaagccatgctttcctgttgtctatgtaaaatttttttctacccactgcttaacaaaatgctatttgaaatgggatacttcaaaagggtttgat

SEQ ID NO: 4373 - DNA, 780 bp, Glycine max
  misc_feature (644)..(644): n is a, c, g, or t
  misc_feature (658)..(658): n is a, c, g, or t
  misc_feature (665)..(665): n is a, c, g, or t
  misc_feature (677)..(678): n is a, c, g, or t
  misc_feature (696)..(696): n is a, c, g, or t
  misc_feature (709)..(709): n is a, c, g, or t
  misc_feature (718)..(718): n is a, c, g, or t
  misc_feature (746)..(746): n is a, c, g, or t
  misc_feature (756)..(758): n is a, c, g, or t
  misc_feature (763)..(763): n is a, c, g, or t
  misc_feature (765)..(765): n is a, c, g, or t
  misc_feature (768)..(768): n is a, c, g, or t
  misc_feature (775)..(775): n is a, c, g, or t
  misc_feature (777)..(777): n is a, c, g, or t
  misc_feature (779)..(780): n is a, c, g, or t
agcctgctccgcgtagaccacccccgccattttcaattaaaccaaagcaaaaggccatataatttttttttatttgaaataatgtccgggatcatccacaagattgaggagaccctccatgtgggagggcacaagaaagaggagcacaaaggagaacaccatggtgagcacaaaggtgaacacaaaggagaacaccatggtgagcacaaaggtgaacacaaaggagaacaacaccatggggagcacaaggagggacttgtggataagatcaaggacaagatccatggtgatggccatgacaagggtgagaaaaagaagaagaaggacaagaagaagaaggagcatggacatgaccatcatggtcatagcagcagcagtgacagtgattagatcttatatgttaagcaggtgtacggtacgatggtagtgaggagccagaatccctcttcctgctttatgatataatacaaataaaatagcgattccggaaatcatgtctgtagctgctctttttatttatgtgataaatgtaaaacgctttggtttggcttggccgttgtgcattaggttgaaaaaataaatgttataattactcagaatctcaaaaattactcaaaaaaaaaacctgagaaaccctattctanacggcgccccgggngactcantttgtcctttanngggtattcaactgcgaantggctccttctgngaatgttcntccatccccactcaccgacctaggaacngggctagagnnnccaananggnccccccntnann

SEQ ID NO: 4374 - DNA, 608 bp, Glycine max
tttttttttttttttttttttttttttttttttttttttgtgcttcttttttttttttttttttttttttttttaatgaagttctcatatttattgagtggctaaaagggcaagcctttgcctcagtacaacattagaagattattgcaactgcaaactggaaaagaacacggaattttaaagcaaagatgtgacaccaccgagttttaacacaggaatagtgttaaaaagatgaggcaccaaataaaaactatatatatatatatatagcagcatgacattaattgcttctcccctcgatttgagtgaaactttagagtccagaaacatataattttcgtcagcaattacgaatatatataggacatgctcgttttggtggcggatagcaaggtatattcgggttcgatgtacatccagtcacccctcctttctgcagtagttgtcgagcaagagttgaactgggaaggaaaaaaacagaggccaagagtaagaagaaaacaataatagccttcatcgtttcgggatatatatctaatgcttagtagatgtatttcaattttccttttggatggatatggggggcgacctccccgtagctgactcga

SEQ ID NO: 4375 - DNA, 1410 bp, Glycine max
  misc_feature (1402)..(1407): n is a, c, g, or t
agatagattaaattgcatttctgttactctttctttattcgtcaatagaagaagaagatcgaacgaaggctccttccgttattccattcagcgattccatggtggcgagaggcgtgccggcaatggcggcggtggccgttgccgcccttgacttgacggaatcctccaactggtggcgggacatcaaccgctccccgctctggcaggatcgcattttccacctcctcgccatcctctacggaatcgtcgccgccgtcgctctcgttcaattagtgcgaatacaattgagagtgccggaatatggttggaccacgcagaaggtctttcactttctcaatttcattgtgaatggggttaggtgttttgtttttgtcttccgtcgggatgtgcagaagttgcagccagagattgtccaacatatcttacttgacatgcctagtcttgctttctttacaacttatgcactgttggtactgttctgggctgagatttattaccaggcacgtgccgtatctactgatggtctcagaccaagtttctatacgattaatgctgtggtttatgttattcagattactttatggttaatattatggtggaaacctatcagcgtgctagtcatcctgtctaagatgttctttgcaggggtttctttgtttgcagcccttggttttcttctttacggtggaagactattcttgatgctgcaacgctttcctgttgaatccaaaggtcgacgcaagaagctacaagaggttggctatgtgactaccatatgcttttcatgcttccttatcagatgtgttatgatgtgctttaatgcatttgataaagctgccgaccttgatgtcttgtaccatcccattctgaattttatgtattacctgttggtggaaatattgccttctactttggtccttttcattttgaggaagcttcctcccaagcgtggtatcactcaatatcacccaattcgctgaaaagattagcatatggagaaaatttagtcaggatttcctgagtgcatgctcctctgctttctttgatgtttctctcccctccgcaaggataatttctagaggacagagaagtcggtctttcttctgttgagtgacaaagctaatatcattgtcttaaagttctcataaggtttgtaggttttgaaacgtgacattttatggattgtcaaacacgttggcttgtgttgtataagtgatatttgtgttgtctctaggaaaatgtggttgctgtttgaggttctgcaattcaacacgatgagcaaccttttttgggagaaaaggacactgatatattgtaaaatagtttttcaagtcttgtaactgttactagttggtgaaatgtattgttccttttcagtcaaaaaaaaaaaaaaaaaaagacnnnnnnaag

SEQ ID NO: 4376 - DNA, 1765 bp, Glycine max
ccggtccggattcccggtcgacccacgcgtccgaacaaggtttccattctctctctatctgttcaatcttctctcccttctacttctagggtttagcttctgcatcggacatgtcttcttcaactcatcacagttgactttacgagcgaattcaatcaggcttgagaaggtatcctgatgttttttgttcaccatcatatccatgatggaatactgtaaagatgtcctcagctatcttgattctgatacatctattaagatactcatgtctctggatgatctggctgaccttgttcgggccacctgtgtctcgcgctcttggagagacattgtgattgcaaatggtctttgcaagcagctgtgcttgagaatgtttcctcagttatctagagttgcttttgttgttgaactgaatcaaaatggagcgaaggaacatgcagaggttggatctagctattctatggaatggctatctctactgagagaacatagagtctttgcttatttaggtagagctctcatgtcatctgttgcaatgaattgcattgctaagacagttggtgcttctagcactgataactttcctcaggagagcattgataatactctagagccaagagatcacattaatggtagatattgctactggtcaagtgatggacaaagtaatcccaatgtgcctgagacattaacatacgagttggtgtctcaaatttgtgttattaccgaaatcaatatccagccttttcaagctgattttcagagagggtcaccaatatattcagcaaaatctgttcggtttaaaatgggtcatcctaaagcctctttagatgtcgctgatgatgaaatgtttgtatggacctataattccccagagtttccaatgtctcaggaaaaccggctacagaagttcaagcttccagaacctgtgctttgtattgggggtattttgcagattgaacttttgggaagggtacagagacaagaaatggatggtttattatacatttgtgtttctcatgttcaagttctgggaagttcattatcaccaccattcaatgtggatattctgcagccctctggaatgtttgtgttgaagagggaccagctggctaaccatcaatctgtagtgacgtctggaaatgaatctcaagaaattttggccgagcaaagagaactgagagattaccagcatattgtgactatatttcgtggacaagcattaggaatcgtggaagatgagtgggatgaggaagaatacgatgatgattttgatccagaatatgccctctgatctttgctagtataaagtacttttataatcccccctcccaaattaacaaaaggaaaaaaaaaaaacactcctgttttctgtgtaatggttacccctaaaaaattctggtctttctgtgctttggctactgatttgattcctaagtatttacatctcgtaaaaaaaaaaaaaaaagttggacaagtattacaccttttttcggtggtttagcatctgatgcttgaaaacttgagatttctctcaagttgtttccttatatcatccacctaattttgcgttaactatagttagacaaaccaaatttcgtgctggtaattatagtcaattttttagtatctactgctacttggcttttttttttttttttttcatttccttataaaatgccttatattaaatagtggatgcaaattgctttgttgaacaatgctttatttagtgaataaatgatagttgattttatgtttcaaa

SEQ ID NO: 4377 - DNA, 1074 bp, Glycine max
cggctgcgagaagacgacggccgcatattgttcaacacttaccttataacataattgggcaggcatcctccgcattgtgaagcaattagggtttcatcctccgcattgtgaagcaatcgagcgcaggcatcaattgggaaattagggtttcattttcttcttcttcgtttttcttattactcaagcaattcgttctctcgaacatggaaccggaagggcaaaagggtacggtgaacccgtcggcaatgttagcttctctgcttagtaggagagccaaacttcacgaagatcttcgcagcattgaaaagcaggtgtatgatatggagacaagttacttacaggatcctggacagtgtggtaatgtattaaaaggatttgaaggtttcctatcttcatcgaagaacactgcactcctgaagaggtctagaaagtttcaacctgaagataggctcttctcattatcttcagtgacctcgccagcggcagaagatcttgcagctggacgagatgatggtagaccagattatggtcctggtcgttcaaaaggtggaggaatttatgctaatggacagggtaaaccaaagaaaggtagaggtggggcaagagatgccaagagagcaagggcttcaagtgaacaagattttgattatgaagatgatcctgacctgaccttgtgattgaaaatgccgctccaaccttctgttgtattataaggcacggcacgggtgacctgttgtattattgcaaggcagtcaggagatacggtaaatgttactttgcggctcggcacgggtgttgtattaaacttgtttttaaggcacggcacgggtgttgtattaaacttgttttttctagcatgatttgatagtgtagtggcaatgctgtacagaacaagaaaataaattcaactaatttttgttcctatgcttatagattgatgtttccttctgtcttgagtttttggcgctctagtggctcagtagagcagcagtcatttgaacactgtagcattgctttttggtgttgcagctattgtagctgccatagtggtccctgcaataatatctatttgcc

SEQ ID NO: 4378 - DNA, 747 bp, Glycine max
gtacgcacgctcggaattcggcgcgatcatcttttctctccgcaaaaacaaaaacaaagtaagagttcactcaatctcactgtgttgtgagttgtgtgtgagcaccaaccaacaatggtgtctctgactccgttatgtttctttattaccttgttgatcgctggtgcagacgcagcggcggagccccaaacggtgcgttttgacaccggggggttgagcagagacacctttcccaaaggattcttattcggaacggccacgtctgcgtaccaagtggagggtatggcccacaaagacggtcgcggcccaagcatttgggacgtcttcatcaaaaaacccgggattgtcgcaaataatggcacgggagaagtttctgttgatcagtaccatcgctacaaagaagatatagatctcatggccagcctgaattttgatgcctaccggttctcaatctcgtggtccagaatttttccaaatggaactggccaagtaaattggaaaggtgtagcatactacaataggttgatcaattacttgctagagaaaggtattactccatatgcaaatctctaccattatgatcttcctttagcacttgaggagaggtacaacggattattgagtcgccaagttgtgaaagattttgcagattatgcagaattgtgtttcaagacttttggagatagagttaagaattggatgacggttaacgaacctcgtgtggtggctgctcttggctatgataat

SEQ ID NO: 4379 - DNA, 1722 bp, Glycine max
attttatttacttgtataaaaaaatgttatacaaactataaacatgtaattaaataattattcattataacagatctctctcacgtaccataaaagttttgataaacaaaaaaaaaagccatttttgttatacccatggcttaatgttgagctcaaattagaaaggatttttttttttttattaattattgtttgtttcaatacaaaacagggattgtcgcaaataatggcacgggagaagtttctgttgatcagtaccatcgctacaaagaagatatagatctcatggccagcctgaattttgatgcctaccggttctcaatctcgtggtccagaatttttccaaatggaactggccaagtaaattggaaaggtgtagcatactacaataggttgatcaattacttgctagagaaaggtattactccatatgcaaatctctaccattatgatcttcctttagcacttgaggagaggtacaacggattattgagtcgccaagttgtgaaagattttgcagattatgcagaattttgtttcaagacttttggagatagagttaagaattggatgacgtttaacgaacctcgtgtggtggctgctcttggctatgataatggtttctttgcccctggaagatgctcaaaagaatatgggaattgtactgctggcaactcaggcactgagccttacattgttgcccacaatttgatattgtcgcatgcagcagctgttcaaagataccgagcgaagtaccaagaaaagcaaaagggaaggattgggatcctcttggattttgtttggtatgagcctcttacaagatcaaaggctgacaattttgcagctcaaagagccagagactttcatattggatggttcattcatccccttgtttatggagagtatccaaaaaccattcaaaatattgttgggaatagactccccaaattcactagtgaagaagttaaaatcgtgaagggttcgattgattttgttggaatcaaccagtatactacgttcttcatttatgatcctcatcaatcaaaacctaaagtcccaggctatcaaatggactggaatgcaggatttgcttatgcaaagaatggagtgcctattggtcctagagctaattcttattggctttacaatgtaccatggggcatgtacaaatcattgatatacataaaggaacgttatggaaacccaactgttatcttatctgaaaatggcatggatgatccgggtaatgtgactcttcccaagggtttgcatgacaccacaaggataaactattacaaaggctatttgactcaactaaagaaagcagttgatgatggagcaaatgtggttgggtactttgcatggtcattgctggataactttgaatggaggttgggttacacatcaaggtttggcattgtctatgttgatttcaaaaccctcaagagataccccaagatgtcggcatactggttcaagcaactcattaccaaaaagaagtattaatagctgggctgaacatctattttctaagcttctagttgcttcagagaatcatgttttaatggttttggttgagtttaacgtgcttctgtaactgtaattatgtgacttgcttaatgcaagtcttagaataaaatgatctttcatggcaataacttgttttctcttatagcaaactattgttcaatgttttgcttattaatatagtttttctttaaa

SEQ ID NO: 4380 - DNA, 1692 bp, Glycine max
ggctcgagcaatttcgaagcctctcgaatccaaactcaacagaacattcatttccctataaattcgacgtcgtttcgttccgctctcactccaagaaaacgttttgcagaagattccaatcggagctcagaaaaaaaagaaacctaatcgccgatcgcgtcgaaagtccctaagcttacatcctgcttctagatagttggtaatcttatctgagggtagtagctagtaccatgggagaagtggcagtaatgcactctgagcctctgcagtttgagtgcaatgacattagtgtgaatatgactgagaaggaagtgtatcctccagaatcaaatgtggagcgcttacctggagaagaatcgagtcaatcaacagaccacaaaaatatcaatgacttgcaagagagaggatatatggagtatggatgtcagcattaccggagaagatgccgtatcagggccccatgttgcaatgagatttttgattgccgccattgtcataatgaggcaaaaaatgatatcaacattgatcagaagcatagacatgatattccacgacaccaagtcaaacaggtgatttgttcactttgtgggactgaacaagaggttcagcaaaactgtataaattgtggtgtttgtatgggcaagtacttctgtggaacatgcaagctttttgatgatgatatatctaagcagcagtaccattgcagtggctgtggaatttgcagaactggaggaagcgaaaatttcttccattgctacaagtgtggttgttgctactcaactcttctgaaaaacagtcacccttgtgtagaaggagcaatgcatcatgattgcccggtttgttttgagtatttgtttgaatcaagaaatgatgtcactgttatgccttgtggacatacaatccataagagctgcctgaatgaaatgagagaacatttccagtattcgtgccctctctgcttgaaatcagtctgtgacatgtcaaaggtttgggagaaatttgatatagagattgctgctacaccaatgcctgagcaatatcaaaataaaatggtttggatcctgtgcaacgattgtggtaaaacttctcacgttcagttccattttgtggctcaaaagtgtccgaactgcaaatcctacaatacacgacaaacatgaggctgagcaagtggccacgattattcattggtttcgtcaaaagccttcacttgagttctcttgatgttgttgtgattcgtgaaggcagtgaaaatgcatgtgtgtccattgggtacgtggatgtgcacgtgggaatttgaatttggagtgcacgatgagccacattcaaagggatagaataatggttctttttcttatatgttgatttggagtggggtagtgtaatttgttggggcgccactagttggaatagggcccccgagtgttagagttcgtgtttgttttagcttagcaatttggctaaaagtgtttctatttttttgggtctcaattgataagtattctagttaaattactattaagtgaaattcatgcttctaattatttttattattctattcaagatatatatcccaattataatgtaactatatcttcatcgttggggaaacgatcgtcccatctttgagctaagatggaaaatttttcccaacgaagagatcatcataattggcttctaacatttctctctacg

SEQ ID NO: 4381 - DNA, 1555 bp, Glycine max
acgacccacgcgtccggctgaagattccaatcggagctcagaaaaaagaaacctaagcgccgttcgcgtcgccgtcgcgccgaaagtccctaaagcttacttcctgcttctagatagttggtaatcttatctgagggtagctagtaccatgggagaagtggcagtaatgcactctgagcctctgcagttcgagtgcaatgacattactgtgaatatgactgagaaggaagtgtatcctccagaatcaaatgtggatcacttgcctggagaagaatcgagtcaatcaacagaccacaaaaatatcaattacttgcaagagaaaggatttatggaatatggatgtcagcattaccggagaagatgccgtattagggccccctgttgcaatgagatttttgattgccgccattgtcacaatgaggcaaaaaatgatatcaacattgatctgaagcttagacatgatattccacgacacgaagtcaaacaggtgatttgttcactttgtgggactgaacaagaggttcagcaaaactgtataaattgtggtgtttgtatgggaaaatacttctgtggaacatgcaagctttttgatgatgatatatctaagcagcagtaccattgctgtggctgtggaatttgcagaactggaggaagcgaaaatttcttccattgctacaagtgtggttgttgctactcaactcttctgaaaaacagtcacccttgtgtagaaggagcaatgcatcatgattgccctgtttgttttgagtatttgtttgaatcaagaaacgatgtcactgttatgccatgtggacatacgatccataagagctgcctgaatgaaatgagagaacatttccagtatgcatgccctctctgctcaaagtcagtctgtgacatgtcaaaggtttgggagaaatttgaccttgagattgctgctacacgaatgcctgagcaatatcaaaataaaatggtttggatcctgtgcaatgactgtggtaaaacttctcacgttcagttccattttgtggctcaaaagtgtccgaactgcaaatcctacaacacacgacaaacatgaggcggagcaggtggccacgattattcattggcttcatcaaaagccttcactcgagagctctcttgatgttgtcgtgacttgtgaaggcagtgaaaatagatgtgcatccattgggtacgtggatgtgcacgtgtgggaatttggagtgcatgatgagccacattcagagggataaaataatggttcttatgttgatttggagtggggtggtttaatttgttggggctcccctagtagttggaatagtccagagtgttagagttcttgtattatatttgttttagccctatcgataagtattctagttaaattactctttaagtgaaattcattcttccaattatttttatttttctatacaactaatccagattatcacttatgacaataataatgtaactacattttcatcgtccggtaaacgatcttcccatcattgagctaagatagagaaactttaccaaaaaaaaaaaaaaaaaa

SEQ ID NO: 4382 - DNA, 716 bp, Glycine max
gaatctgtgaatgatgtcactgttctgctctgtggacatacaatacataagagctgcctaaaggaaatgagggaacatttccataaatgctgcctaaaggaaatgagggaacatttccagtatgcatgccctctctgcttgaagtcggtttgtgatatgtcaaaggtttgggagaaatttgacttggagattgctgctacaccaatgcctgaaccgtatcaaaacaaaatggtttggatcctttgcaatgattgtggcaaaagttctcacgtgcagttccatcttgttgctcaaaagtgcttgaactgcaagtcctacaacacacgggaaacaagaggctgagcaagtggtaatggttatttataggaccacttttgctctcacttcattgctgtgtaggtgtagtggcaatccaagtgcatcctttattgaggaaaatgcatgtgggaattgtcattcaattgcaggcaggccgaaccacatccaagagaaaaacggtttatcacgttgatgtggtgtcgagggtagtgtagagtcagcaattgtcgtgttggttatttcgtgttggggaaacccttttagtgttccagtgttcactcctgtaatgtttgtttgggattaatgccaactttcaaattagctgttactttatatatttgtagaatcgtaacactgtcttaaaagttgtgttaagatgtaaccttcatctcgtatgg

SEQ ID NO: 4383 - DNA, 1268 bp, Glycine max
gttcagcttcattcattcacaccaaaaaggtgaatgtgaacaccaaacaacaacaaagtaactacacacacttcgagcttccaaggaaggaagaagatgggtggcgtgacctcttcaatggcggcgaactggcgttcttccctccgtccccggcgtcctacaaggtgctgaaggaggaggcgacggggctgctgctcatggagccgttcccgcaccgcgagaacgtggagattcttcggttcccgaaccgccgcggcacggagatcgtggccatgtacgtgcggcaccccatggccaaatccaccttgctctactcgcacgggaacgccgccgacattggccagatgtacgagctcttcgtcgagctcagcatccacctccgcgttaatctcatgggacccccccactctggctacggacagtcatcaggaagcctagtgaacataatacttatgctgatattgaagctgcatataagtatctggaagagaactatggtgttaagcaggaagacatcatcctttatggtcaatctgttggaagtggtcctactttggatcttgcttctcgtttaccccgtctaagggctgttgttctccacagtcctatactatcagggctgagagtcatgtaccctgtgaaacggacatactggtttgacatttataagaacattgataaaattccattggtgaagtgtccagtgctagtaattcatggaactgctgacgaggttgttgattgctctcatggcaagcagttgtgggagctatgtcaacagaaatatgaacctttgtggctcaaaggaggaaatcactgtaatttagaactctatcccgaataccttcgacatctcagaaaattcatatcctcggtagaaaagccgccatcacaaagagtgagtttcaggagaagcatagacagagttgaacaatctagaggaagtactgattgctttgaaacaccgaggaagagtactgatcagagggacaaaccaaggaaaagtactgataggacagataaactaaaatttcatgaattcaaatttaacaatacggaaaagttagagaagataagagtccaatttgatcagatggagaggtcacgaagaagcgtcgagtacaatgataaatcaagaagcattgagttccaagataaatccaggagaagtgttgatgttcagtttgagaggccacggaagagcattgattggctggatagaattcgagctagctgaacctgttgaagtataagtaatattggcactg

SEQ ID NO: 4384 - DNA, 1370 bp, Glycine max
gtttgtccagttcttcagaatacataaacatcaagatttcagttccaaacaaaacttatcaaaatctcatatactgattcagttctatacataaccatcgagatttactatcaaaccaaaaattctcaaaatctcttcacctctgtgatgaccatggaatacagaaccttagaactcaacatcatatccgcaaaggacatcaagaacgttaacctcttctccaagatggacgtatacgccgtcgttacgctctccggcgaccctctccaccctcagggcgccaccacccacgtccacaaagacgccggcagcaaccccacgtggaactaccccgtgaaattctccgtcaacgaatcgctggccaaggagaatcgtttgtctcttgagatcaagctcgtctccgaccgcaccctcggcgacaccgttatcggcaccgtccatgttcctctcagggaactcatggacaatcccggcgacgacggttccttccgccaagtcagttaccaggtgatgaaacagtcagggaaatccaagggatccttgaatttctcctacaaagtaggcgaacatgttcccgccccggcccctaaagcacccaagacgggacaagagcctgtgatggcttatcctccgaccggggcgggatccagttcgatgccttatgggacaccacatcctcccccgccgccgcctgtggcaggatcaggaggatatggatatccacctcagcaggcgtatggtggatacccaccccaacagggatacgggtacccacctcaggcggctggttacggatatccacaacatcaatcaggttatggatatccgcaacagcctggatatgggtacccacctcaggctcagaaaccaaagaagaacaaatttggaatgggattgggagctggattgcttggtggtgccttgggtggcatgttgattggagatatggtatctgatgctgctgattatgatgcgggctacgatgctggctttgatgatgctggtggatttgatttttaattttcagtttttcaattaaccatgttcttttttttttttttaatttctggatttcattttgcttttttttttcggtggttgcgtaatgatgttctatgagattgtttattagtatttgtttcatatacctcattgcctgactctgtatttaactggtatgatataaagtatataacatacagcttgtgatttccttgcaaaaaaaaaaaaaaaaaactcggaactagtctcgagttttttttttttttttttttttttttttttttttctttttttttttttttttttttttttttttttttttttttttttttttttaaaaaaaaagagttttttttttaaaaaaaaaa

SEQ ID NO: 4385 - DNA, 1255 bp, Glycine max
aattcagttccaaaggatacataaccatcaagtttcagttccaaacaaaacccatcaaagtctttctccctcagtgatcatatattcattcagttctatacaaaatcctcaaaaactcttcctctctgccatgaccatggaatacagaaccttagaactcaacatcatatccgcaaaggacatcaagaatgttaatctcttctccaagatggacgtatacgccgccgtttcgctctccggtgaccctctccaccctcagggcgccaccacccacgtccacaaagacgccggcagcaaccccacgtggaactaccccgtgaaattctctgtcaacgaatcgctggcgaaggaaaatcgtttatctcttgagatcaagctcatctccgaccgcaccctcggcgacaccgtcatcggcaccgtccatgttcctctcagggaactcctggataaccccggcgatgacagctccttccgccaagtcagttatcaggtgatgaagcaatcaagaaaatccaagggatccttgaatttctcctacaaattcggcgaacatgttcccgccccggccgccaagacacccaaagcggccaaggcgggacaagagccggtgatggcttatcctcctgctggggcgggatccagttcgatgccctatggtacgccacaccctcccccgccgcagcaatatgcggcgacgggatatgggtatccacctcagcaggtgcatggtggatacccacctcaagcagcatatgggtacccacctcagaccggttatggatacccacaacagtcgggttatggatatccacaacaatccggatatgggtacccacctcaggctcagaaaccaaagaagaacaaatttggaatgggattgggagcaggattgcttggtggtgccttgggtggaatgttgatcggagacatggtatctgatgctgctgaatatgatgcgggctatgatgctggctttgatgatgctggtggatttgatttttaattttcagtttttcaattaaccctgtattttttttttcttttatatttctggatttcactttttgcctttttcggttgcgtaatgatgttctatgagattgcttattagtatttgtttcagatacctctcattacctgactctgtatttaactgctatgatataaagtataacatacagcctgtgatttcctcaccattcgattctattccattgattgataaacgagagaaaaaaagaaaaggattcatgct

SEQ ID NO: 4386 - DNA, 1464 bp, Glycine max
  misc_feature (1088)..(1088): n is a, c, g, or t
  misc_feature (1097)..(1117): n is a, c, g, or t
  misc_feature (1135)..(1139): n is a, c, g, or t
cactcaacaatcacatctccagaacacaagattagtgacccttcttcttgttattccacttgcgttaggtattggtgtgattgtttgtaccatccggtggtggagcttgttggaaattggagatgagtcagaggggtttaatatatagctttgttgccaaaggaactgttgttttagcagagcacacgcaatataccgggaatttcagtaccattgccgttcagtgcctgcagaagctgccatcaaatagcagcaaatacacgtattcctgtgatggtcacaccttcaattgcctccgggacaatggatttgtttgccttgttgttgctgatgaatcgattggcaggagtgttccttttgtatttcttgaacgggcgaaggatgactctatgaagcgctatggtgctagcattaagaatgacggtgcccatccacttgccgatgatgaggacgatgacgatttgtttgaggacagatttagcattgcatataatcttgacagagaatttggaccagcactcaaggagcatatgcagtattgcatgaaccatccagaagaaatgagtaaactatcaaaattgaaggctcaaataactgaggtcaaggggataatgatggacaatattgagaaggttttggatcgtggagagaagattgaactgctggtggacaaaacagaaaacttacagttccaggctgacagcttccagaggcagggcaggcagctgagaaggaagatgtggctgcagaatctccaaatgaagctgatggtgggaggaggaatccttatcttaattataattctgtgggttattgcttgtcggggtttcaaatgttgatagagccataagaagtttaagcctgtataaggcaagagatgctcaaaatgatatactacgtgtacatgaaatttggcactggaatttatgatcactgtcatagactgtaattaaccttgtggtgagctgctagttattttgaaccaagctcttaatttagatgacatatctcgaattctggattggttgtgtatatcatgacaatgtttttaccattatatagactattgccacttgccctctcttcanaaaaaaaannnnnnnnnnnnnnnnnnnnnctggagcagcaggggttnnnnngggtaggatatatgggtaggcgttaatgcgttatgcaattgcatgccatttctatggattcaggtgcagctcccatcaatgccagtagttcatttaaaggtttgaaatgcaaagtgacaactctggtgcctccttgataatgagttggacggacgttggtaatttctcaccagagatcctccaagccattcatcagcaactcgttctctgcttgcagaacctctatctaccacttcaaagtgaagcacgcctttgtcacattagcattctgcctttgcattcgctggaaaactcaaccccgattgggctttacaagacagtaaca

SEQ ID NO: 4387 - DNA, 1002 bp, Glycine max
atttaatcgactccagaatcgaattcattactatacaactttttgtgttgggaacgaaaaatacatttatttaattctgaaacgctctttatcttctcttcctcctcataggccttactatgacctcactcacgcattgaagaaggcaacgctccttgcagctcaaatctgcaaattaggctttttttcccccaacagtgggttttgcttttctctgaaattttaagttttggggttttctttcaatcagggttcagtttattcaagttttacaatttcgcggctctgaaactattagatggggaattgtttgcgtaaggctcaagcggatgatgattctgatcataatgtggagtttgcttctgggaatgtgcaagttattactaccaaagaatcttgggaccaaaagttggaacaagcgaggagggacagtaaaattgttattgcaaatttcagtgccacatggtgtggtccttgtaagatgattgcaccatattattgcgagttgtccgagaaatacccatctatcatgttcttattagtcgatgtggatgaactagctgacttcagcactttatgggacatcaaagccacaccaactttcttctttcttaaagatggaaaagaggttgacaaacttgtaggagccaacaagccagagctggagaagaagattgttgtgattaatgatgcagtgcctcataagcaatagtgatcgtcgttgttgttgttgtagatctattcatagaagctctgctcttctcttctctcttcatatggcagtgcgtattctgcatgtctttcaatcccgtgacattgtcattgtatttcttttttaatgtaaatatatgacgttccaaatgaatgttttgcattccaaatttcaacatgttgtcactgtggtatctttgaaatataatgtattggtgtgccttatcccttaaaaaaaaaaaaaaaaaaaaaaaaaaaaaaaaaaaaaaaaaaaaaaaaaaaaaaaaaaaa

SEQ ID NO: 4388 - DNA, 1826 bp, Glycine max
gggacataccatatatacatatattatagtttagtttgcactattttaatggtggctggctaccttaattccacatgctaaaattttgcacccctttattatataaccgtttcattctctatagcatctcaaagggtgtccaaagaaggaatcacacaagagaaattttgggtggatcttggtaatttaaatttggtccaaaaatagtaagaaaaaaaaaccatagttcatttaattttcatgtccttgctaacggtggcgcaccaaagggggtcaggtgagtttatccggttcacggaaagtcatggcggtggtggcgatgacgtcagtggtgacggtgaacatggttgtggacatgatgatggaagtggtgctggaggttcactagggttgaattttaaccaagtgatgcaacaaggtgaggtgacaatgcaaggtggttcattggtttcagggtataacaggggtgatccagagttgagagaaatagtttcagctttgacacacgtggtgtcttcagggtctggccagaggagcaccgaatggacccagcaaagtggttttcctatgatgtctgcttcttctctttcacgtttgtctgctttctcttcttcttctccttctccttcttctggagcctcttgggttggccacaaaagaggcagagaagaagaagagaatagtacttcacataacttgatgcaacaacaacaacaaagtgctccaagactcttcagaaacattggtgacttcatggtgccttctcaaggagactcatcatcagtgacagaagaagcccccacctccacaactacaactgtaaccgccgtcactgaaaacccaccaggaggtggggaaaggaggagaaagtacagaggagtgaggcagaggccatggggaaaatgggcagcagaaatccgtgatccacacaaagcagcaagagtttggctaggcacatttgacacagaagaagcagcagcaagagcctatgatgaagctgcattgaggttcagaggcaacagagcaaagcttaacttccctgaaaatgtaagagcagttccacccattcaaccttttcaagccaccactaggctaaccgtttctgattccaccacctctcaattccggccactctccgcggtggcgccacccttcattcagcagccacagattcagggctcctctgacttgatcagagactacttgcaatactctcagcttctacagagtgattttcaacagcaacaaatacaacaacaacagcagcagcagcggcagcagcagcagcggcagcggcagcagcggcagcagcagcagcaacaacaacaacaaccatctagtttgcttcagcagttgtactataatgcacaatttgcttcacttcaatcaccttcaatgctatcatcatctccttcattttcttcttctgtgtctccagcaccattcccattattcacaacctctgcttctttccccttgttttcaagtcaacaaatgggctatttccagccaccggaaagccgcaatcccgctggcggcgtgccggagtttccaacgtccacatggtcggataccagtagccagccaccaccttctggttgatacagtgttttagtttccttcatattttcctttttcttttttctttctttcattcttagcataaaaaaaaaagacttgttatacttatttcttttttcaagggtgaaactatgatatagttttttttaagtatttttggtactattctcgtatcagaattagagtttcagtaatttatgttgatattcaatacaaatctttattatgtaaaaaaaaaaaaaaaa

SEQ ID NO: 4389 - DNA, 2173 bp, Glycine max
  misc_feature (34)..(34): n is a, c, g, or t
  misc_feature (38)..(38): n is a, c, g, or t
  misc_feature (40)..(40): n is a, c, g, or t
  misc_feature (42)..(42): n is a, c, g, or t
gactaccttaattccacatgatatactatcttanctcntnangatataaccgtttcattctcaatagcatctcaaagggtgtcctgagaaggaatcacacaagagaaattttgggtggatcttggcaatttaaatttggtccaaaaatagtaagaaagaaaaccatagtttatatagttttcatgtccttgctaacggtggcgcaccaaagggggtcaggtgagtttatgcggttcacggaaagtcatggcggcggtggtggcggtgacggcgatggtgaatatggttatggacatgatgatggtagaggtggtgggggtggtggttcactagggttgaattttaaccaagtgatgcaacaaggtgaggttacaacgcaaggaggtactttggtttcagggtataacaggggtgatccagatttgagagaaatggtttccgctttgacacatgtggtggtgtcttcagggtcaggccagaggagcaccgaatggatccagcaaagtggttttcctatgatgtctgcatcttctctttcatgtttgtcttctttctcttctccttcttcttctggagcctcttgggttggccacaaaagaggcagagaagaagaagagagtagctcttcccataacatgatccaacaacaacaacaaagtgctccaagactcttcagaaacattggtgacttcatggtgccttctcaaggagactcatcttcagcgacagaagaagcccccacctccacaactacaagtgtaaccgctgtggcaacaacggttactgaaaccccacccccaccgggaggtggggaaaggaggagaaagtacaggggagtgaggcagaggccatggggaaaatgggcagcagaaattcgtgatccacacaaagcagcaagagtttggcttggaacattcgacacagaagaagcagcagcaagagcatatgatgaagctgcattgaggttcagaggcaacagagcaaagcttaacttccctgaaaatgtaagagcagttccacccattcaaccttttcaagccaccactaggctaaccgtttctgattccaccacctctcaattccggccactcgtcacggaggcgccgcccttcattcagcagccacagattcagggctcctctgacttgatcagagattacttgcaatactctcagcttctacagagtgattttcaacagcaacaaatacaacaacaatcaccttctagtttgcttcagcagttgtactataatgcacaattggcttcacttcaatcaccttcagtgctatcatcatctccttcattttcttcttccgtgtcaccaacaccattcccattgttctcaacctctgctcagttttcctctgcttctttccccatgttttcaagtcaacaaatgggctatttccagctgccggaaagctgccctcccgctggcggcgtgccagagtttccgccgtccacatggtcgggtaccagtggccagccaccaccttctggttgatacagtgtctcagtttccttcatattttccttttttctctttctttcatacttacgataaaaaaatgatttgttttacttatttccttttttaaggctgaaacttagatagtttttaaaatatttttggtactattctcgtatcaaaaacaaatttagagtttcacttcagtaatttatgtttatgttgatatttaatataaatttttattgtaaattaccatgtgaaactctaattctttattatttatatatatatatatatatagagtaccaaaaagatctaactaactgtatttaagttttgtaccttttctaaatgatggtaaattccttgaacatgtagttttggagttaactattgttttgttcctattcatgtaaagaagattatttgaaaacagaaaaggtgggagtgattgaaggttgatgatggatgagaaagagtggcaggtaaagacaaagcagaatttaggttttagggttagtttatttccaattctcaatggatttgatgttaacattccctcagttatccgtggaaaggcgtagaaacccatagcttttacataccctctgtctgctatctgctatacagccacagattttatcaaaatgttcctatactttagttcatttttaataatattttgtgaagatttagtcatc

SEQ ID NO: 4390 - DNA, 1500 bp, Glycine max
ctctctctctcttaggaatcttccttctgctaggaaccctaaaaatctgattacgtacctacccattatttaagaggtccgtttctataccaggagttgtctggctgaactaattaatcatttggggttggaggaacaagaggagtgagagcttcacttttgctgtttttaaaaattagggcttcttcatttggtacccgattcccttgtttcttgggcttctggaattgatgcaaattttaggtctggtgggtggtggttgttaaatcaaatcgacgacaaaaattagttttttttcttcttctggggtgttgggatatggatttgggggtttctgatgagatgttaggcacttttgtgccaatagtagtttactggatttattctgggatttacgttgttctggggttgtttgctgagaattatcggttacattcgaagcaggaagaggatgaaaaaaatttggtgtcaaagggtgctgtggttaaaggtgttctcctccaacagctagttcaggctgtggttgcaaccctcttgtttgcgctgacaggaagtgacaaccaaaatactacaagccagaatacttctctacttgttttagcaaggcaatttgttactgctatgcttgtaatggatgcatggcaatactttatgcacagatacatgcatcacaacaagttcctttacaaacatatccactctctacatcacagactcattgtaccctattcatatggagctctgtacaatcaccccgtcgaggggcttctgaatgacactgttggtggggctttatctttcctactctccgggatgagtcctcgagcctccatcttcttcttctcctttgccaccattaaaacagtggatgatcactgcgggttattgctccccgggaaccttttccacatctttttcaaaaacaactcagcctaccatgatgtacaccaccagctctatggcaacaagtacaacttctcgcagccattcttcgttatgtgggacaaaatcttaggtacctacatgccttacacgttggaggagagggaaggtggtggttttgaaactagaccttgcaaagattacaaggatgattaacttttttgcttgacgagcattctttatctgtactagtattgttttccctttttatgagcagcttctcctttctcatgtgatgcctgtatatatacatatgatgtgtcctgttctatatttttctttcccttatgtccatactagatagacataataaaggaaattgaggtgctacctattaccatttgattttcacccttgttttgcttgctgctacacaatagtcataccttgtatccctctgtgatgtcttgccttctttaactttcacgcatgcaatctttgatatcctaatgactaatacttcatatgttttgccgactttgtatatctggttctattttttagcagggtcaatttatggcctaactatggttatttaatgaaagttgtatttgtttt

SEQ ID NO: 4391 - DNA, 844 bp, Glycine max
ggctcgaggttaacaaattagggttaaaatccaattttaaaattgaatactaaaataagcaaaataatcaagagattaaattcataactaggggattaaatttacaattatgagataaaggaaccaaatttacaaaattttgcaggtaggaggaattgagttgaaatcgaaagggaagcggtggtttaggttaggatttggtgagtgagtggggatggcgaagttcaatgtggtgcagaagcgaaggagagctctaatagcagagaagaagagacagcttcacggagaccctttaaccggcaagctcaagatcaaggaccaacccctttccctatccggaaaacgcaaacgcaagctcttcaaaaaatggcgccgggaccaaaaggacgccttacagaatggtttggtaaccatggaagatgttcaaatggcagttgctgaaggggataccaaagatacccctagaccttcaccaaaaattcacttaaagaagaaggccttgaaacttaaacagctcaagcgcaaagggaagaacaaaagaaaatctgatgtgcctgctgatgtttcggctgatgcaatggtggaataaatatgaaagttttgatatcctacatacttggtagggtggaggatagaagaggccgatgtctgatggtatataatgttgtaatcctcgagtgattatgctattcctatattttcttctttttagtgaccttatcaagtgtgcgtacatggattttagatagacacggtatgaagcagtttatgcacttatcaagtgaagtattggtatgaattttgttttttgcaaatcaaaaaaaaaaaaaaaattcgcagacta

SEQ ID NO: 4392 - DNA, 1420 bp, Glycine max
tcgagtagctacgtagtgccccccccccaatgtaagagaaagagaaattgtgagtgtgttgtgtctaacggcccaagtctaacgttgtggagcatagaagagaaagggatgatattgaactgtgttagagtgacagctatgcctatgatggctgttccttcatggagatccacgtgctgctgcgcttcttcttcttcttcttcttcagtttcagctacgtaggccccccccccccgttctcaacttgatcaccttcattcagaggctgacgccaccagagccaaggataagcagttactttctctatctgaatcaaccgtgtttcctggacaacacccattatagccagtcccatgaatatgattgaagttttactttttttttactttttccactacaattctcaccaaaagaattgaaattggactgctgtctaaagggttcatgtaaagattgaggattgaggcttatattgaaataattgtgtgtggtggttaacacttaacagcaactaatgctagattgaggtttctgcgactgtcagaggttgcagagaagcttcaaaagcaagcagctataagcattcaaaaggggcaggaaaattatgcaagggaaatgctttttcagaggaagaaagtgttgcaggctttagacaagtctaaaagacgcattgaagtgctcgatgagctttcctccaagctaagtgaggcaatatctttgaaagaaagtcagctaattggaaatgttactgtgaaaattgaagacacaacagaagatgcttcaagtccagttcgaattattgctccaaaggaggaagttcaaaataatgtcactaaggatgagtcagatcctgatacggcggaatttggtggtgatattcaagatgtgcaactttctatcgaaagtgaaggaagttcactggatgataaggagactcagcatcttctggaatcccttagtatcagcactccaaatgaagacaatatagccagaaactcgtcagaaatatcctcttatgaggacttcatggaatatatagatctaaaactcagtgaaattgaagctgaactagtgactgttttgaatgtctcaaccttggtactggataatgaagagagagcaaagaattctaggttgcaacaaacaattgaactccttgacagcatccatggcattagacagagaattagaaatactaaggaggcaaaagtgaggatctgatcaattttgttttgctcgactcatcttctgcttccaggtgagaactaacttcatttgtaaaaaaaggtctgccacaattttcttgtatcccttaatcacttaatgtggaaacaggaaagacacatttgagatgcttattattagtttattaaaattgaaagaggtgttgatgttttgatttaaaaaaaaaaaaaaaaaa

SEQ ID NO: 4393 - DNA, 2150 bp, Glycine max
gacaccggttgttgacattggaagaggcattgtgcagtagcttcaatttttgtttcctgggagagcgagaagagtgttcggatttcaccattccaggtgacggcggaagatgcttctgtcgtcgatacgcagaggattcactagtcgagtaggtcccatacgaaccctctcttcgcactccgaaatgaaagactttctggattacctcgactccctcaaaaattacgagaaatcaggagttcccaaaggtgccggcaccgattccagcgacggtttcgatcttggtagaatgagacgcctcatggagcgttttggtaaccctcactccaagttcaaggctgttcatattgctggaactaaggggaagggatcaacagctgcttttgtatctaatattctgaggaatgaaggctattctgttggttgttacaccagtccacatatcctgaccatccgggagcgcattttactgggaaaatccggccatccggtgtcagcgaaattgttgaatgatctctttcgtaggatcaagcccgatattgaccaggcaatgaaagaggaaaatggttgcataagccattttgaggttttcactaccatggcattcctcctatttgctgatgagaatgttgacattgctgttattgaggctgggttagggggtgcacgagatgcaacaaatataatatccagctctgggcttgttgcatcagtcataaccactgtaggtgaagaacatttggcagctcttgggggttctttggaaacaattgcaatggcaaaggcaggaatcataaaacaagaccgcccattggtgttgggtggcccatttgtccctcatattgagcgcattattcgagacaaagcagtagccatggactcacctgtagtgtcagcatacgatactggaaataagtgtactgtgaaaagtttcagcatacgcaatggaaggccttgtcaaatttgtgatatactgatacacctcaagccatgaaaatgtcctgtaagttacatgatgtgaagttgcaaatgctttggagatcaccaacttcaaaatgcagctactgctacttgtgtggcacttgttcttcgcaatttaggatggagtatttctgataaatctattaggtatggtttagaggatacataccttcttggaaggagtcaatttctaacatctgaagaagctgaggtattaggacttactggatcaacagtactgcttgatggagcccacaccaaagaatctgccaaagctctgatgaataccataaggatggcatttcccaaggctcaattggtttttgttgttgcaatggcaagtgacaaagatcatgtgggatttgctcgagagattctctcaggtgtacatgtggagactgtcgttttgacagaagctgctattgctggaggtgtaactcgaacaacaccagcatctttgttgagagattcttggattaaagcttctgatgagcttggcattggtattgttcatgatggaatggcagaatacagtgaattattaaaggaacaaccagtaggctctgaaagcaatttgggtgatggtaagaccgtgttggctactgtgccatgtttaaagggttgtttgagaagcgcaaatcagattctaagcagacgaggggatgaaaagcgtgttattgtcttcaccgggtctctgcatattgcagcttcagtcttagcttctcttgctggttaatggggttttatagtgaagctactgaaacggaatttccctgcaataacaacacaaaaattaaggccagatggaatcttggatgcctttatattaactttcatcatcactgttttctgcttccatggaatgaattatagtcccaatgcggcagctctcgactggaattttggatgtcaataatcagcattcaacagtaatctattaatattgtgtttgacttaaagtttgagatgtgattttcagaggttattagttatagcttttacatcctaaacgtgattttctgttttcaaagagtttccaaacacactttctagaatgaatattttagagataatgcaaggcatttttaggatcctaatgagcttaaaaaaaaaaaaaaaaaaaaaaaaaaaaaattcctgcggccgcgaattcttcctggtgccgaatt

SEQ ID NO: 4394 - DNA, 3709 bp, Glycine max
agaaatgctaatgtgcggtcacgattgagagatggttttggcccatcagtagctcacgtttgtgcctatcatggtcaaccagattgtatgcgggaattactattagctggagctgatcccaatgcagtggatgatgaaggtgaatctgttctgcatagagcaattgccaagaagtacacagactgtgctcttgtgatattggagaatggaggctgtagatcaatggccatcttgaattcaaagaatctgacaccgttgcaccattgtgtggcaatatggaatgttgctgttgtgaagagatgggtggaagttgctacttctgatgagattgctgaagcaattgacataccaagccctattggcactgccttgtgcatggcagctgcttctaagaaagaccatgaaaatgaggggagagaactggtgcggatattgcttgcagcaggagctgatccatctgctcaagattcccagaatgggaggacagctttgcatacagctgctatgactaatgacgtggacttggttaaggttattttaggtgctggggttgatgtgaacattcgcaatgtgcacaacagtatacctcttcacttggccttagctaggggtgcaaaggcatgtgttggactgcttcttgatgctggagcagattataatttgaaggatgatgatggtgacaatgctttccatatagcagcagagacagcaaaaatgattcgtgaaaatcttgactggcttattgttatgctaatgaagcctgatgctgacattgaagttagaaaccacagtggcaagacactacgtgacattttagaggctctcccccgagaatggttatctgaagatctgatggaagcactcgtgaataagggagttcatttgtttcctacaatatttaaagtgggagactgggtgaagtttaaaagatctgtcacaactccaacacatggatggcaaggtgctaaaccaaagagtgttggttttgtgcaaagtgttccagacagagataatctcattgtttcattttgttctggagaggttcatgttcttgcaaatgaagtcataaaagttgttccattggataggggacaacatgtacacctgaaagaagatgtaaaagagcctagatttggttggcgtgggcagtcacgtgacagcattgggacagtattatgtgttgacgatgatggaatcctccgtgttggatttcctggagcatccagaggatggaaagctgacccagctgagatggaacgtgttgaggaattcaaggttggagactgggttcgtattcgtccgactcttacatctgcaaagcatggactaggatctgtgacaccaggaagcattggcattgtatattgtatccgaccagacagtagtctgttaatagaactgagctatcttccaaatccatggcattgtgaaccagaggaggttgagcacgttgctccttttaggattggggaccaggtatgtgttaaacgatctgttgcagaacctagatatgcttggggtggtgagacacatcatagtgttggaagaataagcgagattgagaatgacggtctcttaataatagagataccaaatagacccataccatggcaagctgatccatcagatatggagaaggtggaagatttcaaggttggagattgggtaagagtgaaagcttcggtgtcttctccaaaatatggatgggaggatgttaccaggactagtcattggggtaattcatagcttggaggaggatggcgatatgggtgttgctttttgtttcagaagtaagcccttttcttgctcagtcactgatatggagaaggttcctccatttgaggtgggccaagaaattcatcctgatgccatctgttactcagccacggcttgggtggtcaaatgaatcagcagctactgttggaaaaatagtgagaattgacatggatggtgctctcaatgtgagggtcactggtaggcagagcttgtggaaagtttcacctggagatgcagaacggcttccaggatttgaagttggggattgggtacgatcaaaaccaagcctgggaaccagaccaagctatgactggaatagtgttgggagagaaagtttagctgttgtgcatagtgtacaggattctggatacttggagttggcttgctgttttcgcaaagggaagtggatcactcattatacagatgttgaaaaggttcctagctttaaagttgggcagtatgttaggttccgaactggtttggttgagccaaggtggggttggagaggagctcagcctgaatctcatggggttataaccagtattcatgctgagcgacaagtcagggtcgcatttttcggtctgccaggactgtggagaggagatccttcagaccttgagattgaacaaatgtttgaagtgggagagtgggtgaggttgaacgacaatgcaaataattggaaatcaattgggccaggtagtgttggtgtcgttcaaggaatagggtatgaaggagatgaattggacagaagcatttttgttggattttgtggggagcaagaaaagtgggtaggaccaagttcccatcttgaaagatttgacaaactctttgttggacagaaggttagagtaaaacaatatgtaaagcaaccaagatttggatggtcagggcatacacatgctagtattgggactatacaagcaattgatgctgatggaaagctccggatatatacaccagcaggatccaaaacatgggtcttggacccatcagaagtggaggtggtagaagagaaggagctctgtattggagactgggttagggttaaagcatcaatttcaaccccaacccaccattggggggaagtgagtcattcaagcataggggtggtgcatcggatggaagacgaggatctgtgggtgtcattctgttttacggagaggctatggctttgtaaggcatgggaaatggaatgggttaggccatttaaagtgggggacaaggtaaggatcagagacggactggtgaccccacgatggggatggggaatggagacacatgcaagcaagggacaggttgtaggggtagatgcaaatggaaaactgagaataaaattccggtggagggaagggaggccctggataggagaccctgctgatcttgcccttgatgaggactgatatgttattttaggaacatggaaggttgtatcataagtaaattttctcattcagctctttagcctatgtttttctgggctgagcttgtgcaaagtggaaagctatatatgcggtctgctacttgatgtgctctaaaccataactcctttatgaaggttgaaatgcagtttggccatacatgtattgatgttaataaacagaaggggtggaagaatggaagctgtggagataggaaaactgtcttgctgaccgagtggtggagatttaaaggcagctaaaataaatatattggcagttggcccatttatatattcattactcacaagtttgtagtcccagattttgaggtttatatcgtatgtatgtttatttcatattgtacaaattgtattcaactgtcaacttaatgcatttttttgactcgattatgcagttgcataattcttgaaatagaattgattccattaaaaaaaaaaaaaaaaaaaaaaaaaaaaaaaaaataaaaaaaaaaataataaaaaaataaaaaaata

SEQ ID NO: 4395 - DNA, 1014 bp, Glycine max
tacggctgcgagaagacgacagaagggggggggggaataggagggggcaaattgagttgggtgttggaaaggcagagcaagaggagtaacataatcaaacatggcggttaggcaaagagccgtgtctgcacttccaactcttctacgcactctccgcaaagaacctttgaagcctcgcaaccacgcacacgtcaatgccttgccctctcttcgacgcgctttctctttgtacgatcagatcaacctcatcgatcaagtccccgaagaccagctccgatttcaagggtataatgatacggggtttactgtaaatggggttgaatacgaaggaagcttgctttgtgttggaaatttgctcatgtcttggaaacctaagaagttttcagagatcactgccgatagcttgtcaatcttccaaatagttcgccctattccagagattttgattattggctgtggaaagaacattcaacatgtagatcctgaacttagacggtttattcggtctactggcattaagctagaagctgttgattcgagaaacgcagcatcaacttacaacatactgaatgaagaaggtcgaattgtggctgctgcacttcttccacacggagtttcttcatgaagcttggacttgtattcttagtagccaacaattgctccaaagatgttcacctcaatgccacaaaattttttagcccaagtccttgggacatgctttgattttccatttagaaagttttgacatagtaataggacaatgtgaattaaactcaagtgagtcctttgacgtctgctgaagttttcaaatgtaataaggagaattaaaatgtacagagtgcagtaaatccctgcaaatttggactctaatgactggctgtttggttttaatgctatcttactttgttagagttgaaaagaaaactgtataattttactattcttcaatcaaccctttatttggatgagaaaaaaaaaaaaaaaaaaaaaaaaaaaactcgagactagttctct

SEQ ID NO: 4396 - DNA, 1433 bp, Glycine max
ccccgcgtccggtctagaaccaaccctcttcatacatgcatccactcctctgctacgtcggccccccgcagccccaaaaaacacaccacacgacaaacaaatattattattcaatagaaaagaaagatgagtccaacatgggtttttgtgttaggtgttgcagcaatgttggtggttgtgagtggacaatcatcagtgaagcctttggtgaagacagtgaaggggaagaaggtgtgtgacaaagggtgggagtgcaaaggttggtctgcatattgctgcaatgagactatctccgactacttccagacataccagtttgagaacctcttcgcgaagcgcaattcgccggtggcacatgctgttggtttctgggactaccgttctttcatcaccgctgctgcactgtaccagcctcacggctttggcaccactgggggaaagaccagtggccagaaggaacttgctgctttctttggccatgttggcagcaagacctcttgtggttatggggtggctacagggggacccttagcctggggcttatgctacagcaaggaattgagtcctgataaattctactgcgatgactactataaattaacctacccttgcactcctggcgcagcatactatggccgtggtgccatcccactttactggaactacaactatggaaaagccggggaagccttgaaggtggatctgttgaaccatccagaatacatagaacaaaacgccactctagccttccaggctgcactctggcagtggatgaccccaccagagaagcacctaccatcaccccatgatgtctttgttggcaactggaaacccacaaaaaatgacacattgtccaaaagggtacccggatttggtgccacaataaacttgctctatggggatcaaacttgtggtcagggatcagataatgaggccatgaacaacatcatttcacactatctttattatcttgatctcttgggtgttggcagagaagaggcagggcctaatgaagttctctcctgtgctgaacaagctgcttttaagccctctggctcaccatcttctgccacaaattgagcattccttggctgagattcttggccggtccattcttgaatctttcaaaaaattcttaataaagaaagcaacaagtagacaagatatttcaactactttggccttcaaatgagagtgaaatgagtttggagtggacactactcattgttaatttgtgtatagattatattactttgccatatatcttggcttttgatgtttcctttctcttctataattcgaatatattttggtatataatgtatgtatacaattgagtatttgatcattaaggattttctgaacaattttgttgatgtttgcatgttgtgcatttcactaatcaaatgatacaaagtttcattttgacccac

SEQ ID NO: 4397 - DNA, 1409 bp, Glycine max
acaccacacaacaaacaatattattcaatagaaaagaaagaaagatgagtccaacatgggtttttgtgttaggtattattgcagcaatgttggtggttgtgaatggacaatcatcagtgaagccattggtgaagacagtgaaggggaagaaggtgtgtgacaaagggtgggagtgcaagggttggtctgcttattgctgcaatgagactatctccgattactttcagacataccagtttgagaacctcttcgcgaagcgcaattcgccggtggcacatgcagtcggattctgggactaccgttctttcatcactgctgcagcactgtatcagcctcttggctttggcaccactggaggaaagaccagtggccagaaggagcttgctgctttctttggccatgttggcagcaagacctcttgtggttatggggtggctacagggggacccttagcctggggcttatgctacaataaggaattgagtcctgataaattctactgcgatgactactacaaattaacctacccttgtactcctggtgcagcatactatggccgtggtgccatcccactttactggaactacaactatggaaaagctggggaagccttgaaggtggatctgttgaaccatccagaatacatagaacaaaatgccaccttagccttccaggctgcactctggcagtggatgaacccaccagagaagcacctaccatcaccccacgatgtctttgttggcaactggaaacccacaaaaaatgacacattgtccaaaagggtgcctggatttggtgccacaataaacttgctctatggggaccaaacttgtggccagggatcagataatgaggccatgaacaacatcatttcacactatctttattaccttgatctcataggtgttggcagagaagaggcaggacctaatgaagtactctcatgtgctgaacaagctgcttttaagccccctggctcaccatcttctgccacaaattgagccttgccttgcttggctgaaattcttggccgttccattcttgaatcctgcaaaaaattcttaataaaggaggcaacaagtagacaagatacttcaattactttggccttcaaatgagagtgaaacgagtttggagtggacactcattgttaatttgtgtatagattatattactttgccatatattttggcttttgatgttttctttctcttgtataatttgaatatattttggtatataatgtatgtatacaattgagtatttgatcattaaggattgcctgaacaattttgttgatgtttgcatgttgtgcatttcacttatcaaatgatacaatgtttcatttggataaaaaaaaacttaaaaaaagctggcttccacacatgggaaaaattaattatcaagga

SEQ ID NO: 4398 - DNA, 1672 bp, Glycine max
attacaaatacacaggtattaggctgcgtccatatttatatctcatgatttcgtactctttcaaacactagacttggaagggatttttttttgtgctttgaagaataagaagatgggagggtatgaattaaagtactagatattgcaatcttaaacaaattaacattgacagaatgttaattatcaataatcatccttcatagcaaaagcagggaattaataattgctacctctgaaaatgcatgtttagaaaaacgaaaattacatcttaattaatgttttgacaacacttattaataacttattgtgttaacctaattagattagagacaatacatcataatggataagatttttttttcaattggccaaatcatcatgaatggcatatagcatcgtgagcaatcagccttttcattattacagattgactgctcacgatgttatatcatccataaaatttcttccatgctgttaaaatccacttccatatgctggtgcccagtaatcagctccattttcatttccaacatgttgggtacatgacacaggaaccaagcacagccctctactcttcaagtcccttggcttatcttttgcgtcctggtttggagctccctttcttttcaggccattgtcattcaacagctgaccggggtcctcaggaaatacagaatttctttctccgtgtacctgttgagactgtggattcctcatgttttttgatccattgcccaagtaaggagaactgagtgcctcaatttgaccctgaaggaatcttatgtatccaatggcttctaacaagacagaagctgtgtcagtctttccgaacggggaaactagctggtgaagagctgttattctatcacctaacttctcctttctcaccttgagaggtggttggcttgaagatggttgactcttagtcttcttgtaaactccaccagtggctgtgctattacactcggatgtgtgatctggtagttggttcttcctatggtctgtcttgttgtaagtgaaatccaataaattattgctactgaagctagcaacactagacctaggggaagaagaaactggtaccatatgtgaccaaggtgccccagaaacctgaaattcctgatcatgtccatggtgatacaagttgccactttgggaaacctcttgctttattacatcagccataggaacgatagaggatgggttaagcatttgttcattccattcatctaacttttttgattggaaatgactgaatgcaactctctcttcttctcctggtaaaccagtgaaaagaagttggctcaatgagtgagggggctcttggttttgtgtagaagaattaaaaggaattgaagaagatccaagaacatactgtggagggatcagagatggtggatgcatagtccaccagttagggttcccagccatcatttgctgaaatatagaaaatattttgtgtggaattaatactgaattcttgtcttgcaaatgaacatgtaggtaggaaatgaaatatttaatctccttttcccatatacttttcctctttcacctttgtgatatttccttgtatgtgcaaccaaacaagcctttggctaaagctttgagtgttgtgttttgctttcttactagctgttgggggggcggcctgcgttgcggtatcagtatt

SEQ ID NO: 4399 - DNA, 1834 bp, Glycine max
acatattcttttgttttaagggacatctattctcccactagaagaagtctagaactatagctgccactttcagaacgacgtcgaacctcgcttttcgccgatggccggaaactgcttgccgccggtgaagctcaccggcagcggccgcccggtgctcgaacccaacgaaatcgagtgcttcttcctctccggcgttgaccttctcagcgaagacgaccccagcttccctcacctcaaatctggcctcctcatcctcaccacgcaccgcctactctggctcccggactccgccgcatccgccggcggcaccgccggcgccatccccctcgccgccgtctcccacattttctcccccaagatgtccctgcggaaggtgttcgcctcgccgcgggtccggttccaggtgtcactgtcgccggagggaagggtctccgcggcgggttcgcgatcggtggtggcgacggcggtggtgagagggaagggggattgcgacgcgtttttggcgaagtttacggagaattgccgcgccagggcgtggcaggaggcggagagtgggtccagttcggggtcgaattcggcagtgatggcggcaacagcgacatcatcatcgtcgggcgggatttattcgagcgacggaacggtgaggatggtgggagtgtctgggatactgaggaaggagcaggaaatgtgggagagtactgataggagcttgcaggaggcttttcaggatttgaatgctctcatgagcaaggctaaagagatggtgatgctagcagagaaaatgaggctaaaacttttgtctggctcaaattctcaaaccaatgcaacggctgcgggaggacgacggaagggggaagaaatgcaagattggttattgagtgttggtattatatcccctgttacgaaagagtctgcgggtgctttgtatcatcaacaactttctcgtcagttggcagattttgttaaagttccacttgagaaagctgggggaattatcaatcttattgatatatattgtctcttcaaccgtgctcgtggcacagaattgatctcacctgatgatttgttgcaagcatgttctctgtgggagaagtttgatgtccaagtggttctgcgcaagtttgatagtggagtcatggtaatacagacgaagtcccacagtgatgaggaggttttcaataaagtcaagatgcttgttttgaaacctgacgcccttcgagctggaataagtgctagtgatgctgcaaggacactaggggttgctccagcaatggcaaaggagcatctcttgtctgcagagagcaaaggtttactatgcagagatatcagccctgatggatttcgcttttatattaacttgtttgtggaaattgaccgagattatatgtatttagtgaaagatcagggaatttatgcctcgtgggtacaggctaacgatactcatgcttgagagtcccaagcatgtttaattcaaggtatgcataaattttaaattgataaagcgatgataagcaggaagggaaaaatgtacacacacacgcatacagttttactgtgcttcaatcaatgtgagattttcattgtagaggacacttcacataatcattctgtagaaggattataaatacttgaaaagactcgaagcaaaacttatatgtatcatgtcatatcattccaaaagctattgttactcttagcctagctttccatacatgatgtatgatgatgttgaggattactctgatatccatcccccttttttattatgataccaatactcaacgtgagttcttaattaaaaaaaaaaaaaaaaaagggcggccgccgactagga

SEQ ID NO: 4400 - DNA, 1928 bp, Glycine max
acccacgcctccgttcggccgcgtgctgccgtcagcatagcacaacacagcagttacgcaaggtctttatttgttcttcctcaagcaccggcaacgcaaacggatgcattacaaaaaataaaatgagataagaaattaaaagaagacgacgttctctctcggttttgattcccaatggcaacgcgaaagctgattcgtgatttgttactctccaaacgatcccttcttcaccaccagggttggagtaggagtagaaggttacctttggtttgggaagataggcgtagatacagtgtcttcaatgagttctctaagaacattaaaggccaagctgttagaaaccaagaattccaacagtctgtcaaggagctgaaagaaaaagcagatgaacttaaaggggtaaaagaagagctgaaagaaagaacaaagcaaaaaactgagaagctgtacaaacaagtggatgaagcgtggacagaagctgaagctgctgcaaagaaggtttcttacaatgttaaagagaagatttcagctgcatcagaggaggtgaaggaaacttttgggataggaaagcaggattcttcaggatcaactgattcttcaacaaaacagggtgctgatgcaaatggaggaaatcagacatcacgtgaggaagagaaaaatcagcaatctgggtctagtaaggatgctgattcgttgtttggcaaatttaaatcaactatttcctctccaaatgtttctgctgccttccaaaaattaaaggatgcaaagttagttgacataaccaaaaaaggttatgacatagtaaaagaggagttaagtagtaccccgactaagagaaagcgagttccttttgcatcaagtggtgaaacaagtacaagaacagatcttgttgttatgccatctaaacaatcttggtggagtaagaagtttgatgagttcagggagaaggtgaaaggccatccagtatccaagcgattccttaagtatagtgacccagtgaagacaaagggccaggagatagtagaggacttgcgggaaagatatgagaccagtgacagccccattattcacaaaatacaggatatcaatgacagtatgtttcaagagacagatgctgcaatttcttacaaggaaatacgtcaacgggatccttatttttcattaccagaatttgttggggaagtacaggaggcaataaaaccagtgcttaatgcttacatcaagggagacgttgaaacattaaagaagtattgtagccctgagctgattgaacgttgtaaagcagagcataatgcttaccaaagtcatggtatattctttgataacaagattctgcatgtatctgatctggaaataagagagaccaagatgatgggctcatctccagtaattattgtaatgtttcaaactcagcaaatctattgtgtacgtgataggaatggggcaattacagaaggaggcaaggatacaatccacactgtattctatttttgggcattacaacaaatggaccaagaagatcgtggagaagatggtatttacctaatgtggagactcagagagatgcaacagcaaggcatccaagctctcatctagattttgtcatgattttcagggatttgtataattgaacctttatgtcatatactacatttactgatttcatttcttggggcaaagttgtatcccgatgatacatcctttaattttttttattactaactagaaaaataatttgcacttgagttcattgatgtatgttagatgagctagacaacgtttttattctgctctcaagccagaaatgacaaattgttaatatagtcacaagttatttatttataatagtaattactagtatccttcccgtacggtaagcatttttctttgtttaccaaaaggtttggatatgccgattaatatgtgcc

SEQ ID NO: 4401 - DNA, 1360 bp, Glycine max
gtataaagaagcttcacccactgaaacatgacgttttgtacttgggagctctcggctcgctaaccccagctacttctccctcatccactcacaaaatgtgccaggccctctccgccccatcgcctccgtgtacggctcttctctccttccttttcttcctcctcacggtggtgggcccggtctcggtctcggcatggcggccgtggccccagaaaaacaatatgaacaccaccgattacgccttcggggactccaagaaatacgaggggtcctcggagttcgtgaagctgaggtaccacatgggaccggtcctcacgaccaacatcactgtccacaccatctggtacggcaagtgggagcggaaccagaagaagatcatccgcgagttcataaactcaatatccgcggcgaactcggcgcacccctccgtggccgggtggtggcgcaccgtacagctctacacggaccaaaccggggccaacatttcaaaatcggttcgactcggcgaggagaagaacgaccggttctattcccacgggaaatccctgacccgcttatccatacagactgtgataaagagcgccatcacagccaaaacgaggccgttgccgatcaaccctaggagtgggttgtacctcttgctcacggccgatgacgtgtacgttcaggatttctgcacgtcggtgtgtgggttccactacttcacgtttccctcgttggttgggtatactcttccgtacgcttgggtgggtaactccgctaagttctgccccggtcagtgtgcttatccctttgcggtgcccgcgtatatccctaaccggaaaccgtttaagtccccgaacggcgacgttggggtcgacggcatgattagtgtgattggacacgagatggctgagctggccacaaaccctttggccaatgcttggtatgcgggtcaggacccttctttccccgtcgagattgccgatctgtgtgaggggatttacggcactggcggcggtggatcctacaccggtcaggttttggacgctcgagatggcgccacgtataacatgaatgggatcagacggaggttccttgttcagtgggtgtggagccacgttctcaattactgtactggacctaatgcgcttgatcattgatcatctcgtcaggaccagatatttcttcttctcttcttttaacctttgctttgggctttgttcttgtgggttttgtgggagtctggtaattttgttaaggtagttaagtttgttcattgatgcaaataatgtaattttattgttattgttatatcatagttattataagccttttttggtgtcacggtccccgtatatgggaaaagattgcgttgcgt

SEQ ID NO: 4402 - DNA, 1169 bp, Glycine max
ctgaggaaaaggacggtggcatctgaacgaaaacagaagtaatatccatttaagtcagctacgttggcccccccccccaaaaaggaaaaggaaaacgtttcttattcaaaggaaaggaaaacacctaacaagcttggttggtaagttatctacaatctgcatcatggaaggtgttattctgagaagggtcattccttcggataacagttgcctcttcaatgctgttggctatgttatggatcatgacaaaaagaaagctgctgagttgagacaggttatagcagcaacagtagcaagtgatccacagaaatattgtgaagcatttcttgggaagccaaacacagagtattgtaactggattcttgactcagagaagtggggaggtgcaattgaactttcaatattagcagattattatggacgtgaaattgcagcatatgatattcagacaactcgatgtgatttgtatggtcaggaaaggaattattctgaaagagtgatgctgatttatgatggtctccactatgatgcattagtgatgtctccctttgaggaagctccagaggagtttgatcagaccatatttgctgtacagaaaaacagaagcattggacctgttgaggggcttgctctaaattttgtgaaggaccagcaaaggaaacggagttacactgacacttctaacttcactctgcgctgtggagtatgccaaattggagtaatgggtcagaaggaggcagtggagcatgcacaagcaactggtcatgttaacttccaagagtatagatgatgcactctgttcgtttgaatgagatacaaattcatgtgtaatctccgttgatttgaatgagcatcattgatgaaaggtagttgctttgttgcagaccataaaactgaataatttctgcatgagaattgctgtggcaacttgggttgtaatattagttccttggtctcgttccacaaatgactgtgattataagaaactcacctctagtggcagactagataaagaaactaattagtaatcaattgttttttatattcttttcctggtaaagatttttatctaatatatttcacttcctttcccgttataacttttagtgcaataactatgtaaacttacgccactattttaaccttgacgagtgttgaatgcttttgat

SEQ ID NO: 4403 - DNA, 2607 bp, Glycine max
  misc_feature (2510)..(2510): n is a, c, g, or t
  misc_feature (2531)..(2531): n is a, c, g, or t
tcagctacgtagcccccccccccttttttcttccactctcgtagcatcttctcactcttattctcaatgtaagttctttccacttcttcattccgtcaatttcttcacgccctagcccatgcacccacaatccgtgaatttatgagtacaaatttcactgatgttttccgtggtatgggtttgggattagggtatttgggtatgcttaaatcgcaccctcccacgtgtttcattacttgttttctataatgttattgatcgaggttgtgaaagtttgattcttttgtagatagttggggttgggttttttctagatatgattaaacagatattcggtaaaatacctcgcaaaccctcaaaatcatctcacaataattcaaacggggaaggaggtttcaatgatggtttctcactgaactcatcttctaataccctcttgaaatccaattcagtttcttcaaaatcttcaagttctggttcagttgggtctcgttctgggaatgagactattgctcaacactattcaaaccaatctaagaaatcagctcctattacaggttcagtaatggcttctgcagcttatgaggctttgcctagtttcagggatgttcctagctcggagaagcataatctttttattagaaagttgaatttgtgctgtgttgtgtttgatttcaatgatcctgccaagcatctcaaagagaaggatgtgaagcggcaaactctacttgagcttgttgattatgtttcatccgtgaattcgaagttcaacgagttagtgatgcaggagatgaccaagatggtggcaaccaatttatttcgcactctgccttcttccaatcatgatggaaggttggcagacatgggtgagcctgacgaagaggaaactgttttggaaccagcgtggcctcatctgcagattgtgtatgaatttctctttagatttgtggcttcacctgagatggatgctaagcttgctaaaagatacattgatcattcgtttgtgttgaggctgcttgacctttttgactcggaagaccaaagagagagggattacctgaagactatcctccatcgcatttatgggaagttcatggtgcatcggccattcattagaaaagctatcaacaatatcttttacaggttcatatttgagacagagaaacacagtgggattgcagagttgcttgaaatattgggcagcataatcaatggttttgctttgcctttgaaggaagagcataagctgtttctggcccgtgcattgatcccgcttcacaagcctaagtgtgttgcactttatcatcaacagctttcttattgcattactcagtttgttgagaaggacgtcaaactagctgatactgtggtaagaggtcttttgaaatattggccgataactaatagtgcaaaggaggtaatgttccttagtgagttggaggaagttttagaggcaactcaagcagcagaatttcagcgatgtgtgatcccactatttcgacaaattggtagatgcctcaatagcttacactttcaggtagctgaacgagcactgtttctgtggaacaatgatcatattcgaaatttgatcttacaaaacagcaaagtgatactgcctataatcttccctgctatggagaaaaatatacgggaccattggaatcaagctgttcagagcttgaccatgaatgttagaaaaatattctctgatgctgaccaggcactttttgatgaatgcttgaagagattccaagaagaagaaatcaaggatagggagaagcaagaaaagcgagaatccatatggaaacaactggaagatgttgctgcagctaatgctgtaagcagtgaggccatccttgtctcaaggtttgtgtcctctgttgcaattgctaccagtgcgaatcaattggcaactgcaggtggttgagagccatcagagatccaaattgtttgttctgaccccatgatgaggaacaaaggtgaatgggggttgatgtggatatcaggctgctccttgtttctgggctttttcgtctccatcatctgttctggaatcatgggttgtactatgtatcataaggaatgtagtttataataggcagtgtttgtttagaagtctagccattgagattatgcagtgatacaaaaacaatccttttcttttgccatatttatgtaattttaacattagtaaaatttctatttcttttagccttttgcagaaaaaaaaaaaaaaaaaatgttccctctggcagttatttgttcttggctggctgaactgcttgtcacagtggatccattttttttttctttctagaggggggtcattacacgttcggagtttggtgcttttcagtggatctatttcttatttattacttaacctttgtgggttgggttcgttgggatctgtctcctttccaagtgaatacgtttgctcttatgtttatgacgtgattcttattataacgagatatttcttgtttgctcttacgtttataacgagactnttcttgtactcgtctgcattntttaaaatatttttatagaaggctgtaaaaaagaaattgaatttgtgtgcttaacactatgatgcacttactgcag

SEQ ID NO: 4404 - DNA, 1969 bp, Glycine max
gaatctccaacacaaacacaaacgggatttcttcctcttctctctcttcagctacgtaggccccccccccttcttcttcttctttctcaaccagccatggttgacttgttgttcttctcactcactagaaggagcccatgaatatgaaagttgttgttgtgagcatggagaacgagaagaagaagtgcggttgctgggctgtcctcaaacgcggcgttagaggtgcgtgcaaaccttcttcagcttccagagactctcctaacactatccctcgtactagtctcgtttatgatgcagcaaccgagacaagatacttgaatgctagcaatagagaactatgccctccaaatgaagctcgattatcttctgataatcctgatcccccatctcaggagaataaggttccttgccagctccttcaatttacatttcaagaactaaaggctgcaactgggaatttcagacccgatagcattcttggggagggtggctttggttatgttttcaaaggttggattgaggaagatggaacggcaccggcgaaacctgggtcagggattacagtggctgtcaaaagcttgaagccagatggccttcagggccatagagaatgggtggctgaagttgactttcttggacagcttcaccatcctaaccttgtgaaacttattggttactgcattgaagatgatcagaggcttcttgtttacgagtttatgacccgtggaagtctagaaaatcatctattcagaagaactgtacctcttccgtggtccaacaggattaagattgcccttggtgcagcaaaaggatcggccttcctccataatggtcccgaaccagtcatttatagagattttaaaacatctaacatcttgcttgatacggagtataatgcgaagctttcagattttggtctagcaaaagcagggcctcaaggagacaaaacacatgtttctaccagggtagttggaacttatggttatgctgctccagaatatgtcatgacaggacacttgacagctaaaagtgatgtttatagctttggagttgtgttacttgagatattaacaggaagaagatcaatggacaagaagcgcccgagtggggaacaaaatcttgtttcatgggctaggccatacttagctgacaagcgaaaactgttccaactcgtggatcctcgccttgaactaaattattctctaaaaggagtgcagaagatttcccagttagcttataattgccttactagagaccccaaatcccgtcctaacgtggatgaagttgtgaaggctctgactccattgcaggatcttaatgaccttgcaatcttgtcttatcactctcgcttgtctcaacaaggtagacggaagaagaaagatggaactccacagttcacatacacacaatccaagagcatgagggcttctcccttgaataccggcaagcagcgtcaatgatgggaagtgatcctcttctctattgctggctcaatcattgattgaaaccaaggttggaatgcctcctatgttgatgttgttgttgttgttgtgtggagatggacatttcaagcttatataatttttgggtgtttaaaatatgtcagggccagaacaatgagggaagaatgatgatgatacattgattatttgggctcttttattagagagctaaccatcattatggaaagaaacttgccatttgcatttgctattgctgtaattgagaattcccctatatgtatatgaaaggcctcacatctcagaaagtcttttgcagtaaacctcaatcaattgcgtttcagtggcaataacattttgctactttagttgccagatttttatgctttatttaaaatatattgaaccaaatcatacttctagtgtacacaaaaatttgcttgctactattagtattttatatcttcagcaacatttttaatcgtaacaagaaaaaaaaaaaaaaaaaa

SEQ ID NO: 4405 - DNA, 1338 bp, Glycine max
  misc_feature (988)..(988): n is a, c, g, or t
  misc_feature (1001)..(1001): n is a, c, g, or t
  misc_feature (1017)..(1017): n is a, c, g, or t
  misc_feature (1038)..(1038): n is a, c, g, or t
  misc_feature (1153)..(1153): n is a, c, g, or t
  misc_feature (1192)..(1192): n is a, c, g, or t
  misc_feature (1294)..(1294): n is a, c, g, or t
ccctttctgttcactctttgaaattacttccccccagcccacactcctccattatccctccgccgccatgtccccgtcctccgaacaccacggcggaaaccatcgctttcccggggaagaaatcaacggcttcggcaatggccaagcggaaatgtccgctccttccacggcctcctcgtcggcggtgcgctgcatcgtcgactcaattccgtcgaaggagcgggagaagctccggagaatcctcgtcgcctcggcgaagggtttctcaatcggagccggcctcaagggaggcctcgctctcttcgcgatcttggcgcgattgacgcgcaaaaagccgccaaggaagggaattgtggtttcgaacggcgaagcgattgtggcggctctgaaggaaacgctgagatacggtttgtttctcggaaccttcgccggaacgttcgtgtccaccgacgaggttatcggtgctctcgcaggtcatcgcaggacagcaaagtggagggctctggttgccggggcggttgcagggttgtccatgcttctaacggggttagaagatcagcatacgagtttggccatttacattctcatgcgtgcagctgttttggcgtctcgttgtgggattaagagcaaacgatttgggaaaatctgcaagcctctcacgtggaagcatggtgacattttcctcatgtgtctatcctcctcacaaatattgtctgcttatatattaaagcaagacagtttgccagcttcatataaatcctttctcaataaacatggtggaaaggatctagttatcttacaaggtgtaaaagatatagctagtggcaagcctttcactaatttgggtgcaatagagaaatactacaagaccatgggtgtcaatgtgaaattagacccaaatatgaaagtcccatgctcgattgtacatgggaatcaatcatgcagcggacacatcctttcgtttctcgttcaagcttaccaaagagcnctacctgtttatnttccagtttacctaanacctgcacttatagttcatanaaaaggacttttaaaaaggtgatcatccaataggaatgcatagcaaccagtttacacttcacctgatcctatgtgggacttttacaaaatacatgttatatcaggatttaatttntttgtaaaccttgatcaatgttatcagtggcacatatgntggttttgtcatgaaaagggcttccttggaggcttggacaattaattattccatgtaatatttcaccaaacactcaactttagcacaatataatcatactgngtcatatagtcatgacatattcaatttgaaaaaaaaaaaaaaaa

SEQ ID NO: 4406 - DNA, 651 bp, Glycine max
acttcgcccgccgcctcctgccctccccatctccttaggttaggttaggctaggggcttcgcagagctcgcggaaatggtggccttcaggttccatcagtaccaggtggtgggtcgcgcgctgccgacgcccggcgatgagcagccgaagatctaccgcatgaagctctgggccaccaatgaggtgcgcgccaagagcaagttctggtatttcctgaggaagctgaagaaggtgaagaagagcaacggccagatgctcgccatcaacgagatctttgagaagaacccaaccacgatcaagaactatggcatttggctgcgttaccagagcagaaccggctaccacaacatgtacaaggagtaccgtgacaccacactgaatggtgccgtggagcagatgtacactgagatggcctctcgccaccgtgtgagatccccctgcattcagatcatcaagaccgcgactgtcaacttcaagctatgcaagagagacaacaccaagcagttccacaactccaagatcaagttccccccttgtgtaccaaaaggtcacggcccccaaacccgggaaagctgaaaaaacccccttacaaggggaacgggggggcccaaactttttccctttgtgatttggcctctgggcgcgatacct

SEQ ID NO: 4407 - DNA, 501 bp, Glycine max
gacggccgccatctccttaggtttcagttctcctccgcctccggtctcgagagctcgccagaatggtcgcccacaggttccaccagtaccaggtggtgggtcgcgcgctgccgacccccggcgatgagcagcccaagatctaccgcatgaagctctgggccaccaacgaggtccgcgccaagtccaagttctggtacttcctgaggaagctcaagaaggtgaagaaggccaacggccagatgctcgccatcaacgagatctttgagaagaaccccaccaccatcaagaactacggcatctggctgcgctaccagagcaggaccggttaccacaacatgtacaaggagtaccgcgacacgaccctgaacggcggcgtggagcagatgtacacggagatggcgtcgcggcaccgcgtgcgtgccccctgcatccagatcatcaagactgcgacggtggacttcaagctgtgcaagagggacaacacgaagcagtccacaactc

SEQ ID NO: 4408 - DNA, 1375 bp, Glycine max
  misc_feature (1375)..(1375): n is a, c, g, or t
gcgtgcagcggttggtagtgatatactacgttctgcaggtacggggaagaaagacgtgagataatgggagtacatgggaagaaaggggctggatatgcacggaggagattattggtaaataaagagtagtcatctggtagacacgcaagagagaagcggcgggagggagggtcggggggagagggtggggagagaaggcgcagcggttagtacgggggaggtgtcgtgtggagtagcttactgaggaactttctggggagccctcaaactcattgtgtgtctcctgcttgcgcgcggtgcgcacaatggacgtggaggggcacaaaggcgaagggggcggggcggtggcggggtgaggaggctgaacagggaagggaggagtgggcagtgggggtgggggaggaagtgggaaggaagttactaggaggtggtttgttgagcgaggtatgtgggcgagtagtacttgcactgggtaggggatgcactgaggggtgtggagggagaaataagagacccccccctccccacggggggcaggaattgccacaaggcctttgccttaggcatcttatatataactccttgaccatcgcacagtttctaattaactcagttagactttgttccaagagaaagaccaatcaaagcatcatgactaaagttgtgtgtgcacttcttcttatttttgtcatggcttttgtgactcaagttgcttatggtggcggcgaaggatcacttacgccccaagaatgtccgggggcttgcgattatcgttgttcaaaggctgatcggactaagaaggcgtgcctgaacttctgtaacatgtgctgtgcgaaatgtctgtgcgttccatcaggaacctatggtcacaaggaagaatgtccatgttataacaattggaaaacaaagagaggaacacccaagtgcccctaattcaacttcattattgatattcatcaataaaatgtgtattcttgtggcgtgctatggtatatgcatgccctccgtaaataaatgtgtctgcgcttatcttattttcaaaaaaaaaaaaaaaaaattataaccactaccaaccataacgatacgcgccctcctccgcctcgatcaccagccacttgatctctcgccctccctctctcctaccccccatcctccttctcacagatgccatacgtcgcctatcaccctctcatccgtcccgcggacccccctattaccgcgcccccacccttccctgccctccccttcgacactctcacctacccccccccgcctcccacgttcttcccctatctcccaccccctccctccgtctttccccgctcaccctcccctcttcccatctcttccactcctcctcctctcccgcctcgcn

SEQ ID NO: 4409 - DNA, 1600 bp, Glycine max
  misc_feature (1493)..(1493): n is a, c, g, or t
  misc_feature (1529)..(1529): n is a, c, g, or t
  misc_feature (1567)..(1567): n is a, c, g, or t
ccccccttttataaaggggactttttgtttccacagggggggaaacccctcatccccttattcggggggtatttttttttgggatgtaaagaggaggtgttttcgccgaatttttggccgctgtgtggggggaaagaaaaagaaggcggggtttttaccacaaaaatgttatccgcggggagttttttccacaaaattatattgacgggcttttacaattttcccagtttttggcccctttagaggggtggggcccgcaagttttttggggaaaagggggggcaatccggggtggcggggcgcctctcttttgcgcgttatgttttaccccccccacaccttggggggaaaaagggggggggaatgtgtcttgcccaaagggcgggatttaaagttggggggaaacccaccccggggggttttttccccagtccccgagccgtttgtaaaaaacggaccgggccacgggaaaccgcggggttaattccggcttccccttttggggggaaattggggtacccgggcccccccctcggagggccgccggtatcgaataagcttttttttttttttttttcgaataaaatacttatttctattagagaaaatataaatataaatacaacacattcctctaaacaaactaataatgttttttgtttggtgcgttgaaaaaaaaacgatacatctttacaatatttttcctaaagaatgtgacttccaccttttaaacttaaacaatgtcataacatggtaacatgcactcacatgtcagttgctttaatggacaccttaaactcatctttgaagaaatattttgaaagaaaaaagttaaacaaattgtctgtaactaagtctgcggtatcgtgttttgttgtttagccctttcagcctcaatcttccgtagcattgatgaactcagcttaatttcacctgattctccagagaccaaatctacaacttcaatcttcaactgtgaaagatctctttcagctcttcttctgtttatagccaatcctcccggtaatgtctctttgcttacaatcacagcctccaagttctcatctgtaatggaagggccaaatggatctgtgattggcacagcttgcacttccaactccggcttgatagactttatgaaagttttgacattatttatcctttcctcaatgggctgtatcagttcagcaaactgtttttttgccagcataggtccatcgcaaactccaattacaatccggcgccttgccaactccgctgaagcggtgaggaagaggcggtggccgtcgtgcaatcggtcgaaggtgccaccattgacgacggcttcgtaggtgttgggcggagagagtttgggaaccaccatcaccatggtgtcatcgtcaccgtgaaccgccattcgatgtgcaggaatgactttcactggtggcagtaggtgtgagatgaaaagaggatcggattcgttgttatatatttttcgattaggatgtgtctangtaatggtctcctgcggggcgattccctggcagccnggggatccactaggtctagagcgccgccaccggcgggnaactcccacttttgttcccttagggagggtaat

SEQ ID NO: 4410 - DNA, 1067 bp, Glycine max
tctactcagctacgtaggcccccccccccgaatctaaagataaataaaattcaggaaaaaaaaaaaaaaaaacatggtggtgaaggtgtatggtccaacctatggatcccccaagagggtcctggtgtgtctgattgagaaggaaattgagtttgaaacagtgcatgttgatctcttcaagggagagaataaggaacctgagttccttaagctgcagccatttggatcccttcctgttattcaagacggtgattatactctctatgaatctcgtgcaataatcagatacttagctgagaagtataaagaccaagggactgacttattgggaaagacaatagaagaaaagggtctagtggaacaatggcttgaagtggaagctcataactttcacccaccactctacaacttggttattaatgttctgtttgcgccattaacgggggctccttcggaccaaaaagtgatagaagaaagtgataaaaagattgagaaggtgctggatgtttatgaggagaggctgtcaaagagcaagtacttggctggtgacttcttcagccttgctgatcttagccacctcccatttggtcactatttggtgaaccaaaccgggagaggaaatttggtcagagacaggaagcatgtgagtgcttggtgggatgatattagtaacagacctgcttggcagaaggttcttcagctatataaataccctgtctagttagttcgatctaccccaacattccaagatggtgtgagggatgtgccttcagtgttttctgatacctgtttgagaatataatggaggctatctgcaagatgtggacctgtagttttttttggatttggatcttttcctcttcttgaataataacattggatggtgaaaacataaatttaaaattattgagcagtgtgattagttgttgagtccattagttataacttgttatctaagaagcctcttgtgttgagaagtaataataaatatcagtatttacatgttataaaaaaggatctcgacattaatacagagtatgcatttagaaaaaaaaaaaaaaaaaaaa

SEQ ID NO: 4411 - DNA, 1285 bp, Glycine max
tacggctgcgcggcggcgaccggacgggaatgaatggaaaaggatctaattagacaatgactttatcttggactgtagatgagtgaacagcataaaagcacaacttgactgacatacgcaaccaaactaaagataaacaaaatttagaaacaaaaacatgttggtgaaggtgtacggtccaacctatggagcccccaagagggtgctggtgtgtctgattgagaaggaaattgagtttgaaacagtacatattgatctcttcaagggagagaataaggaacctgagttcctaaagctgcagccatttggatcacttcctgttattcaagatggtgattatactctctatgaatctcgtgcaataatcagatactttgcagagaagtataaagaccaagggacagacttgttgggaaagacaatagaagaaaaaggtctagtggaacaatggcttgaagtagaagctcataactttcacccaccactctacaatttggttattaatgttctgtttgccccattaacgggtgctccttctgaccaaaaagtgatagaagagagtgataaaaagattgagaaggtgctggatgtttatgaggagaggctgtcaaagagcaagtacttggctggtgactttttcagccttgctgatcttagccacctcccatttggtcactatttggtgaaccaaactgggagagggaatttggtccgagagaggaagcatgtgagtgcttggtgggatgatattagtaaccgaccagcttggcagaaggttcttcagctatacaaataccctgtgtagttagttctaccccaacattccaagatggtgtgagggatgtgccttcaatattttctaatacctgcttgagaataaattggaggctatctgcagatgtggacctgtagtttgtttttggatttggatctttttctcttcttgaataataacaatggatggtgaaaaacacaaatttaagagtattgagcattgtgattagttgttgggtccactagatataatctaagaagccgcttgtggtaagaagtaataataaatatcagtatttacatattataagtttggatcttgacatttatacaagagtatacattttgaaacttgtgcttgccgagtttggtgggggcaaccacacagttttggaagataagtttttgtatatttgacctatgaagtatggatgtatgttttacttaaaattgtcaagaaaaatttatattagcaagtaaaaaatcattttatccttaaaaaactcgagac

SEQ ID NO: 4412 - DNA, 1274 bp, Glycine max
ttttcaaagcataactagctacatatttcttgttgttctctgtttacaataaaataactactttaaaaggtttatttcttttagagaaaatataaatataaatacaacagatttctctaaacaaactaataatgttcttttgttgcgtgcgttgaaaaaaaaaacgatacatcgttccaatgttttttctaaagaatgtgacttgcgccttttaaactttgaaacaatgccataacatgcaaccacatgtcagttagttgctttaatggacatcttaatctcatctttgaagaaatattttaagagaaaaaagttacacaaattgtctgtaactaagtttccgatatcgtgttttgttgtttagccttttcagcctcaatcttccgtagcattgatgaactcagcttaatttcacctgattctccagagaccaaatctacaacttcaatcttcaactgtgaaaggcctctttcagctcttcttctgtttatagccaatcctcccggtaatgtctctttgcttacaatcacagcctccaagttttcatctgtaatggaagggccaaacggatctgtgattggtacagcttgcacttccaactccggcttgacagactttatgaaagttttgacattatttatcctttcctcaatgggctgtatcagttcagcaaactgtttttttgccagcataggtccgtcacaaactccaattacaatccggcacctagccaactccgctgaagcagtgaggaagaggcggtggccattgtgcaatcggtcgaaggtgccaccgttgacgacagcttcgtaggtgttgggcggggagaggttgggaaccaccatcaccacagggtcatcgtcaccgtgaactgccatttaatgtgctgaaatggctttcgcactaagcaggaagtggtggcagtaggtgtgagatgaaaagagtatcggattcgttatatattgaactgaaccaatggttcgttagtggtgcttgtgttggtgcatctaaccgtttgctttacagttctgtggggaagcaacttttcagcgggaaacaactgttagctggatccctctctgaggtttaggaaatgggagcgttgatgacgatgatggagacggaaagatcgctgttgaatggcgaaatcgttagattgagagagagaaccaagatagataaatgtagaatttttcgaggctcacactgctgtcgtctgctcgcacccgtacggacgcggggcggacgcgtgggcggacgcgtgggtcgagccg

SEQ ID NO: 4413 - DNA, 1994 bp, Glycine max
gagtcagctacgtaggccccccccccccatatatttaaaccagcaaaataatttaacacatgagtgaatgactaaaacaggacatggctggacttatcaataaaataaacagatcctccatttctccactgccaattgtttattcttccacactgtaagtaacttcctcaaaccaattgcagtcacactattgtcatgatatatttttaacctgtgtttttggtgattcaagtatttttcctcaaagtgaatacaactatattgaagtcaagcaaaattcccctgtaaattttgcacttgcaatcgcatattttccccttctttcatcttatgttttatattgcgtataatgataaaactgaaagatggcaaatgtgtgacaggaaacaacttatcaagagcatgcttaggaaaaacccagaacataggccaaccgcagctgaattgttaaggcatccgcttttacaaccttatgttctacgctgtcataatgcatcatctaatgttcttcctgtatatcccctagttaatccaaaggataaagcaagaagacctaataaatctagtggtggcaaggaccataaggacaaagaagcaggtttagtaaattgtttggaacggattcatccaattgagggaaatgcagatatacagataagcaatcttcctaatgatgtggtaacaatttcaaccagtgcagaagacaatcttgagaccaggatggctaatcttaccagctacatagttgaatcttctactagtattagtggctcaaaagatgggtcaacaacatctgaatcaactatttgcagtgtgtgcaaggaggactttaaaagtagacctgcaagggaaatgactaacaatgagatctcttcaaagagtacacaagattctctgcatgaagaacaaagatttgctgctaaacattttcataaattagaagacgacgacataaatgcggtgactgcagaagttgaagatgcttcttgcaatggaggtttggataatgctgaagcacagagggaagattcaaaccttgaggactctggtaaatcaacaatgtccagtgaaggcagtagcagcactgataaagataagtccatcaatgaggaaaggtcatcacttattgtacatcctattagggttgaaaatgacactgaatctggaaaccgcttgaagaaaagtgaaaaccctgatgtatatacagaggtccctcatatgaactgcttaatgtctgttagtaatgatgcacttccagttaaggatgatgacatagcaaacggacacattctttgctccacgcataaagatgataatgtagtggaggttgatcaggcaccgagtggcatttcattgagtgtaataactgaagtagatggtgatgaaacaatcaagactccgttggatagtccctgccagcaaagagctgatgctctggaatctctgctcgaattatgtgctcaactactcaagcaagataaactcgaagagcttgctggggtgctaagaccatttgggaaagaagctgtctcatcaagagaaacagcaatatggctagcaaaaagcctcatatcttcccaaaagtttaatcctgaaacctaaggtctggtcataaatctatacattgttgtaagaaatgtgcatttcaaatgtcacatgagtttgttcctttcgagatttgttgcttggttgaagattggagactggaagatagcatgccccatgttctttcttggtgtgttaaatggttatagtaaatgaattaaattattcttgttaggttggatagtcatttgtgcttgttttccagcagtgtatgggtcattgattgtgtaaatttttttgcttccccttttacgaactaaaaaataaccatgcacttggagctcgatgttttatatatttggtttatttgttagatggcattcatgaccatattaacgtcgatttctgctcaacacttgcagttatctggcaaaaaaaaaaaaaaaaaa

SEQ ID NO: 4414 - DNA, 1276 bp, Glycine max
  misc_feature (1263)..(1268): n is a, c, g, or t
  misc_feature (1273)..(1273): n is a, c, g, or t
tcagctacgtaggcccccccccccccaaatggatgcttgagaatgatgtgagtgatattcctgacctgacatttagcatggatgctgctgaggaaaagcacatactttacgagaagaatgaggtcactgattatgagcttaaacctggaggaaggaacataagggtcacagaagaaacaaagcatgagtatgttgatcttgttgctgaacatcttttgacaaatgccatccgtcctcaaattaattcctttctagaaggttttaatgaattggtaccacgagaacttatatccatatttaatgacaaagagcttgagcttctcataagtggtcttccagaaattgatttggatgacttaaaggccaacaccgagtatactggttatacagtggcatcaaatgttgttcaatggttctgggaggtggtcaaagctttcaacaaggaagacatggcaagattactgcaatttgtgactggaacgtcaaaggttcctttggagggttttaaggccttgcaaggcatctctggtccacaaaggtttcaggttcacaaggcatatggagctcctgatcgacttccatcagctcatacttgcttcaatcaacttgaccttcctgagtatacctctaaggaacagcttcaagaacgtttgttacttgccatccatgaggctagtgaagggtttggttttggttgaccagcactttggtgcaatatttttttttttgcacagcggttccaccatttgtgtctccaacttgtcatttggagaaggagttcgtgctgctattctgttgtgggcactattggtaagcatcacaatgagtcaatgaggcattctgatgttggtgatcaatttattctgatgctctccctgcaaaaatggctagaatgtttttttcattgtataattctgccatgcctagtttgggagctttctgacagccttcatactgtgtcaagcttttgcaatatggtccaatcttaatttatatgtagtttctatggccaaacagccttttatagttctagaattttctaataagattgaggatgtacatattctggaatacataattgatgtttttgctccagaaagaaattgttcgattcattaaagaggagtctgaaagatgatgatgcgatggaacttgatcacatactgcagcaaactgcaggaatatagattaaaaaactagatttattatgtcgtttccaattcctatgtaaaacaccctgcgcgctcgaataagttacacaannnnnncccgnaag

SEQ ID NO: 4415 - DNA, 1491 bp, Glycine max
tcgagtcagctacgtaggcccccccccccccatcatcttatcaaagccttccctgtttgcttttttcacaattcacttcttttccagagagttagggaagaggaatagagaaagagaaagagaaagagcgtgagagagagaaacagcacaaggatggagctttctcaacttggttttctggatgagctacttgctccaagaaaagacactacttggagtaatgctttgtcaactgggttgaatgagttactactccctagtggttggagctttgactcttttgatgagaaccaaggtttagctactttgaatccctcatttgctgcattttccactccactagaccacagatttgaatgcccttatggaagtgaagcagcatacccttttgttgatggcttcacattgcctgagcttgattcttcatacaccaggaatgatgagtcagcaccacttttgccacaagaggataacccatcattggaggatgaagagtttggctttctgggaagggataaccagagcttggaacaagcaaaaattggctgcaaaattgaggaacaagtgacagagattccagtcttcaacatgggcttgtgtggggagaaaaaacccaaatcaaagaaactagaagggcagccctcaaagaatctcatggcagaaagaaggagaagaaagcgtttgaatgaccgtctttccatgctaaggtcaatagtcccaaagattagcaagatggacaggacctccattcttggagacacaattgattacatgaaagagcttctagaaaggataggtaagttgcaagaagaagaaatagaggagggaacaaatcagataaacctcttaggcatttctaaggaactaaagcccaatgaagtaatggttagaaattcccccaagtttgatgttgagagaagagaccaggacacaaggattagcatctgctgtgccacaaagccaggattactactgtccacagtgaacaccttagaagcattaggccttgagattcaccagtgtgttataagcagcttcaatgatttttcaatgcaagcatcttgctcaggggcagcagagcagagaaattgtatgaaccaggaagagataaagcaagcactattcagaaatgcaggttatggtggtagatgtctctaggagaaagatggaaagctgaaataacaatttgctgatgttgaaaaacaagcaaagttttcctcttgtgtaattcaaggaattaggggtgttagtttaatgagatttcccaataagttggctttgaatgatgctttgattcttatgtaagttacaactttaccctgtattttaacatactatggggtatgttcagttcaagcctcactttcccattgtgataaacatccatttttttagtaatgaagaagggttgttaccaaacccataagcggaatcaacctgattttaatagattcctgaataagcggttgcttcaaaaaaaaaaaaaaaaaa

SEQ ID NO: 4416 - DNA, 1403 bp, Glycine max
tcccgtgttctggtcgacttttctcccttctccccatttgctcattctcctccccattctgctcagacaccgcacagcgaacaaatccaccattcattttcctttttcgcaacagcgcaatggctcgaagatccctcccgctcctgaagcacctcctctcgcggcggatcccggcccgatccggtgacactgatcccgggcgacgggattcgggccgatggtgactggcgcggtggagcaggtcatggaggccatgcacgcgcccgtctacttcgagaagttcgaggtccacggcaacatgaaggccgtgccgccggaggtcctcgattcgattcggaagaacaaggtctgtctcaagggaggactcgttacccccatgggcggtggcgtcagctccctcaatgttcagctccggaaagagcttgatctctatgcttctcttgttaattgtttcaatctccctggccttcccacgcgccatgataatgtggatatcgttgtcatcagggagaacaccgaaggcgaatactctggcctcgaacacgaggtcgttcccggcgttgttgaaagccttaaggtaataacgaagttctgttcagagcgaattgctaaatatgcattcgagtatgcttacctgaataacagaaagaaggtgactgccgtgcacaaagcaaatattatgaagcttgcagatggtttattcttggaatcttgtcgagaggttgctacaaagtaccctggaataaagtataacgaaattattgtggataactgctgtatgcagcttgtttcaaagcctgaacagtttgatgtcatggttaccccaaatctttatggaaatctagttgcaaatactgcagcaggcattgctggaggcactggagtcatgccaggaggtaacgttggggctgagcacgctgtgtttgagcaaggtgcgtcagcaggaaatgttggtagtgataaaataagggaacaaaagaaagccaatccagtggcccttcttctctcgtcagctatgatgcttaggcatctccagtttcctgcatttgctgaccgtttggaaactgctgtggaaaaagtcattttggagggcaaatgccgaacaaaggatcttggagggacaagcaccacccaagaggttgtggatgcagtgatagatgctttagattgagtcattttattagttgctgatttcccaaatgaagtcagtctcgtatattcttttctaaccagttttaccaattgttttgcacacaccaaatgcaaaatagcaatttttggaataaagtttatgcaacacagaaaacgatgtatcttttattttgtgtgaagaatttgtagagaatgtgataattgtttctctcctatttaaaagccgtgatttggcgttattactacccaaa

SEQ ID NO: 4417 - DNA, 790 bp, Glycine max
aaaattcttagtagccactacagtttcggtccttccaatcatcccgtgttctggtcgacttttctcccttctccccatttgctcattctcctccccattctgctcagacaccgcacagcgaacaaatccaccattcattttcctttttcgcaacagcgcaatggctcgaagatccctcccgctcctgaagcacctcctctcgcggcggatcccggcccgatccgtgacgtacatgcaccggccgggcgatgggtcgccgcggccggtgacactgatcccgggcgacgggatcgggccgatggtgactggcgcggtggagcaggtcatggaggccatgcacgcgcccgtctacttcgagaagttcgaggtccacggcaacatgaaggccgtgccgccggaggtcctcgattcgattcggaagaacaaggtctgtctcaagggaggactcgttacccccatgggcggtggcgtcagctccctcaatgttcagctccggaaagagcttgatctctatgcttctcttgttaattgtttcaatctccctggccttcccacgcgccatgataatgtggatatcgttgtcatcagggagaacaccgaaggcgaatactctggcctcgaacacgaggtcgttcccggcgttgttgaaagccttaaggtaataacgaagttctgttcagagcgaattgctaaatatgcattcgagtatgcttacctgaatacagaaagaggtgactgccgtgcacaaagcaaatattatgaagcttgcagatggtttattcttggaatc

SEQ ID NO: 4418 - DNA, 1142 bp, Glycine max
ttttttttttttttttggtcaaaccaaactgtattttattcatattccatgtagtcttagatacatggaaatttgatcacatgaaccccattattctagtccctttttttgacacaagtaaattaacaagaaacaacattgagtgacactacttaattataacaaacaaattaacggaataagtgatgactagtactacttattagttgtagtatgttcctggggtttggaaccagtgcatgtatatttaatttcctttctcataaatctggactttggtgtcataagtagcaccaggcttccaattagcagggattgggttatttgaaggcagccaatatccatagccaacttgaaacctcaagagaattgcaccactgggtgggttagcatagtcaaacactgccccatacaccctgcgtagtggctcccaacgtttctgccctctctgccacatctcaacagccgtgatgtcgcgtactccatttacgttgagaagcaggacagctaagtagccagggtttttgctgctcttgtggacacggagcttaatgttagaagggtagttacagggaacccttgtgaatgcaatatccaccaccccgcgtttgaacagctccttagaagcagctacgttgcgtgccaatcctgagaatccacgtttgctcattatgaagtctgttccgtctcccgcaccagagtctgtggccaccacctgcactcctttcccgcagtattgtggaattttgcaccttacccaataacatgtgccacagccagcaccattcctccatagcccagatacagcagccacacttccattattaatcgttcttccatattcttcaaagccacaagctccccttggattcccaaggccatcaggggtattataatagcttgctctggagttcgtaaagtattcgttgcagctacatagtgcagggaagagcaatattacacaaacaagcccaagttggtggttaagacttagttccatgcctaaatgacaagacaaattctcaggcacaaaggagaaaaatgcagcaagtaattaagaatgaccaatagtgtgtgacaagctaatgtatatatgaaaatgagagaatgctttgagatgagatttttcgattaggatgttc

SEQ ID NO: 4419 - DNA, 1989 bp, Glycine max
tcgcccgcggcggcccccccccccgtggagtgtaaaagaccctggttttctatgctggcagagctcctagtggtgagcggactgattgggttatgcatgaatataccttggatgaagaggagcttaagagatgcctgggtgttaaggactattatgcactttacaaggtttacaagaaaagtggacctggtccaaaaaatggtgaacagtatggcgcaccatttaatgaagaacagtgggcagatgatgacatagtagattttaatatcaactcagctgatcaggaggctccaaatgatgttgataatggtaatgtactgcagcctttgcttgatgatgaaatcgacaacatcattaggggaattttggatgatgagcttgtccttgatcagcagcatgtgaatggttatcctgactttcctcaggttgttagtgaagaaacacaaagtactgttgtggatcagttctctgaggctgtgatgttccctgagccagtcagaatcacacagcctagcaaccaattttttgatgcacagcctagctttgacttcaatcggccagttacttctcatctgcatgtttctgaaacatctgaggtcacttctgcttccaacattaaaacaaaggagcttgactttaatgaggatggcttcttggaaattaatgatctcattgatactgaacctacattgtcaaatgttgaaaattctgtggagtaccagcattttgaagatgggttaagtgaacttgatttgttccaagatgcacagatgtttcttcgtgacttggggccaattattcatgaaacagattcacatgcatatacaaatgcccttgtcagcagcaatattgaatgtcaaagttaccaattgctgccaaatccagaggatgccaatcaaactgttggtgaattctggatgcatggtgaaagtaatcagctatcatccccaggtgttgtatatgaatctgttggctttcctacggaaggcaataacaatcaaagtagcactgtggaagatgttgctacaagtagcttgtcctctgctctctgggcctttgttgagtcaatacctactactcctgcatcagctgctgaaagtgcattggtgaaccgagctttgaatcgaatgtctagcttcagcaggttgaagatcaagcacaccaacattgctgcatcaggtaaagacactggaactatgaagagagctggcagaaagggacttccattccttttcttctctattcttattgctttatgtgctttttgttgggtttttgttggaaacttaagactagtaggtagaagtatttctccttgaatatatttatgtaaatccaaagttttgctgctaggtattttgtctgggacctcccagaatgactgttgtctgggatctccccagaattaccaaacagtgctgtcctaacatattctcaaaataaaaaaaaatctttgtgaatactggaggcaatataaggtgtagggtaattctaatgaaccttaattcaagagaaggcgctgtaaaggaatttgcagggtgaattgctaacttgattcataaaaactttagcaagtttttatgcttgtctaatcttatttttggataagtttatttagtttgttctttttggccccatgtaatatattgttctttattaacccggagagcactttattttggagattgattgtacatggataagatcttatcttgtggaatctgtctttgtatttgtaatgatcttttgttggttgtaacttgtaagttgtaacgcctgcattagcattagattaatattgttcgataaataaacatgtgtcctgaataaccggtatgcaactatggatcgagaaccggttatttcatcgacctgcacaattcttgaaactggtgagtagaaaatgggtcaagaatcgactaaaatttgtcaggtctgggtatatttgaaatttatatgtggattattatgagagttacttattattac

SEQ ID NO: 4420 - DNA, 1236 bp, Glycine max
attggaatttggaagcacagcgaggcagagtagaagatgtttatgtggcgggaacctcttgactctggagaagaaaacccgcgtttccttgggtagtcgaaaggaagcagaatgggatccaaaattcttccaaaatgggcatcgaagccttgcgtaatgggaatcgacgaagctggaagaggccccgttttagggcctatggtctacggttgcttatactgctctcagtcctatctgaagaccctttccacgttgagttttgcagattctaagacactcaaggaagagaagagggaagaattgtttgaaactttaaaactcaatgattctattggatgggatgttgatgtcattgacccccgggaactctccgctaaaatgcttaagaagaataagattaacttgaatgagatttcacatagctctgccatgggcctcattgatagggtactgaaaatgggagtgcttctaactgaggtttatatagatacagttggagatgcagggaaatatgaaatgaagctctctaatagttttccatctatcaaatttgtggttgcaaagaaggctgatagcctttaccccgttgtcagtggtgcaagcatagttgcaaaggtcacaagggaccgtgctttaagagaatgggtgcttgatgagactgctgaaaacatgcagaggaattttggatccggatatcctggagatccccaaaccaagtcctggctagaggatcacaaacatcatatctttggatttccatcattggtccgatttagttggggaacctgcaactcttattttaaagatgccgcagaagtgttatgggagtctgacaatttagatgaagatggtggtggaagcaacaataagaatggcaagcggcaattgaaattaagcaatgtgggtttcaccacatccaagagaagtgaagaaatagaatcaagtggtaaaggacgctgtaggttttttcaggctcggaaacttgagcacctcacttatttctaaaagtgatgctcaagtattgtcccctctatttgccttattccagtaatatctagctatgtgaaactatatattattcgaatttcatccttagataacattttctgcatatacagatgatgctcagtctaacaagatgtgtaccaagtattgtgtcaatttaattattagtatacttaatatccattgaaatttaagccatcatattaaacatttaaaaaaaaaaaaaaaaaa

SEQ ID NO: 4421 - DNA, 991 bp, Glycine max
atcacctataatactcggcccattcagaaacacaccaagcgaagcacattagcaacaacctaacaacaatggctaccaagatattatccctccttgcgcttcttgcgctttttgcgagcgcaacaaatgcgttcattattccacaatgctcacttgctccaagttccattattacacagttcctcccaccagttacttcaatgggcttcgaacacccagctgtgcaagcctataggctacaacaagcaattgcggcgagcgtcttacaacaaccaatttcccagttgcaacaacaatccttggcacatctaacaatacaaaccatcgcaacgcaacagcaacaacaattcctaccagcactgagccacctagccatggtgaaccctgccgcctacttgcaacagcagttgcttgcatcaaacccacttgctctggcaaacgtagttgcaaaccagccacaacaacagctgcaacagtttctgccagcgctcagtcaactagccatggtgaaccctgccgcctacctacaacagcaacaactgctttcatctagcccgctcgctgtggccaatgcacctacatacctgcaacaacaattgttgcaacagattgtaccagctctgactcagctagttgtggcaaaccctgctgcctacttgcaacagctgcttccattcaaccaactgactatgtcgaactctgctgcgtacctacaacagcgacaacagttacttaatccactggcagtggctaacccattggtcgctgccttcctacagcagcaacaattgctgccatacaaccagttctctttgatgaatcctgtcttgtcgaggcagcaacccatcgttggaggtgccatcttttagattacatatgagatgtactcgataatggtgccctcataccggcgtgtgtttcctagaaataatcaatatattgattgagatttatctcgatataaaaaagttcggagaaaagggggggaccc

SEQ ID NO: 4422 - DNA, 879 bp, Glycine max
ccacgcgtccggactagttctagatcgcacatattattgagaccaactagcaacatagaaagcacaatagtgtaccaacaatggcagccaaaatattttgcctccttatgctccttggtctttctgcaagtgctgctacggcgaccattttcccgcaatgctcgcaagctcctatagcttcccttcttcccccgtacctctcaccagcggtgtcttcggtatgtgaaaacccaattcttcaaccctacaggatccaacaggcaatcgcagctggcatcttacctttatcacccttgttcctccaacaatcatcagccctattacagcagttacctttggtgcatttattggcacaaaacatcagggcacaacaactacaacaacttgtgctagcaaaccttgctgcctactctcagcaacaacagtttcttccattcaaccaactagctgcattgaactctgcttcttatttgcaacaacaacaactaccattcagccagctatctgctgcctacccccagcaatttcttccattcaaccaactgacagctttgaactctcctgcttatttacagcagcaacaactactaccattcagccagctagctggtgtgagccctgctaccttcttgacacaaccacaattgttgccgttctaccagcacgctgcgcctaacgctggcaccctcttacaactgcaacaattgctgccattcaaccaacttgctttgacaaacccaacagcattctaccaacaacccatcattggtggtgccctcttttagatttcttatgagttatagttcaataataaagttttttgtctgatgtttgtggcttcccagaaataagaaagtacatttctagattcttaaacac

SEQ ID NO: 4423 - DNA, 852 bp, Glycine max
tccgggatcacacatattattgagaccaactagcaacatagaaagcacaatagtgtaccaacaatggcagccaaaatattttgcttccttatgctccttggtctttctgcaagtgctgctaccgcaaccattttcccacaatgctcacaagctcctatagcttcctttcttcccccatacctctcaccagcggtgtcttcagtatgtgaaaacccaattcttcaaccctacaggatccaacaggcaatcgcagcaggcatcttacctttatcacccttgttcctccaacaaccgtcagccctattacagcagttacctttggtgcatttgttggcacaaaacatcaaggcacaacaactacaacaacttgtgctaggaaaccttgctgcctactctcagcaacagcagtttcttccattcaaccaactggctgcattgaactctgctgcttatttgcaacaacaactaccattcagtcagctagctgctgcctacccccagcaatttcttccattcaaccaactggcagcattgaactctgctgcttatttacaacagcaacagctaccaccattcagccagctagctgatgtgagccctgttgccttcttgacacaacaacagttgttgccgttctacctgcacgctgcgcctaacgctggcaccctcttacaactgcaacaattgctgccattcaaccaacttgctttgacaaacccaacagcgttctaccaacaacccatcattggcggtgccctcttttagattgcttatgagttatagttcaataatgaagttttttggatgatgtttgtggcttcccagaaataagaaagtacatttttagattct

SEQ ID NO: 4424 - DNA, 1743 bp, Glycine max
gcctattcctcaccacaattttattccttcctcttctcttcttcgctcactatataattcattcatctctctcttttctcttttcagctactttgggcagccggctattcaggaatcatggctagggttttggctcagtctattaatgtccctggtctattggctgagcataggcatggtcagcaaaaggaatcaggaaaattaaaaagatcgaccaaaatgatgagtgctttacgaacaaatggattaagaatgtcaggtttctcagggcttcgtactttcaatcctttggatactatgttgagacctggaatagattttcattctaaggtatccattgcaacgtcttcgcggcgagcaagagctaccagatgcgtgcccaaagccatgtttgagcgtttcactgagaaagcaatcaaagtgattatgctagcccaggaggaagcaagacgtcttggtcacaattttgttggcacagagcaaattctattgggtcttatcggcgaaggaactggtattgctgctaaggtgctaaagtcaatggggatcaacctcaaagatgcacgagtggaagtagaaaaaataattggaaggggtagtggatttgtggctgttgaaattccgtttactccccgggcaaagcgtgttttagaactttcactggaggaagctcgccaacttggtcacaattatattggatctgagcacctgcttctgggtcttcttcgagagggcgagggtgtagcagcacgtgttctggaaaatctgggtgctgatcctactaatattcgcacacaggttattcgcatggtgggtgagagtgctgacagtgttactgctactgttggctcaggaagtagtggtaataagatgccaactttggaggagtatggtaccaatttgaccaagctagcggaagagggaaaattggatcctgttgtgggaaggcagccgcaaattgaacgtgtgactcaaattttaggtcgtcggactaaaaataatccttgtcttattggagaacctggtgttgggaagacagcaattgctgaaggtctcgctcagcggattgcaaatggtgatgtacctgaaaccatagagggaaaaaaggtcataaccctcgacatgggtctgcttgttgctggaactaaataccgtggtgagtttgaggagaggttgaagaaactgatggaagagatcaaacaaagtgacgagataatacttttcatcgatgaagtgcacactttgattggagcaggagcagcagaaggggcaattgatgctgctaacatactaaagccagctcttgcaagaggtgaactacagtgtattggagccacaacattagacgagtacaggaagcacattgaaaaagatcctgctttggagagacgattccagccagttaaagtgccagagccaactgtagatgaaaccatacaaatactgaaaggacttagagagcggtatgaaattcaccacaagctccgctatactgatgaggctcttgtagctgctgcacagctgtcctaccagtatatcagtgatcgatttttgccagacaaagctatcgatttgattgatgaagctggttcacgagtccggcttcaacatgcacagttacctgaagaagcaagagaacttgacaaggaggtcaggcagattattaaggagaaagaagaaccggcgcgccaccctgtctttggaaaggctggagagctacgtgatagagagatggatcttaag

SEQ ID NO: 4425 - DNA, 1021 bp, Glycine max
  misc_feature (938)..(938): n is a, c, g, or t
  misc_feature (965)..(965): n is a, c, g, or t
gcacgagaagccagctcttgcaagaggtgaactacagtgtattggagccactcagctacgtaggccccccccccacattgaaaaagatcctgctttggagagacgattccagccagttaaagtgccagagccaactgtagatgaaaccatacaaatactgaaaggacttagagagcggtatgaaattcaccacaagctccgctatactgatgaggctcttgtagctgctgcacagctgtcctaccagtatatcagtgatcgatttttgccagacaaagctatcgatttgattgatgaagctggttcacgagtccggcttcaacatgcacagttacctgaagaagcaagagaacttgacaaggaggtgaggcagattattaaggagaaagaagaagctgttcgcaaccaagactttgaaaaggctggagagctacgtgatagagagatggatcttaaggcacagatctcaacacttgtagagaaaggcaaggagatgagcaaggcagagactgaggcaggggatgaaggtcctattgtgactgaagctgacatacagcatattgtctcatcctggactggtattcctgttgagaaagtctcaacagatgaatctgatcgcctcctgaagatggaagagactttacataagcgagtcattggtcaggatgaagcagttaaagccattagtcgggctatccgtcgagctcgggttggactaaaaaatcctaatcgtcccattgccagcttcatcttttctggtccaactggtgtggggaagtctgaattggccaaagcattggctgcatactactttggctccgaagaagctatgattcggcttgacatgagtgaattcatggaaaggcacactgtctccaaacttattggttcacctcctggatatgtttggttacactgaaagtggtcaattgacggangcagttcggcggtcgtccttacactgntgtacctgttgatgagattgagaaagcccatcctgatgtgttcaacatgatgcttc

SEQ ID NO: 4426 - DNA, 1303 bp, Glycine max
  misc_feature (1028)..(1032): n is a, c, g, or t
  misc_feature (1040)..(1044): n is a, c, g, or t
  misc_feature (1096)..(1101): n is a, c, g, or t
cgtaaaataggatttgaccttgattatgatgagaaggatagcagttacaaccgaatcaagagcttggtgactgaggaactgaagcaatactttaggccagagttcttgaataggttggatgaaatgattgttttcaggcaactcacaaaattggaggttaaggagatagcagacataatgctgaaggaggtgttccagagactgaaagctaaagagattgatctttcagtgacagaaagatttagggagagggtggttgacgaaggatataatcctagttatggggctaggcctctaagaagagccataatgcaacttttggaggatagcatggctgagaagatgcttgctagagagattaaggagggtgactcagttatagttgattctgattctgagggtaatgtgattgtgctcaacggtagtagtggtgccccagattcactagaagatgtcttagttagttgagttgtacttttttttttttcttcttcttttatttgtttaaaaaaacatagccatagtttgtttttagttgtcaatggacatcagtcaagcttttaactgaatgctggtggtctcagccacccataacataatgaacacagctgggtttgggtggaatgaaaaaatgacgttatttctgtgggtcctacccttaatatgctgcattatgaacaattttgatttactggaagcaactaattttgtagttttcacggttctgtaaactattgttataaataagttgcaccacatcaaatgatctgtttggctgacttgatcaattctcaaatgcgtgcttttgattacaaaatagagtacaaattcaccatctgggatatgcttgattctgattatacgaatttggggtcagagaatagcaatcatatcctaactgatccgtgtgctggccctgtgggaaactttattgtgagaagaattctgatgctccaattgaacatataataatgggacagccgttagacgcactccgaacctatactccacttacactttgtagaagnnnnnctaactgnnnnncaccattagggtgatattggctgttagattgggatggggccaaaattgcgtnnnnnnttgggaaaatttggaagtgataaattgttgcttcattataaaggcagaaacttaatcgatttgtttttattgcactgccattccaaatacactcgttactttctaacctgctgatacttggcagcacaaaatctataaatttgcagtttctattgatctattagtggatgagatgatctttgtgtggggctgacactcccat

SEQ ID NO: 4427 - DNA, 2039 bp, Glycine max
tcgagccgctacgtaggccccccccccgagttctttcttcaattggttctatttctcaatcaacatggtgctcttatgcatcttctctattagttggatacaagataatgtgggttggggatggggatttggtaattctgctgtagccatggcaattgccgtggtgagtttcttttcaggcactaggttgtataggaatcagaagcctggaggcagtgccctcactagaatctgtcaggtggtagtggcatccataagaaagtacaaggttgaagtacctgctgacgagtcacttttatatgagactgctgaaactgagtctgctataaaaggaagccgaaagcttgatcacacagatgagttaagattttttgacaaagcaacagtgctagcacggtcagataaagtgaaggaatcaacaaacccttggagactttgcactgtaactcaagtggaagagctgaaatccattttaagattacttcctgtatgggcaaccggcatcatattttccactgtctatggtcagatgagcaccttatttgtgttgcaaggacaaaccatggacactcgtgttggcaactccactttcaaaatcccaccagcttcactgtccatctttgacaccctcagtgtcatattttgggtcccagtgtatgacaggatcattgtgccaattgctacaaagttcactgggaacaaaaatggcctaactcagctccagagaatgggaattggcctcttcatatccatattttccatggtagctgcagcaatattggagctcatacggcttagaatggtgaggaggcacaactactatcaacttgaggagataccaatgacaatattttggcaggttcctcaatatttcatcataggctgtgcagaagtcttctatttcattggtcagttggagttcttctatgagcaagcccctgatgctatgcgaagcttttgttctgctctctcacttaccactgttgcgcttggacagtacttgagctctctgcttgtgacaattgtgacaaagatcagcactaggaatggaagtccagggtggatacctgataatctaaactttggtcacatagattatttcttctggctattggcattgctaagtgtagtgaacttgatagcattccttgtggtgtctatgttgtatacatataagagacctgtgggaactctgcgctgaaaagtgggttaagttgtacattggaagtagtttcattatacatcacattggaagtttccttcacttgtagtcttgtttttcacctacactgtaagctcttgtgtcaaatccttgaaaaaatgatgtaaaattgttattatcaccattgctattatgtgtctgatctttctcatcaacatgcaggaattaaagttaaccaatatcagatgatagctcagttctatccaagtttaaggacatcccatcttacaaagggttatgttattgaatgattaagtgagtgatgtaccaagacaaacagtggaagaaataaagaagcatgtggaggcaatgaatcttccaaaaaccctcagctatcaaagtatctgcttccttcttagtaggaatgacaaatgtttttcaaaagttgaaagatgcaaacctcacagtagtagtccataatctcaaaaatgaatacacaaccctggcatttgactattggtctgatcctgatgtcaagattgcaacttatatccaaactgccaaggttgatggaatcgtgacggattttctagccactgcaagtagattcatgaggagtcccatgatcctgcctggtgatctattaaacaccattcctactgaacttcagccaccagcacttcctcctcttaaggttgcaaaggttgttaacagaggcctttctatagtagctattttagtgtttgctatgctattcgctggtcattaattattaatgtgattaacccctagcacaatctagagatcgctaactttcctctaacatcgtgtcgtgttttaatttgtattatagaatgcacacattggttctcagaaa

SEQ ID NO: 4428 - DNA, 1847 bp, Glycine max
  misc_feature (763)..(763): n is a, c, g, or t
  misc_feature (1126)..(1126): n is a, c, g, or t
  misc_feature (1135)..(1135): n is a, c, g, or t
  misc_feature (1199)..(1199): n is a, c, g, or t
  misc_feature (1201)..(1202): n is a, c, g, or t
  misc_feature (1217)..(1218): n is a, c, g, or t
  misc_feature (1220)..(1220): n is a, c, g, or t
  misc_feature (1227)..(1228): n is a, c, g, or t
  misc_feature (1230)..(1230): n is a, c, g, or t
aaatatcgagcggatttttgtctcagcgggtttgtgttttccctgatatccatgtaacaacatagaagacacgtcgttttgtatcttcattttggttcctgcaataatggatttgatgttccctctgaaaccccactgtgttattctcaaggcaccactctcttcttctctcttgttcccttttcctctcaggtttcgggctgtcaccgctttcaagcatgccaatattcaatgcgagcttgaaggcagacccaatggtgctctctctggtgacttcgaccctcgcttcattgacaggcaaaaagcactggaagcagcgatgaatgatataaacaacaactttggaaagggcagtgttacaagactgggcagtgctggtggagctttggttgaaacttttcccagtggttgtttgacattagactgtgctttaggtggtggtctccctaaaggaagaattatagagatatatggaccagaaagcagtgggaaaaccaccctagcacttcatgctattgcagaagtgcagaagttaggaggcaatgcaatgcttgttgatgcggagcatgcttttgatcctgcatattctaaagcattaggagtggatgtagaaaatttaattgtgtgccaacctgatcatggagagatggctcttgagattgcagaccgaatgtgtagatctggtgccatagatctcatttgtgtggattctgtgtcagctctcactccacgggctgaaattgaaggggagattggaatgcancaaataggattgcaagcccgtcttatgagccaagctttacgtaagatgtctggaaatgcatctaaagctggttgtactcttatatttttgaatcaaataagatataagattggtgtctattatggaaatccagaagtgactagtggtggaattgcattgaagttctttgcgtcacttcggctagaagttcgtcctacagggaagataaagtctgctaaaggagatgaagaaattggccttaaagttcgtttaagagtccaaaagagcaaggtatcaaggccatacaaaatagctgaatttgaaattatatttggagagggtatcagtaagttgggatgcattttagattgtgcagaaatgacngatattgtntcaaagaaaggctcttggtacagctatggagatcatcggttgggacaaggaagggacaaagcantnnagtacttaaaagagnntncacatcnntnagaagaaattgagaaggttgttcggtcttcattgattgatggaactaaccaaacaagtcctgtacacatgaagaatagttcagtgctacatcaagatgatgatatgtttgaggaaaggtaatgatgagggacttgtttgggtgataggttccagaagctgaaaaattttttcttcacaacaaatggaagtggagttggttttgatggttacaccaattattggctcgtccctcctgtaccattggcatgagatatacagaaagggggaaaagtgaaacttaaaggattatgaaggactggttttactactcaatgttccacaaatcatgtaatctagctatatttggttcccatttattactattattgtttcccagtgcctcattttgtgagttttctatttcttttgggttgctgagccattcagctggtggttggatcctgaatcacatggatatactaattagagtgattctactataatgattaggccaacctattaagctttaactgtaattataactagtattttaggtttaactaatgttttaaaaattggactgacaattgaatcgggagaaaatatttgatcaaggtttattgattcaaccgcagtt

SEQ ID NO: 4429 - DNA, 1294 bp, Glycine max
cacgcgtccggccttttttgtgctcttcacctttcactccacgaaatcaaaaacaagtgctaagaagctccgtgtctctattctcaaacatgtagcaccaaacccaagttggcatccaagttttataacactaatactgcatataatattattataatatacataacaacagttattgatattgttgtgattgtgtgtgattttggtgtcgtccctttttcttatgtttaaggttgtacggagtttatgtgttgattcaattcgtcgataagaaaccttagtttgatattttgattggttctgtggagagtttttttttctttggtgtggtttttggtttgtgctgtttttggttgggaataacaatggccgatgaaggaaacaaaagcaataacttctattcgatcttggggttgaagaaggagtgcactgaattggagctaaagaatgcttataggaaacttgcaaagaaatggcacccagatcgttgttcagcgaccgggaattcagagttagtggaagaagctaagaaaaaatttcaggaaattcgggaagcctattcagttttatctgacgccaacaaaaggttaatgtacgacgtgggagtctacgacagtgatgacgacgagaacggcatgggggacttcttggacgaaatgctaacaatgatgagtcagaccaaatcgaatgaaaacggagaggagagctttgaggagttgcaacagttgtttgaagacatgtttgaagcagatattggattggacggaggcccttctcttgcttcttctgattgctcaacttcatctgcttacatgacttatagtgaaagttctagttcaaataaacacaattcctctgagatgaatttcgggaaggcagagaattcttctgtctttgatgctggttaccagaatttctgttttgggacaggtgaaccaactccaagatataaagaagaaaaaggggggaattctaggaggaggtagaagtagacacagaaatggcagaaagcaaaatatgtcctatggccatgatgtttcatcgaatgactaccctggaatttccacaaagtaaatgaccttatgcaactaaaagtttaggagggaaaaggactaaggatgatcatagtttatacaaaaattagttctaggccattgttgccttaccatgaaaaatctatggtagtggcaccttcaatttcatgttcccaaggttgcaattgtacaatcatgctagtactttaaattttaaatctattgagaacccatttaagtctctttctttttaaaaaaaa

SEQ ID NO: 4430 - DNA, 3080 bp, Glycine max
aaaaaaccttgtcagctccgtaggcccccccccccccaaaattccaacggatatccacttcctcttcttctcttcccatttcccttccaatctcctaatttctcttcagcttctgggttctccattttccttcgtcttctgcatctgcattccgtagattcagttctcgtcggaaaatggacgttcgccgaagacccattcctccctccggcgatcgccgacaaacccagaagctgaagaacaccgccaccaccgattcgcagactcttctgcctctctacctcaccaacgccctcttcttcgcggtgttcttctccgtggcctacttcctcctccaccgctggcgcgagaagatccgcaccgccactcccctccacgccgtcacccccgccgagaccgccgccatcgtctccctcgtcgcctccgccgtctatctcctcggcttcttcggcgtcgcctcccgcgcctccctcgacgagctctccgacgacgagatcatcctcaaggaagactcccgcgccccgggcccgtgcgccgcggcgctgtcggactcctgctcactccccaacaacaaaatccaagaccaattccctctgccacccagggctgtccacagtttggcgaaggaaaaacaacatattccttcgccaccacaagtggacagtcctgtctctgtctcagtctcggtctcttcctcctcggacgacgaggacgaggagatcgtgcaagccgtagtgtcgggctccatcccgtcctactcactcgagtcgcggctcggtgacacccgtcgggccgccaccatccgccacgaggtggtgcagagactgacttcccgatccctgtcaggtttacctctggaaggtttcaactacgactcgatattggggcagtgctgcgagatgccgatagggttcgtgcagatccccgtgggagtagcggggccattattgttggatggaaaagaattcaccgtgcccatggccaccactgaagggtgtctggttgcgagcaccaacagaggttgcaaagctatatacgtctccggtggggcctcctcggtgttgcttagggatggtatgaccagagcacccgttgttcggtttccctccgcccagcgcgccgcgcagttgaaattcttcttggaggatcctctcaacttcgattctcttgctgtcgttttcaataagtcaagcagatttgccaggttgcagaatattcagtgtgctattgcgggcaagaatttgtacatgagattccgatgcagcactggtgatgcaatggggatgaacatggtgtcaaaaggtgttcaaaatgtccttgattttcttcagagtgacttccctgacatggatgttattggaatttctggaaatttctgttcggacaagaaagctgcagccgtgaattggattgaagggcgtggcaagtctgtggtgtgtgaggccataattaaggaggatgtggtgaagaaggtgttgaagaccagtgtggaggccatggtcaagcttaatatgctcaaaaaccttacgggttcagccatggctggtgctcttggtgggttcaatgctcatgctagcaatattgtgtctgctatctacattgccactggtcaggatcctgcccagaatgtggagagttctcactgcatcaccatgatggaagctatcaatgatggcaaggaccttcatgtttccgtgaccatgccctccattgaggttggtactgttggaggtggcacacaactcgcatctcagtcagcatgtcttaatttacttggtgtcaagggtgccaacaaagaatctccgggtgcaaattctaggctactggccaccattgtagccggttcagtcctcgccggggagctatcgctcatgtctgctattgcagctggacaacttgttaagagccacatgaaatacaacagatctagcagggatatatctacaattgtccaatgaactggccacagtacacttaaacttgtgtcagagactaatattctaataagcaaaccatcagataaagacataaataacgagaaaaaaaattggtattgatgatggtgggggtaaaagataaagtgatggttggcatcttccatgggcaaatccagctccccagaagcgtggggttggttggcattcattgaatatctgcttcgtgtgaggcattttctcttatggagattgtacagaggtacttgaattagagggtggaggtaaacaggagccacacttttgggattagagtttctctttgttttccaaaaaaaaataaaaaaatgtcattttgtgttgtgtgttatcctcttgtttaaggctactgcttcaataatgtggtactttagagggtagtgtttttacgtgttgtaatctccatcttgttgatttgtaattgtagcaagagatgtctccaattaggatgtagagttgttaataataacagtctctggttgctcaacatttttccttcgtctctaattacgtctttttggcggttggtatattgtgtggatcttgttacattggtaccgtccttttgaattctgatagttggcatgtttttcggatcttgttacattggtctaactttcatacacgtgaaaaatatgcaagacatttctttttgtggttgaaaagctgtgtggactgtatagtggcatttgtggaggtgaataaaagtaaattcttaaaatttcattttttttaatagtgatttgaaaatggtttttgaagtttttgtaagaaaagaaaatgagagtacgaaattggtttctaatttcttttctaaggatttttttcgaagatccggttgaatcatgtaaaggtttggttacataatgcgttgttcttatatgttatcgtagataaattgtcttgacattcaaggaggatggtatctgaattttgtaataaaaagtaaatgtttattatttttacacaaaagtattctttaaaagaaaagaaaaagaaataaattaattatataaatatttttacacaaattaaaaaaataatgttataaaatttaaaaatgaaattcaaacatttctcttctacttcatgttaattaagcaaaaa

SEQ ID NO: 4431 - DNA, 2582 bp, Glycine max
ggtccggaattcccgcggtcgacccacgcgtccgcgctctccgcgtgggcaacggtgctgcgcggcaacctctatctctttttctataaaaaacctccgcttcgcaggccccccccccgaactccaattcccacggatctcaactcccatttctagctccctccctccctctgcttttcttctcttctcattttccttcgaacctcctaatctctccctccagcttctgggttctccattttccctcgttttctgcatctgcatttcgtagattcagttctcatcggaaaatggacgttcaccgaagacccattccttcttccggcgaacaccgacaaacccagaagctgaagaccaccaccaccaccaccaccgattcgaaatcgcaatcgcaggcgcttctgcctctctacctcaccaacgccctcttcttcggggtgttcttctccgtcgcgtacttcctcctccaccgctggcgcgagaagatccgcaccgccactcccctccacgccgtcagccccgccgagaccgccgccatagtctccctcgtcgcctccgccgtctacctcctcggcttcttcggcgttgcctcccgcgcctccctcgacgagctatccgacgacgagatcatcctcaaggaggactcccgcgccctgggcccatgccccgcggcgctggcggactcctcctgcctgctccccaacaaaattcaaaaccaattccctctatcacccaaggccatccacagcgtgacgaaggaaccacaagtggacagcccagtccccatctcctcgttctcggatgaggacgaggagatcgtacaagccgtagtgtcgggctccatcccatcctactcactcgagtcgcggctcggcgacacacgccgggccacggccatcaggcatgaggtggtgcagaggctgacttcccgatccctgtcaggtttacccctggaaggtttcaactacgactcaatattggggcagtgctgtgagatgccgatagggttcgtgcagatccccgtgggagtagcgggaccactgttgttggacgggaaggagtacaccgtgcccatggccaccactgaagggtgtctcgttgcgagcaccaacagagggtgcaaagctatccacgtctccggtggggcctcctcggtgttgctcagagatggcatgaccagagcacccgttgttcggttaccctccgctcagcgcgccgcgcagttgaagttcttcttggaggatcctctcaacttcgattcgcttgctgtcgttttcaataagtcaagcagatttgccaggttgcagaacattcagtgtgctattgcgggcaagaatctgtacatgagattccgatgcagcactggtgatgccatggggatgaacatggtgtcaaaaggtgttcaaaatgttcttgattttcttcaggatgacttccctgatatggatgttattggaatctctggcaatttctgttcggacaagaaagccgcagccgtgaattggattgaagggcgtggcaagtctgtggtgtgtgaggccataattaaggaggatgttgtgaagaaggtgttgaaaaccagtgtggaggccctggtcgaacttaatatgctcaaaaaccttacgggctcagccatggctggtgctcttggtgggttcaatgctcatgctagcaatattgtgtctgctatctacattgccactggtcaggatcctgcccagaatgtggagagttctcactgcatcaccatgatggaagctatcaatgatggcaaggaccttcacgtttcggtgaccatgccctccattgaggttggtactgttggaggcggcacacaactcgcatctcagtcagcatgtcttaatttacttggtgtcaagggtgccaataaagaatctcccggtgcaaattctaggctactggccaccattgtagccggttcagtcctagctggggaactatcactcatgtctgcaattgcagctggacaacttgttaagagccacatgaaatacaacagatctagcagggatatatctacaattgtccaatgagctggccaaagtacaattaacttgtgttagagactaataagcgaatcatcagataacgacaaaaataactaaaaaaattggtattgatggtgggagggggtaaaataaagtgatgattggcatcttccatgagcaaatccagctccccagaagcatgtggttggttggttggcattcattgaatattggcttcgcatgaggcattttctgttatggagattgtacagagggacttgaattagagggtggaggtaaacaggagcctcacttttgggattagagttctctttgttttccaaaaaagggaaaatcagtttgtgtgttgtgttatcctcttgtttaaggcttactgcttcagtgatgtggtattttggcgtgttgtatttttatgtgttgtaatctccatcttgttaatttgtaattgtagcaagagatgtctcccattgggatgtagagttgttaataatagtttctggttgctcaaaaaaaaaaaaaaaaaactcgcgactagttctctctctctctctc

SEQ ID NO: 4432 - DNA, 1060 bp, Glycine max
cccacgcgtccgacggctgcgagaagacgacagagattcgtcagttcattgacttgcccacagtgagaatgaagatgttgcgaacgacaatactgcaattcgctgcgttgcaggttttgtttattctgttgggtgttggtgccgattacataccgccttcgagatttgatggcttcgtctacgggaaggggaacttgaatttgttggatacggttttgatagaagcgttttatgacccagtgtgcccagatagcagggattcctggcctccactcaaacaagctcttcatcactacgcttctcgggtttcgctccttcttcacctcctccctctaccttaccatgacaatgcttttgttacgtctcgtgctctgcacattgtgaacaatttgaacgcatctgcaacgttccccttgctggagtggttcttcaggtatcaggagaatttctatggggctcaaacacggaacttatctagggcttctattatagaggaagtagtgaagtctgcaacacaagtagttgggagctcttattataaaaccataaagaatggcttcaatgacacaacaactgatattcagaccagagtttcttttaagtatgctgcttcgagaggggtgtatggaacgccatttttctatgtcaatggattcttgttgcctgatactggagctgctgttgactacaagacttggagaaaggtcattgacccattggttggtgctaagaataagaagagtatccaaaatgaagagtcccttcatttcttcttgtgaaaattgtcggtatataaataaagtccagttgcattagcactgtatcagtgaaggaatctgaagaatgtatccgctgactaataatggaatcaaatgttataaaacattccttagtccatacatatacatatgtggcatgtattggaatatatgatacactgggcaatgatgatgtgatattccttggcctatgtttgaattttatgaaaggtgatagaatgaatattaaaaatataatgaaatgtaaaaaattcctgccgccgcgaatctggtgccgaatt

SEQ ID NO: 4433 - DNA, 1600 bp, Glycine max
aacatttttcattcgttcttaggataaaattaaaatcgttcacaccaacaggaaacactatttaagttgaaaccatattggacttagaaacgattaagtgagcaacacaacacaaccacacccatcattatctccttctccatctccatggcttccttacccagttttgctccttttgtatttctattgcttgtaattgggagcaatgcaaggactttgtatccacttcccagcaaaggtggtaatgggagtaggaagcccctacaaacttttcgcccttataacattgctcatcgcggttcaaacggagagcttcctgaagaaacgcgtcctgcatacttggtgaaaggaatctttttgcaaaactacatttttttttctgatttggaaattgactaaaattgttttttcatcaaatgcaatcatgctacaattatgcacaaactattattaggcaaaatgtagatgacatgatgaatatcattgtcatctttggcttatgctttctcaaaaacgaatctttcttgcagagagctattgaggagggtgcagacttcattgaaactgatgtcttatcttccaaagatggtgttcttatatgtttccatgatgttacccttgatgatactactgacattgcaaatcacacagggtttgctaaccgtaaaagaacatatgaagtccaagggataaacatgactggcttttttcctgttgatttcacattaaaggaactaaagtcattgagggtgaagcagaggtatagcttcagggaccaacaatttaatggaaaatttcaaatcatcacttttgaagagttcattaccatagcacaggatgcacccagagttgttggaatatatccagagataaaaaatccagtatttatcaatcaacaagttaaatggtcacatggcaaaagatttgaggacaagtttgtggagacacttcagaaatatgggtacaagggttcctacctgtcaaaagattggttgagacaacctgtatttattcagtcatttgctccaacttcactcgtgtatatatcaaacaaaacggacttgcccaagattttcttaattgatgatgttattgttccaacgcaagacactaatcagtcattttgggagattacatctgatgaatacctagactacataaagcaatatgttgtgggaattggaccttggaaggacacagtggtacctgtggtagaaaattatatgacaaatcctactaatcttgttgccagggcacatgctcataacctgcaggtgcatccatatacttaccgaaatgagttcccatttttgcacttcaacttcagtcaagatccgtatatggagtatgattactggatcaacaagataggcgttgatggtctctttacagacttcactggtagtcttcatcgttatcaggaatggacctctaaccataaagatgatgatgacaagaatctattgcataaaattgctttgttagtctcctcttatgaatgatcatcttgagaatacatatggcaataagtgtttggattaatttattgtgctcaaaaaatgcttataataatatttaccggacaaaaaaaaaaaaaaaa

SEQ ID NO: 4434 - DNA, 1994 bp, Glycine max
  misc_feature (1840)..(1865): n is a, c, g, or t
  misc_feature (1908)..(1930): n is a, c, g, or t
gtaacctggcttcgtgcctatcctccaccctcaacacagccttcctttcctcttctccttttctttaccaattttataataatatatttatatcttttcttttcctttttaccatttcgatcccaattcttcctcacaccattttcagttcacagggttaggtttaggtcccttgtctggtctggtgtgcaattctccccatacaataacaatacacccactttatcaaccaatcaatcaatatacctagtagtgattagatttagtgatcgatcctctcctttcgttctcaaaccgtagatttagattttagggtttctctcttaatataatcttttgacacttccgtaacaaacaaaaaaattacataaattttcccttataattattattatttggcttttatctttggattaactaggcttgagctatcacaaataattgtttcggagaatggaaaagaaaaaggtggcagttcccctcgtgtgccacggtcattctcgccctgtggttgatctcttctacagtcccgttacgcctgatgggtttttcctcatcagtgccagcaaggattcgagtcctatgctcagaaatggagagactggagattggattggaacatttgaagggcacaaaggtgctgtgtggagttgctgcttggataccagtgccttacgtgccgcaactgcttctgctgatttctcaacgaaagtttgggatgctttaacaggagatgaattgcactcttttgagcataagcacattgttcgagcatgtgctttttctgaggatactcaccttttgctcactgggggagttgagaaaattctccggatctatgatatgaataggcctgatgcgccacccagagaagtggataagtcccctggttctgtcagaactgttgcctggcttcatagtgaccagacaatattgagttcatgtactgatatgggaggtgtcaggttatgggatgtaagaagtggtaaaatagtccagacactggaaaccaagtcatctgtgacaagtgctgaagtgagtcaggatggccgttatataaccactgctgatggttctactgtaaagttttgggatgcgaactactatggattggtgaagagctatgatatgccctgcactgtggaatcagtttcactggagcctaagtatgggaacaagttcgttgccggcggagaagatatgtgggttcgtgtgtttgatttccatacagggaatgagattgcatgcaacaaggggcaccacggtcctgtccactgtgttcgtttttctcctggtggagaatcctatgcctcaggatctgaggatggaaccatcagaatatggcagactggccccttgaccctcgatgactcagagactgtgtctgcaaatggttcagttgataaggtgaaggaaactgcagatgaggtttcacgcaagattgagggttttcaaattgcagatgaggggaaatctaaagaaaaggatgaggctgtggaggaatcaagctaatatagtctcgcattttgtctggcagagtgttagaattaactagatcaagtgcctactactcatgtacgtgattagtaaagtaaattttgtaaattttagtttgtttgagattttactgaattgaacgagcttgttgcatctggcttaaataagttctatgtttgcttttatttcaattctgacattggagtttatggaatataggaagtgacttggtatacttcaagaatcatggccactaaagcggctttaatctatagattctggccagttcaattttggccggggcttgcggtctagtttatcaaaaagttaggtaccccttatnnnnnnnnnnnnnnnnnnnnnnnnnnagggtaaaacgctaacattttcatttacgcttttattgcaaannnnnnnnnnnnnnnnnnnnnnngaaatgtttaactattcaattactcgaaaacaaattttccttgtcttaaccattttctaattgt

SEQ ID NO: 4435 - DNA, 1479 bp, Glycine max
caagaccttcattatatattgtgcacaataaactatctattttccaacttcaatattcactgttgttgagtattctaattctaatgaggaacaggggtgtgtgggaagatgcaagcacagcaacagtgcttgtacttgtgctatgttcatcgtatggaattgcagaagtaaagtcacagtcacagaaggtatctggtttgtttgtttttggagattcattggttgaagtaggcaacaataacttcctaaacaccatagcaagggcaaattactttccttacggcatcgacttcggcaggggttccactggccgattttctaatggcaaatccctcattgacttcattggagacttgctgggcattccttctcctccaccttttgcagatccctccactgttggaaccagaatactttatggtgtcaattatgcatcagcttctgccggcattctggatgagtcagggagacactatggtgatcggtatagcctgagccagcaagtcctgaactttgagaacacactgaatcagtataggacaatgatgaatggaagtgcattgaatcagttcttagccaagtctatagcagttgtggtaactggaagcaatgactacatcaacaactacctcctgcctggcttatatggctccagtcgaaattatactgcccaagactttggcaatctacttgttaatagctatgtgcgacaaattttggcactacatagcgtaggattaaggaagttcttcctagcaggaattgggccactgggttgcatccctagtcttcgagccgctgctttagccccaacaggaagatgcgtggacttggttaatcagatggttggaacttttaatgaagggcttagatcaatggtggaccaactcaacagaaaccatcctaatgctatctttgtatacggtaacacttaccgtgtctttggtgatatcctaaataaccccgcggccttcgcgtttaatgttgtggatagagcatgttgtggaataggaaggaaccgaggtcaactaacatgcctcccattacaatttccatgcacaagcagaaaccagtatgtgttttgggatgccttccacccaacagaatctgcaacttatgtcttcgcatggagagttgttaatggagcgcccgatgatagttatccaattaatatgcaacaaatggctaccatttaatccactctatcttcctgtattctcctttcatttataaaccaaaaaagtgtaccaaaagtgaagccaaattctacatctattgttgggtataaaataattacttttgggctaaaacaaaaaataaatctacatctttgaaatgtaatacctttttttgggtgataaaaaaaaaaaaaaaaaaaaaaaaaaaaaaaaaaccaaaaaaaaaaaaaaaaaaaaaaaaaaaaaaaaaaaaaaaaaaaaaaaaaaaaaaaaaaaaaaaaaaaaaaaaaaaaaggggggc

SEQ ID NO: 4436 - DNA, 1262 bp, Glycine max
tcagctacgtaggcccccccccccattttggccaaaagtcacaaattactacacgcatctaaattctaaacactcctccgacctataatacccttttctattttcattgttgaagctcacaagcaaaggctaaagtagattagattctcctcaagcaaaacctagagctcccacactcctccactacttagaatattaaaagccccttccttcatcaaggtactactgtttcatcttccctcaaagattggaacaacaacaggaacatgggtactctaacaactgttcctgtgctcccttctaagcttaacaagccttcgctttctccgcgtcacaattctctttttccctactacggaagacgcgtcgggaagaagaacaaagcaatggttcctgttgctaggttgttcgggccagccatatttgaagcctcaaagcttaaggttttattcttaggagtggacgaaaataaacacccaggaaatctcccaaggacttatactctaacccatagtgatataaccgctaagctcaccttggcaatctctcaaaccataaataattctcagttacaggggtggtacaacagattgcaaagggacgaagtggtggcacagtggaagaaggtgaagggaaagatgtctctgcacgtacactgccacatcagtggtggtcattttctcttagatatattagcaaggttacgatacttcatcttctgcaaggagctaccagtggtgttgaaggcggtggttcacggcgacgaaaacctattcaacaactacccagaattgcaagatgccttggtttgggtttactttcactcaaacattccagaattcaacaaggtggaatgttggggcccactgaaggaagcgtcagcaccaataggtggggccaaggaagagagtgagcaagaaactcttctaagtaaggagggcttggcaattccacagccatgccaagaggaatgcgaatgttgctttccaccgctgacgttaagcccaattcagtggtctcaacaagttcccagccaccattacgaaccttgtgatgggattgagacccaacaaagtctataaacttccaaactatcatacacagaaaagaaaaaaaataaaatcacatcacagttacagggatgctggcaaattcatatgccatttccctgtatacatcattaggacaaatcaaatattcaaaacccatttcaatcgacaggaggaccggtgtcatctctacataaccgagatcacttcgtt

SEQ ID NO: 4437 - DNA, 1407 bp, Glycine max
tcagctacgtaggccccccccccgatccaaaaataaataaataaaattgtagcaatcacaacacaaccaaggctacgacttaaagcaaccgcaatcttttggccaaaagtcacacacacattactacacgcatctaaacactcctccgaactataatacagttttcttattttcattgttgaagctcacaagcaaaggctaaagtagattctattctcctcaagcaaaacctatagctcccccacactcctccagtacttgaataaaagctaaataaatattaaagcctttccttcatcaaggtactgtttgatctttgaatttcagtcctcaaagattggaacaacaggaacatgtgtactctcacaactgttcctgtgctcccttctaagcttaacaagccttcgctttctccgcaccacaattctctttttccctactgtggaagacgggtcgggaagaagaacaaagcaatggttcctgttgcaaggttgttcgggccagccatatttgaagcctcaaaactgaaggttttgttcttaggagtggacgaaaataaacacccaggaaatctcccaaggacttatacgctaacccatagtgatataaccgctaagctcaccttggcaatctctcaaaccataaataattctcagctgcaggggtggtacaacagatttcaaagggacgaagtggtggcacagtggaaaaaggtgaagggaaggatgtctctgcacgttcactgccacattagtggaggtcattttctcttggatatattagcaaggttaagatacttcatcttctgcaaggagctaccagtggtgttgaaggccgtcgttcacggcgatgaaaacctattcaacagctacccagaattgcaagatgccttggtttgggtctactttcactcaaacattccagaattcaacaaggtggaatgttggggcccactgaaggaagcgtcagcacccacaggtggggtccaggaggaggggttggcaattccacagccatgccaagaagaatgccaatgttgctttccaccgcttacgttgagccctattcagtggtctaaacaagttcccagccgccattacgaaccttgtgatgggattgggacccaacaaaatctataaacagccaaactactacaattcacagttacggggatgctgccaaattggcaaattccctgtatacaaattaaatattcgaaacccatttcaatgtaaataaggaagctcgtatttgcaatttttttttttttatatatttttctttactttctttgttatgatttttctttcgtaagaaattaaattagttcatgtataatatgtctgtatgcatggttatttcaaagaattaaacagatttttgtaaggagtggaatttcgtggttgt

SEQ ID NO: 4438 - DNA, 873 bp, Glycine max
tcagctacgtaggcccccccccacaattcattcatcaatccattgttcactttcaaatcaactcaagagattcaaccaagaaatatagaagctagggttttgttacatttgtgttagcacgcaatactttgcaaatatggagagcagcttaggagacatgttggttaaggttgtggtgttcattctagttcaagccttggtttaccttatcctctccaattcatcaaacgtgttcaacaagaacatgaagaaatctaacagcttcaggccggcacgttcggtgagcattcgccggatgctcgctttgatctctgattttcctccagaagaagaaccctctccttcaccgaagggtgctaaaacaacatcacttcatcaaagtgatcaataattgtaaggatttaattaaattgtggctgcaattacaaattggagacaatttcagcttatcgggtggccatattaaggctcagaaacctccaaatgttgcggctgctgtggtggttacaaactgcaatttagactagacccatgccaagtagaatgtaattaaattatttctctctctgtttccttgtgtagaggctatggtattgcaaaatttgttaaaagagtccaaaattattggtatgtaggtattgaattcttttgttcatttattcttttatgatgaatattgtaatatatttatgagtggaatattaatgttgacattaatttacttttacctctgcttttaattagttaagaactcaatggttgtcgcacatgcttgtttgttagaatatgcaattgcaatgttgcaagtaaaaaagatgtaacttcatttttatacataacagacgcatttggtggagtgtgtttgattaaaaa

SEQ ID NO: 4439 - DNA, 2374 bp, Glycine max
gttttgcatctttgaggcgttttcgaccctctccgaccatgggagcctgcttttccgccaccaaagtaagcggctcgaacggcaatggcgtcaacgtcaacaaaaagcgcagggggaccacgaagaagccgaaatcagagacggcgaaggcgaatccccaacggcacaaggcggcaagttcgcgccacgtgccgtgcgggaagcgcaccgatttcggttacaagaaggatttcaatcagcgttactcgctcggaaaattgctcggacacggccaatttggttacacttacgttggaattgacaaagccaatggcgatcgcgtcgccgttaagaggcttgagaagagtaagatggttctgcctattgccgttgaggatgttaagcgagaggtcaagatattgaaagcacttactggccatgagaatgtggttcagttctataatgcttttgaagatggttcttatgtgtacatagttatggagttgtgcgagggtggagaactgctagatcggatattggccaagaaggacggtcgttatactgaaagagacgcagcggtggttgtaaggcagatgctcaaggttgcagctgagtgtcatttacatggtttggtacaccgggatatgaaaccagagaattttctttttaaatcaatcaaagaagattcacctttaaaggccactgattttggtttgtcagatttcataaaacctggaaaaaagtttcatgatattgttggcagtgcttactatgttccaccccaagtgttaaaacgtaagtctggtcctcaatcagatgtgtggagtattggtgttattacatacatattgttgtgcggaagacgcccattttgggataagactgaggatggtatcttcaaggaggtcttacgtaagaagcccgattttcgtcggaaaccatggccaactattagtaatgctgcaaaagattttgtgaaaaaattactagtaaaggatcctcgggcgagattaactgctgctcaagctttatcacatccatgggttagagaaggaggagaagcattggagattcctattgatatatctgtcctgagcaacatgcggcagtttgtgaaatatagtcgattcaaacaatttgcactgagggcattggctagcacacttaatgaagaagagttggctgatataaaagatcaatttgatgctatagatgtagacaaaaatggttcgattagcctggaagagatgagacaggctcttgccaaagatcttccttggaaattgaaagaatcacgtgtactagagatattgcaagcgatagacaacaacactgatggtctagtggatttccgggagtttgtagcggctacattacacgtgcatcaattggaggaagactctgacaagtggcagcaactgtcacaggctgcttttgagaaatttgacctagataaagatggctatattactccggaagaacttagaatgcatacatgcttgagaggctccgttgatcctttgctagaggaagctgatattgacaaagatggaaaaataagcctaccagagtttcggagacttcttagaactgcaagcatgggttctcaaaatgtttcaagcccatctgttcatcggcggcagaggttctagattagaggtgcttcagaggctgagataagtttggagaaacgagtggtggagttcctctaagtaacttattgtgtgattgtgctgagtctcttaagactatcttctatcatgcagattgacaatctatgatactcaaaactccagttttggactgtggtaatcccctgcgcggggattatgtccacaatgtcacgaggactacatcaagaagtgtttggtagagtttatgtagacgattcatggactggcttcaggtatattgcagtttcagcagtatcatttatgtgtcggagttttcttggttgtggcatgcaagtaatgtgtaactacaaataaaatcttctagccaaaaatgaaaaaaaaatataaataaacatgaaatgaaatacgtggatcaaattctgttctcactatttttccatctcattcttattttattcctctgcagaaaaagcgattacatcctgctgttcttagtagatactaatgaaatgattgcataaatttggtgtactagtttgagtctgaaatgtatttatgtttatatttatttatatatagttctcttctctgaagaattagtgggggggcaacaatgtgattgtggattgatgacttaagggagtggttgatgtctctgatgacttgcattggaggtcacttgtgggtatgtgctcttgctgtgtttctattattatgaatgatatgacaggtttttatttgcaaaaaaaaaaaaaaaaaaa

SEQ ID NO: 4440 - DNA, 1236 bp, Glycine max
aaagcttataaacttcgcaggaatttacatagcatgtcggaaactaagggaatggtgccttgggaattagaatggctctcctcggatcaaacataacaagcgaagttggactccgattgctcctttgtccacttggttccaacgttgtaattagaacagcatgctgtactgtcggagttgctatgcctgtgtacactacgttcaaggcaatagaaagtaaagatcaagatgctcaacataggtgtcttctctactgggcagcctatggttcattcagccttgttgaagtgttcacagacaagcttatttcttggtgtcctatgtactatcacctgaagtttgcatttcttgtttggcttcaacttccaactaccagtggagcaaaacaaatatatgcaaaccacttgcgcccctttttgtcgaggcatcaagcacgagttgatcaagtcttgggttttgcatattgtgaagtgataaaacttgtcagttcataccaagcagagatccagtttgtcaggagcatggtagtaaagataactggatcagcggatcaaatgttgagaggcaatgctgaatcagataatagatcgccgcaacatagttcacccgaagaccctgcctctgatgctgaaacggaccaaaaccacaatcactgatgagtgctagtgcccttggactgcgtggaataagagagactagacttctgttgttttctacaaatgttatttttttaattagcgtttttaaggtaatcaatattagaaatcttgtatttttcaatttttttatgataaaagagtgatagtgttgtttagtgtcttaaaggtgtatctttatagctcaattgattgagcaaaatgcttgagttgttacaaattctcttgaatctttgatcctacatataaaattagtttcatttttttttgggtttaaaaaacccctccccacccaaacccacacaacacaaaccaaaaactcccgttactccttctacactcccccctcctaaaccctcccccccatctataaaattccctgccccccggggacccccataattcttaaaggggccccccccgggagggaccccccatttttgttccctttatgggggggaattttgcagcttgggggaacaaggggacaaaaggggctcctggggaaaaatgttttcccccccaaattccacaaattataaagcctgaaagaaaaagggcgaacccccgggggggccaa

SEQ ID NO: 4441 - DNA, 1624 bp, Glycine max
  misc_feature (31)..(31): n is a, c, g, or t
ttctgtcagtttaagactttattgtatagtnatacctattgggtagttaagatttatttctaaaacatctgataggtgtggattacttatattggagcgaagctggattctagcctcgcaaaatctgaaacatcaccctctgacttcacaagattaaaagattcaaagatttgcgaggtagcctctcatgcttgtttctactccattttaatggaaataaatcctcgaactttcagccgagttctttaggataagaggctaaatattcgatcacatgtactagtatatgttatccatattttaaggcaatgctcaaattgattattagattaattcaaagttagtaacttactataaaaaaaaaaaaaaaagctaacgttttaatttgtgggctgagcctggtttttctgggtacaaggccagaacccaacttgtagaaattcaagccaccactcatgatttttacatgagagggctatctgaaaatcgcattgataagaaagtttaatgatggaagcgggaactgctctcagtctccgactccacactcgcattcccattcccatcaacactgccaattcaaataccttattattccaacctcgcttcactctttcatctcattctccttcttccttttccgcttacagttacagaggccccacaccaaaacgccccttcctcgccgactgggtctcccaaaacgacgacgtcgttcgcaccctcccaatctacgtcggctctgcctccctcttcgccatcctcctaaaccgctccctgtccggcatcgcccccgtcgtcgacgccggcagttcgcagtcccgagctgacctcttgactttgggattggccgttaccaatattttggcaggcctcgtttggctttcagtaaaacctaaatctattactgtggtaaatcctcgaggagttgaatgcaagagtttgtgcgctacactccctgaagttgcacgtaatgagttgctttgggtgtgggaatctctatcagatgccacttgttgtcgttcacttgttgttgtttatgagagcagttgtgtactccaaattggttttgcagcagaatcttctcctggggatggtgacgctgtaagtgtggatgccaataaattgatgcaaggatcagtataccagggggttatgaaatctggtgctcagagttacttggctaatctatctctttatcctgggaaatctgagctgccatttctaccttcaaatacacaggcagtaattttacaaccacttggagataaagggattgcaattattggtggtgacacgatacgaggtttcactggttctgatcaggtgtggattacttatattggagcgaagctggattctagccttgcaaaatatctgaaacatcaccctctgacttcacaagattaaaagattcaaagatttgcgaggtagcctctcatgcttgtttctactccattttaatggaaataaatcctcgaactttcagccgagttctttaggataagaggctaaatattcgatcacatgtactagtatatgttatccatattttaaggcaatgctcaaattgattattagattaattcaaagttagtaacttactataaaaaaaaaaaaaaaa

SEQ ID NO: 4442 - DNA, 496 bp, Glycine max
  misc_feature (493)..(493): n is a, c, g, or t
tacgggtgcgagaagacgaccgccgggaaaattgtgttggagcaaaataccatcatgaagctaagaagcattctccttattgtgtgggctttgtttgctctcttgagccacgcttatggggaaatccgtttttgcccaaaagaaatgacgttggatgggtcatgtccacttgggacttcaggggaaagctgctttctggaattcctgaatagattgggagcaagtgccatgcctatgaattgctcttgcaaagatgatccttcccataataaacgccaatgcacttgtaatgttgtgtgtaacacatgagacaattttgcctctagagtgcacttcagtccaaattattcataaaataaaaaaacgtgtactgatcttgtaatttctctacatatgttgagaattttaaaagcccatcacctaatgttccagttattatagttaatgatattttcaatttgttatctaaaaaaaaaaaaaaaaaaaaaaaacnaaa

SEQ ID NO: 4443 - DNA, 2363 bp, Glycine max
tacggctgcgagaaacgaccggagggcccggctccaccccgcgcgcggaaaaatgtccgaaaacggagaagagaaattactcgctgtggcgcggcacatagccaaaacgctgggccacaacaacaccatgtctgatgacatattccaaatactatcgaacttcgatggaagattctcgagagagaatctttctgagaagggcgcagatgtggatcccagaggctgcgccgcactggatcattccctcaaatccctagaccgccggatctctccctacgtctcctccgaccgcacaatctgggccgacgccgccgattctgctgccttcctcgacgccgtggacgagctcgtcgccgtcgtcgccgagtggaaccacctcgcctccgacaagtccgtcgccgcctgcctcgtccgcgccgaggacatgctccagcacgccatgttccgcctcgaggacgagttccgctcgctcatggagcgcggcggcgaggccttcgacctcactcggagccaccggaaaggcgactcagcggggaatttgccgttcgagtcagacgaagacgtcgacgaagaagaagaagaagcgcggaacgttggaataggaggaggagacgaggaggagcagattccggtggcgctgccggtcacggacttcgacatcgtcatcgacgcactgccgtcggggacgatcaacgacctgcacgagatcacgaagcgaatggtggcaggaggcttcgggaaggagtgctcgcatgtgtacagcagttgccggagggagttcttggaagaaagcgtgtcgagattagggttacagaagctcagcatcgaggaggttcacaagatgacgtggcaggacctcgaagacgagattgagaaatggattaaagcctccaacgtcgctctcaagatcctcttccccagcgagcgccgtctctgcgaccgcgtcttcttcggattcgcctccgccgcggacttctctttcatggaggtctgccgcggatcggcgattcagctgctgaatttcgccgacgccgtcgcgatcgggagccggtcgccggaaaggctgttccgaatcctcgacgtgttcgagacgctgcgtgacctatttccggagttcgaggctctgttttctgatcagtttagtgtgtcgctcaggaatgaagcgattacgatttggaagaggttgggggaagcgattaggggaatttttatggagctggagaatttgattcgccgggatccggcaaagattgcagttcctggtggcggacttcatccgatcactcgctatgtgatgaactacctccgtgccgcatgtcggtcacggcagagcttggagcaggtttttgaagactatggcttgaaagagtacccaaagcttgatgatagggttccttcctcttcttctctgtcagtgcaaatggattggattatggaactgttggagagcaatttggaagcaaagtccaaaatttacaaggaccctgctttgtgttatattttcttgatgaacaatgggaggtacattgttcagaagaccaaagatagtgaattgggaaccctcttgggagaagattggatcagaaaacacgctgcaaaagttaggcaattccatgtgcactatcaaagaagctcgtggaataagctattagggattctgaagttggatagtaatgggtcaatgccccatattaacttggcaaagtcaatgaaggagaaactcaagtcgtttaacacagtttttgaggagatatgcaaggaacagtcttcatggtttgtctttgatgagcagcttagggaagaaataagaatttcgcttgagaaaatcttgcttcctgcgtatgtaaactttgttgcaaggtttcagagtgttcctgagcttggaaagcatgctgataagtatattaagtatggaacggaggaaattcaagcaagactcaatggtttgtttcagggaagcagtggatcaactggtagccgaaagtgaaggtgaagctgctactagttcttcttgtgtatttgtagtgtaattaaaattaaaatacaatgttttgattatcacaaaattgtagtcttgtagtcgtgtactataaatactactgtatgttattcttcttagcatcatagtggaggattgaaaaaggattttcaagtaagagctacgagttacaaaattaacctttgtgttgtaacatttgaggtggttcttatattggtcattggtttcatcaactcttttcttgtgcagggcttagaatagtatagtatcagtatgtattttactgaatcaagcaattttgtatgttatatcatttatgtacgttttttgggtttccttgagtaggggggcttggttctattcc

SEQ ID NO: 4444 - DNA, 2225 bp, Glycine max
gttccctctcttgtctcgagtccgacgcgcggactaaactaaactagcgaagagaaatgtccgaaaacggagaagagaaattactcgctgtggcgcggcacatagcgaaaacgctgggccacaacaacaccatgtctgatgacatattccaaatactatcgaacttcgacggaagattctcgagagagaatctttctgagaaaggcgcagatgcggatcccagaggctgcgccgcactggatcattccctcaaaaccctagaccgccggatctctctctacgtctcctacgaccgccctatctggtccgacgccgccgactccgccgccttcctcgacgccgttgacaagctcgtcgccgtcgtcgccgagtggaaccacctcgcctccgacaaagccgtcgccgcctgcctcgtccgcgccgaggacatgctccagcacgccatgttccgcctcggggacgagttccgctcgctcatggagcgcggcggcgagtccttcggcctcactcggagctactggaacggcgagtcaacggagaatttaccgttcgagtcagacgaagacgaagaagaagaggaagcgagaaacggaggaggagacaaggaggaacagattccggtggcgctgccggtcaccggcttcgatatcgtcatcgacgcgctgccgtcggggacgatcaacgacctccacgagattgcgaagcgaatggtggcaggaggtttcgggaaggagtgctctcacgtgtacagcagctgccggagggagtttctggaagaaagcgtgtcgagattagggttacagaagctcagcatcgaggaggttcacaagatgacgtggcaggatctcgaaggcgagattgagaagtggattaaggcctccaacgtcgctctaaagatcctcttccctagcgagcgccgtctctgcgaccgcgtcttcttcggattcgcctccgccgcggacttctccttcatggaggtctgccgcggatccgcgattcagctgctgaatttcgcggacgccgtcgcaatcgggagccggtcgccggaacggctgttcagaatcctcgacgtgttcgagacgctgcgtgacctaattccggagtttgaggctctgttttcggaccagttcagtgtgtcgctcaggaatgaagcgattactatttggaggaggttgggggaagctattaggggcatttttatggagctggagaatttgattcgccgggatccagcgaagatggcggttcccggtggcggtctccatccgatcactcgctacgtgatgaactaccttcgtgctgcgtgccggtcacgccagagcttggagcaagtatttgaagactatggcttgaaagagtatacaaagcttgaggatagggttccttcctcttcttctctgtcagtgcaaatggattggattatggaactgttagaaagcaatttggaagcaaagtccaggatttacaaggaccctgctttgcgctatgttttcttgatgaataatgggaggtacattgttcagaagaccaaagatagtgaattgggaacccttttgggagatgattggatcagaaaacacgctgcaaaagttaggcaattccatgtgcactatcaaagatgctcgtggactaaggtattagggattttgaagcttgatagtaatggctcatcattgccccctaatggcttggcaaagtcaatgaaggagacgctcaagttgtttaacacagtttttgaggagacttgcagggagcattcttcctggtttgtctttgatgaacagctcagggaagaaataagaatttcccttgaaaaaatcctgcttcctgcgtatgggaactttgttgcgaggtttgagagtgttgcggagcttggaaagaatgctgacaagtatattaagtatggaacggaggaaattcaagcaacactcaatggtttgtttcagggaagcagtggatcaactggtagccgaaagtgaagttgaagctgctactagttgttcttgtgtatttgtggtgtaattaaaattaaaatacactgttttttatcataaaaaaatgtagtcttgtagtcttgtactataaatactgctgtatgttattctgcttagcatcattgtggaggattgaataggattttgaagttaagagccgtttgagatacaaaattatcgtttatgttgcaacattgaggtggttctaattgatcattgctttcattcatc

SEQ ID NO: 4445 - DNA, 929 bp, Glycine max
  misc_feature (7)..(7): n is a, c, g, or t
ttacggncggggcaactcacaaaacctaggtcgtttcttccgttcgtatttatcagtacttacttgcacttgcttacaaccgtatctctctcgctgagcttcactttctgcttttcatactcatcacaacaacaataactctggtctcatgtgatccctgaaaaagactatatcaaggaattcaaaaagagaaaaacgaaaatactcatcctcataagcatgacttcagcgtcaccgggtcatcggagaaaattctccggcaaggacccgccgagttccgggcgcaaactccagccagagaaacactccggtcgccgatttgcgcccgctcctctgacgctgaagcttccgttgcaaaacagtgagtactctcttcttcggccatcgaagctgttgctgaatgtgaccatcgagaactgtttgggggccgtacaggtgctgttgtcgcctgaggacaccgtcgccgatttgataaaggctgcattggcgttctacgagagggagaagaggaggcccttcttgaagaacactgatcccaagtgctacgaccttcacttctcgtccttcacccttgaaagtttgaagccagatgataagttagtgaacttggggtcaaggaatttttttctgtgctgtaaggctcctgccgctacttgctttgagaaaaagaatatggcaactgattctgcatttccatggatggtattcgtccctctcctgctttagattgggaccgtacgaatctcagtttgatgaacaacaagcccctctttcaacgcctttttctggtcttgcttgcctgattaccttttgttgtgtacgtacgtcgacactacttaattaggaccatatatttataactatctcactcacatatatatgctagtttataattaatcacttattcattattaaaaaaaaaaaaaaaa

SEQ ID NO: 4446 - DNA, 1774 bp, Glycine max
ggaagaatggggagagagtgatgtagtgagtagtgagtgtaaacaaggtttggtctttgctgctgatgttcatcactgcaaggtttccgcatttgggtttctctccgattgaaaaaactttttgaatttgatgcagcaaggaaatgatgatttcatccttttaagaggaatgtgacactaggataatgctgaagaagggaaaaggatcatatttggaagatttgtaatcctatggctgattcttcttccaatttctctttaccttgtgatgcattaagcctaagacaaaagagtttctcaattttccataccggtggttctaggttgggggttggtgctaaaggtttgccagattctgaatctgtttggagccctacatctcctctggattgcagactcttctcaaatcttagcaacccgtttcggccccggtcgcccccccccccatttcaaactgggcataagaagcagtttgatggcagtaaagtaggccttggcatcataagttcccttgctaatgaaaccaaacttaacaatgacatccttgctaaatttaagaggaaaggcataatttttggaccacaggtgaaaactggcatccttaaattctcaaacaacaaccaggaatcccttgtgccttatttgaaatctaattccttgccaaaaaactatgtaatttcacttccttctgaaaccacaattcccaaatctgaactggaaaactttgatgatgtctctggaaagaaagatgactattgggaatgcgaagctttcaaaagtaccataacttctttgcctgattcctttagcccttcctcattgatcaactcaactcaaaactccaatttgggaatcaatgaattaggtgttggaaataatgcatctgtattaatgagtttgcctcaagtgacaagcaaagtttcacaggtaggtaattctttgaaaattaaatcaaattcacttccaatatccattgattttagcaaagggtgtataggctcactctctgcgagagagatagagctttctgaggattatacctgtataatttctcatggtccaaaccctaagagaacacacatttttggtgactgcattttggaatgtcacaaccatgacttcactgagttcagcaagaaggaagaacctgctttcagctattctcaagttccttcattttcagatggatcagccccttatccttctgacaatgttttgagcttttgttactcatgtaataagaaattagtgaaggaggaagacatttatagatacagaggtgagaaagcattttgcagttttgaatgtggatcagaggaaattttgacaggtgaggaattggagaaaacttgtactaactcagcagagagctctcctgactcaagttaccatgatctcttcctcacgggtctgcttttgtccaaataacatgctttctttttacttcgttgagagatactgtgaataattttgtttacaaacagcttcctatgtggatttgtttgtgctatggatggttgcaatgcaaaattatgtagtgtgctggttgtcaacaagaaccatatttcatggttcagtgagttattattgccggaataggcagagttttctcccttctggtaactcttgaacatatatatgcattgtaattatcactggatgagttgattaaagaggctacagcaggcccttgcttctcatcattttctttttacttgcctatcattgccttctacaaaaaaaaaaaagaaaaactcgagactagttctctctc

SEQ ID NO: 4447 - DNA, 2742 bp, Glycine max
  misc_feature (8)..(8): n is a, c, g, or t
  misc_feature (18)..(18): n is a, c, g, or t
  misc_feature (2706)..(2706): n is a, c, g, or t
  misc_feature (2719)..(2720): n is a, c, g, or t
  misc_feature (2730)..(2731): n is a, c, g, or t
ggtccggnaattcccggngtcgacccacgcgtccggtggctaatcagcttcccataaggcccagaggaggccagatgggaataggagttgttggtctttcgagtgggatgagaatgcacttcttcagctgaaagatgggttaggggatgatgatattgaggtcatttatgttggatgccttaaggaggaggttcatccaagtgaacaagatgaagtttcacagacacttcttgagaccttcaagtgtatcccgacttttctccccgctgaccagtttactaagtactatcatggtttttgcaagcagcagttgtggccactgttccattacatgttgcccttgtcacctgagctcggtggcaggtttaataggtcactgtggcaggcttatgtgtcagtcaataaaatttttgcagataggattatggaagttattaaccctgaagatgattatgtgtggatacacgattatcatctgatggtgttgccgactttcttgaggaagagattcaacagggtgaaactgggcttcttccttcacagtccattcccttcatcagaaatatataaaacattgcctgttagggaagagatcctgagagccctccttaattcggatttgatcggcttccacactttcgattatgcgcggcatttcctctcctgttgtagccggatgcttggccttacctacgaatccaagcggggatatattgggattgagtactatggtaggactgttagtatcaaaattcttcctgtcggtattcacttgggtcagcttcaatcggttttgaggatgcctcagactgaagaaaaagtttgcgagctcattagacagttttctgataaaggcaggacattgttgcttggtgtggatgacatggatattttcaagggaataagtttgaagttgttggccatggagcagcttctcattcagcatcctgagtatcgggaaaaggtggtgctggtccagatagctaatcctgcgagggggcgagggaaagatgtgaaagaagtgcaagccgagacgaaggccacggtgaaacgaattaatgaaacatttgggaaacccgggtatgatcccgtcattctgatcgaggagcctctcaagttttatgagagagttgcttactatgttgtcgcggagtgttgtttagtcactgcagtaagggatggaatgaatctcataccgtatgaatatatcatcagtcgtcaaggaaatgaaaccttggataaagttttgggtctagcttcctcccctaagaagaaaagcatgttagttgtgtctgaattcattggctgttccccatctttaagtggagcaatcagagtgaacccctggaatattgatgcagtagctgatgcaatggactcggcgctggaaatggctgatttggagaaggagcttaggcatgaaaagcattatagatatgttagtactcatgatgtcgggtactgggctcgaagcttcttgcaagatttggaaaggacctgtagtgatcatgtgcgacgaaggtggtgggggattggttttggattaagctttagagttgttgcgcttgatccaaacttcaagaagctctcaatggagcacataatttcagcttacaagcggacggcaactagggcaatccttcttgactacgatggtacactaatgcctcaatcatccaccattgataagagtccaagcagtaaatccattgaaattcttagtagtttgtgtagagataagaacaacatggttttccttgttagtgctagaagccgaaagatgctttctgaatggttttgtccttgtgagaatctgggagttgcagctgagcatggttactttctaagaatgaagcgagatgaagagtgggaaacacatgttgcggcaacagacactagttggaaacaaattgcagaacctgtaatgaaactttatactgaaacaaccgatggatccaccattgaagacaaagagactgcacttgtttggtgctatgaggatgcagatccagactttggatcatgccaagctaaggaacttctcgatcatcttgaaagtgtgcttgcaaatgaaccagtaacggtcaagagtggccagagcaatgtagaggttaaaccacagggtgttagcaagggactagtggccacacgcctactttctgccatggaagaaaaggggatgtgccctgattttgttttgtgtataggcgatgacaggtctgatgaagacatgtttgaggtaatcaccagttcgatggggagtccgatcgcggcaaaggccgaggtattcgcgtgcacggtttgtcgaaaacccagtaaggctaagtactacctggatgatacaactgaaatagtgagattgcttcagggcttagcctgtgtttcagaacaaatagacaaatagtttcattttcttcggaacaaaaaatagtttgttaagctctgggaacaaaggtggtggtggtgatgagaggtattataaatacattgtactttgctttactttgtcattgaggatgtaggctcagttgtgctgctcttaaaatcttaatacacaattaatattattggtttccttgatattccatgtatattatccctagtttttactgagaaaagttctgtatcggattctgctccttaaaatgcttgatttctatcaggaaaaaaaaaaaaaaaaaaaaaaaaaataaaaaaaaaaaaaanaaaaaaaaaaaannaagggcggcnncgcttctagag

SEQ ID NO: 4448 - DNA, 1374 bp, Glycine max
tagatataaacccatcttaactggttaggttattaaagggcccgagccaacttaactcttaggggaggagaaaaacccttagccgccagcattcgttgaactcattcttcttcaactcaacagagcaagggttcgcactcgcagattcttgagcaagaataatggggaagaaaagaaaacacagtgagactactcaagctgtagcacaacccaaaaaggaagaggctgctccagagagaccggctaggacccttttggggtggaaggataagaatcaagttgaggatgattcaccaatatttaggaacaaagagaagctattggtcacttgctctaggcgcatcaattacaggtaccggcatttgatgttgaatttggtcacacttttgcctcattgtaagaaggataacaaagttgaatcaaaggaaactaaaggagccaccctcaacgagcttgttgagctaaaaaattgttcctcttgtttattttttgagtgcaggaagcataaagatctttatctctggatggcaaaatgccccaatggcccatctgtaaagtttctagttagtgccgttcacacaatggaggaattgaagctaacgggaaatcacctacaaggttcgcgtccaattttgacattttcagcaaattttgaaaaagatgcacattggaaactattaaaggagatgttgttacagatatttgaaacaccaaaggaccacagaaaggccaagcctttccatgatcacgtttttgttttctcaatagttgatgaccatatatggttccggaattatcagatctctgctcatcataatgagtcggacaaattacctagaggtggccttgataaaatgacattgattgaggttggtccgcgattctgcttgaacccaattaaaatatttggtggcagttttggaggcccaactttatatgagaatccgctctatgtgtcaccaaatcagattcgagctttggagaaaaagaagaagtctggaaagtttgcaaagaaggtcaaagcaaagacaaggaggaaaatgcacgagatgtccaatcctctggagcctgatgagtttgcagatatgtggaaagattgattttaaatacaaccgcagctaccacataaaagaaaaacccatatttctcctatattatcctcgcattatattccataacattaaagggagacttttgtgattctataatgttattttctgtaatttcatgtggggtctggttattctctcttatcagacattgaacctagtggaaattaaattttgacagaggcttcagttttggatcatgggtttgtttgattgatatgctactagtatattaacaagggattatttcgcctttaattagtcc

SEQ ID NO: 4449 - DNA, 1690 bp, Glycine max
gaggataatttttcaatgaaggttttgaccaaactgaaacagagagggaaaatgccaaaccagatgactcccgaaaatcagtagtgtctagtgaaaacagtgatggtaatgataacgatgggtccattgatgagaagcccgcgtagcgtccgcggccctccccccctggagaacaaggatttaccgctgaacattttctgaactcagatgtgattgacacaaatgcagtggcttcaaaagtccaagataatttttccaatgaaggttttgaccaaactgaaacagagagggaaaatgccaaacctgatgactccagagaatcaatagtgtccagtgaaaacagtgacgggaatgataaggatgggtccgttgatgagaccacattaaagagtacactcgattctgtgcatgaagagcaaggttttatagctgaacatgttcaaatgttagatgttgaaatagatgcagcggcttcaaaagttgaagacaaattttctaatgacggatttgataaagctgaagcacagagggaagatgccaaacttgagagctctagtaaatcaataatttcctgtaaaaacagcaatggtaatgatgaagatggatctggttatgagatcacatctaacagtatgctagattctgtaggtgaagaaaaaagactttctgctgaatactttcagaagtctgatgcaattgacataaatgcagagactacagaagttgaagataaactttccaaagaaggctttgatagagctgtaacacaagagaaagatgataaacctgaggactccaataactcattgtctagtgaagacagcaacagcaacgataaagatgggtccattgatgaggaaaggtcatcaccaattgcacatgctgttaaggttgagcatgacactgacactggaaacaggttgaaggaaaataaaaaccctgaagcatttacagaaggctcacgcatggacggcttggcttgtgagagtaatgaaacgcgtccgggtaaggatgaaggacaagcagatacacacacaatcagttgttcaatgcataaagaagttgacaatgctgtcatggctgataagacaccaaatggcgttccatcaaggacacacatatcaagaggtggtgataatacttgccatcaaagagctgatgctctggaatctctgctcgagttatgtgcacagttacttcagcaaggacagcttgaagagcttgctgctgtgctaagaccatttggagaagatgctgtatctgtatcatccagagaaacagcaatatggcttacaaaaagcctcatggcctcacaaaaacttcatcctgagacatagtttgagaggtgtggtgctcctcattatttatacattattgtaagaaaatggtgtatttccaactgttacatgagtttgttcctttgaaacttttgcttgattgaagattggaagctggaaaataacatccgataaattctttgctggtgagaggtgttttgtaaatggattaaattatatttgaaatggttgaatattcattggtgtttgtgtaagaaatggccattgattgcatgaatattgatatcgtcatagtccccctcccctctcaaacttggaaaaataaggccttgagcttcattatttttttggacttattgtttataaaatatcttaatttggttggcctgatt

SEQ ID NO: 4450 - DNA, 3067 bp, Glycine max
acgcactcgtgccccgcgcaaaatttcagaagctagtgatcaatcatcaacacagagctgagtgtgttgctctgtgaatccaccttcttcttccattggaggaccatttcctcctggaatagaaatactaccacacttttcttttttcacttctctaagttgctaagttaattgctccttcattttttcactcttcgttctcgcgtacccgtgtcacggtaactcgtggtgaagtgttcgaaaatgactgtcacacctaagatctcagttaacgatgggaaacttgttgtccatggtaagaccattctgactggagtgccagacaacgttgtgctgactccaggttctggaaggggtcttgtgactggtgcttttgttggtgccacagcttcacacagcaaaagtctccatgtgtttccaatgggtgttttagaggggctccggttcatgtgttgtttccggttcaagttatggtggatgactcagagaatgggaacttgtgggagggatgttcctctggagactcaattcatgcttattgagagcaaagagagtgaaactgatggggagaattctccaatcatctacactgtcttgcttcctctcctcgaaggtcaattccgagctgttcttcaaggcaatgacaagaacgagatagagatttgcctcgagagtggggataatgcagttgagactgaccaaggccttcacatggtttacatgcatgctgggaccaatccctttgaagtcatcaatcaagctgtcaaggctgtggaaaaacacatgcaaacttttcttcatcgtgagaagaaaaggttgccatcttgtcttgactggtttggatggtgcacatgggatgctttctatactgatgtcacagctgagggtgttgaggaaggcctgaaaagtctatcacagggaggtacacctccacgattcctcatcatagatgatggttggcaacagattgaaaataaagcaaaggatgctactgaatgtttggtacaagaaggagcacagtttgctactaggttgactggtattaaagagaatactaaatttcaaaagaaattacagaacaatgagcagatgtcaggtctgaagcatctagtacatggagcaaagcagcatcacaatgtgaaaaatgtatatgtatggcatgcactagctggttattggggtggagtgaagccagcagcaaccggcatggaacattatgacactgccttggcatatccagtgcagtcaccaggcgtgctaggaaaccaaccagacattgtcatggacagcttggctgtacatggccttggcctagtgcacccaaagaaggttttcaatttctacaacgagctccatgcttacttagcttcttgtggagtagatggagtgaaggttgatgtgcagaacattattgagacccttggtgcgggacatggtggccgagtgtcacttactcgcagctatcatcacgcgcttgaggcttccattgctagcaattttactgataacggatgcattgcgtgtatgtgtcacaacactgatggactttatagtgctaagcagactgctattgtgagagcttctgatgatttttaccctcgtgatcctgcttcccataccatccatatttcttctgttgcatacaactcactattccttggagaattcatgcaacctgactgggacatgtttcatagtttacacccagcagcagattatcatgctgcagctcgtgcaattggtggatgtcctatttatgttagtgacaagccaggcaatcacaattttgatcttcttaagaagctggttctcccggatggttcggttctccgtgctcagttacctggcaggccaactcgtgattctctatttgtggatccagccagagataggactagcttgctcaaaatatggaacctgaacaaatgctctggagttgttggtgtatttaactgccaaggtgctggatggtgcaagatagagaagaaaacccgcatccatgatacatctcctggtacactcaccgcctctgtctgcgcctctgatgttgacctcatcacacaagtagcaggtgctgaatggcttggagatacaattgtttatgcttacagatcaggtgaggtgattcggctaccaaaaggggtttcaattccagtgacactaaaagttctggagtttgagcttttccacttctgtccaatccaagaaatagctccaagtatatcatttgcagcaatagggctactggatatgttcaacactggaggagcagtggagcaggttgagattcataaccgagcagcaacgaaaacaatagctcttagtgtaaggggaagaggcagatttggagtttactcctcccagagaccactgaagtgtgtggtaggtggcgctgaaaccgacttcaactatgactcagagaccgggttgacaaccttctccattccagtttctccagaggagatgtacagatggtcaatagagatccaagtttgagtcctttttaagacttggtgtttgatgcattgttgtatcaggagaagggttttgttgtaattaagcattgagggaattgttggagtcaggcagagagagaggggggaggtttgttgtaagacacctagtattagtatcatgtagtggagaaaaagggttgttgatcctaatagctagacaaggcatgttgtagtagtcatggggtggggaagtccttttgttgtagcatgtaatttggtttagacttgtagtatgtcatcaattagatggataaagagagaatattgttatctacccgaggatgtaacaatgtttgtttctctgaataaaaagttcacatctgtcttttggaataaaaaaaaaaaaaagctgtcttgtttcctgcaatgggaagaatagtaggagaaacgattaattggatcggtgtttctaatgtggctgcaaacttctaaatctcaagggctcttttggcagtatcaagggtgtctaatgttgctggccacttaatcaatttatgtttttgagtactctaggaaattttcggaacaaaattttatttgttagtattatt

SEQ ID NO: 4451 - DNA, 1350 bp, Glycine max
accggtccggaatgcccgggtcgacgcacgcgtccgcattgatatggagttatggaccatagaaattagcacatgctcatcactacgggccttcggcggtcaccgaagcaaaattactgctgaaagaggcacttcaagcagaggttggcttgcctgttgacaggaatatccctctgataggcttcattggtaggcttgaagagcagaaaggttctgatattcttgtggaagctatcccaatgttcattgaccagaatgttcagattatgattcttggaactggcaaaaaggtcatggagaagcaaatagagcaactagaggaaatttatcctgacaaggttagaggggtagcaaaattcaacggtcccttggctcacaagattattgctggagctgactttatagtgatcccaagtagatttgaaccctgtggtctagttcagttgcatgccatgccatatggaacggtgcccattgtttcctccactggtggactcgttgacaccgttcaagaagggtatactggattccacatgggagcattcaacgtagaatgtgaagctgttgatccagttgatgtggaaaagttagcaactactgtaaagagagcccttggaacctatggtaccccagccatgacacaaatgatccagaactgcatggcccaagacttttcatggaagggaccagccaaacaatgggaaaaggtgctgttgagcctagaggttgcaggcagtgagcctggaattgatggtgatgagattgctcctcttgcaaaggaaaacgtcgccaatccttgagcataaccattgataacctgtttttgaatatggtcatcatggtcaagaacgttatctaatacttgccagcatttgattatagacatagccacctacacatagttggatcaacaatttctaacgaaggaatggaactttaatttcaagcaaagcataaagctaacaaacatggaggtttttcatatgcaaggtcttgcaatccgtgaaatttgaagcatcttagtggtaaaatgcagcataagtggcctttcaaaaaaaaaatgcagcataagtgaataaatgtcaatccaattgtatgcttccaaatcataggaaggagcatgcatggcatttttttttttcttatcttattggcattagtctcactctttatgtactctggaaaaagttttaaagatataccccatttcgtgagttcagactagtgcaaatcaaatagttgtatgcaaacatcatcgagatttgacatatatatatatatggatgttgatttccttgcagtttaaaaaaaaaaaaaaaaaaaaaaaaaaaaaaaaagaaaacccccaag

SEQ ID NO: 4452 - DNA, 1215 bp, Glycine max
gacaagttttatatacataaactgaaactcttttattagcacttgtgttaggcttattagtccactcatattttcaggcacttctctcattcaagagtaatggcagaagcaacaaaagggtatgctgtggtcactggagcaaataagggaattggatttgcaatatgcaagcaattggcttctaatgggatcactgtggtgttgacagccagagatgagaagaggggtcttcaagctgtcgagaaactccaagagcttggtctttctggccatgtgggttttcatcaacttgatgttacagaccctgcaggaataagatcacttgcagatttcatcaggaacaaatttggaaaactagatatcttggtaaacaatgctggaattcctggagcacaattggacggggaggctttggctgctgctggcattatggaaaatgctggccgcattgattggagtaaaatagtaactgatacctatgaattagctgaagcaggtgttaaaacaaactactatggagccaaggaattgaccaaagcacttattccccttctccagttttcagactccccaaaaatcgtcaatgtttcctcatccatgggaaggctagagcatataccaaatggatggcctaaagaagtactgagtgatgttgagaaccttacagaagaaaagattgatgacattttgaatgaatttctaaaggattttaaagagggttcactagaaaccaaaggctggcctcttgctatgccggcatatagtgtctcaaaagctgctttgaatgccttcacaaggattctggccaagaattacccctcattctacatcaatgctctttgtcctggctatgtcaaaacagatataaacagcaatactggttttcttacacctgatgaaggtgctgaagctgcagtgcgattggcactgctacctgatggtagtccttcgggtcagtttttctttagaggtgaagagaaaccattttgataatagatatattgttgctaggaaaaaaaaggttaatgaataattcatgaagccatgtttgttgctagagtttcaaaaacttcacattaactcttggtagtcctgttttaaattagtttttcttgtaataaacataacgaattatgtctagacattaatgatgttcatcatgttcaagctagttttactttctatcaaataaatgagcaatgtttaaattaaaaa

SEQ ID NO: 4453 - DNA, 1243 bp, Glycine max
acgcgtccaggaggtagaataattattaaaatcgtttttctttatttctcttattacgccaacgccatgctcattactcgtaaccctgttttgttgaattccacttttgtccccactctcatttcagattcagagcatcgttgcgcatctccacgctctctttgcttctcttctcgcacggacatggatactgctgctggtcaaagtctttacccattacaccgttgcaaaactcttcacctggtaagacatgcccaaggatttcacaatgtagaaggtgagaagaactttgaagcatacaagtcttatgatctttttgatgcaaacctgacccctctcggctggaaacaggttgataatctgagacaacatgttaaggccagtggtctttccaaaagaattgaactagttattgtttcccccttgttaaggactatgcaaacagcagttggagtctttggtgggcaaccatatactgatgggattaatgtacctcccctgatgaatgacaatgtgggagatagtggtcgccctgcaatttccagtctaaatgccccaccatttatagcagtagagctttgccgagaacatttgggggtgcatccttgtgataagagaagaaacatcactgactaccgacatatgtttccagctattgatttttcattgatagaaaatgatgaggacattttgtggaaacctgacattagagagaagaatgaagaagttgctgccaggggactgaaatttttggaatggttgtggacacgtaaagaaaaggagatagctgtcgttacccacagcggttttctgtttcattctctaagtgcttttggaaatgattgtcatccaaacgtgaagaatgaaatctgcacacactttgctaactgtgagctacgttcaatggttatcattgacagaggtatgattggttcagatgagtcctctaccaactatcctggcaaagttccagatggccttgaccttcctagtgacgttgctgaccagaagcatccagagaatgggcaggcaaactgatagtggaattttcttcatttttatgatttcctaattacatttatgataccaactacgattacttttaagcattaattaaatggacatcaatttcatgtgtgaaaaaaaaaaaaaaaaaaatttcttattcaaggttattggcttgtgtagctattaaataaatttctctataaacatatacaggagagaaaaaaaaaaaaaaaaa

SEQ ID NO: 4454 - DNA, 1949 bp, Glycine max
aggctttcgtccgggtatattggatctcgcactttagaaattagcgaaagagagacgtatgggaatggaagaggagagtagcatcatagaaggtggtgcttcgcttccatcgtcgggttcagacgccaagaagcgaagagtgacctacttctacgagcccaccatcggcgattactactacggtcaggggcacccaatgaagccgcaccgaatccgcatggcgcacaacctcatcgtccactactccctccaccgccgcatggagatcaaccgccccttcccggcctcccccgccgacatccgccgcttccactccgacgactacgtcgacttcctctcctccgtctcccccgagaccctcgccgattccgccttctctcgtcacctcaagcgcttcaacgtcggcgaggactgccccgtcttcgacggcctcttccccttctgccaggcctccgccggtggctcccttggcgccgccgtcaaactcaaccgcgctgacgccgacatcgccatcaattgggccggcggcctccatcatgccaagaagtctgaggcctctggattctgctacgtcaacgacattgtcctcggcatcctcgaacttctcaaggctcacaggcgtgtgctgtatgttgacattgatgttcaccatggtgatggtgttgaggaggccttttacaccactgatagagtgatgacagtgtctttccacaagtttggggactttttccctggcacagggcacgtcaaagacattggggtgggctcaggaaagaattatgcagtaaatgtcccattaaatgatggaatggatgatgagagtttccgtagtctgtttcgatccatcattcaaaaagtcatggaggtttatcaacctgaggcagttgttctacaatgtggagctgattcattgtctggtgacagattgggttgcttcaacttgtctgtgagaggtcatgcagattgccttcgttttcttagatcgttcaatgttcctttaatggtcttgggtgggggtggatatacaattcggaatgttgcccgttgttggtgttatgagacagcagtggcagtaggagtggagcctgataataagttgccttataatgaatattatgaatattttggcccagattatactctctatgtcgatccaagcaacatggagaacctaaacacatccaaggatttggaaaaattaaggaacacactactagaacagatttcccgacttccacatgctcccagtgtaccttttcagacaacaccacctaccttgcaacttccggaagaggcggaagagaacatggatagaagaccaaaacttcgcaaatgggatggtgaagattatgattctgatcccgaagaaggtggaaaggataattccaagttctcaaacatcactgcccatatgagggacattgcagatgaaatggaagaagagaagccagaagagcatccatcatcttgtagttgatagaacagagcaagttcttgcacagcatgtttgtattgtaatctttatcgtatactattctgtttatgggggagatcattgctaaatagtacacaaacaacacttgagaatgcaaatataaacaacacattgtgcaaatgtaatatagtgtaaaacattgttttggtctccctcgtaaactatttttgtttatttaagtcattttcttttatttggtccctgacttacacttagtttcgttttagtctcatagtgaatttagtttattttgaatattttcatttgtgcatattttcatttggtcaaatggagacgtcactttaattttggttcatgtatatttcttttacatgtatgatgaggatattaaagaaagtgatgaaggggcaaaatgttgttttcttgttactatttcatttttgaaagattcttatgtataatccaaatattttaattaaattgttagttaatt

SEQ ID NO: 4455 - DNA, 1995 bp, Glycine max
attcggctcgagcggctcgagcggctcgagtaacattttaaagtagataagccttccccgcccactagaaatagagagaaggtaaggagggtttggttttgggtgctttacaaattacaataattagcgaaagagagaagacatagcacatagagtcatagagacatcatcatcgtatgggaatggaagaggagagtagcaacaacagcagcatcatagaaggtggtgcttcgctgccatcaacgggttcagacgccaagaagcgaagagtgacgtacttctacgagcccacgatcggcgattactactacggtcaggggcacccaatgaagccgcaccgaatccgcatggcgcacaacctcatcgtccactactccctccaccgccgcatggagatcaaccgtcccttcccggcctcccccgccgacatccgccgcttccactccgacgactacgtcgactttctctcctccgtctcccccgaggccctcgccgattccgccttctcccgccacctcaagcgcttcaacgtcggcgaggactgccccgtcttcgacggcctcttccccttctgccaggcctccgccggcggctccctcggcgccgccgtcaaactcaaccgcgccgacgccgacatcgccatcaattgggccggcggcctccaccacgccaagaagtccgaggcctctggattctgctacgtcaacgacattgtcctcggtatcctcgaactcctcaaagttcacaggcgcgtgctgtatgttgacattgatgttcaccatggtgatggtgttgaggaggccttttacaccactgatagagtgatgacagtgtctttccataagtttggggactttttccctggcacaggacacgtcaaggacattggggtgggatcaggaaagaattatgcagtcaatgtcccattaaatgacggaatggatgatgagagtttccgtagtctgtttcgaaccatcattcaaaaagtattggaggtctatcaaccagaggcagttgttctacaatgtggagctgattcattgtctggggacaggttgggttgcttcaacttgtctgtgagaggtcatgcagattgccttcgttttcttagatcgttcaatgttcctttaatggtcttgggtgggggtggatatacaattcggaatgttgcccgttgttggtgttatgagacagcagtggcagtaggagtggagcctgataataagttgccttataatgaatattatgaatattttggcccagattatactctctatgtcgatccaagcaacatggagaacctaaacacacccaaggatatggaaaaaataaggaacacactactagaacagatttctcaacttccccatgctcccggtgtaccttttcagacaacaccacctaccttacaacttccggaagaggcagaagaggacatggatagaagacctaaacttcgcaaatgggatggtgaagattatgattctgatcctgatgaaggtggaaaggctaattccaagtttccaaacgtcactgcccatatgagggacattacagatgaaatggaagaagagaaaccagaagtgcatccatcatcttgttgttgatagaacagagcaagttcttgcacagcatgtttgtattgttatctttattccgtttatgggggagatcattactaaacagtaccacatgcagctgttgagaatgcaaatataatcaatacattgtgcaaatgtaatatagtgtaaaacattgttttggtctctctcgtaaactatttttgtttaagtcattttcttttatttggtccctggcttacacttagtttcgttttagtctgtcatggtcaatttagttgattttgaatattctcatttgtgcatactttcatttggtcaaatggatacatcactttaatttggttcttgtatcttttgcctgtatgatgaggatattaaagaaagttaggaaggtgctgaaaactcttctttc

SEQ ID NO: 4456 - DNA, 1728 bp, Glycine max
ggctcgagcttcagctacgtaggcccccccccccattgaagctcaaatgaattaagactaaggaaacaatgaagaattgaagaagaagaagaggaggagttaaaaaacaaccatgtcagaatcaaacgcaattgcaaatggtttagctggtgcaggtggtggaattattgctcaaatcataacttatcctcttcaagcggtaaatacgcgccagcaaactgagagaacactcaagaggaacaagcaaagttttacctccaactcaaccactgctcctggcactcttcttcagatctttcaggtcattggaactgagggttggggtggactctatagtggcctcaagccttctcttcttggaactgctgcttctcagggcatttactactatttctatcaagtttttaagaataaggcagtgaccattgcagctgcgcagaaagtgaaagggcgtggagatggtactgttgggatgtttggttggcttgttgtggctgcaattgctgggtccctgaatgtgttgttcacaaacccaatatgggttttggtgactcggatgcagactcatactcaagcacaaaggaaaatcatggaggaaaagaaagaagctttaaggaaggctgcttctgaaagcaccatagcagactcaacattgcaagacaaattggctgaactgaactctataaaacctcggccatatggaactatacacgcagctaacgaagtctacaatgaagcgggtatagttggattttggaagggagtcatccctgcccttattatggtatgcaatccatcaattcagtttatgatttatgagagctcattaaagcatctaagggaaaaacgagctgctaagaagcaagggaatacaagtatatctgctttggaggtctttttggtgggagcaatagcgaaacttggagctactgtctcaacatatccattactagttgtcaagtcaaggcttcaagcaaaacaggagattggtggaagtagctcattaagatactcaggtacttttgatgcggtacttaaaatgatccgctatgaaggattacctggcttttataaggggatgagcacgaagatagtacaaagtgtttttgcagcttctgttctattcatggttaaggaggagcttgttaaggcttttatggttctggcggataagagcaaaaaagttgtatcaaatataagtagttgactttcttcttttggataaagaaagtaaaacaagtagttgacttctttaccatatcaaagggataacttcctctcggtctacctcttactattggttattcacagattgtggtgagagaattatgaagtcttcaccaaataatggatgaagctaactccagtattccactagtctagatgagccatcctctctggacatatgttatctctttgaagtgctgcagatcactttggaaactgtcacatagttggtgttcaagatccaaggaactgtctaactcttaaaacatgaaagtggcttcctccaacagcagattattcttgttttcagtaactgcagccctttgtgttctgaactttcattactaagtttgccatatatcagtgtatttctgagtttaaaaagcattattttccaaaaaattaaaaacaaaaaatgcattcatatataattctttaataaataaacaaacaaccattatgcttagccattgaattccaaaaaaaaacaaaaaaaaaaaa

SEQ ID NO: 4457 - DNA, 766 bp, Glycine max
cgattgggtaccgggcccccccaccaggctgccacataggcttcgcttacagggaacttcctcgattctcttctcttatctcaatcacaatttctctctcttttctctcttctgaattattgtcatggctaagagctcattcaagatggaacacccacttgagaggaggcaggctgaagcatctcggataagggagaagtatcccgaaagaattccagtaattgttgaaagggcagagaagagtgatgttcctgaaattgataagaaaaagtatctggtccctgctgatttgactgttggccagtttgtgtatgtggtgcggaagagaatcaagctgagtcccgagaaggccatcttcatttttgttaagaatattttgccaccaactgcggcaatgatgtctgcaatttatgaggaaaacaaggatgaagatggatttctatacatgacttacagtggagagaacacatttgggcttgtgttctgaaataatccgtgactggtaaccatctgaatagtacttcctaaaattgaccaatgtgaagaagtcagcttaattgtaaattctctggtttgatgcttttatgtaaagtttattatgtctactggaacttatttgaaaattgtcgtgtttctatcagttctaaattgcataagtttaagggtatgttctttgttcaaaaaaaaaaaaaaaaaactgcatgtccgattggtgtcatacaatttgtagtttacataataaaggaataaaatctcgtctgtgttc

SEQ ID NO: 4458 - DNA, 742 bp, Glycine max
ctcgcgccctctccgcggggaagggagtttcctcatttttcttcttctctgatatcaatcacaatttctctctcttcttcactcttcattctcatttctcttctgaattattgccatggctaagagctcattcaagatggaacacccacttgagaggaggcaggctgaagcatctcgaataagagagaagtatcctgacagaattccagtaattgttgaaagggctgagaagagtgatgttcctgaaattgacaagaaaaagtatcttgtacccgctgatttgactgttggtcagtttgtgtatgtggtgcggaagagaatcaagctgagtcctgagaaggcgatcttcatttttgttaagaatattttaccaccaactgcggcaatgatgtctgcaatttatgaggaaaacaaggatgaagatggctttctatatatgacttacagtggagagaacacatttgggcttgtgttctgaaataatccgtcgtgacaggcaaccatctgaatagaacttcctaaaattgaccaatgttaagaagtcagcttaattgtaaattctctggtttgatgctttttatgtaaagtttattatgtctactggaacttatttgaaaattgtcgtgtttctatcagttctaaattgaataagtttaagggtatgtttgttctttgttcacatcgttgatccttgacttgtatctctcattggtgtcatacaattatattcttacatatattt

SEQ ID NO: 4459 - DNA, 1259 bp, Glycine max
taaagtgggcatctctttgaatttgaaaggactcctgacactaaactaataataggtgtgtctcacagtgagagtttaggataagagaaaagatatgcggcatagttgatagttggttgaagcgtgaaggaagggtccgcgcgccatggctggcatcacaaccttccccttcaaactctctcactgtcctctcttctctacttccgattccaaactcttcggccttcccctctccaatccctattccatcaaattcgacccttcttctctctccagtacctctctcccctacgtcaccgcccgctactacggcggcggcggcggcgcctctccccgctcccccaacgacccccgctcccgcaagtcctccgattctgacgacgacgataaagctctcgacctctccactctcaggtcagataccgtgaggcttattgatcagagccagaatatggttggagtagtgtcaatcgatgacgccattcaaatggctgaagatgtcgaacttgacttggtaatattatccccagatgcagatcctcctgttgttagaataatggattacagcaaatatagatatgaacagcaaaagaagaaaagaggacagcagaagaaaagtgctgctaatcggatggatttgaaggagctcaaaatgggatacaacatagatgaacatgattattcagtgcgtttgaaagctgcacagaaatttttgaaagatggcaacaaggttaaggtcatagtaaacctcaagggtcgtgaaaatgaattccggaatatggctattgcgcttattacacgttttcagaatgatgttggggagcttggaatagaggagacaaaaaacttccgtgacagaaatatcttcataattttggttccaaataaagttgctgtgcagaaaactcaagaaccaccaaagaaaagagacaagtcagctgcagatgaagtctccgttagtgcccaagcataaccgcaaacttccacgctagtttctaattgtagaatggatattgtgagtaacttgtattggtccgagttggaaaattttccgagcattatataattgtataattcatgtgcaataatagcatataaattcacgagaattttaattatagaggcagccttggccttttcaacacaagtttctgaagggatacatcatatatcataaaagaacaatcgcacgtggataatttatgctcattttaatttttgacgttgacagcaatatttgcatacttctatttcaatcc

SEQ ID NO: 4460 - DNA, 813 bp, Glycine max
aaaggagtccagagtttaggataagagatatgcgccagagttgaagcgagaaggaagggtccgcgcgccatggctggcatcaccacctcccccttcaaactctctcactttccgactctcttctcttcttctgattccaaactcttcggccttcccctctccaatccctattccctcaaattcgacccttcttctctctccactacctctctctcctacgtcaaagcccgctactacggcggcggcggcggccctccccgctcccccaacgactcccgcttccgcaagtcctccgattccgacgacgacgataaagctctcgacctctccactctcaggtcagataccgtgaggcttattgatcagagccagaatatggtcggagtagtgtcaattgatgacgccattcaaatggctgaagatgtcgaacttgacttggtaatattatccccagatgcagatcctcctgttgttagaataatggattacagcaaatatagatatgaacagcaaaagaagaaaagaggacagcagaagaaaagtgctgctaatcggatggatttgaaggagctcaaaatgggatacaacatagatgaacatgattattcagtgcgtttgaaagctgcacagaaatttttgaaagatggcaacaaggttaaggtcatagtaaacctcaagggtcgtgaaaatgaattccggaatatggctattgcgcttattacacgttttcagaatgatgttggggagcttggaatagaggagacaaaaaacttccctgacagaaatatcttcataattttggttcccaataaa

SEQ ID NO: 4461 - DNA, 1611 bp, Glycine max
cttacgcgtccgcccacgcgttcgcccacgcgggcgctcacgccaatgccccaccgcaataactcagccacagccacaacacacaaacacaaacccttcgttcctctctcgttcccttcttcaattcgatcaaacacagaatagtacttttttattatgatggccgtggcccgaaaggaaatggaccggatcaagggcccgtggagcccggaggaggacgaggctcttcagaagctcgtggagcggcatgggcccagaaactggtccctcatcagcaggtccattccgggccggtctgggaaatcgtgcaggctccgatggtgcaaccagctgtcgccacaggtcgagcaccgggccttcacgccggaagaggacgagaccataattagggcccatgctcggttcggtaacaagtgggccaccatagcccgcctcctctcgggccgcaccgataacgccatcaagaatcactggaactcaacgcttaaacgcaagtgcgcgtccttcatgaccgccgatgaagccgccgccggcggcttcagcccgaggccgctcaagcgatcgttcagcgccggcacggcggtgcctcctccaggaagcccctcaggatccgacgtgagcgagtccagcgctgctcccggcgtggtctctgtctctgtctctgtctctccttcacaagtgtttcgccccgtgccggttcggccggttgtcgaaacggcgtcgtcgcaagacgacgccgatgccgacgccgaggatgctggacctactacctcgctgtcgctgtctcttcccggggtggagtcatcggaaatctctaatcgcacctcgacggttccggtgatgccggtgcacaccgtggctgcggcggctccggttccgttaccggcgccggaggttggattaggagcgttgaatttgaatgcggagtttatggcggtgatgcatgagatgataaggaaggaggtgaggagttacatggagcagcagaatgggatgatgtgttttcagggtatggaaatgatggaagggtttaggaacgtgtcggtgaagagaattgggattagcagggtggattcgtaattattattattattattattattatgacctaattagtgttttcacaaaatgaggtttatgaagaactatgatcaagggaagagaaaaaaaaaaaaggaagctgttttcctttttttattttatttttagggaataataatattggttagtgtacagtgggaacgggacgagagaagccaagagtagtagcctggaatggaatgatggaaagtgaaatttcatggcaaatttgaaatttctttggcttgtttctgagcctctttggatgatcctgtgcttcaggtttatttagtttggaaaaaaacataaatgaggggttagatgcgaaaaaagaaagagaggggttggatttaaaaatgaatggaatatcctcaaattttcaatattaagttcacattttattttcacatccgcagaagcataatgtagatatttgttttcgctaatagtgtttgggcgcaacaacagaaaggaaaaccagccggtatttggtttgaaagtagtttttgtctgttgttctttcatggatct

SEQ ID NO: 4462 - DNA, 1786 bp, Glycine max
cccacgcgtccgcccacgcgtcaacgctcccccgcaaaataactcaccaacaaccgcaaacacaaacacagacccttcccttccttcctccctccctcattcccttcttcaatttcatcaacacaaccatcaatttcatcaaccatcgcataataatagtattatcatgatagccgtggcccgaaaggacatggaccggatcaagggcccgtggagcccggaggaggacgaggcccttcagaagcttgtggagcggcacgggcccagaaactggtcgctcatcagcaggtccattccgggccggtctgggaagtcatgcaggcttcggtggtgcaaccagctgtcgccccaggtcgagcaccgggccttcacaccggaagaggacgagaccattattcgggcccatgcccggtttggtaacaagtgggccaccattgcgcgcctcctctcgggccgcaccgataacgccatcaagaatcactggaactcaaccctaaaacgcaagtgcgcgtccttcatgatggcgggtgatgaagccgtcgccgtgagtccgaggccgctcaagcgatccttcagcgccggcgcggcggtgcctcctcccggaagcccctccggatccgatttcagcgagtccagcgctcccggcgtggtctcggtctctccttcgcacgtgtttcgccccgtgccggttcggccgattgttgaaacggcgtcgtcgcaagacgatgccgacgatgccggacccgcgacttcgctgtcgctgtctcttcccggtgtggagtcggcggaaatttcaaatcgcgcaactacggtgccggtgatgccggtgaataccgttgcggctccggcaccggttccggcggaggttggattgggagcgttgaatttgagtggagagtttatggcggtgatgcatgagatgataaggaaggaggtgaggagttacatggagcagcagaagaatgggatgatgtgttttcagggtatggaaatgatggaagggtttaggaacgtgtcggtgaagcgaattgggattagcagggtggattcgtaattattatgacctatttagtgttttcacaaaatgaggtttattaagaacttcgatcaagggagggaagagagaaaaaaaaaaaagaaggaagctgttttcctttttaatttttatttttagggaataataatattggatagtgtacagtgggaacgagacgagagaagacaagagtagtagcatggaatggaatgatggaaagtgaaatttcatggcaaatttgaaatttctttggcttgtgttctgaacctctttggattatcctgtgcttcagggtctatttagtttggaaaagacataaaaatgaggggttagatggagaaaaaggaaagggtaggatttaaaaaattgaatgaaatatcctcaaattttcaatattgagttcattttactttcatatctgcagaagcatgatgtaaatatttgttttcgttcaaatccaaaattagcaaatagtgttttagtgcagcaacagaaaggaaaaccggtgcttcgtttgaaagtagtttttgtctgttatccttttatggatctgaaagcagttagttaatcagtttactgcataatcttgcaccggattttttgcaacctaaaaattggggttaagctctcctggagtgttttagccttttaggaatcagttgagaccgtttatccagatattttgaatatttgaacctcccttcgacacacgtggtgaataaaacttataaattaaaattatattatttg

SEQ ID NO: 4463 - DNA, 1666 bp, Glycine max
  misc_feature (9)..(9): n is a, c, g, or t
tcgagtagntacgtagggccccccccccaactccaaagttttcaaactcataacaacaactccttctgttcacaaactcatcttcaattccttttctgatctacgcaaggttaaggttaattttatctatctacttggacatgaacgaaatcgatgttccttcgttctttctctgccccatttcgctagatatcatgaaggatccagtgacggtctcaacgggcatcacctacgaccgtgaaagcatcgaaacctggctgttctcgaagaaaaacacgacatgccccattaccaaactgcccttgatagattacaccgatctcacaccaaaccacacccttcgtagactcatccaagcgtggtgttccatgaacgcttctcacggcatcgaaaggatcccaacccctaaaccccccgttaacaagaaccaaatttcgaagcttctcaaagacgcttctcattcccctctcacatgcctcagaagactcaaatccatctcttccggaagcgaaacaaataagcggtgcatggaggcttctggcgctgttgagtttctagcatcaattgtaatcaacaccaaccgcaacattgattcttcacatgaggctgactcaaacgacggatctggattcgagttgaaaacaagtgcatgcgatgaagcgttgagtttgcttcataatcttcatttatccgaacaagggttgaagactctcttaagcttcagaaacggcgagtttattgagtctttaacaagagtcatgcaaaaggggttctttgaatcacgcgcttatgctgtgttcttgttgaaatctatttccgaagtggctgaaccagtgcaactattgcatctaagacaagaactttttgtcgaactggtacaagtcctgaaggatcaaatttcacagaagacatcaaaggcgacccttcaaaccctgatccaattctctccttgggggaggaacaggatcagagctgtggaagcagctgctgttcctgttttgattgagcttcttctcgattgcaaggagagaaagccttgtgagatgatgctggtgttgttggagctgctatgccagtgtgctgagggaagagcagaacttttgagccatgcagcaggtcttgccattgtgtccaaaaagattctaagggtttcgactttggcgaatgatagagctgttaagattattctgtctctttcgaggttctctgcgactccacatgttgttcaagaaatgctgaaactcggtgtggtcgcgaaattgtgcttggtgcttcaggtggatagtggaaacagggctaaggaaaaagctagagagatactcaaattgcatgctcgggcgtggaggaattctccatgcataccgaacaatttgcttaattcatacccgaattatgtgtgaaacaaaacgagaattttgaatggtgcctcttttagaaattttaatgtacagaattatttggaaaggatacagttaggtgtaagttataaatatgaggtgcaactaagcattgattgccccacaaaaaaagtataggtgggtagtgagattcaggttttgatttgtatttcctgacaattgtgtaatggatttttgttttgctataagctgacacagaaatgagaagaagaaagggttaatcaatcacgaaaaaaaaaaaaaaaaaa

SEQ ID NO: 4464 - DNA, 722 bp, Glycine max
gggagcatttattttcaaggttcaaactttatgaaaaataaaaaagggaggacggcaaattcaattgccttcaaaacccctggcaggcagtttcttccatctgagatgctttctaacatgatagagaaggccggagagcaaatgttcgctaggtacctagaatggcttcgggatcatcatatgttaggaaagtcctctgtacccagaattgattattctgaccagtgacttccctacgttattttcttggatacaatttaagtcaataagtctggtgatttttatgttattttattttataaaaattaatttttttatctcgataattaatattaatatttattatcggctcttattgtattgattatcgagatacaattttaatttttattaaaaaaataacactaaaaacactaagtcgtgtcttatttttgttgtgttttccctatttagttgacttttgcttctgctatgtttccatgaatgctagctttggcaagaaccaagaagtatcttccttctaatcctcttctattgtatcattattactgggatagtaggttgtttctccactccctgggtggagatcgtagatgtaggttgttgttgtaataaatatgcatggtgtgttgtaccaaaaacaaagtaagatgcttctgtacgttctgttgctttaaattcattgaaataaattaaagtggggtttagttccaaaaaaaata

SEQ ID NO: 4465 - DNA, 1241 bp, Glycine max
gctgtcacgcgtgcgcgcacgcgtccgcgaaggggtatagattgtgggagaaaaaccgatgcctcatcaatctccaaagagggagctatccccagatggcgtcgagtataattcacccaacaagaggccaaggaccaacacttaccaaccacaacaagaggccaaggtcaagaagaagaagaaccctttcaaaaagttcgtcacagaaaaaatagtagccgctaagacaatgggtgtaggggtttctggttcttctcccgcacatacatcgtcaagtaataatttagttccagggactacccccgaatccacgccaaaaaatgacaatcaaaaaacgtctcacgaatccaccacatcaaccgttaattcagtgggaaaatcaggagctagtgctggagaagtcaccgatgcaccagatgatccacaaactcctattcagacaactggtagtcgtcaattacaaacgacgccactctccattaagtcaagcactggtagcataccacacgttgattcacctggtaaaagtacgagactacaactgtttgaggcagagtcaggcgtcaaaatggatcttaggttgggctatggagattatgttgtgtcaatccagaagaggagcattatttcaagttcaacttatgaggaatagaaaggaagacgccaatcaattgcctcaaaaccctggcatgcagtttcttccatctgagatgctttctaacatgatagagaaggccggagagcaaatgttcgctaggtacctagaatggcttcgggatcatcatatgttaggaaagtcctctgtacccagaattgattattctgaccagtgacttccctacgttattttcttggatacaatttaagtcaataagtctggtgatttttatgttattttattttataaaaattaatttttttatctcgataattaatattaatatttattatcggctcttattgtattgattatcgagatacaattttaatttttattaaaaaaataacactaaaaacactaagtcgtgtcttatttttgttgtgttttccctatttagttgacttttgcttctgctatgtttccatgaatgctagctttggcaagaaccaagaagtatcttccttctaatcctcttctattgtatcattattactgggatagtaggttgtttctccactccctgggtggagatcgtagatgtaggttgttgttgtaataaatatgcatggtgtgttgtacc

SEQ ID NO: 4466 - DNA, 1639 bp, Glycine max
gaaggaaatatcgggctatttgcacagttctattctgccttccctccccccccccccccccccccgtggtgccaagccgataggttaagttgggcagttgactaaaagtcataaaaactgtaacatttcaaaaatccacaaaattacctcaactaattctagatcaaaaataatccacaatctgtaatattgctaacaagattttcagcgctcaagttcactagaatgctatcatttcccgcagagaaaacagtctttgtttttttggagttaccacctgtttttagggggtttcactttataaatacgaactatccaattctgtgtagtgaacgcctcttccaagtactcaagctttatgtccttatttccaatttcaacacctctagcacgatcatacccaggtggtttgccatattctgttgtcagctccccaaaccgataataggacagcttgtacataagacagttcaacatctttggagctgctcctttatctacacgatactctccattgacaaggtaatcaggctcctttatcacaggaaaaactccaccaccaattctcaccatccagagaaatttgttaatatcatcagaagaataaccagtaacaccaccaaacacgactaatacatagtcaacatcaagtgatctcattatctcataagcctcatcctcataggatgacattgctcgcccaacagtggctatgtgtgtgttattccaggtgttattgtcaacaataactgttctgtttcccatggcagtgatttgataaccataatcccaccatgacatcaccttcgcatctggtggagtgttctggcgaagccaaaagtaagcttcacgataatcatcaaagatgaccctgttgccatgggcacccctcgcagccaagacaattgagggagatgagtaagcctctgatgtgacccatgtgcagtgaatggcatatctactgagcaaatagaaagcaccaaggagtaacacaatagcaccattcttttggaaaggctgggagttgtcaactacacccttggcagaactttttgcagagctagttccttttgtagatccactttgaacagcttggcttttggccctcactacccgagccaaattcttcacagtggcagaaaccgctatagcactaatgaggcacacagcaggggtagccacaagaatcaaccgaaccataaccccagcaaaatacatgcttgtaagaccatacattactaaaaagattgtggcatcagacaaacgcttgaagcaaaaatagaggccagcagggaaaaggaatagcaagatatggaaatcaaacatgaaggatgaccaagcagttggctgatgctcagagacagatgcaataatcggaatgtgatccttagcataggttggatcaagcaaggagtaaaacctcccagtccacggagatatataaccagatgctgtgcccactcccaaagcaacagcaccaacagcaaccgcactagtcacagttatcctcaaaagggccggggcctacgtggcggcactaagcaaatgcttcacccaatccaagaagaaaaacacctgaagcaagaaaaacacgcccatggcggccatgtgttcgccggactgaacatgctggaaccga

SEQ ID NO: 4467 - DNA, 680 bp, Glycine max
cccgcccccaaaagcaatatttttttattaattctcttgttcccttcatacaacgagccgagtgatatcaaataacccaaaatttatttgaaggaaatatcgggctatttgcacagttctattctggctatcttgtataatttgggccagacaagtggtgccaagccgataggttaagttgggcagttgactaaaagtcataaaaactgtaacatttcaaaaatccacaaaattacctcaactaattctagatcaaaaataatccacaatctgtaatattgctaacaagattttcagcgctcaagttcactagaatgctatcatttcccgcagagaaaacagtctttgtttttttggagttaccacctgtttttagggggtttcactttataaatacgaactatccaattctgtgtagtgaacgcctcttccaagtactcaagctttatgtccttatttcccatttcaacacctctagcacgatcatacccaggtggtttgccatattctgttgtcagctccccaaaccgataataggacagcttgtacataagacagttcaacatctttggagctgctcctttatctacacgatactctccattgacaaggtaatcaggctcctttatcacaggaaaaactccaccaccaattctcaccatccagagaaatttgttaat

SEQ ID NO: 4468 - DNA, 1094 bp, Glycine max
gcgagaagacgacagaagagcaacgagcagtggctaacaccggaatctgcaaactgagaagtcccatcattctttttccacacttccatcgttaatcattttcccgcaaaatatttttctttctctgtgttgtggcttctccttcaccgttcattctaaaatctcagccgctgatcagattaggcctccgtgttgatcttgatcgccgctcatggaggtccgttccaaccccgccgcagacaattcctccgaccaccgtcgaccgcccgccgtttcgtccatgcagccgctgccttctcctaaccccgtcgacacctccgctgtttctcagagactccaaaaggaattaatgactctcatgatgagtggaggagatcttggggtatcggcttttcctgatggggagagtatttttacatggattggcacaattgaaggtggaaaagggactctgtatgagggtttatcttataagctctccttacgttttcccctagactatccttttaaggccccccaagtgaagtttgagacaatgtgctttcatccaaatattgaccagtttggcaacatttgtctggacatccttcaggacaagtggtcttcagcttatgattgcagaactattcttctgtctattcaaagtttactggaagagcctaacctggagagtcctctaaacagctatgctgcagcactttggaatgacaaggaagattacaggagaatggttcacaaacagtattttgctcgagaagctcttgaaagctgattgataaaattccaaagcgagatcaattagtttccacgtcatagttgtaaacgtttgcctgaagaaaaagtctgcaccttataaatgtccttttttttttccttgctttgatattgtaacctgaaactacgagagttctaagtcctcttaaaagtcttttaattactttctgtatagtagtaaaagttttcattgcaaaatagccaaatgacgcaatgacatctttgtgatattttttgcttcggatgcacgatgcttacaactgtatattcatgttacgtaatatctgtccctttgaaccctgatgcttggcttcctacta

SEQ ID NO: 4469 - DNA, 1194 bp, Glycine max
ggaaagtatgagcacgtaaaaattaaaagtgataaataattgtgataatgaaacagttagaagcaacgagcagcggctaacaccggaatctgcaaactcaaaagttccatctcttcttccacacatccatcgttaatcattttcccgcaaaatattttctttctctgttctgtgccttcttctccaccgttggttcaaaaatctcagccgttgatcagattgagcctccgtgttgatcttcatcgccatcatggaggtccgttccaatcccgccgccgacaactcctccgaccaccttcgaccgcccgccgtttcgtccaagcagccgctgccttctcctaccgccgtcgacacctccgccgtttctcagagactccagaaggaattaatggctctcatgatgagtggaggagatctcggggtgtcggcttttcctgatggagagagtatttttacatggattggcacaattgaaggtggaaaagggactcagtatgagggtttatcttataaactctccttacgttttcccctagactatccttttaagcccccccaagtgaagtttgagacaatgtgctttcatccaaatgttgaccagtttggcaacatttgtctggacattcttcaggacaagtggtcttcagcttatgattgcagaactattcttctgtctattcaaagtttattggaagagcctaacctggagagtcctctaaacagctatgctgcagcactttggaatgataaggaagattataggagaatggttcacaaacagtatttttctggagaggctcttgaaagctgattggacacaaattccaaagcaattagtttccacgtcatatttgcctgaagaaaaagtctgcaccctataaatgtctttttttgtgtgtgtgtgatttgatattgtaacctgaaactacgagaactcggaagtcctctaaaagtcttttaattactttgtgtatagaagtaaaagttttcattgcaaaaatgccaaatgacgcaatgacatctttgtgatattttttgcttcggatgcacgatgcttacaattgtatattcatgttacgtaatatttgtcactttgaagccgatgcttggattctttactacatggtcatcctaatttctaagtgcctcaaaattcattcaaaaaaaaaaaaaaaaaactcgagactagttctc

SEQ ID NO: 4470 - DNA, 1896 bp, Glycine max
gatacatgcatggtaaaacactggtgaaacatgtgattttcaggttcttgtgtatagaagaatatctgtttgtagaaacagttccttacttccttaactagatattagtctctaattttttggctatcccgggttcaattacacctgaaacaaacaacaacaacaacaacagaaataaagcacaatggactaccttcttcttcttccactaatcaccatagtgtggataagcattcatgtactcatctctagcttcaaaccactcaaatcttctaaaaatcccccggggcctcacccttttccaatcataggaaacatattggagcttggcaaccagcctcaccaagcacttgccaaactttctcaaatttatggtcctataatgagtcttaagctcggtaacactaccaccatagtcatttcctctccacaagttgccaaagaagtactgcaaaaaaatgatcaaatcttagctaatagaatggtcccagattgtgttcgagcacttgaccatcacatactttcggttgcatggatgccacctttaccacaatggagggcccttaggagagcttgtgccaccaaagtgttctcttctcagcagctcaatttcacacaagttcttcgccagaggaagatgcaagatttgatggattatgtgaaggaacgatgcgagagaggtgaagctatggatattggtgaggcttcctttacaactgttcttaattccatatcaaacactttcttctcaatggatttggcttattacacttctgataagtctcaagagtttaaggacatcatttggggtatcatggaagaagctgggaggcctaatgttgtggacttcttcccaatctttcgcctgcttgatccacaaggtgcgcggagaagaatgagtggttattttcgaaagttaattgcgttttttgatggtctcgtagaagaaagattgcgtttaagggcattagagaatgggtccagggaatgcaatgatgtgttagattctttgctggagctaatgcttgaagacaattcgcaagtgacccgccctcatgttctgcatttgtttctagatttatttgtggctggaatagacacaacatcaagcacgatagaatgggtaatggctgagttgctacgtaaccctgaaaaactagaaaaagttaggcaagagcttcaacaagtccttgccaaaggtgaacaactagaagaatcacatatctcgaaccttccttacctacaagcagtggtgaaagaaacttttcgcttgcatccacccaccccaatgttactgccacacaagtcagaagtcgatattgaactatgtggcttcatggtgcctaaaagtgcccaaattctagtgaatctatgggccacaggaagagattcaagtatttggacaaacccagatgaatttacacctgaaagattcctggaaagtgacattgattttaaaggccatgattttgagctaataccctttggagctggaagaaggatttgtcctgggttgccattagcatctagaactctgcatgttgtgttggcatctcttctatacaactatgattggaagctcacggatggacaaaagccagaagacatggatgtatctgagaaatatggaattaccttgcataaggcacaacctctactagttattcccatccaagcataataccaaggaagattacatacctgtaatcaaattgttgcaaatttcttggtatgtgactttttcctacgaataaaaaaaatatcaataaaacttcattagcatgcaaataaaacttttattcattagcatgcaaatgtaattggatcataattagtgagtgagtaaaaattttgtaattttttccccttcaaaaaaagaaaaaaaaaaaaaaaaaa

SEQ ID NO: 4471 - DNA, 921 bp, Glycine max
gcctttactttcaacattatcgagatattcttcttcttcttcagggactcaccatttttcttctccttcaattcttcaccatggatcgtgtcagccataggggttcacggtttcttctcgatgcgtctccgctgttagagttggagttccaacctaccatggatcctgtcatcaattgggtttcaaactttcttcacagtcttcagcattgcatggatcctgtcatcaactgggttttaaactttcttcacagtcttcagcattgcatggatcctgtcatcaactggctcatgtccctgataagttgcttagcgacaaagattaatcaaatacttgaaaaattcactgggcatcaatttaacgttaagactgacgcttgtgatgaaatttcattgggtggagaatggttgttgtatgttgctattgcagttgttgtagcactggcagctattcctgttgtctggttgctttggaaggtggtttttggtgttgtttggttgctttggaagctgatttctggtgttgttttgttgctatggaacgtgatttctatttttgtattgggtctttggaacgtgataaggaagattttctgttgttgttgtgaaagagggaagacaatgaaggctccagggaggaatattcgcatttatagagatgattttgaacgtagccctaagaactacttccgtaacttgcgcagagaccaacgtaactggcgcaataatcaacctcatacgattttggtttgaaatctcaaacgtgtaaatccatgtcaaactagaagcacctttcagttgcttctggtgaaactcatgaaaaaatgaacgtcgtgctgttttattatattaaaaaaaaaaagtgtttgtgtatatggtgcatgtttgacgtgatttcggtagatatggtttgaacaaatgg

SEQ ID NO: 4472 - DNA, 687 bp, Glycine max
  misc_feature (670)..(670): n is a, c, g, or t
gaaaaaaactccatcaataaaagaaaaagaaaagcacgttaaagattgtaataatttgtaaaaactatggctagcgatggcagcgaagagtttaggctagtgtcaccggcgttcagcaacgaggggaagttacctcggaactacactgacgagggccagggtgcgaaaaagaacatatcccctccgttggagtggtacaacctgccggaggggaccaagaccctcgccctcgtcgtggaggatatcgatggatccgattcagatgggcccatcatgccatggacccactgggtcgtcgcaaacatcccggccacggtgaagggcctgccggagggattctccggcaaggctgccgagatgggcggggattacgcgacgatcaaggaggggaacaatgacctgaagaagaccggttggaatgggcccaggctgcccacgcctggccacaggattcagtttaggctctatgctttggatgatgagctcaagcttggtaataaggtgacgaaggagaagttgttggaagaaaccattgaaggacatgtgctaggagaagcgaccttgatggctatattctgatgtaacaacatattatgggtgcaatgtctttgactttatacatgtaccattttggaatgtgacatcatcgagataaacattttaccaaatntaaaaaaaaaaaaaaaa

SEQ ID NO: 4473 - DNA, 1405 bp, Glycine max
attagccacaacaaagatcacaacaattgttcgagaacattatataagccccccgagaagacgacacaagggcaggatcacagtaggagataaggagagcattcaccattttcttgtggtttggtttcctagagacactaagtactcccatggaacaaaacaacaaaagccttgtttcttctaaattcttatgtttatgtttgttgatcaccttgatcagcattattgttgctccacaagcggaagcagcacgagcatttttcgtgtttggcgattcgcttgtagacaacgggaacaacaatttcttggccaccacggcgcgtgccgattcatatccttatggcattgattctgcatctcatagagcctctggtcgtttctccaatggcctcaacatgcctgaccttatcagtgagaaaattggctcagaacccacattaccatatttgagtccacagctcaatggtgaaaggctgcttgttggtgcaaactttgcttctgctgggataggaattctcaacgacactggaattcagtttataaacataatccgaattacagaacaattggcatacttcaaacagtatcagcagagggtgagtgcactaattggagaagagcagactcgaaatttagtgaacaaagcattggtgctcataaccttaggtggcaatgattttgtcaacaactattatttggttcctttctctgccagatcccgcgaatatgctcttccagactacgttgtcttcctcatttcggagtatcgtaaaattcttgcgaatctgtatgaattgggggcacgaagggttctagtgacaggcacgggaccactgggttgcgtgccagcagaattggctatgcacagccaaaacggagaatgtgcgactgagctgcaacgagccgttaacctgttcaatcctcaactcgtccaactactgcacgaacttaacactcaaattggctccgatgtcttcatttccgcaaacgccttcaccatgcatttggatttcgttagtaacccacaagcctatgggtttgtcacgtcaaaagtagcatgctgtggtcaaggagcatacaatggaatcggactctgcactccagcttcaaacttgtgcccaaacagggatttatatgcattttgggaccccttccatccatcagagagagcaaatagattgatcgtggataaattcatgactggatccaccgaatacatgcaccctatgaaccttagtacaattattgctttagattctacaacctaatgcaccattactgtatgagttgtcttcttttcttgtctatgcacacctagttcctacaagatattgtatttttcttgaatgtttaaaactatgacgttaattacttaagtatttttttttttttaaaaaaaacaaaa

SEQ ID NO: 4474 - DNA, 1578 bp, Glycine max
agctactaggccccccccccccagctactaggcccccccccccccccattattagagactgaaataacaaaaggcaatggatctcagagagggtcaaactcaaccaatcttggatcctaaccaaccatctcatgtgtatcatctggctttggatattggaggatctctcgccaagttagtatacttcacaaaagatgatgatcatttggttgatggcgaggaagggatatctcatagaaaggctttggagaaatccgacagcagtaagcaatatcctgttcttaatgggaagctcaattttaagaagtttgaaacaagcaggataaatgattgcatagagtttatcaagtccatgaaacttcatattggaggtagtcagccacaagaaaatcctggaagtcagccaatagctattaaggccacaggtggtggtgcatacaaatatccagaccttttcaaggaaagactaggaatcattcttgacaaggaagatgaaatggattgtcttgttgcaggagcaaattttcttcttgaggtggtccaccaggaagcatttacctacatgggtgatcaaaagcaatttgtacagattgacccgaatgatctgtatccctatcttcttgttaatattgggtctggtgttggcatgattaaggtggaaggagagggaaaatttgagcgagttagtggaacaagtataggcggaggcactttctggggtttaggaaagcttttaaccaagtgcaagagttttgatgagctgctggaattaagttatcgggggaacaatagagcggtagatatgcttgttggagatatttatggtggaatggactattctaagataggtctttcatccactgcaatagcctctagttttggaaaggcaatttctgataataaggagcgtggagactacaaacctgaagatattgctcgatctcttctaagaatgatctcaaataatattggacagatctcttacttgaatgcccttcgctttgggctgaagaggattttttttggtggattttttattcggaggcatccttttactatggacacattatctgttgctgttaatttctggtctaaaggtgaggctaaggcaatgtttttgcggcatgaagggtttctaggaggtgtaggcgctttcatgagttctgacaaacatggcctcaaggaattattggccaatcaagtggtgcaaagaagtcccagcaagttatcctttgccgtggataaaacattgcatggttcaccagatggagagtttaatggagatgaaagtatagagtgcagtgtatatgcagcttagatgaagcaatttttcgttgctttcatgacttgtagttgtaacttctatagttttgattctgtataatggttggaagtaagaattataactagtgattattggctttagaatgcaaaagggaaaattagagcgactactcaagtgattgttattgtttcacagtttcacccaatgaattgtgttgtataacaactaatgatttgtatgaatacataaggtgcagccatgttactcatttagtgaaaaaaaaaaaaaaaaaa

SEQ ID NO: 4475 - DNA, 551 bp, Glycine max
atcatatcatatattcatattcatctccccacgagattctggttctgtttaggccacccacacacctccatttccccaactcgctccgagttgactcactcctttccctttcgagatcaaccgccaccgctacgcctccgcgctccgccgccactgcaacccccgcctcccttctccgtcaatgcaaaattcggcgtcgattctcgccggaaccttctcccgctcttccttcccctccgggctttgacttttgctttcttgcgattgcgatgagtccctttcgccctttgttgctcttcgccgccgtattcttcctcctccgtcccctcgccgccaccgacggcgacgccgatccgctttacataggttgtgtggagcagtgtaagaaaactggatgtgtaggggatagatgctttcaacattgtaaattttcatcagatggaaaaccaattgatggtccatggtatatgcatgaacccctctatctgaggtggaaacaatgggactgttgcactgactgtaggtattactgtatgctagctagagaggaa

SEQ ID NO: 4476 - DNA, 1542 bp, Glycine max
gaagaaggaaaggatgggatgcaagattccccaccacacgaattaacgatggcgtcttcaatcgaaaagctcctagaaagtggtcgtcccttccttcgcggtgatctggagtccatcgacaagaacttacctcggctggttggcgtcctgcagagtgtgggtgccggggagtgctggcacaaacacggcagcttccttcaccacctcgtcgacatatttcgcattctcaagctctggaaagcccctcactctgtctgcctctgtggcctcttccactcagcctactccaattcttacgttaacctcgccatcttcgacccttcaaccggtcgagaagtggttcgtgcactcgttggcgaggaagctgagagtctgattcacttgttctgcatagttcccaggcagcctctcatccacgacgatctgctcttccactactctgatgaggagcttgtccaacaccttgctcagtccgagatatctctcaggaacgcaaagaagatggagaagggcctctttgatgacgatggggaattagaaggatggagaaagaaactgcagggtcttgttcctgccgagggggtacaagttaagcacattcgcacgggtgaaggagtgcacgtttctaggaggatagtggcagttttcatcatgatgaccatggcagatttctgcgaccagttatttggttttcaagatttgctatttgataatgctaatggccgccttgagttttccgggaacaattttggggctctttggccgggagatggtaagccgggtctgtggttgaattcaatttccaggatgggagcagtgtacactttgattgcgagagaggaagagattttcattcaagagagaaaaaggaaggtgggagtagcagttgtgcctgatctcgagagaaatgaagatattgagttggtattgccaccggtgttcgattactgtagaaaggttttggaggcgggagatcaaatagttgcgagggatttgtactgggaagctgtttgtgagggtggtagcaaggcggaagagttgttgctggagtctatagagaaaaacccgtttgttggagagccatatgtggtgctgagtcaggtttatttgacagaggggagatttgaggaggctgagaagcacgcagagagaggactgaagcttctgctggaatggggatgtccgtgggacaagaggacttcttgggaaggctgggtggcctggactagggtcttgctcatgagggcaaaggacaaatcttggcctcagacttcatggggcatcctcaatttgggtcttgtaaactaataatgccttatcatctacttaatgccatccatcccccgatcatataatattctactaaataagccataagtacaaggttagtgcatcagaaaaaggctttcaacggtgttatatctttctagctagtactatattttttctctttttaatatcttgtgctgcgtgagaaaagccttttattgttgctatagcggtcttatattctatttttggtaaaaaaaaaaaaaaaaaatt

SEQ ID NO: 4477 - DNA, 2102 bp, Glycine max
caaactcagaaaaaaaaagagggtagaacctgtcaagaaccctgatgcacgtgctcaaccccctcagcctcagccttgttatgcgcctcgtgcaggccccccgggcccccccccaactccaattgatcagagaagaagaaaacaaaaaagcaagagagaaaaagaaacaataataatatgctcagaagaggtggagaaccaagggagcccattgcatatggacataaccctcaaccaggccccagaccaggtccaacaagaccaagcaaccccaataagcctacaaccagcatccttgatggaccaaacaatcctggtggatccagcaaccccaatagacctagaactgacgatgaagaagataaagaagaagcaaaggaagaagacaacttctacagagctgccagaaatctcaattcagacatctacatgccttatagaagcatccccaatagacccagcaattccaatggacccttgccttgcaatctcaacaggccctgaacaggagatgtcaaagaaaaagaagaaaaggaagagtaagcttgaaagtgaagcggcagaactcaatgaacactacaagctgcctgaagctgctccgcctgaggcccctgttcagaaatctatataccatacagatgcaccctcaatcgacccagtgggcccatctccccctgttgacacagaaaccccaatagaccaaggtcagcagatgaccaagaaaaagaggaagaagaaaaagaggattgtgatcataattgaagggacagaaaccaatgaacacggtgtcaagccacctgaaaccctagttcaaaaatttgcatatcctacagtaacaacctcaatagacccaacaatcccagtcccagctcccccaatagatcaaggtcagaagatgaggaagaaaatgagaaagagaagtgcccttataagcaaaggagcagaacctgatgaacatgatgacaagccacctggaaccccagttcaaagatctatacatcctatagcagaaccctcaatagacccaacaattccagcaagccaaactcctccagtagacccagcaaccccagtagaccctgaaccgatgaccaagaaaaagaggaagaagaaaaggaacagtgcaaaaaatgaagggttagaatctgagaaacacaatgctgatcgaattgcagaaaccccagttcaaaaaactgaaggatccacaactgaaaattctatgggcagatgcaatgttgagccagctggtaaaaccctggttcagattactgacactctcagagtgactaaatccccctttaaacatcatggtgaaagttccttgagatgccgggcatgccgacagcctggtcatagattccaacaatgccagcggctgaaatgtctttccatggatgaggaagtttgcttcttttgtggggaaattggacattcccttggaaaatgcgatgtgtctcaagcagggggaggaaggtttgctaagtgcttactctgttatggacatggacacttcagctataactgtcctcaaaatggtcatggaattgatccaaaggtgcttgcagtcaatggggctatcaatagaacagcagtggaagctcgaagagagctcttgccgaggtttaatatgtgagcagggatggtctttcggatcactccaagtcaatttacacaagtactcgtgctcatgtatatagttctggatctcggttccttagcggcctaagttttgatgattttatatcatgtctggtagcatggtgcccaattttttttttttttttatttcaagttctcttatgtaacataaacggtaatattatttcagaccttgttgggtttttgaatccattttgtatttcttttctacgtggggactagttgggataatgcctcagtctactccttgcagaagttagaattaagatagtggagtagtaagttcaacacgggaattggcccccaaatttctgaattcagttgatgataatagttgagacaatttggtcgcagtccctcggaatatagaatggattgcctgagtaatgatgtatgaactttatttacgattttttttatcattatttttaaggtaggcggtc

SEQ ID NO: 4478 - DNA, 1411 bp, Glycine max
tcagctacgtaggccccccccccggtgagtgtgtcttttggattcgatcacttcgacatctcccattgacgacgcgcttgccctagcagcagcttctctcctctgccgtttgccgtgctccgcgctcctcgtccgtttgtgcctgagctcccgtccatgccgcccatgtaacttccgttaccactcacaaaggcagataacgtggttggccaatttcataaacttcaaaaacctccacctcaggctcaactatctgactcaacttcagagggatcacatcgtgagcttccttcgcttaacattgttcgtagtgcttttgttaaggtcatggatgttccactgccactggataaattggctttagatttgattgataatgagccctcccctgcaaacatgagcaacagcaggatatatgtaattctggtggcaactggaagctttaatccacctactttcatgcatttacgcatgtttgagcttgcaagagatgcattgaattcagatggctactgtgtaattggaggttacttgtctcctgtgaatgatgcatacaagaaaaagggcctaatatctgctgaacatcgaatacaattatgtcatttcgcctgcaaaagttcagattttataatggttgatccatgggaggcaagtcagagcacatatcaacgcactttaactgttctctccagagtccacaattcagtttgtgagacagggttggtatctcaagaatccctcaaggtcatgcttctttgtggttctgatctccttcattcttttagcattcctggattctggattcctgaccaggttaaaactatatgcaaagattatggagtagtctgcattcccagggaaggacaagatgttgagaagactatatttaaagatgacattctgaatgagaataaggataatatcaaagttgtgaatgaacttgttccaaatcaaatcagctcaaccagagtaagggattgcattgcaagaggactatctataaaataccttaccgcggatgaagtgattgattatatcagagagcaacaattatacttgaactaatgataaattattactactgtttttcattacattctgtagacatgggtctttgcaagaaccactgtgcatcgctatccgagccaattttctataaacagatgatttttcatttttgtgttgtaaatttgcagataaataaatattacataatttatgtaatcgaattgcaaatactactgttgaaattgcaacctagtgcctttaagactttgggttagatgtagtatattaagtttatttgtaaagggttgatggggatctctgcaatttgtttgtgtaaaaaaaataaaaattgagccggggatattcttgattggagccctgatatattgaaatttattcaagt

SEQ ID NO: 4479 - DNA, 1582 bp, Glycine max
  misc_feature (1564)..(1566): n is a, c, g, or t
gatttcatttttttttttggtttttggttacaccgcggcagcttcgtgtcgcccccccccccatttgtaacacaatgaaattgagatttcatttgtttcacaagttctcccctcatgtaattatataacggaaccatgcaccttattgaatggaccctttcaatgttgcgtgaagtatggtatgggcatggagtattgaaatttgacgtcttcgtgttcaacgcacttgttctcatcaattgtatgtgtagtaagtattcttttcatttcattcatcgtcttattgcgcacgtcccccatcctcggcttctccttcgtggagcactcttactccgtcacccaacacatccaggtaaggatctctctgtaattttaattcattgcaatgtctttttagaatcacagcagaaattaaaaatttgtctgaaacctgtttatgctttctgttggcaaatagtagggactaatttggaatttattagaaaggaagacaaggatgagattcatgtttgtaatttgagcttgaaactccatctcttcgtgcttaacttatttggagcttgttttaatggatttcagcattgcttgtttttaatggtttcaggtcatggatgttccactgccactggataaattggctttagatttgattgataatgagccctcccctgcaaacatgagcaacagcaggatatatgtaattctggtggcaactggaagctttaatccacctactttcatgcatttacgcatgtttgagcttgcaagagatgcattgaattcagatggctactgtgtaattggaggttacttgtctcctgtgaatgatgcatacaagaaaaagggcctaatatctgctgaacatcgaatacaattatgtcatttcgcctgcaaaagttcagattttataatggttgatccatgggaggcaagtcagagcacatatcaacgcactttaactgttctctccagagtccacaattcagtttgtgagacagggttggtatctcaagaatccctcaaggtcatgcttctttgtggttctgatctccttcattcttttagcattcctggattctggattcctgaccaggttaaaactatatgcaaagattatggagtagtctgcattcccagggaaggacaagatgttgagaagactatatttaaagatgacattctgaatgagaataaggataatatcaaagttgtgaatgaacttgttccaaatcaaatcagctcaaccagagtaagggattgcattgcaagaggactatctataaaataccttaccgcggatgaagtgattgattatatcagagagcaacaattatacttgaactaatgataaattattactactgtttttcattacattctgtagacatgggtctttgcaagaaccactgtgcatcgctatccgagccaattttctataaacagatgatttttcatttttgtgttgtaaatttgcagataaataaatattacataatttatgtaaaaaaaaaaaaaaaaaaaaaaaaaaaaaaaaaaaaaaaaaaaaaaaaaaaaaaaaaaaaannnaaaaaaaaaaaaaaaa

SEQ ID NO: 4480 - DNA, 1212 bp, Glycine max
gtgaaccttctagaactataatagacttatattccatggctccgccgctcgaacacaacggcgtttccaccagcggtgactctctgagatctattccgacgccgtttctcaccaaaaccttccaactcgtcgacgatcacaccatcgaccatgtgatttcgtggaacgattctggatcgtccttcatcgtctggaacaccaccgctttcgccaaggatttgcttcctaaatatttcaagcacaacaacttctccagcttcgttcgccaactcaacacttatggattcagaaaagttgtacctgaccgctgggagttctcgaacgagtatttccgaagagacgagaagcggctcctctgcgaaatacagcgacggaagatcctcccggcaacgccgccgacccgagcgactgcgaccgcggcggttctatctccgctgccgctatctacgattccgccggcgaagctgatcgtgtcgccgtcgaactcagcggaggagcaggtgatttcgtctaactcgtcgccggcggagctgttggatgagaacgaccggctgaggaaggagaacattctgttaacgaaggaattggaggagatgagatcgctctgcaacaatatattcaatctcatgtcgaattacgctaacgttcaagcggacggtggttccgcgggggtggcggcgcggtgcttcggcgaggatgcggtggaggagatgaatccgaagctgtttggggtggtgattggtacgaagcgagcgagagaagagaatgatacggttttgagtctgcatcagccgttccatgcggacgtgaaatccgaagcgttggatttcgcaagacgtggcgaaaataaaaaaacgccgtggctaaatcaatgtcatagagcaaatcagagagtgtgtaattgacacacgacgttgtaacagcagctaggaacacgttaggttaagctaggggcgtcgcagagaatcagagtcctgagcacggagacgcgcgtggcaaatgtacgtcgttaaccgtttgggacttttttcgtagaagcttctcagaagaaaacgatactttcgcgttcatttccttttgatgtttctattttttatttttttaagttaagggcatatattggacttggcatgtatatttgccttggaagggaaaaaataaaaaaaaaaaaaaaaaaaaaaaaaaaaaaaaaaaaaaaaaaaaaaaaaaaaa

SEQ ID NO: 4481 - DNA, 1818 bp, Glycine max
ctcatcgagcgctgctacaagagagagagagagagagagagagagagagagagagaagcatcgacaccaaaatcgcgaatctcgttcattgttgtgcttccgtttcgcgttggtgatcctcctctcgctgctctctccaccaccacacagagtgactcactcaccaaatagcaatggctgctcagaagcgttccttccctgatgctcctaacgataacaaccgccacgccaaacatcaccacgaagaagcaaaaactgaagaagaagaagaagaagaagaagaagaagcacaacaacaacaacagcatgatgaagaagaagaagaagaggataataattacaaatcagacgattctcctcccgaagacaaatccgaatatgtgtttgtagaacttctggaaatacgcaaagaagtccaatgtccaatttgcctaggtattattaagaaaacacgtactgttatggaatgcttgcaccgggtttgcagggaatgcattgacaagtcgatgcgactagggaacaatgaatgccctgcttgtcgaacacactgtgccagtcgtcgttctttgagagatgatccaaactacgatgccttaattgcagctctgtcgcgtaagccccccacccatgaacaagaggagcttgaatttcgtgaagaggacaagaaccgcaataagcagattcaggcttcaattgcaaaagttgttcaacgacaatctgaagcactggttaagagacgtagagatacaccaggttcatttgtgacaagatcacagcgcaatcaacgaaatgttctctctaggagacaaaaccaagggatggataatcaaggatctgaagataatgaggaggaaaatgacaataatgaaaaggactcatcttccacagatgagcgatgtacagaactcaggcagagaaggcgaaagaggcggaccagaggtcgtccttctcagccctcatcatcgacggcaagtcctgatggtggatgcatagaaagtgacatggacataagaatttcttctagactggtgtcaaaacctcaaaaactaacttggggaaggggtggttttaggagtcacacacggcatggcagtggcaatggtagcaatagcaaaagttcccgcagtagtcgcttggctaagttagttgattatctccatagcttgaatgaaaacactgatgagttagatgtccatctcattcttttgtctttagacaaacaaattacaccaagcttgcagcagccacacctttgctgtcggccaacattgtctgtgaagcatctttgtgaatatgttgctcatcagacacctttgctggttgaagaagttgagatattggcagttaaaggatgctgcagtacagtttgtgacaagtcatttgatgagacttcatcctctgatgagctaactacgctggttatagatcctagcaaagatgaactggaaactctgcaagggcatgaatctctggcagggattaaatctaaatgcatatctaaaagggagcatttgattctggcatacaggaggaaggaatgaacattatagacagttttgagatttatgaatgccagggcttattctgtacgtacataggaaaattttcgactacaaaactatatatagttaaataataatatgaacctcccgaaagattatatagacagttttgatatttattgatgtcaggatttattctgtatgtacataggaaaattttcaactagaaaactatagtgaagtaatttgatatgaacctcctgaaaggtcatttatatacaagagagtttgtttcgacttgtaaaaaaaaaaaaaa

SEQ ID NO: 4482 - DNA, 1179 bp, Glycine max
gcgtaaatcaatatttttattgatttaatccatttaatttttaaaacataaaaaagttatgatagagaatgcgttgctatcactattttttatatcaatggtggagtatgaacccatatatgtgactactctgcaaaattaagcaaaatgataagaatttttacgtagcacatattaagacatatttcacattattactagttcataaacgaatatactaagcataaacaaatccaattccaaaatttgagaaacttggaaaacaacaacataacataaacctatcaacaccacgcgcaactcttgattaccgttacattaatcggaactcaacccataaaaatgaagcaatatactctccattttctaatatagtgacacaataacaataataataatggtaaatgtctccctcaatttcacaccatctctgcaaaaggagagtgaaatttcaagggaccaaaattacagggcagaaggggcaggtgctgatgcaataatggcctctgacacgtcagaaacagggccaggggcagctcctgagctcacaagttcaaccatggcacgacgagggttggtcttgtgcttttcacacagttctggcaaaaataccccctctccagcagccaagttgaagaaaaggtcaacaatgttggggcacttctggtaacatgcaggagagcaaagcttgccggtgaattgaggctcaaagaaggcatcagatgaaatcccaacagagttcctatcaaccccacatgcctccacacattggtctgtctctatgtagtctgccatcctctccaccaccacttccgatgtccggcattggtactcgacgccaccgtcggctgccttctcagtctccaacaaacacctcttccctgatgaagctactgagaaagcacacacttcctttggcaggtcctcacacaccatctcagccaaagatgcatggatgaaaagggatgaaaataataggaccaaaggcaatttggtagagaaagacatggttctaaatgatgtgtgtagtttggaaaatagagatattgttcttttgtgaaagagggagtaaaatgggttttgcgtatgtaatgaaaagaaaggaagaaatgggcacaatccccgcctgtcgtcctctcgctgccgtgcgcacgcgcgattatactaagcactcgagcc

SEQ ID NO: 4483 - DNA, 1490 bp, Glycine max
aggaaatagcgagaagatggtaaaaaaaaaaatagcgagaagatagatagatatgcactgttattaatttcatcaactcatcaccaaattcactttgttccttcctacttctctctctctctcgtcttcaccaatggcgtcgtcgtcaccaccaccttctctgttcttcctcctcctcctcgctctcttcgccgccacggcatcctgcctcacctgcaccacccaaaagctcaccgactccaacaaaaagctcttctccaactgcctggaccttccctcactcgattccttcctccactggacccacgaccccgccaacgcctccctctcggtggccttcgtggcggctccgcccaatcccggcggctgggtgtcctgggggatcaaccccagcggcaccggcatggtgggggcgcaggtgctggccgcgtacaaggcggagggcaccggtgccgtcaccgtgaaaacgttggaccttaaatcttactctgccattgttccggggaagctgtcgttggacgtgtgggacatgaggggggaagaggtcaggggtgtgattaggattttcgcgacggttaaggttccggataaggcggagagtgttaaccaggtgtggcaggtggggccctcggttaccgcggggaggattgacaggcatgactttgctccccccaatataaatgccaagggcgtccttagcttcaacgggtcgcagagtggtggtggtggtggtggtgccgtcgaccccgttaccatgaagaaaaatattcatggaattctaaatactgtgagttggggagttctgtttccacttggagtgatcatagcaaggtacatgagaacttttccttctgcagatccagcgtggttctatcttcatgttggttgccaggtatcgtcttacgccattggggttgctggctggggaactggcatgaaacttggaagccaatcagaggggattcaatacagtgctcatcgctatattggaatcttcctcttttcgtttgcaactctacagattttcgcattgttcctgaggccagtgaaggatcacaagtataggtacatctggaacatctatcaccacagcattggatacagcataattatcctgggaatcatcaacatcttcagggggtttagcatcttgcatcctgatcagaaatggaaatcaacttacactgcagtgctcattgcacttggtgcagttgccttgttcttggaagtgatcacatggattgttgtgttgaagagaaagtctggcaagtccaccaaaacctatgatggacacaacaatggacaatctagggaagaccccctaaccatataaaaataaagtgaacaaatttggcttgaatgtgttctacttcccctttcccttctttcccccccttttttttccttctatttatatgacacatatgatatctttgtataatgcttgcgtataaaatataaaattttcattgtgtctttaaataggttta

SEQ ID NO: 4484 - DNA, 904 bp, Glycine max
aacaaacaaatatatataattccaaaatttaagaatcatggaagacaacaacataacataaacctatcaacaccatgccaaactccagattattccattaactggaacccaacccataaaaatgaagccatatatcctccatattctattatagtagcacaataacaataataataattataaatgtcttgctgatcaattcacaccatctctgcaaaaggaaagtggaatttcaagggaccaaaattacaggggagaaggggaaggtgctgatgcaatagtaatgtcctctgacacgccagaaacagggccaggggcagctccagagctcaccagctcaaccatggcacgacgagggttggtcttgtgcttctcacacagttctggcaaaaacaccccctctccagcagccaagttgaagaaaaggtcaataatgttggggcacttctggtaacatgctggagagcaaagcttgccagtgaattgaggctcaaagaaggcatcagatgaaattccaacagagttcctatcaaccccacatgcctccacacattggtctgtctctatgtactctgccattctctccaccaccacttccgacgtccggcattggtactcgacgcaaccgtcggccaccttctcggtctccaacaaacacctcttccctgatgaagctaatgagaaagcacacacttcctttggcaggtcctcacacaccatctcagctaaagatgcatggataaaaagggatgaaaataaaaggaccaaaggcaatttggtagagaaagacatggttctaaatgatgttcgtagtttggcaaatagcaagagatattgttcttttgtgaaagaaggagtaaaatgggttttgtgtatgtaatgagaagaaatgaagaaatgtggg

SEQ ID NO: 4485 - DNA, 1062 bp, Glycine max
gcttgtgtaattgtaggtggtttcggttcttatctcctgggtttgaataggaggacttatgagcaagcaggggttggcacagaggggaataatccgggtagtaccaaggagcctggaattggatggatgacagcctttctctttgtgaccagctttgttggattgttggcgttggttcccattcgaaagattatgataatagactacaaattaacttatccaagtggaactgctactgctgttcttattaacgggttccatactcctaaaggagatgtgatggccaagaagcaggttcatggtttcttgaaattcttctcagccagtttcctctgggctttctttcaatggttttattcgggtggagataactgtggatttgttcagtttcccacttttggattgaaagcatggaaaaactcattttattttgatttcagcatgacttatgtcggagcaggaatgatttgttcccatcttgtaaatttatcattgcttcttggtgctgtgatttcatggggcattatgtggcccttaatcaggggactaaaaggggaatggtttcctgcaagcataccagagagtagcatgaagagtcttaatggttataaggtttttatttccattgctttgattcttggtgatgggctttacaattttgtcaaagtcctctatttcactgccacgaatattcatgccaccgtgaaaaggaagaaccccgaaactttttcagataaccagaaaccactccctcttgatgatcttagacggaatgaagtgtttgcaagagaaagcattcctatatggctggcctgtactgggtacatattattctccatcgtttctatcattgtaatccctttgatgttcccccagttgaagtggtactacgtggtgtttgcctatctttttgcgccctctcttggcttctgcaatgcttacggcgcaggcttaactgacatgaacatggcctataactaccggaaagtggctctctttgtgctagcagccttggccggaaaaaatgatggcgtagttgctggactagtggggtgtggcctg

SEQ ID NO: 4486 - DNA, 1145 bp, Glycine max
cggctcgaacctcgcactattcttctcttctcacaattattccacaaaatttccctcaattatttctcaccatcatcaccccctttccttctctcaagaaaaaaaaaagttaatttcttgaacccaatggcttcagagacagaggtgccggatattatttcctctgttttcgaaaggtttcaacaaaacagagacatgtctctgtttctgcccttcctcttcggcttctctgacgccaccccaggacgaaatagcgacgacccagatcacgaaactgctcccacagaagccccacaacgtcaaagaataatcttggtgaaccccttgactcagggcatggtggtgatcgacggtggttcgagcctcgaggctctgtttcgcgaattcaccaacggaaaaggtggtcgaccaccggcttctaaggagtccattgaggccttgccgagtgtggaaattggagaaggtaacgaagattcggagtgtgtggtttgtttggaggagtttggggttggtggggtggcaaaggagatgccatgtaagcataggtttcatggtaattgtattgagaagtggttggggatgcatgggtcttgccctgtgtgtaggtatgagatgcctgtggaggagattgattgggggaagaagagggaggaggaaggtggtgagaggagaaggagtgatggtggtgaagtttgggttagtttttctttcaataggagtagtagaagaaaccaagatcatgatcaagctgattctggtgattcaaatgatgatgatggttcttcatcaagtcatggagatggtgctgctgaagagagttagagaaggttttttttcttttttgtgtttttctggtagatcaaggttttaaattgcggtcacagttatggttttgttgcggtcggtctttgatgttgcaggaaactacagacaaatgcagtcgatgttgttggaattgaggtcgtggtggtgactccaaaaacattgattttgtggccaaaattgtgatcgttttttaaaatcttggggtagagtgttgtcggttttcaagttggggaggactggaaaatatgtacaggcaaaaatgcacaaaattgttattatatcttgtggtgataaataaaaatgatgattttttgctctta

SEQ ID NO: 4487 - DNA, 459 bp, Glycine max
attcccttctcacaattattcctcaattatttcccacttttcttctctctcaagcaaaagttttcttctctcattctcagcgttctgaatcgaaactaatggcttcagagacagaggtgttaaatattatttcctctgttttcgaacgcttcgagagaaacatgtctctgtttctgcccttcatcttcggcttctctgacgccacctcaggacgagatagcgacgacccagatcacgaaactgctcacacagaaggttcactgcgtcaaagaataatcttggtgaaccccttgactcagggcatggtggtgatcgacggcggtttgagcctcgaagctctgtttcgcgaactcgccaacgggaaaggtggtcgaccaccggcttctaaggagtccattgaggccttgccaagtgtggaaattggagaagataatgaggatttggagtgtgtagtttgtt

SEQ ID NO: 4488 - DNA, 957 bp, Glycine max
atggggatgatgagcatataggattcggctcgaagtgaaggcatcgttagcagttttgtagattcaacctcaatttgcagagttacgttctaatatatttacacaagactgataagagaaaatgtctctgattccaagtttcttcggtggccgaaggagcagtgttttcgaccctttctccctcgatgtgtgggaccccttcaaggattttccatttcccagttctctttctgctgaaaattcagcgtttgtgagcacacgagtggattggaaggagacaccagaagcacacgtgttcaaggctgatattccagggctgaagaaggaggaagtgaagctggagattcaagatggcagagttcttcagataagcggagagaggaatgttgaaaaagaagacaagaatgatacgtggcatcgcgtggagcgaagcagtggcaagttggtgaggaggtttagattgccggagaatgctaaagtggaccaagtgaaggcttccatggaaaatggggttctcactgtaactgttcctaaggaagagattaagaagcctgatgttaaggccatagacatctctggttaatctatgttgctctgttccttcgttgaaatgtgtttatgttttcttattctgaggatcatttgtgtgagtcgtgtgaaaaatatttcaggttttatgttggctaagaggcctaatgtttgggccctagaaatctctggttaaactgtgtaaagatctgttacttggtttaaagtttgtgtgttttgttcacttccaaggaatttatgtgtgcaagaaagatgtaattgaaaaatttagcaatagactaatggttttatatattctatgttgcaataaatcttaggatatgtatatcactggaacagattcactatgccagtgtgtgagaaagcaatgatagttctaaatcctcccaaaaaaaaaaaaaaaaaagg

SEQ ID NO: 4489 - DNA, 973 bp, Glycine max
tacggctgcgagaagacgacagaaggggacacaaagaagcgaaatcatagttagaagtcttaaacattcaacctcaatttgcagagttctaatattacattgcagagaaaatgtctttgattccaagtttctttggtggcagaaggagcaatgttttggatcctttctccctcgatgtgtgggacccttttaaggattttccttttcccacttctctttctgctgaaaattcagcgtttgtgagcacacgagtggattggaaggagacaccagaagcacacgtgttcaaggctgatattccagggctgaagaaggaggaagtgaagctggagattcaagatgacagaattcttcagataagtggagagaggaacgttgagaaggaagacaagaacgacacgtggcaccgcgtggagcgaagcagtggtaagttcatgaggagtttcagattgccagataatgctaaagtggatcaagttaaggcttccatggaaaatggggttctcactgtaactgttccaaaggaagagattaagaagcctgatgttaaggccatagaaatttctggttaaactatgttgctcagtttcttcgttattgaaaagtcgtgtgtttatgttttcttattctgaggatcatttgtatgagtcgtgtaaaaaatatgtcagctattatgttggttaagacttaagaagcctgattatgttagggcaatacaatgatacaaatctctggttaaactgtgttatctgttacttggttgaaagattgtgtgtttggttttcttcgacgagttatatgtgtaagaaagtaatagaataacagttttatatataaattctatgttgctatataagatttattatcttaggatctggtatttgcatgtacttgcacaagccggagcagatgtacatgcaccatcccaatgcatgcatgaaaaagcaaataatatactataccttcccagtcc

SEQ ID NO: 4490 - DNA, 1167 bp, Glycine max
acacaaacatccacacaaacatctctctctctctctctctctctctctctctctaagacacacaaacacaacaaacacatcacaatctcacactgttctcaagtttcaacactttctagttctaccatggcggtaggactctccgccgccataaccatgaagtccctcctccgtttccaccaacctcacctgaacctccccaaatcaatcccaacaacactccctttctcccccatgagaattttccaccacacagcatcaccaagaacccaaaaagtttcaactttcaccgtttgtgtcctcatgcaggacccaaaacaaggcacccacatggaaattgagccacaagaacaacctcctcctcctcctcctcctcccgctcaacaagttctgtcaccaaagttggctgagaaattggccagaaaagagtctgagaggttcacttaccttgttgctgctgtcatgtctagcttcggcatcacatccatggcagtgttcgctgtttattgcagattctcgtggcaaatggagggtggagaagtgccttggtctgaaatgtttggcacatttgctctatcagtgggagctgctgtgggtatggaattttgggctagatgggctcatagggctctctggcatgcttcgctgtggcacatgcatgagtcccaccatcgaccaagagaaggacccttcgagcttaacgatgtatttgcaataatcaacgctgtccctgccatcgctctcctttcctatggtttctttaacaagggactggtccctggcctttgctttggtgcgggtcttggaattacggtctttgggatggcctacatgtttgtacacgatggattggttcataagagattcccggtgggccccattgcaaacgtgccctatctcagaagggtggcctctgctcaccaacttcaccattcggaaaaattcaatggagtgccatatgggctgtttttgggacccaaggaaattgaagaggtgggagggctagaagagctggagaaagagataagtaggagagcaagatcatacaaaatagctaatgagaacaactaatacaaatcaagaatgtttcgaagaattatcagtgtaaatcagaaatatgaaataaaatgatccaaaaattttgcttgcaaaaaaaaaaaaaaaaaa

SEQ ID NO: 4491 - DNA, 1327 bp, Glycine max
acgttgaggaaatgtcccacgaggttttttcattttcttagtggccccacataaaaaaaccacccaaaaaaaccaaaaaaaattccacacataacagagaaaaagttgtggtctctgttcatcccctttttaaacctcctcagctacgtaggcccccccccacacaaacatctctcagacacaaaaacaacacaatctcacactgttcccaattttcaacactttcaagttctaccatggcggcaggactctccgccgccataaccatgaaacccctcctccgtttccaccaacctcgcctccccaaaccaatcccaacaacactccctttctctcccttgagaattttccatcacacagcatcaccgataccccaaaatttttcaactttcaccgtttgtgtcctcatgcaggacccaaaacaaggcacccagatggaaattcaggcacaagaaccaccaccctctcctcctcagcaagttttgtcacaaaagttggctgagaaattggccagaaaagagtctgagagcttcacttacctcattgctgctgtcatgtctagcttcggcatcacatccatggcagtgttcgctgtttattatagatttgcatggcaaatggagggtggagaagtgcctttgtctgaaatttttggcacatttgctctatcagtgggagctgctgtgggtatggagttttgggctagatgggctcacagggctctatggcatgcttccctgtggcacatgcatgagtcccatcatcgaccaagagaagggcccttcgagcttaacgatgtatttgcaataatcaacgctgtccctgccatcgctctcctttcctatggtttctttaacaagggactggtccctgggctttgttttggtgcgggtcttggaattactgtctttgggatggcctacatgtttgtacacgatggattggttcacaagagattcccggtgggccccatagccaacgtgccctatctcagaagggtggcctctgctcaccaacttcaccattcggaaaaattcgatggagtgccttatgggctgtttatgggaccaaaggaagttgaagaggtgggggggctagaagagctggagaaagagataagtaggagagcaagatcatacaaaatagctagagagaaaagctaatacaaacaaatcaagagctgtttcgaagaattatcggtgtaaagctgaaatatgaaataaaatgatctaaaatttttgcttgtaaaaaaaaaaaaaaaaaaagcgatactagtcagactttggttaataaaataaaaagaggaaaatattttgttgagatgtgc

SEQ ID NO: 4492 - DNA, 1618 bp, Glycine max
tcgagtcgctacgtaggccccccccccccccatgagtgtggttccctggagagtggagattaccctccaacgtcaatacagcatagcataaaatgcgaaatctttgttcccagttgcaaaacccttaaaccccttccacgccatgaagtcccttctcaacccaaagttctcagctttatctcccaaagcttctccttttgctctgttctcacttccttcttctcgattctccttccgcagcaacccgcgtcgaatccccaatcgtcttcttcgcctcaacccaccaccctgttcgtccaataatttctgttgcaccattcaaaatcgaagtttgcaaacggagccctcgccgcctccctccggcgagattcacgtcattgtggggcccatgttcgccggaaaaaccacatcgctccttcgtcggattcagtcggaaaccaccaacggcagaaatgtagcaataattaaatcaagcaaggatacaagatatggattagactcaattgttacacacgatggtgcagaattaccatgttgggcactggcaaacttatcttcattcaagcagaagtttggaattgatgcttatgagaagctggatgtgattggtattgatgaagctcaattctttgatgacctttatgaattctgtcttcaagctgctgatcatgatggaaaaacagtaatagttgctggactagatggtaactatttgaggaggagctttggttccgtccttgatataattccccttgctgattcagtaaccaagttaactgccagatgtgaaatctgtgggaagcgtgcttgctttaccctgaggaagacacaggataagcagattgagctgattggtggtgttgatgtctacatgcctgtgtgtcgccagcactatgtcagtggacaggtagccatggaagccacaaggcatgtccttgaatctcacaaggttgaatgtgcctcccatacttaagctgctccacatttcttagcggttacgtacatgcctagtgtttattcatggttgtgccatatcttatattgaaagaaatgagtaggttatttttcaatgtcaatttagtttcaatgtttgattctaaattgaaagctagtattgatttgctccattttatggacttggattaaatagttcagagaagagacgagggccagggagtatgtaacgcccttcttcacattgatgtatgttttgtttagattgaggtttggtgtagctcgggactatatataaatgtggattaaatattaatcaaaaaaaaaaaaaagtttagtaggctatgtaacttgatgtgaaaattttcaaaaagtttaataattgcaacattagtccaattcaaattaattcatgacaccagttgagaaatctctgccactttagtgtcactgctattccagtttccaatcctcatgtgttcaacattgtgcttgtatcggtgaatgaaaaggaaatccgaattctaaccccatatggaagaaggcaataatacatttatgttggatcttttcttcagagaatgagaatgcgaggctaaccaccgtttaagtgtaacaatgttacaggcaaaaaaagattttgcatgtaatctattcctttccc

SEQ ID NO: 4493 - DNA, 862 bp, Glycine max
aagctcggaattcggctcgagtgagtccatacgcaatgcaattatagttcttcaagatatcggggcattgtcaaatgatgaaaaactcacccaactaggggagaagcttggttctcttcctgttcacccattaatatgcaggatgcttttttttgctatattgatgaactgccttgatccagctttaactcttgcatgtgcatctgattatagagatccatttacacttccaatgttacctgaagaaaagaagagagcttcagctgccaaatatgagcttgcttctttatatgggggttgtagtgatcagtttgccatattggctgcatttgaatgctggaataatgcaaagaaaatgggtctagaagcacggttttgttctcagtattttgtgtcttcaagcaccatgaatatgttatcaggcatgcgcaggcaactccaagcagaactaattcgacttgggtttattcatgaagacgtttcaggttacagtgtgaatacacatgaccctggtgtgctcaatgcagttttggtagcaggtttgtatccaagggttgggaggtttcttacaaataaaagtggaaaaagggttattgttgaaacaacaagtggagataaagttcgcctgcacaatcattccataaattttaagttgtcattcaagaaaaaattagatgacactttaattgtgtatgatgagattactcgcggtgatgggggtatgaacctaaggaactgcacagttgttggaccacttccacttttgctgctttcaacagagattgctgttggcccagcagaagaaatgatgaagggggtgaggatgatgtaggaggtagtgaagatgaagctggaagtgaag

SEQ ID NO: 4494 - DNA, 376 bp, Glycine max
tcgggaatgacccatctctcgccccattttggtaaaatattcttctctttctctccttctggtgagcacacatgatttttgccaacaaagattgagccaattgataagaaacgaactcatatcccttaaggatgtggatttgatcctcgttgtcgatatgaagaccttgttggtaggtaatctatacgtaccttataagcgttctttgagtcttgagccctgtcttgacctcggtgaatccaggatcccgctcacctaaattttccacaaaaatataaaaaaaaaagtaatattgtgttcgctaaggtagtgtaacatctatccgtcattacagttttcacatactatgttatccccaaaaaaaaaaaaaaaaaaa

SEQ ID NO: 4495 - DNA, 3096 bp, Glycine max
  misc_feature (79)..(79): n is a, c, g, or t
ggaacgtagctgtggaccagctagctgaaaagataagtgctactggattaaaggttgtgaggctttgcgcaaaggcaanggaagctgtgagttctgctgttgagcatttaactctccactatcaggttcgacatcttgacacatcagacaagagtgaacttcataagttacaacagctgaaggatgagcaaggcgaactttctagcagtgatgagaaaaaatacaaagcacttaccccgcctccggaaaggggagatttctcagagtgctgatgtgatctgctgtacatgtgttggtgctggagatcctcggcttgcaaattttaggttccgtcaggtacttattgatgagtccactcaagcaactgaacctgagtgcctcatacccttggttcttggagcaaagcaggttgttcttgttggtgatcattgtcagcttggtccagttattatgtgcaagaaagcagcccgtgctgggttagcacagtcactttttgaacgccttgttctacttggtgtcaaaccaattaggttgccggctccgtagcccccccccccatgcctttcagaatttccctcaaacagcttcaatgatggcaccctgcaaaatggagtcactgttaatgaaagacaatcttccggaattgattttccttggccagtgccaaaccgtcccatgtttttttatgttcagatgggacaagaagagataagtgctagtggaacatcttatttaaataggactgaggctgcaaatgttgaaaagattgtaactactttcttaaaaagtggtgtggttccaagtcagattggtgtgataacaccttatgaggggcaaagggcttatattgtgaactatatgtcaagaaatggtgctctcaggcagcagctttacaaggagattgaggttgctagtgttgattcctttcaaggaagggagaaagactacatcattctgtcttgtgttagaagtaatgaacatcagggcattggattcctgaatgatcctaggaggctcaacgttgctttgacacgagcaagatatggcattgttattttgggaaaccctaaagttttgagcaagcagcctctatggaatagtttattgactcactacaaggagcatgagtgcttagttgaagggcctttaaataacttgaagcaaagtatggttcagttccagaaacccaagaagatttacaatgaacgaaggcttttttatgggggtggacctggaattgcatctaatgataattttggtaacgttggatctggtgctggcacaagttcagatcggaggagcagtcgaggaaggggatcttatatacctcctggtccaccaaatggaactcataagcctggagtgcatcctgctggatatcctcctgtgccaagggttcccttgcctcattttcatggtggtccccaatctcaaccatatgccattccatctcgtggggctgttcatggacctgttggggcagttcctcatgttccatctccagggagtcgaggttttggggctgggagaggtaattctggtgctcctccaattggcaatcatctacctcatcaacaaggcacccaacagcctattggatctacatttaacttccctgctctagagaatcccaacagccagccatctgttggtggtccattatcccaacctgggtttgccaacaatatgcatgttcaaggggctggccaatcatttcgtgatcaattttctatgcctggaatgtcccaggacttcttgggcgatgacttcaaaagccagggatctcatgttccgtataatgtcactgatttctctacgcaggcttctcaaagtggatatgctgttgattatgctacacaaggagcacaaggtggattcccagggaattttcttaaccagaattctcaagctggatattctcgctttggttctggaaacgactttatgtcacaggactacatgggccatggatcacaaggccttttcactcaggtggggttcagtgatcccttgcaagatgatgcaacacagagccatttcagtgtggcaaatgccaaccctcttcagtcccagatgaattctctttactcccaaccttttgctcactacaacacacagccgcttaacatgcaggctacccaacagcagcctcaggctcagaactcccaaaatcagaaaatccactataacgtttgaggaactttaggagcttaatgtggctttgatgggttatagtctttgcaatcagcaactgggtttgtgcctgtcttttgtgctgaaatacgtttgcatgtgacatccgaaggattgccttgggatagctatatcgaggaattggtatatatgatttcagttgatggaagtttggggcattacgaagatacaagcaggcgcatcccgggctgaaaattgataagataaccccctttaccgtactgaagttttgtattgtttgggattaaggtgaaattgttcgagaaagcattacatggaatggttttgtcgaaagggtttcgatcttgaagcagaaggggcagtttacatgtcggtgaaatactgaatatagtaatccatacggcaccaatcatcgccaaggaagttattattgtacagaaggcagggatgcggtgaaccctttcagctcttcctgacatgtaatttttcaactcgatattatagacacaagttatattatgcaactattgccactcgtaattttctgtggcatataaaggtgtgataattgtttccttgtaaattagttatcttataagtgcaacatctgagtgctttgagtagtaattacgcagagatttttaatctcctggttaatagctaactggagttggaagttacaaatctgaagatgtctactgtcctcaatgggtgatatgtaatgatgtatcgttagttgagacgattctcgtatttatacaaattacatcgaccggagacactggactagaaaagtgatagggaatcccttcctaatgaatttttaagataatttttatgaatacaaaggctccgaaacagtaatttcaaattagtatgaaatgcagtttgcgattaatgatcaaaaaaaaaaaaaaaaaa

SEQ ID NO: 4496 - DNA, 2685 bp, Glycine max
ggtccggattcccgggtcgacccacgcgtccgcggactcgtgggcggacgcgtgggcggacgcgtggggtgaatttcgcgtgtggggcgaacaaaaccactgccctccactgtgctgcttctggtgcatctaccaaggctgttgatgccgtcaagcttcttttatcggccggggccgatgtcaattgcgtggatgcaaatgggaatcgccctatcggcgtcgttgcccccccccccaagctgcaaggtgcgaaagccgttcttgaggaacttctttcggacaatgcttctgatgtgtctgttggtgaattctctgtcccggtgtctgttaattcttccagtccgggttctcctgcccattcgtcgaatgggatgccgtacactccttcggtttcaccgccatcccccgtggctgcaaagtttactgatgcagctatttgctctttgtcggagaagaaggaatacccgattgatccatcgctgcctgatataaagaacagtatatatgcgactgatgagtttcggatgttttcgttcaaggtgagaccttgttcccgggcatactctcatgattggactgagtgtccttttgttcatcccggagagaatgctcggaggagagaccccaggaagttccattacagctgtgtgccgtgccctgattttagaaaaggggcttgcaggcgtggagacatgtgtgaatatgctcatggggtgtttgagtgctggctgcacccggctcagtatcggacacgcctctgcaaagatggcaccagttgcaatcgaagggtgtgtttttttgctcacactgcagaggagcttcgtccgctgtatgtgtccactggatctgctgccccttcgccccgttcatctgcttcaggtcctaatgtcatggacatggctgctgccatgagcctttttccaggatcgccttcatcgggctcttccatgtcgccgtcccactttgggcagccaatgtccccatctgcaaatggcatgccactgtcttctgcttgggctcagccaaatgtgccggctcttcatttaccaggaagcaatcttcaatctagtcgattgaggtcttccctaagtgctcgtgacattccaccagaagacttgaacatgatgtctgatcttgatggccagcagcagcaccatctgaatgacttgagctgttacatacagcctcgccccggtgccagttctgtgagtagatctggtcggtccaagaccctaactccatcaaatctggaagagctcttttctgctgagatttctttgtctccccggtattctgatccagcagccggttctgtgttttcccctactcacaaatcagctgttctcaatcagtttcaacagctccaaagtatgttatcacctataaatactaatttgctgtctcctaagaatgttgagcatcctctttttcaggcttcttttggtgtctctccttctggaaggatgtcaccaagaagtgttgaaccaatctctccaatgagtgctcgtttatctgcatttgctcagcgagagaaacagcagcaacagctgcgcagtgttagttcaagagaccttggtgccaacagtcctgcctcacttgttggctcccctgcaaacccttggtcaaagtggggttctcctattgggaaagctgattggtcagtaaatggagactcccttggtcgtcagatgcgaagatcatcctcgtttgagcgcaagaacaatggggaagagcctgatctctcttgggtccaatctctggtgaaggagtccccacctgagatgatcaaagagaagtttgcatctcctatgcctactgcatctgctgatggaccgaattcaaattcccaaattgaatccattgaccattctgttttaggagcctggcttgagcaaatgcagctggatcagcttgtagtctagtcaaaattgaccctttacatatcttgttgagataggtatttaatttcgtaaggtacatattcttttggtgaaattttttgggaagacaacaaggaaagaagtgtagtaaaaggaatggaggattggttggctgcgaagttacctgaaggatattctattttttcttctttttttaaataataattgtcattcattattttactacagagcttcaagagagttgaagaagctctctctcttggggctgaaattcaatagtaggagaaaaatcctgtcgaggttatctatttttcttccaaaacggccccgtttcaggatttttccccttgctattttacttgatttctgagttcactatcaagcaagctagtttggtttataatggaacaaaaaccattattagcctgcgtttgttttgaaagatttttctgaagttcactaagttaagccaagtcaatgatttgctgttgcctatggttgaagttgtttctttctgagggaataattagagatgatctgcactgttgaatatttacggcagataaatgagatagtgaagtttacattgttcttcctgttaagctgtgttaccttgaattgtactggttatatatatccatttcgtttctaattcaaatcaaatgtaatgtttttcttttcttgtctcttttattgtcctcttctctcttttctgtacctactttcacataatctgtgtaactacttgcacactgatgcatactcttcactgcaagtgttttaa

SEQ ID NO: 4497 - DNA, 3793 bp, Glycine max
ttcaatttcaatttcaatttctttctttctagacgttacattctctctcttccaaagtcacacacaccacattctctctcttcttaaccctctctgatgtttcctcagtttcatcgatggagagtgaagccttaactcttctgcttcttccgtgttcagatctcgttgttgttgcttccgattctttgattcttcgcttttttcttctcacttcacattccgattcgtcgcagattctttcagtttctaaacttgatgatcgccactgcctccacctgtaatcggtgaatttctccctctctctctctctctcttctctcagctcatgaattttcctttttctttattagctgttgaatttacacgatcatcgagtgaatcacttttttcttcttctattttcatggttagaaatttttgttctattttcattttgcaattgttttgttgttatctttaatctgctaaagatgattctagatttacctcagatctgtgctcttgttgtgtttcattttttaagattaaagtaatgcacacacacacaaacacacatacacacactcacacacacacacatatatgtgtgtatgtatattattattttcagctacttgtttgtcaacaatactttcgtgtggttatgctaccttgtgatttgttattatttattaattttcttaaataattttattgtttatgttactatttctcatcaagcgtggtttttgcttaatctgttgttagaatccttagtaaacttttgtgttattgtgaatttttctatgccaaatttaggttattttttttattctttaatttgttgatttattgattaatggtttgtttgtgtttttttatggtttgagctgtcctcagtttgttgttgtcacgtgaggtggtccagagaaatcaaaatctccttcaacttcgtcttccctttaggtgtaaaagtcagctaacgataaagaaatgaaatcgctaactgttaatactgaagattctttttccagtttgctggaacttgcttctaacaatgatattgaaggcttcaaggtgcttttagagaaagattcttcttcgatcaatgaggttgggctctggtatggccggcaaaacggatcgaagcaatttgttcttgagcacagaacccctttgatggttgctgcaacttatggtagcattgatgttatgaagattatactgttgtgccccgaggcagatgtaaatttcgcgtgtggggcgaacaaaaccactgctcttcactgtgctgcttctggtgggtctgccaatgctgttgatgctgtgaagattcttttatcggctggggccgatgtgaatggcgtggatgcaaatgggaatcgccctattgatgtgattgctgttcctccgaagctgcaaggtgcaaaagccgttctcgaggaacttctctcggacagtgcttctgaaggctcaattggtgaattctctgtcccagtgtctgttaatacttccagtctgggttctcctggccattcctcgaatgggatgccgtatactccttcttcctcaccgccatctcctgtggtggcaaagtttactgatgcagctgtttgctctttgtcggagaagaaggaatacccaattgatccatcgctgcctgatataaagaacagcatatatgcgaccgatgagtttcggatgttttcgttcaaggtgaggccttgttcccgggcatactctcacgattggactgagtgtccttttgttcatcccggagagaatgctcggaggagagaccccaggaagttccattacagctgtgtgccatgccctgattttaggaaaggggcttgtaggcgcggggacatgtgtgaatatgctcatggggtgtttgagtgctggctgcacccggctcagtatcggacacgcctctgcaaagatggtaccagttgcaatcgaagggtgtgtttttttgctcacactgcggaggagcttcgtccgctgtatgtgtccactggatctgctgtcccttcgcccaggtcatctgcctcggctcctaatgtcatggacatggctgctgcgatgagccttttgccgggctcgccttcttcggtctcttccatgtcgccatcccactttgggcaaccaatgtccccatctgcaaatggcatgtcactgtcttctgcttgggcacagccaaatgtgtcagctcttcatttaccaggaagcaatcttcagtctagtcgattgaggtcttcccttagtgcccgcgacatgccaccagacgacttgaacatgatgtctgatcttgatggccagcagcagcatcctttgaatgacttgagctgttacttacagccgcggcctggtgctggttctgtgagtagatctggtcggtccaagatcctaactccatcaaatcttgaagatctcttttctgctgagatttcttcatctccccggtattctgatccagcagcgggttccgtgttttcccctacgcacaaatcagctgttctcaatcagtttcaacagctccaaagtatgttatcacctataaatactaacttgctatctcctaagaatgttgagcatcctcttttacaggcttcctttggtgtatctccttcgggtaggatgtcaccaagaagtgttgaaccaatctctccaatgagctctcgcatatcggcatttgctcagcgcgaaaaacagcagcagcagcagcagcagctgcgcagtctcagttcgagagacctcggtgccaacagtcctgcctcacttgttggctcccctgcaaacccttggtcaaagtggggatctcctaatgggaaagctgattggtcagtaaatggagacacacttggtcgtcagatgcgaagatcatcctcgtttgagctcaagaacaacggggaagagcctgatctctcttgggtccaatctctggtgaaggaatccccacctgagatgatcaaagagaagtttgcatctcctatgcctactgcatctgctgatggaccaaattcaaattcccaaattgaatccattgaccattctgttttaggagcctggcttgagcaaatgcagctggatcagcttgtagtctagtcaaaattgaccctttacatatcttgttgagataggtatttaatttcgtaaggtacatattcttttggtgaaatttttggaaagacaagaaaggaagtgtagtaaaggaatggaggatcggttggctgcagagtcacatgaaggatattctattttttcttttataaaataattgtcattcattattttactacatagcttcaggagagctgaaaaagctctctcccttggggctgatcaattaatagtaggcgaaaaatcctatcgaggttatctatttttcttccaaaacggccccgtttcagggttttcgcccttgctatttcactagagttctgagttcacttcactatcaagcaagctagagttctgagttcactatcaagcaagctagtttggtttataatgcgacaaaaaccattattagcctgcgtttgttctaaagatttttccgaagttcaccaagttaagccaagtgaatgatttgctgtttgcctaaggttgaagaagttgtttctttctgagggaataattagaggtaatctgcactgttgaatatttacagcagataaatgagatagtgaagtttacaatgttcttcttattaagctgtattaccttgaattgtactggttatatatcatttcgtttcaaattcaaatcaaatgcaatgtttttcttttcttatctttaaaaaaaaaaaaaa

SEQ ID NO: 4498 - DNA, 2149 bp, Glycine max
gcaaaatctgattagccaaaatcgatcaactaatgttgactcctcaaattctagcttggatattcagacgtcaggtgctctttgggacatgatacaattagttggtgagagagctcgtcggaatactgtccttttgatggatagagataatgctgaagtgttctacagtaaggtttcagatcttgaagatctctttttctgcttagatgcagagttagaatatgttataagaccagagcatccgttaggaatccagatccagagggcatgcgaactctctactgcatgtgttaccataattaggacatgcttcaactataagaatgagaaccgattatggtatccaccacctgaaggattaacaccttggtattgtcaacctgttgtacggactggtatttggagtgttgcttctgtcctgcttcacttgttaaatgaaatatctggacttgataaaactgcaaaattagatctgtataatcatttagaagccctagctgaagttctattcgaggcatattctggtgctgttacagctaaaaatgagtgcggagaagaacacaaaggtctgttaaatgaatattgggagaggcgagatagccttcttgaatctctctatcaaaaagttaaagattttgaagatactcacaaggattcgattgaaggagctggagagcagaatgaagaggccataatgaaggttacttcacatctgttatcaattgctaaacgacatggatgctacaaagttatgtggacaatttgttgtgatgtgaatgactcggaattactgagaaacattatgcatgaaagcctgggacctaatgggggatttagttactatgtctttatgaaactccatgaaagcagacaattttctcaacttttaaggctaggggaagaatttccagaagagctatccattttcctaagggagcatccagatcttctttggcttcatgatttgttccttcaccaattttcttctgcctcagaaacacttcatgcattggctctctcacaaaacttactatctacgtcagttgctgaagaggaaggagaaacagagtatatgaaaatgaaactaaaattgactgacagaaaaaatcttttatttctctctaagattgctgcctttgcagctggtaacgatgctggtactcaagtcaaggtggaccgcattgaggctgatttgaagattctaaaattacaggaggaagtaatgaaacgccatccttccattgaagatagacaacttgttgaagctcagctgcttcatcccgaagacttgattaaattgtgcctggaaggtgaagatcgagaactctcattgtcggcctttgacgtgtttgcatggactagttcctcatttcggaagatccacagaaaacttttggaggattgttggaagaaagctgctagtcaggacgattggagtaaattccatgattcgtacagagctgaaggatggagtgaccaggaaatcctgcaaaacttgaaaaatactatacttttccaggcttcaagtaggtgttatggacctcaaagcgaaacatttgaagaagggtttgaccaagtattgtccttgagacaagaaaacatggagacttctattttgggggatatgagtagttcagtccaaacaatcttgatgcaacacaaggattttccagttgcaggcaaacttatgctaatggcaatcatgctaggtagcgagcattgtggtgacatcagaattgaagaagggccttccccaatggaataacgtggccaaggatcattccttaaccgtaatccaagttggtgtaggttttgtacaacatgacatgtggaatatgtagttgttattgttcgctcctctcttccatgcattgcattcacaatcacaacgcaaccctggatgatattggtaaatggtgttggatagaagatatgcagcaagcacaaatccgcaaatattaaaagagacatgcttcctgtatacgattttagcacaccattccggaaaccttgtttggtaaaagaaaaaggttgtgattaatgttttttataaaaaaaatacaaaacaaaaggagcagtgtaagaatggcgcaattaaattgccttgcaaataacattgttgatattgaaataaaaaattaattacacc

SEQ ID NO: 4499 - DNA, 1019 bp, Glycine max
acaccatagatatcacaattaactatcaactacctatagggaactaattacaaaatcctagaggttgtgatattatggctcctacacttcaacgtgcactttctcatctgctcactcttgtagcttcactttcaatactcctagtggtaccctcctcttgtttcaaccctaaaaagattgtgaatgcttcctatgcttcatactccttatatggttcagattggtctcctgctgtagccacttggtatggaccagcccaaggggacggtagtgaaggtggtgcttgtggttatggaagtgctgttggggaacctcctttctcatcattgatgtcggcgggaagccctcttttgtttgaatcaggcgaaggctgtggttcttgttacgagatgaagtgcactgggaattatgcatgctcaggcaattctgtaagggtagtcatcactgatagctgtcctgggtgtggttcagatgctcaatatcattttgatttgagtggcactgcttttggtgcgatggcaatttcaggccaagacgagaagctacgcaatgctggcaaaatagacattcaatttagaagagttgaatgcaactatcccggtgtatcaatatcttttcgcgtggatcctggttccaacaaggaatattttgcaatcttgattgaatatgagagtggtgatggtgacctagacaaagttgaactcagggaagcacatgcttccgcccaatggtactccatgcagcgatcatggggtgcagtttggaaacttgacaaagggtcagcacttgtggcaccattctccatcaagctaaccactcttaaatctggcaagaccattgtggctaacaatgtgatccctgctgggtggattattgatcagacttatagatcaattgtcaatttttaatttcaataatcgaagttgtccatttgtttggatctatcatcagcttgtggttgtcctacttaatataatatatgaataagaagataattaatcttaaaaaaaaaaaaaaaa

SEQ ID NO: 4500 - DNA, 2659 bp, Glycine max
ccacgcgcccgcgtccctctctctctctttctctctccggtctcaaccatggcttcttccacttcctctatctctctctcccaagccctcctccgccccaccaccacctctctcccctcctcctcctcctcctccctccgcctcacccccactctccgccctaccccacccgccctctccctccgccgccgcctcaccacctccatccgcgccgccgcctccgtcaaaaccgtcgagaaagcaaccgcggacgccgcgctggtcgaaaaatccgtcaacacgatccgcttcctcgccatcgacgccgtcgagaaggcgaattcgggtcacccggggctccccatgggatgtgctccgatgggtcacgtgctatatgatgaaaccatgaagtataaccctaagaaccctttctggttcaaccgcgatcgcttcgttctctctgctgggcacgggtgcatgcttcagtacgcgcttctgcacctcgctgggttcgatagcgtcaaggaagaggatttgagggaatttcgccaatgggggagcagaactccgggacaccctgagaattttgagactccgggaattgaagttacaacaggtcctcttggtcaggggattgccaatgctgttggtttggcccttgcagagaagcacttggctgcaagatacaacaagcctgacaatgagattgttgaccattacacgtatgctattctgggtgatggttgtcaaatggagggaattgcaaatgaagcatgctcacttgctggccactggggactggggaagctgatagcattttatgatgacaatcatatttctattgatggtaacacagagattgcgttcactgagagtgttgatagtcgttttgagggacttgggtggcatgttatttgggtaaagaatggaaataatggctatgatgatattcgtgctgccattaaggaagcaaaagctgtcaaagacaaacccacattaatcaaggtcacaacaaccattggttatggttctcctaacaaggctaactcctacagtgtgcatggaagtgcactgggtgccaaagaagttgatgccacaaggcagaaccttggatggtcacatgagccattccacgtgcctgaggatgtcaaaaagcattggagtcgccacacccctgagggtgctgcacttgaagctgaatggaatgctaagtttgctgagtatgaaaagaaatacaaggaggaagctgcagaattgaaatctattatcaatggtgaattccctgctggttgggagaaagcacttccgacatacactccagagagcccagcggatgccaccagaaacctgtctcaaacaaaccttaatgcccttgcaaaggttcttcccggtctgcttggtggcagtgcagatcttgcttcttccaacatgaccttgctcaaaatgttcggggacttccaaaaggatactccagcagagcgtaatgttagattcggtgttagagaacacggaatgggagctatctgcaatggcattgctcttcacagccctggactgattccatattgtgcaaccttctttgtattcactgactacatgagaggtgccataaggctttctgcgctgtctgaggctggggttatttatgtcatgacccatgattcaataggacttggagaagatgggccaacccaccagcctattgagcacctagcaagcttccgggcaatgccaaacattttgatgcttcgtcccgccgacggtaacgaaacagccggagcatacaaagtggccgtgctcaacaggaagagaccctccattcttgccctatccaggcaaaaactgccccagcttcccggaacttccattgaaggagttgaaaagggtggttacaccatttcggacaactccactggcaacaagcctgatgtcattttgatcggaactggttcggaattggaaatcgctgccaaagctgctgatgacctaaggaaggaagggaaggctgttagagttgtttcccttgtttcttgggaactttttgatgagcaatcagaagcctacaaggagagtgttttccctgctgctgtttcagccagagttagcattgaggcaggatcaacatttgggtgggagaaaattgttggagcaaagggaaaagcaataggcattgatcgttttggagctagtgctccagctggaagaatatacaaagaatttggtatcactaaggaagctgttgttgctgcagctaaagagcttatctagaacttttgattttttttgccttctggttttggttgagagcattccatgtcatgaataagaaaaaggttaaatatccttcgattgggaatttgggattttaagtgaagaagcaacatagatcaaagaattttgtgaacttgtaataactatttgacaatttagttttgcactgccacatggttaaattcaatgtttgatcatatcaaccatagatgctagtgtatactacttgtataatttgtttcacttgcagattcactcttagcatttgagtgtttggatggccgtgttttgttcattaagaaatgttgacatggatagtttgttgcatggtaaattggtgattaatacctttttaagcttcttttggcaagttgttaaaaagtgttttgttttaatctctagttaatct

SEQ ID NO: 4501 - DNA, 1700 bp, Glycine max
atggaacatagaaaggtccaactgttggttcgattccgactcccatcccatcccatcccactgtcttgctaaaaaagaaaaccccaaaaaaaaagtgttttatctttttgctcctcaatacaaagtgaagcatatagtagaaaacaaacgaacacggcaatgcaaacgcgcgcagcgttgacaacaaaaccacaaaccaattaaccgaacatgaattccgattgggacagcggcggcggtggcggtggcgcgacgctaatccctggtctcccaaacgacgtagcggcgtcgatcctctcgaaggtcccctactcccaccacgggaggctcaaagcgacatgcaaatcatggaaactgctcctctcctcgaaatcgttcttagcctcgctgaacaaacgtaaccaccttctctgcatcttcccgcaagatccttcactcgcttcaccctttctcttcgatccgaactcgctcgcgtggtgcccgctccctcccatgccctgcagcccccacgtgtacggcctctgcaacttcgccgctgtctccgtcgggccccacctctatgtccttggtgggtccctcttcgacacgcgctccttccccatcgatcgcccttccccgtcctccgccacgttcaggttcaacttccacgacttctcgtgggagccacgcgccccaatgctgtctcccagggggagcttcgcctgcgcggtggtgccggccggcgggagcatttatgtggccggcgggggttcgaggcatacgatgttcggggcggccgggtcgaggattcggtcggcggagcggtatgaggtggggagagaccggtgggtgccgatggagaatcttcccgggtttcgcgccgggtgtgtcgggtttgtcggaggggaggggagggagttctgggtgatgggggggtacggcgcgtcgaggacgatttccggggtgtttccggtggatgagtattatagggatgcggtggtgatgggagtggagagtggcgcgtggagagaggttggggatatgtgggggaatggggagagggtcagggttgggaagattgttgtggttgatgataatggatgccccatgcttttcatgcttgatgccaatgagattttgagatatgacatgtcttctaatcgttggctatacgagtctcgtgtgccaagaaaagctccttacaattcgtcctttggtgttgttgtgttagacggggagctttatgtagtgacacatttatgtgtcgttgattttacagaaacacgaaggtccagacaacataagagggcaggaactctgttcattcaaatatatgacccaaaaaagaagacatggagatcgcttgttgcaaaatcacctttccattaccctatagatattaatagtgctgtattgagctcaatttgtctatgaataatgttgcatcctatttgtatagtatagggatcacttccaaattgattgtgtatcgcatcatttgatccaccagattccatgtaggtggcttatttgtatatttctgtatgtagtatgtcttgatcggggcattcactttgtattagttgataccatctaaatttggatacaagtgacgtatagtatcagctttttctagtgttgtaatcctgaagtactgaaatatttataatggataaagaaatgagtgaaacttgcaaatttgcttgattttgtaaaaaaaa

SEQ ID NO: 4502 - DNA, 2858 bp, Glycine max
ccccatgttatatttttatctttgaaattatgagaaaaaacgaggaggcagagaagtaagaagaagatagccagaagtataggctaagattgtccacaacatgtggacagcaggaacaacgagtgtatagatcaacaactacctttcccttttcgtctatcagtccaaacactcttcttcttcttcttcttcttcactctacaaccactaaactaagtggttggttttggtttagtttcatttttttgaagctcttaaacttaaggcttaagccatggcatcctcatcctctctgcatctatctcaggcccttctggcacgtgctgtgtaccttcatggctcttcttcttctgaccgtgtctcactctccttcccatcattctctggcctcaagtcacattctacatgcaaagcagcagcagccacgtcctcgcgtagaaggggtgcttgtccatccaccaacgttgttcgagccgctgcggttgagacactcgaccaaaccaccgaggtttctctggtggagaaatccgtcaacaccattcggtttttggccattgatgcagttgagaaggccaactctggtcaccctggtctccccatggggtgtgctccaatgggtcacattctctacgatgagataatgaggtacaatcctaagaaccccgcttggttcaaccgtgaccgtttcgttctctctgctggacatggctgcatgctccaatatgctctccttcaccttgctggctatgacactgttcaggaacaagaccttaaggaattccgacaatggggaagcagaactcctggacatcctgagaactttgagacccttggagttgaagtgaccacaggtcctcttggtcagggcattgccaatgctgttggattagcactagctgagaagcacttggctgcacgatttaacaagcctgacaatgagattgttgaccattacacatatgttatattgggtgatggttgtcaaatggagggaatttcaaatgaagcatgctcacttgccggtcactggggtctaggaaagctcattgctttatatgatgacaatcacatttccattgatggtgacactgagattgcattcactgagaatgttgatcagcgttttgaagcacttggatggcatgtaatttgggtgaagaatggaaatactggatatgatgaaattcgtgcagccattaaagaagcaaaggctgtcaaagacaaacccactttgatcaaggtaaccactaccattggatttggttctccaaacaaggctaattcctacagtgttcatgggagtgcattaggtgctaaagaagtggatgctacaaggaagaatcttggatggccatacgagcctttccatgtgccagaagatgtcaagaagcattggagtcgccatacacctgagggtgctaaacttgaagctgagtggaatgccaagtttgtggaatatgagaagcaatacagtgaggaagctgcagagctgaaggctattattactggcgaattaccagctggttgggagaaagcacttccgacatacacaccagaaagccctgctgatgctacaagaaatctgtctcagcaaaatctaaatgcccttgttaaggttcttcctggtctacttggtggtagtgcagatcttgcctcttccaacatgaccttattgaaatcgtatggggatttccaaaagaatactcccgaagagcgcaatgttaggtttggtgttagagaacatggaatgggagcaatctgtaacggtattgctcttcatagccccggattcattccatactgtgcaactttctttgtcttcactgactatatgagagctgccataaggatttctgcactgtgtgaagctggagttatttatgtgatgactcatgattcgattggacttggagaggatggaccaactcatcagccaatagagcatttggcaagcttcagggcaatgccaaacactttgatgcttcgtccagctgatggtaatgaaactgctggatcatacaaagttgctgtggttaacaggaagagaccctcaattcttgcactttctaggcaaaagttgacccaacttccaggaacttctattgagggagttgaaaagggtggctacaccatttcagacaactcatcaggtaacaagcctgatgttattttgattggaactggttctgagttggaaattgctgctgctgctgctgaggatctaaggaaggaaggaaaagctgttagagttgtttcttttgttagctgggaactttttgatgagcagtcagatgaatacaaggagagtgttctacctgcttcagtaacagctagagttagcattgaggcaggatcaacatttggttggcacaagattgttggaagcaaaggaaaggccataggcattgatcgatttggagcaagtgctccagctggaaaaatatacaaggagtttggtatcaccaaggaagctgttattgctgctgccaaagaactttcgtagatatatttgttgagtttcttttatctcatctagaacttgtggttttcacttgtggctttgggttactgttacatgacttgttttttgagatatcactttagccacaataaggaagattagattgttcttgcatatgattgtcagaggaaccacttacattgaaggatgagttgaattaatgaagttgtatgaatttgtaacaactatttggcttgctctgtggtgtagttgaattagtgatgctcactctagcactcaattctggacagatatggcttctaggaagaattatatccttctctatttttttttcttaaaaataaaaaataaagaatctagtttaaaaccattactc

SEQ ID NO: 4503 - DNA, 854 bp, Glycine max
tacggctgcgagaagacgacagaagggggccttataatgcggcactatcctctcctcctagaatttttattatttaaaaaggaaaaaaaacattaggaaattgggaaagatactaaaactttccctggaactgagttggagtataatttattcttgttttgcgcacttctcagatgaatccctagtttccttacaaggtcctctgtaccatttacaatggaacatgcagataaaggaaaagaatcatcaaatagtataaatgaagtagaagtcactaattctccaattatttgtggccttccagatgatatttctcttatgtgcctggcaagaattccaagaaaatatcattctgtcctgaagtgtgtctcaaagagctggaggaacttgatttgcagtgaagaatggttctgttatcgccgaaagcacaaacttgatgaaacctggatttatgctttgtgcagggacaaatcaaatgagattttctgttatgtattggatccaaccttgtcaagaagatactggaagctcattgataaccttccacctcaaatctcgaaaagaaaaggcataggttttgaagctttgggaaataagctattcttattgggtggttgtagcgagtttctagattctactgatgaggtttatccatatgatgcttcctcaaactgttgggctcaagctacttccttgtcaccgctagtacaacttggtgtggagtttggaaaaaaactatggtatcggggaggaggtcaggcaatatcttcttgggaacttgaccttgacattgtgacatccaacaacctaaattgtatgattaaaattccgcccttacggaaatacctccagta

SEQ ID NO: 4504 - DNA, 1476 bp, Glycine max
aagacttattttgtgtcagcaaagccggcggcaacagagtagagaagagtgggcaagaatggcgacggagatggaagaactcgtctcctttctttcttccacgtcgcctcagatcacaaaagccgccgttgacatagtccgcggcttaaccggctccatggagggcttgcagtccctggcaaattactcaaacgccctcttacccgctttgtctcgcctcttaacgttacccaaggaggtttcggaggctgctgcggaggcgctggtgaacctgtcgcagaattcgagcctcgcggaagcgatggttggaattggtctggtcaaaacgacgatggatgttctgtacaagcccgagtgtagcattgctcgcttgcttgtcatgctgttggtcaacctcactcaactcgaagctggtgctgcttccttgcttcagactgaagatgagaaggtgcatggtttatatgttatgaagcttgtgagatcattttgtagaacctcccatgagagtaatgatgatgcttttgaacatgttggttcaatacttgttaacatctcaaaacagcggaaagggagggagcttctacttgaccctaaacggggtctcttaaagcagataatcagacagtttgattccaacagttcattgagaaagaaaggggtctctggaactattcgcaattgttgttttgaagctgagaatcagctacaaaatttgcttttggtatcagagtttctctggcctgcattacttcttcctgtagctagcaacaagatctacagggagcaagacagattgaaaatgccacttgaacttgggactgcactctcgattgaacgtgaaccagttaatgatccagaaattcgtattcaggcattggaagccatatacttgatcatattacaggaggcaggtcgaagagccttttggtctgtaaatggacctagaatagttcaaatcggttacgaagacgaggaagatccaaaggtgatggaagcatatgagcaactgggatccttgttggttcacagtagcagtgcagaggaaccactcagtgataccacaaagtagttattttgtattaccatcaattgaccctgcaatatctctccataagaactctgtaatacttatgagggtcattcattccaagtcaaatttccattttgaggttagaattaccaattttagaaatatgtaaattatgcggctcggagtagttagtcaaaattatttatacacatggcagaatgagtgaaagatgttctcttgatgcaaaagttcagtttgcttcttcagtttctgtatttggaattttgaattctctaaactgcaggtacaatatttcactttggagaatcccgtttcttatgtagcctgttttctttggattattagtaatcattcatttggctggtaaacgccactgataaaaaaaaaaaaaactccaatatcaaaagatgatgataagaaaaaaa

SEQ ID NO: 4505 - DNA, 605 bp, Glycine max
actctgcttcctctctccaaagcctgaaagaaaaaaaaaatcatctttctctttctcatattttctctgtgtgtgaatttgttgttctttcacaatggaacaacctccttcctcgtctcttcaggtggagacagcacaacaaccgggacctagtcctctccgaaaaatgttcgctgtctcgtcaatcgccgcgggaattcaattcgggtgggccctacagctctctcttctgacaccgtacgtccagaccctcggcgtccctcacgcatgggcgtcgttcatttggctctgcggcccaatctctgggctgcttgtgcagcccattgtagggtacagcagcgatcgatgcagatcccgcttcggtcgccgccgtcccttcatcttcgtcggagccatcgccgtcgcaattgctgtgttcctcatcggttatgcagccgatataggacacgcggcgggcgatgacctcacgaagaagacccgtccacgcgcggtggtggtctttgtggtcggcttctggatcctggacgtggccaacaacttgctccagggtccatgccgcgccttcctcggtgacctcgccgccggggaccaccgcaagacgagga

SEQ ID NO: 4506 - DNA, 1813 bp, Glycine max
tcgcagctacattcatactcgagtcaaaggctggcttggctagcttgcgtctttgttaagactttgatgacatgttcacaaccccgcccgagaacctacttttttgtttcataggaataaaacatttactttgatcaccttttcattccttttaggtaaaaaaaaaaaaaccacaacacatgggtgtgtagtagaattgcagtgaaattggaaaaatactcaaacatggagcgctatgagatcctcaaagatattggttcaggaaattttgctgtggccaagcttgttagagacaactacaccaatgagctttttgctgtcaagtttattgagagaggccagaagattgatgagcatgtccagagggaaatcatgaaccacagatcattgaagcaccccaacattattagattcaaagaggtcctgttgacaccaactcatttagccatagtaatggaatatgcttctggaggagaactctttgagaggatatgcaatgctggtagattcagtgaggatgaggcaagatttttctttcagcaattgatatcaggagtcagttactgtcattcaatgcaaatctgtcatagagatctgaagcttgaaaacacactcttagatggaagcactgcaccacgagtcaaaatttgtgactttggttactcaaagtcatcagtattgcattcacaacctaagtctacggtgggaacgccagcttacattgcacctgaggttcttacaaggaaagaatatgatggaaagattgcagatgtttggtcttgtggagtcaccttatatgtgatgttagttggggcttatccttttgaagacccagcagatccaagaaacttcaaaaaaaccattggtaagatacttagtgtccagtactcagtcccggattatgtacgagtttccatggaatgtagacatcttctatcacaaatattcgtggcaagtcctgaaaagagaataacaataccagaaattaaaaaccatccatggtttttaaggaacttgcccatggaactgacggaaggtggaagctggcaaatgaatgatgtaaataatccatcacaaaatgttgaggaagtactgtctattatacaagaggcaagaaaatctcttaatgttcccaaggttggaggccttcttactgggggcagcatggacctggatgactttgatgctgatgaagatcttgaagatctagaaacaagtggtgaatttgtgtgtcctatttaagtgtgtacatgaacaagctgagctatagtttgctgtgaaaatgtaaatagatttttctgtaggggctaaaattccttggtggttaatttttcaattaagatcagtagccccacttgcacggcttgttatttatcagttttgagttttgacatttaaagggttttttttttttatttctttatgtttatttttccctcttccctatcacacgtgtggatgtgatcagatttaggaacttccgaaaccatgtgctgttttcctagagaagtaataccacatgttccaaagatgagaatataaaataaagcaagttgtggcaggttccacttttgcatcatgggaaactgagacatgggaagtaagtagacttttgttagtggattttattttatattgtagagtgggaattgagcaagcaatgctctccttggaggctttgccctcaaccgtgacgtcccccccattatgtaggatttcttttgtatatttacatatatcctttttttaaaaataactattgtaattaggttttcgattttttgagttgattataagactaatctttcacttc

SEQ ID NO: 4507 - DNA, 816 bp, Glycine max
gatgatatctctgctggtgaaaatggattaattagattttggttggaggaaaatacccacccaaccatggctgcaaccattcctttctctctgcttaggaactgcgcgccattgaaactagcaacacctttcgctcgcaaagcctccatctttaatcttcttctccctcttcaaccacgcaggttggtctctagtacctgtgctgtgaacaatgaagaggctacagcaaaaacagcagctgttaattttgatagtgaagctccaacaatatttgataagatcataaataaggaaatcccttcgagcattgtatatgaggatgaaaaggttcttgcatttcgtgacattaatccacaggctccggttcatgtcctagtcattccaaaattaagagatggattaacacaacttgggaaggctgatagtaggcatggggaaatattgggtcaacttctgtatgctgccaaaattgtagctgagaaagaaggtattgatgatggattccgtgtcgtcatcaacaatggtcccagtgcctgtcaatctgtgtatcatctgcacttgcatgtattaggtggcagacagatgaattggccacctggttgaaggttgactattactttttaaattttaactgcctattttctgatgaatctctcatggatatttcttcatcaagagttgtaattttgagacctacatataaataatcttgcaacaactgatcctttagtttggttatatgattattcattgggagcttatctatgattaaatagaaagggtgaaatgctttttgtgttaaaaaaaaaaaaaaaa

SEQ ID NO: 4508 - DNA, 1470 bp, Glycine max
atttctctctatctttctctctctcctcatttacctagctcgaatctcatctccaaaggcaacaaacaagagcaaaaagaagagaagaaaaaagaaaaccccttcatttcagcaacaaaactaatgcaacttgtactacaaaaatatttatactaacccactccttaccttgccgtctccaacaccctctcatatatatgtttttgcttattattcaacatcatcaacaaatcacacacacacacaaacacaaagtgatatatatctccggagagaagaagaaacaaagagattcatttttagttactattatttttattataaattaaataataataataacaatgccttcttctcttcagttggataggttcaatcctatcaccgacgccgtcaccaccgccaccgtcgccatcgccaacggcgttaactgcccgaagcagcctcaagcgccgccgtccactgcggcgcgtcgcctaatggtgccctctctctcttctggcaggggaatcgcggcctccgacacggtggcgctccaccacgcgaacgtggtggggctcaaccagtgctgctccgtggtgacgcagcacatcaacgcccccgtcgcagccgtgtgggcggtggtgcggcggttcgacaacccacaggggtacaagaacttcgtgaagagctgccacgtcatcaccggccacggcattcgcgtgggcgccgtccgcgaggtgcgggtggtgtcggggctccccgccgagatgagcacggagcggctggagatcctcgatgacgagcgccatgtcatcagtttcagcgtcgtcggcggcgaccaccgcctcaggaactaccggtcggtgacgacgctccacgccaacgggaacgggacacttgtcatcgagtcatacgtcgttgacgcaccgcagggtaacactaaggaggaaacatgcgtgttcgtcgacacgatcgtacgttgtaacttgcagtcgctggctcagattgctgagaacagaaccaaaaactgtgaaaacgctgcacaacactgttaactgttaagtgtttaacgatatcattatttcttctctatttctttttctttcttcttctttttttaaagttaaaatgggttgtgtcttccggtttttttgtttcaaattcgggtgtcatggacttagattcaagcccgtgtttttggaattgatatgcatggatgtgtatagatcactagggtttttcggacggcaatggttgaatctatgtgatatgtatatatgatatatgttaatgttaatgttcatataaatgatccaatgatgtagtaaaaatttcttttttcattctacctagcaagctcttgatcgtggattgatggtgttctatttacccagaacttcgcatccgaggtggactttgattcttcttgttttgacttttgtgtatgttttccttcattcgcaacaccccgtaaataaaattatggat

SEQ ID NO: 4509 - DNA, 764 bp, Glycine max
  misc_feature (753)..(754): n is a, c, g, or t
  misc_feature (756)..(757): n is a, c, g, or t
atcctctccaagttgaattagccaaggtaagggctagactctagagatttccgcgtggagaaaacacaattggggttgttccttcttctgcttatatagtacatatagcatagcaagcacataatagattgtgtttgtgtttcactttcgcaaaggactaatccatatcgtagagtcaatcacaaaactctctactttgccacaaatgagtgaccccaagtatgcttatccctaccctgctcaaggtcaggggtattatcaaggtcctcctgtgatggcaccaccgcaatattatgctgctccaccaccacgcacaagacaaactggattccttgagggatgtcttgcagctctgtgttgttgctgcctcatagatgagtgctgctgtgatccctcaatcttatgtatcatctgatgtgatcaaaattgctgcaagtaggaaaaacaaaatgaagaagatacaagtacatatatatgcagtgtgatgcttccagagggcttcagttagcattatgtttagttgaatagtagtcttacttttatccagaactagaacttatgtttgtgcttgattaacatggtttctttccatcttggtctttggtgtggttgtgcatcaccagtgatttgatttgtaatgtggaaagtaaacaattattgtgaattcaattgggtcactctgtttctccaattttctttgtcttacatcttatcattttgaatttgaatctggaatgtggaaatggcgctcgnnanntcaacaa

SEQ ID NO: 4510 - DNA, 1550 bp, Glycine max
tcgagtcagctacgtaggccccccccccctccgaaacgcaaagcgcaaagcgcaaagcgcagttgttgctctttgaactcgaacgaagttctccgaagtcgaaacactcgttcgattcgctgaactctgaagttaatttttgttgcgaaaatgtcggtggcgaagaagttgattagatgcgtcatccttgacttggacggcacgctgctcaacacagatggcatcgtaggcaacgttttgaaggttatgttaggtaaatacggaaaggaatgggacggaagagaagctcagaagataattggaacgacgccgtttgaggccgctgctgcggttgtgcaagattatcaacttccctgctccgccattgaattcctctccgaaatttcgccactcttctctgaccagtggtgcaacattaaagcacttcctggtgctaataggttggttaaacatttgaagagtcatggagttcctatggccttggcgtcaaactctccaagggaaagcatcgaagccaaaatatcctatcatgatggatggaagaattctttctctgttataattggtggagatgaagtaagaacagggaaaccttcccctgaaatattccttgaagctgctaggaggttaaacatggagccttccagctgtcttgttattgaagactctctacctggggttactgcaggaaagactgctgaaatggaagtagttgttgtaccatcacttccaaaacagtcgcatctctatactgcagcagatgaggtgatcaattccctacttgatttgcgactcgaaaagtggggtctgcctccatttgaagattgggtggagggaactttgcccgtagatccctggtatattggtggtcctgttgtcaagggatttggtcgtggctcaaaggtacttgggatccctacagccaatttatcaacagagggctattcagatctcctttcagagtatcctgcaggtgtttattttggttgggctggattgtcggcaagaggtgtttttaaaatggtgatgagcattggttggaatccatatttcaacaacaaagaaaaggctatagaaccatggttactccatgactttaatgaagatttctatggggaagaactgcggcttgttatagttggttacatacgtcccgaggtcaatttttcatcccttgaaagcttggtagctaaaattcatgaagatcgaagagttgctgagagggctcttgatcttcccttatattcaagttttaagaatgattcgtatttgagaagctcttagtacaattttttttatcccttagcttcttgtcgaataaaaccctggtgttaattgttgtaagtgcaaaatccagttattcaactcgaaagcagtacgcatattataccctatgattcataatcatgccaatgcaatgtgatttggaacatgcataaagaaatactgaaaaaaaataagagtcattgtttgcattttactaaaaaaaaaaaaaaaaaaggattttgacctttaattgagttcctcacatatcttaaaggagatttgcc

SEQ ID NO: 4511 - DNA, 1610 bp, Glycine max
cccacgcgtccgcccacgcgtccgcccacgcgtccgcccacgcgtccgtacggctgcgagaccgcaatacgataaagggtttttgttttgtttccttgggtgctgcatgcactttcactcgaagaaccttgaagcgagtctgggccacagcaaccagcgacaacaactcaatcagctagggttgctttgcttgctatcttgttggaggattttctgttcaagagaagatggtaactagaattgtggatcttcgttcagacacagttacaaagccaactgaagcaatgagagctgctatggcaagtgctgaagttgatgacgatgttctaggctatgatccaactgcttttcgcttagaaacagagatggcaaagacaatgggcaaagaagctgctctttttgttccatctggcactatggggaaccttgtatctgtacttgttcattgtgatgtcaggggaagtgaggttattcttggagacaattgccatatcaacatttttgagaatggaggcattgcaaccattgggggagtgcatccaagacaagtgaaaaataacgatgatggaaccatagacattgatttgattgaggctgctataagggacccaatgggggagctattctatccaaccaccaagcttatttgcttggaaaacactcatgcaaactctggtggcagatgcctctcagttgaatatacagacagagttggagagttagctaagaagcatggactgaagcttcacattgatggggcccgtatttttaacgcatcagttgcacttggtgttccagtggataggcttgtccaggcggctgattcagtttccgtttgcctatctaaaggtataggtgctccagttggatctgttattgttggttccaagaattttattgccaaggctagacgactccggaaaaccttaggaggtggaatgagacagattggcctcctttgtgccgctgcacttgttgccttgcaggaaaatgttgggaagctggaaagtgatcacaagaaagctagacttttggctgatggattaaaagaagttaaaggactgagagtggatgctggttctgtggagaccaatatggtatttattgacattgaagagggtacaaagactagggcagaaaagatatgcaagtacatggaagaacgtggtatccttgtgatgcaagagagttcatcaagaatgagagttgttctccaccaccaaatatcagcaagtgatgtgcaatatgcattgtcgtgctttcagcaagctctagctgtcaagggagtacaaaatgaaatgggcaactagtggaagaatttgaatatggcacgttgctgccatattagtcattaaaaaggaattccgtgttccatttgcctttgctcatttgattttcttaaatgtaccctaaagaacatgcaaagatttacatctttgatgttgttccctgttatgaattatgttgactatcatcgtcgttcccctgctaatttagctcattgtttactgtcccattattaggcatgttaggcatgtataggatattgtgcaacgttagcaatatatttttaatatatcttttatcaattaggtaatttgatattgtcc

SEQ ID NO: 4512 - DNA, 993 bp, Glycine max
gttttctttcttcattttaagccttctttttgctccctatttcacattgttaagaaccctccactagtttttttctagggttaaggaaattaacctaatagctcttagcacattgccttgttcttgcactaggaagaacatgaaggagagtggtagaaaacaaggtaccatgtcgccatgtgcggcgtgcaagcttcttcgaaggagatgcacgcgagattgcgtgtttgctccttattttcctgctgatgaaccccagaagtttggtagtgttcacaaggttttcggggctagcaatgtaaacaaaatgttacaggaattacctgagcaccaaagaagtgatgcagttagttcaatggtatatgaagccaatgcaagggtgagggaccctgtgtatggatgtgtgggagccatatcctctcttcaacaacaagttgatgtgctccaaacccaattggcactagcacaagcagaggttgtgcacatgagaatgcgccaattctcaccaccatcagaacaacaacaaccctcagtgcttcctgaagcctccaattcatcatcagagaacttgtaccactcaagcagactcttgtcttcacaaaccaagtccctttttggcatggacatggtcgttgatcaggccaacatggggcaatccttgtggtcatactagcttaattaattaggttatggcatgcatgcatgcatgaccttcactttatttatttttcttatcattattattactatcacgggcttgctttattgtctgcctcattagtaccttttttttctgctttgtatcccctttaccctagcctgttctcatgactgaaaggacatccatctctctctgcattaccaagagatgatgatgatgattagttagccttagtgtgtaaacgtataaacttgtaattatgagtaatcatatcatttgtattaagttgactatatacttttttactgcatcttagcttcacttcctgtctg

SEQ ID NO: 4513 - DNA, 2381 bp, Glycine max
tatatgtacaacagatgcgtcctccatttctcctcgcgttacgagtttcaggggtaccactaccacctttccgccttcagccgtttcaaccaccagcaaatggctgggcttcgtggcggccgtgtggattcaatgcatctccggcaacaactacactttctcaaactactccgacgccctcaaatccctcatgcacctcactcagctccaactcaacaacctctccgtcgctaaagacgttggcaaagcctttgggcttctcgcgggcctggcctccgaccgcttccccacttgggccattctcctcataggctccgtcgaaggcctaattggctacggaacccaatggctcgttgttagccaaagaattcaacccctcccctactggcagatgtgtgtgtttctgtgcatgggagggaacagcacgacgtggatgaacactgccgttttggtaacatccattcggaacttccgttcaaacagaggacccgtttcggggattctgaaaggctttgtagggttgagcactgcgatattcactactctctgttccgctctcttcgccgacgatcctggctccttcctcatcatgctctctgtcattcccttcgcagtttgcctcaccggtgtgtttttcctccgggagattcctcccgtcgcctccgccgacgccgacgccgaggaggtaaagtatttcggcgtcttcaacgtcgtggcggtggcaatggcgctttttctgttggcgtatgggttcatccccagccccagcatgttggtgtcaagagtgttcgtggcggttttggttgttatgctggtttcgccgttggggatcccggtgtactcgtacttgaagggtagcttcggagaggggaatgacgtggaggggcagagggtgaaggagccgttgcttcagattccggagaaggagaacgaagctgtggcggcggagatagtgaagagggtgccggtggtgggtgaggagcacacgataatggaggcgctgagaagcgtggatttttggatcttgttcgtgtcgtttctgtgtggggttggaacgggtttggcagtgatgaacaatatgggtcaaatcgggttggctctcggatacccagatgtctcgctctttgtgtcgcttacaagtattttcgggttttttggacggatcatctcgggtactgtttcggagttcaccatcaagaaagctggaacacctagacctctttggaatgcagcatctcagcttctaatggctgtaggttacatactcctggccatggctatgccaggttccctatacattgggtctattttagttggcatgtgctatggagtgaggcttgccattacagtcccaacagcctcagagttatttggactcaaatattatggtctcatatacaacattctcatccttaaccttcccttgggttctttccttttctctggtctgcttgctggcatactctatgatatggaggcaactacaacagagggaggaggcaacacgtgtgttggaggtcattgttacaggctagtctttgttgtcatgactggagcatgcattgttggcttcttcttagacattctgttgtcaatcagaaccaagaatatttacaccaagatttccatgagcaagaaatccttagcaacatccaataggcagtgattcagaatggtatgacattcctgggattgatgaactttatgctcaagtgatatctcaagatctgtcagcaaggtgacttatcctatcagatagttaaaactcattttttcaataaaggagggccgtttgtcatgtactgtaatttttatttatttatttttatgatgtgtttggaaggatcagtgagaattctttttgttccatatggagagaagtgcatttagtatcgtgagagttttttgatagattaaaatattatgctgtttgtttatgaattagactggtgtagtggtgttcttagctgtttttttcgtaccagtcagtgttgtttggctattagcgacagtcactagtctatgtcctaagtttgcaagtggccatcctaatgttgcagcaatctttggcattgtaacatgtgttattggcaatatgttcaatgaaggaggcaacaggtgcaattgatgcagtaggaaaataaaatttattaaagattatgcaaaccccatggtactactatttacgagggtggagaccactctagagttggcttgcagcttccaaactacagtttgccaaaaacaaaagcatttttaacttctactcaaaccatgacttgggactttaaactatattcaaatataatttaatagtgagttttccaaataaataaattatacatgaaattcattttgcattctccaaattaaccataccc

SEQ ID NO: 4514 - DNA, 678 bp, Glycine max
aatttggataccctaacgtgataaggacttaattatttgtccctacgtaggccccccccccgaaacacaagctacaattttggtaaatgaagccctctgtgctacgtttgtcactgcttgttttcgttcctctgcttctatccctcttgtatgttgcactcatgccaaagaaggaaactgctatgaaaacctatgaggtctttggagtgaagatagagaagaacccacctcagtccaagctcaatgagcttggagtctcaacttggtccaagtgggaaggtggtccagccaaaattccatggtcctttaaagaagaagagactatgtatctgctggagggaaaagtgagggttactgttgaagggtctgttgggtcttttgaaattgggggtggtgatttagttgtcttcccaaaaggaatgaacattacttgggaagtgattgaagctgtgaagaagcactacagcttgaaaaaataatgatgtgtacttataagccttttctgttgttgtggcctaatgatgccatgtatgaacatgatcaagtaattactactcactatagcaggatataccaaagcctttcacttccattagattgtacctttgacaatgatcctattggaattaatctctgatcattatgtttaagatgattgtggagggagcaactctcatc

SEQ ID NO: 4515 - DNA, 1373 bp, Glycine max
tcgatcagctacgtaggcccccccccccgcattatgttacatgaagaatgcagtaaaagtaactcattcattgagtgtggtcacttacagagcagaggaagaatggcagatggatcatcaacaccagcaacaccttctgccaaagtttcagccatcttcatataccctattaaatcatgccgtgcaatttctgtttctcgtgctcctctcactcctactggatttcgatgggatagacaatggatggtggtgaattcccaagggaggatgtacactcaaagagttgaaccaaggcttgctttggttgaggttgaattgccatctgaggcatttcttgaaaactgggaacctacacaagactcctacatggtggtgaatgcacctgggatgcaacctctcaaaatatgtttgagccaacaagggaaggaggtagcaaatgctgtctcagtatgggaatggactggatctgccttggatgagggagctgaagcatcacagtggttctcagattatttaggaaaaccatgtcaactggtccgcttcaattcagcttctgaagttcgaccagtggatcctgattacgtcaagggacaacatcagaccacatttactgatggttatccattcttactcgcgtctcaggaatcattggatgaactaaacgagcatctaaaggagcccgtttctattaaccgatttagacccaatatcctcgttgaaggttgtgaaccatattctgaggacttatggactgacatcaagataagcaagtttttattttctggtgtcaaactgtgctaccgttgtaagatacctacaatcaatcaagagactgcaattgctgcacctgaaccaaatgaaactctcatgaaaactaggtctggagaactcataagaccaaatgataaaaataaaaaaaggatctactttggtcagaatatgacctggaactggatgggattttctgctgaagggagtggtaaaatcatcaaagtgggagattctgtttatgtgcttcagaaggtctcttcaactgctgaagcagctgcttgaactgtgtatgtggaatctatgtcgatgctatatcagaaataaaaggctactatgccataaactttctcaaacatagtacccaggcctatgaagtttgctttgtgcaagttatggcttgtgataataaggcttttgcaattaagaaaaaggttttatttttctatttcaatcatggtaaatggtacaaaagatggctgcatgcacaaactagttgaaatgtgactggttactttttagtttcatgtatcaaagagcaatgccattaagaaaaaacagctaagattgtcaccagaaattttcataaaaaaaaaaaaaaaaaa

SEQ ID NO: 4516 - DNA, 670 bp, Glycine max
attcggctcgaggcaaactgaagatttgctttacaaactaagtgtttctttgactggtgaagaacttgatgtcattgaaaagctttattaccaagcaatgaagcttgaaatagatttcttctctgctcagccactctttcagccaactatagtacccttgactaaaggacataagcctgcggaagatcatctcatagttttttctgattttgatttaacatgcactgtagttgattcgtccgccatcttggctgaaattgctatagtgacggcaccaaaatctgatcagaatcagcctgaagatcaaattgttcggatgttatcttctgacctcaggaatacatggggttttctatctaaacagtatacggaggagtatgagcaatgtatagaaagcattatgccttccgatagattgaacaatttcgattataaagaattgtctatggctcttgagcaactttcaaaatttgagaacactgcaaataatagggttatcgagtcaggggtactcaagggtataagtctagaagatataaagcgtgctggagagcgtctgatactacaagatggtgccctaacttctttcagagcattgttaagaatgaaaatttgaatgccaacgtgcatgttctttcatactgctggtgtggtgactcaagatgacaag

SEQ ID NO: 4517 - DNA, 1096 bp, Glycine max
aaagaaaggcaacaagtatttattgatataaaaaatgaagacctcaaagtaacaaacttggaaccccggtcccttgtgatttgctcacaaaaccagtgtcggtcacaccatctctcccttttctccacctgcaacgatgtcggttaaggagtgccaccaccaccacaagggaaagaagcacaagctctggagacgcatcttctggggaatagtgatcttcgccttcatcgtgttactgacagttcttataatctgggcaatcctaaagccttcaaaaccaaccttcatcctccaagacgtcaccgtttacggcttcaatgccaccatccccaacttcctcacctcaagttttcaggtcacgctttcctcgcgcaaccccaacgacaaaatcggaatctactacgaccgtctcaacacctacgtaacttaccggaaccagcaggtcacgtaccgaacctcaatcccaccctcgtaccaaggtcacaaggaagaggatgtgtggtccccgtttgtctacggcactaatgtccccgtcgcaccctacaacttcgttggcctcagtcaagaccagaccaacggcaacgtcctcgtcctcgttaagattgacggtaaggtacgatggaaagttggttccttcgtctctgctcactacaacctcaatgtaaggtgccctgctttcataacctttggcccccaaagcaacgggattgcccttggcaataacgccgttaagtatcaattggttcaacgctgcaccgtcggggtttgatgtcaacgccttccaagatatattgctctgcctcttggtatatttagtgtctatttatatacggtctttctcatttctttttttcatatacgtattcttcctatcttcctctacgtatttcttctacggatcactttgttgttagacatacatatgtctgtcttcgttactgtattttgaattttacattttgctatagaataaatttgtatttggagaaaattctcatgagatgaagcaaaattacaatttatagcaaagtcattttagataaattaaaacgttgtttcaatttggaaaaaaaaaaaaaaaactcgtgaatcatct

SEQ ID NO: 4518 - DNA, 993 bp, Glycine max
  misc_feature (932)..(932): n is a, c, g, or t
  misc_feature (982)..(982): n is a, c, g, or t
  misc_feature (993)..(993): n is a, c, g, or t
atgatcttaccatatctttgcaagaccttaaagtaccaaacttccaactcttctctcttctctcttcactcttcactcttgtcgtcatttcctcacaaaaccagtgtccgtaacatctccaccttaacgatgtcggtaaaggagtgtcaccaccacaagggaaagaagcacaaactctggagacgcatcttctggggcatagtgatcttcgccttcatcgtgttgctaacagttcttataatctgggcaatcctaaagccttcaaagccaaccttcatcctccaagacgtgaccgtctacggcttcaacgccaccatccccaacttcctcacctcaagctttcaggtcacgctttcctcgcgcaaccccaacgacaaaatcggagtctactacgaccgtctcgacacctacgtcacttaccggaaccagcaggtcacgtaccgaacctcaatcccaccctcataccaaggtcacaaggaagaggatgtgtggtccccattcgtcttcggcactaacgtccccgtcgcacccttcaacttcgttggtctcagtcaagaccagaccaacggcaacgtcctcgtcctcgttaagattgacggtaaggtacgatggaaagttggtaccttcgtctctggtcactacaacctctatgtaaggtgccctgctttcataacttttggcccccaaagcaccgggattgcccttggcaagaacgccgttaagtatcaattggttcaacgctgcaccgtcggggtttgatgtaaccgccgtccaacatatattcattctgtctttgctctgctccttgctatatttagtgtctatctatatacggtcttttctcatttctttttttttatatacgtattcttgttatcttccactacgtatttcttctgtattgacggatcactttgttgttaggaacttcnttcttgttaacattggaatgtcttgcacaaaaaacgcctggaaaaaattntataaaataan

SEQ ID NO: 4519 - DNA, 2533 bp, Glycine max
ccacgcgtccgctggattatagttgatggttgtcataaattcatgttgggggttgtgaggcctcatctgttagtcggtttcttttgaaatttgacccccccctcccccctttggatcgttgtttcatgctgtactagttagtggttaccatttggccactcttagaggtactttttgttaaactttgtctgattttgttatcagttagtttggaagagaccatagaaaagaatctgcttgtggggtggtttgatatatcacttgttaaggaggggtggatatgggtgacaaagaaaagtttgagttggatagaaacgaggatcctatgagttattctagtggaatgcactcggattggagatttgggggtgcaaatattgcaagttcttctgtagctatggttggcctggggaattctatgaatgtcagcagaggggatttgattggttcttcttcatgttcctctgcttcaatggtggactcatttggtccaaactactgggaaaaccccacctgttcccaaaacttgggattttgtgacattaatgtccacaacaatgggggttcttcaagcacagttgcaatcagaaaagatggttttggatttggaagagctggtcaggatcatcatgaaacacttgaaatgggttggaaccctgctaattctatattatcaaatggaccagggatgtttccccacactttgtctcagtttccaactgattctggattcattgagagagctgcaagattctcatgcttcagtggagggaattttagtgatatggtaaactcatatgggattgctcaatccatggggctgtatggagcaagagatgctattgcaggccatgggatgaaatcagtaactggagggcaatctctcggctccgttggccccccccccgaagctacaaaggatgtgtctccatctgttgaacatcttgttgctgctaaaggaagccctctcaagagtgatagaagaagtgaaggccatgttatatcccaagatgaagggaagcaatctcttgttaggcccgctaatgagtctgatagagctgaatctagtgatgatggtggtggtcaggatgactccccaatgttggaaggtactagtggggaaccttctagcaaaggactaaacacaaagaaaaggaaaagaagtggacaggatggtgataatgataaagccaatggagctcaagaactacctagtgaaggtgcagaggacaactatgagaatcaacagaagggagaccaccaaccaacttcaacagccaaggcttctgggaagaatgccaaactggggtctcaagcttctgatccacccaaggaggaatacatacatgttagagctcgccggggtcaagcaacaaacagccatagccttgcagagagagtgaggagggaaaagataagtgagagaatgaagtttcttcaagatcttgtacctggatgcagcaaggtcactggcaaggcagtaatgctagatgaaatcatcaactatgtacagtcacttcaacgacaggttgagtttttgtctatgaaacttgcaacagtaaatccacggctggattttaatattgaaggacttcttgctaaagatattcttcaacaacggcctggtccttcatccgcactagggtttcctctagatatgtccatggcttttcctccattacatccacctcaacctgggctgattcatccagtaattcccaacatggcaaactcatctgatatccttcaaagaaccatccatccacagttagctcccttgaatggtggattaaaggaaccaaatcagctgcctgatgtatgggaggatgaacttcacaatgttgtacagatgagctttgcaacaactgctccccttactagccaagattttgatggtactgggccagcaagtcagatgaaagttgaactttgatctttagtcttcatacattaatctttgccacatcgagtattttggctttcattctcgtcagatggaaataaccaagcttagagttttacacatgagttgccaaacttgaaggccatggtctcaattccctgcgaaatatgttttagatgatgtactaccgagtaaggttttggtgtttaggccttggagggcagtcacatatccttgcagaagactaactctaggttagaggatgtagagcagtattcatggatgtttccttccttttcaagcgtgaatatatgtatcatatgtttagaagtggaagtctattttatcaaaataggtttattcactaaatatattattaaagaatgtaaagacaaggatctcactgagtctgatcaaccaggagaaatgctaaagcaaattttttagttggacttagtatagtttacaattacaaagtgctatgagaacctgttcatggttttgatttgatgcttgctaggtgcttgcttgcacatattgtaatgtttttctgcccaacaattagctatgttgcattctttcatggaacaagttgggattttagatgataccaagggagctttttgttca

SEQ ID NO: 4520 - DNA, 1493 bp, Glycine max
tcagctacgtaggcccccccccccatctctccatgatcgcctatactgtagtgatgtgaaaaaggaaccactaacatggaagcagagactaaagatctgcataggagcagcacgtggactacacttccttcacacaggtgtcaagcgaaccatctttcatcgtgacgtaacaccttataaaattcttttgggtagcaacatggtggccaaacttgcagacttccggctttccttaacaggaccgcattatgcatcaaagccaaaaccaaagacaatttcaaaagatggctttataggtacatatggttatgtggctcctgagatttccgaaaacaatacaataacagaaaaatgtgatgtttattcctttggggtagtgctactggaactggtatgcaaagacaagctaaaagatgttgagaagcggcagaagcaccctgttgaggagaatattgatccgaatatcaaaggaaagattgcaccagagtgttgggaagtatttatggatatcacagaaagatgcttgaagtttgatccgaatgagcgaccagcaataggtgaagtggaggtgcaacttgagcttgctctgtcactgcaggaagaagcagatataataaatactggcgatgattataccctattatcgatgatcattatgaattaatcctcaaccagaataggtaccatctttagctggaaactaaactgatggattatagaacttccaaggttgtctcaatgataattgataacagttcaacagattgttcaatcacagtagagcagatgaatgggaagtcatgggaaaatattttttttagttcaagaatgaaattgagttatttgccagttttgtcactcaaggcattttttgtctctctagtaagattttatgaccgcaaagacaagaagattgttgtgactggtgtatgagaacacaggcactgccaattgatctctccataatttcctaaactgtcatgatatgaaaatggaatcacttttgtggatatatataggctgaaagatccttcaaagctgcagtgcatggactacattacattcacacaggagtcacgtgcaccgactttcatcatgcagccaatatcctgcaatattttagcccttcattagtcattgcacagaaatgaaggaacagaaaaatgtaatgaatagttcctatttagctatagagaaaattttgatggagaggcaggagaggatccatacttgttttggataacaatacggtgcctgaactcagatttttgcttttttgaggtatctatactgttttcttgttaattatacatcacttccagcttagaagctggcccagtaatccagtatcaacttcaaatttgatctcttgttgtataaagtttgcgtctgggtagatccatatagaaataatcgctatgaaagaatttgttgggaaaaaaaaaaaaaaaaaaaaaaaaaaaaaaaaaaaaaagaaaaaaaaaaaaaaaaaa

SEQ ID NO: 4521 - DNA, 957 bp, Glycine max
atataccctcactatctgacatcaattccaagcactttactacctagaatttgttacactcatcatggcagagcttgagagtcctaatgttatgcctaagctgatatcttttctctcatctctgctcaaaagggtagctgaatctaatgatcttaaccagcaacaactcatacaccaaaaggtctcagttttccatggcttgacccgccccaccatctcaattcaaagctaccttgagagaatcttcaagtatgccaactgcagtccatcgtgcttcattgttgcatatgtctatcttgatcgtttcactcaaaggcaaccctctttgcccatcaactccttcaatgtgcaccggttactcatcaccagcgttatggtggctgcaaaattcatggatgacttgtactacaacaatgcttactatgccaaagttggaggaatcactacaatagagatgaactttcttgaggtggactttttatttggtttgggtttccatttaaatgtaacccctggcaccttccaagcctactgtgcacatctccaaagcgaaatgctgctgatgcaaccactgaattttgcagattcttccttaagtttaggaaaatctctaaaggcacatttatgctacaatgaggacgaatcttcttcccatcaaaagcaacaacaattagctgtttgatttcttgcattacctcaatgcatgtaatctagctgtagatgtatgaacctattatagattttcaaattaaattattttggtcctgctctcttcttacttctttgtgtctctaattagtaaaagaaaatttctatttttctatttctgaactctggttaaattatttggcattgcacagaactacagataatggtctcttctttacagtctggctaaatgagtggtatttttaattagctctactaatataataatttattgtttctttgtaaaaa

SEQ ID NO: 4522 - DNA, 1379 bp, Glycine max
tcagctacgtaggccccccccccaccgaagggcgagagagtccagtgagtgttagcggttctggttctggaaattgatcgagtcgaaaagaaccctaacaataacatggattctcaggttgccgtagctcttgctctttcacttgttggtggtgtcagcacttctatcggtgcactttttgtaattgttaataaagctcccagtttgaagatgcttgggctattacagggttttgctgctggtttgatgcttagcatatcgttctttgatttggctcacaatgctttgaactcattgggcttcttgaaaggcaacctttggttttttgctggggtaatattctttgctgttgttgccagttttatcccagagccaacacttacacccacttctgatgtgaagggcagaaagatgtaatcacatgcttgaaaatagaaaaatggggatgaaggaggcaaggatattatgaaaaagcatcgccggcaagttttgttcagtggaattgttacagccgtaggcataagtttgcacaattttccagaaggaatggcggtgttccttggatccttaaagggcctccgtgttggcatcaacttagcattagccattgctctgcacaatatcccagagggtgttgctgttgcacttcctgtttattttgcgacacaaagtaaatggcaggcattcaaattagcatcactttctggctttgctgaacccctgggagttataattgtagcctatctattccctagcagcttaagtcctgagattctggaaggtttacttggatcaggtttgcaatgatacagcatctagatgtcactggaatctttggcatttatgtttttatgcagatttgatctatgatgattaattacagttggtggagttatggcttttctgacccttcatgaaatgcttccattggcttttgattatgcgggacagaagcaatctgtgaaggctgtctttttggggatggctttcatgtctgcaagcctgtattttctaagtatcagcttacctgaggacttaagcttgtaggtgggaacaacctcttctcttctttaaatgtcatgaatttcagtcacattgtgatgtgtttcctgattctatcacctatcgcagcaaagttccttcagaaggggtctcacagagtgtccaaggacaataatgcaccaccatgtgtttaggatacctatcaatcagacatcaattttagggatgcattccacctatgattgtggttcccctatagactaatgtaaaaaaaaaaaaagaaaagaataagagtacagcccctttaattcttttactgacccaccttgtatactgtatcatcaacgtgattggactttaaattgcgcaatttgcgc

SEQ ID NO: 4523 - DNA, 1494 bp, Glycine max
  misc_feature (1438)..(1438): n is a, c, g, or t
  misc_feature (1462)..(1464): n is a, c, g, or t
gacccatattcgtttccctactcattccaccctttgattaataataatcatagccacacccacccacccaccctttgcccccacaaaatgtcacattcattctctttccccttaacaccccttgtgctcacttttcgagccacaccatcatttagtcatcatctaaactaaaccactctctcttcattctctttctcttttcctttcacacaaactcctcttatgatgggtcttgatcaagatgctagcagcaactctggccttcagcttattctagggttagctttgactgccaccaccaccaccactccatcatcaccaccatccatttccaacaagcttgatcatgttgatcatcaccaccatcttataactcttagaccaacaacaaagtcatcctataattcctctgaggctgaaccatcattaacgttgggtctttcccgggagagttacctcaaagtccccaaaagcatcataggacacaacaacaacaaagtctcatcctgtgatgaccctcttgacttgtccacacagactaattcacctcatcacagtgctgtttcctccttctccagtggcagggtcaagagggagagggatctcagctgtgaagaagttgtggatgcaaaagagattgatcagagggatcttagctgtgaaggaataataagagccaccgaagaagaagaagacggcgccgccaccagaaagaaacttaggctcaccaaagaacaatctgctttgctagaagaaagcttcaaacaacatagcaccctcaatcctaaacagaagcaagctttgtcgaagcagttaaatctaaggccacgacaagttgaggtgtggttccagaacaggagagccagaacaaagctgaagcagacagaggtggactgcgagttcctaaagaaatgttgtgaaacattaacagatgaaaacagacggttacagaaggagcttcaagagctgaaggcactgaaactggctcagccgttgtacatgcctatgcctgcggcaacactcgccatgtgcccctcttgcgagaggctcggcggcagcgccgtcaacggtgccggcggttcccccaagacatcattctccatggcccctaagcctcacttcttcaaccccttcgccaatccttctgcagcatgttgattgatattgttattataattaggcttttagttttcattaaaaaaaacaaaagacaaccaaagaagagttcccccacaacctttgtatttttttggttgagggatacgtcttatgaaccagtgaaaaaaggctaaaggtgtaattaactaatatactgtagaaatttgtaaccgctgattagaattactttttactcttcctttattaatgtatgtttataaatcgttatagaagacatccatctatgaaggaattaatgactattttttttaatagcccnaaaaaaaaaaaaaaaaaaaaaaannnaagcggccctctagaggatccaagcttacg

SEQ ID NO: 4524 - DNA, 1342 bp, Glycine max
tcagctacgtaggccccccccccgatctaaactaaaccactctctcttctcttcattctccctcttaattcttttctcttttctttctttcacacaaactcctcttattatgatgggtcttgatcaagatgctagcagcaactctggccttcatcttattctagggttagctttgactgccaccaccactactactccatcactaccatccatttccaacaagcttgatcatgttgatcatcatcaccatcttataactcttagaccaacaacaaagtcaccctataattcctctgaggctgaaccatcattaacgttgggcttgtcccgtgagagttacctcaaagtacccaaaaacatcataggacaaaacagcaacaacaaagtctcgtcttgtgatgaccctcttgatcacttgtccacacagactaattcacctcatcacagtgctgtttcctccttctccagtggcagggtcaagagggagagggatctcagttgcgaagaagttgtggatgcaacagagattgatcagagggaccatagctgtgaaggaatagtaagagccactgacgaagacgaagacggcaccgccgccagaaagaaacttaggcttagtaaagaacaatctgctttgctagaagaaagcttcaaacaacatagcaccctcaatcctaaacagaagcaagctttggcgaagcagttgaatcttaggccacgacaagttgaggtgtggttccagaacaggagagccagaacaaagctgaagcagacagaggtggactgcgagttcctaaagaaatgttgtgagacattaacagacgaaaacagacggttacagaaggagcttcaagagcttaaagcactgaaactggctcagcctctgtacatgcctatgcctgcggcaacactcaccatgtgcccctcttgtgagaggctcggcggcggcatcaacggtggcggcggcggttcccctaagacaccattctccatggctcctaagcctcacttcttcaaccccttcgccaacccttctgcagcatgttgattgattgttattataattaggcttttaattagttttcattaaaaaaaaaaaaaaacagcaaaaaccaaagaagagttgccccacaacctttgtatttttttggttgagggatacgtcttatgaactacatagctagtgaaaaaaaggttaagggtgtaattaattaactaatatactgtagaaatttgtaactgctgattagaattactttttactcttcctttattaatgttatgtttataaatggttatagaagacatccatctatgaaggagttaatgactttttttaatt

SEQ ID NO: 4525 - DNA, 880 bp, Glycine max
gccccaccagtttcaaccaaaatggagaagcgattcatctccgtagaccgttgggcagagggaagcgaagcgtacttcctcacccacctccactccgaccacacccacggcctcaccccctcctggcaccacgcccccctcttctgctccgccgtcaccgccaaactcctccccttcaagttccccggcttcgacctctccctcctccgcatcctccaccccggcaccacccacaccgtcaccctcccctccctcaccctccacgtcaccgtcatggacgcctgtcactgccccggttccatcatgctccttttccgcggcgacttcggctgcatcctctacaccggcgacttcaggtgggaagccacgtgcgagcgagcaaccaagtcccggtacgtgcttcgcgacgcgctccggcacgttcccgctgttgacgttgttcaccttgacaatacctactccaatcctatctacgattttccgcctcgccatgtcgcggctcagcagattatcgatatcatcgcgtcgcatcccgatcacgaggtcattatcgggattaacacattggggaaggaagatctgctggttgagatttcacgcgcgcttcaaatcatgatttgggtgtggccacagcggttgcggactatgcatcttcttggttacgatgatatttttacaacgaacacgtctcttactagagttagagcagttcctgtatatagcttcagcatcaatactgtagaggaactaaattatgtgtgcccaactataggaattatgccatcgggtcttccatggataaagaaatcccatcaaaagaatgagcttcaaaccggttcctttttgacatctcgttacaagagaggcaaattgagtgcaa

SEQ ID NO: 4526 - DNA, 1460 bp, Glycine max
tcgagtcagctacgtaggtcagctacgtaggaaatgctcagcgtggctaaatggatcgaacactctgcctctctctacttttcttcacggcggcggtagcggcggagaccggcggcgcagaacccaacctcacttccggcgggctgttatggtctactgctgcggaggaatccgatctggccccgccgccggatgacggcggcttttcttcactcgatggcatgttgcagtgggctataagtcattctgatcctggaaagttaaaggaatcagcagaagctcagcaacggcttccaccaagcgagctatataaacgtcaatttgaaatcaaggaaataatggagaaaatgaagatgccttctgatgctgaattgatgagaatcgcaataagtgacttgaataacgtgtctacatccttggaagataggcaccgtgctttacaggagcttcttgagcttgttgagtcgattgataatgcaaatgatttaagcaaacttggaggacttctcgcggttagagaagaactttattgctctgatcctggtataaggacaattgctgcatgggttcttggaaaagctagtcaaaataatgcaattgttcagcagcagatcttggaacttggagtgctctcaaggctgatgaaaatggtaaactctaattcgatggaagaagccaataaagcattatatgctgtttcagctttgattaggaatgatttggctagtcaggggttgttctatgctgaagctggaggttggatgcttcaggatattttgagtaatacaagtcttgatgtcagactacggaggaaagctgtacgtctattggctgatctagcagcgtatcaattagaaaatgtagatagggaagaacaaccatttttcaatgaccaagatctgttgaaggctgtggttgatttaactacatcaaccgaccttgatctccaggaaaaggcccttgttgcgattaagagtctcttgcaattaagaaccactgaagctcgggttttcaaggacttttgtgctttaggtgatgcactgaacagaatgagacaattgttgcatgatttgatggcggatgagtatcagagagactatgtgatggatgtggaaaatcttcgtgttgaagtggaacacactttccaaagaaagctgaagcaatcatgagttgacgtgtccataaatcttgtatcagtatctagtttctagagatttctcacaattttgaagctgctgtaggtgtttgatgaattcatgttaattttataggtgtacaggttaatccccgtcaatatactagtacctggtgatttgtattctgccattagtccttttttacgtatagaatttgtgttaacaggcgtcttttattttattgagtaaaacggcttaaacttaaacaaaatagttataatcaaatgtttttatatacttagatatatggattatttattgaat

SEQ ID NO: 4527 - DNA, 881 bp, Glycine max
acggacacggatacaaataaatagcaccgtttccttgtaatccttcatcttcataaatcctaacaagtacacaagacccagcatcagtatgtgttggtcaacacacacacagtttgagttagagttggatggacatggaatggtgcctataagaatcagagaaagagaaaggatccacaacattaggttgaagaggaaaaagttggaggacattccggaggaaaccgagcttcctattgatactaatccagcagagcttgaagaagcgagccttcacttggaaacagatttggaaatactgagccgagccatggatatgggactttgggcactctgcctcggtttcggctatatcctttccagagctcactttcgcccactttcttgacaaaaattcgttcaattattatgtacctcgcaaatagcaaatgtttttgcgaaacagtcgtaggccttaattggtggtaccatttgtgatcatcacgaggctaggtttttgtatatacccttcaaacttactgtgaagcaaaaaccacaagttttatttttaaagtattcattgattcgtgtgtgtgttacactgttctagttcatggttactataaaacttgtcttgcccaggacaggaagatacattgaatgattatctctgattgatgcccgtacaagggcaactctttttgtatatgaactaaatttaagtactgtttctttagtatttttattgttaatttgagttttatcttagtatctaagacaataaaagtcgacatttgaggtttgtgttagttgaatagatgaatcttcaatttctcaaaaatcatatgtaaattttggcctcaattgataatgcacaaaatatagacattggcaaggaaaaa

SEQ ID NO: 4528 - DNA, 1489 bp, Glycine max
tcgagtcagctacgtaggccccccccattcatttttaagaaaataaaaaataattttttaaatattcagtctcaatcatctaacataacctaaccaatttatgatcgagatggtgtaaaatttcggctcgagcccaactcatttccggttcagaaggcttgatgcacaacagccccaaaaggcgaagctagttgggataaaaaggtaatttgaagaaaaagaaaacagaggcttaggcaactaagaaagaaagatgaagctgaaggtatatgcggaccgcatgtcccagccatcccgtgcggttctcatattttgcaaagtgaatggaatagattttgaggagatcaaagtcgatttatccaaacgtcagcagttatctcccgaattccgagcggttaaccctttaaggaaagtccctgctattgttgatggaaggttcaagctatttgagagtcatgctattctcatatatcttgcttctgcatttccaggagttgcagaccattggtacccggctgatctttccaggagagcaagaattcactcggtgttagattggcatcaccagaatttgcgtcgtggagcagcttcatttgttctaaatactgtactagctccactattgggcctacgagcaaaccaacaagcagctgctgaagccgagaaaattttgatttcatctttgtcaacaattgagaacatttggcttaaggggaatggacagtacttgcttggtggcttgcggccatccatagcagatctcagtctggtttgtgaaattatgcaattagagcttttagatgagaaggaccgtgatcgtattcttggccctcacaagaaggttcagcagtggattgagagcacaagaaatgcaacgaggcctcattttgatgaagttcatacaatcctctataagctcaaaacgaggctttctgagcagcaatctaatcaggcagatggcgtgatgcaatctaggattagaacccctctaagttcaaagatgtgaacaaacaaccatgccagtaacgtgcctgtgacaacttatatgtgtgtgtgtgtgtgtgttggctgcaagtatcactgtatcaggtttgaaacatcaaagatgaagtttatgtctgtattgagaccccttaatctaagtaagttgggcaggtaataaatgtgatttccacatgaagatacaatcgtctcctcctatgagcagatttggcggcaataatgttagtctgtcctttatatttgccacgcacaatattttctaggagctggtaaattgctgtagtatagacctatgtttttttgttgaacccggatctccctcgatccaagagccaatgactaattccccaaggccatgatttgtacaatataaatttgtatgcattatccaatggcaatgacgtgggaacattatgcagcatttgtatcaaaatttgattgaaataaattaatcctagtatattaaaattttaaaaaaaggcggccg

SEQ ID NO: 4529 - DNA, 760 bp, Glycine max
  misc_feature (674)..(674): n is a, c, g, or t
ctcgccaaaaaattagttgcgacttgcgagcaacaaaatgagtgttccaatggagacggagctctcaaccgaccaaaacggcgcttcttcccaacactcactttccgttcccgaggacaaagttcttgtccctgtcgaggtaaccctaaaactttccagcacagctaaaatcgacgacgttcgttccgccgttgaggggatgttagaaaagaggagtttgagctataacgatggacccattccggtgcctcttgatgacgcgtttctagcagataacgtgcaaagaatttgcgtttgtggatgtgatactgatgaggggatgcacaatgataatgttcttttgttctggcaagtcaagcctgttgtacatgtctttcagcttagcgaggaagggccatgtgaggatataagctctgatggccaatcttccagcttcaatgaatggattcttcctgcaaaagaatttgacggcatgtgggaaagcttaatatacgaatctggtctaaagcaacggttattacgatatgcagcaagtgctttgctctttactgaaaaaggggttgatccattccttgtttcatggaaccgcatcattttgttacatggaccacctgggactggaaagacgtcgttatgtaaagcattagctcagaaattatcaattcgattcaatntcgagatacccacaggcccagcttgttgaagtgaatgcacattctttgttcagtaaatggttctctgaaagtggcaagcttgtagc

SEQ ID NO: 4530 - DNA, 836 bp, Glycine max
  misc_feature (749)..(749): n is a, c, g, or t
  misc_feature (753)..(753): n is a, c, g, or t
  misc_feature (758)..(758): n is a, c, g, or t
  misc_feature (782)..(783): n is a, c, g, or t
  misc_feature (785)..(785): n is a, c, g, or t
  misc_feature (789)..(789): n is a, c, g, or t
  misc_feature (798)..(798): n is a, c, g, or t
  misc_feature (805)..(806): n is a, c, g, or t
  misc_feature (814)..(814): n is a, c, g, or t
  misc_feature (818)..(818): n is a, c, g, or t
  misc_feature (822)..(822): n is a, c, g, or t
  misc_feature (824)..(824): n is a, c, g, or t
  misc_feature (831)..(831): n is a, c, g, or t
  misc_feature (833)..(833): n is a, c, g, or t
  misc_feature (836)..(836): n is a, c, g, or t
ttcgggtcggggccgtcggcccgcccccacacaatacttccaccctcaccatttgagttcatatcattcgtcttcttcttccaacgtgaagcaatctctgtgttcgaaatggctcgtacgaagcaaaccgcaaggaagtccaccggaggaaaagctccgaggaagcaactcgccacgaaagcagcacgcaagtccgctccggcgaccggcggcgtgaagaagccacaccgtttcaggccgggtacggtggcgctgagggagatccgaaaataccagaagagcaccgagcttctcataaggaagcttcctttccagagactcgtaagggaaatcgctcaggacttcaagaccgatctccgcttccagagcagcgctgtctccgctctgcaggaagccgcggaggcctaccttgttgggctgttcgaggacaccaacctctgcgccattcacgccaagagagttaccattatgcccaaggacattcagcttgctcgtaggattaggggcgagagggcttagggtttgttcgtgtgatgtacaaagctgtagtactttcttagtgttattgttttgtaatcgattatgaaacttctattttcactgtgactggattggaaaatcatttgtagtatggaaagtgtcagtggtgaatcttgagaattacatcgtctttggtctttaatctggtaatataatatcccttctagcaagattaattgggattttgagaaaaaaaaaaaaaaattctntccnggggnccttattttaggcgcacggggganncntttntctttatgngtaatcnntggcaaanggcnattncntggaaantnccn

SEQ ID NO: 4531 - DNA, 1397 bp, Glycine max
agcaatgaagtgtgatcgatcatcaagcctaatagagggctaatccttcacttgtttgttttgtggtgtattattacattttgcaccatgccttctctcttcgctagaaaccagaggttctcattggctactctcctgcttcttctggaactattgacaggaaaccttcgcatggcagatgctcaaattggtgtgtgttatggcatgctgggcaacaatctaccgtcagcaaacgatgttataggtctttatagatcaaataacataaagagaatgagactctatgatcctaatcaagctgctctagaagcacttagaaattctggcattgaactcattcttggggtgccaaactctgaccttcaaggccttgccaccaatcctgacacttctcgtcaatgggtgcaaaaaaacgtgttgaacttttggcctagtgtcaaaatcaagtacgtggcagttggaaatgaagtgagtcccgttggaggctcttcttcggtagcccaatatgttctacctgccatccaaaatgtataccaagcaataagagctcaaggccttcatgatcaaatcaaggtttcaacatctattgacatgaccctaataggaaactctttccctccatcgcaaggttccttcaggggtgatgtgagatcatacctagatcccataattgggtacttggtatatgcaaatgcaccattactagtcaatgtgtacccttattttagttacactggtaacccccgtgacatatcacttccctatgctcttttcacagcaccaaatgttgtggtatgggatggtcaatatgggtaccaaaatttgtttgatgctatgttggattcagtacatgcagccattgataacactaagattggttatgtggaggttgttgtatccgagagtgggtggccatcagatggaggatttgctgccacttatgacaacgcacgcgtgtacttagacaatttggttcgtcgtgctaatagaggaagcccaagaaggccttcgaagcccactgagacttatatatttgccatgttcgatgaaaatcaaaaaaatccagagatagagaaacattttgggctcttcaatcccaacaaacaaaaaaaatacccatttgggtttggaggaaagaggctagggaaagttgttattgacgacttcaatgcaacaacttccattaagagtgatgtgtaaggttggaatcctactcctcaaaatctctgttattccacccataaaataagagagaatatgttgtttgtgtgaaatatgtatatatccttcagtcttggatgaataaaatttgtgaaaagttgataaagatgaagctatataatatgagacattctctcccaatttaaccaaattttatttcattgttgatttttaat

SEQ ID NO: 4532 - DNA, 791 bp, Glycine max
tcagctacgtaggccccccccccgaggaagtatccgatatttgacaggttcatcatcataaccttcaatgaaaagaaatggctgaggcaagcattggcagcaaaagcagcagatggtctttacagggaatgacagctctcgtcaccggtggatccaaaggaatcggatatgctatcgtggaggagttggcacagcttggagccactgtgcacacttgcgctcggaacgaagctgaactcaatgaatccttaaatgaatggaacacaaaaggatacagagtaactggttccgtctgtgacgtggcgtctcgtgcagaaagacaagacctcatagctagagtctccaatgagtttaatggcaaactcaatatccttgtaaacaacgtgggaacaaacgtaccgaaacatacccttgatgttacggaggaagacttctcatttctgataaatacaaatcttgaatctgcttaccacctaagccagcttgcacatcctctcctgaaagcttcagaggctgcaaacatcatttttatatcctccattgctggtgtgctatcaataggtataggatccacttatggtgcaacaaaaggagcaatgaaccaactgactaaaaatttggcatgtgagtgggccaaagacaatataaggactaattgcgttgcaccagggccaatcaaaacccctctcggtgacaagcattttaaaaatgaaaaacttcttaatgctttcatttcgcaaaccccccttggacggattggagaaccaaagaagggcttcatggtggcattc

SEQ ID NO: 4533 - DNA, 1141 bp, Glycine max
ccacgcggcccgggggatgagtccagcgaatctggaggaggagtgcttgaaacttctgaaaggagagcgagacgaacagcgtctggctgggcttcttctggtaaccaagttctgcaaagctgaggatcagtcctcagtccgtagggtctacgatgcggttggacctcactttctctatcgcctcctcagaaccggtatggcaagcggaggaggaggcctcaacgataaccggaatgcctacttaagcttatccatcacggttctcgccacattttgtcgtgttccagatattgcttcctcggaggacatgcttttctatatcccccttgtcttggaagtaatatccaccgggtctgtcttatctgttcttgaagaatgctatgagtttctatacttggtgtcagctgcttctgaaagtggaatcgcgagatttttcgaatccggaggcatcaagatactagcttctcaaatgcgttctcttcacgatggttcacatctgatggaattatcttttaaacttttgcaattgattctgggtaggacgtcctcggacataattcagaataatgacttatctgaaatctcagttattgtggcagcaatagcaaggcagtttgctgtcttgcacaattccttgaaatttgaagctctccacctactaaatgccattctttcctcaaaagattcgtcacaacttcgtgatgccttccgattacttcctcaagatagctggtcacccaatatacgcattggtataatggctattttgcagaatcgtgttgcacctgctgaaaggttgcaggctctcattttagccgagtctatggtttccatgtatggagaagattggttgattggccaagtaagcacaaatgatgcactagatccagctccagctgacatgtgcttgttgcttgtcttggagcagtcaagggttgaaattgctgttcttctgaatgagttggcgtacttaaaatatgaagcacctcaggatacttctgccacagctgaagcaattttttcaaagcgacataatgtggctgttgcttactccttggttgagaggataataaaattaatatcaaatgttgaaggaaatgatggaaacctccttgatgaaggcacattgaccaagctgatt

SEQ ID NO: 4534 - DNA, 1725 bp, Glycine max
gcgattacttcctcaagatagctggtcacccaatatccgcattggtataatggctattttgcagaatcgtgttgcacctcgtgtcgctacgtaggccccccccctagctgagtctatggtttccatgtatggagaagattggttgattggccaagtaagcacaaatgatgcactagatccagctccagctgacatgtgcctgttgcttgtcttggagcagtcaagggttgaaattgctgttcttctgaatgagttggcttacttaaaatatgaagcacctctggatacttctgccactgctgaagcaatttttttgaagcgacataatgtggctgatgcttactccttggttgagaggataataaaattaatatcaaatgttgaaggaaatgatggaaacctccttgatgaaggcacattgacaaagctgattcaccaactgaatgagacaattgctgttgtactagagtatttagaagatgcaaaggaacatgggcaaaagaaaggagatgatttacttgcttcagtgcgaattattgggagctatcttgcagaagcacctgtagcatgcaaggagaaggttcaagatcttttagggtatatgctttctcttgaaggtgaagatgaacaaaggcccttctacgctgtttgctttctgctacctatgttgtctcaaattactatggagattgaaggatgcaaagctttggcttcatgtaaaggacttgaggctgttttagattgcttcagtaaattagttgggtcacatgcttttctggttgaggataatggttgcatctttatggcatgtgatacaataatgaatcttttattaaagaaagacaaagttcagataaagttggatgtatcagctattgttgatcttcttaaagtgttggctcattggtcagaaaacactgatgaaatgtcaagtatgatgatggcttcaagcatttgtacactgatatttgattatacatcagaagaggctcttttaaactgtccagatttcgactatagaactcttagcagtctttatcttctcattgcaagatgtctggcatcatcagaacaggatactaaagtggatatggatctttctgagattgtctcttctggcttctctcgatgggctcatcggtacccccacatcagagacgctgtcaagaactaattttgatcctctcgatctggattagttagagatggatactttcaacttccaaggtattatcattgttgaagtgaactaatgatgtgccaaatacatggaattggaaaaagactacctatcagaggattgaagctcatggttacaaatcaatgcctttagatcgcatccctccttgcccataaccggttaaaaagggacacagaccttttgttacaagtaggaaaaaccatggtctccacatattgtgaacatactatgagaaatttgaatacggagacttgtgacgcttgttaaaaaaaaagaatttgttcgttttagcacaggatagaaaaataaatagtcgtctgtatatccaaactgtttgtaccattattttccgttaggagatataggttttagataacattttaatccatgtttttcttattagattttggtccctaatttcttttttcttttggtattgatttataatctttatgcattcacattttttctattaaaaaaaaaaaaaaaaaaaaaaataccccaagggcggccgctctagagga

SEQ ID NO: 4535 - DNA, 1660 bp, Glycine max
gagctgttttgctttttttttttttttttttatcaatttatatcgcagacgtgcattaccatttttatttggtcgttgtataatacatctatagtagataattgagcagttaaacaatgctaaaaaatggaaacatggtttatactgcaaagccagtcattattgaaaaaggaagtaatcatgaataggactcttgactacttctagcttctacagaaaatatattaattgatcaataggactcttatctgctgttgaaaattgaaaattgacctgaaacaaaaattcattatccgctcctgatccagtgaaatcaacgaatttgggcaggagagcagagcaatccagaagcatccgcccctaccactgaaagctcacacacagcacatagctgcccctcctggcttggcacaaaacgggaagtacaataggggcaagagatatccttctgtccacgataaatgggcacataggttgctccacaaattacaaatgggtttcggaaatcatagttcaattgtaaggcatcagtcatattcttttctgcagctgccagcacttgccttgctgtcttagcttggttttcaacagtaggattggtctcaagtagcctcctggcaaagttagcggctgtggcaaggttctttgccttgtagcagacagtcatggcattcagcaaagctagcctcaagtgaggtgtttgaagattgctgtgggtgaaataagctgcaagctcttgctggcgtgctggattgtccttaatttcccttcttttcagctccatctgcagacccaagacatactctttcactatgataatcaattctttcacttcatcgacctccctccttgactcaacaacaatcaaaggaattgtatgaagaatattgacaaaagtgcgaagagcatcagtaaatttcccagcagttgttgacttgtatccaactttgagtttttcatctaattgagacaatctgaaaggaagtgctggtgggcctctcacatttggactagatgactcagtccaacctctttcaacagcaattgatacaactggagcggatgaaaaggcacgcagataggaatgactgccagtatgtagatctagaaacatagatttcaagggggcaaagttccttatcccgagttgcctgttcagtaatctcattgcagtatcaaaattgccagcagctacatgatcagctgcaagagatgatctctgaatccatatctggccaactgccatcccaggtgctggggccacaaaaactgaagatcgcgaactgacagaaacttttggcgtgtcagcttcagggggaagctctaaatcttccagctcccatccaccttcttcgtcatcatcttccgccacttctacaccatccaaaattgcagcaacatctccattttgtaacccatctacatcaaccatgtcaagctcctcaacccagtcaccatcagcagcctcatactcttcatcatcagcatcacgatctgtattgttaaaaccaccttcaaatattcctcgcatgaccctaagaaggggccaatcaccaccacacactacaggtgatggtggcatcaagagagattgtacttttccctcaggcacagatggaacattatccgggggggggtggggcctacgtagctgactcga

SEQ ID NO: 4536 - DNA, 3066 bp, Glycine max
  misc_feature (2957)..(2957): n is a, c, g, or t
tcagctacgtaggcccccccccttggagtttctggaactgcattggctgcttcacttctgcgagatgggtggagtttggccaaaatgtatgcaaaataccaagaggtggttgatgcattgaggcacgaacaattgggaaggaaggagtcagaagcagtactgcaacgggttctatatgagttagagcagaaagcagaagcaattttagatgaaagagtggaacatgacaagatggctgatgcatactccttgatgaaccaaaaattgcaaaactccctgaatgaaaattccaacttagagaaaaccatccaggaactaaaggctgatctgaaaaggcgtgaacgggattataatcttgtcctgaaagaaactgatgaccttcaaaaacaggttacagtacttctgaaggaatgccgagacatacaacttcgttgtggctcaatggggtatgatattgttgatgatgcttcaaatattgcttcaaggacaagtagagagactgaagctgaagatgtcatatcagagcaccttttgaccttcaaggacattaacggactagttgagcagaatgttcaacttagaagccttgtacgtagtatttctggccatattgaaaatcaggaagtggagttcaaggagaagcttgaaatggaactcaaaaaacatactgaagaatctgcttctaaagttgcagctgttctgcagagagcagaagagcaaggtcacatgattgaagcgcttcatgcatctgttgcgatgtataagaggttgtatgaggaggagcataatcttcatttatctcatacccattcctcagaagctcttgcagctgttgcggaagttggaagaaacaaccttaagacttcaattgaaagttcacaggaggctgctaagaagtccctggaaaaagctgctgagcgtgtgagatgccttgaggatgatttagcaaagtctaggagtgagattattgtattacgatcagaacgtgacaagagtgcacttgaagcaaattttgctagagagaaacttaatgacattatgaaagaatttgaacatcagaaaactgaagcaaaaggcattttagaaagaaatattgagttttctcagctggttgttgactaccaacgaaaattgcgtgaaagcactgagtcattgattgctgctgaggagctttcgcggaaactttctttggagctgtcagttttaaagcaagaaaaggaagtcatatcaaattctgaaaaaagagcatccaatgaagttcgcagtttgtctgaaagggtgcagcgtttgcaggctagtttgagtaccatacagagtactgaggaagttcgaggggaagcaagagctgcagagagggttaagcaagaagaatatataaagaaattggagagggaatgggctgaggccaagcaagagttaaatgaagagcgggaaaatgtgcggagattcacatcagatcgggaccagaccctaaaaaattctctgagacaggttgaggatatgagcaaagagttagctaatgcattgcgtgcagttgcatctgctgaatcaagggctgctgtggctgaggtaaaactctctggtcttcaaagaaagatgggttccacggatgacaagcttgtcgaaataggtggagtgagtggaccttccactttatcaagtgatgaggttgttgctgaatggctcgagcccgagcccgattcggctcgggggtaagaggatgcgcatgccaacaaagcccacatgctgcagtataagagcattgctgaggcgaatgaagatgcactgaaagagatagaaaaggcgcatgagaagtttaaaacagaggctgacaatggaaagaaagttctggaatctgaacttaactcacttagagacaagatgttagagattgaaaatgaatcttctttgaaatatgaagaagttgcttctgaaactgttggaaaggaagaggctcttacatctgctatggctgaaatcacaaatcttaaagaagaaattttgaccaaatcttctgaaatttcagcaatggaaattcagatctcaggtttaaaagaaaacctggacagggagcatcagaaatggcgggcaactcaaaccaattatgaaagacaggttgttctccagtccgaaactattcaggagttgacaaaaacatctgaagcactagccttgctgcaggaggaggcatctgaattacggaaactagccaatactcagaaaattgaaaataatgaactaaagactaagtgggaagatgagaaggcacaactagaaaagtctaggaatgatgctgagaagaaatacaatgaaatcaatgaacagaataaaatactacatagccaacttgaggcttttcatattcaatgggccgagaaggagcgtaatgctgctggtatttcatctggaagtagtagtgcagatgcctttggtgatgctggtccggctcgagtgattaattatctcagacgttccaaagaaattgcagaaacagaagtttcattgttaaaacaagagaagctgcgactacagtcacagcatgagagtgctttgaaggcagcagagtctgcacatgcatcactagaaactgagcgtgcaaaatcaagatcatttttgtttaccgaagaggagttcaaagcattgcagcttcaggtcagagaattgaacttacttcgtgagagtaacatgcagctcagggaagaaaataaacacaattttgaggaatgtcagaaattgcgtgaactggcacaaaaggttagagctgagacagagaacctagagaatctcctgaaggaaagagaaattaagcttgatggccatacgaaagaaattgaaaccctaaaaatggaaaaagatcatctcaataagaaggttactgagctgcttgaaaggagtaaaaatgttgatgttgaggattatgatcgagtgaagaaacttgctaaagagatccaggatanactaagagagagggatgctcggattgaggaaattggtaaaagtctatcagaaaagcaggattctggtttcatcctagagaaagatctttcaactgccgattggagcttg

SEQ ID NO: 4537 - DNA, 1094 bp, Glycine max
cgtaagctcggaattcggctcgtgtcgaaaggcgttttagagtggaaaatggcaggaagcagcattaacagaggagaaagatggtctctcaatggaatgactgctcttgtcaccggcggcactcgtgggatcgggcactccatagtgagtgacttggctgcgtttggcgctgcagtgcacacctgttccaggacccaaacagagctcaacaaatgcttacaagagtggcagagtcaggggtttcaggtaactgggtcgctctgtgacgtgtcctcaccaccccagagagagaagctcattcaggaagttgcatccaccttcaatggcaagcttaacatctacgtgaacaatgttggaataaacattagaaagccaaccattgagtacactgctgaagaatattcacagattatgacagttaatttagactcctcattccatctgtgccagcttgcatatcctcttctgaaagcatctgaaaagggaagcattgtgttcatttcatctgttgctggtgtagtgagtttaggtactggagctgtctttgcagcaagtaaagctgcaattaatcagcttacaaaaaacctggcttgtgactgggccaaagacaacatacggagcaactgtgttgtaccatgggcaaccagaaccccacttgtagaacatttgttgagagaccaaaagtttgtggatgatattatgtctcgaactccgattaaacgtatagcagaacccgaagaagtgtcatcgttggtgactttcctttgcttgcctgctgcttcttacatcactggacaggttatttgtgttgatggaggattaacggtgaatggatttcaacccagcatgagaattacctgaaattactttccttccatctttgtgggagtagaacaacgattctcatttgatttcaacatgtgtgtgacaagccatgtcaatttcgttttttctcccttctagttgcatatgaaaatgaatggccttatttaattcatatgaacaacttatataataaatggaacatcctatttaatagtactaggtttgatgtttttttttcttttataatagcccttctgtcgtcgtctcgc

SEQ ID NO: 4538 - DNA, 1482 bp, Glycine max
gtttcatgtgtcgttttgtggttctatgaccaacaagccacacgtcgttttgaagcagtgaccgaccgtgcatccctttgtagtttgaagcgctcaacacgcgcaacgacgatgatgcaaaccaacatcaccaccacaatcctcatcgcgttctcttcggtcaattcctcgaatgttctaccttgagccatgtccaaccccgttcagattcgcgtcgccgccgacgcaggcgacggcttcgactctccggcgaagcagaaagccgccaaccgcagcgcctacagcattcgcccctttctctacctccgccgcgccaaacagttcctcggcgccgccaagttcaagctcttcttagttctatttgctctctccgtcatcgttttcgtctcctccagactcagttcgtggatgggatggaaccctcaccaatcctcttcggtttcttccacttcaaggggtggttatactgtgcttataaacacttggaggcaaaaatctcttctgaagcaaactgttgctcattattcatcatgtcaaagtgtggatgcaatacatttggtgtggagtgaaagtgaacaaccatccgagaagctgaaaacatatctgaataagattgtggttttgaagtctcagaaagctcacaagccaaactttagatttgacatcaatgcagatggtgagccaaacagcaggtttaagccaataaaggacctcaagacagacgcaattttctcagttgatgatgatgtggttgttccatgttctactctagattttgctttctctgtctggcaaagtgcaccatttacgatggttggatttgttcctcgaatgcactggctggataaggagcaaaataatgctgcatattacaggtatggaggatggtggtctgtttggtggatgggcacttatagcatggttctctcaaaggctgcattctttcacaggaaatacttggatttatatactcatgagatgtctccatcaattcaggactatgtttccagggagagaacttgtgaagacattgcaatgtccctttatgttgctaatgctacaagtggtcctccaatatgggtgaaaggcaaaatctatgagattggtgcatcgggtattagcagtctgagagggcatagcaacaggagaaacaaatgtctcaatgacttgatatcactatacggaactcttccacttgtgtcaactaatgtgaaagcagttagtgctagaaaagaatggttatggtagtgttgttatttcattaatcaggaaccgatccattcctctcacctaggaaaaatatgaacagaacttaattgcctgcatatgtgttgtatatataacacttctactaaagtgactcactaggttttgattcattgatgtctgacgcaaaacatgatgtatacaatcaacattcatattttgaaacacatacagtataacaaacaacccatttctgtcacaaaaaaaaaaaaaaaa

SEQ ID NO: 4539 - DNA, 1505 bp, Glycine max
acaaattcagacgtaccattctcctgtagtgaaccacaggaagataaactaagtagacctgacaagaaacagaaagttgttgtgggagccagtttcagaaatggctatgatcagctacgtaggcccccccccccagagtcgatagtggctaacggaaatgatagcatgggacatggccaaaagccttcctgcacagtcgaagttcaaaccaaacagtgttccatggcaccggcctttgacgcaagaaaattgttgattgagaaagccaggaaagaaatcaggaagaaactggaggagatgaggttgtcgtctgaagcagcagcaacagcagctgcagctctgaatgagaaagaaaaatcacaagctgaagttggtcaagtaaaaagagagacatgtagaaaagcagctccgattgtttctggtctacagttagagaatgggaaaactggtccaatctcaattactgttccagattctgactttcatgactttgacaaagataggtcagaggaatgcttcaggccaaagcaaatatgggccttgtatgatgaggaagatggaatgccacggttgtattgtatgatccgtgaggttgtgtctgtcaatccatttaagattcacatcagttacttgagttccaaaactgatagtgagtttggctcagtaaactggcttgattcaggttttaccaaatcttgtggaaatttcagggcttttaattcagatgctgttgatcaagttaacatattttctcatgttctaagtaaggagaaggctggtcgaggtggttgcgttcgaatatatcccagaagtggagatatttgggctgtgtatcgaaattggtcgccggattggaacagatctactccagatgaagtgaggcatcagtatgaaatggttgaggtgctggatgattactctgaggaacttggtgtttgtgttagtcctcttattaagttggctggatttaaaactgtatatcagagtaatacagacaagagtgccataaaatggatacccagaagagagatgttgtgcttttcacatcaagtgccttcttggttgctgaagggggaggctagcaatttgcctgaaaggtgttgggaccttgatccggctgcaactccagatgagcttcttcatgctgctacagaacctaatgctttgtaggttatgcaatagtaaaaacaattatttgggttgtgctttagcattcttcccagagtattttagatttaactgtacactatgtctcacttggttagagaccgatgagatattaacaacggatgttttagaaggtgaaattttattttgtaacatttgtctagtagactttaagatctagtgattgcttgttcggtaaagtttcttctctgtaactcttgtgagagaggtcaggacagattgcctgcttgtaactctatttccgaccagtttttactggttggtaaagaattcattcaattaaaggaccaaaaaaaaattaaaaaaaaaaaaaaaaa

SEQ ID NO: 4540 - DNA, 1369 bp, Glycine max
actgtcttcattgcaaaagtgttttgaagacctagagtattcatacctggttgatagagcattggagtggggaaagcaggtcaggtcctcagctgtgctttcttttgtcacaaagcagttttaaaagcatgatctcctaggttcattttatcaaggggaatgacttgatgagaattctaaacattgcagcttttgctgtgtctagctatgcgtcaactgaaggtcgacaatgtaaaccttttaatcctttacttggggagacctacgtcgccgacgtatcccccccccccccccaagtttttttctgaaaaggttagtcatcatccaatgattgttgctcgtcactgtgagggaaggggttggaagttttgggcagattctaatttgaaaggaaaattctgggggcgttctatccagttagatcctgtgggtgtcctcactctacagtttgaggatggtgaaacatttcagtggagcaaggtcaccacttccatatacaatatcatactaggtaaaatttattgtgaccactacggtaccatgcacatcaagggcagtggcaactattcttgcaaactgaaattcaaggagcaatccattattgacagaaatccacatcaggtccatgggtttgttcaagacaacagaactggagagaaggtagcgatgttaattgggaagtgggatgaagcaatgtactatgtactcggggatccaaccaccaagccaaaaggttatgatccgatgacagaagctgcattattgtgggaaagggacaaccatgtaccgaagacaagatacaacctctctccttttgcaatttccttgaatgaaatattacctggtttattagagaagttgcctccaactgactcaaggttgagaccagatcaaagacatttagaaaatggagaatatgagctggcaaatgcagagaaactaagacttgaacagttgcagagactggcaagaaagatgcaagaaagaggatggcaaccaagatggtttaagaaggatgaggatggttgtttccgatatattggtggctattgggaaacaagagaaaagaataattggaacggaatccctgatatatttggacagagttgtgatttaccttcatgttcggaagagactgtatcctactgagtactggttttcttttttaacagcccttaaaaatatcatgttttgttaaatgtgaatttggttgtaggttgtaggttgtaagttatataaagatcctttcaaaaaaaattaattccttttctggctgcgcgttttgggtatttgtcattaatctccgcaagtaatttatgttgatgcttacttactagtatgttaataatatcaagtcctcagtgttccc

SEQ ID NO: 4541 - DNA, 2857 bp, Glycine max
cggctcgagtgagtgactagtgccttaaatgggatgtgtgtgggcagtggttcagctctttatagattgttggcctgccacaaccaaaactgtacctcactcactcactcccctttccatcaccaccacacactttcatgtcttgctcttttgattcagtcagaatatgaatcctctgtgctgcattgctccggtttccatcgatcgggaccgccccaaccacgtgctggcaaaatcgcccgctcagtgtcagttagggctcgatgcgtccatcaggacggtgaaccacgcctccaaatccagctcctccacgcaggattcctccgtcgccgtcgactctgtcaaggccacctccgccgtcgcggatctcccggaggaggaggagccacgcgattccaaggccttctccggcgggaacggcggcggagtggctgggagtgtcgccgggatcctgtacaagtgggtgaattacgggaaggggtggagatcgaggtggttcgtgttggaagatggagtgctttcgtattacaagattcacggaccggacaagatcttgatgagtccggcgaaggataggagcgtcagggtgatcggagaagagtcatcgaagtttgtgaagaaagcgaattggaatctgaatctgaatcgagcatcttctggtggaggagtaggaggaggtaatagcagtaacaacgggaagcaatgcaaaccgttcggtgagatacatttgaaggtttcttcagttcgttccagcaagtctgatgataagcggctttccatatttactgggacaaaaactcttcacttgaggtgcgtgtctagagaagacagagccatgtggatcgaggccttgcagtctgcaaaagatctttttcctagagctctaacaagtagcgatcttgcaacttcagaagatatcgtagtttcaacagagaagctgcgatcacgattgtctcaggaaggcataagtgaaccaatcattaatgactgtgagtctattatgctttccgaagtctcttatcttcaaagcaagttgaagtttcttcagcagaaacatgttatgttgctggacaccttaaaacaactggagacagagaaaatagagttggaaactactgtagtggatgaaacaaaggaacgtgaatcatactgtggacaaggaaatagaaggtttagtgatttctattcagtcatgtcagagggcagtgttactgattcagtggcggataatgaaagtcaagatggagcagatggtgaaacagatgatgaggatagaacatattttgacacaaatgaatttttgtattctgatgccctaagaagtgcttcctatcgaagtagggaaggtatgggcaatgctagtatattcgatagagattatatttgttatgatggtgtgcatgggtttgacaaggagatcaaagatgtaagttatccatatgtcaaaagaagggataacctaccagagccaaaagaaaaagagaagcctgttggtttgtggtcaattattaaagacaatattgggaaggatctttctggagtttgtctccctgtttattttaacgaaccactgtcttcattgcaaaagtgttttgaagacctagagtattcatacctggttgatagagcattggagtggggaaagcaggggaatgacttgatgagaattctaaacattgcagcttttgctgtgtctagctatgcgtcaactgaaggtcgacaatgtaaaccttttaatcctttacttggggagacctacgaagctgactatccagataaaggacttaagtttttttctgaaaaggttagtcatcatccaatgattgttgcttgtcactgtgagggaaggggatggaagttttgggcagattctaatttgaaaggaaaattctgggggcgttctatccagttagatcctgtgggtgtcctcactctacagtttgaggatggtgaaacatttcagtggagcaaggtcaccacttcgatttacaatatcatactaggtaaaatttattgtgaccactacggtaccatgcacatcaagggcagtggcaactattcttgcaaactgaaattcaaggagcagtctattatagacagaaatccacatcaggtccatgggtttgttcaagacaacagaactggagagaaggtagcgatgttaattgggaagtgggatgaagcaatgtactatgtactcggggatccaaccaccaagccaaaaggttatgatccgatgacagaagctgcattattgtgggaaagggacaaccatttaccgaagacaagatacaacctctctccttttgcaatttccttgaatgaaatattacctggtttatcagagaagttgcctccaactgactcaaggttgagaccagatcaaagacatttagaaaatggagaatatgagctggcaaatgcagaaaaactaagacttgaacagttgcagagacaggcaagaaagatgcaagaaagaggatggcaaccgagatggtttaagaaggaagaggatggttgttaccgatatattggtggctattgggaaacaagagaaaagaataattgggacggaatccctgatatatttggacagagttgtgatttaccttcatgctcggaagagactgcatcctactgaatactggttttcttttttttcacagcccttaaaaatatcatgttttgttaaatgtgaatttggttgtaggttgtaagttatataaagatcctttcaaaaagtgttaattccttttctggccgggcctgttctctcatttgtcattaatctccgaaagtaatttatgttgatgcttactttactagtatattaataatatcagggttttcagagtaa

SEQ ID NO: 4542 - DNA, 1892 bp, Glycine max
atacctgtaagtaagctgcaacgaaggaagagcagagaaatggcggttgggcaacttgttccttcgaatttgttcctcaatcattctgctgctacaacactcatacccacttccactccccccagacacagacaccttctctgtatttcttctgccaatcacacaaccgcaaccgataacgattctccattctcaagtttcggaagagtgaagactctcctggtccacagaagaagaaaggaccaaagccatagacgcgccgttcaacttgaagatgataatgatgatgatatagcccctagacccagacgttctcagtctcggtcacgaggaggagaaagatgggatatgattcccaattatactccacaaagcaaatcagcgactgacacaaagtttttcagtctaaagtccttcaaagaaataggttgcagtgaatatatgattgaatccctccagaaactcttgttgagccggccttcccatgtacaggccatggcttttgcacctgttattagtggaaagacttgtgtcatagctgaccaaagtggttctggtaagacattagcttatctcgcaccaatcatccagctccttagactagaagagcttgaaggacgtagtagtaaatcctcttcacaagctcctagagtccttgtcctcgcacccacggctgagttggcttctcaggtcttagataattgccgctccttgtctaaatctggagttccattcaagtctatggttgtcaccggaggttttcgccaaaaaactcaattggaaaatttacagcagggagttgatgtcttaatagctacacctggccgtttcttgttcctcatccatgaaggcttcttgcagttaacaaatctaagatgtgctatcttggatgaggtagatatactctttggtgatgaggacttcgaagtggctcttcaatccttgatcaattcttcacctgtagacacacagtatttatttgtgactgcaactttaccaaaaaatgtttacaccaaattggttgaagtttttcctgattgtgaaatgattatggggcctggtatgcaccgaataagttctcgccttcaagagattatagtagattgcagtggagaagatggacaagaaaaaactcctgatacagcatttctgaacaagaaaactgcacttctgcagcttgtggaggaaaatcctgtcccaagaactattgtgttctgcaacaaaattgaaacatgcagaaaagttgaaaatttgttaaagcgttttgatagaaaaggaaatcacgtgcaagttctaccattccatgctgccatgacacaagaatcacggcttgctagtatggaagagtttacacgttctccatcaaaaggagtctcccagtttatggtttgcaccgacagagcatcacggggaatagacttcacaagagtggatcatgtcatactctttgacttcccacgtgatcccagtgaatatgtacggcgtgttggaagaacagccagaggtgccaagggagtaggcaaggcatttatctttgtggttggcaagcaagtatcccttgcacgcaaaataatggaaagaaatcagaagggtcacccactacatgatgtgccttcggcttattagccggtgaagtagaaagttgagtgagtgcttactctcaactcgaatgctgaaacatattgagtgagctagcagctgcttaaccacttctctcttcccaaaccaccttattcagatccatagtttgcttattagtaacatacgcagaaggtggtttgcactttgcaacacttgtagcaaaagcatgacctacattaattatctactttcaagtatgaaatggaagattgacttaggtccaaaaaaaaaaaaaaaagtttgcaaaatgc

SEQ ID NO: 4543 - DNA, 1080 bp, Glycine max
atgggttaaacatggaaccaagcccgttttgccccgattcgtttcccgtaaagtggctaagcagtcgcacaaatatcccagcggtggcgtgtgtgtataaatagcccacccataaaccctctcattctaaaaccctctctttcgtttcattcagtgggaacctttctcaaacaccatgagtgcattcccgaacggttccaactcgagcctcgacaacctcctcctccaaactatgatgggcaggctccagctgcgagctccgataaacaaccccttggtcacacagtccctcgaggactttttattcaacgacctcggcgacgacgacgacgacggcggtgacaacgaggacagcgagaaagccttcgaagggaaatcggagcttgcgagagaggaggccaagctggaaagagaagtcatcaagatcgtcctaagcggaaacggcgagtccgtcctcaagcccaattcgggccaggccgtgtcggttcgcgaccaccacatatgtgtcgggtttcaagacgaagaggattctgggtatcgcgtgtgggagtggcatggccacatcatgtcttttgatgaggaatttgggtataaccctgagtatatatacggcaattactttcagtggtttaaggctagaccttctcctgttgctgctgttgctgatgccgttgttgagaaagaggaagaagaagaggaggatgaagagaaacaggagaatcagggtttgagggagttgattgataacaaggattccgcggatgctcgcattcttcacaggaacatcaacgctgcttgtccaagcctgacaggtactagataagacatgattcttcatcggaaattcaagttcaaagtgttgcgagcagaggttatagccaacatctcatttcccgtgttcagcagagattgatttcccctgctattcagagtctaaatctcagaagcccgcatcgaggaatttgtttgagctttaaattacatgtaaaggatgcgagacctagatttctctacaataatacatttatctttgcccaaaaaaaaaaaaaaaaagcaattttttacttttgccttttcatt

SEQ ID NO: 4544 - DNA, 638 bp, Glycine max
gtgagccccttattttatcttggagttcggattctgtttcacaagaaagatacatgagacgccaagtggacgccgaagaccaccagctaagggtgttatacgagctatgttccctcatcattcacactctcaagtttcctccgttaccctacccttttcccacctcgtacccatgttcttcttctcgcgcttcttcgtctttgtcgcattctaggagacatcactggtggacaacgttggctacctcccaggattccccggcagcattcgcgtcgctgtttctgggcatgtccctgtccctcatgcttctcggggcggtcacgttcctcgttgggttgctgctgctgccttgggttactcttctggtgctggttttctatgttgctgcacttgtctccaatttgtctgtgttgggccgtttcattcttgggtccatcacgttgcagagggatcttccacatgaggctaatatataccgctgaagctttaggagggaaaagaaattgtccgagacattgaggttaggtagcagatcacaaatacatatgtcatgataaataataagtgaatctggttgagattttgatgacttcatttgcttgcaataaaatgaacgatttcatctttttgctcgtttc

SEQ ID NO: 4545 - DNA, 1527 bp, Glycine max
  misc_feature (2)..(2): n is a, c, g, or t
  misc_feature (42)..(42): n is a, c, g, or t
gnctgaatctagctataaacaggataccccatcggaatcttncttccacagaacgcaccactccacacctcatcggaatattcctttcttttcggtttcaatctctggatccgtcgtgacagacggcatggccacttccaatggcttcgtcgacggcactccctcggaatctgcattgatctttctcggcaccggttgttcgagcatggttcccaacctcatgtgcctccttcagccttccgaccctccctgccccgtctgcgtccagtcattgtccatccctcccgaacgaaaccctaattacaggtgcaatacgtctctcctaattgactacggcgccgccgccgccaacggtggcgatcgcaagtatatattgatcgatgtcggcaagacgttcagggagaccgtgcttaggtggttcgttgcccatcggattcccagaattgattctattattttaactcatgaacatgccgatgcagtccttggattggatgatatacgtgctgtgcaggcttttagtccaacaaatgatattgatcccacacccatatacttgagtcagcattcaatggatagcatagcagagaagtttccttatttggttcagaaaaagcgcaaggaaggagcagaaatacgaagggtggctcaaattgactggaacattattgcggatgactgcaatcaacagttttttgcgtcgggattaaaattcactcctttaccagttatgcatggagaggattacatctgtttgggctttctttttggtgagaaaaacagggtggcttatatatctgatgtttcccggtttcctgctagtacagagtatgtcatctcaaaaagtggagctggacagttggatcttcttatattggattctttatataggactgggtcacacaatgttcacctttgttttccacagactctagaaactgtgaagaggttgtgtccaaagcaaacactactaattggcatgactcacgagtttgatcaccataaagacaatgagtttttgatggagtggtccagaagggaaggaattccggtgaagcttgctcatgatggtttgagagtccccataaacttatagtaagggaaggttaaagcatgtgacaatgtataccgcatactgttgatcttaattagattggattggagcattaatattctttacagaatatcctcaatttctgctgtagtaaaaagccacatttttgctagaggtcgcatttctggatatgagaagaggataacttactttgatggaaatcccaattcttcttattgaactcgtgaaagcttgtattagaataattttataatcgactccttgatgccggaaaacaaattgagtgggcaatgagttttaagagctaaaaaaatccacatcttaaatttcttctgcaatcactgtgcgttactctacgatgaaactaatctgctggctacaaagttgtattattcaattgtatggtaattgttataaataacaattggtcaacttgacattgagttttactc

SEQ ID NO: 4546 - DNA, 1345 bp, Glycine max
tcagctacgtaggcccccccttcacttccttggcgcacctctaggctctaactttttctcttacacttcaattttcctatcttcaaagcactctcacgcacatgatgaactcgcacaaacaactcttccccctcttctcacttttcttagttctctacctcttaggacaaagggtagtgctgcaagctgaagcaagtcctcaacatggtccaacaaaattgttcgttttcggagactcgtatgctgacacaggaaacattcagagaactgtctcaaattcatggaaggacccttatggcatcacctttcccggcaagcccgccggtcgtttctccgacggaagagtcctaaccgattacatcgctaagtatttgaaagtgaaatcaccaatcccctacagattgaggaaactgatgccacaacatctgaaatatgggatgaactttgcgtttgggggcactggtgtctttaacactttcgttccactcccaaacatgacaacacagattgatttcttggagcaactcatcaaagacaaagtgtacactaccttagatctcaccaactcggtggcccttgtctctgtcgctggaaatgactacggtcgttacatgctaacaaatggctcgtagggtttaccatctttcgtggcctcagttgttaatcaaacaagaagcaatcttattcgcatcaaagggttgggggtgaagaaaatagtggtgggtgctctacaaccccttggatgccttccccaggagacagccacaagctcgttccaacgttgcaacgccacctccaacgccctcgtgcttctccacaacagcctcctgaaccaagcagtgaccaagttgaaccaattagagaccaccaaggaccgttattccaccttcgtaatcctcaaccttttcgacagcttcatgtcggtgttgaaccacccttccacccacaacattcggaacaagttgacgccgtgctgcgttggcgtaagcagtgggtactcgtgtgggagcgtggacaagaacaatgtgaagaaatatagggtttgtgatgaccccaaatctgctttcttttgggatcttgtgcaccctacgcaggctggatggcatgcagtgtataacaagttgcgaaccatgaacgctcttcaacacattctttactagttagttcattagttgtgatcacttgctctttttgttttgtgttcaaataatgcatgtctttttggtaattagattgttcctcaaatagtgttttgtttattcggactgtgggtggtgcaatgtgcaaatagaatgttctcttgttgtccatggtacaacgtattcgctccaaataagtttcattt

SEQ ID NO: 4547 - DNA, 1821 bp, Glycine max
cttctggttttcattttcattttcttcaagtcccatttcccacgcgtccgcccacgcgtcctcctttctctctctttcattattgagacttctttccagatttctcaatctatggctctgcattttcttctcctgctgctttttgcagtgtctgttgttgcagctgatgaagaaccatttataggagtgaatattggaacggatctctcagatatgccacaccctactcaagtagtagctctactaaaagcccagcaaattcggcatgttcgattatatgatgcagaccaagctatgctccttgcacttgcaaagacaggcattcaggttgctgtgactgtcccaaatgaagagatcctagcaattggtcaatcgaattccacggctgccaattgggtttcccgcaacgtggtagcgcattatccagccaccaatatcactgccatttgtgttggttctgaggttttaactaccctcccaaatgcagcaaaagtacttgtcagtgcgattaaatacatccattcggcccttgtggcatccaatcttgatcgccaagttaaagtttcaacacccctttcctcttccatcatccttgattcatttccaccttctcaggctttctttaaccgctcactcaatccagttttagtcccactacttgatttcttgcaatccactggctcttatctgatgctaaacatatacccttactatgactacatgcaatcaaatggagtgattccattagattatgcacttttcaaatctctccctccaaacaaagaagctgttgattccaatacccttctccactacaccaatgtctttgatgccatggttgatgcagcatactttgccatggcctttctaaattacaccaacattcctgtagtggtgaccgagtcagggtggccctcaaaaggtggctccaacgaaccagatgcaacggtcgacaatgcgaatacttacaacagcaatttgatcaagcatgtgtttaacaaaaccggaactcccaagcatccaggaatagatgttagtacatacatctatgagctctacaacgaggatatgaagtctgggccattgtcagagaagaactggggactgtttgatgccaatgggacacctatttacattctacacttgacagagtcaggggcagtcttagcaaatgatactagcaataatactttctgcattgcaaaggacggtgctgacccgaagatgctgcaggctgcactagattgggcatgtggaccggggaaggtcgaatgctctccattgctgcagggtcaaccatgctatgaaccagacaatgtgattgcgcatgcaaattatgcatttgacacttactatcataagatgggaaagactcctgatgcatgtgacttcaatggagtggctacaatctccacctcagatccaagtcatggttcttgtttatttcccggaagtgttggcaaaaatggaaccttaggtaacttcacagctccttccatgaattctacaaattcagattcctcagcctacaaattcagctgtgacttgagaattagaagccttttaatggtaacaggatttctattatggggagtggttttgctataaagtggtatatgtcagaacgtgttactttgaaattttttgtggtggatgataatgctacatattcgtcttggtacgattctattgttcatagtggtccattcaattttgtacaaaaaccagctaagggtttggaccgaatgaggccgcaactgaattatcatcatcatcattattattcttttcaactagaattgattcaatctttatcaaaaa

SEQ ID NO: 4548 - DNA, 1948 bp, Glycine max
ctgatttgtcctcttcttctagttggatatggatttggtgcctcctttgttgcactattggcccagttgggtggtggaatatacacaaaggccgctgatgttggagcagaccttgtcggaaaagtagaacagggaatacctgaagacgaccctaggaatcctgctgttattgctgatctggttggtgacaatgttgggagattgtgctgctcgaggtgctgatctttttgaaagtattgcagctgaaataatcagtgccatgatacttggtggaacaatggcacaacgctgtaaaattgcagatccatctggcttcatcttgtttcctcttgttgttcactcattcgatctgatagtttcatcagctggaatattttctattaggggtacacgtgaaactggaattatagttcccatggaggatcctatgacaattcttcagaaaggatattcttttacaatagttttagctgttctggcattcggtttgtctacccggtggttactctacactgagcaagcaccttcagcatggttcaattttgctttgtgtgggttgattggtattatcactgcttacatatttgtctggattgccaagtattataccgactacaagcatgagcctgtgcgcatattagccctttccagctctactggccatgggaccaacataattgcaggagtcagtttgggtctggaatctactgctcttcccgtccttgtcatcagtgtgtcaattatctcagctttctggctgggccacacctgtggactagtagatgaaacaggaaacccaactggtgggctgtttggcacagctgtggcaacaatgggaatgcttagcactgctgcctatattcttaccatggatatgtttggcccaatagctgataatgctggaggaattgtagagatgagtcagcagcctgaaagtgtccgagagataactgatgtccttgatgccgtaggaaacacaaccaaagctaccaccaaagggtttgctattggttctgctgctcttgcatctttccttttgtttagtgcttatatggacgaggtttctgcatttgctcatgaaccttttaaacaggttgatattgctattcccgaagttttcgttggtgggctgctaggttccatgcttatatttgtttttagtgcttgggcctgtgctgctgttggcagaactgcacaagaagttgttaacgaagtgagaaggcagttcattgagaggcctggtataatggattacaaggagaaaccagattatggtcgctgtgttgctattgtagcatctgcttcgttaagagagatgataaaacctggtgctttggcaatcatttcacctattttagtgggtattgtgttccgtattttgggctactatacagggcaacctttacttggggctaaagttgtggctgctttgctcatgtttgcaacagtgactggtattcttatggcactttttctgaacacagctggtggtgcctgggataatgcaaagaagtacattgagactggagctcttggaggcaagggaagtgaggctcacaaagcagccataactggagatacagtgggagacccattcaaagacacagctgggccttcaatccatgtccttataaagatgcttgcaacgattacactagtaatggctccagtcttcctgtgagtgagggttgtgttgatatctctattgcggccgcctcagaaaaagcatactcgcgccattttgattttgctaattttggaagtatagggataggttgtatgaatctatgatgtaaatggacgagcttgattaatagtcacaatgaattttattgcccttgatcagaataagagacattagttgactggaacatatggagaaaatagtgattagaaaaattcccccataaaaaaaaaagggggggcccccggattaggaccccctccc

SEQ ID NO: 4549 - DNA, 820 bp, Glycine max
gccctttcgagcggccgcccgggcaggtacgcgggggcaatagcaataacaatgggttggataggtgagagtgttgattccatcaaatctcttcagatccgccaggtcctcacccaggctgttagcctcggcatgattgttacctctgcactgataatatggaaggcattgatgtgcattactggcagtgaatctcctgttgttgttgttctttctggaagcatggaacccggattcaagcggggagacatcttattcttgcacatgagtaaagacccaattcgggcaggggagattgttgtgtttaatgtcgatggacgtgagattccaattgttcatcgtgtaattaaggtacatgagagggaagatactggggaggttgatgttctcactaaaggagacaacaattatggtgatgacaggctactgtatgctcacggtcaactttggctgcaaaggcaccacattatgggtagagccgtcgggttcttaccttacgtaggctgggtgaccatcattatgactgaaaagcctattatcaagtatattctcattggtgctttggggttgctcgtgataacttcgaaagattaaatgatgaatctgaagtcaaactgcggtctaacctccgatggtagtgtgagcagaatataatgttaagattaaatgatgaatctgaagtcattttgtaccatgcatagtatgggggacaatataatgttaagaattaatgcaaaatagtttaattttggtaactattaaaaacttccaccaagtccattgatgagttggaatctggattgaaacccccccttccctt

SEQ ID NO: 4550 - DNA, 1573 bp, Glycine max
aactactgaagcccaatgaggtaaatcaaagctttgcgaggagcccaaggtctcccatgtgtacaacacccaaatcaaatttctcttgagaaattcttaggccgagttttattttaaaaatcacttaagaaaaaacgcacactttgccaactaaaacagtaaaacctccccaacaacacgcataaattgacagaaaactacggcaccagaaggttctgattctgaattctgagctttctagttttcctatcatccaatctctttagttagctcctgctccttttctgccagaagcttcaaggaaaaacaaagaaatgagacttggatttgcttcttggagattcatcctatgcaccctagttgtctttttgattctacaagacagtgtagctagaaagatagctacaacatctgggaatgaagttcaactgaaggaagtatcctatgatttgcaaaagcttgcaacagagggtcttgtacttgacagtattattcagcttgaaggcgctgatataaaaaggaagaataagcatgtccataaagacgaggctagagtgaagaaaggaataggatttgacatagaagaagaggaggataaaaatgatcacaaaaagatagttggaaaggatgtgcatggttataagccatctcatgaggatcacaaacacatggaccttgaactgaatgtgtttttcaccccaaatgatttgaaggttgggaaaataatgcccatctatttttccaagaaaaactcctcaacatctccaaaatttctgaccagagaagaagctgatcagattcctttctcatcaaaacacctaccatcgcttctcaaattcttctccatcccaaaacactctccccaagccaaggcaatgaaatataccctcaaacaatgtgaatttgaatccatggaaggagagaccaagttctgtgccacttcgttggagtccttgtttgattttgcgcactatctgtttgggtccaatgcacaattcaaagttctgaccactgtccatctcacaaattcaacagccctgctacagaactacacaatctcagaagtgaaagtgatttcagttccaaatgttatagggtgtcaccccatgccttacccttatgcagttttttactgccacagtcagcatagtgacaccaatctctatgaggtgatggtagaaggtgagaatggagggagagttcaagctgcagctatttgccacatggacacctctaagtgggaccgggaccacgtgtcctttcgtgtgctcaaagttcagccgggaacctcacctgtgtgtcacttcttccctcctgataatctagtctgggtgcctttgcctctgcctccataactatatatatagtttcatgttcttcatcaaagtttcttatatatgttccagtatatcaaactgtgtcaggtacaacataagttctagtatagacctggtgtactagctaggaagcttgatgaaaaactatatatgtatctatgttaataaagatgttattctggtgtgccttagaatagtaatctcatcgttatcttctgccaaaaaaaaaattaaaa

SEQ ID NO: 4551 - DNA, 648 bp, Glycine max
gcaggtacggtcgggaattccccgggatccaaagctacttcagttattcatctctttattactaacatttcttccattcttagcttttgtttgtcccatcaaatttttgaagatggccaagagaagtgttgctgctaattcttcttttgagagtactagcttggcttctctggatcaaaagttggccatggccaagcgctgctctcatgagggtgcgatggcaggagccaaggcagctgttgctgctactattgccactgccattccaactctggctagtgtaaggatgctaccttgggcaagagcaaatctcaatcacactgctcaagctctcataatttccacagtggcgggagcagcatatttcattgtagctgacaagactgtcttggcaactgcaagaaagaactccttcaaccgaccctccaaagcatgaattccaaatagataacttggatgctggattcagcttcaccttggattatcttggcataaacccgatcatcgaacttatcatatatgtaaatgtaattatgtattgataataatgaagagtttgcatttcaatagtgagatggaacatatgtactaattatcagttaattatatgaatgcaaatcattcaccttaatttcttctaaaaacctt

SEQ ID NO: 4552 - DNA, 1860 bp, Glycine max
  misc_feature (1847)..(1852): n is a, c, g, or t
tcagctacgtaggcccccccccccgccgtgttcatctcgcgtgcgtagcagtcagaaaaacactgcgagaaagagaagaagaatcagagagagaaaatagagagagaaacgaaaaccccttttgaccattgcgcctcgattccatttgccccattgattattctcccaccaaaacctcttctgtattttttttccttcttcttgtgatcattcctctcatttgggggcacggttctgtttgtgatcaacctcaaaattctgatctttttcccttcctgattcggattcggataccctgttgcgtttttctttctgggtgtgttttatttcggccaaagtttctgttttgcatagtgggaagtttaaaaagggattaattctatgtgggcatcgttcatattggcaaatcaatgttaactctatcatcagtgtggttatgaagtaatatggaagtgctccttgcgcgcatagctcatcaacgacaacatcaaggacaatagcatgtcgttttacattggtcgtgaggcttcaaagctatggaagagaatttgtgcagagacgactacagaggtcaacctccttgctgagaattggaagtaccttctggctggtcttgtttgtcagtatatacatggtttggctgcccgaggagttcattatttacataggcctggccctactctacaagatgttggattcttccttcttccggagcttgggcaagacaaagcttacataagtgaaacactgtttgccatgatttttatatcgtttgtcttgtggacatttcatccattcatattgaagaacagaaagatctacacagttctaatatggtgcagggttttagcattcttagttgcttctcaagttcttcgcataatcacattttattctacacaacttccgggtccaaactaccattgccgtgagggttctaaacttgccacattaccccgtccagatactgtccttgaagtgctcttgattaattttccgcgtggcgtggtctatggatgtggtgatttgatattctcatcacacatgatctttactcttgtctttgtgctcacgtatcagaaatatggcactcgaaggtcaataaaacagctagggtggttgcttgctgtggttcagagtcttttgatagtagcatctcgcaaacattacacggttgatgtagttgttgcctggtacactgttaatttggtggtgtttttcattgacaagaaattgccagaattaccagacaggtcaattgcagctgcaaccttgctacctttgagcaccaaagataaagacaataggaccaaagaggagaaccacaagctattgaatgggaattctggagaccctgcagattggaggcagagaactcaagtgaatggcaagatcatggaagatggcaatacactccatgcagattctgccatgaatggtgcatagatataggagcctctgctgtataaattggatccactgcaaagattgctgctgatggaaaagctgcaaccaaccttcaatttgaaggatttgttgtctgaaacattcacctgttaattcaaattagtacgccccaatttgtactagtgaaattgaaactgggttgtgcatttcaacattttgcagctcagattccatgtcatggttaaattatctatacaccatcagcatgtgccatagaaaaaaaaaaaaaaaatcttttacctacatcattgatcccacatgcataatgctgtagagtcttttgtttttgttggttgttaaatctccttgcaatcacatggtaaccaacctaatgatcagcactatgtaatagactgataggcatgtgttatgcaaaaaannnnnngggaaaat

SEQ ID NO: 4553 - DNA, 1371 bp, Glycine max
  misc_feature (1179)..(1179): n is a, c, g, or t
  misc_feature (1183)..(1183): n is a, c, g, or t
  misc_feature (1204)..(1204): n is a, c, g, or t
  misc_feature (1207)..(1207): n is a, c, g, or t
  misc_feature (1213)..(1213): n is a, c, g, or t
  misc_feature (1218)..(1218): n is a, c, g, or t
  misc_feature (1221)..(1221): n is a, c, g, or t
  misc_feature (1228)..(1228): n is a, c, g, or t
  misc_feature (1233)..(1233): n is a, c, g, or t
  misc_feature (1236)..(1236): n is a, c, g, or t
  misc_feature (1246)..(1246): n is a, c, g, or t
  misc_feature (1250)..(1250): n is a, c, g, or t
  misc_feature (1253)..(1253): n is a, c, g, or t
  misc_feature (1267)..(1267): n is a, c, g, or t
  misc_feature (1270)..(1270): n is a, c, g, or t
  misc_feature (1275)..(1276): n is a, c, g, or t
  misc_feature (1296)..(1296): n is a, c, g, or t
  misc_feature (1299)..(1300): n is a, c, g, or t
  misc_feature (1302)..(1302): n is a, c, g, or t
  misc_feature (1304)..(1306): n is a, c, g, or t
  misc_feature (1308)..(1309): n is a, c, g, or t
  misc_feature (1311)..(1311): n is a, c, g, or t
  misc_feature (1314)..(1315): n is a, c, g, or t
  misc_feature (1322)..(1324): n is a, c, g, or t
  misc_feature (1327)..(1327): n is a, c, g, or t
  misc_feature (1333)..(1333): n is a, c, g, or t
  misc_feature (1336)..(1336): n is a, c, g, or t
  misc_feature (1341)..(1342): n is a, c, g, or t
  misc_feature (1345)..(1345): n is a, c, g, or t
  misc_feature (1347)..(1348): n is a, c, g, or t
  misc_feature (1350)..(1350): n is a, c, g, or t
  misc_feature (1354)..(1356): n is a, c, g, or t
  misc_feature (1365)..(1365): n is a, c, g, or t
  misc_feature (1369)..(1369): n is a, c, g, or t
  misc_feature (1371)..(1371): n is a, c, g, or t
gtgcattgcagtcagcccaagcgagaaagggaagagaatcggatagaaaaacttcagagagagagagagagagggaagagagggagagtctagagagagaaagcaaagcccaaacaccccttttcaccattgcaatcttcgttcggtttcagagaaccccttttgaatttgtttgaattttctgggaaactgggcattttgcgagcatcctccgggggccccccccccccatcttttttttctggctttcggttttttctcctcagatcctcttctgtttttgttttctcagtttttttattcgaattttttaagttgtctcgcaattctgcctcgtgggtgtgtgtttttccaaggaaaagattcagcttttaatagcaagaaagtgggaaaaggattgattcctatctgggtttttttatgcgattgttggtttaaattttgagggcaatgatgttgaccttaaaagtgtcgttatgaagtaatatggaagtggtcgttatacggttacaacagcatcaacaacatcatcagcaacaaaagcaaaaacaccaccatcagctacgtgggcccccccaagaacatgtcgttttacattggtcgcgaggcttccaagctgtggaagagattttgtgcagagacaactaccgagctcaacctccttgcggagaattggaagtaccttctcgctggtattgcttttcagtacatacatggtttggctgcacgaggagttcattatttgcataggcctggccctacactacaggatcttggattcatccttcttccggagcttgggcaagagaaggcttacattagtgaaacactgtttacctttatctttttatcctttgtcctttggacatttcatccctttatattcaagagcaaaaagatctacacagctctaatatggtgcagggttctagctttcttagttgcttcccaagctctacgcatagtgacattttatgctacgcagcttcctggtccaaactatcattgccgggaggggtctaaacttgctacactgcctcgtccggatagtgtctttgaagtcctcttgattaatttttccacaagatgcgatatatggatgcggtgattttgatattttcatcacacatgatctttactctagtctttgttaatacatatcatagatccgccacgaanaggntaagcactaggggaccctgcntgngcagcntttgnaanacatccncaacntancggtgattanttgngcnggatcgggaattgnggntttcnngaaaattaaaatgcaacggnaanngngnnntnntnctnncccaggnnnaanggggcnaanaaccnntgngnngnttgnnnccggttggnaaanan

SEQ ID NO: 4554 - DNA, 1133 bp, Glycine max
acgagagagaacagcaaacaagagcatagcattggtactgttgtttcaactatattgaaggagaaacagggctctgaaaagctttctgtacatgatattaataatgtggaagatagatatgagattctgttgggaatgaaggaattagctagcaaaggaatggctgctgaagcggttgaggaggtcaatgctatcgatcccaatttctttgcccagaactcaattttgctcttccaactcaagcaggttgaattcctcaagttggtcagctctggtgattataatgctgctttaaaggttgcttgcacccatttgggtcctttagctgcctgtgatcctgctttattaaagccgttgaaggaaactcttttggctttactacgacctaatgaagatgctcttggaaatgcattacctctacatgctctagctgcttctctccaggttgcagttggtcgtaggcttggtgttgaagaacctcaactcatgaaaataatgcgagctactctttatactcataatgagtggtttaaacttcaaatgtggaaagatcgttttgaaggtcttttgaggcttgattccttgaaggaagccaacactcccttccttgcaccagtcactacatccaaatcgtatgctgatagctgcacaaatggatcttctcaggccacagtatcttcagggaccaggatgtcagaagatggtagtagtccaactcaagcatcttcaagggatgtcatctgtgacgaaggtgcaatacttaaagtaatggagtttttggctttgcctagggctgatgccatacatctgcttgcacaatacaacggaaatgcagagacagtcattcagcagatatttccctaggcgttgtgcaggaaaatcgggtttgttatttataagaaaggccaaattatttttttaaatattatttgattcaaatttgtgaattttttttataccccttgtacatatagctgcaaagagggaagtcactgcaacgtttggaatccggattgacggaaatactctgtacagaatctcttgattattgcctctcagttttaatatgagataagttgtaattaataaaataattattggcgtatttcaaggggattcaggaaaaaaaaaaa

SEQ ID NO: 4555 - DNA, 1056 bp, Glycine max
atgctctgtcttcatcctcgttgaaacttctcacagagccaaagctgttctctttttttcatctgggtctaaagaaccactggtgaccaaaattgtgaaaaggggttccttgattttcatcaattcatggcatttcagcactacatttcccgggatttgaaaaccatcccaaatgctgcgactgagacagaaaactccaatggttgttttgattgcaacatctgcctagactttgcacatgagccggtggtgaccctatgtggccacctctactgctggccatgcatctacaagtggctccatgtccaaagtgattctcttgcacctgatgagcatccacaatgccccgtttgcaaggcagatatatccaatagcacaatggtcccactctatggccgtggccatgccgccacagctgaaggcaaaacatcttcttgtgatgtttttataccaccaagaccatctgcttcatgtgttcaagcccttttggcaacatcatctcaaaggggtcagcaccttccatatcgtaatccttatcagggtcactacttcagctctcatccataccaagaagaggatgatgccacttcacaaatgctcaatcttggatcccaccaccaccctgtgactgggatgtttggggagatggtttatgccagagtgtttggcaacccagaaaatttgtatgcataccccaattcttatcagctgatgggaagtgccacccctagattgagaaggcaagagatgcaggcacacaaatctttgaacagaatttctatttttctcttttgctgcttccttctttgtcttgttgtcttctaagtgagcacttgagattattttctctcattctctgttgtatactttgtaaagaagcatggatgcaacctttaaaaacttgatagatcattgagtaaattatcacaggctaaagagcttgtgagtctatactgcatctacacttctattcgcattattacacttttttttttgtgtgtgtatataagaacaagacaataatgagatttaaactttggatttataaactaaaaa

SEQ ID NO: 4556 - DNA, 1160 bp, Glycine max
atactttgtcttcatcctctttgaaactcctcagagccaaagctgttctcttttttcatctgggtatgcaatttccttcttgttatcctctttggtctcctggattccataatctgtgttaggaaaacttccacatccaaggtctaaagaaccactggtgaccaaaattgtgaaaaggggttccttgattttcaccaattcatggcatttcagcactacatttcccgggatttgaaaaccatcccaaatgctgtgactgaggcagaaaaccccaatggttgttttgattgtaacatctgcttagactttgcacatgagccagtggtgacactttgtggtcacctctactgctggccatgcatctacaagtggctccatgtccaaagtgattctcttccacctgatgagcatccacaatgccccgtttgcaaggctgatatatccaacagcacaatggttccactctatggccgtggccatgccgctaccacagctgaaggcaaaacagcttcttgtgatgtttttataccaccaagaccatctgcttcatgtgctcaagcccttttggcaacatctcaaaggggtcagcaccttccatatcgtaatccttatcagggtcactacttcacctctcatccataccaagaagaggatgatgccacttcacaaatgctcaatcttggatcccatcaccaccctgtgactgggatgtttggggagatggtttatgccagggtgtttggcaacccagaaaacttgtatgcatacccaaattcttatcagctgatgggaagtgctacccctagactgagaaggcaagagatgcaggcacataaatctttgaacagaatttctatttttctcttttgctgcttccttctttgtcttattgtcttctaagtgagcacttgacattattttctctcattatctattgtatactttgtaaagaaggcaagagatgcaagctttaaaaacttgatagatcattgagtgaaatagtgaattatcacaggctaaagagcttgtgagtctatattgcacaaaaaaaaaaaaaaacttctattcgttttattaaacctcttttttggtgtgtgtgtatatataagaataagacaataataagatttaaactttgaatctataaacaaattagaaaa

SEQ ID NO: 4557 - DNA, 1544 bp, Glycine max
tcagctacgtaggccctttctgacacgataatctcggaaccctatcacacattgacacagtggcatcttgttccttccttgtgatgtgtgtagggaagcgaagcagagaagagtagatggtgggtgaaacggcggcaacggggaagtcggttggtttgggtttgggatgtgacccagtggtgggatccttggcttgttcgaagaagagagaatacagagtcaccaatcgccttcaagagggaaagcgccctctatacgccgtcattttcaacttcatcgactcccgctacttcaacgttttcgccactgttggcggcaatagggttactgtttatcaatgtctcgaaggaggagttattgctgttttgcaatcttatgtagacgaagataaggatgagtctttttacacagtgagttgggcatgcaatgttgatggcaccccatttgttgtggctggaggaatcaatggggtaatgcgagtcattgatgttggcagtgagaagatacacaagagttttgttggccatggagactccgtaaatgaaatcaggactcaaacattaaagccatcacttgtgatctctgcaagcaaagatgaatctgtccggttatggaatgttcatactggaatatgcattttaatatttgccggagctggaggacatcgtaatgaagttttaagtgttgattttcacccatcagatatatatcgtattgctagttgtggcatggataatactgtaaaaatatggtctatgaaggagttctggacatatgtagaaaaatcatttacatggactgatcttccttctaagtttcccacaaaatatgtccagtttcctgtatacaatgcttcagttcatttaaattatgttgactgtaataggtggctaggtgattttatcctctcaaagagtgttgacaatgaaattatcttgtgggaacctaaagtgaaggaacaaactccaggggagggtgtagttgacatccttcagaaataccctgttcctgagtgtgatatctggttcatcaagttttcttgtgatttccatttcaacttagccgcagtgggtaacagggaagggaagatttttgtttgggaattgcagtcaagtcctcctgtacttgttgcaaggttgtcacatcctcaatcaaaatctccaatcaggcagactgctacgtcctttgatggaagtactatattgagttgctgtgaggatgggacaatatggcgttgggatgatgttacaaactccccagactaacttatcacatactatatcaatctgatgtacctatatcactgaataaatcattaagtttagtctgtgaatccgcgagtgcgtcctcaagctaagttaatgtttgttttgaagttgtgtgattcctcgtttgagatttggcaatggagaaagttctctagtgccaacaccacatttttactaaccttttcagaagacaaaatcttgtcaatgccttcactttctgcaaatcaccatatcataacacaatcaattctagttcacaaaataatggtgatatca

SEQ ID NO: 4558 - DNA, 967 bp, Glycine max
taagatttgaaattttgataaaccgcgatcacaggttgccgcaccttaaaaccggaaacaaaagcaatcgttacttgttctcaagaatcttcaaactttcttctgttttctctgcactcggttcttcaggaaaagaaaatcactctctgtattgattacagacttcgtgaatcattttcttttcaactttcagttcacttgctgaacactctcctataaatatataggacttcgtgtcagatttgaacttttcctgtctctttctcggttttctttcttattctcatcttctttaaattttaaggctcgtattttgtttctctaaactttctgttggactcatttgaaatacaacatgaagttttatccaggacaaaatgtctctgaaattgtttaccattttcagagtaatgagacagctaataggcttgatgcttattttgcctgtggctgtgaagaggatactgaagtcctcgctcgtttgaagcaatgtaaccctcggttactgcatttatcttatgctgctttctgtttggaaatgggcagtcattctgttgaagaaatagaatatgatgatggagagttggttttcttgtatttccaaaattttctactctccatagtgtccaattcttctaaaacagcaaatctgagagcatacatacgttcagcttttgcatatcattttcagcactttgttgaatttgatcaatatacaaatgattctctcaatgtgatggatacaagcgtatctgctcaaggaattgcagatttggctctgtccatggtcagatggattcctactcaaattaaaaaagttgtgaattttggggtaggatcggtcatagaatccttttcagaacatttcaataagctcataatgcaatattgtccaatagtgttccaagcttttagctgggttaacaatatttggaccatggttaaagaatggattgaggaggctgcg

SEQ ID NO: 4559 - DNA, 1138 bp, Glycine max
gcacgaggtcaaatactcttcggacctaatgatgggtatttatacttaatgtcgggcagctacgtaggccccccccccccttacaattttgcacaaaacaagaaatccttgcttggaaagattatgagacttgatgtagacaacatcccaagtgcagcagatattagtaaactcagcctttggggtaactactccattccaaaggacaatccttttagtgaagataaagatctgcagcctgaaatatgggccttgggactaaggaatccttggcgctgcagttttgatgcagaaagaccttcctactttttgtgtgcagatgttggacaggatgtttatgaggaggtggatctcatcaccaagggtggaaactatggctggcgtgtttatgagggcccctatccattccaaccaacacaatcacctggaggaaatacttcggtaaattcaataaatccaattttcccattaatgggatacaaccattctgaattaaacaagaatgaaggatcagcatccatcactggaggatatgtctatcgatctaccactgatccttgcatgtatggaagatacttgtatggagatctatacgctggagcaatatgggcagccacagaagatccgcaaaatagtggcaatttcagcaccagcagaattcccttcagctgtgcacgtgattctcccatacagtgcgactctgcacctggaaaccttcctgctttaggctacatcttctcatttggcgaagacaacaacaaagacatttacatccttgcgagcaccggtgtataccgagctgttcgtccaagtcgctgcagttatgcttgctctcaggaaaaggcaactactactacaacttcagctccctctcctacttctcatgctacacgttggagggtcctttctggatatctggttttgcagtgctcatttttcttgctgcttttgttgggttttatgtagtgtgttatgatctttgtacattatgtagtagagatcgtaagaggagaatgtttgccctttcttctgggttttctacattttggtttcgttccttttgcttaattaataaaagataagtaagttgagttactgaatcaaaaaacaaaaaaaaagagtaacttaattaaataag

SEQ ID NO: 4560 - DNA, 1614 bp, Glycine max
gtgccttgagagaattggtaatggatcttacctcaacatggtggctcaccctgatggctctaaccgcgcattcttctctaaccaaatgggcaaggtttttctggcaacacttccagatgtgggatcaggaggaacaatgaagcttgatgaatcgagtccttttgttgatctaacagatcaagtttattttgatactcaatttggaatgatgggcatggcatttcatccagattttgctaaaaatggacgattctttgcttcatttacatgtgataagtctaagtggtcaggatgtactggaagatgttcttgtaattcagatgttaactgtgatccatcaaagttaggtactgatcacggtgcccaaccatgccaatatcaaactgttattgcagagtattctgctaatagcactggatctcagccttccttggtggaaagtgctaaaccaactgaagtgagaagaatatttaccatggggctcccatttacatctcaacatggtggtcaaatactcttcggacccgatgatgggtatttatacttaatgatgggatatggaggaggtgctggtgatccttacaattttgcacaaaacaagaaatccttgcttggaaagattatgagacttgatgtagacaacatcccaagtgcagcagatattagtaaactcggcctttggggtaactactccattccaaaggacaatccttttagtgaagataaagatctgcagcctgaaatatgggcattgggactaaggaatccttggcgctgcagttttgatgcagaaagaccttcctactttttgtgtgcagatgttggacaggatgtttatgaggaggtggatctcatcacgaagggtggaaactatggctggcgtgtttacgagggcccctatccattccagccgacacaatcacctggaggaaatacttcggtaaattccataaatccaattttcccaataatgggttacaaccattctgaattaaacaagaacgaaggatcagcatccatcaccggaggatatgtctatcgatctaccactgatccttgcatgtatggaagatacttgtatggagatctatacgcgggtgcaatatgggcagccaccgaggacccgcaaaacagtggaaatttcagcaccagcagaattcccttcagctgtgcgcgtgattctcctatacagtgtgactctgcacctggaaaccttcttgcgttaggctatatcttctcatttggcgaagacaacaacaaagacgtttacatccttgcaagcaccggtgtttatcgagttgttcgtccaagtcgctgcagttatgcttgctctcaggaaaaggcaactactactacaacttcagctccctctccttctccttctcatgctacacgttggagtgtcctttctggatatttgtttttgcagtgttcatttttgttgctgcttttgttgggttctatgtagagtgatatgatctttgtacattatgtagaagagatcgtaagaggagaatgcttaccctttcttctgggttttctacattttggtttccttatgcttgattaataaaagatgagttgtgttgctgaatccaaaaaaaaaaaaaaaaa

SEQ ID NO: 4561 - DNA, 1714 bp, Glycine max
ttttaaaagctccaaacatacccgaacccgattaccacacgaactggatagtagcttctcgcgcacctatcttccctcgccgtaggaaccaaaaccattcacaccaaattttgcaacttggtttccaattgcgtgcacccatgtcctcttttctctccttatcactctctgcgccctccctccacgattcttccttcctccatggaacaaagctctttcccttttctcgaagagtggcaccacgccgcttcaactcttcctctgccaagtgctccctcgaccacatccccaaacagttcagaaaggaaaatctcaaagatggattgatggaaaactacaagaatgcacctcaatctctatatggcctttctccttcacaaatggacatgttcatgacagaagataatcctatccgtcagcaatctgaaagagttacagaggaaagcatctcgtctgccaagaattatatggataatggtggaatgtggagtctatctggcatgggaaaaagtgatgcttcaaaatacagcatgagtgttagtatgtatcgaggaggtaggggaactggaaggccaaaaactgctccaccagatctgccttctttgctcttggatgctcgaatatgctatctgggtatgccgattgtaccagctgtgacagaacttattgttgctcaatttatgtggttggattatgataaccctagcaaacctatttacctgtatattaattcatctggaactctgaatgagaagaatgagaccgtgggatcagaaactgaggcatattccatagctgatatgatgtcttatgtcaaagcagatgtttatactgtgaattgtggcatggcatttggtcaagcagcaatgcttctgtcgcttggaacaaagggttatcgtgctgtacagccaaattcatctacaaaattatatctcccaaaagtcaatagatcaagtggtgctgttatagacatgtggattaaggcaaaagagctagaggcaaatactgagtattacattgagctgttggcaaaagggacagggaaatcaaaggaagaaattgctaaagatgtccagaggcctaagtatcttcaagcacaggatgctatagactatggaattgctgacaaaataattgattccagttcaagggatgttgcatttgagaagaggaattatgatgaaatgcttgctcaatcaagagctatgaggagacaaggtggtggcaatcctcaagcggctccttcaggatttaggtaatcacacagcataaggccacttattcagctccaaatccaatgccttcaaaggatgctcgcgggttaaatttaagttgacgcctggcataaaggtcaaaaagctatctcacatcaaggccatgtggaaaatttctctggatattgtatgatatctgtatcttggcagttgggcgacttgttcaatacttatatttgaattacttatgcttagtttcaacaactaaagaaagtgaccatatttcttaagttgtaaatatcgaaccattagcaatgtgatggactttatctgatggctgcattctcttcaaccgtttcatttcacattttgaatgagattttatatgtaacccaataatattggatggaaatatgctgattcagagaaacatcatgtttgcatagtagttgacttttttgccttgacattcaaaattatgcagtacttgttttacaatt

SEQ ID NO: 4562 - DNA, 1739 bp, Glycine max
acagaaaatggactcgaacggctacttggtagttggagtggtagcttttgctctactttgctcattcagagtttctttgacagattcagttccattattttcgcctgttcatgacgctgcttctttgactcgcaactctttccctgctggcttcatctttggggctggatcctcagcctaccagttcgaaggagcagcaaaggaaggtggaagaggaccaagcatatgggataccttcacacataaccatccagaaaagataagagatggagccaatggagatgtcgccgttgaccaatatcaccgctacaaggaagatgttaagatcatgaaggatatgaatttggattcatacagattctcaatctcttggcctagaatactacccaaaggaaagctcagtggtggtgtaaatcaagaaggaatcaattattacaacaacctcatcaatgagctattggctaatggtgtactgccatatgtgactctttttcattgggatcttccccaagctttggaagatgagtatggtggtttcttaagctcccatatagtccagggtggctatgcaaccggagcgacggcaccaggaagatgtaccggtccacaatgcctcggtggtgatgctggcactgaaccttacatagttacacacaatcaaattcttgctcatgcagctgctgttcatgtgtacaagactaagtatcaggcacatcagaaaggcaagataggtataacgttggtaagtaactggttcataccgcttgcagagaatagcacatcagacataaaggctgcgagaagggcaattgactttcaatatggatggtatatggaaccattaacaaaaggagagtatcctaaaaacatgcgagccctggtgggaagtagattgcctaagttcaccaaatggcaagccaagctagtgaatggatcatttgattttattggcttaaactattactcctctggttatattaatggtgtccctccaagcaacgacaaacccaattttctaacagattctcgcaccaacacttcatttgaacgcaatggaagacccctaggtctaagggccgcttcagtttggatatacttttatccaaggggacttctagatcttctgttatataccaaggaaaaatacaataaccctttgatttacatcaccgaaaatggtatgaacgaattcaatgatccaaccctttccgtggaagaagctctcatggatatttatcgaattgattattattatcgtcatttcttttatcttcgatcagcaattaaggctggcgcaaacgttaagggattttttgcatggtcatttttggactgtaatgaatggtttgcagggttcactgttcggtttggattaaactttgtagattacaaagatggcttaaaaaggtaccctaagctttctgctcaatggtacaagaactttctgaaaagaaactagtgttagacccaccgtttgaaagctatgcagcacctaaaaacggttaggttaagctcaatgtttgtagttgtagctaattccacgtataagtcattaggttgttgttttctgttagaataatttcatggcacactactaagtgtcctgcaccagcacagctataaattaatatgttatagctgatccttcatgtatcggtttgattttgaatgttatctcagaattaagattcagtttcagtttcaacaattaaaaatcttcgcgtgatgattcctagttc

SEQ ID NO: 4563 - DNA, 1347 bp, Glycine max
tagtatcgggtacgctgttacggctgcaggtcacacggcccgcaattacaggatcgactctcacgcgtacgcccacgcgtgcgtccacgcgaagggtttaagattaggcagggctgtgagattgtcatcgccactcccggacgtttgattgattgtttggagcgccgctatgctgtgctcaaccagtgcaactatgttgttcttgatgaggccgatcgtatgattgacatggggtttgagccccaggtgatgggtgtcctcgatgccatgccttccagcaatctcaaaccggagaatgaggatgaggagcttgacgagaagaagatttaccgcaccacctatatgttcagcgccaccatgccacctgctgtggagaggcttgctaggaaatatttgaggaaccctgttgtggtcaccattggcactgctggaaaggcaactgatttgatcagccagcatgtgatcatgatgaaggaggccgagaagttttccaagcttcataggttgcttgatgagcttaacgacaagactgcgattgtgtttgttaacaccaagaagaatgcggatcatgttgccaagaatttggataaggatgggtatcgcgtgactactttgcacggagggaagtcgcaggagcagagggagatcagtcttgaagggtttaggaccaagagatataatgttcttgttgctactgatgttgctggacgtgggattgacatacctgatgtggctcatgtcatcaactatgatatgcctgggaatattgaaatgtacactcaccggattgggcgtactggtcgtgcaggaaagacgggtgtggctaccacattcttgactcttcacgactctgatgtcttctatgacctcaagcagatgcttattcaaagtaacagtcctgttccacctgaactggcaaggcacgaagcttcaaaattcaagccaggaactattccagacagaccacctagacgaaatgacactgtttttgcgcattagacagattttttttttgagctagccacttctttagaaggcatcaactattcaactttgcaggtcatatcaagttttctggtgtaatgaacattttgccagtgaggccctagcagcctaatctgctttttgtggttatatggtcctgtataaaatttaattacagcagctcttctattctggtattgttcgttgtccttgcttgtattcttcttagctagagttactactattctgcttattaattatttctaacaggaattgatagttgtagatgaggatatttgattaattttgtcatttggctttgaggtttctcatcttatgctacaatggttgtcttttctgatt

SEQ ID NO: 4564 - DNA, 806 bp, Glycine max
ccacgcgcagaagaagctccagaacattggagaaaactacatccgattttcgcgaagcaacgcaacgacggcgatgggagcgtccacttcggcggagccgagagtgtcggcggagcagaaagaggcggaggccgtcacagcctccaccggagctctccccctgcttcagaaagccttctccaagctcgctaatcccgagaccaacgccgttcccttagaaaatctccagcaatgcttcagtttcggtcgcgaaggtcgaagttattccggaagcaacgtgccagattcgtttccggtgttgttagatcacttagcctcatccctagttgatcaatttttcgtgcctgacaaagagggaataatttgggttgaattcgtgaggggttacaacaagtgctgtgctagggtgtccgcgtcggtttctttgaatatgctcatgagagtgttcgctgctatttcacaaagtgcgaacgtgcctttgcatttggagtttgaatcaggggatgatgattgcaaggtaaacgggcacgttcttcctagcaacgtgtttctgcttctcgccctgtgttgggttatgtcgtggggtggttctagaaagttgaaaggggaaggggaatttgagcttacctgatctgaatcatttggtgttgtcggtgatcgcatcgtgtggtgaggttgagggtggtttgaatgtgtgggactgtgatatctcgagcttggaggttcagcttcctgccagggaagttgtgacgtgggttatgagcaccgtgccatgcctcccggatgctttgagcagtatttcatgc

SEQ ID NO: 4565 - DNA, 1463 bp, Glycine max
tcagctacgtaggcccccccccccccccgggagaagaaaataagaggagacaacagatacatccttggttggctctgggtttaaggagggaaattgattcttgttctttgggaaggataaggaatcaatctgatcgctggaagagaggaagtagcaatagtaatggaaatggggatttccaagacgacaacaaaaacaagcactgaggttaccgacaacaattccaattccaatagcaatagcagcagcaccactcagactgaaactgacaaccatatctccgttgctgctccctacgccgtaggagaaaaggtcttagtctatcactctgattgtctttacgaagccaagctgaggcaagctgagtaccacaacactaaaggctggcacttcctcgttcattatcttggttggaagaagagttgggatgaatggcttgacctggatcgtttgatgaaacacactgaggaaaatatgcgcaaaaaacatgaccttgacgagaagcttggcaatgataagaatgcaaaaatcccgcgtggttctctggctaagtccaagaccactaacgtttcaagaggcaggaaacgaaggaatgaatctgtcatcaaggaaaaacctgcagttgatcttgaaaagcttgtcaacattcaaattcctccaacactaaagaaacaattagttgatgattgtgagtttattacccatctcggcaagcttgttaaactcccccgtactcctaatgtgaaaggcatattgaaaaattattttgattacagattgaagaaatgtggctcgatgggtgattcagttgaagaaattatgaaaggattgtcttgttactttgacaaagcactgccagtgatgcttttgtacaagaacgagcaccaacagtaccaagaggcttgtccagcgaatgtctttccttctgctatatatggtgctgagcatttgttacgtctctttgttaagttgcccgagttattgtttcatgctagcattgaagagaagacattggtggaacttcaagcacacttaattgactttctcaggttcttgcaaaaaaaccagagcacattcttcctttctacttatcatgttgcagaaggtattgagaacagcaccaacaaacaaggagactaggcttgtggacaacaattgtttttgctatgtacatagtttcacagagctgctgctgtatacaatgcttgtcacaattgcagtttactttcttcatcaaaatgatgtgaaatcagatttggtaagtgtataacttagctttgggaactcaatgttttcagggttcagggagtgtaacttctacggaaggaatatgcaccgaccctcaattttaaacaccagttggttttctgaaattttagatttaatatgtttttcacagtccaaccaaccaaccaaattctatcgatgaaatcttagttcaattcaatattgttttaaaaaaa

SEQ ID NO: 4566 - DNA, 914 bp, Glycine max
tatatatatatattcctctaaagttctatcccacgcgtcctccaacgcgtccgggttaaccatgaagtttatgtatcttgcattcctacttctatttgttttctctagccaattcttgcttggaggagcagatgcttcccccagacaagtgattgacacagaaggcaagaaagttcgagctggcgtagattactatatccgaccggtcccaacaaccccatgtgatgggcgtgggccgtgtgtggttggaagtggctatgttctcatagcaaggtcatccaaccacacttgccctcttagtgttgcggtggtggagggtttccgtggcctagcagtcacattcaaactagttaaccctaaaaaaggggtcattagggtttctactgacttgaacatcaaaacctccctaactaacacaagttgtagtgagtccacggtctggaagctagatgcctttgatgattcaactggacagtggtttgtgaccactggtggtgtgttgggaaaccctggcaaggataccatcgacaactggttcaagattgaggagtatgatgatgattacaagctcgtgttttgccccacagtgtgcaacttctgcaagcctttgtgtaggaatgttggggtgtttagggatagtaatgggaaccagcgcgtggctctcactgatgagccttacaaagttaggttccagccatctgcttgaagcttcattaatgcatatgcatgaaaaaagatatgtaattaatgagaacatgatatttcatctggaaaattaagcatcatcatcatgcacgaataaaattgatgcttttgtcatattctatttttgtatgaataaattacgtattgatatcttctgatgattaaaaaaataaatttccttattaattactatactttttctttatatt

SEQ ID NO: 4567 - DNA, 1730 bp, Glycine max
  misc_feature (1672)..(1672): n is a, c, g, or t
tcagctacgtaggcccccccccaagctagtagtagtagtgttcggaataaacctgaagctaacgaaccaatcataaaccctaacccaacccccgccctatggccaccctcgaccaaatccaaaacggcgtttcttccgacaatcccgccgccgctgaacctccctccaccaccgccgacgtccccccgcccgatgccgccgccgagaagcggtggccggggtggccgggccactgcgtgttccgcctcatcgtgccggtgctcaaggtcggcagcatcatcggccgcaagggggagctcatcaagaagacctgcgaggaaacgaaagctcgcattcgtgtcctcgacggcgccgtcggcacctccgatcgaatcgtactcatatcagggaaggaagacctggaggcacctctttctcctgcaatggatgctgtaataagggtttttaaacgtgtctctgggttttctgaaattgatgccaagaataaagcatcagcggttgcattttgttccgtccgtttattggtggcctcaacgcaggctatcaatttgattggaaagcagggttcattaattaaatctatacaggaaaatactggtgcttctgttagagtactgtctggagatgaggttcccttttatgctgctgcggatgagaggattgtggaacttcagggagaagccatgaaggtccttaaggctttggaagcagtagttgggcacctgaggaagtttttggttgataatagtgttcttcccttatttgagaaaacttacaatgcaacaatctcccaagagcgccaggcagatactacctgggttgacaaaccatcactgcatagcgcttcacaacctagcattgtaactgatattcctctttcaacaaaaagggattctctctttgcagaccgtgaaagtcagttggactcattgctccctccttccacaatgtcaatgtatgggcaagattcttcactttctggtcttcgttcttcggctctcagtcgacccagtgcccctcctattgttacaacggtaatacaaactatgcaaataccattgtcctatgcagaggacatcattggtatacaagggactaatattgaatacattcgtcgtactagcggagccatattgactgtacaggagagccgggtgcctgatgaaatcattgtggaaataaaaggcacctcatctcaggttcaaacggcacaacagttgattcaggaagttataagtaatcacacagaacctgtagctagtaattacagcaggttagatacaggtctgaggtcttcttaccctcagttgggcagttcatcgtattcctcatcttccttgtcctcgcaattctatagtggtgggtatggatcttctgctcttggaggctatagtactttcagactttgaattagtgtctctaggtcacaatgaattcattttgagccaaattgttctaattgcgtctgattggagagtcgatgctggaatgtattatgaagccaccaaaatcacgtttttatcatcatgtaatcgggtaatcttaggtgtggccatagagttgagtagtgccatagaaaatgtaatgaaatattaaccattttcaggatgtttaattttgtagtgtatatgtgcattaatttaaggcttaaaaaaaaaaaaaataggggcangaattataagttatatttattttattttatatttgcaatgctaactattcttaccttg

SEQ ID NO: 4568 - DNA, 2535 bp, Glycine max
gaaatttgctgcggagggcaacatacacagagagagagagaggtgttattatttgacttatttcattgcaatagcaactaacagctaacaagtatcaccacccaccaatcatcgcgtgactctggtgaatatcacaaaagaaagacagcacacagaaccagaatccacccgtcaacaaagacaaaaaccgctctcttctccaacgctgtctgtcaccttaaaaaacaaagttccacttcatcagattcaactaaaccacaccacaccattcgcatcaacacagcacttgtttgttcccaactccgaaaaatatcatgctcctaacgtaaaatcctcggtttcaacgttcaaccgcgatctcaaaaaacaaaactatggcatcactctcaggcatttgctcctcttccccgactctcaaaaaattcccaaaccaatccccatcgttgaccgaccctctccgcaaagaccacgtgtccttccccgcacgcctcgccgatcggaccctcagcctcgcgccgctccgtgcggtggctcgggaggtttccgacggagcgttggcggcggcggtgaagaaggggttggagaaggatccgcgcgcgctgtggcggagatacgtgggttggctataccagcacaaggaacttgggatttacttggatgtgagtcgggtcgggttcagtgatgagttcgttaaggagatggaaccccgtttccaagcggcgtttcgggcgatggaggagttggagaagggcgcgatcgcgaatcccgatgagagtcgcatggtgggacactattggctgagggaccctaagcgtgcgcccaactcgttccttaaaacgcagattgagaacactctcgacgctgtttgcaagttcgctaacgacgtcgttagtggtaagattaagcctccttcgtctccggagggtcgatttactcaaatattgtctgtgggaattggaggttctgctcttggaccacagtttgttgcagaagcattggcacctgataatcctccactcaagataagatttgtggacaacacggatcctgctggaattgatcatcagattgcacaacttgggcctgagctagcttcaacacttgtgattgtgatatcaaagagtggaggtactcctgagaccagaaatggtttattggaagtgcagaaggcctttcgtgaagcaggcttggattttcctaaacagggtgttgctataacacaagaaaattctttgttggataacactgccagaattgagggctggttagctagatttcctatgtttgattgggtgggaggtagaacgtcagagatgtctgcagttggcctgcttccagcagcccttcagggcattgatattagagaaatgcttgccggtgcatcattgatggatgaggctaataggagtactgtgttaaggaataaccctgcagctctgctggctttatgttggtattgggctacagatggtgtaggatccaaggatatggttattcttccatacaaggacagcctgttattattcagtagatacttgcagcagctggtcatggaatctctaggcaaggagtttgacttggatggtaatcgggttaatcaaggaattagtgtctatggaaacaaaggaagcacagatcaacatgcctatattcaacaattgagggaaggtgtacacaatttctttgtaacattcattgaggtgctacgtgatagacctcctggtcatgattgggaacttgaacctggtgtcacatgcggtgactacttgtttggtatgctacagggaacaagatcagctctgtatgccaataaccgagagtccatcacagttactgtacaagaagtgacacctagaacagttggtgctcttattgcactctatgaacgagcagtaggaatttatgcctcccttgtcaacataaatgcttatcatcaaccaggtgtggaagctggtaaaaaagcagcaggtgaagtactagcacttcagaagcgagtgttggcagtgctaaatgaggcaagctgcaaagaacctgtagaaccattgaccctcgaagaagtagcagaccgttgccatgctcctgaagatatcgaaatgatttacaagattatcgcacacatggctgccaatgacagagcattgattgtcgaaggcagctgtggttcaccacgcagcatcaaggtttttcttggggaatgtaacattgatgggttgtatgcatgagttagacgactaccagaattcatgttttggtaatgttgcaattgtgtttgaatacacggaccaacagaagagaagttgcctgcaataatttggtttcaatgttgaatctccatcattaacgaaagtggaaatttctgttaagacaaattcttgaaagtgttttggtgttctgaattggaactacgtgtaaccaaatggagaatccagtgggtaaatataattaataaaattgttcctttcgctgcctagaaaaaaaaaaaaaaaaaaaaaaaaaaaaaaaaaaaaaaaaaaaaaaaaaaaaaaaaaaaaaaaa

SEQ ID NO: 4569 - DNA, 1404 bp, Glycine max
ttcggcctcgcggctacgacacgaccgggagtcgaacaagaaagaaaagaaaagaagaggaaaaggagagtggagaggaagaaaaggattgaagttgttgctgtgagaaagagaaagagtgaaatcggagtttgggaaggaattgcaatcaatggatgtgataaagacgcagcaaatctcatctcgaccaatcgagaaggtggtggttcaccctctcgtgcttctcagcatcgtcgacaactacaacagagtcgccaaagacactcgcaagcgcgtcgtcggcgtcttgctcggctcctccttcaaaggcaccgtcgacgtcaccaacagctacgccgtgccctttgaagaagatgacaaggatcctagcatctggtttcttgaccacaattaccatgaatctatgttttccatgtttaaaagaataaatgcaaaggagcatgttgtggggtggtatagcactggtccaaagctgcgcgaaaatgatcttgacattcacggcttatttaatgactatgttccaaatcctgtcttggttataattgatgttgaacctaaggaattgggaatcccaacaaaagcatattatgccgttgaagaggttaaagagaatgccactcaaaaaagtcaaaaagtgtttgtgcatgtgccatcagagattgctgctcatgaagttgaggaaataggagtggaacacttgcttagagatgtgaaggatacaaccattagcacccttgcaacagaggtaagtgcaaaactcacagctttgaagggtttggatgcaagacttaaagagatcaggagttaccttgaccttgttattgatggaaagcttccattaaaccatgagatcctgtaccatctgcaggatgtgtttaacctgctaccaaatcttaatgttgctgatcttatcaaggctttcgcagtgaaaaccaatgatatgatgctggtaatatacctctcgtctctcattagaagtgtaatagcactccacaacttgattaacaacaagatgcttaacaaggaacatgaacgggcagaagactcgaaaacagttacagtgccaagtgcagctgcataagttttgaggggtttgtgatggccggagctctaaatgtcatttgaatacatggatttgagattattacaccttttttctatttctgctaggagtagagaacttacacctaacatggcataacgatccttttatgctgttccggtgcttaatgtattttactcttcaatactttgctcattttccttgtttggtagctttggtgacagccgttaaaagaattcaatattagattataaacaaattgaggattaagatatcagaaatgaatctttgccctggtaaaaattgctgaaaaaaaaaaaaaaccaaaaaaaaaaaaaaaa

SEQ ID NO: 4570 - DNA, 1672 bp, Glycine max
tcgagtcagctacgtaggccccccccccatatcatcatgcctggagagcaaatctaatgccatcattgatcatcttcttcgagattgtgatttagttggaaggtttctccaggcagataaacattgtattctttcagtggaaagcagtcagcacacagtacctgctgctggaaaacggggaacacgtgtaggaaacattggacatattactcgaattttcaataaacttgtccacttggctcataaccaaagccacattctggcatgtctccaggagaatagtgagtggaatgagtggcaagctacagttcttcagcagcgtaatgtggtcgagaatgttcaccgttgggcttgtggacgtccaactgcattacaagataggatgagggatagtgatgatgaagaccttcatgacagagactatgatgttgcagctttagcaaataatttaagccaggcttttagatacaaaatttatggaaatgacaataatgaagaggaacatggtggtcttgatcgagatgatgaggatgtctactttgacgatgattctgctgaagtagtcatatcatcccttagacttggtgatgatcaagggagtaatttgtttacaaattccaactggtttgccttccaagatgacagaattggtgatgcacctgggggcacatcatcctctgagatgatggatgagataaaattgaatgcagttgcaaatagtggtagcaacagtagtgatgatgaggtagtggttggagaggatgaagaattggctgacagcaaaaatactgtgaatggtacatctagcttaagtgcagacttctttagtggattgactgccagtgattccatgaatgggggcactttaaactttgaaagtgagaagacaagtccttcaaatgatatgggattcttcaggtttgaggcaccagacaacgaggacttgtttggagataggcctttacctgattgggttggatggggtgaaccatcagaaatgcaagatgctggctcaagtatgaacccctttctggataatgacgagtctggtaggcctcaagtaggcagccctaatcttagttctccttcaaatggggaatccgtaccttcaaatgggttgccaactactagcgattctatcaatgggaacagtgactcaagtccaacatctgtagcggtaccctcgctatttgaagaggatgtggaatttgtaggtgtagaattagaaggtacagagaaggcaatggaccaggctctcaaagaagggatagttggggaagcaggaccattgaaaagaaacgtagtctcaaaagttccagataaggaaaattctgaagaaggcagtcctggtgtgaaggagttcaacgatgcaaattactggagggttgacaacgaggttgctgttctagagtgatggacaaattggtaaatcttgcttccattgtttgtctgtatgaaaatttggatcaacgccaaggttatgcaacaaattagtgtacagtatttttgtttccattatgttctgtttctgttgtttcatcattgttagatattaaggttgtttattaatttgaagttttgcctctacctgcaagagacttaaagggaattcccacatttattgaatatttactctggtcttctttctcagtttatttattttttccgtgtt

SEQ ID NO: 4571 - DNA, 3318 bp, Glycine max
gttttcattcattttgtgtctttttatttattttatttgttcatgtggggttattggttatttttctatgatcggttgatcacaggtgagggactgaaaggtagcaatggcgaccaggaacttggaaaagatggcatccattgatgcacagcttaggcaattggctcctgccaaagtgagtgaggatgacaaactgattgagtatgatgctcttctgctggatcggttccttgatatccttcaagatttacatggggaggatctgaaggaaacagttcaagaagtgtatgaactttcagctgagtatgaaggaaagcatgaccctaagaaactggaagaacttggaaatttgataaccagtttggatgctggggactctattcttgttgccaagtccttttcccacatgcttaatttggccaacttggctgaagaggtccagatttctcgccgccgaagaaacaagttgaagaaaggggattttgcagatgagaacaatgcaactacagaatcagacattgaagaaactctcaagaaacttgtatttgacttgaagaagtctcctcaggaagtttttgatgcactgaaaaaccagactgttgatttggttcttactgctcatcctactcaatcaattcgtagatctttgcttcaaaagcatggaaggataaggaattgtttatctcaattgtatgccaaagacattactcctgatgataagcaggagcttgatgaggctctacaaagggagattcaagctgccttccgtacagatgaaatcaggaggacccctccaacaccacaagatgagatgagagcagggatgagctacttccatgaaacaatttggaacggtgttcccagatttctgcgccgtgtagacacagctttgaacaatatcgggattaaagagcgtgttccttataatgctccccttattcaattttcttcttggatggggggtgatcgcgatggtaatccaagagtaactcctgaagtgacaagggatgtttgcttattggctagaatgatggctgctaatttgtattattcccagatagaagatcttatgtttgagctctctatgtggcgctgcaatgatgaactacgcgttcgtgcagaagaacttcacaggtcttccaagaaagatgaagttgcaaaacactatatagaattttggaaaaaggttcccccaaatgaaccatatcgtgtggtactcggtgaagtaagggataggctctatcagactcgtgagcgttctcgccatttgctttctaatgggtactctgacattccagaggaagccactttcaccaatgttgaggagttcctggaatctcttgaactatgttacagatcactatgtgcttgtggtgatagagcaattgctgatggaagccttcttgatttcatgagacaagtctccacttttggactgtcactagtgaggcttgatatcaggcaagagtcagatcgtcacactgatgtgctggatgccattaccaaacacttggaaattggctcgtaccaggaatggtctgaagagaaaagacaggaatggttgttgtctgagttaagtggcaaaaggcctctatttggacctgaccttcctcaaactgaagaaattagagatgttttggacacatttcatgtcatagcagaactaccaccagacaactttggagcctatatcatatcaatggcaactgcaccatctgatgtgcttgcagttgagcttctacaacgtgaatgtcacatcaagcatcccttaagagttgtgccattgtttgagaagctagctgatctagaggctgctcctgctgctctggcacggttgttctcgatagactggtacagaaataggatcaatgggaagcaagaagtgatgattggatactcagattcagggaaagatgctgggaggttctctgcagcatggcagctatataaggctcaggaggaacttataaatgttgccaagaaatttggtgttaagctaaccatgttccatggtcgcggtggaactgttggaagaggaggtggacctactcatcttgctattctgtctcaacctccagacacaatccatggatcacttcgtgtgacagtccaaggtgaagtcattgagcaatcatttggagaacaacacttgtgctttagaacactacaacgtttcactgccgccactctagaacatggcatgcaccccccaatttcgccaaaaccagaatggcgtgctttgatggatcagatggctgtcattgctactgaggaataccgttccattgtattcaaggaaccacgctttgttgagtatttccgcctggctacaccagagttggagtatggaaggatgaatattggaagtcgaccagcaaagagaagacctagtggaggcattgaaacactgcgtgcaataccttggatttttgcatggactcagacaaggtttcatcttccagtgtggctaggctttggagcagcatttaaaaaagtcattgaggaaaatgttaagaatctcaatatgctgcaagagatgtacaatcaatggcctttctttagggtcacacttgatttggtggaaatggtgtttgccaaaggagatccgaaaattgccgctctgaatgatagactccttgtttcaaaggatctgtggccgtttggggatcaattgaggaacaaatatgaagaaactaggaaactcctacttcaggtggctggacacaaggaaattcttgaaggggacccttacttgaagcaaagactcaggcttcgtcatgctcccattaccaccctcaatattgtccaagcttacacattgaaacgtatccgtgatcctaactacaatgtgaaggtgcgcccccgcatatcaaaggaatctgcagaggcaagcaaatcagctgatgaacttgtcaaattgaacccaacaagtgaatatgcccctggtttggaagacacactcattctcactatgaagggtattgctgctggcatgcagaacactggttaagtttgtttgaatactgaaagtgagtgctctagttttgttctcagatacactttttttgttttgttattatgttgccccacctttctgtacaatttggtatgctgctctagaattccagaagagctagctaccacacaaatgaatcaatgacattgatctgttatgtttcttatgcttagtaccgttactacacccttctatacttctttgtatcttggttccataaggtcttgttttgtttgacatcattaaatcaaggatgtgtttagtactatctatatgtattactaatagagggtttgtagtct

SEQ ID NO: 4572 - DNA, 594 bp, Glycine max
agggtaactgttatggggagaagcatccccttgcccttgagggctactggggaagtggttcagatttgcctacaatgagccccgtggagaagatcctaagacatttgacctcaaaagtttctgtcatcaacattactcaactatcagagtatagaaaggatggtcatccttccatttttcgcaaattttgggagtcccttcggccggaacaattgtcaaatcccccgtcttactctgattgcatacattggtgcttgcctggggtacctgatgtgtggaatgagttactcttccattttttgtagaaattgtttaactattcaatttccttgattgaatatagcagccaatgtcttcattttaaagagtggcaaaagctgcttacattagttgtttgcacgcaagggtggactgtttttgacaagtgaatgctgaaaatttagagatctcaatgttgatgcgccacgttaaaacttggcttcacacaaaaaggaacaaaaaactaagttatttgtatgatttcttttgtatgtgatttattccattctcaccttcaaaaaaaaaaaaacattcttatgaaatgattttttcagt

SEQ ID NO: 4573 - DNA, 1712 bp, Glycine max
gcaacttgcaaatgcagcaccgactgattattgttcaaacttcaaacttcgaaatcaaagtttctgattctgtctatttccgagtactgactagtctttattacataccagctcacccttgatttggtttccttatagaggatcaaaagtcaaaatcataatcaactacaacccaccaacaccaccatgcagaggtggaagtggaacagaaagaaaccccccattttccctttgcttgtgcttattttattgtttttcatagccttctcaaccctccacagtgaacacaccatacaacgaatccatgaaaatccagatcatgttcacaaccaccaagaagtttcttcagccacctttgtcaaaccaaacctctctggtcacctaaagcaagcaccagaggttttggatagattcagtagatgcaactccactgtggagtatagtggccggaaaattgcttggctcggcgattctcggcattccggtcactggagtgcgaggccggagagttgtgatgttttttcaggcaaatgggtgtttgataatgtttcacatccactttacaatgagtcagattgcccttacatgtctgaccaattggcctgtcacaagcatgggaggtctgatttggggtaccagtattggagatggcagccacataactgcaatttgaagagatggaacgtgaaagaaatgtgggagaagttgagaggtaaaaggctaatgtttgttggagattcactaaatagagggcaatggatatctatggtatgtttgttacaatcagtaattcctgctgataagagatcaatgtcaccaaatgcccatctcaccattttcagagcagaggagtacaatgcgactgtggaatttctctgggctcctcttcttgctgaatctaattctgatgatccagtaaatcacagactagatgaacggataattcgtcctgatacggttcttagacatgcatcactgtgggaaaatgctgatatactagtttttaatacatacttgtggtggagacaaggcccagtcaagctattatggactcatgaagaaaatggagcttgtgaagaattggatgggcatggagccatggagttagccatgggagcctgggcagattgggtatcttctaaagtcgatccccttaagaagcgtgtcttttttgtgaccatgtcacctactcatctctggagtcgagagtggaaaccaggaagcgagggaaactgttatggggagaaggaccccattgacaatgagggctactggggaagtggctcagatttgcccacaatgagcactgtggagaagatcctaagcaatttgagctcaaaagtttctgtcatcaacattactcaactatcagagtatagaaaggatggtcatccttccatttttcgcaaattttgggagccccttcgcccggaacaattgtcaaatcccccatcttactctgattgcatacattggtgcttgcctggggtacctgatgtgtggaatgagttactattccattttttgtagaagttgtttattcaattttcttgattgaatatagcagccaatgtctgcattttttaaagagtggcaaaagctgcttacattagttgtttgcacgcaagggtggactgtttttgacaagtgaatgctgaaaatttagagatctcaaacgttcatgtgccactttaaaccttggcttcactcag

SEQ ID NO: 4574 - DNA, 773 bp, Glycine max
  misc_feature (769)..(769): n is a, c, g, or t
  misc_feature (771)..(772): n is a, c, g, or t
ccacgcgtccttacggctgcgagaagacgacagaaggggaatctagtggaagagtgaataagagatatcaatatattatgataatggagggatacaataagaaggttatgattgtggggatggtgttgggcatggccatgattgggatggccaatggccaatactcgttttgtcgcatgcccagcgatgggttggcggcatgcaagccgagtgtgagtggggactatcctgctgatccctccactgcttgttgctcagccattgccaaggctgatcttaaatgcttctgccgcttcaaggattcgggccttctctctatgtatggtgttgatcccaacaagtgcatggaactccctgttaagtgcaaggttgtcgactctttccactgctagattcattagagggggcactaatcaatataaactacacaagggcacttaattaactatgtactctcgttgattgccattgttaattttctagcttgtgcccctgctgtttatgtttcttattttccaacgtgcttgttgctaatgtaatggatcgtggcgtgcttgtttttgtttgttgttgttgttgtaacttgtaatagtgtgatttgtttgtttctctactttagttttggctaatattcctgttacgtacgtacatctttaattttggtttgttgtgaatcaatgttcttgtcaatttcttttcttggaaagctctttcattttaatggaaagcaacttcaaccagatccaaaaaaaaaaaaaaaaaaaaaacncnna

SEQ ID NO: 4575 - DNA, 1513 bp, Glycine max
ggattgtaatacgcctcccttaagggggaatgggttacggggccccccctcgagtcaggctacgtagggcccccccccccaatcccaattcccagggtctaagcagcacaacactagttcccaacgccgtcacccccgtttgtgcagtgaagaagaagaagatggccgtaaaatcgaagaaagagaaagaacacctgaatcttctcctaggttcccaccttactactatccatgaaaccctccaggttttggatcaaacaccgccatcttcttcttccgccaaagtcacctgggacgatgtcattaagatggctgaacaagtctcaaaacaagctaccacggtgggaatgctgtggactggagagaagccagatgccaaagcagttgaggaaaatatggcatcatatttcaacaccctgcaaggtttccttttactttcccatggcagtacagtaggtgcagggcctaccttgtcttctgctgttcatgcatccgtcaagcaagtcgttgattccagcttcagattgatgaaggaaactgtctctttatacgggtaccattctaaagacctgaaaatatcagtaccacaattggttggtgctgtctgggaagcctgttctgcccttaaaaagactccttccacaaatattacagcaattgggagaggaatgacacaggttgctgtttcagtgaaggacgttcttcgtgagatgaaagaattgaaacctgtttcatgtgatgatcaagttgacgaagctgctggtgagagttgtgcagaagcagcgtctgagccacatgatgataattcaagtgaaggtgatctagggaatgacctgtcacctgaagagatgaaagtggctgaaagagcaattgaggttgtctctaatacgctttcatttataaaaatacttattcactccatcataggcttgcttaagctggaaaaaccaaatgacaacagcagttttgtaaattctctggagaagttgttgcagctgtgtcatgaacttggtcgacagatcgatgagattggagcttgcctttatcccccacaagagattcctgccataaatgcagctttggagaaaattcacagcattattgatgctgtgcaagtggaggtaggagaacttctaggcgcatcagatgtatttctggagccatgcaatgatttgaggagttcactgagacagcttgcatctgaactaagtaactctagtactgctgatatagaagccagggttgaaaatataacattaaaccaataagtagactccaatatgtgtacttaattattattttttttgcaggggggttggccggttgggaatatgtgaaatgaatttgacattgtagaacttacgaaaatgatccttttttatttataattttatatacacctgtaacaagtgtactttaagaaacagaaaaaaaaaaaaaaagaatacaaggagtctaacttaattggttaacaaaaaaaaaaaaaaaaaaaaaaaaaaaaaaagggcggccg

SEQ ID NO: 4576 - DNA, 969 bp, Glycine max
  misc_feature (822)..(823): n is a, c, g, or t
  misc_feature (916)..(916): n is a, c, g, or t
  misc_feature (940)..(944): n is a, c, g, or t
  misc_feature (946)..(948): n is a, c, g, or t
  misc_feature (950)..(953): n is a, c, g, or t
  misc_feature (959)..(961): n is a, c, g, or t
tacggctgcgagaagacgacagaaggggatagtagtcagcgccccactatcagtgccagtccattaagaaaacgcaaaaatcatcgctgaaaacataaacaaacatggtctgcctctgctgttagcagctactacctcgctccacaaaaaacaccccctttctcaaatcttaggttgttccaacgatggaagagttcagatccaaatcgtacggtgacggaaggatgcagattgaggcctaccgtggagcgaacattcaagatctccgctgctacagcgcctcctacgcctcttcggtgcacccaacaacaacaacaacaacaacaacgcagacccagatgggaggaaacaacaacaacgaagccaagttcaagaagggaaagtccacaaacgggtccacatcgaaaagttggagctttagtgaccccgaattgcagaggaaaaagagggtcgctagttacaaggtctatgctgttgaaggaaaactcaaaggctctctcaggaagagtttcaagtggctcaaggacaggtgcaacagagttgtctatggctagtaatcacaacaacatcaactatgggtggggattggggtgtcttatatatgatgtaagaatactaattttataatttatttgtatttgtttctttttatctgctgcactttttagtgtttcttttctgtgcctgctgaagtacacataatgggtgtaatgtggaagagaaattgtgattcttgtgttcattctggtccgtcaaaagagtgcaatcaccttgcttacttgctaggaaaaaaaaaaaaggttcatttggagtttcatttcnntctagactgaagtttataatggttgcttataatttggacaaaattagtgcatctatgttcaatactgatagctttcaatcggtgcccccctcnttttgatgtgtcgagtgaatatgnnnnngnnnannnngttcannngttgtcca

SEQ ID NO: 4577 - DNA, 742 bp, Glycine max
aattcggctcgagttcttttgttattcggtcttgatttctgaataatataaagtcttcaaaagtcgctttccccttccacctttctttccaacgttcacaaaggaaggttggtattaaaatggaaagcaaccatagcatgaggcaaaacaccatggaaacagagtttgaggacttgctgccagtgatggcagaaaagctggatgtggagtcctttgtctctgaactatgtggaggtttcaagcttctatcggacccggaaactggtttgatcacgagcgagagtctaaggacaaattcagctcttctgggcatggaagggatgagcaaggaggatgcagaggctatggttagacaaggtgatcttgatggagatggaaagcttaatgaaactgaattttgcatcctcatggtgaggcttagccctggaatgatggaagatgctgagtcatggctggagaaggcaattgatgaagagcttagcaagtcctcatcttagagataattggtccccttttgtaaccaattgtaagttatgatatatgtatttaataaatcttgtcagttttaagttgctataattgatgaaactcatctttgtcctaatgggtcttggcttgttaatcaaatcaatttcttttgttactttgatatttgtgtgatgtatttatcttttttgtcaaatgaataggattatataagaaaaaaaaaaaagggcggaaaaaaaaaaaaaaaaaaaaaaaa

SEQ ID NO: 4578 - DNA, 624 bp, Glycine max
tacagaagaagagagcagaagcttcttcttggttataccttgacagacaaatcagcgagtgggaacattttcattttgtgtttggtggagatgcctattaggagcttggtagaggtggagccaccaagcccactgagatacttgatcggtgccgccgttatgatgatcggagtagtgttacccgtcggttacatgatgttccgtaacaagcgcgtcccctcctcttcctcctactccaaacagacgaacaaggttttgatttgatatagagaattagagatgtgctgaggcctgatgatgatggtggcggctatgatgtgagaagcctatggtttagtggatttggattgattaacttagaggcttcagcagatatgccatttgttcaattgtaaatgcattttgacttcccaaatcttcttagtgctttttcacttcattctgaactcatacatgctgcctgtttttccatctagatacacttggtcttcatattgtgtagtacaaaaaaaattcaatgcacgggatttgcttttatttgttcaaaaaaaaaaaaaaaaaaagatctgacggttgctgcttcctttaactatttgatcatggtttttttctaaaaaaaaaaaa

SEQ ID NO: 4579 - DNA, 1078 bp, Glycine max
ggtaccggttaggccttcgcgtccgtacccccgcgtccgggggaccactaaacgatgatcccaaacgttcaaatccctacctgggacgcggacggaggaggagcactctccccgtcgatctcttccaatgctgacacgtgctcattattctcctccgaccatttccgaatgttccagttcaaggtgcggaactgtccacgtggcaggtcccacgactggaccgagtgtccctacgcccaccccgccgagaaggctcgccgccgtgacccccgcaagtaccactactcaggcacctcctgccccgattaccggaaggggaactgcaagaggggcgacacgtgtcagttcgcgcacggcgtcttcgaatgctggctccacccttctcgctaccggacccagctctgcaaagacggaacaaattgccgccgcagagtgtgcttcttcgcccacaccagcgaccaactccgcgtcgtgacggattcatcgtcgtcgtcgtttgtttcctctcccacttcggtgctcattaactcttcgttctccgattcttcgccgtacagcttcgtccgcggaatagttaaactggatgaggaagggtcgtattcgggtctgacccgttgcgtgttcgggtcgccacgtggcgggtttatgagtgtgaatgggtgcgaggaggagcctgcgatggagagggtggaatcggggagagacattagagcgaggatatatgcgaagcttagtagggagaattccattggatgagtatcggaactcgtgaaatgaatggattccgtggcctttcatttgggtctgtctgtttgtctctgtacaatatataatgcaattcaataaaataaaactatatgtacatagttgagaaggtagagaccgttttgctctctgtgttttgttttttaccttagttcctggctgcccaaaattgggtagcatttgattgtatcaattgttaattttggacttcattcaagaatcatgtttttcttattatttccctttcgctgaacaacgatgtgacgtaagtgtttttttattcgagacttggaagcaaaattgttccaaatgc

SEQ ID NO: 4580 - DNA, 2298 bp, Glycine max
cgactggagcacgaggacactgacatggactgaacgcgtaggggaggaaagaagagagagaacaaagcacttagtgctattcaataattacgaaaaaccaacagcgagtgttgtttttgtttggtccaggctggaccagggaatgaatagagatgagaggctttcggttgaagagaactgagttaagcggcgaagccaaacgcagaatcggcggcagaaattgccaccggaagcacgtcgaagacgggtgaaccaaacacaaaattccatccaccacttctcttttcaatccccaactcaaatctgtgaagaaaatctcaatttctaaattgtaattcttagcactactgctagtagtagtaaaaaaaaacaattagaaagtagtagagtgtttttttttctttttttcgtttgttttacttttaagatgggtgagaagagcaacgttggcggcgacgcgattaacacgacactgcttcacgggaagtacgagctgggccggctgttaggccacggaaccttcgcgaaggtgtaccacgcgcgccacctgaagacgggaaagagcgtggcgatgaaggtggtgggcaaagagaaggtggtgaaggtaggcatgatggagcagatcaagagagagatctcagccatgaacatggtgaagcacccaaacatcgtgcagcttcacgaggtcatggcgagcaagtccaagatctacatcgccatggagctcgtccgcggcggcgagctcttcaacaagatcgccagaggccgtctccgggaggagatggccagactttacttccaacaactcatctctgctgtggacttctgccacagccgcggcgtctaccaccgtgacctcaagccagagaaccttctcctcgacgacgacggcaacctcaaggtcaccgacttcggcctcagcactttctccgagcacctccggcacgacggcctgctgcacactacgtgcggcacgccggcctatgtcgcgcccgaggtgattgggaaaagaggctacgacggcgccaaggccgatatttggtcttgtggcgtaatcctctacgtacttcttgctggttttttacccttccaggatgacaacctggtggccttgtacaagaaaatttaccgcggtgacttcaagtgtccgccgtggttctcctccgaggcgcggaggctcatcaccaagctcctcgaccccaacccgaacacgcgaatcacaatttcaaaaatcatggactcgtcgtggttcaagaaacccgtgccgaagaacttgatgggaaagaaaagagaggaattggatctggaggagaagattaaacagcatgagcaggaggtttctactacgatgaatgcttttcacatcatttcgctctcggaggggttcgatttgtcgccgttgttcgaggaaaagaagagagaagagaaagagttacggtttgcgaccacgcgccccgcgagcagcgtgatttcgagattggaagatttggcgaaggcggtgaagttcgacgtgaagaagagcgagactaaggtgaggttgcagggtcaagaaaaagggcgaaaaggtaaactcgctattgctgcggacttgtacgccgtgacgccgtcgtttttggtggtggaggttaagaaggacaacggtgacaccttggagtataaccagttctgtagcaaggagcttcgtccagctcttaaagatatcgtgtggaggacttctcctgcagagaatcctacactcgcttgaagaacaaccaagactcccatgctaattgtcgttcctttgtagttgtttttgttaattcttgtttcaggactgagatattttagttatttgcttgcttctttgttatgttttggcctctggggtgtgtcgtcttttacccagaaaggggaattgttgaaaaggcgaatgcagtaatgaaccgaaatggacatcgaggagttgttgtcgatgatgattcaggtacatgtgctgcgtgttgttgtgctcgtgggtgatgttgttgctatgttggcgtgattgtgaatatgtttgcaaattgattggtgtggctcatgggtcattcatggctgcgtttaattttgttttatttatattttttcggtgaattagtgctttgtttgggggcggccccaagtgattttgtgtttttttattttatttttaacttctggaccttgctcgcctaatacccagaggaaatccacttctctaaaaattgtggtggaaaaattatatttttgtagtaatatttttgcagaaaaaggatgtgaaataaaacaattattttgcgagcc

SEQ ID NO: 4581 - DNA, 2185 bp, Glycine max
cccgagaagaaaaaagccactgagtgcgattcaataattgcgaaaaaccacggggagtgttgtttgtttcggtcccggctggaccagggaatgaatagagatgagaggctttcggcttaagaaaactgagttaagcggccaagccaaacgcagaatcggcggcagaaattgccaccggaagcacgtcgaagacgggtgaactaaaaagaagaatctcatccaccacttatcctttcaatccccaaccccaaaaaaatcacaacttctagtagtaaaaaaaaaaaaagactagaaggtagtatagtagagtgtttttcattttttattttttattttaatgatgggagagaaaagcaacagcaacagcggcgacgcgattaactcgacgctgctccacgggaagtacgagctggggcggctgttaggccacggaagcttcgcgaaggtataccacgcgcgccacctaaacaccggaaagagcgtggcgatgaaggtggtgggaaaagagaaggtggtgaaggtaggcatgatggaacaaatcaagagagagatctcagccatgaacatggtgaagcacccgaacatcgttcaacttcacgaggtcatggcgagcaagtccaagatctacatcgccatggagctcgtgcgcggcggcgagctcttcaacaagatcgccagaggccggctccgggaggaaaccgccagactttacttccaacaactcatctccgcggtggacttctgccacagccgcggcgtcttccaccgcgacctcaagccggagaacctcctcctcgacgacgatggcaacctcaaggtcactgacttcggcctcagcactttctccgagcatctcaggcacgacggcctgctgcacactacgtgtggcacgccggcctacgttgcgcctgaggtcatcggaaaaagaggttacgacggcgccaaggctgatatttggtcttgtggcgtaatcctctacgtacttcttgctggttttttacctttccaggatgaaaacttggtggctttgtacaagaaaatttaccgcggtgacttcaagtgtccaccgtggttttcctccgaggcacggaggctcatcaccaagctcctcgacccgaacccgaacacgcgaatcacgatttcgaaaatcatggactcgtcgtggttcaagaaacccgtgccaaagaacttggtgggaaagaaaagagaggaattgaacttggaggaaaagattaaacatcaggagcaagaagtttccactacgatgaatgcatttcacatcatttccctttcggaagggttcgatttgtcgccgttgttcgaggagaagaagagggaggagaaagagttacgtttcgccaccacgcgccccgcgagtagcgtgatttcgagattggaagatttagcgaaggcggtgaagttcgacgtgaaaaagagcgagactaaggtgaggttgcagggtcaagaaaatgggcgaaaaggtaaactcgctattgctgcggatttgtacgccgtgacgccgtcgtttttggtcgtggaggttaagaaagacaacggtgacaccttggagtataaccagttctgcagcaaggagcttcggccagcgctcaaggacatcgtgtggaggacttctcctgcagagaatcctacactcgcttgaacaacaaattcaattcaattgtcgttcctttgtagttttcttgtttcagaacagagacatattttaattatttgcttgcttctttgtttggattctaattctatgttttagcctctcgggggtgtcgtcgtctttttacccaggaaagggggaattgttgaaaaggcgaatgcagtagtagtgaaccgaaatggacatcgaggagttgttgtcgatgattcgggtacatgtgctgcctgttgtattgctcgtggctgatgttgttgctatgttggcgtgattgtgaatatgcttgcaaattgattggtgtggctcatggtcattcgtggctgcgtttaatttattttttctattatttatttttttggtgaatgagtgctttgtttggggtcggtcagtgatgacgtgtatgttaatttctgaactctggaccttaattgccaaataaaagaggaaattgacttctgaaaaaaaaaacggaaaaaaaaaaaaaaaaaaaaaaaaaaaaaaaaaaaaaaaaaaaaa

SEQ ID NO: 4582 - DNA, 974 bp, Glycine max
ctgctgcgagaagacgacagaaggggagagaagggaagatgatgatggctcattctcattatcttcttcacattccatcgttatcatctttatctgcatctctcacttccccgcctcgctcgcttcttcctgttcggacattacaacctaagacgctgtcgtgtcgtgtcccttcatttccaacacgcaccccgtggcacttcaagcctcttcattttgctctctctggggcactctcacttgggttattattcggaggaattggcgtggctgaggctgcaaaagttggtgtgaacaagccagagttgctccccaaggagtttagtactgtcattgatgttgctgggttcctatccgatggacaggagaaaagactagcagaagagattgctgctcttgaagcggatactggattcaagttaagagttttggcccagaactatcctgttacgccaggtttggctattaaagatttctggcaagtagatgacagaacagttgtttttgttgctgatcccacatttggcaatatattgaatttcaatgttggtgctacggttgatttggatgtcccacgtagcttttggaatcgcttggctgggaagtatgggaacattttctattggaaagaaaagggggaagatgcatctattgaagcagcagttatggcaatttctagttgcttgagagaaccagttgggcctaataattgttctgaggtgaattaatttcattgatcagtattatttggtcatgtgataccataggtgtacagatatgaactaaaatatttaggagaatctgtttcatgttttaagtatattattctgttctctaaaaaaaaaagagtatattatgctgcgtataaggatcttatgtacttcattcattgttaatacatatggagtctgtaatgtattttcattattatataaataagagaggcaagagattgaacattggcatgatttgtc

SEQ ID NO: 4583 - DNA, 1306 bp, Glycine max
ggaattcggcacgaggtttcactttcagttctgcgattatacatttctttgaacttcaatttacataattccactttaattgatatgaatttggattcatcttaatttcaaaattcaatttttagtggagggtttatgctaaagaacttgaatttgatctttggatttttgctcgcatttttttttcatcatcagttccaggaccaaattgatacacaagatcactgtttttttagagagagattgagagaggatgtttggttcaaagaaaactcctctgagagatgctaaacctagttctgttggccatgcccataacccctttgattctgatgaagagacgaacgataaaaagtataattcctctaagaagactttgaccaacaccaacccctttgatgatgaagttgatgttgatgccactggccactcttcgtcgtcttcttatggcctttcgtcctcccatcgaaataggtataagagcgatttccgcgactctgggggattggagagtcaatctgtgcaggaattggagaactatgctgtttacaaggctgaagagacaacaaactcagtgaacagctgtttgaagatagcagaggaaatgagagaggatgctaccaagactttggtgatgctgcaccatcagggtgagcagattacaaggagtcaccatgttgctgctgatattgatcacgatttgagtcggggagaaaagcttttgggaagtcttggtggcatgttctccaaaacttggaaaccaaagaagacaggcacaataactggccctgttgtttttggagatgatccggtgagaagaaagggcaaccacttggagcaaagggagaagttaggattgacttctgccccaaaagggcagtcgaagtcacggccaacactttctgagccatcaaatgcgctcgaaaaagttgaggttgaaaaagggaagcaagatgatgcactgtcagatttaagtgatctcttgggagaactgaaaggcatggccattgacatgggatctgaaatcgggaggcaaaaccaagccttggacggttttgacaatgatatggagaagttgaccgtccgtgtgaatggtgctaatcaacgtagtcatcgtttgcttgggaaataggggcgtatatcatgagattgatactaatttttaccttgcattattcaattaaaggagcttccaatgttccaggatactggtttcaaatatagtaatgtacaatccgcttgtgaaatatttgtctctgaaatatatattgtattggttgatttgagattaaaaaaaaaaaaaaaa

SEQ ID NO: 4584 - DNA, 569 bp, Glycine max
gtcataataattcaaacgagcgcatacatcagcggggagcaatcgcgtgaattttcaacgggattttgcagagcttccgcgttgaaaccatccaaccctcttagcctcatattcgttgtctatacttccctccttccttcgtgtaattacatttttttcatcagcagttccaggaccaaattgatacacaagatcactgtttttttagagagagattgagagaggatgtttggttcaaagaaaactcctctgagagatgctaaacctagttctgttggccatgcccataacccctttgattctgatgaagagacaaacgataaaaagtataattcctctaagaagactttgaccaacaccaacccctttgatgatgaagttgatgttgatgccactggccactcctcgtcgtcttcttatggcctttcgtcctcccatcgaaataggtataagagcgatttccgcgactctgggggattggagagtcaatctgtgcaggaattggagaactatgctgtttacaaggctgaagagacaacaaactcagtgaacagctgtttgaagatagc

SEQ ID NO: 4585 - DNA, 1329 bp, Glycine max
cttccgcgttgaaaccatccaacccccttaaccttaaattcgttgtcttcacttccttccttccttcgcgtgtgattacattttcttcttctgcaggaccaaattgatatacaagatcattgttttagagagagagagagagagagagagagagagagagaggatgtttggttcaaagaaaactcctctgagagatgctaaacctacctctgttgaccatgcccataacccctttgattctgatgaagatacaaaagataacaagtataattcttctaagaagactttgaccaacaccaacccctttgatgatgatcatgttaatgccactggccactcttcatcatcttcttatggcctttcgtctacccatcgaaataggtataagaacgatttccgcgactcaggggggttggagagtcaatctgtgcaggaattggagaactatgctgtttacaaggctgaagagacgacaaattcagtgaacagttgtttaaagatagctgaggaaatgagagaggatgctaccaagactttggtgatgctgcaccaacagggtgagcagattacaaggagtcaccatgttgctgctgatattgatcacgatttgagtcggggagaaaagctgttgggaagtcttggtggcatgttctccaaaacttggaaacctaagaagacaggcacgataactggccctgttgtttttggagaggatccagtgagaaagaagggcaaccacttggagcaaagagagaagttaggattgacttctgcccctaaagggcagtcaaagtcacgtacaacactttctgagccatcaaatgtgcttgaaaaagttgaggttgaaaaagggaagcaagatgatgcactgtcagatttaagtgatctcttgggagaactgaaaggcatggccattgacatgggatctgaaattgggagccaaaaccaagccttggatggttttgacaatgatatggagaagttgatcgtccgcgtgaatggtgctaatcaacgtggtcgtcgtttgcttgggaaataggggtgtatatcatgagatcgatactaatttttaatatgcattagtcaatcaaaggagcttccaatgttccaggatactgatttcaaatatagtaatgtacaatacgcttgtgaaatttttttctctgaaatatgtatagtattggttgatttgagattatttatgattcaaattttctatcgtcaatatggtgattcctactctaccttttctggcatgattcattccacaaacttgttctcttttactaggaaacggataagtgcataataaaattcattcacatttta

SEQ ID NO: 4586 - DNA, 2000 bp, Glycine max
ctcgagccgaatcggttcgagcttcttcttcatcccctcaactcgatctacgccgacatagatgatcgatcactgataacttcgtcctccctcaccttgcgcagtgttgatgtcgttgttgcgtttctaggaagaagaagacgacgacgaaacgctgcgtttcgagaaacgatgaggtcttcttcttcggacaggaacaggatcaacatcgctgccagtgctcagaaagtcgatgtcgataaccgaatctctctccgattctactaccgcatcgccgataacatcctccgacaggccgatatctttcgtgcagagaagaatattattgacctatatgtcatgcttttaagattttctagtttggtgtcggagacaataccacgtcaccgagactatagatcatctccaccaaggcagaaagaatcattgaaaaagaaattgttaatttctttgaatgaactggagaacttgaaaccagtggtccaacagaagatcaatgagcttaacagcaaacttgcataccaacaaaatggacagggaaaatttagttcaaataattcactggatttttctcccgtgaaaaagcaaacttcggctagttatggcctaataaaggctgtcaggcctactgctggggagtttgtttaccaaggatcaaggagccaacctttctcttatgtcaggcctgtggaagagcatgcacgaagactatctctaactcttccacctccaaaggaagaaactctctctagacattctatccttggtcccaacgggctaaaagggcagtggagaccacctatcattgataaagggatcaagtatccaagcaacatagatctgtctcctgttgaattaccaagcctacaacagtccatggaagatgaatctctgaaaaagaaagataacagcattgcagaacaccataaatcagagttagcttcaattctaacccaaagtgaggactgccagctgcagccccatccccagcctgagcctgaccaggagcctccttctcttatttcttttgaaacaacagaaacctctgctcaaatagaagttatcagacaaccttctcctccacctgtacttgctgaagtacaagatttggtccctgcagtgtcaccttgtgttaatgaggcagggtgtaagacagagattccgtcattagataatagtgttcatgccgaggatcctctacaactgcacatttcagctgctttgatggagaggtttatgaagcttgccaagtcgaatacaaaaaaaaatttagagacttgcggtgtccttgctggtttgcttaaaaacagaaaattttatattactgcccttataatcccaaagcaggagtcaacatcagattcttgtcagactacaaatgaagaggaaatatttgaagtgcaagataaacggtctctttttccccttgggtggatccatacacatcctacacaatcttgttttatgtcatcaattgatctgcacacccattactcctatcagattatgctgccagaatctgttgcaatagttatggcgccaagagatagttcgagaaaccatggcatttttcggttgacagcccctggtggaatgtctgtgattaaacaatgtgatcaacgtggctttcatccacatagtcagcctccagatggtggtccgatttacaagacatgtacagatgtatacatgaacccagatttaaaatttgaggtaattgatcttcgatgataagagttatgctctctgtcattgtttatagaccaagcttttctcctatataggttttacttttaccattaattcagccgtggccataaagaatggcccggctgtgtttgtaaaaagaaatcttgctggttagctgtttcttttttgggttacactgatttgagcttttaaccgctgtgctgcatgcatggtcatttgtattaatatcaaactgttttacccactgctgtatatcaaacttgtgaagatctataaaaaaaaaaaaaaaa

SEQ ID NO: 4587 - DNA, 2807 bp, Glycine max
ccacgcgtccgatcttttgtagcttctctggattcaacagcacagactggacagtcaagtggaggtgattggcaagaagaagtgtatcaaaagatcaaatctatgaaggaaagttacttgccagagttgaatgaaatgtatcaaaaaatagttagtaaacttcagcagcatgattcccttccacaacagcccaagtcagatcaacttgaaaagctgaaggtatttaaaatgatgctggaacgaattataacattccttcaggtttccatgagcaacatctcacctaattgcaaggagaaactgaattcatatgagaagcagattagaaattttataaatacaaatagacctaggaaaaacatgcctggacatcttcccccacctcatatgcattccatgccacaatcacaaccccaagttactcaagtgcagtctcatgaaaatcaaatgaactctcagttgcgaccccccgcccggccgggctctgtagcaacaatgcagcagaataatatggcaggcatgcagcataattctctgtctggtgtatctacagtacaacagagtaagatgaattcaatgcaaccaagtaccaatttagattcaggaccaggaaatgctgtgaactccctgcaacaggttccagtgagctcacttcaacaaaaccctgttagtgctcctcaacaaactaatgttaactccttatcttcacaagctggggttaatgtagtccaaccaaatcttaatccccttcagccaggttctagtatgcttcaacacccagcaactaaaacaacagcaggaaccacagatgttacagaatcaacagttaaaacaacaataccagcggcaattgttgcagagaaaacaacagcagatgttacagcagcaacagcaacagcaacagcaacagcagcagcaacaacaacagttacaccagacatcaaagcagcagctgcctgcacagttgccaacacatcaaatacaacaacttcaccaaatgaatgatgcaaatgacataaagatgaggcaaggaatcggtgttaagccaggggtctttcagcagcctcttacttccagtcaacgctcaacttatccccatcaacagatgaaagggagtccttttcctgtttcttctccccaactccttcaggccacatctcctcagattccacaacactcatctcctcaggttgaccaacaaaaccaccttccatctctcacaaaagttgctacccctctgcaatctgctaactcaccttttgtggtacccactccttcacctcccttggctccatctcccatgccaggggattctgaaaagctgatttctggtgtttcatcgatctcaaatgctgcaaatattggatatcaacaaacagggggtgcagcagcacctgctcaatcccttgccattggaacacctggaatatcagcctctcctttacttgcagagttcactggccctgatggtgctcatggtaatgctttagcacccacttctggaaagtcaactgttactgagcagcctattgagcgcctaattaaagcggtcaaatcaatgtcaccaaaagcattaagttctgctgtcagtgatattggttcagttgtcagcatgaatgatagaatagcaggatcagctccaggtaatggatccagagctgctgttggcgaagatttggttgctatgactaattgtcgtcttcaggctagaaattttatcacccaagatggtgccaatggaactaggaggatgaagcgctacactaatgcaacacccttgaatgttgtatcttctcctggtagcatgaatgacagtatcaagcagttaactgctgaggcttctgatttggattcaactgcaacatctagattcaagatgccaaggattgaggctaatcattcccttttggaagaaattagggaggttaatcagcgacttattgacacggtagtagacataagtaatgaagaagttgatccaacagcagctgctgctgctgctgaagggacagaagggaccattgtcaaatgctcttacaatgctgtggctctcagtccgagcttaaaatcccaatatgcttcagcacagatgtcaccaattcaacccttgcgattgcttgttcctacaaattatcctaattgttcccccatactcctagacaagtttccagttgaatccagtaaggagaatgaagatctttctgtgaaagcgaagtcaaggtttagcatatccttgcgaagtttatcacaacctatgtcccttggggagatagcaaggacttgggatgtttgtgctcgcactgttatttctgagcatgcacagcagagcggtggtgggagtttcagctctaagtatgggacttgggagaattgcttgaccacatgatgatccttgccgttccatgcaaacaaacatcttttttcttctgaaatttgccaaaacttgtgtcaatcattggaatcggagtttttgggtgcaggtgaaaagcaattttgcatcaggtcaaattggttccgtttcagtgaattgtgtattccgttagtatccattttcttgtttatttatatctcaaattgcgatatttaccgctgcctaagatatgtggtagatttgtgtgacttgaatcaaattgccttcaccaaggctttgttcataactaatatagtagctcaacagtttaggcccgtaatttctgcataagaacaattcttccagatgctcataattaaattgttagttatgattagttatgtatcttaaaaaacttgttcatgtgaagtgagttatgaatacttatttttgaatc

SEQ ID NO: 4588 - DNA, 1273 bp, Glycine max
attccccaccatcggccgcccccccccccttttccctccctattctctctcctactgttaacgttttctgtttttctttaagatggcgatgacgacaacgacggagtccgatctcgattacgagcttcgctatctcagtctcgccgtaaccgataccttcactgctttccaaaacctcttaccggatgcgatgacttccttttcagcttgtggactaatagaccctctttgttctcaaaacctcactcccaagcattccaccatcactgcaaccattgattctcagtcatcgatttgcgccactagtaatgttgggagcccagtctcagctaataaaccagagggcagagagaatcatacgaaaggagccacaagtggttcctctgagccatctgatgaggatgatgaagcaggtgcttgtgaacagagcacaaatccagctgatatgaagcgccttagaaggaaggtttctaatcgcgactctgccagaaggtcaagaagaagaaaacaagcgcaattgtctgaccttgagttgcaggttgaaaaactgaaagtggaaaatgcaaccctatacaagcagttcacggatgctagccaacattttcgtgaggcagatacgaataaccgagtgctgaaatcagatgtagaagctttgagagccaaggtgaagttagcagaggatatggtgactaggagctcttttactacgttaaacaatcagcttcttcagacacaacatcatcaaatgagcacaccccagcaactgaacacgactaatctgcggcgcatggcgcatgtttcgccaacaatcaccgttcatggaaatgatgtctcgtacaataatggtggacagaattcagcacttggaaacttggatatgagtttcaatgacatcaatgaagtcatgaacgatgctatgagttgtggaactatttggccactcgactagacagactctctctgtagcttccaattagatcgatccatcttttatattttacgtcttgtctaatttgattagtaggctatatatgttaatgtcaagctatgctatttgtcttcgcttgattcctctttaatgatgcctgtttaaaatggcgtcttctttcgttgtatgtagttttgtataaaaggacttgattgctttatccatttctgattgtaattgcaaaacaaaatgttttctaattagggtcatgccaatgcttatggagcatttggctgacaaaatataatacatgagttaattttgatttaaaaaaaaaaaaaaaaa

SEQ ID NO: 4589 - DNA, 1938 bp, Glycine max
gaaaatactataatatatatcattgtctgtcttttgttttgaaccattttctgcctataagtactcatacattcgacgtttttcaaaggtgagagccaccctttttctcttacaagctactagaacaccgtttgctttgctctcccttcattttgcaaaacctctgggtatctaactctgcagccatgggaagtttggaagttgaatcaacaaatggtcacacctcaagtcctcacaaaaaaactgaaaaatcggagagagagaggagaattgatgagtggcttccaattacttctaaaaggaatggaaaatggtggtattcagctttccacaatgttactgccatggttggagctggtgttctcggtcttccctatgccatgtcagagcttggatggggtccaggtgtaactatacttatcctctcatggatcatcaccctgtacacactatggcaaatggttgagatgcatgaaatggttccaggaaaacggtttgatagataccacgaactgggccagtatgcctttggtgaaaagctaggcctttatattgtggtgcctcaacagcttgtggttgaaattggggtgaacattgtgtacatggtcactgggggaacatcattgaagaagttccatgatactgtgtgttcaaactgcaaaaacatcaaattaacgtttttcattatgatctttgcctctgttcactttgtactgtcccatctccctgacttcaactccattactggtgtatccttggcagcagcagtcatgtccttaagttactctacaattgcttgggtagcttctgtacataagggtgttcaagaaaatgtacaatatggttacaaagctaagagtacttcagggacagtgtttaacttctttaatgcccttggcactgtggcttttgcctatgctgggcacaatgtggtgctagaaattcaagcaacaatcccatccacaccagagaagccatccaaggttcctatgtggagaggagtggttgttgcctacatagttgtggctatatgctacttccctgttgctcttattggctactggatgtttggcaatgaggttgattctgacatcctcatctctttggagaaaccaacttggcttattgcaatggctaacttgtttgttgttattcatgtaattggaagctatcagatttatgcaatgccagtgtttgacatgattgaaacggtgatggtcaagaaattgaatttcgaaccaagcagaatgcttcgttttgttgtacgtaatgtatatgtggcattcactatgttcattgctattaccttcccatttttcgatggtctcctaggattttttggagggtttgcttttgctccaacaacatactttctcccctgcatcatgtggcttgcaatccacaaaccaaagagatacagcttgtcttggttcattaactggatctgcattgtgcttggcctatgtttaatgattttatcacctattggaggattgaggacaatcataattaaagccaagacctacgaattttactcttgaactctttctcctcttgactcagtcatggaaagttaactatatggaaatgtgtgtgatttatcataggtcgctctttaatttactattgcaaaagattgcttgtatagtattgcgtgttggtggaaggggaaattattcccacggaatctcatgaaagaggaatttctagatgtttttttcctttggcattttcattataggaatgtaccattttctctttgctctacattattctcgtaatgatacctattttgtaaagcacatatagcatgtttggctttgattaatttttggaaacaagcaagatttgttttccttttaagcacattttgtataaacttttgatgtaaattattttgaacaaaataaatgaaaaatgagattttttttctgaata

SEQ ID NO: 4590 - DNA, 2624 bp, Glycine max
tcagctacgtaggccccccccccatgagaaccttctctagttgattctcttgtgtgttcttgatagaaaataatccaggatgaggcatctccgttatcatgtgccagtataagagccagcactctggctaggtcttgtagccagaatctgattctggcttgaatggtagcttgctgaggctatcagaagcagtcaagaatcaccatagatttctgagaatcagatcaggtctactcatcagtcatggatagcagcaagaagggagccctcatgagtaatgaaagcgcaaaagatttatcagtcatggttctgaaacagcagcagtacaagaagaacaaaccaaaattaagctctactccacaagagagatgcgatcaatcccactgcctgatctgtaggggaaacaacagttgtcaaacagttcatgcaagaacaaaactgatgaatgctttgattggaaaagggaagccacatgaagctcaggccgtcttccacaatttgactgaagaagggcataagccaactctcataacatacacaactcttgtggctgccctaacccgccaaaagcgtttcaagtctattcctgcacttctttctaaagtcgcagacaatgggatgaagcctgattcaatacttctcaatgccatgatcaatgccttttctgattctggcaaggtagatgaggccatgaaaatctttcagaaaatgaaggagtatggatgtaaaccaacgactagtacttataatactctcatcaaaggatttgggattgctggtaggccttatgagtctatgaaattgctagagatgatgggtcaggatgaaaatgtgaaacccaatgatagaacatataatattctcatccaagcctggtgtaccaagaagaaactggaagaagcatggaatgtcttgcataaaatggtggcttctggcattcagcctgatgtcgtaacatacaacacgatggcaagggcatatgctcagaatggtgagacagagaaggctgaaagactaatattgaaaatgcagtacaacaaagtgaaacctaatgaacgaacttgtggtatcataataagtggttattgcaaggaaggcaatatgacagaagccttgaggtttctatacagaatgaaggagcttggtgtgcatccaaatccagtagttttcaactctcttatcaaaggatatctagacgctacagacacaaatggagtagatgaggtgagatctgatatcttaaacttctcatgagatcaatattttcttgcatgcctttccctccagtttgttgacacattgaaaatactccaagaaccgtttgctgcatgtttattttgtcattttgtgcttctattctgttggtctgtaattattcagtatctagtattgtgatagtaacttacagatgaaaattgttcaggcactgacattgatggaagaatttgggatcaaaccagatgtagtaacctttagcaccatcatgaatgcatggagttcagcagggcttatggacaattgtgaggagatattcaacgacatggtgaaggccggtatagaacctgacatccacgcatatagcatccttgcaaaaggctatgtgcgtgcgggacagccacgaaaagccgagtctcttctgacttctatgagcaaatatggtgtacaaacaaacgtggtgatcttcactaccatcatcagtggatggtgtgccgcaggcaaaatggatcgtgcatttagcctttgtgagaaaatgcatgaaatgggaacttccccaaatttgaaaacttatgaaacattaatatggggatatggagaagcaaaacaaccatggaaagcagaagagatacttagtactatggaagagagaggtgttgtccctgaaatgtcaactatgcaactggtggctgatgcttggcgtgccattggtttattcaaagaagccaacagaattcttaatggttcagaagaagaatctgagctagatcaagaatttgatagtgacaagatgccagtgcaaagcttggagagtatttataagaaacagaaactcagtgcttctccctctaatctgcttcaaatacctgatgtaatggtggctcatccagaaagaacaaccaatggaaacataagaagccgaatggtagtcaaactgtctgacaacatgcggaatgttactacttccatgttttttgttcgcacaagaagttcatatggagtgcaaccactgattgtaagtagtcagcagattcaaaatcaggttgttaggccattccttgactgttgcagagtagtgtcaatactttgttgaggtgactgaccattgtgatgatcacaaattgattagtgatgaaacacaaatcctgtctaaatagatttgtttgctttcatgacagcacaccatgccaatgagttcaggtggaaaaaactgtagataccattcatggacttcagaaatcagaacatacgcttacaattttgacaaaatgctggtgtaatttcaatttgttgaactgctgctattcgtattcagtgctcactagccaatgaaatgtgcatcctgcatcactacaaaattcgttttgtaaaaaaaaaaaaaaaaaacattgttggaatatcatactttt

SEQ ID NO: 4591 - DNA, 1335 bp, Glycine max
gaagaagcatggaatgtcttgcataaaatggtggcttctggcattcagcctgatgtcgtaacatacaacaccatggcaagggcatatgctcagaatggtgagacagagagggctgaaaggctaatattgaaaatgccgtacaacaaagtgaaacctaatgaacgaacttgtggtatcataataagtggttattgcaaggaaggcaatatgacagaagccttgaggtttctatacagaatgaaggagcttggtgtgcatccaaatccagtagttttcaactctcttatcaaaggatatctagacgctacagacacaaatggagtagatgaggcactgacattgatggaagaatttgggatcaaaccagatgtagtaacctttagcaccatcatgaatgcatggagttcagcagggcttatggaaaattgtgaggagatattcaacgacatggtgaaggccggtatagaacctgacatccacgcatatagcatccttgcaaaaggctatgtgcgtgccggacagccacgaaaagccgaggctcttctgacttctatgagcaaatatggcgtacaaccaaacgtgtggaaagcagaagagttacttactactatggaagagaggggtgttgtccctgaaatgtcgactatgcaactggtggctgatgcttggcgtgccattggtttattcaaagaagccaacagaattcttaatggttcagaagaagaatctgagctagatcaagaatttgatagtgacaagatacaagtgcaaagcttggagagtatttataagaaacagaaactcagtgcttctccctctaatctgcttcaaatacctgacgtagtggtgactcatccaacaagaacaactaatggaaacataagatgcagaatggtagtcaaactatctgacaacatgcggaatgttaccacttccatgttttttgttcgcacaagaagttcatatggagtgcaaccactgattgtaagtaggcagcagattcaaaatcaggttgttaggccattccttgactgttgcagagtagtgtcaatactttgttgaggtgacttaccactgtgatgaaacacaaatcctttctgaatagatttggttgtttccatgacagtacaccatgccaatgagttcaggtggaaaaactgtagataccattcatggacttcagaaatcagaacatacacttacaattttgacaaaatgctggtgtaatttcaattgttgaactgctgctactcgtattcagtaatcacttgccaatgaaatgtgtatcctattacatcactataaaattcgttttgtattgttgtgtacaaaaaa

SEQ ID NO: 4592 - DNA, 1200 bp, Glycine max
tcagctacgtaggcccccccccccgaagaagttcaactcttgcatgcactgctatcacccttttctttcaacatgtctacaccagcagaatactacaggtctctaccacctgtgagcaagacctatggagtggcctgtttgatgaccacttctgcatattatctgcaactctatgatgcaaggaacatagcacttgattatggcccagtgtttaaaagccttcaagtttggaggcttatcacaaatttcttctttcttggctcattttcattaccatttgcagtccgtctgataatgatagcaaaatatggtgtttcattggaaagagggccctttgacaagagaactgcagattatgtttggatgttcatttttggtgcattctcacttctggtgattgcagctgtgccatttttttggtatccattcatgggaatttccttagttttcatgatcgtctatgtttggagccgcgagtttccaaatgcacgaattaacatttatggtgttgtatcattgaagggtttttatcttccatgggctttgctagctctggatttaatatttggaaatcctataaagccagacattgtgggtatgattgcaggacatctatactacttcttaacagtgcttcaccctcttgctggaggaaagttcaagttcaagactcctctctgggttcacaaaatagtggcatattggggagagggtacacaaataaatgccccagtgcaatctaatccatcagctggaatagtattcaaaggaagaagccaccgtcttggtgggacacaagcaacaacaaaaagcactgcagaacaaaatgaaggaaatgcttctgcttcctcccctcaaccgcaaagtcaaagtaaaggaattgctttccaaggaaaaagttatcgtttaaatggatgagttcagtaacatgatttgtctatatatgttgtgccatcaaaaccgcaaaaaagttatgatgtaatgaattgtttaacagaagttgaggttctttccactgcctcatgtatcatcattatcactctttatcttattatcattgttgatgttgttaccatcataaatggttgatcattttaggttattttcaaaataatttatatatatatatatatatatatatatatatatatatatatatatatatatatatatatatatttcattgtagttgttaaaaaa

SEQ ID NO: 4593 - DNA, 1535 bp, Glycine max
tccggaactctcgagcccgtttgcctcgcgcctctgtatcccattcctctgccatatcctgaaatacgttttcacaacactcacctttgccatatacagcataatcatcaattttctgaaatgagccagcgtgtccccaactgcgatgtggacgacaataacaacattcccacaaccacaaaaatccctcttcttcccaatttcaatttcatatcccatgaagtcccaatgttgggctaccaagctgctgaactaccatgcaaaaagggacaaccttcgacgtacaaaggcagccacggaaacctaactagtacgtgggacaaacctcgtacaagtggtggtaccttggagtccatagttagccaacatgtcagcgaaaaccgctacaagttggttactatggacgccttagtgccctgttcagaacaacagggcacacagaaggcagtggtgtcagaaaggcttgatgcgtgtgggaagagtcgcttcccacgcgtggtggcacaggaggaagtggagaaacgcgctggggtggtggcgcgtgggacgcgtggtactacaacgctagaattgggtggctgcaaggattggagtgtgagtggtagtgaaacttgtcgtagggagttgagtgtgaccttcaattctgccaccaagggttcgccggaaaacaccacttgctctggcaaacagtgcaccgggaccaccaccaatgacgaccgtgattccattagccaccgtatatcgcagggtgaggtaccggatgaggattacaaggcaacaaaagttgatagatcttctgggtccaacaaaagaatcaaagctaattcagtagtgcacaaacaatctgaacggagaagaagagataagatcaaccaaagaatgaaggaattgcaaaagctggtcccaaattccagtaagactgataaagcttcgatgctagatgaggtgatccaatatatgaagcaattgcaagcgcaagtgcaaatgatgaattggatgaaaatgtacacctccatgatgctgccaataaccatgcagcagcagcaacaacaacaacttaaaatgtctatgatgatggctcagatgggcatgggcatgggaatgagtaaggatatggttatgaatatgaacagcatgaacattcctggattcccccctatgcttcccttcccctccttcatgcctatggccccatgtggcgatcaattacaaggaacaccagagaagtccgtgaccatggatgcatacagtacgatggcttccctgtatcagcagctatttcatcctccagcttctagctcaaagaactgagcctttcgtgttctaccttcctgacaatattatggtgagctataaattaattaagagtgtgcatgtgtgtaaaattttggtgagaaagattgaagtgtgaagagccatcagctttttttttttcttttttatcggcaaaataaaatgtaatttctttgtaccaatagtacaaaaataagatgtttggaaatgtacattattagattagatgtgttcactcccct

SEQ ID NO: 4594 - DNA, 1478 bp, Glycine max
tcagctacgtaggccccccccccgaaaaacgaatttaaaattttaggatttaagaaggaattttagttagctgaaaaaaatagaatttaaaattccatctatctcaagacagtgaatttggaaaattctcactctcgacggaggcggatcttcgtgctctcgacgcggagcctcgctcactcactctcgaatgcgaagcctcactcttgaacttctctctctgctgtataaacattctagttatggaagattctgatcaaccagccaaatctgctgaaaaccagcaaactgaacaagtgtgtagttttttcagaaagccagttaataaaaagaatataaggaaacgaactattgttaatgaagataatgaggaggactcaaacaatgaaacttctctgttgcatattcagaagaagaccttaaagcctgataataagttgtacttttccactggttcttcaaaaagctctgcatctgctgaacccagtgaagaaccaggaaaaccagtctttcagttcgagtcttcaaaagagattcaagttcagcatgatagcaaagcaactgcaacactagagaccgagactgagttttcaaaagatgctcgtgccatccgtgaaagagctcttaagcaagcagaggagagtctgaaagggaaaagcccaagttctaagaatgaaaaattatataagggaatgaacagttacaaagactacaaggctggctttcgtagggagcaaacaattgctagtgaaaaagctggcgggtcacatggtcctcttagggcttcagctcatattagagtttcagcgaggtttgattatcagcctgacatatgtaaggattataaggaaactggttactgtggatatggtgattcatgtaagtttatgcatgatcgaggggattacaagtctgggtggcagatggagaaggaatgggaagaagctgagaaaccaaggaaaatgagattggctgcaggagaggatgcagatgaggaggagggtgctaatttgactgatgaagatgatgaggattcgctcccatttgcctgtttcatttgtagaaactcttttgtggatcctgtagtaaccaagtgcaagcactacttctgcgagcattgtgcattgaagcatcattcaaagaataagaagtgttttgtctgcaaccagccaacacttggcatttttaatgttgctcatgggatacgcaggaagatggccgaggataaatcataaaaatgtctctgtaggatacatggatctctttacttcaaggaagttatcttttctccctcattttagtttcatgtttaagtttgatgcctatgtaatgagctgaaaacctaccataggtctgcaccagtggaattaggcctccattccttttgttgcatttcctttgacatatagatcccagaatatctaatggtgagagacctttatggatttacccatttgtatataccatgccagttgccc

SEQ ID NO: 4595 - DNA, 815 bp, Glycine max
  misc_feature (2)..(2): n is a, c, g, or t
  misc_feature (10)..(17): n is a, c, g, or t
  misc_feature (24)..(26): n is a, c, g, or t
  misc_feature (28)..(31): n is a, c, g, or t
  misc_feature (45)..(50): n is a, c, g, or t
  misc_feature (54)..(54): n is a, c, g, or t
  misc_feature (56)..(57): n is a, c, g, or t
  misc_feature (78)..(79): n is a, c, g, or t
  misc_feature (96)..(96): n is a, c, g, or t
tncggcaaannnnnnnnagtgaannngnnnnagggtcacatggtnnnnnnaggncnncagctcatattagagtttcannaaggtttgattatcagnctgacatatgtaaggattataaggaaactggttactgtggatatggtgattcatgtaagtttatgcatgatcgaggggattacaagtctgggtggcagatggagaaggaatgggaagaagctgagaaaccaaggaaaatgagattggctgcaggagaggatgcagatgaggaggagggtgctaatttgactgatgaagatgatgaggattcgctaccatttgcctgtttcatttgtagaaactcttttgtggatcctgtagtaaccaagtgcaagcactacttctgcgagcattgtgcattgaagcatcattcaaagaataagaagtgttttgtttgcaaccagccaacacttggcatttttaatgttgctcatgagatacgcaggaagatggccgaggataaatcataaaaatgtctctgtaggatacatggatctctttacttcaaggaagttatcttttctccctcattttagtttcatgtttaagtttgatgctatgtaatgagttgaaaacataccataggtctgcacagtggaattaggtctcattcgttttgttgtatttctttgacatatagatcccagaatatctaatggtgagagacatttatggatttacccatttgtatatagcatgtcagttggccatactatggttctttttgcagtagtttgttaccaaattaattttgaatacagcgacctttacttccatat

SEQ ID NO: 4596 - DNA, 1498 bp, Glycine max
tcagccacccgtcactgttaaagtgaaaatcacgacactcaagtggaagagggaggtcggcgacggctgctacttcaatcggcgccgctaccgaggtctccgtcgcggcggaaaggggcatctccgctccactacggcggctattgactactatggttaattgcattaattgtacataaatagacctctaaatcaaagttatggaagattctgatcaacctgccaaatctgctgaaaaccagcaaactgaacaagtgtgtagttttttcagaaagccggttaataaaaagaatttaaggaagcgaactattgaaattgaagataatgaggaggactcaaacaatgaaacttctctgttgcatattcagaagaaaaccttaaaggctgacaataagttgtacttttccaccggctcttcaaaaagctctgcatctgctgaaccaagtgaagaatctggaaaaacagtctttcaatttgagtcttcaaaagagattcaagttcaacatgatagcaaagcaacagcaattctagagaccgagactgagttttcaaaagatgctcgtgccatccgcgaaagagctcttaagcaagcagaggagagtctgaaagggaaaagtgcaagctctgaggataaaaaattatataagggaatgaacagttacaaagactacaaggctggctttcgtagggagcaaacaattgctagtgaaaaagctggagggtcacatggtcctcttagggcttcagctcatattagagtttcagcgaggtttgattatcagcctgacatatgtaaggattataaggaaactggttactgtggatatggtgattcatgtaagtttatgcatgatcgaggggactacaagtctgggtggcagatggagaaggaatgggaagaagctgagaaagcaaggaagatgagattggctgcaggagaggatgcagatgaggagggtgctaatttgactgatgaagatgatgaggattctttaccatttgcctgtttcatttgtagaaacacttttgtggatcctgtagtaaccaagtgcaagcactacttctgcgagcattgtgcattgaagcatcatgcaaagaataagaagtgttttgtctgcaaccagccaactcttggcatttttaacgttgctcatgagatacgcaggaagatggccgaggataaatcataaaaatgtctctctaggatccatggatctctttacttcatggaagttatcttttctcccccattttagtttcatgttaaagattgatgctatgtaatgagttgaaaacataccagaagtttgcacagtggaattagttgattcattttgttgtatttctttgccttatagattccagaatatctaatggtgagagacatttatgatatacccgtttgtatatagggtcatactgtggttctttttacagtagtttgttaccaaataaattttgaatagagcgacctttacttaaaaaaaaaaaaaaaaaa

SEQ ID NO: 4597 - DNA, 903 bp, Glycine max
tcgtcccacgcgtccgtacggctgcgagaagacgacaggcggggacgcaactcaacaacaaaagcctttttttttaaaaaaaaaaattcctttaaaaaatgaagaatactatcttcttcgctctctttcttgtttgtgccttcacctcatacctaccttcagccaccgctgatactatcttcgacataaatggtgattttgtccgaaacggtggcacatactacatcttgccagttataagaggagacggaggtggaatagaattcgccgcaacaggaaacgaaacatgccctctcactgtagtgcaatctccccttgaggtctctaagggtctaccactaatcatttcatcaccattcgaaatccttagcatccaagaaggccttattttgaacattgggttcacttttgtgcccccctgtgccctaattccttctgagtggactactgttaagggtttaccagaaggactcgctgttaaacttactgggtatgaaaataaagtgcctggttggtttaaaattgagagagtttcccttgaattcaatgactataagcttgtgttctgtgcaactgaagatagcacgtgtgtggatattggggtttatattgatggtgaaggaaacaggcgtttggtggtgactgagaataatgatccgttattggttcactttaagaaagttgaagttgaatcatcagctactgcttgaggtggccttaaaaaatcatgtggtttctcgtagtgtaagactgaataaatgctttggttgtaatgattaattcaagactgaataaaataagaatagtgcctttacgaatttctgtaacacgaaatatgtaatacgtgtaaagatggagctatattcaatgtccgttaattccgtataaattttttctaaagtc

SEQ ID NO: 4598 - DNA, 1043 bp, Glycine max
tcgagtcagctacgtaggccccccccccaaatctaacactagcttgcgtgccctagctcactacgtcgctcgtcacggttccgtcagtgcttttccgccgccgtcgcggttcaaacttgaaaagttcaaaaggtgtgaaagcagataagatgcagcatagaaatttgacttctggaaggccttctggaactgatggctccgattactcctaccgtatggtagtcgattcaaggtatcaactggttgcaaaggggaagaaacgcctgtctctctactttatcactgaggctgtgttgctgttaataggagtgacacttacatatttaccaggaatagaagcagacgctccaaatacagttgcctattcatctgttattgttagtgttgtttcactaataattgggaatataggtcgaagacgaagccggtctggtttgttgagattttatgctgctgtatcatctatagcaatgcttctcttgattgcttctcttgcccaacagcatttgctgctgaaggctatccaggattctaaactttggaaaacagggaagtatgacgtcaatgaattatctcattttcaaattggtttgctgttatacatggtaaccttatcggtgctcaagctttgtaccgtcaatgcagttgtttcccttctctttaacatggcgccacccaagaaaacctcttagctccttatcggttttggggtccaaatccaaatttctttcctcattcatctatttacaacccattgatctatatccatgactatcttctatgaatgagatattttgagggaagctcaagagagattttacctacaaaacattttaaagacatttgttaattatataggtttttgttgttttgtgtttcttttgagttctagtctagggaggatctattgaaccgtcaccacaaaaacaaaacgtagtgttgaggagataatatttcaccctattccggtagtgttccctactaattttgttagttctttttacaaagcaaatattttctaatgagaaatgagacaattcatt

SEQ ID NO: 4599 - DNA, 839 bp, Glycine max
  misc_feature (812)..(812): n is a, c, g, or t
  misc_feature (815)..(815): n is a, c, g, or t
tacggctgcgagaagacgacagaagggggagcttgggaggaaataatatcatttccgttctcaaaatcataacagtacttcgcgtgccctagctcactccgtcgctcctcacccttccggcagtgcttggtcgtggccgtcacggttcaaacttcaaaagcatttgttgtgttggagtaggctatggatgacttgtttgattcttcgctgaacttggaggacacccattacaaggaaggctatgacgaaggctacagccatggccttgtcactggcaaggaagaagctaggcaggttggcctcaaggttggctttgaggttggcgaggagcttggtttctataggggttgtgtcgaaatctggacttctgcgatccggctcgacccaacctgtttctctccacgggctaaaacatttatttgccagatggaggagttgatccagaaataccctctcatggatccagaaaatgcacaagtgcaagagatcatggatagcctcaggctcaagttcaagatggtttgttcttccttgcatgtcaaacttgagtataatgggtatcccaaatcttctacggaggtcaatgatattcaattctgagctagttatgatattttcagtctttagggatatccatgtgtagggaacctctgagttgggttagttgatgaacaaattacgtgttatcattttacaaacatttgtgcaagtcaatgtatcgaataattattttatattaaaaatgatgatatatacattgtttatgaacgtaaaaaaaaaaaaaaaatggcgtgtcgattccgtatttatanaanaatcactgctttcttttgttaaaa

SEQ ID NO: 4600 - DNA, 1407 bp, Glycine max
ccacgcgtccgacccacgcgtctccgccctccccctacagccccgcgccgcccccgcccaacccccccggccgcaagaaggccgtcatcgtcggcatctcctaccgcttctcccgccacgagctcaagggttgcatcaacgacgccaaatgcatgaagtacctcctcatcaacaagttcagctttccagaatcttccatcatcatgctcacggaagaagaagatccccatggccccaaatttccaacgaagcacaacatcaggatggcaatgtattggcttgcacaaggatgtcaacctggagactccctggtttttcattattctggtcatggatcacagcaaaggaactatagtggtgatgaagctgatggatatgatgaaactctatgtccccttgattttgaaacacagggtatgattgtagatgatgagatcaatgccgcacttgttagacctattcctcatggagctaagctacatgcactaattgatgcctgccatagtggcactgttctagatttgccatttctttgcagaatgaacaggagtgggcaatatgtatgggaggaccatcgccctagatccggtgtatggaagggatctagtggtggagaagttatctgcttcagtggatgcgacgatcatcaaacttcagctgatacatctgctctatcaaaaattacatcgactggggcaatgacattttgcttcatccaagccatagagcgtggccatggggctacctatggcagcattcttactgcaatgcgcacttccatcagaaatgttggcggcggcggcggcggtaccgggggtggtgatgtggtaacatcccttctctccatgcttttgactggagggagtctcagcggtgtcggtggactgggacaggaaccacagttaacagcttgcgaagcatttgatgtgcatagaaaacctttttcattatgatactcaatattctttattctgcaatttgttttcctaggctctgcccctgtatacgactacattgattacaatgattaatatattataaagtagagaggattcttttttcgtaaatcactgaggatgtgtttggatgaatttatgtctgcccttgagaatgtgacatgctcttgtaataatgactttggttgctgctgcaatccttggatgaaaatgctgattcgactcagatttgaattccacataagaggtgagcatcttaaccctggataaattaggaggtgtgcgtgtgaccccaattttacttcgtgaaaagtgtcaataatgacttgaaagtgatggtctcgtactgatcatacatcatgtgcataaatttgatgtaattacttgtatagtatgtttttggaacaacaaatcttaggaattgatttgataaaaggtataaattataatt

SEQ ID NO: 4601 - DNA, 692 bp, Glycine max
tacggctgcgtgcggtcgacagtagggagagagtgctgtgagcttcagcaaaatgcgcgccctagcagctcagttctctaattatttatgcagaagaaaagttggggtcaatctgcgatctcgtaatttttcatcatataacagtaaagatgagctaaccatcgaggaagaagctgagagaaaagttggatggctattgaagacgatattttttgtcactgcaggggtagcaggataccatttctttccttatatgggagagaatttgatgcaacagtctgtttcgcttttgcgtgtcaaggatcccttgttcaaaaggatgggagcttctagattggctcgttttgcagtagatgatgaaagaaggaagaagatagttgagatgggtggagctcaagaactcttaaatatgttaagcactgctaaagacgaccgtacacggaaagaagcattgcatgctcttgatgcactgtcacaatcagatgaagctcttgcatccttgcatcatgctggggccatttcagtaattaggtctgcaccaaattcacttgaggatgcagaagttgagcgattcaagttgagcttgatgaaaaggtttcaagatctcagatacgatgatgtgccatcatgacttgaggtgcatgcctccttttgctttttgtttttgggtggttggagcatgaaataacatg

SEQ ID NO: 4602 - DNA, 2118 bp, Glycine max
  misc_feature (2076)..(2076): n is a, c, g, or t
gatgagaaagggaaagtgatttgagttggttttagtcagcagccataactaccaaaacctagaacaaacattggttgcgttccccagttttctcagtcaccatggccgcggcagcaccagccactgtctcctcttccttctccaaaccctcctctcttccttttcagacccactcttactctttccccacaaccctaccaacactccccactccccctcgcgccgccgtcgtcaaaacccctctcatcgtttactccaaaaaccccatttccgacatcgtctcctccaccgagtcacgctccggaggcgcctgggacgacgagaagccgcgcgaggagtgcggcgtggtgggcatatacggcgaccctgaggcctcgcgcctttgctacctcgccctccacgcgcttcagcaccgcggccaggaaggcgccggaatcgttacggttcacaacaacgtcctccaatccatcaccggcgttggtctcgtttccgacgtgttcaaccagtcgaagctggaccagctccccggcagcctcgccatcggccacgtccgctactccaccgccggccaatccatgctcaaaaacgtgcaacccttcgttgccggctaccgcttcggctccgtcggcgtggcccacaacggcaacctcgtcaactaccgcaccctccgaaccaacctcgaggacagcgggtccatcttcaacactacctccgacaccgaggttgttctccacctcatcgccacttccaaacacagacccttcattttgagaatcgttgacgcctgtgaaaagctcgaaggggcttattcaattgtcttcgtcaccgaggacaagcttgtcgccgttcgcgaccccttcggattcagacctttggttatgggaaggagaagtaacgggtctgtggttttcgcttctgaaacctgcgctcttgaccttattgaagcgacttatgagagagaggtttaccctggtgaggttcttgttgtggataaaaacggtattcagagtctatgcctcatgtctcatcctcaacccaaacaatgcatttttgaacatatttactttgcacttcccaattcggttgtttttgggaggtctgtgtatgagtctcggagacaatttggggagattttggctactgagagtcctgtggactgtgatgttgtgattgctgtgcctgactctggtgttgtggctgcgcttggttatgctgccaaagctggggttccgtttcagcagggtttgattaggtcgcactatgtggggaggactttcattgagccctctcagaagattagggactttggtgtgaagctgaagctatcacctgttcgtgctgtgcttgaaggtaaacgtgttgtggttgtggatgattccattgtgagaggaaccacctcgtccaagattgttaggctgttgaaggaggctggtgctaaggaggttcacatgaggattgcgagtcctccgattattggttcttgttactatggtgtggatactcctagctctgaggagttgatttcgaataggatgagtgtggaggagataagggactttattgggtcggattcacttgcctttttgccttttgatagcttgaagaggttgttgggaagtgaaagtccaaatttttgttatgcttgtttctctgggaattaccctgtggagccaagagagcttaaagtgaagagggttggggactttgttgatgatggcttgaatggaagcttggagtctattgatggtggttgggttcaggcaaaccgaaatcaaatcaaggttggtactggtactagtactagtatttcataatattcctatatctggtttttgcagcataaggcatccctcagtggacaaaaatcagatgcagttcttcaggtgtttttggtgttgttcttcattttaaattgaagttttaccttgatgatacggataataatgtttacattataggtcaatataagttctctaagtaaaattctaattctgactcgagaaagtactagaagtacttcagaaactgtatcttaatcttgtccagtttgatagtttaaaccctaaaaatgggggntgtgtttgatttttatttaataaagtgtttttagtttctaaa

SEQ ID NO: 4603 - DNA, 1244 bp, Glycine max
cccacgcgtcttacggctgcgagaagacgacagaagggggagagtctgtttcggtcacagcagagcagagagtagtaagaagacactgcacagatctgagtggtgactgaaggaatctagcttctttcatttctcatcactattcttaggtctgagggctcattgccattatcatgtcaaggaggccagtaaatccttcgcgtcggttaggtgatggtggaagtataccatttgctgcatctatccggtctaaatctcaaaactctcccctactatctattgggcttgtcattgtgggtgcaatccttctgattggttattgttacagcaattcaggtggagctagcggtggtattaaggatgtaagtaaacttgaaggtggtgcatcatgctcatcagaagtcctacaagcattgcccgttttgaagaaatcatatggagacagtttgcacaaggttttgcatgttggccctgactcttgttctgtgttatctagtttgttagaagaagaggatactgaggcttggggaatagaaccatatgagttagatgatgttggtgcaaagtgtaaaagtcttgtacgcaagggcattgtgcgtgtggctgatttgaagttttctctaccctaccgtgcaaagtcattttctctggttattgtgtcagatgcattggattacttatctccaagatacctgaataaaaccctgccagagttggtgagggtgtctgctgatggtgttgttatctttgcaggttatccaggtcaacagagaactagaggtgaagaagtggccaaatttggtcgtccagccaaattgcgcagctcatcttggtggataaggtttttcgttcagtctagtttagatgaaaatgaaactgctggaaagaagtttgaacaggcttcagccaagaaggcatacaagccagcatgccaaatttttcacctcaaatcatacccttgaaatttcactgtcttatttgtatactccacttaatggttagaagccatgctgatgagataggcatcttcagcacccgaagggtaaagttccatatatgctgttgaaattatagttcgatggtgatgacatattttatttagattcaattattaaactatttttgtcttggatagtgttcctcatgtttttgtattcacaactgctatttattatttagaaaaatttctaatttgacacatttacttcatctatagtatatgatgggaaaaccatatttgtttt

SEQ ID NO: 4604 - DNA, 1200 bp, Glycine max
  misc_feature (1181)..(1182): n is a, c, g, or t
  misc_feature (1188)..(1188): n is a, c, g, or t
  misc_feature (1193)..(1193): n is a, c, g, or t
gcaacaatcatcataaccgattaatcactgtgataagataagattgaaaagatgtttagggacgtgtcaagctgcaacacgtacaactacggcgaggctgtgtattgggacgcgcgctacatccaagaggatggttcagctacgtaggccccccccccattggtaccagcgttattctgctctcaggccttttgttcgcaatttcatccctctttcttccaggattctcatggttggttgcggcaattctgttatgtcagaggatatggtcaaagatggttacgaggacatcgtcaatattgatatttcttcaattgcaattgacatgatgagtagaaaatatgagcacatcccacagctaaaatatgaatgtcagagatatgagcttgtttccagatgaatcttttgatggtgttattgataaagatactgatgctacttttgcacccatgctttgttgatgcttgatctaggaactcttgattcattgatgtgtggtactgatgctccaattagtgctgctcagatgcttgctgaagtttgtagactactaaaacctggagggacctatattttgattacatatggggatccaacagtaaggatgcctcatataagcagaccggtgttcaattggaaaattacgctgtataatatcccaagaccaggatttcaaaagcccgagagtagtacaccatcaagaaaatcatacttggagcccatcgctcttactgaaaagggcttactttcagcagatttcgttctggaagatccagattctcactatatatatgtttgtaaaaagataaatgacacagagatagacaataatacctgcataccaattaacagctgatgttttatagatctgacttacattgaagcactgatgaaggtagtatttatcctcttcacaaactttgatgtgcatcatagttatttaagtggttgcttttgtcatctgtaccactgggacaagttaccaccgtcaatgtgttgtttgcaatagcattttattctcataaattagagtaatgaagttagcatgtagagattattggtattattagaatcttaaagaaatcagacaaattgactgattaatgtattgttttgcccgtgattttgtctggatgaatggattatggttgtaacatgtaacaaaccaaaaagcaaaaaannggggcngccgncgactcc

SEQ ID NO: 4605 - DNA, 1732 bp, Glycine max
cgagtttccagtataggagagcaggataaaatatcacgggatcgaattgaattaagatatttgaaaagcaaagctaagaagaaatgagaaaataaaaaggatagcatatcatatgatatcagaagtgagtgtctcataatggaagcataacagcgaagtgatccaaagaagaagaaggatgcaggagaactactcataccaatcgtatccagattccggcgagtcctcaccacgatccagagagatagacttcgacaaccctcctccatgggacgaccaaaactacaaagccaagttcatgtgcagctacggcggcaagatcctccctcgctcccacgacaaccagctctcctacgtcgccggcgagaccaaaattctcgccgtcgaccgctccatcaagttctccgccatgctcgccaaactctccgccctctgcgacgccccagacaacaacaacctcaccttcaagtaccagcttcccggcgaagacctcgacgccctcatctccgtcaccaacgacgacgacctcgatcacatgatgcacgaatacgatcgcctctatcgcgcttccgctagaccctcccgcatgcgactattcctctttccctccgatactcttccttcccctccacctgctgcttctgctccacacgattcggttatcaaacctaataacgtcgattttctcttcggtctccagcctcagccaccacctattgatgtcaaattcaatgatccgctgccggagcccgtggcgccgccgccggagcatccgttgcgattcaattttaaccctgcggtctcggatccgagcgcgattcagcgccagttgcagcaactgcaaattgcggagaacgagcaagctgcgcatcggaggaagggtgaggataattaccccgccggtgattactacgttcaaaaagtgcctgagaagttccccccaccgaattttctggcaagctcgccgggttattggcctgaaaaacatgtttccggcgacgtttatcctccggctgtgacggctacgtccggcggaggggaaccgtcggtttatatggttccggcgccggggacgttctatcatgcaccggttatgcggcctccacctccagcaactcagggatactacaccgtgcaacgaatgggttccgataattaccgtgaagcgccggtgtacggcggtgttccgccgccaaaagcggcggttccggcgagtatggcgccagcccagcagccgattaaggctcccgcgtatacggaaggattcggaatggttcggccaggtgggatagtggataatactggtgttccgtacgcgcaggtggcgtacgatagtggaagtgggagacaggtttattatactgcgcccggtggtggtgtaacgcacgctcctccgtaccatggggtttttccgcccgtaaccgctgatatgagactgggaggggtttcgtttggtcaggatgttaaagtcataagcaagcttacccaaggttcagtctgatcattatcgaacaaaaaaataaaaataatagttcagtatgattatgattatggttatcgctaaatatgttttttttttttgctatcttgttcgtaatcctatttatgtaataggaatactattagcttttagtttttcgcttgctattgttgtacacaatgttgccgatgatggttataacttataccatgttattcctatggttttgtgtaaaattcttactgtgctgca

SEQ ID NO: 4606 - DNA, 1692 bp, Glycine max
ggctcgagcgggaatttaagatagtatccggactgcccgggtcgaaccacgggcccggggaaaataaaaaggatagcatagtgccataatggaagcttgagaaggaagtggtccaaagaagaagaaagatgaaggagaactactcataccaatcgtatccagattcaggcgagtcctctccacgctccagagagatcgacttcgagagccctcctccatgggaccaccaaaactacaaagccaagttcatctgcagctatggcggcaagatccacccacgctcccacgacaaccagctctcctacgtcggcggcgacaccaaaatcctcgccgtcgaccgctccatcaagttccccgccatgcttgccaaactctccgccctctgcgacgcccaagacaacaacatcaccttcaagtaccagctccccggcgaagacctcgacgctctcatctccgtcaccaacgacgacgaccttgaccacatgatgcacgagtacgatcgcctctaccgcgcttccgctagaccctcccgcatgcgattattcctctttccttccgatactcctccttcgcctccacctgcttctgctccacctgataccgttatcaaacctaataacgtcgattttctcttcgctctcgaaaaaaacgtcgccgtccctgctcctccgcctcctcagccaccaccggtttctgtcaaatttaatgatccgctgccggagcctgtggcgccgcagccggagtaccggtcgcggttgaattttaaccctgcggtttcggatccaagcgcgattcagcgccagttgcatcaattgcaaattgcggagaacgagaaagcttcgtatcggaggaagaacgaggataattaccctgccggtgattactacgttcagaaaatgcccgagaagttcccgccagcgaattttccggcaagcgcaccgggttattggcctgaaaaacatgtttccggcgaggcttatccgccggcggttacggcaacgtccggcggaggggaaccgtcggtttatatgattccggcgccggggacgttctatcatgcaccagttatgcggcctccggccactcagggatactacgcagtgcaacaaatgggttctgataattaccgtgaagcaccggtttatggcggtgttccgccgcctaaagcggcgattccggctagcttggcgccggcgcagcagccggttaaggctcccgcgtatacggaaggattcggaatggttcggccaggtgggatgctggataatacggttggtccgtactcgcaggtggcgtacgatagtgcgagtgggagacaggtttattatactgtgccgggtggtggggtagtgcacgctcctccgtaccaaggggtttttccgcccgtaaccgcagatatgagaccgggtgtggtgtcgttgggtcaggatgttaaagtcataaacaaggttactcaaggttcagtgtgatcattatcgacccaaaaataataataataataatagttcagtgtgattatgattatggtttatcgctacatatctttttattttcttttttgttactatcttgttcgtaatcctatttatgtaatagggatattattagctttttagtttttcgtttgctattgttgtacccaatatgtcgatgatgatcataacttatatcatattcctatggttttgtgta

SEQ ID NO: 4607 - DNA, 736 bp, Glycine max
aaaccgatcaatacccatcaatttgcatctagaatatttgataaacccgaaccatgactggtagcttcatttcatggctccaaaataaaaagtgaagggtgggaaagggggaggttgtggaacttagcagcgaagcgaggaagatgcaaagtcaacaaacagtgaaagaagaagatgatgaaggtccacctccgggatggcaacctctccccgctcagccaccgccaccgccacgtccatccggttgggctcaaatggtttgcggttcttgtcgtcgcctgctttcatatccacgaggtgccaaacatgtcaaatgttcatgctgtcagactgtcaacattgtattagaagctgatcaggttgggcaagttaagtgtggcagttgtgcggtattgctgatgtacccatatggtgcttcacaagttagatgttcatcatgccgatttgtgacagaaattggggcacacaacaagcggcctccatggtctgtacaacaaaggaagccatctcctccaaaaactggttgttagtggcctgtccgttggcctagtagatggatcatccttgtacatcaaacaaattaggtatgaggattcatgtaccaatctcaaaattgctttgttattgagatacgcatccttaaggaattatttattaatgtaaagttttggaatttcaccagaatttttaagatgaagtttcacttgaaagtcttctatccctgcttgcttaaaaa

SEQ ID NO: 4608 - DNA, 898 bp, Glycine max
atgttatagattatggttgagataaaaaataattatagacttcaatatccgaaatgctcaacgatggtgatgccaatcatgtctcaattgagaagtccttcagaataaaagaggatgataggttcttctcaaggctaatgtccaaggaaatctccatggctaactcttcttcaagggtcttctattatggagaaacatcaattgcagtccctttcatgtgggaggcacaacctggcacccccaaacacccttcttctgagacttctctgccaccccttacacccccaccttcatattattccaattccaagtccaaaaacaagagaagaaactcaaaggccaatatattttcatgttttatgccaaagtttatagggtcaagaaaggctcatgtgtcaccaacatcatctcgctcatcttcctcatcctcctcctcatcatggtcattggtttatccagcatactcatattccatgagggacacagatcaaggaagcatctctttctcacgctctacaactgttcgctcttttctcaaacacaaagcttcaaacggttttagaggcttctatccctttggaaacataaataatgcaattgtgagccatggagcagtctagtttgtggaggtaacataattaggacttgattttctacacggtttacatattgtggaaaatctttgaaaatgtagttgtttggttggttattgtgtgtgggctttaaaggtgttggacataataatttcctatctcatgatttaggttgagattgtatatgctttaaattagaagccttttttttaatataatatacttgagtaaaaaaaaaaaaaaaaaagcttatcgataccgtcgacctagtgttaaacacaataaagttgggaactggagggggg

SEQ ID NO: 4609 - DNA, 1463 bp, Glycine max
  misc_feature (1449)..(1451): n is a, c, g, or t
gtagccggtagcattttcagcgagatttagctgtctgcgccggaagcgcccccccccaggagcccgtgacggttctgatcaatcgctgtgcagtggtaacctgctttgtgatgtggtggaaggatcttcttccgtcttggttctcgaatcccgagccttacactgctgcttggaccaccatcacctcagcatggctataactataatctagacaaggcaatgaatccttctctcacttcttcctcaaccttgtcgtcgtcttcttcgtcctggttctccggaatcgttcgagttggccgttccaacagtgtcaaaatgtccaataactccgctgctgcaccctcctccgacactgccggccccgtcgtccgcaaaaatcagttccgaggtgttcttttcaagtacggtcccaatcctattcaggttgcatttaagactggtgatttcaagcggcaagtcatttttattggtggattgaccgatggttttctagctactccatacttggaacctctggcaattgctctggaccatgagaattggtcgttagttcaattccttatgtcatcttcatacagtggatatggcacctccagcttgcaacaagatgctaaggagctggatcagctgattaattatttaattaacaaagaagactctgaaggtgtggcattacttgggcatagtactggctgtcaggatattgtgcattacatgcgcacaaattttgcttgctcccgagctgttcgtgctgccatctttcaggctccagtcagtgatcgggaatatcaagctacactccctcatacagcttctatgattgacttggctgctaagatgataagtgaaggccgaggtctagagttaatgccaagggaagcagatcctagtgccccaataactgcctataggtatcactccctttgttcatataatggcgatgatgacatgttcagttctgacctgagtgatgaccagttgaagatgagacttgggcatatgtctagcacacattgtcaggttatattttcaatggctgacgaatatgtgccagattatgttgataagaaagctctagttgagcggttatgcagagcgatgggaggagcagagaaagtagagattgaatatggaaatcattccctctctaacagagttgaagaagctgttgatgctattattgacttcttaaaaagagagggacccaagggatgggacgatccatggagttaatgtaggtgtctatcaattttcaatgccttcttttgttgttatgatagtttttattccattttgtcaatctttcatttttctcccatatataattttttggggtggaggggtttgaatttcttgtggttgttatttgcaaccatagtttttgttgatatatcagatgttaatattttttgtcatgagaaatatagtgtatctgttttttgaattaannnatttaacccaag

SEQ ID NO: 4610 - DNA, 1909 bp, Glycine max
aattcggctcgagggaggagagagtcgcgaggctgcgaattttgattctgagcttagagagaaggggaggattctggatgaagcgaatgaggttatgaagaagcaggaggctgagcttgaggagctaaagagggtggttcgagagaaagaggaggagattgaggttttgttggttcagagggaggttgagagggagaagctgagggtggctgaggcgaatttggagaagcaggcaatggactggatgttggcgcaggaggagctgaagaggctgggtgaggatgctgcgaggcatgctgaggagagtagtgagaccttggaggatttcaggagggtgaagaagcttctcaatgatgtgaggtctgaattagtttcgtctcagcaagcgttggcatcttccagaagcaaaatggaggagcaggagcggttgttggaactgcagctgagtgagcttggggagcagagggcaagtgtgatgtcctacatggaaaatttgaaggatgcacagattgaagtggagagtgagagaacgaaactcagggttgcagagtctcggaacagagagcttgaacgggatctgaagatggaaaaggagcttattagtgagttggaggaggagctgaagaaagagagaacttctttggagcaggcagtcaaagaagtggctttgcttcaagaggaattggagaagaaaactgccgagtttagagaaacaagtgccgttcttcaggttaaagagtcagagcttgttgatgctaagctagaaatccagcgtttgaaatctgaaaaggcttctcttcagggtatcttggaggagaaagacttggagctttccagtgctaggaaaatgctgggggatgttaaccaggaaatctatgatcttaagatgcttatgcacagtaaagaaacccagctcattgaagcaaacagtatgctaagggacaaagatgagcatgtgaaggtaatccagaacaagttgaataatacaaaccagaaggcttttgaggctgaaactgtggtagaaagaattttagatctcacaaacagacttgttgcttccattaaggatgaagatatgaactcatcaaaaccactactagatgaaatgggtaaccaactacttgatcaactattggagaaacctgctaatgaattgaaatggcaacaaaaaagccttgagaatgagcttgagttggccaaggtaaccttaaaagaaaaggagatggaagttcttgctgcacagagggctctaacaataaaagacgaggagctgaagatgactcttgcaagattggactcaaaagaggaagagttgaaaaaagtaagggaagaggtgacagaagactctaatgatcttaaaaggctgtatgctttggcacaggagagaattggtgagaaaagcttaggtgatttggcaattgagaagcttcagcttgaggcagctcagcttgaagttgaagctgccactaatgcactacaaaaacttgccgaaatgagtcgacaacttctgaataaggctatcctgagtgttgaagctgataactacatcagtgtcatgcaaaataatgctaataaaaccccagattcaatcacagataccaataaccctgaatgtttcgaagaggtaaaagcaagagttgctcgcctctcagctttgtctgagcagcttgtgatggaggcaggtattgttcctgcaaactaagagagagaggtagtgaagaaagttgtgagggagggttggatcataaaatcttcccttagtttgcaagacatgtacaatgtacagatagtgatcacatctggttttggtactttactacaagatatgtaaaatctccactcattttattgtattagttacattcaaaaaaaaaaaaaaaaagcacgagaagcaaaaaaaaaaaaaaaa

SEQ ID NO: 4611 - DNA, 1175 bp, Glycine max
aatacatcattattgtatactcttttatatgtatggcgcaacccaatttttgtttttttttttcaatttttaatctcctatccctttttttaattttggaatcgaaatatctaatctaaataatccaaaaattcactcttaatcttgacagtgatatatgttgtatatgtaaatcctactcgtgccgattcgcagacttctcccgggaaaaaaagtaggtaaaaaaatatgctaagtataaattgtctactgatgaaatacgaaagctgatgatattgaaaaaaaaagaattgtaaataaggttcaggttcgacttccatagagaatatagatgatattgtctataatgatagaaaaaaataaaaaaactttcgaaagattttatccaattgaaattttaaaaatgactgggataaacttaagaattcaattattgaaattgaataagtaaacaatttaattggattggtcgaatggtatcaaaaaaatggagtactaactcccatttcttatttattattgaattaaccgatcaacttgctttgttatcgaacatttctttttgatttcaaaaattttccggaaaaaatttgaatctatttttatatgcgaatcaatcctactacttctggtcctgaggtttctgcgcttgaaaaaaaaaatctgggacgtatcgcccaaataattggtccggtactagatgtagcttttcccccaggtaagatgcctaatatttacaacgctctgatagttaagggtcgagatactgttggtcaacaaattaatgtgacttgtgaagtacagcaattattaggaaataatcgaattagagctgtagctatgagtgcgacagaaggtctaatgagaggaatggaagtgattgacacaggagctgccctaagtgttccagtaggtggagcaactctaggacgaattttcaacgtgcttggagagcccattgataatttaggtcctgtagatactcgcacaacatctcccattcatagatctgcgcctgcctttatacaattagatacaaaattagccatttttgaaacaggaataaaagtagtagatcttttagctccttatcgtcgtggaggaaaaataggacttttcggtggagctggagtgggtaaaacggtactgattatggaaattgatcaataacattg

SEQ ID NO: 4612 - DNA, 1249 bp, Glycine max
tttttttttttttaaaaagttttttttttttttttttaaacggaaaaggaatcaaatctttaagaatattgttatgcttgaataactaatatctttggacaaagacaataaaaaaaatactttttttttcatgtttgatatattttgttgcgtccatatgatgaagtatttacccagttccattatcagaattagcatgaattaccatcttttcgcggcactgttctggattccatctggtgattgtgtgctcttcaatggtgtagtttgccaaacataatggagactcattgctgctaccatttctattgacatacaaaaccaataagatttttgcaacacctccaagaagtcgagttgtgcaatgaacatcagaccatactctcaaccttccatttagatctttatcttctccatctgataaaacaagcacaccatactccgaatggacccgagctggatggtgacgatagacaacgaaatctgcaccatactgagctcctgacctcactacccagtttttcattctcaggtgggaataagccttgtagaaacaagggaatgtttctttctttgacttcatgtaatgccacagctcttcactgttttggggactagtatcatcactgtcattattaatcttaaggcatttcaaggaatagcataggtagaatgcctcctcaaagcttaattgaaaccgaggtttgtccttttcaactgttctcacaggtgagccaaagcatgctttatcgagcaaatgaagttgttctgctcccactgctaagtgtacactactaccagagagaaatccacaagtatttgattgaactagagaagactgaagttgagatacaatctttgacatgggttccttgagcgcttcagcttgtgcatcctttttagcttttgcatcttttcctttccatctaggtgccatttggacccaacgttattgtgctccccgatcttgtgagctccgtaatccacagcccgttctccgaggaaggcgcctgcgatgacgaaggtgacgtagactcagttgcgacgcattaggaccttgtcgaggttttccaaaacgcctcctcctctgcttcttcgaggcactgaatccattacctctggttagggttagggttagggtttcagatctcttctctttcgcaaaggaaaggtatttctgacggagaatgaatcaatgaggtgagactggttcacactggctgctcggggggggggcctacgtagctga

SEQ ID NO: 4613 - DNA, 1812 bp, Glycine max
cacgtacgcgggactaatattatcaattaatccccaaggttcgttattattaaacgatggtatttgatttgtcaaatacatcattattgtatactcttttatatgtatggcgcaacccaatttttgttttttttttcaatttttaatctcctatccctttttttaattttggaatcgaaatatctaatctaaataatccaaaaattcactcttaatcttgacagtgatatatgttgtatatgtaaatcctagatgtaaaaataggcagacttctcccgggaaaaaaagtaggtaaaaaaatatgctaagtataaattgtctactgatgaaatacgaaagctgatgatattgaaaaaaaaagaattgtaaataaggttcaggttcgacttccatagagaatatagatgatattgtctataatgatagaaaaaaataaaaaactttcgaaagattttatccaattgaaattttaaaaatgactgggataaacttaagaattcaattattgaaattgaataagtaaacaatttaattggattggtcgaatggtatcaaaaaaatggagtactaactcccatttcttatttattattgaattaaccgatcaacttgctttgttatcgaacatttctttttgattcaaaaattttcggaaaatttcaaaaattttccggaaaaaatttgaatctatttttatgtcagctacctaggccccccccccccgtcctgaggtttctgcgcttgaaaaaaaaaaatctgggacgtatcgcccaaataattggtccggtactagatgtagcttttcccccaggtaagatgcctaatatttacaacgctctgatagttaagggtcgagatactgttggtcaacaaattaatgtgacttgtgaagtacagcaattattaggaaataatcgaattagagctgtagctatgagtgcgacagaaggtctaatgagaggaatggaagtgattgacacaggagctgccctaagtgttccagtaggtggagcaactctaggacgaattttcaacgtgcttggagagcccattgataatttaggtcctgtagatactcgcacaacatctcccattcatagatctgcgcctgcctttatacaattagatacaaaattagccatttttgaaacaggaataaaagtagtagatcttttagctccttatcgtcgtggaggaaaaataggacttttcggtggagctggagtgggtaaaacggtactgattatggaattgatcaataacattgccaaagctcatggaggtgtatctgtatttggcggagtaggtgaacgtactcgtgagggaaatgatctttatatggaaatgaaagaatctggagtaattaatgaacaaaatattgcagaatcaaaagtagctctagtatatggtcaaatgaatgaaccgcccggagctcgtatgagagttggtttaactgccctgactatggcggaatattttcgagatgtcaatgaacaagatgtacttctatttatcgacaatatctttcgcttcgtccaagcaggatctgaagtatctgccttattgggtcgaatgccttctgctgtgggttatcaacccactcttagtactgaaatgggttctttacaagaaagaatcacttctaccaaagaggggtccataacttctattcaagcagtttatgtacccgcagacgatttaaccgatcctgcgcctgctacgacatttgcacatttagatgctactactgtactatcaagaggattagcggccaaaggtatctatccagcagtagatcctttagattcaact

SEQ ID NO: 4614 - DNA, 1212 bp, Glycine max
aagcttaaatggaactaaaattcgggatttcctaaatgattagtttgggacaatcattttcacttgccccgtagttattttttttttttttttttgactcaaaagataccatttactgcaacaaactcaattggagttaagagtaagagagacatcatataatatgcaaaactttaagaaaaaggttcatatcctcagccaattacatttattaaaagtagggactatgtccctgtgttccttcggccaacacgagcaacaaaaccagccttgattggagcaactgatcttcctgatccacacttctcacaccggagaaagaagagacgattctcctttgtaagtatagtatccggactcttgcacccaaggcaaataacgtattcattgacatatcgtcgcagaattccttcaaagttctttggtgcaaaccttccctttacaaccaatctctgctgtccatcaagggagccacttgtacccaattcagcaagcaagaaagccatgacatggtctggctgccgatgcatcgttttgcatagatccataaaattgacaaacacagttttctttgtgccctcacgaagaacttgaggaggcctcataactgtccttcgccgatctccagctagttctggattattctcacgtagaatgttaaacaccctgccaagaagctcctcatattcataatcacgatcactcccttcccaaggatagcgagcctcgggagcaaccacttctccttcatcatcttcagggtgatcatccaaatcttcatttgcatctccactctcatcattcaagttactcatttcaacaggcttcttcttcttctttttcaaaccagtaaatgcagtctcaaccccctcggaaactgagaggttttctgtcttctcagccaatttctccacagggtcatcagcaggatctacaattgtaatcttcttcttcttcttcttcttggtaggatcaaaaggaacaatttctggaacctcctccttcatctcatttggtgtttcgtcggccatgattgctgatagcgcggaggaaaccctagaagtgagtgcagagaaaatcgaatcccttgagaacaagagtaagtgcggccgatggttgcgaaatgagaaccctctttttctttcagatacaaaatgcgttgcagatccttttctcttttttttttccccttctgtgtcttctcgcagccgt

SEQ ID NO: 4615 - DNA, 772 bp, Glycine max
aattcggcaccaggctcattcagctaaccgaaggaaacaggaaacttcctctttctcaccgccactgaatcctctttatttactttccctggccccggctcttcggggcatcacacacacacaacataaactattcaattcagtctctttcgttatcaaattatttcttcgatcaaggtcgttttcgaaacttcaccaacatgagctactacgatcatcagcaacagcctccaattggtgttcctccccctcaagggtatccaggaaaggacgcttaccctccaccagggtaccctgcacaaggttaccctccaccagggtaccctccccaaagctatgccccacagtatgctcaacaacctcctcccaggcaagaagttggttttcttgaaggatgtttggctgcactctgctgctgttgcatgcttgatgcttgcttttaagttctgaaagagacgtggaaggtggtgactgaatcagagacattctgtgaagcggcattctcatcaatattgtgttctgttaattcaatagtagaactgaatattaacatttgtttaggtttaaattcttgcagtgtctatgagtctatgaattctgtatttaaactggttagttcatgggttggtttctaactttgaatttaagggactggatttatgcttctctgtgcttgatcccgaatcatgcagcgattactaattactgaagttaaatttttataaattgtgataaagctcttattcaagagttttctgttaaaaaaaaaaaa

SEQ ID NO: 4616 - DNA, 2186 bp, Glycine max
ggctcgaggttatatctgaccccagtacacccaagcctaatccagatccatttttatacattcttgaaggaaagtctgatcattactttgaaatgcgagatggggttattcatgtatatccagatagggatgcaaaagaagagctttttcctgttgctgatgcaactacatttttcactgatcttcatcacttacttcgagtcatagcagcagggaatataagaactttatgccatcataggctcaatcttctagaacaaaaattcaatcttcatttgatgctaaatgcggatagagaatttcttgctcagaagagtgctccacatcgagacttctataatgttagaaaagttgatactcatgtccaccactcagcatgcatgaatcagaaacatcttttaaggttcataaagtcaaagctgagaaaagagcctgatgaggttgtaatatttcgagatgggacatatctaacgttggaagaggttttcaagagtttagatttgtctggatatgacctcaatgttgaccttttggacgttcacgcagacaagagtacttttcatcgctttgataagttcaatcttaaatacaatccttgcggtcaaagtaggctcagggagatatttcttgaagcaggataatctcattcaaggtcgttttcttggtgagttaactaagcaagtgttttcagatcttgctgccagtaaatatcagatggctgaatatagaatatcaatatatggtaggaagcaaagtgagtgggaccaactagccagttggatagtgaataatgatttgtacagcgagaatgtcgtttggttgattcagcttccacggttgtacaatgtgtacaaagaaatgggaattgtgacatcattccagaacatgctcgacaatatttttattccactttttgaggtcactgtcaacccagattcacatcctcagctgcatgttttcctgaaacaggttgttgggttggatttggtggatgatgaaagcaaacctgaaagacggccaacaaaacacatgcctacaccggagcaatggactaatgtattcaatccagcattttcatactatgtctattactgttatgcaaatctttacaccttaaacaagcttcgagaatcaaagggaatgacgacaatcaaattccgtccacattctggagaggctggtgatattgaccaccttgcagcaaccttcctcacggctcacaacattgcacatggaatcaatttgaaaaaatctcccgtgcttcaatatttatattatttagcccagattgggctggcaatgtctcctttgagcaataactccctattcttagactaccatcggaatccttttccaatgttcttcttacgaggtctgaatgtgtcactttctactgatgatcctctccaaattcacttaacaaaggaaccattggttgaagaatatagcatagctgcttctgtgtggaagttgagctcatgtgatttatgtgagattgcccgtaattcagtttatcaatcaggtttctcacatgctttgaagtcacattggattggtaaggagtacttcaagagtgggccacgcggaaatgacattcagagaacaaacgttcctcacattcgattggaattccgtgatacgatttggagagaggagatgcaacaagtttatttgggcaaagccatcattcctgaagtagtagacaaataagatgccagtggcattcgtttcatacacaatgaggtagaaagtatatttcctcaaacccatgcagcatcagagatgtactaaggctgaagacattacaacactggtctgatgatatgaaccagatacatactatagagaatcagcaagatcgctgagcttgagtatcgaacaacgtttacagctacaaatcgacgtaccgtgggaatttttttccttgtactattttgtgttattttaaaattattacgaataagttcatgcttaaagcaaaatgatgcctgttggtgttagaaatgtaagttatgatcctttgaagggagagatgttcatctcccaaaattttgattcccattgtttatcgataatattatatatagtgaacaacagttgagacttgcaaaacggtggctctgttagttttaccataacgaggctacgtaacaagagcaaaagtggctgttaagttagttttaaaa

SEQ ID NO: 4617 - DNA, 2195 bp, Glycine max
gcacgagtatgatcagaagccttgcctataaagacattctcatgttgcacttgaatgcctcttttgaaggtgtcacgagagaagtttgtctctttgaagaagaatacaccggaagatgttgttgctgaattagaagaggatctacaaaactcaaaatcagcatttgagaaaagtcgcttcaatctagagtgcaggtaaactctctcatgaatattgaagtgaaaaagaagtacgagttcttggagtccattagtgcaataatggatgctcatttgagatattttaaactgggttatgacttactaagccaaatggagccctatattcaccaggtgctaacatatgcacagcaatcaaaagaacttgctaatattgagcaagataagcttgcaaaacggattcaggaatacagaacacaggcagagctggagaatatacgagcttctagcaattatatagaaaccgttctaggttctgatggcacccatgttgtgggtttgaactcttacagaagttttgaagcaggggtgcaacctgcaacaaccaaaggggaggttcaaacagttaaacagggttatctgttaaaacgatcatcaagctcacgtggagattggaaacggaggttctttgtacttgataaccaagggaatttatattattacagagtgaagggtgtcaaacccatgggctctcagtcatataattattctcgcttgtctgaacaaaatagtggcatgtttggtagattccgttcaagacacaatagggcttcgtctctaaatgaggatattttaggttcttgtacagttgatctgtgcacatccactataaagatggatgcagacgatacagatctacgtctttgcttccgaataatttctccctcaaaatcatacacactacaggctgaaaatgaagctgataggatggactgggtaaacaaaattactggagctatcacatcgctttttaattctcagtttcttcaacagcctcaatttggtagagtgcattcccagaatagaaactcagcaactggtgcttctttggcaagtcaatcagaggatagtcagaaatcattgagggatggcatatattccaaggaagtgggtagtgtctctaagattttaaggggaattcctgggaatgataaatgtgctgagtgcagtgctcctgatccagactgggcatctctaaaccttggcatattgctgtgtattgaatgctctggagtgcatcgaaatcttggtgttcatgtctcaaaggtgagatctataacattagatgttagggtttgggaaaataccgttctagagttatttgataacttaggtaatgcttattgtaattctgtctgggagggcttgcttctacttgatcatgaaaggttaggtgaatcaaatgtgcctatgaaaccttgctctacagatgccttccaacacaaggagaagtacatccaagcaaagtatgtagagaaatcactgatcatccgagaagaggatatacctgggaatccttcagtttccataagaatctggcaagcagttcaggctgtaaatgtacgagaagtgtatcgccttattgtcacatcaacatcaaatctgataaacacaaagtattatgatgagtctcaccatgctgctgatgccaaagggcatcagcatgatcctgaagcctgtctgagagttgaagagactactgagacagagaggtgtttccgtggatggtcattattacatctggcatgtcattctggcagtgcactgatggttgagttgttgctccaatttggtgctgatgtaaacatgtgtgactatcatgaaagaactcccttgcaccattgcattacaagtgggaaaaatcaattggcaaagtttctattaagaaggggtgcaaggccgtcagttaaagatgccggaggactcactgtacttgaaagagcaatggagaggggagcaataactgacgaagaactatttatcttgcttgctgaatgccagtgaagatggatctggtatatatatatatattaggaatgttgaagatatgctgttgttcattaagaaaaagaaagttcaatttcttaattttgaatgcctaattcatcgaaaggaatttcattaactttttaaaaaatctggatccatatttgttgcggttactatagaaaacatttaacacgtaactcttaatga

SEQ ID NO: 4618 - DNA, 1081 bp, Glycine max
ctgcgagaagacgacagaaggggaataatataactatataagcggttcttccatttgactcttgttctgaacgacttttcaagagaatcaaaccatggcagtgaaagtatacggtccccactgtgcttccaccaagcgggtgctggtttgtctggttgagaaggaagtcgaatttgaggttgtccctgttgatgtcactaagggggagcagaaggatcctgagtacctcaaactacagccatttggagttgttcctgtcatcaaagatggagattataccttatatgaatctcgtgctataatgaggtattatgcagaaaaatacagatctcaaggggttgagttgctgggaaaaacaatagaagagaggggtctagtggagcaatggctagaagttgaagcacacaactttcatccacaagcctacaacttgtgtcttcatggtttgtttggttcactatttggtgtgactccagatcccaaggtgattgaggagagtgaagcaaagctggtacaagtgttgaacatctatgaggagaggctctcaaagactaagtatttggctggggatttcttcagcattgctgatattagccaccttccatttcttgattatgttgtgaacaatatggggaaaaagtatttgttagaggagaggaagcatgtgggtgcctggtgggatgacattagcagtagaccatcatggaacaaggttctccagctctacagagctccaatctagttgctaaatgagtttcagggaaactgctattagtgtatcatctttgaatatgttagtcaagaataaatgtacttttagcagattccaatgaaaggaagaaagtgggtagtgttcaacttaatggaatgtgttgaatttctgctttctttcattttcagttgtttgcttgtgtttaatttggatattccttgtggtcatgctcttaactttcccgttgtttaccctctatttttcttttgctactgaataaaagttatatatatatatatataaaaaaaaaaaaatatatatatatatatatatatatatattgtacttctatttttcttagtgaaaaaa

SEQ ID NO: 4619 - DNA, 2097 bp, Glycine max
  misc_feature (2072)..(2075): n is a, c, g, or t
atcttctactaattcctttattcttatatctatatttcagttcattttgttctccaataatttcttctgctactttagagaccttgctgcaaaggttctctcttagcatggtaacaatgggtttgaaagcactttttgtttggtgcataatatggttggcgtttgcacagttgtcactaggaggaagagtgaggcattacaagtttgatgtggagtacatgatcagaaagccagattgcttggaacacgttgtgatgggaatcaacggccagtttccaggcccaactattagggctgaagttggtgacatccttgacattgctctcaccaacaagcttttcaccgagggaactgttattcactggcatggaatcagacaggttggaactccttgggcagatggtactgctgccatctcacagtgtgcaataaacccaggagagacttttcagtacaggtttacagttgacaggcctggtacatatttctatcatggacaccatggtatgcaaagatcagctgggttatatggttcattgatagtagatttgccaaagggacaaaacgaaccgtttccttacgatggtgaatttaacctccttcttagtgatttgtggcacaccagctcacatgaacaagaagttggcctctcttccaaaccattcaagtggattggtgaagctcagactctgctcatcaatggaagagggcaattcaattgttctcttgcatctaaattcatcaacacaaccctaccccagtgccaacttaaaggtggtgaagagtgtgcccctcagattcttcatgtggagccaaacaagacatacaggatcaggattgctagcaccactgccctagcttcactcaacttagccatttcgaatcacaaacttgtagttgtggaagctgatggaaattatgttacaccatttgcggttgatgatattgacatctactctggtgagagctactcagtgctccttcgcacggaccaagatccaaacaaaaattattggctttcaattggggtgagaggaagaaagcccaatacccctcaaggcctaacgattctaaactataagcctatatctgcttcagtttttccaacttttccaccacccatcacacctctttggaatgattttgagcgtagcaaagcattcaccaagaaaatcattgccaaaatggggaccccacaacctccaaaacggtccgaccgtacaattttcctccttaacacccaaaatcgggttgatgggttcaccaaatgggccattaacaatgtgtccctaacattgccaccaaccccttacttgggttctatcaagttcaaaataaagaatgcctttgacaaaacacccccaccagttaccttcccacaagattatgacatctttaaccctcccgtgaaccctaatgcatctattggcaatggggtgtacatgttcaaccttaatgaagttgttgatgtgatcttgcaaaatgcaaaccaattatctgggagtggtagtgagattcacccttggcacttgcatgggcatgacttttggattttggggtatggagaagggaaattcaaatcaggtgatgagaagaaattcaatttgacacatgcaccgctgagaaacactgcagtaatatttccatatggttggactgctttgaggtttaaggctgataacccaggagtttgggctttccattgccacattgaaccccatttgcacatgggaatgggtgtgatttttgctgaggctgttcaaaaagttgggaaaatcccaagagatgcactaacttgcgggcttacaggaaagatgctaggaaatagacactattgaaactagccacaatacacacatcaaaagaatgttgaatagtgtttatttgattaaaatttgaatgttgaattgatattatgttttaattttacatttttaaattttatatatatatatatatatataatttatatatatatgtgtgtgtggagaatttgttaatgtagacctatcttttttttttttttgaaagtgtatgttagctaactacaactccaattgttgttaagattnnnntgaagtgatagttggtggcgat

SEQ ID NO: 4620 - DNA, 2100 bp, Glycine max
  misc_feature (2076)..(2077): n is a, c, g, or t
  misc_feature (2094)..(2097): n is a, c, g, or t
atccaaagacaactcagatctatataattcagttcttcttattctccactaatagcttcttcttcggctacttgagaccttgctgcaaaggttctctcttagcttagtaacaatgggtttgaaagcactttttgtttggtgcattatatggttaggtttagcacatttgtcccttggaggaagagtgaggcactacaagtttgatgtggagtacatgatcagaaagccagattgcttggaacacgttgtgatgggaatcaacggccagtttccaggcccaactattagggctgaagttggtgacattcttgacattgctctcaccaacaagcttttcactgagggaactgttattcactggcatggaatcagacaggttggaactccttgggctgatggaactgctgccatctcacagtgtgctataaacccaggagaggcttttcattacaggtttacagttgacaggcctggtacatatttctatcatggacaccatggtatgcaaagatcagctgggttgtatggttcattgatagtagatttgccaaagggacaaaacgaaccgtttcattacgatggtgaattcaaccttcttcttagtgatttgtggcacaccagctcacatgaacaggaagttggcctctcttccaaaccattcaagtggattggtgaacctcagactctgctcatcaatggaagaggacaattcaattgttcccttgcatctaaattcatcaacacaaccctaccccaatgccaacttaaaggtggtgaagaatgtgcccctcagattcttcatgtggagccaaacaagacctatagaatcaggattgccagcaccactgccctagcttcactcaacttagccatttcgaatcacaaacttgtagtggtggaagctgatggaaattacgtttcaccttttgcggttgatgatattgacatctattctggggaaagttattcagtgctccttcgcacagaccaagatccaaacaaaaattattggctatcaatcggggtgagaggaagaagggcacccaacaccccacaaggcctaaccattctaaactataagcccatttctgcctcaattttcccaatttctccaccacccatcactcccatttggaatgattttgagcgcagcaaagcgttcaccaagaaaatcattgcgaaaatggggaccccacaacctccaaaacgctctgatcgtacaattttcctcctcaacacccaaaatttgcttgatggattcaccaaatgggccattaacaatgtgtccctaacattgccgccaaccccttacttgggttccatcaaattcaaaataaataatgcctttgacaaaactcccccaccagttaccttcccacaagattatgacatcttcaaccctcctgtgaaccctaatacaactattggcaatggggtatacatgttcaaccttaacgaagttgttgatgttatcttgcagaatgcaaaccaattatctgggagtggtagtgagattcacccttggcacttgcatggacatgacttttgggttttggggtatggagaagggaaattcaaaccaagtgatgagaagaaattcaatttgacacatgcaccgttgaggaacactgctgtgatatttccatatggttggactgctttgaggtttaaggctgataacccaggagtttgggccttccattgtcacattgaaccccatttgcacatgggaatgggtgtgatttttgctgagggtgttcacaaagttggaaaaatcccaagagatgcactaacttgtgggcttactgggaataagctagtaggaaatagacactattgaaactagctagccacatatcaacatcaaaagaatcttaaatggtgtttatttaatttaatatttgaacgttgaattaatattatgttttaatttttcattttaaagtttatatatatatatatatatatatatataaagaaaaattattatataaatggaaattgggagatgctctatctcatccttgaattaataaatttgttaagaatgaagaagatggattttgatgtagaaannaacaaattgggaataannnnagg

SEQ ID NO: 4621 - DNA, 773 bp, Glycine max
  misc_feature (729)..(729): n is a, c, g, or t
ttcggctgcgagaagacgacagaaggggaaaggtgttaggttataaaaaaaaaaaatcttagccacagacgcagaggaggagatggagacgatgatgatgatgagctgcgtttcgatttcgagttcagtgacaagaggcgctattagcgtgggttcctcttcatctttgtgtttcggcacacccaagttgttcaattcagcaagggtggcggtgaatggtcggcgaagaaacaaaggtttgagttgcaacgccatgttcggtctgggggtgcccgaactggtcgttattgccggcgtggccgccctggtttttgggcccaagaaattgcctgaagtcggccgtagcatcggcaagactgtaaagagcttccaacaggctgcaaaggagtttgagtcggagcttaagaaggaacctgattccacccagggggactcatccgagaaacctattgttacagtcactgagcagcagcaggaggacaatgaggtgtctacttctaaggagactgtatgatattttcgccatgaaataaactattctgttagtttagtatttttggctgtctgagatttcgttatttaaatcaagaccaagctttcaaataaaataaaaaattaattgctactgctggtactagtgaagaaattgatcatttttcttcactttccatcgcttggatttgttttcactttatttttaactagtattaaactcactttgctcgttgnaaaaaaaaaaaaaaaaaaaaaaaaaaaaaaaaaaaataaataat

SEQ ID NO: 4622 - DNA, 764 bp, Glycine max
acgtgtagcacgcctatcttgtcttttacttttctttctttgtgttttggggttaggttatcaaaaacaaacaaaaatcttagccgcagaggcagaggaggagatggagacgatgatgatgagttgcgtatcgattccgagttcaattccaaaatcaagaccttctattagcttgggtttgggaactcccaagttgttcaattcagtttcagtaagggtagccgtgaacgtgaatggtcggggaagaaacaaaggtttgagttgcaacgccatgttcggtctgggcgtgcctgaactggtcgttattgccggcgtggccgccctcgtttttgggcccaagaaattgcctgaagtcggccgcagcatcggcaaaactgtcaagagcttccaacaggctgcaaaggagtttgagtcggagcttaagaaggaaccggattccaccgaaggggactcatctgagaaatctattgtagtcagtgagaagcagcagcagcaggacaatgaggtgtctacttctaaggagactgtatgagatattatatgatatgtagatgtcaaattttcgccatgaaagaaactattctgttagtttagtattttttggctgtctgagattccattatttaaatcatgaccaagctttcaaataaaaagattaatatattggatgctagctgacgtttatgattaaaaaaaaaaaaaaaaaaaaaaaaaaaaaaaaaaaaaaaaaaaaaaaaaaaaaaaaaaaaaaaaaaaaaaaaaaa

SEQ ID NO: 4623 - DNA, 1013 bp, Glycine max
aacgaaccaacaaccaaattgtttcccctgcacacttggcacaaagtgattaataagactgattgattcattgctgtggttgtgggtgtgatgtcagagaactacacactggaatcgttcaccgtcgaaggcagcgacggagtgaagctccgtacaagggtgttcaagccagatgctggaacagaagcggatgggaagttggggatcgttctggtgcacccgtattctattttgggtggctgccagggtctcctcaaaggaatcgcttctggcttggctctcaatggttacaccgctgtcacctttgacatgagaggcgttggcaagtccaccggcagggcttctctcaccggcttctccgaagttaaggatgtcgttgctgtctgcaactggctttccaacactttctctcttcccaggattttgttgcttggttcttccgctggtgcacctatagcagggtctgccgttgatcagattgaacaagtcattggttatgtaagcataggttatccatttggaatgactgcctcaatcctttttggacgacaccacaaagccatcctacagtcaccaaaaccaaaactcttcattatgggaacacaagatggattcaccagtgtaaagcagctgaggaacaagcttaattctgcagcaggacgtgtagaaacacatttaatcgatggggtaggccacttccagatggaagggcctggttatgatgctgagatggtggatctcatcatcaagtttattgcatcactatgaagacaaataactgattgtgctgagtgtgatttgactctactattgggaattgggattagtttgtgtacaaaatcttgttgaatctgcgattgcaatgtttatttgtgccccctacgcctatgccaccttctaaaatgaaagaaatcagttacccacatagtaagcatttctgctgattggataatgagagagaaggggaattacaagccaaaaaaaaaaaaaaaaagcttatcgataccgtcgac

SEQ ID NO: 4624 - DNA, 1445 bp, Glycine max
tcagctacgtcggcccccccccgtcataatcagagttctcgcctctgcttctcaatctgccaagtgataagagtaatagaaacctctcagcccctctccgatcaaatggccaccgtaatcgacggcaaagccgttgcgcaaaccatccgatctgaaatcgccgacgaggtgcgccagctctctcaaaaatacggcaaggttccgggattagcggtggtgatagtagggaacagaaaagattcacagagctatgttggaatgaagagaaaggcatgcgctgaattgggaatcaaatccttcgatgtggaccttcccgaacaagtctcccaagctgaactaatcaaacaagttcaccagttgaatgctaaccctgacgtacatggtatattggttcagctcccgttgcctaagcacataaatgaagaggaagttctgactgaaatcagccttgagaaggatgtagatggttttcatcctttgaacattggcaagcttgcaatgaaaggcagagaccccctgttccttccctgcactcccaaggcatgtattgaactattacaacgaagtggtgtaagtattaagggaaagaaagccgttgtggttggtagaagcaacatagttggattaccagcttcattgctgcttttgaaagcagatgccacagttactattattcattcacacacaagtcagccagaaagtatcatacgtgaagcagatattgttattgcagcagcaggacagccgatgatgatcaagggcaattggatcaaaccaggagctgcagtcatagatgttggcacaaatgctgttgatgacccaacaaagaagtcgggttacaggcttgttggagatgtagattttgaggaagcatctaaagttgctggttggattactcctgttcctggtggtgtaggtccaatgacagtgacaatgttgctgaagaatactgtggagggagccaagcgctacattgagcaaaataattgatcttcctttaatttgaataaatgaaaggtatgtactattagtttgaaattctttgagaatcgggtttatccacagttttgtttctgctaaggtagatgaatgcatcctataaaatcacaaggatcggtttcaatgggtaagcagaactggtccaatcgaaactatgtatttgccctttcactatctctgaagaagcattctcgatgtgggtactgagcatattttagattggatttagaccataggtagtccttggagataagaaacgcatgttttttgggagtacttttggagtggactgatctgtagccacagtgtaagttctgttcttatgtaagaatcagttctacaacaaagtataaaaatgtggagtaatatgtagaacacatttttaattcttaagtggttttactattagagtaaaaagttattgaaattctcaaaaaaaaaaaaaa

SEQ ID NO: 4625 - DNA, 944 bp, Glycine max
cggctcgagcggctcgagcggctcgagacggctgcgagaagacgacagaaggggacgtgagaggagggtggacggaagcttctgggtcggagggagacggagacgattttacaggaagatctgaaattctgaactggaatcagggttttggttttttttcattatcttcctcagtaagcaatgtcttctcccgcggagttttatcactctcttccgccaataacgaaggcatatggcaccgtttgcctgttggctaccgcaacttaccatcttggattatatcatccagcttacattgcactattctacgataaagtgttctacggttttcaggtttggaggttgttcacaaacttatttttccttggaccattctctatcaattttgggatccgtctcctaatgatagtaaggtatggtgtccaacttgagaaaggaccatttgaccgacggactgctgatttcttgtggatgatgatatttggtgcctttgcactattgtaccacttgtttttatgctcctttatgtttggagtagagaatttccgaatgcccaaatcaacatatatgggcttgttgcacttaaggccttctatcttccatgggcgatgctggctttggacatcatttttggatcgcctcttatacctgacctcttaggtatcattgcaggacatctgtactacttcttgacagtgttgcatccactagcaggtggaaagaacattttgaagactccaatgtgggtgtatccttcttgtttactgttctttaaggtgttaagcatatgctgttgtcattttaagtatttttattttgtactgtcatgtaggtttatttatttacttttttgggaagctgaacccaacataaaccctatccttcctcttcaagctcttccatccaaatacaccactagttgttcctcaaaaaaaaaaaaaaaa

SEQ ID NO: 4626 - DNA, 1261 bp, Glycine max
cggctcgagcggctcgagcggctcgagacggctgcgagaagacgacagaaggggacgtgagaggagggtggacggaagcttctgggtctgagggagacggagacgattttacaaggaagatctgaaattctgaattcttaactggaatcagggttttggttttttttcattatcttcctcagtaagcaatgtcttctcccgcggagttttatcactctcttccgccaataacgaaggcatatggcaccgtttgcctgttggctaccgcaacttaccatcttggattatatcatccagcttacattgcactattctacgataaagtgttctacggttttcaggtttggaggttgttcacaaacttatttttccttggaccattctctatcaattttgggatccgtctcctaatgatagtaaggtatggtgtccaacttgagaaaggaccatttgatcgacggactgctgatttcttgtggatgatgatatttggtgcctttgcactattggttttgtctgctatccccatattttggtccccatttttggcagtaccacttgtttttatgctcctttatgtttggagtagagaatttccaaatgcccaaatcaacatatacgggcttgttgcacttaaggccttctatcttccatgggcgatgctggctttggatgtcatttttggatcgcctcttatacctgacctcttaggtatcattgcaggacatctgtactacttctttacagtgttgcatccactagcaggtggaaagaacattttgaagactccaatgtgggtacataaattaattgcaagatggagaattggagtgcaaccaattagccgtgggccggctgctaataaccctcagcaagagaggggttcgggagttgctttcaggggaagatcctatcgacttggtggatagatgcaattacctgatcagctgtttcatcttcacttattggttatagacatgacaccactgacaaatgaagctggacagttccttgaaaatcgaactttgtttttgagaacagccttatagttttcaatgaattaattgccgaatgttgattctgaattcattactttgtcctctctttctagatatgtacactttttcgtattcggtattaaagctagtccctgtagttttcagttttcacctcaaactcttaatactcctgaatccatgcccctgtgcaagtgctaaaaaatgaagcaaagtttgatcagatagcataatggtgcatattc

SEQ ID NO: 4627 - DNA, 1339 bp, Glycine max
acggaacgacagaagggggggatttgaaattcaaaaggcaggcaggcaagtgtccgttgctcaacgattcgatttgtgatttatttattatatttcccggggcggcccccgcctatataattgaatggaagagcgtcatcggcgaagaaggactcaattgagagagagagatggagaagccaggaggaggaggagtgttatcggcgaaggaggcattcgagaagcttgaaaaggtgggagaagggacatatgggaaggtgtacagagcaagagagaaggccacggggaagatcgtggctctgaagaagactcgtctccacgaggacgaagaaggtgtccctcccaccactctccgtgaggtttccattctgcgaatgctctctcgcgatccccatgtcgttaggttaatggatgtcaaacaaggtcagaacaaggaagggaagacagtgctctacttggtctttgagtacatggacaccgatctcaagaaattcattcgctctttccgtcaaactggacaaaccgttccaccccaaaccatcaaaagcttgatgtaccagctttgcaagggcgttgctttctgccacggtcatgggatcttgcacagggacttgaaacctcacaatctcttgatggacccaaaaaccatgatgcttaaaattgctgatcttggactcgctcgagcatttactgtgccgattaagaaatatacacatgagatactaaccctgtggtatagagctcctgaagtcctcttgggtgctacccattactcaatggcggtggacatttggtccgtaggctgcatatttgccgaacttgtcaccaaacaagcactctttcctggtgattccgaactgcaacaactcctgcatatattcaggctattgggtactcccaacgaagacgtgtggccaggcgtgagtaaactaatgaactggcatgaataccctcaatggaaccctcaaagtctgtcaacggctgttccaagtttggatgagcttggactggatttgctatctcaaatgttgaaatatgagccttccaagaggatttctgcaaagaaagcaatggaacatgcttactttgatgacttggacaagaggcacctttagaacgaataaattggtccaagatttggaagtagaattttatgactaccaatttactctatgcttctctcgagcgtgtatcctaatccgtttaaggagtggttgcccttgggatttatttcatagctgcttctatgttttttagtcattctaatggaaatatcgaggtgttttcgtgtcattctaatgaaaatcctctccgcttttcttaaaaaaaaaaaaaaaaa

SEQ ID NO: 4628 - DNA, 1260 bp, Glycine max
tcagctactaggccccccccgaaattcaaaaaaaaaaaaaaaaaacctgttacagagagatacagagagagagagacggagatggagatggagaaaacgggcgcaggagtagtagtgttatcggcgaaggaggcattcgagaagcttgagaaggtcggagaagggacatacgggaaggtgtacagggcacgagagaaggccactgggaaaatcgttgctctcaagaagactcgtcttcacgaggaccaagacggtgttcctcccaccacacttcgcgaggtttccatcttgcgaatgctctctcgcgatccccatgtcgttagcttaatggatgtgaagcaaggccagaacaaggaagggaagacagtgttgtacttggtgtttgagtacatggacactgatctcaagaaattcatccgctccttcgatcaaccgggacaaaacattccacccgaaactatcaaaagcttgatgtaccagctttgcaaggggattgctttctgccacggtcatggcatcttgcacagggacttgaagcctcacaatctgttgatggaccgaaaaacaatgatgcttaaaattgctgatcttggactcgctcgggcatttactgtgccaattaagaaatatacacacgagatactaaccctgtggtatagagctcctgaagtcctcttgggtgctacccattactcaatggcagtggacatatggtccgttggctgcatatttgccgaacttgtcaccagacgagctctctttcctggtgattccgagctgcaacaactcctgcatatattcaggctattgggtactcctaatgaagaggtgtggccaggggtgagtaaactaaaggactggcatgaatacccccaatggaaccctaaaagtctgtcaacggctgttccaggtttggatgagcttggacttgatttgctatcccaaatgttgaaatatgaaccttccaagaggatttctgcaaagaaagcaatggaacatgcttacttcaatgacctggacaaggggcatctttagaaacacaaattattgatctatgcttctcttgtgcgtgtatcgttttaagacgatagacttttgctgtttaacttttcatatttgtggaatcatggagtgattgattgcccttgggatttatggtcacttctgtcttttctagtcattctaatgagtaatgaaaatatcaaggtgttttcatgctattaatgaaatccattccttttttcttgtgaaaaaaaaaaa

SEQ ID NO: 4629 - DNA, 1332 bp, Glycine max
gggggtggtaagtagggggagcgggatttgaaattcaggatttcggcgcggccgttggagatggagatggagaagacgggcgcaggagtagcagtgttgtcggcgaaggaggcattcgagaagcttgagaaggtcggagaagggacatacgggaaggtgtacagggcacgagagaaggccaccggaaagatcgttgctctcaagaagactcgcctccacgaggaccaagaaggcgtccctcccaccactctccgcgaggtttccatcttgcgaatgctctctcgcgatccccatgtcgttaggttaatggatgtgaagcaaggccagaacaaggaagggaagacagtgctctacttggtgtttgagtacatggacaccgatctcaagaaattcattcgctctttccgccaaaccggacaaagcattccaccccaaactatcaaaagcttgatgtatcagctttgcaaggggattgctttctgccacggtcatgggatcttgcacagggacttgaagcctcacaatctgttgatggaccggaaaacaatgatgcttaaaattgctgatcttggactcgctcgggcatttactgtgccaattaagaaatatacacatgagatactaaccctgtggtatagagctcctgaagtcctcttgggtgctacccattactcaatggcagtggacatatggtccgttggctgcatatttgccgaacttgtcaccagacgagctctctttcctggtgattccgagcttcaacaactcctgcatatattcaggctattgggtactcctaatgaagaggtgtggccaggggtgagtaaactaaaggactggcatgaatacccccaatggaactctcaaagtctgtcaacggctgttccaggtttggaggagcttggactcgatttgctatctcaaatgttggagtatgaaccttccaagaggatttctgcaaagaaagcaatggaacatgcttacttcgatgacctggacaagaggaatctttagaaagacacagattgattcaagatttggttgtagaaatttatgactaccaatttatttttatgcttctctcgagcgtgtatcgttttaggatgatggacttttgctgtttaacttttcatatttgaggactgacggagtgattgattgcgcttgggatttatttgcagaaactacatttgaaattaggattagtaaaaaaaatgttctgtttagttttcaatataaagcaatagagatagttgcatctacagctacatgtggatcttgcatgacttcctataaatgaagggataactttcacaaaaaaaaaaaaaaaaa

SEQ ID NO: 4630 - DNA, 797 bp, Glycine max
tttttttttttttttttttttttttttttaactacacaaaattgaagttcctttccctggtaataaatagttcaacactacggggaaaaaaaatagtaatgaaaaacatacattgttttccctgtatcagtgattggtaaataaaaatacaactgacagttctgaagattaatcacgaagccaagtcttgacattcttcgtcatagcaatgccgaatgccttaatgttttgtttggtccactactaatccttgactgaggtacgtagtatcttaacgtcatggatgggcctgtcgttgttatctgtttggacgctgccaagtcttttgataatttccatccccctacacactcttccaaatattgtgtgttttccatcgagagaggggcatggtgccagagtaataaagaactgactaccattggtatttgggccagcatttgccatggataagattccagctccagtgtgcttcaactctcgttttatctcatcttcaaactttgcaccatatatggattctcctccccttcctgttccagtgggatccccaccttgtactatgaagtccttgatgatcctgtggaatttaacgttgtcgtagtaacctcggcgagacagttcaatgaagttcctacaagtcctcggcgcatgcttgtagtacagctcaacggtgaaagaacccatggaagtttccagagtaacctccggagcaccaccttctgcgcttgcccacattttgattttgctctcacacacaccaaacacccccttctgtcgtcttctcgcagccgtaa

SEQ ID NO: 4631 - DNA, 1331 bp, Glycine max
tcagctacgtaggcccccccccccatcgtcatccgacaagaagaaagagacgccccctcccccgtacggctgcgcccccacaacactacactacctccaacacatcatctccttccttcaccttcttcccatacacccaaaggaaaaatcttccatctccactttcttttcaatggccactctctttaacttcaactccacccttcgcccctcttgttatcatccctcctcaccctcctcatcttatccccacttctccaagacactctccacaactttcttgggccacaccgtaaccctcaaatatgctgccacttccgcaagcatccctccccgttcactctccgctcacatgtcatgggacggtcctctctcttccgtcaaattgatcattcagggtaaaaatctcgagctcactgatgcagtgaagcagcatgtggaagacaaagtggggaaagcggttcagaagcacagtcacctagtgagagaggttgatgtgaggctttctattcgaggaggaggtgaatttgggcgaggacccagaactcgtaggtgtgaggtgactttgttcacgaaaaggcatggtgtggtgcgggctgaggaggatgctgaaagcacctatggaagtatagatttggtgtcatcgatcattcagaggaagttgaggaaaataaaggagaaggtgtcagatcatggtcgccacatgaaggggttcaataggctgaaggttagggagcccgtggagcaattacctgtcgaagaggatgaaatattatccccacaggaggaggaagaatcaattgacgaggttgttcgcacaaagtactttgacatgccaccattgactgtggctgaagcaattgagcagcttgaaaatgttgatcatgacttctatggttttcgaaatgaagaaactggggaaattaatattgtgtacaaaagaaaagaaggaggatatggactcattgtaccaaagggagatggcgaagcagagaaattggagcctgtagtgcttgaaccagctatagaatcctccctgaaagaatgataggctcccacaataaactctttttgtaagaacataagagcttgtacatgattagcggatactaatggcggtttcttggagccagaagtgcatacacaatttcaatggcgtctctgacattttaaagtgcaaaccaagttttaaagtatgatgtacgcttggatgactagtcactataaatgaaagagatgcaccatttcccaaaagaaaaaaaaaaaaaaaaaatccagaatacgccttttctctaactattccacacactatttttcatcaaaaaaaaaaa

SEQ ID NO: 4632 - DNA, 1733 bp, Glycine max
cctgggcaggtacccgggcccctccggaggcccccccgcggcccgtcgttcaggcgaaacaatggcgacggtggagctctggtggatgacgtgctttctctaacaactgctcttagaaaagagagagagaatggcggtggagtacacatgctgctcaacggcgttcttcgttcacatagtggtaatcgtgctgctggtgctgttcgcgggcctcatgtcgggcctcaccttgggcctcatgtcgctcagcctcgttgatcttgaggttctcgctaagtccggcactcctcaggatcgtaaacacgctgagaagatattaccagttgtcaaaaaccaacatttattgctatgtactcttctaatttgcaatgctgcggccatggagacacttcctatttttcttgatggtcttgttactgcttggggcgctatcctgatttcagtgacattaattcttttgtttggtgagattataccccaatcagtttgttctcggtatggtttggctattggtgcatcagtggctccctttgtccgtgtgcttgtatgcatatgtttcccagttgcctttccaattagtaagttgttggattttttgctgggccatcgacatgaagccctattccgtagagctgagttgaaaacactcgtaaatttgcatggtaatgaggctggaaaagggggggaactgacacatgatgaaacaacgatcattgctggggcacttgaactcagtgagaagacagcgagtgatgccatgactcctatatctgaaacatttaccgttgatattaattcaaagcttgatagggaactgatgaatgaaatattggagaaagggcacagcagagtcccagtctattatgagcagcctacaaacattattggccttgtactggtcaagaatttattgacagttcacccagaagatgaagcacccgtgaagagtgtaaccatacgcaggattccaagggttccagaaagtatgccactttatgacattttgaatgagtttcagaagggccatagtcacatggctgttgttgtcagacggtgtgacaagactaaccaacaatcttcccaaaataatgcaaatgactcggtgagagatgttaaggtggatattgatggtgaaaagcctcccaaagagaaagctttgaaacccaagatgccactccacaagtggaaaagctttccaaatacaaacaagtcatcaaataggggttctcggagcagaaaatggtcaaaaaatatgtactcggatattttagagatagatggaagtccacttccaaagctccctgaagaagaagaagctgttggaattattaccatggaagatgtcattgaagagcttttgcaggaggagatctttgatgagacggatcatcattttgaagactcataacagtgctttttccataaaaccttccatgttcatatttcttgtttggaccttatagataattaaatagataatgcggtttagggttgaaagctgctgtatagagatctgagttgtgatttggaacgtgtaagccattatcgttgatgtaatgcagagaccagacagctgttatataaaccaaaccttttgagatgtacatgggcgtgttgtctttatcacaatgacgcatgcaatcaaggcagcaaatcatggtttgttttagtgcgtgcgcgcgttaccctttcttttgattaaatgatagctacttgtactgtgtgtagtgcat

SEQ ID NO: 4633 - DNA, 1831 bp, Glycine max
ggctcgagaatccatccattattctctgtgtgtctttctctacttctttccctttccccaacccctcatacgttactctttaaatacgcaccacatcttcacgtgcctctcggttcttcagtccaaacaatggccatggttgagctctggtggattacgtgctttctctaactactgttttccacacttaacgaaccagaacacagtgagaaagacataatggcggtggagtacacatgctgctcaacggccttcttcgttcacatactggtcatcgtgctgctcgtgcttttcgcgggcctcatgtcgggcctcaccttgggcctcatgtcgctcagcctcgttgatcttgaagttcttgctaagtctggtactcctcaggatcgtaaacacgctgagaagatattaccagttgtcaaaaaccaacatttattgctatgtactctgctaatttgcaatgctgcagccatggagacacttcctatttttcttgatggccttgttactgcatggggcgctatcctaatttctgtgacattaattcttttgtttggtgagattataccccaatcagtttgttctcggtatggtttggctattggtgcatcagtggctccctttgtccgtgtgcttgtatgcatatgttttccagttgcctatccaattagtaaggctggaaaagggggggaactgacacatgatgaaacaacgatcattgcccgggcacttgaactcagtgagaagacggcgagtgatgccatgactcctatatctgaaacatttactgttgatattaattcaaagcttgatagggaactgatgaatgagatattggagaaagggcacagcagagtcccagtctattatgagcagcctacaaacattattggacttgtactggtcaagaatttattgacagttcatccagaagatgaagcacccatgaagagtgtaaccatacgcaggattccaagggttccagaaagtatgccactttatgacattttgaatgagtttcagaagggccatagccacatggcagttgttgtcagacggtgtgacaagactaaccaacaatcttcccaaaataatgcaaatgactcggtgagagatgttaaggtggatattgatggtgaaaagcctcccaaagagaaagctttgaaacccaagatgccactccacaagtggaaaagctttccaaatacaaacaagtcatcaaataggggttctcggagcagaaaatggtcaaaaaatatgtactcggatattttggagatagatggaagtccccttccaaagctccctgaagaagaagaagccgttggaattattaccatggaagatgtcattgaagagcttttacaggaggagatctttgatgagacagatcatcattttgaagactcataacagtggcttttttccataaaaccttccatgttcatatttcttgtttggaccttaaaaataattaaatagataatgcggtttagggttgaaagctgctgtatagagatctgagttgtgatttggaacgtgtaagccattatcgttgatgaaatgcagggaccagacagctgtttttgagatgtacatgcgtgtctctatcgcaatgacgcataccagcaaggcagcaaatcatggtttgttttttagtgcgcgcgcgttttcctttcttttgattaattgatacctacttgtattgtatgaagtgcatatgtattacgtaacagtattggcatttagtaagcacatgattagagaaaatgcatcacaatacgcaattgaatttaaaaataatcattattattctgttaaaaatagtttccgt

SEQ ID NO: 4634 - DNA, 950 bp, Glycine max
agaaaagctaaagactgagaaaagtaaagggccaagagtgaggaagaggaagatgggttggtcttcagcaacagcatgtgcgtcgctctcctctccgctgcctcgacttccaccgtctcgcactcgcactcgcacgtccattcccagttcgttttcattttcatggctttcttcatttcccactttaactttaagtgcttctcgctcttcctcctccggcataaaccctcccaatccctcacgctcccatgattctttcattcgagctgcctggacccgaagatctcgaggtgaagctgcaaagaaacctaacaggaaatcgtggaagcagaggacagacatgtacatgagaccgttcttattaaatgttttcttctccaaaagatttattcatgcaaaagtggtacaccgaggaacaagcaaagtgatatgtgttgctaccacaaacgccaaggatcttcgaaactcccttccatccttgatagatcataacgcttgtagagttgttggaaaccttattgctcaacgatcaatggaagctgatgtatatgcagtagcctatgaacctagaaaggatgaaaggattgaaggcagactagggatcgttcttgatactattaaggaaaacgggattatttttgcttgagctcatttcctatcaaattagcctgttttaatgtagccagtctccttgcatgggttgttacgaattctatttgattgtttatgcttcatttgtgcattaatttgctagttgatgaattaaattgttctagtttttatgtgttcgtgttgagttattttggtaggtacaggcccaatttgattgttgatttatagtgtgtttgaattagctgagtcaatttcttttttattcatggtgaaggtaaaatgccaaacaaacacattaccatgattctgtgggatagaattggtttttggtgttattc

SEQ ID NO: 4635 - DNA, 858 bp, Glycine max
aaaagggctaagagtaaggaagaggaagatgggttggtcttccgcaacagcatgtgcgtcgctctcctcttcgactccgctgcctcgacttccaccgtctcgcactggcactcccattcctggttcgctttcattttcatggctttcttcatttcccactttaactttaagtgcttctcgttctcgctcctccggaataaaccctcccaatccctcacgttccgatgattccttcattcgagctgcctggacccgaagatctcgaggtgaagctgcaaagaaacctaacaggaaatcgtggaagcagaggacagacatgtacatgagaccattcttattaaatgttttcttctccaaaagatttattcatgcaaaagtggtacaccgaggaaccagcaaagtgatatgtgttgctaccacaaacgccaaggatcttcgaaactcccttccatccttgatagatcataacgcttgtagagttgttggaaaccttattgctcaacgatcaatggaagctgatgtatatgcagtagcctatgaacctagaaaggatgaaaggattgaaggcagactagggatcgttcttgatactattaaggaaaacgggattatttttgtttgagctcatttcctatcaaattagccgttttaatgtatgtttcgaatctatttgattgtttatggttcatttgtgcattagtttgctttatggtgtgtttggattagctttatggccagccaatttatttttcttatattcatggtgaaggtaaaacgacaaacaaacaatcgtttctactttttttttttatgacttatgattttgtgggggccgaattgattttgtgttattcaaac

SEQ ID NO: 4636 - DNA, 1173 bp, Glycine max
tggagctccaccgcggtggcggccgctctagaactagtggacctcgcttcccctctcttcttccataaccatgggtatctccaccatcgcttctccttttgactccatcatcttcgatttggacgacaccttgtacccctccagcaccggaattgacaagtgcgtcaagaaaaacatccaactctttctcatccagaaatgcggattctcagaatccaaagccttgacccaacgagttgagctcttcaaaacctacggaagcacccttgccggcttaagagcacaaggcctcgatatcactgcagaggactaccacggtttcgtgcacggaaggctaccttacgactccatcgacactgatcatcagttacggaacctcctcttgagcatcaaacaaagaaaaattgtttttactaattctgacaggattcacgcgatgagggcgctggataggcttggggtcaaggactgtttcgagcaaatcatatgcttcgagactataaacccgaaccttccctattcaacccgacccgacgaattccccatcctccttaaaccttcgctcgacgccttcaagatcgcgcttgacgctgccaacgtggatcctcgtcgtacgttgtttctggatgacagcgttcgcaatattgccgcgggaaaagaaatgggtctccacactgttctggttgggaagacaatgaaaagcaaaggagctgactatgctgtggagagtgtgcataacttggcacaagtgatcccagagatatgggcaaacgaaatggacggtggtgatccaacgatgacacgttcgaagagtgaattggaggccgtactcgcttgtgctctggttggagcttgaaaattgacgttgtacaaaaatgtacattcccaaccaacccaactatctatgcaattaaaaataatagtacagtagtataaatagtatcagaccaccaatagcgaagacaataacagtaagtaacgtggaccccctaagcaattatttgcgacatgtgaatattgtaagatattaagtattatcaatcgtctttcaaataaaatcaatgtgtctctcagggatatcaattgcttaataataaagttgagttattgtcattattttcatcctccggtttctgtggtttgggcggacgatctagaggaaaaaaaaaaaaa

SEQ ID NO: 4637 - DNA, 1242 bp, Glycine max
ttcagctacgtaggccccccccccccccccagctcgcttcctctttctaacttgccataccatcttcatcttacttttactttgttttcacaacatagccatggccatctccagcaacgcttctccttttgattccatcatcttcgatttggacgacaccttgtacccgtcaagcaccggtattgacaagtgcgtcaagaaaaacatccaactctttctcatccagaaatgcggattctcagaatccgaagccttcaccctccgagttgatctcttcaaaacctacggaagcacccttgccggtttaagagcactaggccatgatatcaccgcagaggagtaccatggtttcgtgcacggaaggctaccttacgactccatcaaccctgatcatcacttacggaaccttctctgcaccatcaaacagagaaaaattgtttttactaattcggacaggattcacgcgatgaggtcgttggatagacttgggatcaaggactgtttcgagcaaatcatatgtttcgagactataaacccgaaccttccatattccacccgacccgatgaattcctcatcctccttaaaccgtctctcgacgccttcaagatcgcccttgacgctgccaacgtggatcctcgtcgtacgttatttctggatgacagcgttcgcaatattgccgcgggaaaagaaatgggtctccacactgttctggttgggaagacagagaaaagcaaaggagcagactatgcagtggagtgtgtgaatgacttggcacaagtgatcccagagatatgggcaaacgaaatggacggtgaggatcaaacgatgacacgtaccaagagtgaattggaggccgtactcgcgtgtgctgtggttggagcttgaaaagtgtttggatgtggaggaggataaggcctgacgttgtacaatgtacattcccaaaccaacccaactatctaagcaattaaaataatagcagcaagtactatcagaacaccaacaaccaagacaataacaataagtaacatgggcccctaagcaattatttgcgacatcatgttaatcatgtcaatattgtaagatatttagtagtattatttgtacgtattatcaatcgtcttacaaataaaatcaaattgtctctcagagatatcaattgcttaacaattaataaagttgagttactgtcattattttaataaaaaaaaaaaaaaaaaaaaaaaaaaaaaaaaaaaaaaaaa

SEQ ID NO: 4638 - DNA, 1276 bp, Glycine max
  misc_feature (117)..(117): n is a, c, g, or t
gcaggcacaaggcctcgatatcactgcagaggactaccacggtcttcgtgcacaggaaggcgtaccttacgacgtccagtcgacacgtgatctatcagttacgtgaaccctcctctntgagcatcaaacacaagaaaaattgtgttttacataattctgacacggatatcacgcgatgatgggcgactggatagcgcttggggatcacggactgtttctgagcaaatcatatgcttcgagactataaacccgaaccttccctattcaacccgacccgacgaattccccatcctccttaaaccttcgctcgacgccttcaagatcgcgcttgacgctgccaacgtggatcctcgtcgtacggtaagacgacgaagtcagcaacctcaaccaaaatcgtgattgatttcaataactgaacttgatccaagttaaattagacccaaatgtctcggataaaattttggattctaattttataataaaataatggtgattaagggaaaactctattaaaattagtcaaccaaattttcctacaaaaattatcataaaattaatcgtgcacaaaatcaatcctatgagtatggttataaaaaatagtcaacaaacgaaacgggtcgtcacttccttgtttcggcgatgttgttttttgacagtgaaacccaaattagattattatttaaggaaatgttagaaaggatcgtttttaattttttataagaaatcattgtgatggataatgattttctagattttatgctatatattgcagttgtttctggatgacagcgttcgcaatattgccgcgggaaaagaaatgggtctccacactgttctggttgggaagacaatgaaaagcaaaggagctgactatgctgtggagagtgtgcataacttggcacaagtgatcccagagatatgggcaaacgaaatggacggtggtgatccaacgatgacacgttcgaagagtgaattggaggccgtactcgcttgtgctctggttggagcttgaaaattgacgttgtacaaaaatgtacattcccaaccaacccaactatctatgcaattaaaaataatagtacagtagtataaatagtatcagaccaccaatagcgaagacaataacagtaagtaacgtggaccccctaagcaattatttgcgacatgtgaatattgtaagatattaagtattatcaatcgtctttcaaataaaatcaatgtgtctctcagggatatcaattgcttaataataaagttgagttattgtcattaaaaa

SEQ ID NO: 4639 - DNA, 1762 bp, Glycine max
cggaattcccgggtcgaccaacccgtcctaccggttgcaaaggacaccagagggggaggccattgttaatatagttatggagttgtccaaaggaggggaattgctagataggattctttccaggggtggaaagtcctcagaagaggatgccagagtagttatgatccacatattgagtgtggtagctttttgtcatctgcagggtgttgttcaccgtgatctcaagccagagaattttcttttcacttctaaggatgacaagtccacgcggctcgccattgattttgggttgtctgactatgtaaagccagatgagaggttgaatgatattgtgggaagtgcttattatgtagctccagaagttttgcatagatcttatgggacagaggcagatatgtggagcattggtgtaattgcttatattcttttatgcggaagccgtcccttttgggcccggacagaatctggtatatttcgggctgtacggatggcagatccgagttttgatgaggctccttggccttctttatcggttgatgccaaagattttgtaaagaggttgttgaataaggattatcgtaaaagattgactgcggctcaggcactaagtcatccatggctggtgaatcatcatatgatatgaggatacctttggatatgataatccacaagcttgttaaagcttacatttgctcgtcttccttacgcaaatctgctttacgggctcttgcaaagacattaacagtagctcagctaacatatctcagagatcaatatactctgttagggccaaacaaaagtggattaatttctatgcagaactttaagacggctgttttgaggagctccacagatgcctcaaaggattcacgggtcttagaatatgtcagtatggttagttctatccaatataggaaattagattttgaggagttttgtgctgctgctataagtgtgcaccaacttgagggaatggagacctgggagcaacatgcaaggcgtgcctatgagctttttgaaaaggaaggaaatagaccaattatgattgaggagcttgcctcggaacttgggcttagtccatcagtacctgttcatgtagtacttcaagactggataagacactcagacgggaagcttagtttcttggggtttgttaggcttctgcatggggtttctgcccgtgcatttcagaaggcctgagagaatgcacacagttgctattgttttttcttgcccatgttacctttaattattttgatggtctgctgatgctaactccatcagcagacctcagtgatggcttctgcaagttgaaagcagtggctgataggaatttgtttctgaagctttatgcaacatatatcaatccctcttttccaagattttcaaacacaacctattcccctccttgtttctcactcactttaggttggtggttctggagttagatgcttgtacagttgaaagctagaccaaaaattgtacttaggaccatcagaacctctgaaaaatgttgagttgtcttaagggcttaccccttgtgtacccatggcacctatcaataaaccttatcacgtgaactccttgatagtagacaaatatttagctttttttttttttgtatttatatgttattattattcaaggcaacaaggaatggtacttttatatacaatagcattatggagttttgaatctataacttgcaaactatgcaaatgcaaaacctttttcctcaaaaaaaaaaaaaaaaaaggggggg

SEQ ID NO: 4640 - DNA, 1013 bp, Glycine max
gaatgaaagctggaaaccgagtcagctacgtaggccccccccccaaatgtctagttatggagtagtcatgaattcttttgaagagttggagccagcatatgcaacgggctacaagaagatcagaggcgataaattgtggtgtataggccctgtgtctcttattaacaaggatcatttagataaggctcaaagaggtacggcctcaatagatgtgtcgcaacacataaaatggcttgattgtcagaagccaggaactgtaatctatgcatgtcttggaagcctatgcaatttaacaacaccccagttgaaagagcttggtttagccttggaagcatcaaaaagacccttcatttgggttatcagggaaggaggtcattccgaagaattagaaaagtggattaaggaatatggatttgaggaaaggaccaatgctagaagccttctcattcggggatgggcgcctcaaatattaatattatctcaccctgctattggagggtttataacacactgtggttggaactctaccttagaagcaatatgtgccggggtgccaatgcttacgtggccactatttgcggatcagtttttgaatgaaagcctagtggtgcatgtactaaaagttggagtgaaggttggggtggaaattccgcttacatggggtaaggaagtggaaattggtgtgcaagtgaagaagaaagatgttgaaagggcaatagcaaagttgatggatgagacaagcgaaagtgaaaaaagaagaaaaagggtgagagagcttgctgagatggctaacagagccgtagagaaagggggatcctcttattctaatgtgaccttgcttatccaggatatcatgcagaaaaacaagagagatgtgtgataagtccaaattttgtaatttttcacttaatcatctgtcttttaaatgctgtccagtgttttttgttttaaaaataaaaatcaaacaatgaaataataagtaaactcaattattcaaaaaaaaaaaaaaaaaa

SEQ ID NO: 4641 - DNA, 2864 bp, Glycine max
ccacgcgtccgaagagagaaagagggtcccactggaagagtccgaagcggaggggagaggaagaaggaacatgtcaggcgttagagatgatgggcgttgttgttggtgttggtgtgcccaccctcactctctaatctctaagactctctactcttctcttagtgctctaatctaattattattatcaacataagtcacaacaccaccattcttccattctctctctttcttctacactattcattcaatccatgccggtcaacgtgaggtgctgaaggtcaatcgtggtctttcgaaatggggaacgggagcagaagctactcggcgaaccggagcgactacaagcttctagaagaagtcggttacggcgccagcgccaccgtctaccgtgcaatctacctcccctacaacgaggaggtcgccgtcaagtgcctggatctggatcgctgcaatataaatctggacgacatacgtagggaggcgcagacgatgagcctgatagagcaccccaacgtggtgagggcctactgctccttcgtggtggagcggagcctgtgggtggtgatggcattcatggcgcagggctcctgcctgcacctcatgaaggctgcttatcccgagggattcgaagaggccgccatcggatctatcctcaaggagactctcaaggcgttggagtatctccaccgacacggccacattcaccgtgacgttaaggccgggaatattctcctcgacgataacggccaggtcaagctcgccgacttcggcgtctccgcttgcatgttcgacaccggcgaccgccagcgctccagaaacaccttcgtcggaactccctgctggatagcgccggaggtgctgcaacctggaaccggttacaatttcaaggcggatatttggtcgtttgggattactgcgttggagttggctcatggtcacgcgcctttctccaagtatcctcccatgaaggttcttttgatgaccattcagaatgctcctccggggcttgattatgatcgtgatagaaagttctccaagtcttttaaggaaatggttgctatgtgcctggtaaaagatcaaacaaagaggccatctgtggagaagttactcaaacactccttcttcaaacaagctaagccaccggagctttctgtaaagaaattatttgctgatttaccgcctttgtggaaccgtgtaaaatccctccagcataaagatgcagccgagctagcactaaagaaaatgccttctgcagaacaagaagctatatctcaaagtgaatatcaccgaggagttagtgcatggaacttcgatattgatgatttgaaagcacaagcggcattgatgcaggacggtgatgatattgcagagatgagggaagaagatgaaaacaaattcttcagctcttacaagggcacagctgattcccagtttattgtggacgaaaagaattcaaataacttgcaacaagatgagttcacatcacaagtaggtagtaacgacataccacagtgtgagaaaagaaatggatcagttgctgaagcaacaccatctactttagagaatgatgtgggaacaagcaaagttaaaactcaatcagtgaaacttggtaaaacccaaagtggacccctgatgccaggcttagtgcttggtcattcttcatctgaaagagggcgtacatttgaaaggtttgagaatgaaaaccagttagcgggtgagaaaagtaatcgtgatatacgacgagctccaagctttagtggtccattaatgcttccaaaccgagcttcagcaaatagtttatcagctccaatcaaatcttctggaggattcagagattccttggatgataagtctaaggctaatctagtgcaaattaaaggacgattttcagtgacatcagaaaatttagatctggtgaaggatattcctgtaagttcagtttcgcgccgatcttcacagggatcaccaatgaggaaatctgcgagtgttggtgattggatggtggattacaaacaaatgccaattggtcagtcctccaatgattctgccaatatcaatattcctgcatcacttttagtgcctcatcttcacaatctttttcagcagacatctattcaacaggatcttataatgaatctgttgaatagcttgcaaactgccgaggcaattgatacttctcagaacgggaagttaccaccattacctcgcaattcagagaacaacggaagtgccgatacagcagtttcagagagggaacagctgctgctgggcaaaatttcagaactccaatcccggatgattaatttgaccgacgaactgacttatgagaagttaagatatgtgcagttgcaacaacagctaactggtctctacagccaggaacaaaatggggaaagagaggaatttgcatgaaagcagataattatgaacctccaggcgagtgatcaatcatacgttgggctccaattctttctctttgctgaggagaactactttttggatgtttatagtcagtccttgataagtgtcatatatatatatagatatatatattctctgatccagccttgtgttcaataaacttttgtgacgatctataatacccagctagtgcaaatgagcaagatgatgatctgtcatagttaatctcattatttatttcatttaaagattcagatgtaaataagcttctctgttgtatcatactgcaacgtgctatgtttgcagatcaatccgaaattctcgtgataactgataagaaagttgtgagtactaccccgggggagaaataacatccctacacattgaactggttttgttattattactataaaaaaaaaaaaaaaaccctcgtgccaaattcc

SEQ ID NO: 4642 - DNA, 1465 bp, Glycine max
tcagctacgtaggccccccccccccctttattgtggacaaaaagaattcaaataacttgcaacaagatgagttcacatcacaagtcggctgcgttggccccccccccagtgagaaaagaaatggatcagttgctgaagcaacaccatctactttagagaatgatgtgggaacaagcaaagttaaaactcaatcagtgaaacttggtaaaacccaaagtggacccctgatgccaggcttagtgcttggccattcttcatctgaaagagggcgtacatttgaaaggtttgagaatgaaaatcagttattgggtgagaaaagtaatcgtgatatacgacgagctccaagctttagtggtccattaatgcttccaaaccgagcttcagcaaatagtttatcagccccaatcaaatcttctggaggattcagagattccttggatgataagtctaaggctaatctagtgcaaattaaaggacgattttcagtgacatcagaaaatttagatctggtgaaggatattcctgtaagttcagtttcacgccgatcttcacagggatcaccaatgaggaaatctgcgagtgttggtgattggatggtggatttcaaacaaatgcgtcttccaatgattctgccaatatcaatattcctgcatcacttctagtgcctcatcttcacaatctttttcagcagacatctattcaacaggatcttataatgaatctgttgaatagcttgcaaactgccgaggcaattgatacttctcagaatggaaagttaccaccattacctcgcaattcagagaacaatggaagtgttgatacagcagtttcagagagggaacaactactgctgggcagaatttcagaactccaatcccggatgattaatttgaccgaggaactgacttatgagaagttaagatacgtgcagttgcaacaacagcttgctctctacagccaggaacaaaatggggaaagagaggaatttgcatgaaagcagataattatgaacctccaggcgagtgatcaatcatacgttgaactccaattctttctcttttctgaggagaactactttttggatgtttatagtcagtccttgataagtgtcatatatatatgttatctgatccagccatgtgttcaataagcttttgtgacgatctatatataaagcccagctagtgcaaatgagcaaaatgatgatcggtcatagttaatctcattatttatttcatttaaagattcagatgtaaataagcttctctgttgtatcatactgcaatgccctatgtttgcagatcaatccgaaattctcgtgataactgataagaaagttgtggggactaccccgggggagaaataacatccctacacattgaattggttttattattattactatatcggatttgaacttgtataggccctttgtattctacatggtaaaatgagtcaacatggt

SEQ ID NO: 4643 - DNA, 1901 bp, Glycine max
attcggctcgagacttacttgaagttgtgctattcaatcccaaagccacagaaataatattattcagattttagagactgaaaacatcatggccaacctcgacctcgacccattccagacaagcatcttaatcctcgtcccaatagcactcctggtggcgttactatctcgtactcgtcgaagagcaccctacccaccaggcccaaagggtttaccaatcataggaaacatgttaatgatggagcagctaacccaccgcggcctcgccaacctggccaaacactacggcggcatcttccacctccgcatggggttcctccacatggtcgccatctccgaccccgtcgccgcgcgtcaggttctccaagtccaagacaacatcttctccaaccgcccagccaccatcgccatcagctaccttacctacgaccgcgccgacatggcttttgcccactacggccccttctggcgccagatgcggaaactctgcgtcatgaagctcttcagccgcaagcgcgccgagtcctggcagtcagtccgcgatgaggtcgacgccgccgttcgcgccgtcgctagcagcgtcggaaagcccgtcaacattggagaattagtgtttaacctcaccaagaacatcatctaccgcgccgcgttcgggtcgagttcccaagaaggccaggacgagttcattaaaatactgcaggagttctccaagctctttggcgcgtttaatattgcggattttataccctatctcgggtgcgtggatccacaaggtttgaactcgagactcgctagggcacgtggcgcgctcgatagcttcattgataagatcatcgacgagcacgtgcataagatgaagaatgataagagcagtgaaattgttgatggagaaacggacatggtggatgagttgctggcgttctacagcgaggaggcgaagttgaacaatgaatcggacgatttgcagaactctatcagactcactaaggataacatcaaggctatcattatggacgtgatgttcggaggcacggaaacggtagcgtcagcgatcgagtgggccatggcggagctcatgagaagcccagaagatcaaaagcgggtccaacaagagctggcggatgtagtgggcctggaccgtcgggccgaagagtccgatttcgagaaactcacttatctcaaatgtgccctcaaagagaccctccgcctccaccctccgatcccgctcctcctccacgagacggcggaggacgcgacggtcggcggttacctcgtccccaagaaggcgcgtgtcatgatcaacgcgtgggccattgggagggacaagaacagctgggaggaacccgagagcttcaagcccgcccggtttcttaaaccgggcgtgcccgatttcaaagggagcaacttcgagttcattccattcgggtcgggtcgcaggtcctgccccgggatggtgttggggctctacgcgctcgagttgacggtggcgcacctccttcactgcttcacgtgggaattgccagatgggatgaagccaagtgagatggacatgggtgacgtgttcggactcaccgctccaagatccacgcgactcattgctgtgccaaccaagcgcgtggtgtgccctctcttttaaaaaaacaacaatttgaatcttttttcttccttttttttgtattttctttttatccctcaattatacataatcatattaaaataatataaagggaaaaaaggcagctacacaataagaatgtgagagtatttggaagaaaaaaaaattgtaaacaatcaattatatgtattttgttatttttgccccatttccgttttgattcttatatacgagtagagtaatgatggagtcattctttttaaaaaaaaaaaaaaaaaaaaaaaaa

SEQ ID NO: 4644 - DNA, 2013 bp, Glycine max
ctttgttgtcagcgacagtgctttgaaatttactcatgtcctctacaatctctccccagctgaactttatgaacaggcgattaagtatgagaaaggatcgttcatcagttccaccggagcattggcaacactttctggggccaagacgggtcgctctccaagggacaagcgcgtcgtcaaggatgatcttactaagaacgacctttggtggggaaagggttctcctaacatcgagatggacgagcacagtttcatggtgaacagagaaagagctgttgattacttgaactccttggacaaggtcttcgtcaatgaccaattcttgaattgggacacagagaacagaatcaaagtccggattgtatctgccagagcttaccattcattgttcatgcacaacatgtgtatccgccccactcctgaagagctggagaattttggtactccggacttcactatatacaatgctggacagttcccgtgtaatcgttatactcactacatgacatcctccactagcatagatcttaatcttgctaggagggaaatggtcatcctcggcacacaatacgccggggaaatgaagaagggtcttttcagtgtcatgcattatctcatgcctaagcgccaaatcctctccctacactccggatgcaatatgggcaaagatggggatgtggcactcttctttggactctcaggtactgggaagaccactctttccaccgatcacaataggtatttaatcggagatgatgaacactgttggggtgacaatggtgtctccaacattgaaggtggttgctatgccaaatgcattgacctctcacgggagaaagagccagatatttggaatgcaatcaggtttggcacagtgttggaaaatgtggtgtttgatgagcatgatcgagaagttgattactctgacaagtcagttacagaaaatactcgtgcagcttatcctatagagtacattccaaatgcaaagttaccttgtgttggccctcacccaaagaatgtcatacttttggcatgtgacgcatttggtgtactcccacccgttagcaagctaaacctggcacagaccatgtaccatttcatcagtggatatactgctttggtggctggcacagaagaaggtattaaggagcctcaggcaactttttcagcttgttttggtgcagcattcattatgctacaccctacaaagtatgcagcaatgcttgctgaaaagatgcagaagcatggtgctactggatggcttgttaacactggttggtctgctggaagctatggtaatggaagccgtattaaactacaatacacaaggaaaatcattgatgctattcactccggaagtctcctgaatgcagagtacaagaagactgaaatttttgggcttgagattcccaccgaagtggagggtgtcccttcagaaattctggatcctatgaacacttggtcaaacaaaaaggcctacaaggagacactattgaagttggctggattgttcaagaacaattttgaaaccttcaccaactacaagattggcaagggaaacaacaacctgacagaagagattctcgcagctggtccaatcttttgagacaatgttatgcaacatgttgtgtggttgggaatgttagggtggtagataaaatctttccttagaataaaatattgtaccattggtttggttgggctcaaaatgtcatttctagtcttcctccaaaaatgaagtttattttctagtctttacatttttcttcactttggcacctccttaagggtttttaacattttatagcatttgttgcaagccatacaattattcccttctgcatcacatcaccattcgttgtctgccgttgccactagaattataatgcataccgttaccgggccttgtcaacttcgaacgattctgatgtgattgttatcaatgattcaactatggaatcttagtatctaattgccgattaacaagagaagagggggtgaacattggctttc

SEQ ID NO: 4645 - DNA, 2097 bp, Glycine max
tcgatcagctacgtaggccccccccccatcaccaactcgtttcgtcttcacacttgcaacgcaacaacgtaacgttgctaattgcttgcacttcccatggtcgcttcttttgtttcacattagctgtttttgtttttgtcttagttttacacctttcctcatttccgcagtagcaacctgcgaatcaacctctctgagaaaaaaaatggcgtcgaacgggaatggcagcgttgcgaacggtaacgggagcgctaggaacggacttgcgaagattcagacgcagaagaagcatgacgggatttgtcacgacgacagcggtccaacggtgaaggctcagaccattgacgagcttcactcgctgcagaagaagaaatccgcacccaccacccccgttacggggtttcaggctcctttcgccaccctcaccgaagaagaacgtcataagcaacaactccaatccatcagtgcatctctggcatcactgaccagagaaactggaccgaaactggtgaagggagacccagctaggaagtcagatacccagaaggttactcacgtgcaccatcatgtcagcactcccaccattgttgtcagcgacagttctttgaaatttacccatgtcctctacaatctctccccagctgaactttatgaacaagcgattaagtatgagaaaggatcattcatcacttcaaccggggcattggcaacactttctggggccaagacaggtcgctctccaagggacaagcgcgtcgtcaaggatgatcttactgagaacgagctttggtggggaaagggttcccctaacatcgagatggacgaacacactttcatggtgaacagagaaagagctgttgattacttgaactcgttggacaaggtcttcgtcaacgaccaattcttgaattgggacacagagaacagaatcaaagtccggattgtctctgccagagcttaccattcattgttcatgcacaacatgtaccggaaagaccactctttcgaccgatcacaataggtatctaatcggagatgatgaacactgttggggtgacaatggtgtctccaacattgaaggtggttgctatgccaaatgcattgacctctcacgggagaaagagccagatatttggaatgcaatcaggtttggcacagtgttggaaaacgtggtgtttgatgagcacgaccgagaagttgattactctgacaaatcagttacagaaaatactcgtgctgcttatcctatagagtacattccaaatgcaaagttaccttgcgttggccctcatccaaagaatgtcatacttttggcatgtgacgcatttggggtactcccacccgttagcaagctaaacctggcacagaccatgtaccatttcattagtggatatactgctttggtggcgggcacagaagaaggtattaaggagcctcaggcaactttttcagcttgttttggtgcagcattcattatgctacaccctacaaagtatgcagcaatgcttgctgaaaagatgcagaagcatggtgctaccggatggcttgtcaacactggttggtctgctggcagctatggctatggaagtcgcattaaactacaatacacaagaaaaatcattgatgctattcactcaggaagtctgctgaatgcagagtacaagaagactgaaatttttgggcttgagatccccaccgaagtggagggtgtcccttcagaaattctagaccctgtgaacacttggtcaaacaaaaagggctacaaggagacactattgaagttggctggattgttcaagaacaattttgaaaccttcaccaactacaagattggcaagggcaacaacaacctgacagaagagattctcgcagctggtccaatcttttgagacaatgttatgtaacatgttgtgtggttgggaatgttaatgttaggatggtagataaaatcttgccttagaataaaatattgtaccattggtttggttgggctcataatgtcatttctattcttcctccaaaaaaatgaagtttattttctaggctttacatttaaaaaaaaaaaaaaaaaaaactcgagactagttctctctctcc

SEQ ID NO: 4646 - DNA, 2566 bp, Glycine max
  misc_feature (2432)..(2432): n is a, c, g, or t
  misc_feature (2456)..(2456): n is a, c, g, or t
  misc_feature (2459)..(2459): n is a, c, g, or t
  misc_feature (2461)..(2461): n is a, c, g, or t
  misc_feature (2485)..(2485): n is a, c, g, or t
  misc_feature (2492)..(2492): n is a, c, g, or t
  misc_feature (2497)..(2497): n is a, c, g, or t
  misc_feature (2515)..(2515): n is a, c, g, or t
  misc_feature (2546)..(2546): n is a, c, g, or t
  misc_feature (2548)..(2548): n is a, c, g, or t
  misc_feature (2563)..(2563): n is a, c, g, or t
  misc_feature (2566)..(2566): n is a, c, g, or t
cggtccggattccgggtcctcccacgcgtcgtcttcacccttacaacgcaacaacataacgttgctaattgcttgcacttcctcttatggttgcttcctttgtttctcattagctgttttggtttttgtcttagttctacacctttcctcatttccgcagtagcaacctgcgaaccaatctctctgagaaaaaaaaaatggcgtcgaacgggaatggcagcgttgcgaacgggaacgggaccgctaggaacggactggcgaagattcagacgcacaagaagcataacggaatttgtcacgacgacagcggtccgaccgtaaaggctcaaaccattgatgagcttcactcgctgcagaagaagaaatccgcgcccaccactcccgttacggggtttcaggctccgttcgccaccctcaccgaagaagaacgtcataagcaacaactccagtcaatcagtgcatccctggcatcactgactagagaaactggaccgaatctggtgaagggagacccagctcggaagtcagatacccagaaggttactcacgtgcaccaccatcatgtcagtactcccaccattgctgtcagcgacagtgctttgaaatttactcatgtcctctacaatctctccccagctgaactttatgaacaggcgattaagtatgagaaaggatcgttcatcagttccaccggagcattggcaacactttctggggccaagacgggtcgctctccaagggacaagcgcgtcgtcaaggatgatcttactaagaacgacctttggtggggaaagggttctcctaacatcgagatggacgagcacagtttcatggtgaacagagaaagagctgttgattacttgaactccttggacaaggtcttcgtcaatgaccaattcttgaattgggacacagagaacagaatcaaagtccggattgtatctgccagagcttaccattcattgttcatgcacaacatgtaagtgaaaactaaagaataatttaccattggcaacagttctagttgcaattgtttctctcttctcccttccatccatccagacaaaaaggtataaggccccgccagataagtgccctatcgttgaaagccttaattaattaatttatacatataatgctgtacataatatacatatatacatccctgctgaaaatggaggaaaaggttccccccaaaatagtacatgttagattagtttagtgtacaaaagtggataactgggtgggtgacaggtgtatccgccccactcctgaagagctggagaattttggtactccggacttcactatatacaatgctggacagttcccgtgtaatcgttatactcactacatgacatcctccactagcatagatcttaatcttgctaggagggaaatggtcatcctcggcacacaatacgccggggaaatgaagaagggtcttttcagtgtcatgcattatctcatgcctaagcgccaaatcctctccctacactccggatgcaatatgggcaaagatggggatgtggcactcttctttggactctcaggtatagtatcagccgatcaccggttgaaatcggtataatgtggctccacacagctaccctaccatatgttccttcccctcttactactactcagccatactcaatactccactgcttgttaattatcaactatgttgtatgcttacacatggatgttttgtgttatggctacttgtgtctccatttttctacaatcctaatggatccctttgttctcttttttactattgtttgttttaggtactgggaagaccactctttccaccgatcacaataggtatttaatcggagatgatgaacactgttggggtgacaatggtgtctccaacattgaaggtggttgctatgccaaatgcattgacctctcacgggagaaagagccagatatttggaatgcaatcaggtttggcacagtgttggaaaatgtggtgtttgatgagcatgatcgagaagttgattactctgacaagtcagttacagaaaatactcgtgcagcttatcctatagagtacattccaaatgcaaagttaccttgtgttggccctcacccaaagaatgtcatacttttggcatgtgacgcatttggtgtactcccacccgttagcaagctaaacctggcacagaccatgtaccatttcatcagtggatatactgctatggtggctggcacagaagaaggtattaaggagcctcaggcaactttttcagcttgttttggtgcagcattcattatgctacaccctacaaagtatgcagcaatgcttgctgaaaagatgcagaagcatggtgctactggatggcttgttaacactggttggtctgctggaagctatggtaatggaagccgtattaacctacatcacaggaaatcttgtgctntcctccgaagctctgatgcaaatnaananatgaattttggctgaatcccccantgagggncctcnaatttgatcttgacctgncaacaaaggctcaggacctttgagtggtggntntaaacatttaacctncan

SEQ ID NO: 4647 - DNA, 2721 bp, Glycine max
tgggttaccgccactgccagtttacccggttccccggactctccccgggttccgaacccaaccgcgttcccgatctttttccattctctccctctgttaaaaggagaagctcactcacttccattgtcactgctcctttctcggatctctctcttcttcttcttcgttttctcttcgcgagtgagagatggcgcaaattctgcttcatgggactctccatgccaccatcttcgaggttgataggctcaatgctggtggtggtggcggcaattttttcagcaagctcaagcaaaactttgaggagactgttggtattggaaagggagttactaaactctatgcaaccattgatctggagaaagcaagagtaggaaggactagaatcatagaaaatgaacatactaatcccagatggtatgagtcttttcacatttactgtgcccatatggcttcaaatattgtattcactgtgaaagatgataatcctattggggcaactttaattggaagagcttatgtgcctgtttcggaggtcttggatggtgaggaaatagacaggtgggttgaaatattggatgaggaaaaaaacccaatacatgagggttcaaagatccatgtgaagctgcaatattttgatgtcacaaaagaccgcaactgggctcgaggcattagaagtcctaaatttcctggagttccctatactttcttctcacagaggcaaggatgtaaggtatctctgtaccaagatgctcatgtgcctgataattttgtacctaaaatacctcttgctggaggcaagaattatgaggctcataggtgttgggaggatatatttgatgcaatcactgatgctaaacacttcatatacattactgggtggtctgtttaccccgcgtccgccttggtaagggattctaggaggcctaagcctgggggagaccaaacacttggtgagcttctcaagaaaaaggcaagtgaaggtgttaaggtattgatgcttgtttgggatgatagaacatcagttggtttgttgaaaaaagatggactgatggctactcacgatgaagaaactgcacagttctttgatggcactgaggtgcattgtgttttatgcccccgcaatcctgatgatggtggtagcattgttcaggatttacaaatttctaccatgtttactcatcaccagaagattgtggtggttgacggtgcgatgccaggtggagggtcagataggcgaagaattgtgagttttgttgggggtattgacctctgcgatggaagatacgacactgccttccactcactgttcagaaccctggacacagcacaccatgatgattttcatcagcctaactttcctggtgctgtaatcacaaaaggtggtcccagggaaccttggcatgacattcactcccggcttgaaggacccatagcttgggatgttttgttcaactttgagcaaagatggagaaagcaaggtgggaaggatgtacttgttccattgagagagcttgaagatgtcattatctccccatccccagtaacatttcttgaagatcatgagacatggaatgttcagttgtttagatctattgatggtggggctgcttttgggttcccagagactcctgaagatgctgccagagctggtcttattagtgggaaggataatatcattgatcgtagtattcaagatgcttatattaatgctattcgacgtgcaaagaacttcatctatattgaaaatcagtatttccttggaagctcttttgcctggagtgctgatgatattaagcctgcagacattggtgctttgcatctaatcccaaaggaactttcactcaagattgttagcaagattgaagctggggaaaggtttgctgtgtatgttgtagtcccaatgtggccagagggtgtcccagaaagtgcatcagttcaggcaatattggactggcagaagagaacaatggagatgatgtacagggacattattcaggcactcagagctaagggaatcgaggaagatcctcgaaactatctgacattcttctgccttggcaaccgggaagtgaagaaaccaggagaatatgagccttctgaacaaccagatcccgattcagattatcagagagcccaagaggcccgacgattcatgatttatgttcataccaagatgatgatagttgatgacgaatacataatcgttggatctgccaacatcaaccaaaggtcaatggatggtgctagggactctgagattgccatgggtgcttatcagccctatcatttggctaccaggcagccggcacgtggccagatccatggtttccgcatgtcattgtggtatgagcaccttggcatgcttcatgactccttcctccagccagaaagtgaagaatgcattaataaggtgaaccaagttgctgacaaatattgggatctgtattctagtgagtcacttgagcatgaccttcctggtcaccttctccgctaccccatcgggattgccagtgaaggagatgtcactgagctgccaggatttgaattcctccccgacacgcaaggctcgcattcttggtggcagagctgactacctcccccctatcctcactacttagtttgattttgtactttgttacaaacttgtgattgcttacatcctaatttgtgtttttattactacttagtaataatcttaatatagtctgtgatgtcttgtgg

SEQ ID NO: 4648 - DNA, 2799 bp, Glycine max
ccacgcggccgcgtccttccacgcgcccggactcactcactcactcacctccatttccattgtcactgctccttattcggatctatctcacaccctttctctcttttcttcttttctttcgttttcccttcgcaagtgagagatggcgcaaattctgcttcatgggactctccacgccaccgtcttcgaggttgataggctcaatgctggtggtggtggcggcaattttttcagcaagctcaagcaaaactttgaggagactgttggcatcggaaagggagttactaaactctatgcaaccattgatctggagaaagcaagagtaggaaggactagaatcatagaaaatgaacatactaatcccagatggtatgagtcttttcacatttattgtgctcatatggcttcaaatatcatattcactgtgaaagatgataatcctattggggcaactttaattggaagagcttatgtgcctgtttcggaggtcttggatggtgaggaaatagataggtgggttgaaatcttggacgaggaaaaaaacccaatacaagagggttcaaagatccatgtgaagctgcaatattttgatgtcacaaaagaccgcaactgggctcgaggcattagaagtcccaaattccccggcgttccctatactttcttctcacagaggcaaggatgtaaggtatctctgtaccaagatgctcatgtacctgataattttgtacctaaaatacctcttgctggaggcaagaattatgaggctcataggtgttgggaggatatatttgatgcaatcactaatgctagacacttcatatacattactggttggtctgtttatactgaaatttccttggtgagggattctaggaggccaaagcctgggggagaccaaacacttggtgagcttctcaagaaaaaggcaaatgaaggggttaaggtattgatgcttgtttgggatgatcagaacatcagttggtttgttgaaaaaagatggactaatggctactcacgatgaggaaactgcacagttctttgaaggcactgaggtgcattgtgttttatgcccccgcaatcctgatgatggtggttccagtctgcacgttggccccccccctaccatgtttactcatcaccagaagatcgtggtggttgacggtgcgatgccaggtgaagggtcagataggcgaagaattgtgagttttgttgggggtattgacctctgcgacggaagatatgacactgccttccactcacttttcagaaccctagacacagcacaccatgacgattttcatcagcctaactttcctggtgctgctatcacaaaaggtggtcccagggaaccatggcacgacatccactcccggcttgaaggacccatagcttgggatgttttgttcaactttgagcagagatggagaaagcaaggtgggaaggatgtacttgttccactgagagagcttgaagatgtcattattcccccatccccagtaacgtttcctgaagatcatgagacctggaatgttcagttgtttagatccattgatggtggggctgcttttgggttcccggagactcctgaagatgctgccagagctggtcttattagtgggaaggataatatcattgatcgtagcattcaagatgcttatattaatgctattcgacgtgcaaagaacttcatctatattgaaaatcagtatttccttggaagctcttttgcctggagtgctgatgatattaagcctgaagacattggtgctttgcatctaatcccaaaggaactttcactcaagattgttagtaagattgaagctggggaaaggtttgctgtgtatgttgtagtcccaatgtggccagagggtgttccagaaagtgcatcagttcaggcaatattggactggcagaagagaacaatggagatgatgtacaaggacattattcaggcactcagagctaagggaatcgatgaagatcctcgaaactatttgacattcttctgccttggcaaccgggaagtgaagaaaccaggagaatatgagccttctgagcaaccagatcctgattcagattatcagagagcccaagaggcccgacgattcatgatttatgttcataccaagatgatgatagttgatgacgaatacataatcgttggatctgccaatatcaaccaaaggtcaatggatggtgctagggactctgagattgccatgggtgcttatcagccctatcatttggctaccaggcagccagcacgtggtcagattcacggtttccgcatgtcattgtggtatgagcaccttggcatgcttcatgactccttcctccagccagaaagtgatgaatgcattaacaaggtgaaccaagttgctgacaaatattgggatctgtattctaacgagtcacttgagcatgaccttcccggtcaccttctccgctaccccatcggggttgccagtgaaggagatgtcaccgagctgccaggatttgaattcttccccgacaccaaggctcgcattcttggtggcaaagctgactacctcccccctattctcactacttaatttgattttgtactttgttacaaacttgtgattgcttacatcctaatctgtgttttcattactacttagtaataatcttaatatagtctgtgatgtcttgtggagatttttttttcttctatttttttgaagatgtcagtgacagattttagttatctgatggctttgactggtttctaatcaatgtttccttttctctcccaacgttactgttgtttttctacct

SEQ ID NO: 4649 - DNA, 1277 bp, Glycine max
tcgagtcagctacgtaggccccccccccggtgtgtgttgttatcactcctctaaatataaagatcagcgaaaacaagcgcagcttcattgtttgactctgactcactcgctcgctccctccctcagaaaccatggccgaatttgccatcaacaacaacaacaacggttcccattccagcattaacagcccccatcctgattatgcggagattgttgtggtgcgtcatggcgaaacagcttggaatgctactgcaaaaatccaggggcacctggatgttgaattaaatgaaaatggaagacagcaagcagctgtagtggctgatagactatccagggaacctaaggcctctgttatatattcttctgacttgaaacgggcttttgaaacagcactgatagttgcatccaagtgtggagggatcgaggttgtcaaggattctgacctacgggagagacacctaggggatcttcaaggccatgtttttcatgaaatagcaaaaactaatcccacagcttacaaggcttttgtgtctaagaacgaagatcaagaaataccaggtggtggagaaagtcttgttcaactttatgatcgcagcacatctgcattgcttaaaattggcttaaagcataaaggggagcgagtaattgttgtctctcatggaggattcatcagagccctttacaagtgggcatgcccaaatggtaagcctgggaaggtactcaatacatgtgttagtgtttttcacttgtacggtgaggacaaatggaccttaaaagtgtggggtgatgtcagtcatctgaacgaaactggatttctagagtctggttttggaggtgatagaaattctggttaggccattgtttcctatttaaggtaataaaggtttgattgtttcccatccgaagttaataaaagattagagaaagagcagaaaatggatattaatcagtggtgctaaatatgattttggcccctatttatgttttgtatcttagcatgcaaatatatggtcaccatgtaaggatatgcctaaactatttaattttgtggaggtgatgtcaatctcctttatagaattgtttcttttaaaatcttttcgaagctttcatggagtgatgaatgtaatgatacacttttcatgttagtatttttaatttgtataaaaaaaaaaaaaaaaaaaaaaaagaaaaaaaaaaaaaaaagaatgcctgccctgcagccccgggggatcccctaattccaaagagcgccgccaccgggggggagttccagcttt

SEQ ID NO: 4650 - DNA, 1873 bp, Glycine max
caacagactaactggtgcattgagtcacaccattggttcactggttgagttaaccaaactcaaccttggaaacaatcagctgagtggaagaatcccatcagagatcttgtcttgctctaagctacaacttctggacctgggaagtaatagtttcaatggagaaattcccaatgaagttggtctaattccttcactggcaatctctctcaaccttagctgcaaccagttctctggtaaaattcctccccagctctctagtcttaccaaactaggagttcttgatctctcacataacaagctctcagggaatttagatgctctttctgaccttgagaatcttgtttccttaaatgtttccttcaatggcctctctggtgagttgcccaacaccctattttttcacaatcttcctcttagtgatcttgctgaaaatcaaggtctctacattgctggaggtgttgtaactcctggtgacaaaggtcatgctagatcagctatgaagttcattatgtccattctcttaagcaccagtgcagtacttgttcttctcacaatctatgtcttagtcagaactcacatggccagcaaggtgctcatggaaaatgaaacttgggagatgactttgtatcagaagcttgatttctccattgatgacattgtcatgaatttgacatcagccaatgtgattggcactggaagctccggagttgtgtacaaagttacaattccaaatggtgaaacattggctgttaagaagatgtggttatcagaagagtcaggagcattcaattctgaaattcaaacattggggtcaataaggcacaagaacatcatcaggcttcttggatggggatcaaacaagagcctgaagttgttgttttatgactacctgccctaatggaagcctgagctcattacttcatggttcaggaaagggaaaagctgaatgggagacaagatatgatgctatattaggtgtggcacatgcacttgcatatttgcaccatgattgtttgcctgctattattcatggagatgtcaaagccatgaatgtgttactaggccctggacaccaaccttaccttgctgactttggcctggcaagaactgcaactgaaaatggttgcaatactgattccaagccacttcaaagacattaccttgctggttcatatggatacatggctcctgagcatgcatcactgcagcctataactgaaaagagtgatgtgtacagttttggcatggttctacttgaggttctcacaggaaggcacccattagacccaactctaccagggggtgcacacttggttcagtgggttaggaaccacttgtctagcaaaggagatccttctgacattcttgacacaaagcttagagggagggctgatcccaccatgcatgaaatgctacaaactctagcagtgtcctttctatgtgtaagcactagagctgatgagaggccaacaatgaaggatgttgttgcaatgctcaaggaaattagaccccttgagacctcaagggcagaccctgatgtattgaagggaggtttaacagcacatagttcaccaccacctcctaagaatgtggtctcacatggatcttcgacatgttcctacaatttctcggataactcaatcaattgagcatgtatgaataagtttgcatctcatggagaagctatcactccaattgtacatagtctaatgcaatgccaatcagaggtggcctgaattattattagttaatgatattctagtaatctagtgtataattttttttccttttaatgtaatgtcatatagacgatgcaggtttcaagaatccatatattcatttgaaatatataaataaatataatttcttaagc

SEQ ID NO: 4651 - DNA, 1345 bp, Glycine max
gtgggatctgccacaatacagtatctttattgtcacatcgttcacaccattctcccttcttttgaaagtgtagggggtaatcttgcccgaagaatcatgtgacaataaagatactgtattgtgggatctgccacacggacctccactatgctaaaaatgaatggggctcggctcggggccccgtgccgcccggacacgagatcattggggtggtaactaaggtggggagagacgtgaaggggttcaaggaaggagacagagtgggtgtggggtgtttggcggcttcatgtttggaatgtgagcactgcaagaccgatcaggaaaattactgtgaaaagttgcaatttgtctacaacggagtattctgggatggcagcatcacctatgggggctactctcaaatttttgtcgcagattacagatatgtggtacacattccggaaaacctagcaatggatgcagcggctcctctgctatgcgcaggaataacagtgttcaatcctttgaaagaccacgatttggtagcatcaccgggaaagaagattggggtggttggtctgggaggccttgggcacattgccgttaaatttggcaaggctttcggccaccatgttaccgtcatcagcacttctccctccaaggaggctgaagctaagcagcgtttgggtgctgatgatttcattgtcagctccaaccctaaacaattacaggctgcaaggagaagcatagatttcatattggacactgtttcggcagagcactctctgttgcccatcttggaattgctcaaagtcaacgggaccttatttctcgtgggtgcaccagacaagcccttacaattgccagctttcccattgatatttggcaagagatcagtgaaaggtgggatcatagggggaataaaagagacgcaggaaatgttggaggtttgtgcaaagtacaatataacgagtgacattgaattaatcacaccagacagaatcaacgaggctatggagcgccttgctaagaatgatgtgcgctaccgtttcgtcattgatattgctaatgctgccgcttccaacaactaaactagccttcaattcggatcaaattttacttgtttcgatatttactgtttaatagacccgtgattttacctctgcaattggacgaataagtcatatatttatgtcaatgactttttacttgttaaactgatctatcgtttaagtctgaattaattttttaagcttttagagaaaaaaattataatttaaacatttgtatgtttggtactctcgttttatttaataaaatgaatcaatctaaatgtatttataaaatatgaggaactagtctcgag

SEQ ID NO: 4652 - DNA, 1325 bp, Glycine max
tcagcggcggcggccccccccccccccccgggggtctgattaattctctagttatggctgagagcagagcgaatcacacagtgagcgtatctgggtgggcagctcatgattcgtcgggcaagattaccccctacagcttcaaaagacggcagaacggtgtgaacgatgtgacaataaagatcctctactgtgggatctgccacacggatctccactgtgctaaaaatgaatggggcatcactatgtaccctgtggtacccggacacgagatcattggggaggtaactaaggttgggaccaatgtgaaggggttcatggaaggagacagagtgggtgtgggctgtttggcggcttcatgcttggaatgtcaccactgcaagaccgatcaggaaaactactgccaagacctccaatttgtctacaatggaatcttctgggatggcaccatcacctatggtggctactcccaaatctttgtcgcggattacagatatgtggtacacattccggcaagcctaccaatggatgcggcggctcctctgctatgcgcaggaataacagtgttcagtcctttgaaagagcacgatttggtagcaacagcggggaagaggattggggtggttggactgggaggccttggacacattgctgttaaatttggcaaggcttttggccaccatgttaccgtcatcagcacttctccctccaaagaaccagaagctaagcagcgtttgggtgctgatcacttcattctcagctctaatcctaaacaattacaggctgcaaggagaagcatggatttcatattggacactgtttcggcagagcactctctcttgcctattttggaattgctcaaagtcaatggaaccttatttctcgtgggtgcaccagacaagcctttacaattgcctgctttcccattgatatttggcaagagatcagtgaaaggtgggatcatagggggaataaaagagacgcaggaaatgttggaggtttgtgcaaagtacaatataacgagtgacattgagttaatcacaccagacaaaatcaacgaggctatggagcgccttgctaagaatgatgtgcgctaccgtttcgtcattgatattgctaatgctgtcacttccaacaacaactgaactagccttcaatttgattcaaatttcgtctattcattacttgtttctatatctactgtttagtaaaccggtaattttacctctgcaattggatcactaagtcatatatttatcccaattatcttctgtttaagtttgaattaagagaaaaatggttatgcatttaaaaaaaaaaaaaaaaaa

SEQ ID NO: 4653 - DNA, 1379 bp, Glycine max
tcgtctcccacttttccctggatttaggactgataagaaaggtcaaactgccctacacatggctgtgaaagggcaaaatgaagaaattttgctggaattggtaaaacctgacccagcagttttgagtctggaagataataaaggaaatacagcattgcatattgccacaaagaagggccgtactcagaatgttcgctgcttgttatcaatggagtgtatcaacatcaatgctacaaacaaggctggagagactcctcttgatgttgcagaaaaatttggaagtccagaactcgtctccatattgagggatgctggggctgccaattctactgaccaaaggaaacctccaaatccatcaaagcaactcaagcagactgtcagtgacataaagcatgacgtacaatcccaactccaacagacacgtcagactggcatgagggtccagaaaattgcaaagaagctgaaaaagctccacattagtggcctgaacaatgcgataaactctgctactgttgttgccgttcttattgctacagttgcttttgcagccatcttcacagtccctggtcaatacgttgaagacaaaacacatggattttcacttggacaagcaaatatagcaaacaatgcagctttcctaatattttttgtgtttgacagcctggcattgttcatctctctggcagttgtggtggttcaaacctctgtcgttgtgattgagcaaaaggcaaagaagcagctcgtttttgtcattaacaagctcatgtggatggcttgccttttcatttccattgccttcatttctcttacatacgtggtggtgggatcacactccagatggcttgcaatatatgctactgtgattggaagcttgataatgctctctacaattggctccatgtgctattgtgtaattttgcataggatggaggagacaaaattgagggccgagagtcgatcgttctctatgtctcatgcatcagaccaagagattttaaacagtgaatacaagagaatgtacgcactgtagtctgtaggatagttgatatatcagaatggaatggcttttatcctccagcatattcttgaagtgatatgtagtttctactatcagtatcagattttaccaagacaagctgtctatgttagactacaggtaccgtgagaaaagagggaaaagaagaaaatgggtggggaattctcgtcacatccactcgtaattataaatgatgtcaaatttagcatcatgtcagtgaaatgattgtggtgttgaagaatgaagacttatatccatttgtatttactctagtattctattataaactaaacttcataaaagaatctaattcaattggtttaagagagtctctgaatattat

SEQ ID NO: 4654 - DNA, 1686 bp, Glycine max
caaaagagaaataaattataatcaagtattccaaaaaataatcatgatcaaaacgagttggattggctagcaatatgtaaacaacttgtgcttttatatattggttatagggcctttaaaccaacggcgaccactgattaaccagtaagaaactacaagaataagcaaacatccaacggcaacaggggtgtagttaagtgtcttaatggttattgggtaggaaacaggcaaggagaagagtacagaaatggtcagcacccaaagaacagcaacccaacccacaacgacaccataacggcccaagttgaaaggcccactgacaaagtgtttccgtgccaaggtcacccttaagaatatagggaaggcataagcaatatagaggccaattgttgctatggacaccatggcctcaaatgctactatgcttccaagagatgtcagtgccatgcaaaatgatatgaaaacagaaagccaaactgcatatatagggacctcctgcttgttaactttgtgccacaatgatgacaatggcatggccccatctctagagaatgcataagccatccttgaattgctggttactgaactcataccacagaaaaatatggcaacagcaacaattactaagcaaataatgcctccagttccatggccatatcttttcttgaatgcttgataaaatacttgagcaatagcatacccaccagcatcattatcttcactcaaaaggtaaaggatgtcagtgactgcaaaggtaatgcctagtatgtaaccccatccaacaacaatggatatcccgacagcgctgataattccttttggaccattcctatcagcatccttggtttcctctgtcatgtgagctgatgcatcaaatccagttagggtatactgactcattagaagtcccaagaggaatatgtagggtttgctgttgattccttccccattttctgcattgaagtgagtgaaaacaaacttggcactagccctttccgttgcaacagatggaatgacaatcataagcacaaaaacacctataacattccaaatagctgccagctgtcctaagaatgataacaatgagataggaaggctgtttattataccgtgtaggaacaaaattcccccatggaaagcaataactacatatttagatgcctcatatccaccaccatttttgccaccagtactaaggagaataataacctgaatcagttgtgcaagtgaataatctacacttgttgtcactgcccactggccaacaatattgaaccagccagtaatccaggaagcaaagggtgcccatctgggcccagcaagcttggcactccaataataaagcccaccagaagttggataagatgaacaaatctcagccattgacaatgcaacaagcatggtgaaagcagaagctaaaaaccacccatacaccagcgaaacagggccgccataattcaacccagggttgtaaagagtggtcactccaggtcaacaccgatataatagaaaacgaaaacgcaaaattcgaaataaccgaaagatcacgcttgagttcttgtttgtaaccgaggtctttgagacgggcggggccggaatcaagtggggcgtggccctttgccggccccatccgtggggagtattttgtcagagcccatgagaagatggaggaaaaaatgggagttt

SEQ ID NO: 4655 - DNA, 1050 bp, Glycine max
aaagaaaacccttatcacataacccttccaaatctacaacaacactagcctttgtcatctcctcccctagcatccatagcggccacgtcgtcttcgtcactctcccaatattcttgccatgaacgagctctacatcatcatggccttcattggcatcatcctcaacaacatctatacttgcatcatctttgccacaccccttcttccctttcatttgggccacatagaggagcaaaagaataaaagcagacgaaaaaaatttgagtgtgaaattaattgaagtgaagtgaggtgattttttttttttttttgcttcttagttactagaagaattgtataggaatgaataatgatagcagatcaaattctcaggcaatgcacgtattcatttggattccttcgtgtcaatcttccatatatctggccttcctgaagagtattaccataataattgtctgtcaaatgctggggatagttttgttgatggagcagtcatagctgcagcacgaacactgccaagttggtcagatggggatgtgcctccaatccctagcgtggaaagaaaggctgccaaggagttgcaagatgaatgtcaaaagatgctcgcagcatttgctacaacctctaagcaagaccagaaattgctaggttccatgacagatgctacgaggacacttgaagctgcaataaagtatagattgcacaggaaattgttcatggagaaagttatccaagcattggagatgtatcaagagcaaatactgttctgatcccaatctactaacaggagaatagtcagtaagattttgtagcactgtagtgtcgtgtatacctgtaatcctgtgtcacttaaaacaatgctctttatccattaattgtaggttcttcattctgttgtgccttaccatttctttgtgccgttccttgatctagtgttaagcaaattaaaaaaagaaaaaaaaagtgtaaaattatagttatatttatgtaaaatttcaaaaatacttttttttaaaaaaaaaaaaaaaaacgcttatcgataccgtcgac

SEQ ID NO: 4656 - DNA, 1533 bp, Glycine max
tcgagtcagctacgtaggcccccccccccggctttctacactcattgcaacgaattgctaacgtcccacacgctacagagaagatacgacagagtgagagagaaagaagcacaacaaggatgtcttcgtcgtcatcgtcgtcgtcgtcgtcggaagatgaatctatgtcggaacagagcaatgaattaggacttgatttcatcttgagcttggacaatgttccatcaaagctccctccacacctcgaactctttaaaacacgtgttctttgcaacaacgatgctcctgtgcacactgatactgttcaatattccggtgcctatgctattatgggagttgataatagtgtgcggttggatagcttctgtgaaaactttaaggttgaagtgaagcggctgacggatagcgatattgaatttgatatgattggaatcgatccggcaattgccaatgcatttcgaagaatccttatagcagaggttccaacaatggctattgaaagagtatatatcgcaaacaatacatcggttgtacaagatgaagttctttcccatagattgggtctcattccaattcgtgctgatcccaggttatttgaatatccagaaaatgcaggagatgacaagaatgaaaagaacaccattgtcttcaagctacatgttcgttgtcaagtgggtcaacctcgtattactgtgaaatcagataaactgaagtggttacctaatgggagtgagcttccctgtgaagatgtcaaaccaaatgcaggttcaaaaccaaaaacatttacatctttcacttgcagccaagattcacttcctgaattttccaacaattcaattggtcttacatattcggatattatactggctaaacttggacctggtcaggaaattgaacttgaagcgcatgcagttaaaggcactgggaagacacatgcaaaatggtccccagttgccaccacttggtatcggatgcttccggaggttgtactcttgaaagatgttgaggatgagctggctgaagaattaaaaaacaagtgtccagttaatgtgtttgatattgaagacattggaaaaggtaaaagaagggcaaaagtagccagaccacgggattgcactttgtgtagggaatgcatcagagggggcaaagaatgggaagatcgtgtatcattacgccgtgttaaaaatcatttcatttttactattgaatcaactggagcattaccccctgaagtgctgtttactgaagctgtgaagattttggaagataaatgtgaacgtgtgattactgagctttcttgattcttctttttgccatgtcttaaaatcagtgaaatggataaatgtgatccttgattcagttctgttatgattccatttttttttataatatgaaagttcttttcttactcatagttaagcgttgtaccaaagaaaaagaaacggtgcatgcatgtctgcatatccattatctgtattatccaaatctagcagcttaatatatttgattttatcgaaaaaaaaaaaaaaaaaa

SEQ ID NO: 4657 - DNA, 1585 bp, Glycine max
gtttgttggtgagtgtgaggagaagttgagtaagttggaatctcggatggaatcacagaggcctttgttgattgatcagttgagttttgtttccaaaattcacaaccagatttgcaatgttgttaggataattgaccacggtagcaccgcgcggccgtctgaatcgttgtttgtcccgcaagaaacggatgttgaggagaatacttcgtgcctctttggctgggatggagtccactatatgagttgaccaagattgttgttcagaaagctaaggatgtgcttgaggagaacgatcgtgagattaagagtttacatgagacgttggctcggttagttagggagaaggatcaaattggttcttttcttaggagtgctttgtctaagagggtggcagttgatccgtcttctagaaagagtgagctgtttcaagctgcagagaatgggttgagagaggctggaatagatttcaaattcagtaagcttcttggagatgggaaagttgcagcttcaaatgacaagtctgatacaacggaaaaacaagaggatgaaatatactccctggctggtgctttggaggatgttgttagggcatctcagcttgagatcatcgagctgaagcatactgtgggtgaattaagggcagagttgagcttacttaagcagcatgtagaagctcaggccaaggagcttgaccatagaatgcatcggatagaggaacttgaagagaaggagagagtggcaaacgaaaatattgagggactaatgatggacattgctgctgctgaagaagaaattaacagatggaaagtggcagcagagcaagaagctgccgcaggcagaggcgtcgaacaggaatttgtggcacagttgtcagcacttaagcaggaatttgaagaggcaaagcaatccatgttagaatcagagaagaaactaaatttcaaagaagaaacagctgctgctgccatggcagccagagatgcagcagaaaagtctcttaagttagcagacttgaggtcatctagactaagagacagagtagaggagcttactcatcagctcgaagagtttgagaacagggaagattcaaggagccataatcggcctagatatgtatgttggccatggcagtggctcggcatggactttgttggatttcagcagcgacccgatacacaacaggaggcttctaacgaaatggaactttccgaacctctattataattgggcattttcttttctcttcttttttatgttcttttgtgtatttatgttaatttcttcaaattaatgttacaaagttgtagtttataccatcaacatgttccaccatctcttagaatgcaaccatggtggttactggttgagcattaggctcctgtaaagtgagaaagtgtctgaagtgtgaagtatacaagtgagggtgtgctcacgcttgaattaaaataggttaagttcatcaaacacttcaattctaattgacataaaatgcatcttcacttattcactttataggttttctcacttcaggtgagccgtttacccagcattatcatgttgcacctgcttccggcttgagtagcttact

SEQ ID NO: 4658 - DNA, 1495 bp, Glycine max
tacggctgcgagaagacgacagaaggggaccgtcaccgattgattattctcagggccgggctcttaaaagcttgaaccgagatacgatttttttttcagcgtttaggcgaattcaccgagagttgcggctgggaatggacggtgacggcgaggagttgactgcgcaggagaccgctttgtatgaccgtcaaattagggtttggggagctgatgctcaaagaagattaagcaaatctcatgtcttagtctatggaatgaaaggaactgtagctgagttttgcaagaatattgttctggctggagtaggtagtctgactttagtagatgaccgggttgccactgaggaagtgctttcctcgaattttctcatccctcctgatgagaatgcgtatagtggaaagacccttggtgagctttgttgtaattcacttaaagacttcaaccctatggttcgtgtttccattgagaaaggtgatttgtcgagttttgatgttgaattcttcagcaaattcgatgttgttgtcgtcagttgttgctcgctttcagccaaaaaactggctaatgacaaatgcagaaagctatcaaaacgtgtagcattttatgctgttgactgcagggattcttgtggtgaaattttcgtcgatttgcaggattataaatattcaaagaaaaaacaggatgaaactgttaaatgtgacctgaaatatccatcattcgaggatgcattatctgtaccttggagggcacttcacaggagaatgtcaaagctgtactatgctatgagagtaatagaaaagtttgaagaggctgagggacgtagcgcaggggaagtttccattgcagatctttctggtgttctcaaactgaaaaaggagatttgtactgcacaatctctcaatgaatctcatgtgcctgatactcttctagaaagattggtgacaaatgcaatagaatttccgcctgtttgtgcaattatagggggaatccttggacaggaggttatcaaagcaatttctgggaaaggagaccccctaaagaattttttcttttttgatgcttttgatgggaagggcattatagaagacctctctccgaagtgattaattaatggccgaagctttggcagtctaaagtagggatgcaaccttttgccaaaacagcacagaaaactagtaaatttcaaaagatctctaaagaaattgacccttctcccttattaactgctcatatagcttcctagtctgtatgtattttatctagactaataacagtttagggttaggatcttctcgtcatgtagtcactagacacactcatcagcgttccttttgatgttatgaagcccaattgtccttttatgtttatgtggtggtactctattgggtacatgtggttatcagtcttttttaattatggatttccattaaactcgccgtacacaatcatttgataatgtaagttttattataatatttatgatatcaattcaccaaaa

SEQ ID NO: 4659 - DNA, 1098 bp, Glycine max
tatcttacggctgcgagaagacgactgaagggcaccgtcaccgattgattattctcatcgccgcgctcttgaaagcttgaaccgagatacgattttttttttaaagcgtttaggcgaattcagcgagagttgcggctgggaatggacggtgacggcgaggagttgacggcgcaggagaccgctttgtatgaccgtcaaattagggtttggggagctgatgctcaaagaagattaagcaaatctcatgtcttagtctatggaatgaaaggaactgtagctgagttttgcaagaatattgttctggctggagtaggtagtctgactttagtagatgaccgggctgccacggaggaaatgctttcctccaactttctcatccctcccgatgagaatgtgtatagtggaaagacccttgcagaactttgttgtaattcacttaaagacttcaaccctatggttcatgtttccgttgagaaaggtgatttgtcaagttttgatgttgaattcctcagcaagtttgatgttgttgtcgtcagttgttgcacgctttcggccaaaaaactggctaatggaaaatgcagaaagctatcaaaacgtgtagcattttatgctgttgactgcagggattcttgtggtgaaatttttgttgatttgcaggattataaatattcaaagaaaaaacaggatgaaactgttgagtgcgacctgaaatatccatcttttgaggatgcattatctgtaccttggagggcacttcacaggagaatgtcaaagctgtactatgctatgagagtaatagaaaagtttgaagaggctgagggacgtagcgcaggggaagtttccattgcagatctctctggtcttctcaaactgaaaaaggagatttgtactgcacaatctctcaatgaatctcatgtgcctgatactctgctagaaagattgggacaaatgcaattaaatatacccctggttgtgcaataataggggggaatacttgacacggagggttcaaaaaaattttttgggaaggagaacccgctaagaaaatattgtctttttgatgcttttaagatgagaggcatgatgaaagagcgctct

SEQ ID NO: 4660 - DNA, 2390 bp, Glycine max
  misc_feature (2262)..(2262): n is a, c, g, or t
  misc_feature (2277)..(2277): n is a, c, g, or t
  misc_feature (2288)..(2288): n is a, c, g, or t
  misc_feature (2302)..(2302): n is a, c, g, or t
  misc_feature (2305)..(2305): n is a, c, g, or t
  misc_feature (2319)..(2319): n is a, c, g, or t
  misc_feature (2338)..(2338): n is a, c, g, or t
  misc_feature (2352)..(2352): n is a, c, g, or t
  misc_feature (2370)..(2370): n is a, c, g, or t
  misc_feature (2381)..(2381): n is a, c, g, or t
tccacgcgtccgcccacgcgtccggcatcatcatcggattccctctctctccccttttcccttctctccaaaccccatcattttctatcggaccctccgtccagtctctaccaccgcaaccaccattctctctctctctctctctctctctctctctctctctccaaggtgttgataatctgaagcctatgcgatggaaatatcaaatgattcgggtactaagaaacctaaaaggctgacatctgttgtctggaatcactttgaaaggattagaaaggcagacatctgctatgctgtttgtgtgcattgtaacaagaaacttagtggatcaagtaacagtggaactactcatctgagaaatcacttgatgcggtgtctgaaaagatcaaactttgatgtgtctcaactacttgcagcaaagagaaggaaaaaagataatacccttcagcctagcaaacataggttttgatgaaggtcagaggaaagaagaatatataaagccaacaatcatcaagtttgaacctgagcataagaaagatgaaatcattaacttcggaagtagtaaatttgatcaggaaaggagtcaacttgatcttgcacgcatgatcatattacatggatacccactgagcttggttgaacaagtaggattcaaggtctttgtgaagaacctccagcctctctttgagttcacgccaaacagttctgtagagatttcttgtatagatatctacaggagggagaaagaaaaagtgtttgatatgataaacagactacatggtaggattaatctgtcaattgaaacatggtcttcaacagaaaattctttgtatttgtgtctatctgctcattacattgacgaggaatggacattacagaagaaactcctgaactttgtcacacttgattcttctcatactgaagacttacttccagaagtgattatcaaatgtctcaatgaatgggatattgactgcaagctttttgccttgacacttgatgattgttccatcaatgatgacatcactcttagaatcaaggagcgagtttctgacaaaaggccttttttaagtactcggcaattacttgatatacgctctgcagcacatctcataaaatccattgctcaagatgccatggacgcattacatgaggtgatccaaaagattcgagagagcatcaaatatattagaagttcacaagtagtgcaaggaaaatttaatgaaattgctcaacatgctaggattaacactcaaaacctcttatttcttgattttccagttcagtggaagtctacgtatctcatgcttgaaactgcactagaatacaggactgccttttctctcttccaagaacacgatccctcctattcatcaactctaactgatgaagagtgggaatgggctagttctgttactggctacttaaaacttttagttgaaattatgaatatattttcaggcaacaaatttcctacagcgaatatatacttccctgagatttgtgatgtccatattcaattaattgactggtgcagaagttcagatgattttcttagtcccatggctttgaagatgaaggctaaatttgacaggtactggagcaagtgcagtttagctttagctgtagccgcagtcctagatcctaggtttaaaatgaagttggtcgagtactactactctctaatttatggcagcactgctctggagcgtatcaaggaagtttctgatggtatcaaagaactttttaatgcgtattctatctgttcaactatgattgatcaaggctcagccttgcctggcagcagtttacctagtacttgtggttccagagataggctaaaaggctttgacagattccttcatgagacatcacagagtcagtctatcatatcagacttagacaagtacttagaagaaccaatctttccacgcaattccgattttaacatattgaactggtggaaagtccacatgccaaggtacccaattttgtctatgatggcacgtgatgttcttgggactccaatgtcaactctggcgccagaattggcatttagcactgggggcagagtgctagattcttctcgtagttcactaaacccggacacgcgagaggctttgatatgcacccaagattggctccaaaatgaatctggaaatctaaatccatctccaatccattctgctctacctcttctcatcgaatgaagttaattttttcaaggtcttattgaagaagcatcgtggcattggcgccaanatccattgttgaacnttttgctttgngcttatttatggtntgngctggtgtttcaanattgatggatcggttaccncttcatgaacaatntttatcattttgttttanaatgtcaggtnttattgaag

SEQ ID NO: 4661 - DNA, 1409 bp, Glycine max
tacggctgcgagaagacgacagaaggggacactttcacttcacactccccttactcgctcgacctagaactgtgttagggttttacgaaaccaccgaagttgcagaaaaaggaagaaagaagaaaaaatggtggctgacaggagcaagaagccgaaggtctccgagaagggcgaaaacctcgatgaaatcgacggagaactcgtcctctctatcgaaaagttgcaggagatccaagacgagctcgaaaagatcaatgaggaagccagtgacaaagtgctcgaaatagagcagaagtacaatgagatacggaagcccgtctatgataagaggaatgatattatcaaggctattcccgatttctggttaactgcttttttgagccatcctgctcttggtgatcttttgaacgaggaagatcagaagatatttaagtatttgagttctcttgaggttgaagattttaaagatgtcaaatcaggctactcaatcacctttaatttcaatgccaatccctattttgaggatacaaaacttgtaaagacctataccttccttgaagaaggaacaactaaggttactgctacacccataaaatggaaagagggcaagggcatacccaatggagttaatcatgagaaaaaaaggaacaagcgtgctcctactgatgtcagcttcttcagttggtttagtgacaccgagcagaaagatgatatagatgacattcatgatgagggttgcagaattgatcaaggatgatttatggccaaatccacttacttatttcaacaatgaagaacctgacgaagaggaaggtgatgaggatgaagctgatgatgagggaaaggaggatgaatctggtgatgatgatgacgatcaagaggaggatgacgatgagggtgaggaggaggatgacaagtgaaaaatacattatggtcatattacttttttttttttggggttgtaggagtatttaagcgttctttaggggatgatcatggcctccctttgtggttgtcatcttatgtcagctggtggagctaccaaggccagttattggttctctctctgactatagcctatttattgtcctacgaagttatttctggtttcatcccttgtgcactttttcagatactaatgttacatcgtttcttttttcataaccctttgtcgtggaactaaatagtaaaaattgcagtatttagtgtatagcagagtccagtttggtatttcttagcgtgcaggataccatgggaagcatttatcagatacagatgttcaaatgctatttcaatgttatccaatttatttcctcttaccaatgactgttgggattaatctttcaccaaataaaagtaatgctacttgcccagaaaaaaaaaaaaaaaaaaaaaaaaaaaaaaccaaa

SEQ ID NO: 4662 - DNA, 1477 bp, Glycine max
  misc_feature (1)..(1): n is a, c, g, or t
  misc_feature (327)..(327): n is a, c, g, or t
  misc_feature (351)..(351): n is a, c, g, or t
  misc_feature (353)..(353): n is a, c, g, or t
  misc_feature (404)..(404): n is a, c, g, or t
  misc_feature (440)..(441): n is a, c, g, or t
natatattgtgggaatggataagggggtagaatggattatgtaatatggggtaatgtgtggtggggggaagagaaggaggggagaggagaggggggagggtggagagtggaggggtaggtgtagaggagtgaaggagttagaggtataagaatgtataataagggaggtaggttgtgggtgggtggttgaagtaggaaaggaaagggggaagggtgaggaataaggagagaaagagagaagagggaggagggagggggaagaggggaaaagaaggaggaggggggagagaggaaggagggagagggaggggagagagggggagggangagggggggggggggggggggggngngggggggggggggggggggggggggagaggggggggggggggggggggagnggtgccgggccccccctcgaggtcaggtacgtaggnnccccccccccccccccacatcacattcaataacaatggcaatggcatttccgtccgtaacctctgtaactgtggagaacgtgacattccctcccaccgtgaagcctccctgctcccccaacaccttcttcctcgccggcgccggcgtcaggggcctccaaattcatcacgctttcgttaaattcactgccatctgcatttacctccaatacgacgccctttccttcctctccgttaagtggaaaaccaagtctactcaccagttaacggaatccgaccaattcttctcagatatcgttacaggtccattcgagaaatttatgcaggtgacaatgatcaaacccttgacggggcagcaatactcagagaaagtggcagaaaattgtgtggccatttggaggtctcttgggatttatacagattcagaagccgaagcaatagacaagtttctttctgttttcaaagacctaacattcccaccaggctcctctatccttttcactgtctcacccaatggatcattaacgataagtttctctggtgatgaaaccattccagaagttacgagtgctgttatagagaataaactactctcagaggctgtgttggagtcaatgataggtaagaatggcgtttcccctgcagcaaaacagagtttggcctccagattatctcacttattcaaagagcctggggtttgtgaccctcaatctcataagtgaactcattatatcatcaacccaagatcaaaatcccttaccactctgctgtgactttcagtactgtgctactaataaataaagggcaaattacagtttttctaagtgctaaacttctagtaacattattgtgttgttcttactgtccatgtctaagtactgaactgttgtatttgatttttcgttgggaattgaagcaactaattacattacttaaaaatttgcttattttagaattaatcaaacacgctccatcaagtgtgcatgaaaataatataaaataataaataagcacatgacatggctaaggtcttggtc

SEQ ID NO: 4663 - DNA, 1972 bp, Glycine max
ggccagggaattgtaatacgaccccctatagggcgaattgggtaccgggccccccctcgagtcagctacgtaggccccccccccccccgattctccttgaaggcactgcagcataccacaaaaccccttgtccctctctcacgttaaacggcagagccactgcaacaagaagcagcagagttcgccgctgctccgcaaccttaccctatcaattttcgtccttgttttcgtaattgcagcgaagaatggggaagcgtaaggagcggattcagaacccggaacccttcgatccgtacggcgccgaccccgcgaaaacgaagaagcgctcgaaggcgccgaagcggcaccagcaggaggagcagttcatcgctcccaaactcagctccaagatcatgaagcaggcgctaatccagcagaaggaggaggagaaggaggaggcgcccgagaacaacgccgcaaatttattcgaagaggttccggatgtcgaggaagacggcggcgacgacatcgacgactttgccgggttctccgaaacgcagagtcagttcgccgaatatgatgaggaaattaatgaggaggatgagagactaatggaagcatttgcattgaaggagcctggtcagcagaaaacacttgctgacctcattgtccaaagaataaaagaaaaggatgcgtctgttgcttcagaaaatcgacccgttccaaaattggataactccataattgacatatacaagggggttgggactcatctcagcagatatacaataggcaaaatacccaaggcattcaaacacattccctctatgcaactttgggaggaggtcttgtatataaccgaacctgagaattggtctccaaatgctctttatcaagccactaggatttttgcttctaattttggtgcaaaaaaggcagagcgcttctacaagcttgtgttgcttccaagagtgagagaagatataaggaagaacaaacggctgcattttgctttatatcaaactctgaaaaaggctttgtacaaacctgctgcattctttaagggcatactgttttcactatgcgagtcacgcacttgcactcttagggaagcagtcatcataggaagcattatagaaaaggtttctattcctccacttcattcaagtgttgcgctattgaagctttctggaatggaatattgtggcaccacaagctatttcataaagcttcttctggagaaaaaatatgctttgccatatcgtgtggttgatgcagttgttgctcattttacaagatttctcaatgaaaccaggataatgcctgttatatggcaccagtcacttcttgcttttgtgcagaggtacaaaaatgagctgcagaaggaagataaggatagattaaggaatctactggaaaagcaaaaacataaattggttacacctgaaattagtagagagctagaccacagccgcaaccgaggtgaaaaggaggaagatcttatgtcaatttccagtccagtatatgtgataaacaagactattgaagaagatagatttgacattccagatgtaccaatggaggaggattaatttattgtggatttttcatcgctattcacttgggagggagaaaatgtttagagacatgtcctcgtttagtttcacaagggtgcagttttgagcgtcagcaatcttgtactgcaatgcatgggatttataattattatttggccattttatattttttcagtggttttttgacaaatgcaatctttttctgatgtattcttaccttaagtgcactaaaatacaattcaacttgctataatatttctagtgttttaaatgtgaaaaaaaaaaaaaaaaaaaaaaaaaagggaaaaaaaaaaaaaaagaatttcgtgcagcccggggggatccactatttttagagcggcccccccccgggggggacccccccgctttgttcccccttaagggggggtaaattc

SEQ ID NO: 4664 - DNA, 1940 bp, Glycine max
cggaattcccgggtcgacatcggtactcgacaagctcaagcaagcatgcaccgcaagctctcacctttgaagccccaaattttaaaagatataactggcctgacagaaactgagaggatgaaacgtaatagtgtttatccctctgcacttaactgtgatgacatcttgcatgagatcctacttcgaataccaccaccaactatctccaaattaattatcgtatcaaaaatatggttgcgtgtgatatgcagtccttcatttcgtcaatgctacttgaggcaatggggacaaagttttcgacttttgggtttttttgtttgcaactttttatatcttggaagacctcgtgatggctatcgtcgccctcgttgggagcctgcgctcccaatcttgtccacttgcaaagatggtgatgatttgaaactttctggaatcctcaaacatcttgggtacttcattgatagttccaaaggaattattctttctggtttccatccaaagacatattatgtgtacaatactgtgaccaagcaaaagtatgaactcccagaacctcagcagttctataaagttctgtgcatggcattgattgttgaggaatatcttgatagtgacatatgctacaaggtgatccgtgcaagatgtgaatgcaaacttaaggaacgcaacactgtctcaattgagacttattcatcaaaaactagacaatggaagcaatccactctgatgtgctccacaacttttgcattgtgcccaaggacggcagctatggtggttggaggggttgtacactggtttgcaatgtggggaaaacttgccatttatgatcctcgtcttggagacaggtatatagccttgattaaactaccaacaggtgtgttaacacatgagcatgaggaatctgttcttggggagtcatctgatgggcttttgcagtatggccagagcaataatttgggcctggagatatggatacttgagaaggaatcaggagccaactcatctatttactgcaactgcactcatctgaagtacaagtggattctgaggtggagattaaactttaaagtattatggaagcagatgccgtctttaagcacacattctaaagaaacccagatattgtcattccttcctcagaattctacttctatcttcattaggtcggggtggaatattttgctgtgtgatttggagaccaaaacggtggaaattgtcaattatcagggtcgtggaggaaccatttcatgggaatctagcaaagtagttccttactttctaccagcttggccacacacttcctcggtgtcggtgtcatgacaacatggaacaagggaaaacttgtcgtttttcaatctagaggcacttggtcttttccattctgtttttgatctggatatgatgaaaattaagggtctgttttattttctgtgttcacttttaattacaatcttgttttcaatctaaaagttgttttcactagtttctattcaaatctttgaaaacaggaaatagattgaaaacaaggtataattaaaagtaaaaaccaaaaacattttgtcaaagtaaacggaccctaagcttttagcttctttgttctgttttgaatagccatagtattagtaggaccttcatttctcttacagtttcagtggtgtactgtacatgcctagaggttgctgtgttatcaaaacactgaaaaatattactcttctgattactttcactttagtcttttcgtagaagaattcagaattgcagcctgatacagtcacaacaagctgcatataacggttttcaaagatgaagatgcaagactcttgttttacccgtttttgtttggttttgctaaagtagaatttgaatatagttttgtttgattatggtaactatgtatatgaatttcatacattgaaaactgatgtcctttaatttacagt

SEQ ID NO: 4665 - DNA, 1070 bp, Glycine max
cggctcgtacggctgcgagaagacgacagaagggggagtgaacacacacctacgaacaaacccaaccccgaatggcacagaagcagcacctccttctggatctatcccaaatctcaatctccaaaccctagaacattcaactctcccccgttccctttcaaaaaccttccctttccactcttccgccgcgattcgatctccgggctgccttcctttccgcgatttcgatctgaaactcgaggttgcggaattcggaaattgacattgaagtgttcaattggcactgtcaatgccattggtgtggtttgtgaagaatttttctgtggttttttgataccggaaaaacacaatgtcttgggcaggccctgaggatatttacctttctacttcacttgccagctatcttgacaagaaacttcttgtattgctgagagatggtagaaagctcatgggaacacttcgctcttttgatcaatttgctaatgcagttcttgagggtgcttgtgagagggttattgttggtgatctatactgtgacatccctttaggtctttatgtgatccggggggaaaatgttgttctaattggtgagctggacttggagagggaggaacttcccgaacatatgacacgtgtttctaccgcagaaatcaagagggcacagaaagcagaaagggaagcttcagatctgaaagggactatgaggaaaagaatggaattccttgactttgactaatcaaccctcactcatccttcacctccccgtccgcaaatattatagcggctgttcttcagatatttcgttttgtttttctctgcttattgttgcctttcatgggagggttgaatgttcttgaattgtcttttgtaatattagccgcaggaatcaatactatcattcatttgcttttaaaaaaattgccaattaatatagcttgttttcaatttgtaaacgacattctgattaggggatgataggcttcaagttgtgcaaaatagttatgttttaaactcaatgtttttgcaaccttgcattcaacggagctatataatgctatgtttacccgtcc

SEQ ID NO: 4666 - DNA, 1870 bp, Glycine max
catcgtcaaagggcatcagcgccggaagccctatccagtgtggcgcatctcagccaatgatggtgtttttccgaccaaaaataagccaatgacgaatttcctcttcgaaaatactacgaaaatcgaaaaccaatcgtagactaccgatgatgttcatgatgatattaaagagcaaaggtggcctcttttcatgtgaattttgagtgatccattgattcttcagctaccatcttatctgcgccaaaaaggaagagggaaaaagaaattgaaacatgggttggattccctgttctggaagttcaaacagtaagaagaagttgaagaagaaattggagaagatggaagcgcagaacagcctcgttgatccgatcaaagccaccccagggaaattgaagaggaattcatccatgaattccaaagagtcctccaaaaatggaaaccctgagcacattgctgcacagacattctcattccgtgaattggcaactgcaactagaaacttcaaagccgaatgtcttttgggtgagggaggctttggcagagtatacaaggggcgtttggaaaatattaatcagattgtcgcaattaaacaacttgaccgaaatggactacaagggaatagagaattccttgttgaagtgttgatgttaagtcttcttcaccaccctaaccttgtcaacctgattggttattgtgctgatggggatcaaaggcttttagtttatgaatttatgtctttaggatccttggaagaccacttacatgatatttctcctggcaagaaagaacttgactggaacacaaggatgaaaatagctgctggggctgcaagaggattggaatatttgcatgacaaagctaatcctcctgtcatataccgagatttaaagtgctccaacattttgcttggtgaaggatatcatccaaagttatctgattttggtctggccaaacttggtccagtgggggaaaacacccatgtatcaacaagggttatgggaacctatggatattgtgctccagagtatgcaatgaccgggcaactgactctgaaatcagatgtttatagctttggtgttgttcttctggaaataattactggaaggaaagcaattgacaattcaaaagctgcaggagagcagaatcttgttgcatgggccagaccattgtttaaagatcgaagaaaattttcgcaaatggctgatccaatgctccaaggtcaatatccttcaagaggactataccaggcccttgctgttgcagcaatgtgtgttcaggagcaggccaatatgcgtccagttatagctgatgttgtcacagctttgagttaccttgctttgcaaaaatatgacccaaatacacagacagtacaaagctctcgccttgctcctggtactcctccaagatccaagaggggatattgatatggagctgaatgtttgttagctatatgatattctggtgcaaatttcaaacatcttacaacacactgcaagttatagatttgtagatcataataccagttgtcttatggtggtgatctttcttcagagcatagttgctaaaaatgttttgtaaaattttgttctacctctggtgcacagaactgctcctatttccatttggagccaagatagtatatcctcttccttttgttagtttctatttaaaagcaaattgctggattcattattcatgttccttttgtcttactggtgtaccaacattttatagttgtctattcttcttgtcctgggtgtttgtatagttatgaagctctataaaatttggctttttcaaccaagaaaaaaaaaaaaaaaaaatcgcgatctagcggacgcgtgggcggacgcgtgggcggacgcgtggg

SEQ ID NO: 4667 - DNA, 1096 bp, Glycine max
aggagtggattttctcggagcccgaagacgagcctgacccaaaccaaacgaaaacagaacccctttaaaattaaaccctagcctcgcaatttcgaaaattttcaccggctcatccactcctcttattctcaggccagaaaagagaagaagaaatggtgtcaggcgtgagagagataagctgtagcggagagccagtccttgacagtgatagcggggaggagttgatgcaggtgcaacccggcatagacattgtcctcggcgatcttcctcgccagtcccccggcacgctctatatcactaacaagcaagtaatatggttgagtgatttagacaagactaaaggatatgccgttgattttttgtctatctctctccatgcagtctctagagaccctgaagcctatcctcttccttgtttatatacccagattgatacaggagaagctgatgatgaccacactgattctgaatccattcatatcccacaagatttgtccaacatcgcagagatgaggctcattccctctgatcctacacaattggattctctctttgcaatattctgccagtgtgcagagcttaatccagaaccaaatgatggggaaggagaagaacatggttggttttttagtgctgatcagatgggagatgaagaagcagaggaagaaggttatatctctcaccatccagccaactctattggtcactcaaatggaaatcatgacctagctcgtacaatacttgagcttcaaatcaatgatcaaagatttgaggatgcagaagagatggaggataatggagatggcaccaatcgttgagtgtctgtgttttctccaaaatagcattttctagtctgtaccaaaagtcatcgactgattgttgtgtagtttggttctatataatgtaatcctattatgaaacatctgaccagaggcttagagtttttttatcttggaccttcgtttttgttttttttttttcctgcaatagaaagcagctggatactgagtttaaagctgtattatgtagaacaggagaagaaatttgaaaattgtttggatagtttattgagtaagaatttgcaaataattttagt

SEQ ID NO: 4668 - DNA, 1133 bp, Glycine max
gcggtgaccggtgaaggactgaattttaacggctgcgagaagacgacagaagggggatccaaaccaaaacaaaatccctttaaaaccctagtctcgcaatttcgaaatttatcactcactcagtcactctcatcatccactcatcttattctcaggccagaaaagagaagaagaaatggtgttaggcgtgagagagataagctgtagcggagagcctgtccttgacagtgataacggggaggagttgatgcaggtgcaaccgggcatagacatagtcctcggcgatcttcctcgccagtcccccggcacactctatatcactaacaagcaagtaatatgggtgagtgatgtagacaagactaaaggatatgccgttgatttcttgtgtatatctctccatgcagtctctagagaccctgaagcctaccctcttccttgtttatatacccagattgatacaggagaagcggatgatgaccactctgattctgaatccaatcatatccaacaagatttgtcccacatcacagagatgaggctcattccctctgatcctactcaattggattctctctttgcaatattctgccagtgtgcagagcttaatccagaacctaacgatgaggaaggagaaggacatggttgggtttttagtgctgatgagatgggagatgaagaagctgaggacgaaggttatatctttcacaatccagccaactctattggtcactcaaatggaaatcatgacctaactcgtacgacacttgagcttcaaatcaatgatcaaagatttgaggatgcagaagagatggaggacaatggagatggcaaccattattgagtgtctttgttttctccaaaatagcattttctagtctttaccaaaagtcatcaactgtatgttgtgtagtttggttctatatatgtaatcctattatgaaacatctgaccagaggcttagagtggtttatcttagaccttttttttttctttcctgcagtagaaagcagctggatactgagcttaaagctgtattatgtaggacagtagaagaaatttgaacattgtttgcataatttattgagaatgttcatgcagataattagtgtgtttggttctccaaaaaaaaaaaa

SEQ ID NO: 4669 - DNA, 1426 bp, Glycine max
gaaagatcctttaccaatttgaaggataatactaaacaagtagtattattatcgattttattgtaccttccaaacaaaccctgcagcgatttgtttccttccatctccgccgtaccatgtcggaagcaccaccgcctccaactgccgatgcgtcaccgcctccgtactggtgctaccactgcgagaagcgcgtctccgtcgaaacgctcgcgaatctccccgacgtcgtctgcggcgagtgcaagaacggctttgtggaatccatgcccacgccgtcgcgctctcgctccccctccgcctcctccgacgacccctacttcggctcgcagttcctccaggtccttcgcctaatcgctcagtcggcgcgtgacgacgacgcgtcgcctccgccgccgccgagccgctctccggagaacgatttcctcaggatcgagctcggcggctgggacaacgacgaggagaacgaaaacgacgacgataacggcgacgaggagttcgaggaacacgaggaggcggaggatcgctccggcaacgaagatccgcacggaggagacgacgaggatctgagaagaaggaggcgcgagctacttcggcttcggattagggatttggcgactcgtacgaggagcatgcggaaccggatcttggattgggccgagattctgatgggcctcgaggacaattccatcgagttccgcctccagctgccagaatccgaccgctacgtcggaaatcccgaggattacgtcgacgcggcagagtacgaggcgctgctgcagacgctggcggagagcgacgggggaggcaggaggggagcgccgccggcgtcgaaggccgcgctggaagccttgccgacggtgaaaattgcgtcggaaagcgaagccgtggcgtgcgctatatgtaaagatttgctcggtgttggagacgcggcgaagaggttgccgtgcgggcatcggtatcatggagattgcattgttccttggttgagttctcgaaattcttgccctgtttgcaggtttgagctaccaacggatgataaggaatacgaggaagagagagtggttatcgctgcttcttcgaattcgaacggagcttcgagttccggtggaggtggaagtgccattgtttgattccgcttggtatgttccgtcatgctctgctctgctctgttctgttctgccatttgtgtaatatatttcgtggtttctgaatttctctttcttttttttttggtattagtggatttaaatcaaagcttgcgccatgttattatttattttatttgaagcttttattatgtagttggcttcttagctctcggatgatgctaagatacttgtatatagcatttgaatcaatgtgaatgtgatcatatcacactatctcaatggaatttacactttctccctgttaaaaaaaaaaaaaa

SEQ ID NO: 4670 - DNA, 1802 bp, Glycine max
tttttgtaaggaacttgtcaagttcataaatttcctttataatgtcatcaccaatagcatttttttaactatattgatatatgatcgatgatgaaacaaaatttgcaccagtgaggcgctgatgcaccaacacaatttgtttccgtacaccgtcaacacctgtgtaacccacccatgaatctgtgcaacttctgtgtcctctctgaatctgttaacaccaaccatgaagacagatcatcatcaggtcattgcctcatcacaactaagccacaccatttcacgaatcagcaaccatcctacgatcatcaggaggaggagcactgtccaaaggtttggctctgatttttgccgaaaatctcagggcaagagaactttggaaacacaaaatgtttgatgaggttctgattgaagacattatgcgtaatggacgcctgaataacatcagtgttgaatcgattttattgtaccttccaaacaaaccctgcagcgatttgtttttatctccgctccttccatctccgccgtaccatgtcggaagcaccaccgtctcagccaccgcctccaaccgccaacgcgtcaccaccgccgtactggtgctaccactgcgagaagcgcgtctccatcgaaacgctcgcgaatctccccgacgtcgtctgcggtgagtgcaagaacggcttcgtggaatccatccacacgccgtcgcgctctcgctccccctccgcctcctccgacgacccctacttcggctcgcagttcctccaggtccttcgcctaatcgctcagtcggcgcgtgacgacgacgcgtcgcctccgccgccgccaagccgctctccggagaacgatttcctcaggatcgagctcggtggctgggacaacgatgaggagaacgacaacgacaacaacgacgacgaggagttcgaggaacacgaggaggcagaggatcgctccggcaatgaggatccgcacggaagagacgacgaggatctgagaagaaggaggcgcgagctgcttcggcttcggattagggatttggcgacgcgcacgaggagcatgcggaaccggatcttggattgggccgagattctgatgggccttgaggacaattccatcgagttccgcctccagctgccggaatccgaccgctacgtcgggaatcccgaggattacgtcgacgcggcggagtacgaggcgctgctgcatacgcttgcggaaagcgacggcggaggtaggagaggagcgccgccggcgtcgaaggcggcggtggaggcgttgccgacggtgaagattgcgtccgaaagcgaagccgtggcgtgcgctatatgtaaggatttgctcggtgttggagacttggcgaagaggttgccgtgcgggcatgggtatcatggagattgcattgttccttggttgagttctcgaaattcttgccctgtttgcaggtatgagctaccaacggatgataaggaatatgaggaagagagagtggttaactctgcttcgagttccggtggaggtggaagtgccattgtttgattccgcttggtatgctccgtcttgctctgttctcttctgccatttgtgtaatatatttcgtggtttctgaatttcttctttttttgttgttggcattagtggatttaaatcaaagcttgcgccatgttattattaatttatttgaagcttttattatgtagttggcttcttagctttcagatgatgctaagatacttgtatatagcatttgaatcaatgtgaatgtgatcatatcacactacctcaatggaattttcactttctccctgttt

SEQ ID NO: 4671 - DNA, 1485 bp, Glycine max
gcgcccacgcgtccgctgcgagagacgacagaaggggactgcatttcccacctcaatattaatatatttctttccccacaagagagatcatggaaaaggatatcattcatctttctccaacatgggatggtgacaatggcaattccactgagaaaaggctcaggctatttggttttgagctaaacccttctaaagatggttatgccaaagaatctggtgaaggagatgaaagtgtgaactcctctaactcagtttcttctggaggagacaaaactgtgcaagagaaaccctctgccaaagactctgatgagagaaagtttgagtgccaatattgttacaaggaatttgcaaactcacaagccctaggaggccaccaaaatgctcacaagaaagagagaatgaagaagaagaggttgcagcttcaatccataaaccgctacctacaacaccctttccaatccaagcatggctttgctcacccttctgatactccttggttctatgacccctctacctataataactctgagttcacccttagtgaagaacctcagattagcttcaattcaaatgttttagatgccaacttttcttgtgaccagaaatctagttggtattctcttgcatctcacccttctaattcccaacaagatacttgcatgtttactttctccaatgcaagtaataatagtcctttcatcttcaagccttgccacttccctgcttcaaatcagagccataaaagtaaagccctagatcttcaactaggcctcaacttgcagtcaaatacaagaagttccttaagaaggatgtaatttaagtatatataggacacataagttaaattaacagtttccttgaattattttaatgcatcaattctcaaacatctggaaaaaggaaatgagaaaaggtaaaaaaaaaataattacaattcattagagttagttggccttggccactgcagagccaagaagagtctgacaatgaccacctttcagaattcagacagcatatagaattcatacgatgtatttattatagcatgttgtagccctttgatatatattacatacacttctttacattctcagtacatacatgcttagagaacgttctctttcatttcagttatctatttctgtaagacaccaattatgagtttaatttgaagtatcattgtaaaaaaattacaatcaataaaaaaaattggcattgatatgcgttttatgataattattataaaaattaacaagcgattgaatcaccctataaaaattcttcacaatggcaggtcatacaagctatttacccattttattatattcatagaatagaatcatgtgcaacacatgctgatggattgggagaagagagtactgattatataaaattgtgaggggaaatttatccttttaaggcctagttggaatggttcatggcaagagtgaaacacaactccgagggaaccctgaagggggtatg

SEQ ID NO: 4672 - DNA, 1597 bp, Glycine max
  misc_feature (528)..(528): n is a, c, g, or t
tcgaagttcttattcggctcgagatttcctagcctcccaacaaggaggccccctatgctcaacagcagaaaataaataaagggcattggggtgcaatggccattgcaaagagtgcttccattcttattattttgtgctttgcattggcctgcaatgcggataatgctggaaaaccagacccagttgctggtcctgacatgttcagcaataaaaatgtggctaaggatgtgctccttcccggggagcaaatagttaacgtccaggattttggagccaaaggtgatggcaagttcgactgcaccgagtctttcatgcaagcatgggcaaagacctgccatcaatcctctgggccagccaggctttacgttcctgctggcagattcgtggtttcatcaatgtattttaatgggccatgcaatgctacaagtataacaattcaagtacaagggactgttttggctaccacggatatttccgaatatgaaaacggcgactggctctttttccagaaccacaatggcttgaaanattgtgggcgggggcactttcgatggccagggtaaagattcatggcaatacgcccagaattgcgagtcagccaatgacggttcatgcgccaggaatccaagcaacctttatttcagcggaaacagcaacttggttgtacagaatatcagatcagtgaatcccaaaggctttcacatattcgttacaaaatgtacaaacgtcaggttgagaaaacttaagctggttgcaccgggaaccagccccaatactgatggcattcatgtcagccactctgacactgtgataatgtccagaaataccattgcaactggggatgactgtgtctctctgataccaggactcagaaacattttcatcaacaaactcaagtgtggccctggacatggtatcagtatcggtagccttgggaagtatgcagatgagggagacgtgagaggcgttcgtatcaagaactgctcattgactggcacaaccaatggccttagaatcaaggcatggccagagaggtatccaggtgcagcgtcagatgtaagcttcagtgacattatcatgaaagatgtcaaaaatcctatcatcattgaccaagagtatgaatgttatccagactgcaaaaagaagccgtcacttgtaaagctccaaaatattcatttctcaaatataaggggaactacaatttcaccacttgcagtggacttgaggtgcagcgggctattcccatgccaaggtgttacaattcgagacattgacctcaagattggactcaccccaaccacctcaagatgtgtcaatactcgacctctctttggaggcttgctaatgccccctgcatgcgcatagcttcctatccatccatcacattaattttcttaccttacttaattaccagctctgttgttgagaaaaaaaaaaaaaggttttagagctaatgggaatttattatgctaggagcatttttttaataaaatgtttgcactgtaaacaggaatggggaaaataatcttgttttttgaagaatggttttcattctcaattaattaactaaataaattccaaacgccttcagtgcctt

SEQ ID NO: 4673 - DNA, 1394 bp, Glycine max
tcagctacgtaggccccccccccccgagtttggcgaaaacaacgaaaagaaagggaagaaaaagcaaagcaaagcaaaaaagaagaaccaaacaccacccgcgcattcagcttcgcacgaaagtgaacgtatttggtgttttctgatctgaatcaatctctgttctttcgttcgttattcttccttcgtcttccacatgggtcgccttcttctctttctcattattctcagccttgtcgcattctctttcctctcagacgtacaatcagcatcgttcaagattgtgaacaagtgccgccacacgatatggccaggattactctccggcgccacatcaccgccgcttcccaccactggattcaccctcgagagcggcaaatcaaggattgtaaaaatcccgaagtcttggtcgggtcggatatgggcacggaccctctgcggccaagactctgacggaaaattctcttgcgccaccgccgactgcggctccggcaaagtacagtgcgttggcggggccaaacctccggcgacattggcggaattcactctcaacggtgccgacgggttggacttctacgacgtgagtttggtcgacggttacaaccttccgatgctgatcgtcgccaaggacggaaccaggggcgggtgcagtgccaccggctgcctcgtcgacctcaacggcgggtgtccggcggagctgagggtggcgcgttcgaacggcagccgcgggagcgtggcgtgccggagcgcgtgcgaggccttcggggatcctcgtttttgctgcagtgaggcgtactcgacgcctgacatgtgtggtccttctccttattcgttgttcttcaagcacgcttgcccacgcgcgtatagctacgcgtacgatgacaagaccagcacctacacatgtgccaatgctaactatttgattattttctgccccttcccctataccagccaaaaactgttgggagtacgaaaagatggggcacagcttcctctggtaaataaaactatgatgtacttatcaaggctacaatcaggtggttcttcaccatcaggtctgattcaaacgcagagtataatagcttatgttgcctctatttttttggtggctttcttcctcttctgccctttttagcatcctttatggattatgtttgcttggacacttcagggtagacacttacaccaaaaatagctgcttcttagtataaccgtgagctgaaagatatcatataggaaacactgtaaatcctttttcttttttttgttgttgttgtgtatattgtctttttttgtttcccacattaatacgtcaacactgctatagttaatctctggcactggcatccttcagttcttattttattaacagagaggcattaccaaaaaaaaaa

SEQ ID NO: 4674 - DNA, 986 bp, Glycine max
ttctctctcatggtcatcatccacttggagtcttgatcttgtacttcattgccatcacctatgttccacgataccccgccccccgaacgcgcgggccaatcagagttcacacaaggtagtttcagttaagtgtaccaagttaataggtctttatatttagttgttgacatcaacaaagtcatggaggaagttaatgtggttcaaaccaagaatggaactgttgcagtagcttctgcgtttgctggacataaggaagctatacagcaaagggaccacaaatttttaagaattgctgttgaagaagcctataaaggggtagactgtgaagatgggggtccctttggtgctattatagtatgtaatgatgaaatagttgctcgatgtcacaacatggttctgaggaacacagaccctactgctcatgcagaagtcactgttataagaaaggcttgtgaaaagttaaaccagatagaactttcagactgtgaaatatatgcttcttgtgaaccttgccctatgtgctttggagcaattcacctctcacgagttaagaggttggtttatggagcaaaggcagaggcagcaattgctattggattcgatgacttcatttcagatgcattgcgaggcactggattctaccagaaagcacaattggagattaaaagggctgatggcaaagcggcaaacattgctgaagaagtttttgagagaaccaaggaaaaattccgaatgtattaattgaatctccatgtttcctaagccgttaggtatttacacctgatgaaatctgagttcacataaataagctcattgctctcgtgtatcctaaatcctaatgaataaattgtatggggagaagagaatcaaagtgaaatttactttgtgatatttgatgtcattctcatgttaaatccttgtaatgatcgtaaatattgaatggggttttatattttaagacattaaatttattaaagttttcattt

SEQ ID NO: 4675 - DNA, 847 bp, Glycine max
aatcagagttcacataagggagtttcagttaacgtacctagttgttggtctttatatttagttattgacatcaacaaagtcatggaggaagttaatgtggttcaaaccaagaatggaactgtttcagtagcttctgcgtttgctggccataaggaagctatacagcaaagggaccacaaatttttaagaattgctgttgaagaagcgtataaaggggtagactgtgaagatgggggtccctttggtgctattatagtttgtaatgatgaaattgttgctagatgtcacaacatggttctgaggaacacagaccccactgctcatgcagaagtcactgtaataagaaaggcttgtgaaaagctaaaccagatagaactttcagactgtgaaatatatgcttcttgtgaaccttgcccaatgtgctttggagcaatccacctctcacgagttaagaggttggtttatggagcaaaggcagaggcagcaattgctattgggttcgatgacttcatttcagatgcattgcgaggtactggattctatcagaaggcacaattggagattaaaagggctgatggcaaagaagctaacattgctgaagaagtttttgagagaacaaaggaaaaattccgaatgtattaattgaatctctatgtttcctaagccattaggtatttacacctcaggaaatttgacttcatataaataagctcgatgctatggtgtatcctaaatcctaatgaataaattgtactgggagcatcaaaatgaaagttactttgtaatataagatggcattctgttattaaaaaaaagaaatgagccttagcctcctctgccgcttcat

SEQ ID NO: 4676 - DNA, 1341 bp, Glycine max
agggggcgggcggcgcgcgaggaactctttttccttcaagtcactaagataatggcaagcatttataacattccatcacacataaaagcttgggtctattatgaatatggaaacatagaagagattctcaaatttgaatctaacatacccataccagacatcaaggaagaccaagtgctcatcaaggttgtggctgcagcgcttaatcctgcagattatatgagggctcttgggtttttcaaggacactgatgcacccttacctattgttccagggtttgatgctgctggtgtggtggtgagagtgggaagtaaagtgagcaaattcaaggttggagatgaagtttatggtgatatcattgagtatgcttggaataatccaaagaccattgggactttggcagaatatactgctactgaggagaaagtgttggctcacaaaccctccaatttaagctttattgaagcagctagccttcctgcagccatcatcactgcttatcaaggatttgataaaattgagttttctgctggcaaatctatacttgttctaggaggtgctggtggagttggatcccttgttattcagctcgccaagcacgtttttggcgcatctaaggttgcagccactgctagtactccgaaacaggatttgttgaggagcttaggagcagacttggctattgattatacaaaggagaattttgaagaactggtagaaaagtttgatgtagtgtatgatacagtaggagaaagtaataaggcattgaaggctgttaaagaagggggcaaagttgtgacaatagtaccaccggcgactccaccggctataaccttctctgcagtttcagatggtgcggtgttggagaaattacagccttacttagaaagtggaaaggtgaagccagtattggatcctaagggtccctttccattctctcagacagtggaagcatttgcatacttgaagactaatagagccattgggaaagtagttctacatcccatcccataaacatatttaattaagcatataaggagagagcacagccttttaattatgtaatatgaatattgttagtcaagaatgtttagatttagaaacagattgtccttataaggttgtattggtaaattttgtcatatctagttcaaatgaaggtggtgttatcgttcagcaaaaaaaaaaaaaaaaaaagacacaagaagatttgcaggtctcttttgtgagttggaaggctaacattgctttagctggattatgatcaatagagaatcctcaaattcacattttctattgtattaattccaactcaaactatgtttaagaaataaagtttga

SEQ ID NO: 4677 - DNA, 2662 bp, Glycine max
tcagctacgtaggccccccccccgtattttagatttttttttgttataaatgatatagctatttgtggagacttttctgtatttatacctgatgctggttggtaatgcccccattcattttgaattagaattctatatgttattttataagatgttggaattcttaacacgactcatctggatgaaatacatgaaggtcataaagactggtagtgctttatactgaatttggttttggactgaagtgatgatttgttgtgcatctagttggcatttgcttgttgatagtgttatgctttggcctgtgaattttctcccttttggtcattggtggagtgtgctcgctgctcagtttgggctgcttgacagtttacttgcatgaaattataaatgctcatctatgtagcaaggtttttcttaataaaaaaatcaattgcttaaaccgtcttgcaggttggaatatgttatttttcctatggggtatattcagagggaggaggatcaatcacttggattccacaaaaaagatatgtattcccagtttgaatgtgatgccaaatgagaaagattttccaactgctgtaatgactttgtctgaaactcagtgttcacctaagcacatggataaagagtccattgaccaaggtcacaatatggttagtaggaattttgatggcaaagaaactatttttgaccagacacatttgggtttacaagtaaacttagagagacaagacactagaatcaacaccaaatctacattagggattccgaccatcagtacacaaatttgtcaagaagtgaattccactggttcgtccctggtaatgtttttatccttaaatatgttgcttgatagattcaagagtttctgtttgccatttgataaagatctgcttacattctgtcaatattgtgacctgaacttcttctgtaataattgagttagaaattctattttgatcttttggattgtatagagtatagactatgtacagattagtttttataaattgttttatgcttggatgattctacaatgaggttaagttgttaattatataaacttgcccatcattcaattattatacacaaggaaagattaaaacatagtaaaacaggaaaatgctactatgagatttcatgttaaccactttttaggaggagagaaaacaagttataagtgttttatgaagtgtcctgctgctattcatctcattgttttttttttaatatttttggtttgtgcagagagacagtgtaccaaagcatcgacaatacataaagtctaaacctcctgaagcaatgggaactagtgtaagtagtaggattgtggaaacaaaaactaatcatgatatttctgttaagcaagagaactctttgtcttcggggatccattccgttggttgccaagagatagatactgcaagcaatatcagtaaggataaaattttggacagaacaaacaatggtgagaatcagcaaaggcctaaacggaaacagatggaagatgatctcgatattaacgtggaggcaacgtttcagagagacctgactgtgaaagccgtcaactgtcagctacctaatgataaaaaagttaagcatatagatctttcagatacagttgtggaggcttctgcagttagttgtcagaaaatgccttggaatgaggtaaatggcaaatttgaagacagagaaagttatagcagggagctgcgaacaagttttggtggaattcacggatgttatgattctggagcctgggaatcttttaatggtagttctgcatcacttgtaaatgatcttggtttctgttctttaggggaggacaaacggtgtaaagaaccttgtgatgagaaaatcatccacgaggactttggagcgatggaaagaaccttctttcctgttgatactcgtaaaaaaaatgacttggggatggtgctgaatagcgagtcactgaatgaacctcgtgagtacgtggaccaagttcaagttgggattccaaatctagagcttggtttggggggtgaaacgaaaccctcacacaagggtatgctgcctttctttgttggtgcggttcacaagaaaaataaccaggaaaagattccagaaatattgacatacgagcgagaggatgagaacgttgctgcatctctttccctgtctctatcttttccatcttcaaacaaggaacacgtcaaacctgttccaaaagctgagcctttgccgggtgggcataatgtgaattcgccgtatcttctttttaggagattcacggacaaataaatatgctgagttgctagttctaaacatgtacattatcttgttccatcatgtatgtaatcgtccagtgagtccttatacaaaggagacgtccaactgttcatgtgcccagcaaaatagtataagttttttctttttacttctttgttaaatacatgcttttgtactgtctttttggtttcagaacgcatagctacggctatttgtatatagagagaatttcagccgatataatttcattaatgttaggacattgcggatgactattttttatgacagggtttcctttgttccttgcttcatcatcgctctttccagttgtaattaatgagcactaagtgaatttgtttactaaatttttctgttccgttgcccgcgt

SEQ ID NO: 4678 - DNA, 2287 bp, Glycine max
  misc_feature (1)..(1): n is a, c, g, or t
  misc_feature (95)..(95): n is a, c, g, or t
ntaatgccagttgaggagaaatcctcaactgccattttaactatgcctgaaacacatgtttgccaaagtgcaaggatgaagaatcaaatgattgntgataaagtatgcaatgcatttctcccatccacttccagagaccaacatcagactagtggaagtaggaatgttgatgtcaatgaccagacacatttgggttcacaagtaaacttagagaagctagatagtaggattgactcaaaatctacatcaagggttcctccgcgccgtacgcccccccccccaagaaatgaactccactggttcatccctgaaagttagtgtccttgaacaagaacagtgcagagagtctaaacctcctgaagcaatgggaaggagtgcaactagtaggattgtggaaacaaaaactgattctgatatttctgtcaagcaagagaacactgtgtctttgtttccttctgaaaaaggtgctgcaagcaatattggtaaagatacaatttcagagaaaatgaacagtgatgaagaccagcagaggcctaagaagaaacaagaagaggattgtccgtatattgatttggaggcaaatattgaaaatcaagaaacagttgctgcaagcaattttagtagggatcaaaattcagtaacaattgttgttgatgaagatcagcaaaggcccaagaggaaacagaaagatgatcattatattgacttggaggcaacacttgaagatcaagaaacaggtgctgtaaccaatatatgtgaggataaaacttcagaaaaaatggacgttgaggaagattggcaatggcttaagaggaaacagaaagctgatcactatattgacttggaggcaacttttcatgaagacccaagtgtagaagggatcaactgtgggctacctaatgataaagttcagcatgtagatctttctgacacaattatgcagggttctgctgtcagttgtcagaaaataccttggaatgagggaaatgccaagttagaagacagagaaagttctggcaagaagttaaagacaggtttcggtgggatttatggttctggaggtagagactcttttaatgacagttttacatctcttggaaataatcttggctcctgttcttcagttgaggacaaaggatgtgaggaagcttgtgatgagaaaatcatccgggaggacttgggaaccctggaaagaaccttctttccagttggcacacagaatattaccaactcgctatcagtgatggatagtatgtcaaccaaaggggttggtgagtatgatgaaggatttcaagatgggattcccaatctagagcttgccttagggggaaaaacaaaaccaccaccagctgcgcctaagggtatgctgcctttcttagttggggcagtagacaggcaaaataaccaccctgataacttgggagacaggcaggaggatgaaggtgtcgctgcatctctttccctctctctgtcctttccatctccaaacaaggaacacacaaacgctgcagagcttttgcctgatgggcagcgtgtgaacaacccgtttttcctttttgggagaaaataaatctgctggctgcttatgtgttgcttccaatcatgtaaattatcttatcttgttcctgatggcccagcctgtatgatagatagatataatcttccagcctctctccctacagaaaggagccattgtcctcaacaagagtcaataagtttttttttttaatcctttgttacatacatgtttttatgttagtttttttttgttcagaatgcatagttaacggctgtttgtatatatagagagaattgaagccggcataatttcagatgttacaaggaacttgcgggtgactatttttatggcagggtttcctctgttcctggctccattctgtctttttttcatcgttattcttggtaagcgcttaattattgaacaagttctatactgaaaatgaaactcctgttgctgaaagtgaacttaatgattttggtgtgtggtttgttcctctcgatgattacgaaggactaatctgaatgacaatgccagtgttgtaatgctgctgttttgtttttctgcaatgcgatttgtggcatactggcatatgcattaaacaccgcgttgagttgaaatttaaaccaccaccgttgcaacaaaagaggtgggaattctgtaactcaccagcttctctagcagttacttattttgacatgtactggtttgaggaagtcccccatcaattgattcttctttggatgaataataccagtattcttgggt

SEQ ID NO: 4679 - DNA, 837 bp, Glycine max
tcgagtcagctatgtaggcccccccccgaacaaaaacccaaaaaacatgcatttgttcctgaatttgttgacgaatcctaattcctaactaattctactcaacagtacattcaatccaccgctttgttcaactcaaatcctcaatcgctcgcgatttcttcttctggaattctcaaggatctcgataaatggcaaccactgcctgtttcatcattgttagcagaaatgacattcctatatatgaagctgaagttggagtagctgctaaaagggaggattctgctcagctgcatcaatttatccttcatgctgctctcgatattgttcaggaccttgcatggactactagcgctatgtacttgaaatcagtagacaggtttaatgaacttgtggtgtcagtgtatgttacagctggtcatacccgatttatgttgctacatgactcccgtaatgatgatggtatcaagagcttcttccaagaggtgcatgagctttacataaagactctccttaatcccctgtacttacctggctcccggatcacgtcatcacattttgatactaaagtccgagcccttgcacgaaagtatttgtagaaaccactaatttgtctgtggttgatagttcatatagcactgtggcccgactcttaaccttgttcgttcttgattacatttgaaaagctgtatttctttttctttatttccatgatttggcggcaagagtagatttgctgctgtctataatgtacctcagtcattagcaggtggtgcctgtttttgctaatgaaggcgattgttgacgagctatttaattgctagaggcttcatttgtgac

SEQ ID NO: 4680 - DNA, 1764 bp, Glycine max
  misc_feature (1756)..(1756): n is a, c, g, or t
aattaaagctagcttaaaattaaagctaaaagaagaaaaagaaaaggaaaaagctgcggcaatagagagtagagagtaaacagaaaatctgaggcgcgagtggctggtgaaggcagcgactgcgagggaagggaagcatctttagctccaaatccaatggcggatacctcaagccgatcaagagacctcgacaagctccttctccgccctggcaatctcgtcggtcctaggttcgaacctggccctgagttgcgagatgaccttcaggccttcgccaaagtgttggtggttggggctggtggcttgggttgcgaattgttgaaggatttagccctctctggtttccgaaaccttgaggtcattgacatggatcgcatagaagttaccaatctcaaccgccaattcttgttcagacttgaagatgttggcaaacccaaagccgaggtagctgccaagcgtgtcatggagagaattagtggtgtggaaatcgtgccgcacttttgcaggatcgaggacaaggaaattgaattttacaacaattttaacattattgcccttggtcttgattccattgaggcccgcagttatatcaatactgttgcctgcagttttctagagtacgattctgatgataatccacaagaagagacaatcaaacctatggtggatggtgggactgaaggtttcaagggccatgctagggttatcatgccagggattacaccatgctttgagtgtactatctggctttttccacctcaagtgaagtttcctttgtgtaccctggctgaaacccctagaactgctgctcactgtattgaatacgcccacttgattaagtggaatgaggttcatggcggagtggcttttgatccagataaccctgagcatatgaaatgggtctatgacgaggctgtcaagagggctgagctttttggcattcctggggttacttattctcttacccagggtgtcgtgaagaacatcataccagctatagcttcaacaaatgcaattatatcagcagcatgtgcactagaaacattaaagattgcaacagagtgcagcaaaactttgtcgaactatttaacgtataatggatcagaaggcctccatactgaagttgcagaatttgaaagggacaaggactgtcttgtgtgtggtcctggtatacgaattgaactagacccttcaatcacattgcaaaagttcatggatcttctggaagaacatcctaagttgcgattatcaaaagctagtattacacatcgaggaaagaatctgtacatgcaagctccccctgtattggaagaaatgactcgatcaaacctgaatctatctctttttaatctcatgggtaaattgcccaaggatgttgtgcatgtgaatggtacaacaatcaagaacgaccaaaagttttcctgtttgagaaaattacgtgttgttttcaagggagttgacggggttacagatatggatacagctggaggagcataacttaccacatccaaacatgttttgctgctagaattttttcggctctatatgcatagtttatgttagatatcatagcttgtttccaatattggtcaggtaaggttttacagtttctacctgtcaaagttattcatagacgagcaaaactgtaacacttgatacctgtttcacttaatgattcgtgaccttctcaatgctctaaaaaaaaaaaaaaaatatgagcatgtcgacccgggaggtacggtacccaatgcgctgntataggcg

SEQ ID NO: 4681 - DNA, 953 bp, Glycine max
  misc_feature (936)..(936): n is a, c, g, or t
tttataacagcggtggaaggtctccttctctctcaatccacaaggatatataacagcgctagctcttgttaaattcttctctaccttactactccctcactttgtgttagaatcatcatgggtttgcaaaaccaattaaacgacgtgtcgtcgggttcgattccgcttctggtgttggcgcagatagccacctgcgtcaactacctccgctccatgcttttcgcgcttttgcaaaccctaggtctcagccgattccactccgaccagatcgtcgacgagcgcttcctcgccgccgtcggatccggcctcgccggacttatcatgctctccgatcagctcaccctcagcagccaattcttccaccatcaccacggcaccgccgccggccacgaccacgaccacgaccaccacccctgcgtcgtgtgccaggccaccttcgaggacggcgaccaggtccgcatgctcccctgccgccacgtcttccaccgccgatgcttcgacggctggctccaccactacaagttcaactgcccactctgccgctctccgctcttctccgacgagcgcgtggcactcacggagcgccgcctcggccagcaactcatctcttggttctccctacactgatgcggccacgtttcgttttctgaacctccacttttacggttttacccctctcacgcgatcactttttacagagctgtacgcgggtttctttttctgtttttcttttccttgtttttaatattagttttttttttcccatagggtattaggctagatttatttatttttctctttttaacagtaatttttctgaaggtattttttgaagggttttcttccgtctgaaaatcctttttgagatgctgtaaattttggaactctgtgtttatggtaataatcggagatagtagatgtaaagttttcatgaanacaaaaaaaaaacacca

SEQ ID NO: 4682 - DNA, 969 bp, Glycine max
tccgggtcgacccagcgtccgtacgtcagctacgtaggcccccacccgaaaactagaaaggagaataaagaaatgggcgcaacgaagagtggacgagttaaacttggaacacaaggccttgaggtttcaaaattgggattcggatgtctgggtcttactggagcgtataatgagcctctcccggaacaggatggcatatctattatcaagtatgcattcagtaaaggaatcacattttttgataccgctgatgtttatggagccggtgctaatgaaattttgcttggaaaggctctgaagcagctacctagagaaaagatccagctagccacaaaatttggtattgcgagattagatttttctaacatgctgatcaagggttcgcctgaatatgtgcgctcatgctgcgaaactagcttgaaacgtcttgatgttgaatacattgatctctattatcagcatagggtggacacatctgtacctatagaggaaacagtgggtgaacttaagaaactggtggaggagggcaaagtgaggtatatagggttatctgaagccagctcagatacaataaggagagcgcacgcagttcatcccatcacagctgtgcaaatagagtggtctatatggactcgtgacattgaggaccagatagttactatctgcagggaacttggtattggaattgtatcatatagtcctcttggtcgtggtttctttggcggcaaaggaattctggaaaatgtgtctgcaagtagctccctgaaagtacatccacgctttcaagccgagaacatggacaagaacaagaatatatatgaacgaattgaaagccttgcaaagatgcatcggatcactcctgctcagttggcattagcgtggctcctatcactatgcgaggatgtcgtacctatgcctggtactactaagattaatgatcctgattcagatatatgtgccttaacagtc

SEQ ID NO: 4683 - DNA, 1614 bp, Glycine max
  misc_feature (65)..(65): n is a, c, g, or t
  misc_feature (74)..(74): n is a, c, g, or t
  misc_feature (82)..(82): n is a, c, g, or t
  misc_feature (100)..(101): n is a, c, g, or t
  misc_feature (160)..(160): n is a, c, g, or t
  misc_feature (174)..(174): n is a, c, g, or t
  misc_feature (181)..(182): n is a, c, g, or t
  misc_feature (200)..(200): n is a, c, g, or t
  misc_feature (247)..(247): n is a, c, g, or t
  misc_feature (267)..(267): n is a, c, g, or t
  misc_feature (276)..(276): n is a, c, g, or t
gcattttgttttctgaatcgtataacaatgtggagattcctcgagcgaaacttggaacacaaggnccttgaggnctttaaangcagctacctagagcaannaggtccagttagcaaccaaatttggcattttcaaggggatggattttcctaatgtacanagtcaaaggcacanccagagnntaggtgaacttaagaaancttgtgaagaagggtaaagtgtaggtatattgggggttatctgaagnccagtccagatacaataagngagagcacnatgcagttcatcccatcactgctgtacaaatggagtggtccttatggagtcgtgacattgaggacgaaatagttatccagcaggtgaaaggcagggacgagtcgaaatggctgaagcagagagtgtgcagattcctcaagtcaaacttggaactcaaggccttgtggtttcaaagttagggttggggtgtatgacccttagtggacgctataatgatccacttcctgaagaggaaggcatatctgttattaagcatgctttcagccaaggaatcactttttttgacacatctgatctctatgggctcgaccatgctaacgaatttttgctcggaaaagctttgaagcagttacctagagaaaagatccaggtagccacgaaatttggcgttgcagtagcaaaatttcctaattttcaaatcaaagggacaccggagtatgtgcggtcgtgttgtgaagcaagcttgaaacgccttgatgttgaatacattgatctctattatcagcacaggattgaccaaacagtacctatagaggaaacagtgggtgaacttaagaaacttgtggaagagggtaaagtgaagtatatagggttatctgaagcgagtccagatacaataagaagagcacatgcagttcatcccatcactgctttacaaatagagtggtccctatggactcgtgacattgaagaggagataattcctctctgcagagagcttggcattggaattgtaccatatagccctcttggtcgaggcttttttggtggcaaaggagttctggaaaatatgcctgcaagtacagtcctgactttacatcatcctcggttccaagcagagaacataaacaagaacaagagaatatatgaacaaatagaaagccttgctaagaaataccagagcactcctccccaattggcattagcttgggtacttcaccaaggcaacgatgttgttcctattcctggaacaactaagattaagaacctggatcaaaacatcggtgcattatcactgaaatttacagaaagtgacttgagagaaatttccgaggcagttcccatacatgatgtggcagggtctcaatacttctttggaaatgataaagattcttggaaatttgccaacacacctccaaaagatccgagggtctccacttgaagcactctaaatcctttttagttggataattttctattttgtgagcggtcatatgtcagatgcaaaagctagtacgactataagctactaatgcattctgttgatgtagtagataaggatattaataaacttcaatttgagtttcttttctgtttagcaaaaaaaaaaaaaaaaaa

SEQ ID NO: 4684 - DNA, 911 bp, Glycine max
ctagcccctctgacgcacagaatgacgaagacaaaaagcggattcctttcctatataattcagctacgtaggccccccccccggcaatcagcaaccaaaatgactcaagcccagattcaaccagttaaacttggaacccaaggctttgaggtttcaaaattgggattcggatgtatgggccttactggagcgtacaatgaccctctccaagaacaggatggcatatctgttatcaagtatgcgttcagtaagggaatcacattttttgatactgcggatgtttatggagccaatgctaatgaacttttggttggaaaggctttgaagcagctgcccagagaaaagattcagatagccacaaaatttggtattgcttcacgaggttttcctgatatgaagatcaagggttcgcctgaatatgtgcgatcatgctgtgaagctagcttgaagcgtcttgatgttgaatacattgatctctattatcagcacagagtggacacatctgtacctatagaggaaacagtgggtgaacttaagaaattggtcgaagagggtaaagtcaaatatattggattatctgaagccagcccagatacaataaggagagcacacgcaattcatcccatcacagctgtgcaaatagagtggtctttgtggactcgtgacattgaagaagagatagtccctctctgcagggaacttggtattggaattgtaccatatagtcctcttggtcgtggcttttttggcggcaaaggagttgtggaaaatgtgcctacaaatagctccctgaaagcacatccacgctttcaagccgagaacttagacagaacaagaatatatatgaacgaattgaaggcctttgctaagagcatcaggccacttctgcccagttggcattagcatgggta

SEQ ID NO: 4685 - DNA, 902 bp, Glycine max
ccacgcgtccgcccacgcgtccggacgcccggaccgggcaatcagcaaccaaaatgactcaagcccagattcaaccagttaaacttggaacccaaggctttgaggtactattaactacattacttgctcttattttgataattgatacaattaatctcattctaggtttcaaaattgggattcggatgtatgggccttactggagcgtacaatgaccctctccaagaacaggatggcatatctgttatcaagtatgcgttcagtaagggaatcacattttttgatactgcggatgtttatggagccaatgctaatgaacttttggttggaaaggctttgaagcagctgcccagagaaaagattcagatagccacaaaatttggtattgcttcacgaggttttcctgatatgaagatcaagggttcgcctgaatatgtgcgatcatgctgtgaagctagcttgaagcgtcttgatgttgaatacattgatctctattatcagcacagagtggacacatctgtacctatagaggaaacagtgggtgaacttaagaaattggtcgaagagggtaaagtcaaatatattggattatctgaagccagcccagatacaataaggagagcacacgcaattcatcccatcacagctgtgcaaatagagtggtctttgtggactcgtgacattgaagaagagatagtccctctctgcagggaacttggtattggaattgtaccatatagtcctcttggtcgtggcttttttggcggcaaaggagttgtggaaaatgtgcctacaaatagctccctggaagcacatccacgctttcaagccgagaacttagacaagaacaagaatatatatgaacgaattgaaggccttgctaagaagcatcaggccactcc

SEQ ID NO: 4686 - DNA, 682 bp, Glycine max
  misc_feature (7)..(7): n is a, c, g, or t
acgcgtntcgccacgcgcgcgaataaacaaaacaaacacaaccaaacccagagcccattcgatttggatccgatgggtgatatagtgaaacaaatattggcgaagccgatccagctggcggaccaagtaaccaaagccgccgacgaagccagctccttcaagcaggaatgcggcgagctgaaggcgaagacggagaagctggcggcgctgctgcgtcaggcggctcgtgcgagttccgatctctacgagcgtcccacgcgccgcatcatcgacgaaacagaacacgtcctcgacaaggccctcgccttggccctcaagtgccgcggcaacgccctcatgaagcgcgtcttcaccctcaaccccggcgccgcgttccgcaaggtctccttgctcctcgagaactccatcggcgacgtctcctggctcctccgggtctccgccggagacggcggcggagactacatcggcgggctccctccgatagcgacgaacgagccgatcctctgcttcatctgggagcagatcgccgtcctccacacgggtaccttggaggaccgctccgacgccgccgcgcagctggtctccctggccagcaacagcgaccgctacgggaagctcataatcgaagaaggcgggtgggcccactcctgaagcttctgaaggaaggaaaagccgaagggca

SEQ ID NO: 4687 - DNA, 2181 bp, Glycine max
ggctcgaggtccgcaggtatatgggtacaataactggcataagtgatttggattctgttcggtggccaaattctcattggcgctctgtcaaggttggttgggatgaatcaacagctggagagagacaaccacgagtgtctctgtgggaaattgagccattaacaacattcccgatgtatccatcattatttcccctcagactgaaacgtccatggcatcctggcacctcatctttgcatgatgggagagatgaagctactaatgggctaatgtggatgagaggtggacctgtagaccaaggtctcaattccctaaattttcaaggagctggtatgttgccctggatgcagcagagactggatccaactttactaggaaatgatcagaatcaacagtaccaagccatgttggcagctggtttacagaacttaggtagtggatatctcatgaagcaacaaatgatgaattttcagcagccttaccactatcttcaacaatctggaaacagtaattctcctttgcaacttcagcagcagcaaccaattcaacaatctgtgtcttctaacatgctgcagccacaagctcacgtgttgacagagaacctctctcagcacctccttcagaaaccacataacaatcaagaagtccaagcacaacagcagcaacatacttatcaagactcgctcttaattccgagtgatcaactccatcagagacaacactctggcattccttcaccatcatattcaaaaccggatttcttggattcgagcatgaagttccctgcttcagtttctcccgggcaaaacatgcttagttcactttgtcctgaaggaagtggcagtctcttgaatttatcgaggagcagtctgtccttgctgactgaacagttaccgcaacagcaatggactcaaaaatatgcacctgtgcaggtcaacacctatggaggcactgtgtcacatgcacaatattctggaaaagattctgcaatggtgctaccacattgtaactcggatgcccaaaattctacgctttttggtgtcaatattgattcatctggccttctccccatcacagtccctggttacaccacctcgtctgctgacactaattcatcaacaatgccattagcggattctggtttccagggttctctatatggttgcatggattcatcggagttgttgcaaagcgcagggcatgttgacccagaaaaccagagtcaaacctttgtcaaggtttacaaatcagggtcagttgggcgctcacttgacatatccaggttcagcagctatcatgaactacgcgaggagttggctcagatgtttggaattgaggggaagttagaagaccctcttagatcaggctggcagcttgtgttcgttgacagggagaatgatgttcttctccttggagatgatccgtgggaatcattcgtcaataatgtttggtatatcaaaatactttcacctgaagacattcagaaaatgggggaacaagcggtagaatcccttgcattaggttcaggacaaaggctaaatggcactggtgccgagtctcaggacatagtttctggaccaccatcaattggctcacttgagtactgagaaaattgaaacatgtattccttcagaccccatggtcaagagaatttctctacatgtttttattacttaagttggaatatgttgtgtatgatctgttcccccctctcaccctcattattactatcagcatttgaagaaaaatatacatttatgattaaaaaaaaccttaggacatgcttctgtgccaatttgaacttggggcactgcaagctagagttagtgttactgctattttagcataatattttattcaacttttgcatgaactaatgtactctagataggaaactagagaaggctgtttatgcttttgaactgtctatgtattctaaaatgccatcacttcccagttaaggggtcgaacttttacctcaaaaaatgtatgagtagtattttactatattgccattgaaaccatcaacccaccatacgacatgtctcttaaatgctactattttgtagctctataaaaaaaaaaaaaaaaaaaaaaaaaaaaaaaaaaaaaaaaaaaaaaaaaaaaaaaaaaaaaaaaaaaaaaaaaaaaaaaaaaaaaaaaaaaaaaaaaaaaaaaagg

SEQ ID NO: 4688 - DNA, 2031 bp, Glycine max
tattattctgagtgtggtgcaagccacctatgtactatttttcctttacttatgcaaaagctacctttgtactatttttcctttacttctgcacaagccaccttcgttttgcaggtacatgggtacaataactggcataagtgacctggatcctgttcgttggccgaattctcattggcgatctgttaaggttggttgggacgaatcaaccgctggagagagacagccccgggtatcattatgggaaattgagcctttaacaacgtttccaatgtatccatctctatttcccctcagattgaaacgaccctggcatccgggcacctcttcttttcatgatggcagagatgaagcaactaatgggcttatgtggctgaggggtggacctggagaccaagctctcaattccctgaattttcaaggttctggtttgttgccatggatgcagcagagaatggatccaactttacttgcaaatgatcataatcagcactaccaagccatgtttgcatctggtttgcagaacttagggagtggagatttaatgagacaacaaataatgaattttcaacagccttcaattatcttcgacccgctacgtacgcccccccccctttgcagcttcagcaaccgcaagcaattcagcaatccgtatcttctaataatattctacagccacaagcccaagtaatggcagagaacctgtctcagcacctccttcagaaatcacacaacaatcgagaagaccaaacacagcagcagcagcagcagcggcacacttatcaagatacagttttacttcaaagtgatcagctccatcagaggcaacactctggtctaccttcaccgtcatattcaaaaccagatttcttagattcaagcatgaagttccctgcttcagtttcaccaggacaaaacattcttggttcactttgtcctgaagggagtggtaatctcttgaatttatccagaagtggtcagtccatgctgactgaacagttacctcaacaatcatgggccccaaaattcacaccgttgcaggttaatgcttttggcaactcaatgcaacatgtgcagtattctggaaaagataccgcaatggtgccaccacattgtaactcggacacccaaaatcctattctatttggggtcaacatcgattcatctggtcttctgctccctacgactgtcccgcgttatactactgcatcagcggatagtgatgcatcagcaatgccattaggagagtctggattccagtctcctttatatccttgtggtcaagattcatcagagttggtgcaaagtgcagggcaagttgaccctcaaaaccagacacgaacattcgtcaaggtttacaaatcagggtcagttgggcgctcacttgacatctcccggttcagcagttatcatgagctgcgggaggagttggcacagatgtttggtattgaggggaaattagaagaccctcttagatcaggctggcagcttgtattcgtcgacagggagaacgatgttcttctccttggagacgatccgtgggaatcatttgtcaataatgtatggtatatcaaaatactttcacctgaagatatccataaaatgggagaacaagccctggaatcccttggtccaagtccaggacagaggctgaatagcactggtgcagattctcatgaaattgtttcaggactaccatcaattggctcccttgaatactgagagaattttaacatgtatttttctctcaggtcctacggttaagaagactattacatatccacatgtttagtacttctgtttgaacactacttttcgaccttgcatatctgaatcaatatatactgtattgtctgtttcactttcaaaaacatcgttattatttcgtagaggattgttgagattttcaggacaaaaaatctatattatatatatgatgagaaagaaacctaggacaaacttttgtgccaatttgtaacttgtgctctgaaagctagaaatagtgttactactaaaaaaaaaaaaaaaaaa

SEQ ID NO: 4689 - DNA, 1222 bp, Glycine max
tcgagtcagctacgtagccccccccccccaaataaatattctatgaaatggaggttcccaattatatatatatttataaggaaatactagattttgatatactattatttaataattttcctactcgactaaaatgaaaaaaaaacactaaaataatgatatcactaatattattagctggtttttttttttttgtttgttgaatctttagttgactgaatttagtatttgactaaaaaaagaatcatatcacaaactaatttgcctgtaactcattgctttaatttgcttttaataattgtcagcaagtctagctttttaatgattagatagatagctaacaaaaataccacactggatacatatgaaatcaatattaagtttaaagagatgcaatacgcaatcgatttgattaatgaatttcaaatgttctgcgttaatttattcaattaccttttaaattgaatgttttcattcctgggctctgccactcactactgtctcttccctaaataacttcagaaaaagctactgatttttcttctcatcgaggttgttttctttgctgccgttgctcttataacaatgctggcattgcatggcactcgccaaaggtcgttagtggttggtgttctctctgatatcttcaatgttatgatgtatgtctcccctcttacaattatggcaaaggttataaaaactaagagtgtgaaatacatgccattctggctctctctggctaacttccttaatggtgcgtgttggacaacatatgctctcatccacccatttgacctttatgtcctgatcagcaatggtatcggagcaatctctgggcttattcagcttatattgtatgcttgctactgctcttgcaagagtaaaaatgatgaggatggtgatcaagatttgaaaccaagtggctttcagctctctaacttaaacggaagagctgcagtagtctgatgtcacatatatcaacatccgtttaaaacctttctttttcttttttctttttactccttcttgaccttatatttaatcctttctttttctttttttttaactccttcttgaccttatatttctatctgtcctttaaatttcaatgtcaaatatgacatttatatagatatagatacatatatacgatggtgttgctttttataaatatgcgtgtgatgcatactagttaagcactagtttggattttcattttcaa

SEQ ID NO: 4690 - DNA, 1439 bp, Glycine max
aaaaaaaagaaaactaaacgagataaagacaatacgaaagagagagtgaagcatcgtttcaaattattcgtccgtagccgacgggaacatgcaatatccattatggtgaattgggtctataaataaaggctggtcaagtgtggcaaaaaaaaagaacaaggcagagagagagaaaaatgaagtctttccatctcacagtgacagctttgtgctgtgtagtggttgtgcttggagtgcttccactctccctagatgcacaactagatccctccttttacagagacacttgtcccagggttcactccattgttcgtgaagtcgtcaggaacgtttcaaagaaagatccccgtatgcttgctagtctcattagacttcactttcatgactgctttgttcaaggatgtgatgcatcagttttgttgaacaacactgccaccatagagagcgagcaacaagctctgccaaacaacaactcactaagaggtttggatgttgtgaacgacattaagacagcagtggaaaaggcttgtcccggcgtggtttcttgtgctgatattcttacccttgcatccgaaatatcttctgttctgggtggtggtcctgattggaaagttccattgggaagaagagatagtttaacagcaaaccgaaaccttgcaaatcaaaaccttccagctccattcttcaacctatctcgacttaaatctgcctttgctgttcaaggtcttgacaccactgatctagttgcactctcaggtgctcatacattcggcagagctcactgcaatttcattcttgaccgattgtacaatttcagtggaactggcaaacctgatccaactcttgacacaacttacttacaacaattgcgccaaatatgccccaatggtggacctaacaaccttgtcaattttgaccctgtcactcctgataaaattgacagggtctacttctccaatcttcaggttaagaagggcttgcttcagagtgatcaagagctgttctcgacacctggtgccgataccatccccattgtcaacaggttcagcagtgaccagaaagttttctttgacgcctttgaggcttcaatgattaagatgggtaacattggtgtgctcactgggaagaaaggagaaatcagaaaacattgtaactttgttaacaagaaatctgttgaagttgatattgctagtgtggcctcagaagaatcatcaacagagggtatggttacctcaatctaaatggattaggatgaatagttttcacttaaaatggtgtgattagagaccacaaataaagaagctataggcacattcatgccatgtgcccgccactacttgttgtgtactgtgtttgtgttacactttctttttttaattttgaatcatgcagtgttcataaccaaaaaaaaaaaaaaaaaaaaaaaaaaaaaactcgag

SEQ ID NO: 4691 - DNA, 2022 bp, Glycine max
ccacgccgtccggaaaccggttaggcgctttccggcccgcccggggcgacggtgcctccccttttcttcccctctcttcctcttctcccactgctttccccgtctccaccgctcttcgttttcttcttgaagcttttcttcttgacttccgcacttcgatctccccctcaggcgccaccacgacgccgccgccgccggcggcggcctccacttgcccagctacggtttttatcccttccgcagccacccatactcagaatagactacaacggtgatttctgcaagggcttttcccccttctgaaacagcttcactttcttaaagagtttctgtagttggggtggctagcaatggaagttttgctgccaaaacttccttctttcaaatttccaagtgccacttattgctgctcgatcactagtaggagctcttcatatgtcagatttgggttccgtcgtgtatctgtttgtgcatcaactgtcaatgaaacagtagctgaacctacagttggttcctcttctttgggtcactccacgcgaccccatttccctatacttcaccaggaagtaaatggctcaaaacttgtttacttagacaatgcagcaacttctcagaagcccaccactgtgttgaaggcattgcaaaactattatgaagcttacaattcaaatgtgcatcggggcatacatttcttgagtgcaaaggccacagatgagtatgaatcggctagaaggaaagttgcgtcttttataaatgccactgattccagagagattatattcacaaaaaatgcttctgaagctatcaatcttgttgcctattcttgggggctgtcaaacttaaaaccagatgatgagatcatacttacagttgctgaacatcacagtgcgattgttccttggcaaatagtagctcaaaaaacaggggctgttttgaattttgtggatctaaaccaagatgaaattccagacatagacaagttgaaagaaatgctctcaaggaagaccaaaatagttgttgtccatcatgtttcaaacgtgcttgcttctgtccttcctattcaagatattgcacaatgggcacatgatgttggagcaaaagttcttgtagatgcttgccagagtgttccacacatgatgattgatgtccagagccttaatgctgattttcttgtggcttcttctcacaagatgtgtggccctacaggcattggattcttatacggtaaaatagacctcttgtcttccatgcctccatttttgggtggtggtgaaatgatttccgatgtatatcttgatcattcaacttatgctgaacctccatccagatttgaggctggaacaccagctatcggggaagcaattggtttaggagcagccattgattacttatctgggattggtatgcaaactatacatgattatgaggtggagctcggtagatatctgtatgagaggcttctttcagtcccaaatattcgcatctatgggccagcaccttcagaaaaagtcgaacgagctgccctttgctctttcaatgttgagaatttgcaccctactgatcttgcaacacttctggatcaacagcatggagtggctatcagatcaggtcaccactgtgcccaacccctccatcgctatttaggtgtcagctcaagtgcacgggctagtctctatttctataacacaaaggaggatgtagacaactttatccatgccctcaatgacacagtcagctttttcaattcattgatgtaactgaaatgtatttttatgtatattatattttgtttatacacgaatgagagggttggcttagttggtaggacaaactgcatcaatgaaatgttcttgaatttcattcttcctgttcatatcattggctggtaataggcatccactaattgcagtattgcaacctatctacctcctgaatttttgtgtaaagaaaatgctcttaacgcactaaatttttccccctcttgatgttggaaggtgaatgttgtatccgaaaaaaaaaaaa

SEQ ID NO: 4692 - DNA, 1474 bp, Glycine max
agctcgagccgaatcggctcgagaacgtgcctaacaagaagttgtcttgttcttcagtgtcattcttcgtccatcacaatattcacaagcatggctgctatttgtctctataaataaaaggcaagttatatggtgagtcttgcagcagcaacacacacaaacagaggtgttgagtgagttcaaatcaattttaggcagaaaaatgaggtgttttggtcttgtagtgataggtctagtggttgtgcttggagggttacccttctcttcaaatgcaggattagatcccttcttttacaagaagagttgtccccaggtgcatttcattgtatttagagtcgtagagaaagtttcaagaaccgatacacgtatgcctgccagcctcgtcaggcttttctttcatgactgctttgttcaaggctgtgacgcatcaattttgttgaacaacacagccaccatagtgagtgagcaacaagctctgccaaacaacaactcaataagaggtttggatgttgtaaacgaaatcaagacagagttggaacaagtttgccctggtgtagtttcttgcgctgatattcttacccttgcagctgaagtatcttctgttctggctcatggtccttttttgaaattccccttgggaaggagagatagtttaacagcaaaccgaacccttgccaatgaaaaccttcctgctcctttcttcaacctcactcaacttaaagctgcctttgctgttcaaggtctcgacactactgatcttgttgcactctcaggtgctcattcatttggtagagctcactgctttttcattctagaccgattgtacaatttcagtggtactggcagacccgatccaactcttgacacaacttacttgcaacaattgcgccaaatatgcccccaaggtggacctaacaaccttttgaattttgacccaaccactcctgatacattggacaagaactactactccaatcttaaggttaagaagggtttgctccagagtgatcaagagttgttctcaacacctggtgctgataccatcagcattgtcaacaagttcagtagtgaccaaatagctttctttaagagcttttccgcttcgatgattaaaatgggaaacattggtgtgctaactgggaagaaaggagaaatcagaaaacaatgtaactttgttaacaagaaatctgctgaacttgatataggtattgtggcatccgaatcagaggagggtgtggttagctcaatataaatgaattaggaagagttttatatacactgggaaattatgtgaatgaagatcactaataaagaagctataggcacattattcgtatcaagtgcccccagctagctatagtttattgtattctgaatcatgttgtatttgtattaaaattctctttttccatatctgtttgttcttttcttccattttcatattcacctcttttaatagatatatacgttggtg

SEQ ID NO: 4693 - DNA, 1104 bp, Glycine max
gtcgaatctttatccctcggatacagtggccaattgtgttgctgcggtagtcactgtgtacatacagatacagagataaataattaattttaattttagacccttcttcttcttcttctaactgaaaccgcagccacccatactcagaaaagagtacaacggtgacttctgcgagggctttttcccctcttgaaacagcttcactgaaagagtttctgttgttgggtggcaatggaagttttgcgaccaaaacttccttctttcaaatttccaagtgccacttattgctgctcgatcactagtaggagctcatcatatgtcagatttgggttccgtcgcgtatctgtttgtgcatcaactgtcaatgaagcagtagctgaaccaattgttggtttcctttctttgggtcactccacccgaccccatttccccatacttcaccaggaagtaaatggctcaaaacttgtttacttagacaatgcagcaacttctcaaaagcccaccgctgtattgaaggcattgcaaaactattatgaagcttacaattcaaatgtgcatcggggcatacatttcttgagtgcaagggccacagacgagtatgaatcagctagaaggaaagttgcttcttttataaatgctatcgattccagagagattgtattcacaaaaaatgcttctgaagctatcaatcttgttgcttattcttgggggttgtcaaatttaaaacctgacgatgagatcatacttacagttgctgaacatcacagtgcgattgttccttggcaaatagtagctcaaaaaacaggggctgttttgaaatttgtggatttaaaccaagatgaaattccagacctagacaagctgaaagaaatgctctcaaggaagaccaaaatagttgttgtccatcatgtttcaaacgtgcttgcttctgtccttcctattcaagatattgcacaatgggcacatgatgttggagcaaaagttcttgtagatgcttgccagagtggtccacccatgatgattgatgtccagagccctaacgatgattttcttgtggcttcttctccaagatgtgtggccctaccggcatttgaattcttatac

SEQ ID NO: 4694 - DNA, 1359 bp, Glycine max
cggccgctcgagccggccggggcatagcagcaacatacacaaacacaaacacaaacacacgtgtcgagtgaattcaaatcaatttaggcagaaaatgaggtgttttggttttatagtgataggtctagtggctgtgcttggagggttacccttctcctcaaatgcaaaattagaaccctgtttttacaagaagacttgtccccaggtgcattttattgtatttaaagtcgtagagaaagtttcaagaacggatccacgtatgcctgccagtctcgttaggcttttcttccatgactgttttgttcaagggtgtgatgcatcaattttgttgaacaacactgccaccatagtgagtgagcaacaagctctgccaaacaacaactcaataagaggtttggatgttgtaaaccagatcaagacagagttggaaaaagcttgccctggcgtagtttcttgcgctgatattcttacccttgcagctgaagtatcttctgttctggctcatggtccttatttgaaatttcccttgggaaggagggatagtttaacagcaaatagaacccttgcgaatcaaaaccttcctgctcctttcttcaacctcactcaacttaaagctgcctttgctgttcaaggccttgacactaccgatcttgttgcactctcaggagctcattcatttggcagagttcgctgcttattcattcttgaccgattgtacaatttcagtggtactggcagacccgatccaactcttgacacaacttacttaaaacaattgcgccaaatatgcccccaaggtgggccccctaacaaccttgtcaattttgacccaaccactcctgatacattggacaagaactactactccaatcttcaggttaagaagggtttgcttcagagtgatcaagagttgttctcaacacctggtgctgataccatcagcattgtcaacaaattcagtagtgaccaaatagctttctttaagagcttttcggcttccatgattaaaatgggaaatattggtgtgctaactgggaagaaaggagaaatcagaaaacaatgtaactttgttaacaagaaatctgcggaacttgatataggtagtgtggcatccgaatcagaagagggtctggttagctcaatatgaatgaattaggaagagttttatatacactaggaaatcatgtgattgaaggttaccaataaagaagctatatataggcacattatccgtataagtgcccccagctagctatgttttattgtggacgtgtgagatctttattgttttttgaatcatgttgtattcgtagtcaacttctctctttaaaaaaaaaaaaaaaattttcttccattttc

SEQ ID NO: 4695 - DNA, 1108 bp, Glycine max
acgaaaggtatcttaactccaatctgttgacgccaactactaatgtcagccaaggaccctttacatttaatgttcttactctacttcttgtatttataatcagctacgtaggcccccccccccgaatttctctttgcctttgatctttgtcagctttttcttgcttccgtagttcatatggcgtgtgttcaagtcatcacagtttttctctttgcattggctctagctaaaatttacccctcaacatgtcaagtggtgcagggaaaagtctcctgcgttgactgcactcacaactatgacttatctgatattaaggtttcggtgaggtgtgatggtgtgaaaaaactggctttggctactacagaaaatgatggctccttcaaggttgatcttcccctagaccacacaaaaccttcttcttctgtgaataattgcctagcaaaacttcttggtgggccagttcagctttatgtctcaagggaaaaccaggtatcccaaattatcaagggcaaagatcaaaacagctacaccatctccacttcccttagtttcaggacatcatgccccctaaccacaaaatgcaagggtgggaaacaggttggttcatcgaaaactgtggatctacctctgcctccagagtggggattggcaccaagtagctattatgttcctttcttccccatcattggaataccttgatcatgggctcaagacttcaagtgatttgtaatcacttgattaataatacttgtaggggataatagactgttatactgtcttatatgttacatatgattattatagatatgtgtcatgtgtagtgtgaaagaatgatgccacttatagttgtggcatgtactgtatgatagtacgtgaaggaagtatatttcctggcttgaaaaagaatataaatactctactggtttgtcaacttatgttaccttgttatatagtatgatattttgctaatcaactgcaagcaggaagaaaagagttagctgtccatggatgagagtatgagacacataatcatttgattatatacagaggtgtatgacacttaagcattaactaaaaaaaaaaaaaaaaaaaaaaaaaaaatttaaaa

SEQ ID NO: 4696 - DNA, 2373 bp, Glycine max
cccacgcgtccgcccacgcgtccgcccacgcgtccgcccacgcgtccgcaaccttcttctaaggcccggggaaattgtcgattcatttttctttgtgaattgcattgcaatgatctgggttcattgattggctttgcgaggagagcttgggtgctactctgaacgcaaattttcaagatagctatgggtgttgtatatttttttgtgaagaagaattagtgagcataatgttttctgaaagattgggggcagacgaatctcattgtcaagatttacagagtttgagtgtgtcaaagcgacttgtgaggagtgttagccagaagtggaggaagaagagtaacaggaattctggggaagaagctgacgatgtaaatggagtttctttaagatgcttaaatctgtatggacgaggtgggggctgcaaggtaggtgctgacactggtgatgattttggcgattcaagcagtagaaggagatctagtgccagtgacgaaggaaagggatataagccgatttgtggcccagaagaaactgctgtggattgcttttcatatggggtgaaggacaggttctggaggagacacaaccgaaagaattctgagcttgaagaattgtttacaaacaatagaatgcatatttttcttcctgatgatattcttgaaatgtgtttggttaggcttccactgacaagtctcatgaatgcccgtcttgtgtgtaaaaaatggaggtcgttgaccaccacgcctaggttcctccatatgagaaggggagggttcatatcaaagtccatggttgtttctgttcggggctgttaaagatggattttgttctggtgagataccatgcgctggatgtgtctttgaatcaatggcacaggatagatgctcattttctcagaggaaggttcttgttctctgttgctggtatacaggatgatatcttcattgttggaggatgttctagcttgactaactttgggaaagtggataggagctcagtcaatacacacaaaggggtgcttgcatttagtcccttgacaaaatcttggcgtaaaatgccatccatgaaatatgctagatcaaatcctatattaggagtctctgaggtcagtttggattttccaacttgtcaaagtcatcaaagtcggcaggatagacgttttccaagatcaaggattggtggggtttcagacgtctatgaggatccccacaagctttcaatgagacgccattgcagacctgcttttaatgagactgaagctttgtctctgcccagtcgaaagacatacaaattccttaggcaaaaaagtgagcattcaagctcaaagggcagtaaaagatttttgttgatagctgttggaggtctgggatcttgggatgagcctctggactctggagaaatatatgattctgtgtcaaataaatggactgaaatcccaagattacctttcgattttggggttgctcgttctggaattgtttgtggcaggatgttttatgtttattctgaaacagacaagcttgcagcatatgacatagaacggggtttctggattgcaattcaagccactccaatcccacctcgtgtacatgggtactaccccaaacttgtatcttctgatggccgccttttcatgctctcagtgtcctggtgtgaaggggatggtcagattgggagacgaaacaaggctgttagaaaattatgggagttggatctcatgtatcttacctggactgaagcctcagtgcatccggatgccccaatggactggaacgctgtttttgtgtcagataaaagcctgatttttggggtggagatgttcaaaataattggccgggtattgggttttttcaccgtttgtgatgtgtctgatatggcaaactggaaccatatttcaagggatcatgttactcatgagctggacgtttcttcgtgcttgaccaaatctgtggcagtgttacacctttgaaatcctttgtgcgtgtatgctaaacaacagaatcttaggtcttccctctatgttttgaggtacaacatgaccggtaagtcctgctgtatatttgctgcatataattgtaatgggcaaatcttctgaacacgattctcagtttctgtgcttctcatgtaccttttatttaattcatttctcaccaatcataaaagttgaattccacaccgactttgcacttatattaggtttttgtattataactagtagcactaatcagcctccttgtgtatttggcatatggctatacgtgtatgcaatacaagtgacattgtctcaattctgaagaagacactcccagaggcagggaattggctcaatgaaaacgagtatataatgtgtgattaggtgcattttgcaccctt

SEQ ID NO: 4697 - DNA, 1296 bp, Glycine max
acacaagcctgagtaatagaaaagccaaatccatgtttggtctttgttcagtttaggaacagaaatcattcattgattaccatatttccttttctctcttcttccttccttccttccttccttccacaaatgttgcactctcactctcaccatcaccaccttctcttctccagtctccctcttcgtctctcactcaccaccacccatcacaactcttctttaccatctcttcattttctccacagacccatcatcaccaccaccaccacaacaactactgtttcagccattcctcctactgctgcatggcttgcaaagctcacaacacaagactttgcccactttgaactcccttcttcccatcttttcacagatgacccttctaccattcaggttgcttgcagtgttcttctcactggtgccatcactgtcttcttctttcgctctgtccagcgccgtgcaaagcgtgccaaagaattgaaatttaggtcttcaggagtgaataagtcattggataacttgaaagctataagttcaagttccatcaaagccaagagtccaccttcacctgatcaagcattgttaggggcaattatagctggtgtgattgctgttgttctctacaggttcaccacatctattgaggctactctcggtcgccaaacactttcagataatttctcagtccgccagataacaatcaccataaggacaataataaatggcctgtgctaccttgctacatttgtctacggcatcaattctgtcggtttatttctttattctggccagcttgccatggacaccatgggaggagggtcaagtggaaaggaaactgaaagcaaaatcactcagcagccaggcttatcaaatgcatcagttgagaatagtaataataataataataataaattgagcagcacaaaggaagatcaaagttcaaataactccctgtaatagaagccttgtgctgaagataaagtggaggaataagtcaactcctcatatccctttggtttcaagagtaatgttggtggcaagtaatattttcatgaagtcactactcttagtagaatgtactaaaggttccttttgttgataggaggaaattatggggttgagatgcttaaactcagtcctttgaagtatatatatatatatatatatatatatatatgcatgtgtgtgtgtgtgagatttaggaattagtatatactcactatattcgcacaaacctgtcttcaccaaaaacttgtgtgtaattacctctcattcaatgacaaaaatatatcttgt

SEQ ID NO: 4698 - DNA, 2045 bp, Glycine max
  misc_feature (1931)..(1931): n is a, c, g, or t
  misc_feature (1966)..(1966): n is a, c, g, or t
  misc_feature (2019)..(2019): n is a, c, g, or t
tcgagtcagctacgtaggcccccccccccccatatataaaagacaagcgtgaaacccactcagctgaagaatcaatctctccctttcacctttcttcatagcctaccacttttctgctttcatctactctcacttctcttcacacactgagacacacagagagagaaaaataaagggtgtgatgggtgtcttactgagtgttttctttttataatgaacaaagaactgcacaccctcttcttcaccgaagaagaagatggcaattcagcaccacaatgaccaactagagcataatgaaaatgtctcatctgtccttgatgccctttactgtgacgaaggaaagtgggaagaggaagaggaggagaaagaagaagaagaagatgaaggtgaaaatgaaagtgaagtgacaacaaacactgcaacttgtcttttccctctgctcttgttggagcaagacttgttctgggaagatgaggaactaaactctatcttttccaaagagaaggttcaacatgaagaagcctatggctataacaatctgaacagtgatgatgataataacaacaacaacaatactagtaataataatgtgcatttggactcttgtctctctcagcctcgtcgtgaggcagtggaatggatgctgaaagtcaatgctcactatggattctctgctctcactgcaacactggccgttacttatctggataggttccttctaagcttccattttcaaagagagaagccatggatgatccagcttgtggctgtcacttgcatctctttggctgcaaaagttgaagaaacccaagtgcctcttctcttggaccttcaagtgcaagacacaaagtatttgtttgaggcaaagactattcagagaatggagcttctggtgctgtccacactcaaatggaagatgcaccccgtgacaccactctcgtttctagatcacattataagaaggcttggattgagaactcatcttcactgggagtttctcaggcgctgtgagcatcttcttctgtctgtgcttttagattcaagatttgttggttgtcttccttctgtgttggccactgcaacaatgctgcatgttatagaccagattcaacacagtggtgggatagaatacaaaactcagcttctaagtgttctcaaaattagcaaggagaaagtagatgagtgttataatgcaattctccaactctcaaaggccaataaatatggtcataacaacatcaacaacactagcaagcgcaagtatgagcaaatcccaagcagcccaagtggcgtaattgatgctgcattttgctctgatggttccaacgattcgtgggcagtggggtcatcattgttatattcaccaccagagcctctcttcaagaagagcagaacccaaggacaacaaatgaatttgtcaccacttaaacggttcattatcggaattgttggcacctctccttaattaattaataccctttcacaaaccaaaaaaaaaaagtcttaatatttatttactgtggtaattaatctttccatgcatgctgctgaactatagtgccttcccctctctatgggtatctcttcatttccaacaacgtgccacattcatttaacatatcttgaagaggcaaggtggaggttcaggaatgagtggtctatctctgagggaagaggaggacaaagttggcaatgaagaattgaagactatcatcagcgagcactctataatatgtttcaggcactctttttttttttttttttttttccgttcaatgggtcgcatatagaccataccaaatttggacatatttatatcatattttctataataaattgggaacaattttcttcatttgtatatgctcttattcacttcccagtgttgtgtgcttgaattttttttgttggaggggggtactgtgacatanagatgagagtcgcaaatggtccaccctaagctttntttaccatatgttttcttatgatgtggttttataaggtaaaaaactagtgagncaaaacaaaataagaagggtttttgc

SEQ ID NO: 4699 - DNA, 1824 bp, Glycine max
tatatatctaaaaaccaagcgtgaaacccactcagttgaagaatcaatctctccctttcacctttctccatagcctaccacttttcttctttctctgctttcatctatctactctcacttctcttcacacactgagacacagagagagagagagaacaaaaaaagaaagggagtgatgggtgtgagactcagtgttttctttttataatgaacaaagtactacacatcctcttcttcactgaagaagatggcaattcagcaccacaatgaacaactagagcataatgaaaatgtctcatctgtccttgatgccctttactgcgatgaaggaaagtgggaggatgaagaggaggaggaagaagataatgaagaaagtgaagtaacaacaaacactggaacttctcttttccctctgctcatgttggagcaagacttgttctgggaagatgaggaactaaactctctcttttccaaagagaaggttcaacatgaagaagcctatgactataacaatctgaacagtgatgataataatagcaatgataacaataataataacaataatgtgcttttggactcttgtctctctcagcctcgtcgtgaggcagtggaatggatactgaaagtcaatgctcactatggattctctgctctcactgcaacactggccgttacttacctggataggttccttctaagcttccattttcaaagggagaagccatggatgatccagcttgtggctgtcacttgcatctctttggctgcaaaagttgaagaaactcaagtgcctcttctcttggaccttcaagtgcaagacacaaaagtatgtgtttgaggcaaagactattcagagaatggagctcctggtgctgtccaccctcaaatggaagatgcaccccgtgacccctctctcctttctagatcacattataagaaggcttggattgaaaacacatcttcactgggagtttctcaggcgctgtgagcatcttcttttgtctgtgcttttagattcaagatttgttggttgtcttccttctgtgttggccactgcaacaatgctgcatgttatagaccagattaaacacaatggtgggatggaatacaaaaatcagcttctgagtgttctctattttagcaaggagaaagtagatgagtgttataatgccattctccaactctcaaatgtcaataattatggtcataacaacaacactagcaagcgcaagtatgagcaaatcccaagcagcccaagtggcgttattgatgctgcattttgctctgatggttccaacgattcgtgggcagtggggtcatcattatattcaccaccagagcctctcttcaagaagagcagaacccaaggacaacaaatgaaattgtcaccacttaaccgggtcattgtcggaattgttggcacctctccttaattaaatacccctttcacaaaccaaaaaagaagtcttatattttatttactgtggtaattagtcttccatgcatgttgctgaacttcagagccttcccctctatatgtatctcttcatttccaacaatgtccctcattcatttaacatttcttgaagaggcaaggtggtggtggttcaggaatgagtggtctatctctgagggaagaggaggacagagttggcaatgaagaattgaagacaatcatcagcactctataatatgtttcaggcactcttttttaattgttcaatgggtctcatatagaccataccaaatttggacatattttatatcatattttctataataaattgggaacaattttgttccttgtgtaaaaaaaaaaaaaaa

SEQ ID NO: 4700 - DNA, 2188 bp, Glycine max
  misc_feature (2183)..(2183): n is a, c, g, or t
acccgcatcaaaagtcactccattcccatcagaacacaaaacacagcatttcccttagcgtaggtaaagccatagtatccatcactcactctttcgcaagcattctttctgtttatatatttcactcaccaataccttcattgtgttaggaaatggaagtcacactttcagcctgcaagtccgttagctcgccttctgttcccgtcgcaggtttgtttgcggggaatggaggaattaagagctcgcaatgcagtttcttagcgggagcgagcaaagtgaggtttcctaggcaagtaggtcaagttagccaccttcgcaaacagcgccaaacgcgtcactgcggtgctctccacgcgacttgcagcggtgacaagatcctgatcgcgaacagaggcgagattgccgtccgcgttattcgaaccgctcatgaattggggattccttgtgtggctgtgtactccaccatcgacaaggacgcgcttcatgtcaaattggctgatgaagccgtttgcatcggggaagcgccgagtagccagtcctacttgctgatcccgaatgttctgtcagctgctattagccgcagatgcaccatgttgcatcctggctatggttttcttgcggagaatgcagtgtttgttgaaatgtgcagagaacatggaatcaactttattgggcctaaccctgacagtattcgggttatgggtgacaaagcaactgccagagagacaatgaagaaagcaggtgttcccaccgttccgggaagtgatggccttttacagagcacagaagaagctatcagactggcaaatgagattggtttccctgtgatgatcaaggcaacagctggtggtggaggacgtggcatgcgtcttgctaaagaacctgctgagtttgtgaagtttttacagcaagctaagagtgaggcagctgctgcatttggcaatgatggggtttatttggagaagtacattcaaaacccaaggcacattgagttccaggttcttgcagataaatatggtaatgttgttcactttggagaacgtgattgcagcattcagaggcgcaaccagaaactgcttgaagaagcaccatctcctgccctgacccctgagttgcgaaaggcaatgggagatgcagcagttgcagctgctgcatctattggttacataggtgttggaacggttgagttccttttggatgaaagaggttccttttactttatggagatgaacactcgtatccaggttgagcatccggtgacagaaatgatttcctcaacggatttgatagaagagcaaattcgtgtagctatgggagaaaaacttcgatacaaacaggaggatattgtcctcagaggacattctattgaatgccgtatcaatgcagaagatgcttttaagggatttagaccagggccaggtagaattactgcatacttgccatccggaggtccatttgttagaatggatagccatgtttatcctgattatgtggttcctccaagctatgattcccttcttggaaagctgattgtatgggctccaactagagaaaaagcaattgaacgcatgaaaagggcacttgatgatactattatcacaggagttcctactacaattgattatcataaacttatccttgacatagaggatttcagaaatggcaaggttgatactgcttttattccaaaacacgaggaagagttggcaatgccaccgcagaagatggtactcgctaacagggtgaatgaactagctggttcaactgcctgatgaatatgattgtgtgatgccagaattgctttgttgtaatcaccgtgtcgttagtgccttgaagtcaatgttttattgaaattttgataattagtctcgtacattcctatttcttcacataattatattgtaatatcaattaatttcatcccaaatattagtgcaaggaataaggaataactccttgcatttttcttccaaagttagttgtctaaacggtttagaggatctttgtcccaaggcttgtttgtaattcttgtattaagagctcgttgctagatacactaataaaaacttaaccttatcctaaaaaaaaaaaaaaaaaattatatggatcaattggcgtccaattggcgtcgctagatgctagaaaaaaaaaaaaaaaaaaaaagggcggccgctctagaggantcaag

SEQ ID NO: 4701 - DNA, 1891 bp, Glycine max
tgcttgtttcgatataatcggaagcacccctttatgcttttccgcctacaaatatgacaaccttccttacattttcttccgccttcggctccagcttctctcatttttcatctcacccttcctctatttccatcatttcgtgacaacaacaacataaccctctcgcccccaacacacacctcttctttttaagggtttatcttaaaccaggatttttggcactaatttctctatgggagaagcaccagcattgcttgttgatgacgtgcaggatggggctctgaatggccttgaattgaaaaatggaacttgcaaaacaactgctactgttggcgataagatgtatgtcattggtggagctgatgatggaactttgtccattgaagttcaaatttttgacggtagtcttggagaatgggttcgtcccactgtgcgtggcaccaaacccgtgttgtgcaatggcctctcagcagtgcctttggaagaccgaatactgattcttaagaagggttctaagcctgatgatcggatatggttcctggagattgacacccaatatgttaggcagcagcaaaaaattttggggactgaggtagttgcatggagtaaaggtgtgataggcaatgctgagaagcctgttgttattagtggtccttctggagtaggcaaaggaacactgatatcaatgcttatgaaggaatttccatctatgtttggtttttccgtgagccacaccacccgtgctccaagaggtatcgagaaagatggggttcattaccattttactgagaagagtataatggagaaagagatcaaagaaggaaagtttcttgagtttgcttctgtccatggcaatctgtatggaactagtgttgaggctgtcgaactggtagcagatgcagggaaaagatgtattcttgatattgacgttcaaggtgcaagatctgtgagggctagtacgcttgaagctatattcatctttatctgccccccatcaatggaggagctggagaagcgccttcgtgaccgggggacagagactgaggaacagatcctgaagcgactacgaaatgctgatgctgagattgagcaagggaaatcttctcaaatatttgatttcatcctatacaatgacaatcttgaggagtgtcatgagagacttaagaaactattgggacttgacggttttgtcactgctccacctatatcaggccctatagagattgatttaccaatggatcattcagtgtcaaaaattgataacaaaatcatcataaactgcatctcctcaggagagaaggaatcaaagaatttggtcattttggatgtttcctcactaaaagggggtgcacctggacggacaagaggcctaaatttccaagccattggctctttctcaaatggcttgaatgggatagatcaacttagctaacattcaatgcacttggccaactaacttggtattgaagaaatgggacacattgataaggcattagattcacttcttaaacatttttttaagcattcggtaagaacttctataagcattctttgattattatgactattgagttgacttgagagatggcaattgctaaattattattccctacataggcaatgagattacttgtgtcttttgtgtgtcaaggaaggcaaaatatggtgtacgtttctctattccccccaccccaagatctgttatagtaagggaatatgaagggggcctacaacatgaatacttcaaattcaaagatgtctgtcagatattaggtgttatactaggcatggctattcattgattcaagccatatgttttacacattaaatttgttggatacatgttttatgtcattaccatgttcattagattctaacagctatatggcgg

SEQ ID NO: 4702 - DNA, 1898 bp, Glycine max
tcagctacgtaggcccccccccctttatgttcaaagcatttcttttgggcttctgacccaaataattcctcctaacgattcaacccatttcaaacaatctgtaatagtgttataggatagatgaatcagaagacaacgttgcatggaaagcaattggatactgcggacctgatccagaattcaaagctcggttgaagagccactttttagatggaacatctaaaggaggacaagaggataaggaagatgaagatgctgaagaggtgataggaccactttacaaaggtctagtccatctcaattacccacgagacatcactgcagatgctctaaaacgactcggattccctgtatcggtcatccgtcagaagcataaagctgctgcaaacttatcatctccttctttggtgatacaatgtgatgcagtggtggttggttctggctcaggaggtggagtgatagctggtgttcttgcaaaagctggttacaaagtgttggtgttggagaaaggaggttattctgctaggaacaatctttctcttcttgaaggaccaaccatggatcaaatgtacctcaatggtggtctggttgcaagtgatgatatgggtgtgttcattctatcaggatccactgttggtggagggtcagcaatcaactggtctgcgtgcattaaaacccctcagcatgtgtgcaaggagtggagtgataaacatggtctagagctgtttgagagtgaactgtatagagaagccttgaatgctgtttgtgagaagatggaagttcaatctgagattgaagatgaaggattcaacaatgcaatactaagaaaagggtgtcaagaaatggggtatcctgttagtaacattcctaggaattctgcggcagatcactactgtggctggtgttgcatgggttgtaaggatgggaggaagaagggtacctcagaaacatggttagtggacttggtgaaatctggcaatggagcaattcttccaggttgtgaggcaataaaagtcttgcacaagaaaaaggaagggagggatagaaagattgcgcgtggagtggcttttgaatttgaatataaagggactaaagacatttgtgtggtggagtccaaggtcacaattgtagcatgtggagcactgagtactccagcattgcttaaaaaaagtggcttgaggaatcagaacatagggaggaacttgcatcttcatccagtggcgatggcttggggatacttcccagatgcacctgaatctgaggtgtggccagaggcatataagaagagctatgaaggagggataatgacagcaatgtcaactgttgttgcagagtttgaacaatctggatatggtgcagtgatccaaacaccttcattgcatcctggtatgttctcaattgtcacaccatggacttctggaatcgatataagagaccgaatgcggaagttttctagaacagctcatatatttgcactggcaagggatcaaggatcagggactgtaaaagccccagaccgtatcagttataagcctgcaggtgtagatgaagagaatttaaagaaaggaattgagaaggtgctgagaattctggcagcagctggtgctgaagaaattggaacacatcataataagggaaggaccttaaatgtaaagcaggtgagctatcatgagtttgagaaatttgttaaagaggaaagttcaaggtcattgacagaccttacaacaccattgtgctcggcacatcaaatggggagttgcccgatgggttctaatccaaagcaatcagtggtgaatcccacacgcgagacattggaagtggagggccttatgttgcagatgccaatggcttcccacagcattgggtgtgaatcaatgttactgttcagctattgctta

SEQ ID NO: 4703 - DNA, 2761 bp, Glycine max
tcagctacgtaggccccccccccccaatatcgttttcaagctgagactacatatttattttcttgattttccttaacaggtgcaatttatacgaaagaattaccagtttaaaccagcttaacactatatatttatctttttttatctgctttggtttcatttttcaaccattttgccattactttttttataaattataactatcatcatcatcttccagagatatcttcacatctttttttcattatatctcttttagtaatttatgttggctatcacagtgcattttgcatattcataattgaacaagactgtttattacatcaggttttgaattttgttatcctttcctcaaatataatgcattgtaatattaatataatatggataagcatagttttgtactacatactagcttataggtaggttatatagtcaatgatttcttgacataaagacgtctttacaatcatgaataatcatgttttgtttttatgactgacattttatacctggagagtagagactaagtacaaagagtctgttcatcaggtttaatggaaataacttcatatgcaattaagtgctctatagtcatcctcaatctgtgatagttcttaggtcttaatcttatgacctcattggtatcaattaataaagcaatagtatacctgaatgggccaaattcatgatgcgatatttgttcactacatatacatagtcaagcagtatccatatcaagaaataattgcttcaagaatgatgaatctgatcattaacatcaataaagaaaatcttaattaattagttgtaaacaatactagctacaataaacaattgcgagcagaaatttttttacaagttttatgcatgatgttaattaattaaatcatttttgtctctttattatgaaggaaggaacaaaggactcaagggcttagcttcagctatcttaaagttgtgggagaagagtcttatagcaaaaattgctatcaagtatggaattccaaatactgacaatgaaatgatggccaatgaactgaagtgtctcactggaggagttctgttgttgcgcaacaagttttacatattactctataggggaaatgatttccttccaagaagtgttgcatctttggtggaaaagagagaattggagcttaaaagtcgccaacttcacgaagaagttgcacggatgaaagcaattcaaaccttttctcctattgatgaagtgccactagacactagtacaagtggaactttaacagaatttaggaaaatccaaacaaagcttgaggatacaaaaagtgtaaacgtagattcaaacattcaactggaagcagaaatatgtagactggagaaggaattgaaagaggaacagcgcagagcattcattcttaacaagaaaataaagagatcagagagggaattatcaaagttaaatgctgcatggacgcctagtgagcaggatactgacttggaaataatgacagatgaagagagagaatgttttcgaaagataggattgaagatgcaaagttccttactgcttggcaggcgtggaatctttgatggtgtattggaaggcctacatcagcattggaaacacagagaagtggtgaaggtaattacgatgcagaaactattcagtcaagtcatcaacactgcaaaagtgctggagacagaaagtggtggaattttagtttcagttgataaactaaaagagggccatgctattattatttaccgtggaaaaaactataaacggccttcaataaagttagcaaaaaatcttctaaccaaaagagaagctttgcggagatctcttgaaatgcagagaattggatcgatgaagttttttgctcatcagagagagcaggcaatctctgagttagaggtaaaactggcagacctgcagcagaaaaaggaaattgagctgagagaatttgcaaattaatgcatacatgtctaagacatttatcatgctgcaacttctctctagttgtcttgttgacaatagacaagacatgagaaatttgacaaacattgtagtaagcacagcatgttttgcaattcctttccagagaatcgaagtggcacctgctgtatggatctggaaaatttgaaacaatagttctgcatgtaggaaatcgcatgcacaacctggaactttgagcaaggtagattgtgaaaatttatttttttcccgttgcagaaatcaagtgtttacttcatgagagtgaagtgcttttcacttatgttcgaccactatcatctttctttaagttgaagctgaatcttttgaagaggcatagcttgcatgtagaagttcaaaaatacttctacaaggttgttctgaccatgaaatattctataacatttataacagagaaacttgactacctctagcatacaattaagaagctgcttaagatgaaggacacattactaacattacggacatgtattgtatacaacttgttaaagccactgaaatttctggtgtcttggagtattttgtgatttgtcatttgtcatttttattttattctttatgcagtagttattttgttttcagtctaaagtgcaatgagttaagctttgtaattaagttgggcgggtggctcattaagatgttacgtagaagtaacttacgctctgttttgtaagccatattgtatcagaaacaaatgcattttgctgtatgaatgaaaacttttcacgtttctaaaaaaaaaaaaaaaaaatcataaaacaacac

SEQ ID NO: 4704 - DNA, 1445 bp, Glycine max
  misc_feature (579)..(579): n is a, c, g, or t
atgctggcaaagcacatgggtctggggagctgacaaagtcaaagagtatgaaatcatcgtttaaagggaaagttactagtttcttcttctcaaggaataagaaaccatccagagaaaaatcttgtctatctcaatctaaaattgaatcccaatccactgccattgaagcatcagattctccagtgaatttgtctagagtccttacggatgatgtgtctcaaagtttcaacagtggatccatcggacagtgttctcttccagctccatatgaatcatcaggcaaaattttagcagattctatctctaatggacaaggtgctgtaccactggagcctggattgactctgtcaaagcccatggtgcctgggatttcaagcgaaaaccagggtcagcccagtccaatttctgttttagagcctccatttgaagatgataatgctgttgtcgagtccttgggctgtgtgaggggtggtcagctgggatcacgggtgtctctgaagtctaatttaattgataaatcaccacctatagaatcaatagcccggaccctctcatgggacgattcttgtgcacaggtgncaagtccatacccattaaggccctcatcggcatcctcggcctccttagtcacgaagcaagactggcttgtctttgtcaagaaacttctatcagctgctggaattgatgatcaagtgcagcccggctcgttttactcgagatggcattcccttgaaagcccattggatccatcattgagggacaaatacgccaatctcaatgacaaggagcctcagcagcaactccacgaggccaagcgaaggcagaggaggtccaatcagaagcttgtattcgattgtgtgaatgtctcactaatagaaattactggttatggatcagagaagaattacttgatgggtagtaggttgtgcagtgggagccacagcagggtccaagtcccagaagctgcatctcccccattggtggacctcattgtggcacagatgaaggagttaatatctagtgctatgagttctgtttgggtggtggattgtggggacagtaacagcctggtggtagagagtgttgtcagaaaagaggttgtgggcaaagggtgggttgagcttatgagattggagatggatattttggtgaaggaagtagaggggaagctgctagaagaacttgtggaggatgcggtggttgatttgacaggcagggcctgaatggttgaaaaccctgacatggctttccgctttggctttgctcttttttataatatatattgtaactctactattgttgtattcgattatcaacacaaggccctacttacctaatttattaaatgctactgagaaattgtttcaacttgcagctatttcatattagtgaaactgtaatatattaatcaccccattcagctgctcaaaaaaaaaaaaaaaaaa

SEQ ID NO: 4705 - DNA, 2499 bp, Glycine max
cttcaatttgattccttcgttgtttcgtcctgagagggtcagccatgacccaaaccctctcattctctctctcaccttcccagaaaaccctagaaattaattaaaaccatccaatcttcttttctccatttccccgatttttttttttcatttctatttcaatcgcaacctcctcctccttccaagtcaacgcggatttcagaattctcgatccatgtcgtccgagatcgaggttgtcgaggaggtgcagtcccgcgacgagcaatcgggggcggaggagagcctccgtaatgacgtgtacacggcggcggcttacggggatttggagaggctgcagagattggtggagcaagagggttgccccgtctccgagcccgacggtttgggctactacgcgcttcagtgggccgcacttaacaaccgcactgccgctgctcagtacatcattgagcatgggggagatgtaaatgcaacagatcatactggtcagacggccttacattggagtgcggttcggggtgctattcaggctgcagagcttttactccaggagggtgctcgagtgagtgctgccgatatgaatggatatcagacaacacatgttgctgcacaatatggtcagacagctttcctttaccacattgtttcaaaatggaatgctgaccctgatgttcctgataatgatggaagaagccccttgcattgggctgcttacaaaggttttgccgattctatacgtcttctgttatttcttgatgcacacaggggacgtcaagatacggggggttgcactcctcttcattgggctgctattaggggcaacttggaggcctgtaccgtgctagtacaggctggcaagaaggaagatcttatgctggctgataatacaggcctgactccggcacagcttgcttctgataagaatcacagacaagttgcttttttccttggaaatgcccgaaggttgcttgacaaacgctgtgacgggaacagccgccttggaaagatttccaaattaggacttgctcccgtcctttggtgccgagtccctgcgctagcccccccccatattcattcagtcatcttggcaacaaaaatgccaaagctgacagctgcagctggccttcttgcatggtttggagtttttcttgcaagtgttggtttggtgatgttttacaggtgtagcagcaaggatcctggttatatcaggatgaatatgcatgacaatcaggatacaaaagatgacgagcctctcttgaagattgagataaataatcctgctttgctagctggaaattggtcccagctttgtgcaacatgcaagattgtcaggcctcttcgagcaaaacactgttccacctgtgatcgttgtgtggaacaatttgatcaccattgtccttgggtatccaattgcatcggcaagaagaacaaatgggatttctttgtttttcttgttcttgaagttctggcaatgttggttactggtggagtttgtcttacaagagtgttaactgatccacttgcacctcattcatttggggcatggattcagtatgttgctaacaatcacattggtgcaatatcatttctaatagccgattttttcctcttctttggtgtgtttactttgacagttgtgcaggctagtcagatatcacgcaatattacaacaaatgaaatggcaaatgcaatgcggtatagttacctcagaggtccaggtggtagatttagaaacccatatgatcatggtatcaagaagaactgttctgatttcttgatcaatggttacaacgaagacgttgagtgcattgaagaattaggtaactcagaggagggtataggaatgatgcatatggcaagaagctcgaacttggcaaatggagactcgcacacccatactgaatatgcaagaggcaatggaaatggccatcatgctattaatgtggattccaattccaacagtaccaactccaaaatacatcatggtcatattaatggtcatgttcattcttcgcattgtagccataataaccatggcaaaaccagaaatgacaacgttcccttgggcttgggtcttggccttggacggaacagatctgttacagcctcatcatgatatttacatacatgtctggtgtttgaacctaacctgtaatgtaacataggcacacatctgggttggtttacgttaattcaatttattgtggctcttttctaccacacccccatgtgcaattttgtgctgttacatttagtcgtcctcttatcgttttttctttctactttttgtaactaatttaagttgcattttaaagatgataagccttgaaatctatgtatgaaattcgaatgtatttgctagagcctagaggtcccgccccccttccttcctatggcggttgctacttgctagtgtgcggatgaaacaaatatatatatatatatatatactggtacaacttattctttttaataaattttcttacatatttaattttt

SEQ ID NO: 4706 - DNA, 1326 bp, Glycine max
tcgagtcaggctacgtcggccccccccctcagctacgtaggccccccccccaacgaaacagagcacaatacaaggaaatcaatcctgcgatttcgaagcagaagaaggacaagaacaaaaaacatgtagcatgccataaaagcaggagctcttgttccttgtcatctagaaagaaatactgtagatctgggttagcaatggctcctggaagcagtgttttcaaagaagttcttgaatctcacctgatgtcttcagattatgaaatgggaaaagctaaatctgaggccaagagtaacagtacatctacaaaatctagcattgggttgagtggaaagagtggaattagttcaaacaatggcgtgtatgaattacttggatgccccgtttgcaagaatttgatgtatcccccaattcaccagtgcccaaatggccatacattatgttcccattgtaaagttgaagtccataatatctgcccgtcctgccatcatgatcttgggaatataagatgtttggctttggagaaagtggcagaatcattggagcttccttgcagatatcagagtcttggttgccatgatatattcccgtactatactaagctgaagcatgagcaaaattgtggatttcgtccatacaattgcccctatgctggatctgagtgctctgtgatgggtgatattcctactcttgttgcccatctcaaggatgatcacaaggttgacatgcatgatggatgcaccttcaatcatcgatatgtcaaagcaaatccacatgaagttgaaaatgccacatggatgctaactgttttcaatagttttggaagacatttctgcttgcactttgaggcgttccagcttggctcggctccagtgtatatggcttttttgcgattcatgggtgatgacaatgaagcaaagaaattcagctacagcttggaggttggtgcaaatgggcgcaaacttatatggcaaggaattccaaggagcattcgggacagtcatagaaaagttcgagatagtcaagatggacttataattcagaggaacctagccctttatttttctggtggagaaagacaagagttgaagttgagaatcactggtcgtatatggagagaagaatgagacatgtaaatataatgttatttagagatgtaaccattgttttaagattttgctctctggcaaagaatgaagcactgtatctgcttaagttaatctctccatagatttctctttcattttcctttttgaacaaaaccatgtgcttctgaatctgaatattggaaatcaaacttacacagtcaaaaaaaaaaaaaaaaaa

SEQ ID NO: 4707 - DNA, 922 bp, Glycine max
  misc_feature (13)..(13): n is a, c, g, or t
  misc_feature (15)..(16): n is a, c, g, or t
  misc_feature (30)..(30): n is a, c, g, or t
  misc_feature (41)..(41): n is a, c, g, or t
  misc_feature (80)..(80): n is a, c, g, or t
  misc_feature (89)..(89): n is a, c, g, or t
cggcttcgaagtntnnttcggaattaagtncaattcgaaantaatttaaattaattaattaaattgctcaattttatgcncatttcaantcataaacttcttaccaaaacaaacatacacagagattcaacattcatagtttcatagtcctacctttttccttttttttttcttttttctcaacgttgttataataaattttattagtaattaccacaactcttgaaggtggtggttgatgttacgggcatgtttggggttgaattaccatggtagaatggaggagctgccaggggcgtttggaagcagcgccagtttggctctccggttgggccaaacagtcttttccacagcttcccttctcttcatgtgtttggatgttgatttctacggctacactgctttctgctacttggtaactgtcatgggtttggtaattccctggagcataacactgttggttgtagatgcatactctgtctttataaaatgtttacccctccaacgaagacttgtactgatcgtctttctgggagacatgattttgtcatatctctcattagctgcagcatgttcaacagccagtgtcacagatctcctgcttgatgccgatcgatcctattgcccaccaaagttatgtggtagatatcaattgtctgctgctatggccttcttgtcttggtttctttcatcagcatcctctctgtttaacttctggcttttcccttctttgtaaaatctatccttctagctgctgttgatatgtacaccaatgataagggtgcaagtgacgaagtaatttattcttgtgcagatattttttgtttccatgtgaataaaattatcatgactatagacaacaatgcaataagtacttttccaatgcaagaaaaatacaaaaattccagagtattggttctca

SEQ ID NO: 4708 - DNA, 1732 bp, Glycine max
aaattctgccccctccaaaactaaactaaaaatagcctttccgtagtagagagaaagatgggtagtagtgaatatcagactctgcacattttcttctttcccttcttggctcatggccacatgataccaaccgtggacatggccaaattatttgccgaaaagggtgtgaaggccactataatcaccacacccctcaacgaacctttcatctacaacgccattggaaaatccaaaactaatggcaacaaaatccacatccaaaccatagagtttccttctgcagaggctggtttacttgatggctgtgaaaataccgagtcagtcccttccccagaattgttgaatccgttttttatggccacccatttcctccaagagccacttgagcagctactgcaaaagcaacttccagattgcattgttgctgatatgttcttcccatgggcaactgattccgccgccaaatttggaattcctaggctcgtcttccatgggactagtttcttctccttgtgtgttaccacgtgtatgccattctatgagcctcatgacaaatatgcttcttctgattctgattcgtttctcattcctaacttcccgggcgagattagaatcgaaaagacaaagattccaccttatagcaagagtaaggagaaagcaggcctggccaaattgttggaggaggcaaaggaatcagagttaaggagctatggggttgttgttaatagcttctacgaacttgagaaggtttatgcagatcattttaggaacgtacttggaagaaaagcgtggcatattggtcccttatctctatgcaataaagacgcagaagagaaagcacgtagaggaaaggaggcatctattgatgagcatgagtgcctgaagtggctaaacacaaagaaacccaattcagttatttatatatgctttggaagtacagtaaagtttcctgattctcaacttagagaaattgctaagggtcttgaggcttcagggcaacaattcatttgggtcgttaggaaaagcggagaagaaaagggagagaaatggttacatgatggatttgagaaaagaatggaaggcaagggactaatcataagagggtgggcgcctcaagtgttgattcttgaacaccaagcgattggcacgtttgtgacacattgtggatggaattcaacgttggaagcagtgactgcaggggttcccatggtcacttggcctattttcgccgaccaatttttcaatgagaagttggtgattgaggtccttaaaattggggtacctgttggtgctaaaacatggcttggaatgcagggagatagtatttcatgtgatgcagtggagaaggcagtgaagaggataatgacaggggaagaagccattgaaatgaggaacaaagcaaaggtgctttcacatcaagctaggcgggccatggaagaaggtggatcatccaactctgattttaaagctttaattgagggattaagttcgttgagccactaatataccaccatcaacactatgcatgcatttactctcaagattatttgttatctaaattttaatgatttaagctaaaatagtttaaaatcctgtcgacctaatttttttttatctagtgaaaatcaaatactatttataataaaaaaaaaaaaaaaagtttcgagatatttagttcctcataatcatattatattataacattattcgtgtatttattgaatttttttcc

SEQ ID NO: 4709 - DNA, 799 bp, Glycine max
  misc_feature (19)..(19): n is a, c, g, or t
ccctcatttcatctcatgntgataggtctgagcggagcatacaaaggctaatcaagctacgaagttcagtcacacattcatatcaaatgtacaacattccaactgcatggatgcttgattctggaataatgagcgagataaagcaggcttccatgactctggtcaagacatacatgaaaagagtgacaatggagcttgaatccattcggaattcagacagagaatccattcaagattctcttctgcttcagggcatgcattttgcatatagggctcatcagtttactggaggtttggactcagaaacaatgtgtgcttttgaagagataagacaacgtgtaccaggacacctagcagggtctcgagaacttttggccggcataccataatcatgagaaactactgactttttatgctgctactaatggttacaaatgttggctattaaacattcattattctttttcttatctctaatgttgtggaagaacccctttgaagaaatatggaagaacaataagatattctgaagaaagaattcttcatacttcctagtaaggtcataaactggcagctcccaacttgtcataacctaggaataggatcttcagttcagggtagtttaatttctatagttaattttgttaggtggttctctctagtgctgtaacaaacatcataaccagcttaattttccttttgtaagtacatatgattaatgtttacccagttactttattgatttaacagtcatgttcaaaaaattcctgcggccgtgaattcttcctggtgccgaatt

SEQ ID NO: 4710 - DNA, 733 bp, Glycine max
cctcgagcgattcggctcgtgcagaaatcaagaaacttgatgacgggtgtgggtatagcagtagcatgaaaaggaaagacgtgccacaaaactatacggaacctatagactctggagtctggactgaaatcgaagtcgaagcaagcaatgggcaacgctcagtcacctcccaacaatgatcctcgatatgtttcagcaaccagagcttttactcaaaaggaacttgaagacttgaggtctctgttcatcaatctggcaaatcaatcccagagcaacgggaaatacatctctccctccgtttttcagtcatattttggacttcatggccctcttggggagaggatgtttgatttagttactcaggagcgcaaggatcagaggctaacctttgaagacctcgtggttgctaaagctacttatgagaaagggacaaaagatgaaattgaagaattcatctttcgcttattggatgtatctggagataattttgtagggaggtctgatttggaaactgttatgattgccatttttaatgatatattacgcataaaaggttctgatgatagatcaagttcacatgaggatattgtcaacatatttctgaatgctgcaaatttctcccagcaagatggagggggcacttgaggggacaatgtcttttgaagatttcagaagctggtgtactcatctcccctctgtgaggaagcttcttgaagcctgcttttgccacctg

SEQ ID NO: 4711 - DNA, 1409 bp, Glycine max
cggctgcgagaagacgacagaagggtacggctgcgagaagaccacagaagggtacggctgcgagaagacgacagaaggggaattattatttttttcatcgcattcaacctttctcttcctcctcactcaaacttcccctctctacgccgttcctcccaaatggatgcaccaatggagttttggggtgttgaggttaaggttggtcagaccgtgacagttgacccaatggatcctgtggattcatacatacacatatctcaggttgcgctcggagaggcgaaaaaggagaaacctaatgagtctgtggttttgtatttgaaagttggtgaacagaagattgtcttgggaaccctttctagggatggcattcctcatctatcgttggatttggttctggactccgattccgagctttcccacacttcaaaaagtgccagtgtctttttctgtgggtacagagtactaactggcggcaacaatgcttctgatttttctgatagtgaagaggatgaggaacttgcattggagggtcaagataatgatgaaggtgcaaaggttaccaaaccttctaaacctgttcccaagattggtgccccagcaaaaacagctgatcctaagaaagacgagggtgatgattctgatgatgaatcggatgatgatcttgctggtgaagatgaatttggaagttccgatgagatggatgatgacagcgatagtgatgaggagagtgatgaagagacccctgctaagaaggtggatcagggcaagaagagaccaaatgagtctgcagcaaaaactcctgtttctgccaagaaagctaaaactgctactcctgaaaagactaatggtaagaaaaatgtacatgtagcaactccccatccttcgaagaaaggtggaaagacacccaacagtacaaaaggccagtctcccagttctgctggacaactatcttgcgcaagttgtaaaaagtctttcaccaacgaagtcggtctgcaacaacataagaaggctaagcatggtggtcagtgaatattgatactgcattttatcgtactcatgtagtaattttcccctgtattacagtgagtaggttcggaaggttggtaatttatctcactattaggctagtaaacgaaacttcgaaattttgttttgatgtttgagtccctatatattggaactgctgcatttaaattttgttaatcattcaatgcttagaatattgtgatgatgttggtgctttgctttttcttttgtggcattaaaattctctttcaaatctggccgatgatgttgtctattgctacgagcaaatgtatggtatgaccctctaaatggaaaaagcataatgagaatgggggtattctttaacattccctcttgaatgtcaatgtgtaaagctactgaat

SEQ ID NO: 4712 - DNA, 1129 bp, Glycine max
  misc_feature (6)..(6): n is a, c, g, or t
  misc_feature (18)..(18): n is a, c, g, or t
  misc_feature (27)..(27): n is a, c, g, or t
  misc_feature (29)..(29): n is a, c, g, or t
gcacgngaccattacctntaacatccnantcgaaaaaaaattacgaatggctactttagaatcagctctcactctcttcgcacctcaacggttctctgcaaaagcaccaatctccatcaagctccatgcttccacctcccatatcttctcttccaagtccttcttcaaaaccggaagactctgcttccagttatgctccactctgcaagaggtagcaccaacagagcaaacacttgagcctatccaaccaacagacaacgtaaagaagctctacgtagttaacttgtcttggtctctgacggcggcagacatcactgacctctttgcccaatgcggaaccgtaactgacgtcgagataataaagagcaaagatgggaggagcaagggctatgccttcgttactatggcttccggggaagaggctcaagctgctgttgataaatttgactcttatgaattatcaggacggataatacgggtagaacttgcaaagagattaaaaaaacctccttctcttccacctcctccaggtccccgtcctggagagacacgccatgtaatttatgcatccaaccttgcatggaaagcaagatctacccatctcagacaagtcttcgctgaaaatttcaaaacgccatcgtcagccagggttgtctttgacagcccttctggacgatctgctgggtacggatttgtttcttttcttaccagggaggatgcagaggctgccatttctactgtggatgggaaggagttaatgggacgaccgcttcgcctaaaattcagtgaaaagaataaagaagctggaagtcaaaatgatgaagaccaaattaaggatgctggaagtgaagaagatgaagaccaaggttctgatgctcaaccggaagaatcataaattttagatatacttttactgatctttggtcgtggtttgggattgagtgaaaacctctacgagctagaattgtacttcatgtataaagaactatggtggatgaatttctgcattcccaatatttttcactaaggtcgagtttactatccctttaaaatgtgagtgaaaatgtaagaattttttttatgttaattcttataaatctccgctctgaattttttcactcccattttt

SEQ ID NO: 4713 - DNA, 1238 bp, Glycine max
ggaattcagcacgagggcagtgctacccctttatctctttatccacactgtttgtgccacaaaaattacgaatggcggctactttagaatcagccttcatcctcttcgcacctcaacggttctccaatagccatcgtttctctgcaaaagcaccgatctccatcaagctccatgcttccacctcccttttcttctcttccaagtcctccttcaaaacgggaagactctgcttccagttatgctccactttgcaagaggtagcagcaacagaagaaacacctgagctaacgcaaccaacagacaacgtaaagaagctgtacgtggttaacttgtcttggtctctgacggcggcagacatcaatgacctctttgcccaaagcggaaccgtaaccgacgtcgagataataaagagcaaagacgggaggagcaagggctatgccttcgttactatggcttccggggaagaggctcaggctgctgttgataaatttgactcttatgaattatcaggacggataataagggtagaacttgcaaagagattcaaaaaacctccttctcctccacctcctccaggtccccgtcctggagagacacgtcatgtaatttatgcatccaaccttgcatggaaagcaagatctacccatctcagacaactcttcgctgagaatttcaaaacaccatcttcagccagggttgtctttgacagcccttctggacgatctgctgggtacggatttgtttcttttcttaccaaggaggatgcagaggctgccatttctactgtggatgggaaggagttaatgggacgaccgcttcgcctaaaattcagtgaaaagaaagataaagctggaagggaaaaagatgaagaccaagataaagatgctggaagtgaagaagatgaagacgaaggttctgatgctcgaccggaagaatcataaattttagatacacatttactgatttttggtcgtggtatgggattgagtggaaacctctacgagctagaagtatacctcatgtatgaagaactatgatggatggttttttgcattcacaatatttttcactaaggtcgactttactatcctttaaaatgtgggtgaaaatttaagaaattttttttatggaattcttataaatctcgtctctgaattttttcactcccatttctaagggtgcttaaggggtgataaaacttaaaaatctttgtcaattaaaacttgcaaaccatatat

SEQ ID NO: 4714 - DNA, 1437 bp, Glycine max
  misc_feature (1100)..(1100): n is a, c, g, or t
  misc_feature (1140)..(1140): n is a, c, g, or t
  misc_feature (1147)..(1147): n is a, c, g, or t
  misc_feature (1212)..(1212): n is a, c, g, or t
  misc_feature (1218)..(1218): n is a, c, g, or t
  misc_feature (1226)..(1226): n is a, c, g, or t
  misc_feature (1235)..(1235): n is a, c, g, or t
  misc_feature (1241)..(1241): n is a, c, g, or t
  misc_feature (1274)..(1274): n is a, c, g, or t
  misc_feature (1286)..(1286): n is a, c, g, or t
  misc_feature (1302)..(1302): n is a, c, g, or t
  misc_feature (1305)..(1305): n is a, c, g, or t
  misc_feature (1307)..(1307): n is a, c, g, or t
  misc_feature (1312)..(1312): n is a, c, g, or t
  misc_feature (1318)..(1318): n is a, c, g, or t
  misc_feature (1322)..(1322): n is a, c, g, or t
  misc_feature (1324)..(1324): n is a, c, g, or t
  misc_feature (1354)..(1354): n is a, c, g, or t
  misc_feature (1356)..(1356): n is a, c, g, or t
  misc_feature (1358)..(1358): n is a, c, g, or t
  misc_feature (1360)..(1361): n is a, c, g, or t
  misc_feature (1364)..(1364): n is a, c, g, or t
  misc_feature (1378)..(1380): n is a, c, g, or t
  misc_feature (1382)..(1383): n is a, c, g, or t
  misc_feature (1385)..(1387): n is a, c, g, or t
  misc_feature (1389)..(1389): n is a, c, g, or t
  misc_feature (1391)..(1392): n is a, c, g, or t
  misc_feature (1395)..(1395): n is a, c, g, or t
  misc_feature (1402)..(1403): n is a, c, g, or t
  misc_feature (1411)..(1411): n is a, c, g, or t
  misc_feature (1413)..(1413): n is a, c, g, or t
  misc_feature (1420)..(1420): n is a, c, g, or t
  misc_feature (1424)..(1424): n is a, c, g, or t
  misc_feature (1431)..(1432): n is a, c, g, or t
  misc_feature (1436)..(1437): n is a, c, g, or t
aacattaagaaggaaagttacaaagataaacgtcattacttctgctgaccctttaacgcatactttagtactatttattcttatcctatatatccgctcccaccagccggctggaggaaaaaatgatagtgaccatgcctgagagagtggaagaaggagttgttgccttgaatcagcactttgtgcttgtacatggcataggtggaggaagttggtgctggtacaaaatccggtgccttatggagaattctggctataaggtctcatgcatagacctcaaaagtgctggaattgatcaatctgatgctgattccgtgctatcctttgatgattacaataaaccactaatggatttcatgtctgatttgcctgagaatgaacaggttatattggtggggcacagcgctggagggttgagcattactcaggcctgtcacaagtttgcaaacaagatccgtttagctgtttatgtggcagcaactatgctcaagttcggtttcttgaccgatcaagatcataaagatggtgtgcctgatttatccgagtatggggatgtgtacgagctaggatttggattgggacatgataagcctccaaccagcgctttggtgaagaaagaatttcaacgcaaaatcatctatcctttgagccctcacgaggattcgacattggctgcaatgctgttgaggccagggccattgctggcactgatgagtgctcaattcagagaagatggagatgaagtggagaaggtgcgccgggtgtacataaggacaaggcatgacaaggtggtgaagccagagcaacaggaagccatgataaagaggtggccaccatctacttcgtatgaacttgacagcgaccatagccccttcttctccaccccattcctcctcttcggcttgcttctcaaagctgcagctttggatgttggattggatgcaattaactagttgaggacatggggcctccatgcatatgttttttttttttttggattaattaagtttttagttctcagagaaattttgaatttttggttcttaaattatatatatatttttaaattaatccttaaagaattagacacaaaagatagnctctgcattaataatctctttaagcaaaaaaaaaaaaaanattcctnagcccggggaccctattctaaacggcgccccgggggactcactttgtccttaggaggtaattcanctgggnacatgcanctgtcctgngaatgntccgtccatccccactacaccgacctaaggaancggggccagagnccaccatatggtgccnctncnttcanggaacnggcncntatttggccccgggagggtgttggctcctncntncnncgngggggggggtcttnnngnntnnntntnnaanaaaaaannagaaaaangntttttcncccnaaaagannaccnn

SEQ ID NO: 4715 - DNA, 1269 bp, Glycine max
gagagaaaagatacaaatccaattttttttgtatgaaaatattcagctacttcttagttctccaattataaataaatggtggagcaaccgtttcatttacaacatttttctctatccgcgtctctttagccaccatcgtttcacgtgtccctctcttcccttgttctgttctgtttgctctgtttgtttcctaggaaaagaaaaagcctcaattgggttcctttatatttatttttctttactcttataaaggtttttgttcttaggcggtgtttagtgtttctttgtggggttggtaaaactttcaccttgtttgaagggttgaggcagagattgttaaagggtgttgtggtagtagaaaaatggaaggaaggaaaaaaatgggttcttcttctttcacttctgagctctttggatccaaccagttccagaaatctgctgcttctggaatttttgaatctatgtttcctccaccgtctaaggtgttagggagagagtctctgcgttctgaagtgtgtgagaaaactgccaatgagaggtggagctccaaaattgattacatcagcaagggaagtgatggtgaaactcagagcacgacacataaggatatgagttctatctatcaggaacaaagacttcaaccatgtcaacttagctcatcaatccattatggtggccaggacatatgttcttgtcccaagagtacacaagattcaggatacaactctttgctgtacaagaaagatggggttgaagatgatttaggaagtaacctgtggcaagggggtccctattattaagatcacacttgccaaaggacatgctccttaaggtaaacaggaggatagtttagcattttagtgcatcttttgttgcatggacaacaagttatgaacagtgagaacgttgtggatggctagttgctttctccagccaaacaacacaatcacaatatgaacctatagttagtcatacgcatatcttttcatttacctgtaaagagtatagtattcaaaaacagtggtaatgtaagagttgtatggtatggtataggaactatatgcatcatcagctactctattattatgtggctgaggctttcaagtttttacttttacttgtatgggagaaactctcttttactggtttcccctctactttgtatttcagatgtgatgtgattagtgagaactgatcatttatgaatatgtagtgctagtttactttaaaaaaaaaaaaaactttactgccgagactagttctcccggt

SEQ ID NO: 4716 - DNA, 1919 bp, Glycine max
cgaccgacgcgtccgcccacgcgtccggttggggtaggtggtggtggcgccgaaccgcaatggagaagccatcgtcgtcgtcgtcgtcgcgaagaaaatcgagcacgaaggtgaaagcttcaaccgatgcgaacacgaacctgagcatgctcaacgaggaccttctccagaacattctagcgaggcttcctgctctgcatttcgcttccgcagcttgcgtcagcaaatcatggaactctctctgcaatcgcatcctcactcgccccaaactctcttccgcgatttctctcaacccttcgctccccgatgctgtcaacgaggttgttcacaaggttctttcggagccaattcgaccccatttcgctattgccaatatcggaactggattcagcactgccaagactttgtgccttattagacagtcgttgggatccaatattcctgttattgttaccgttgcgagtggtattatgggaagggatgctggaaccgatgagtttaaagaggtcaaatggggtgccctttttagtggctttggcgaggaatcgtatacgaggtttataaacgaaggcttagttttgactgttgggtacttgcctggattgaaagttgaagcattgccgttgcgacggccaacaaagacatcgcaagcaacatgggttgacaatttcataaaggatattaaggaatattcagcctctgtctccagtagccctttccctgttgggattatattgtttggagaagcaagctgtgacatgaaattggttctggagaaattggatcatgccatgcctatggacatggtcattgtgggtgatgagagaggctcttttgactttgtacacaaaagtgggaatgattctagaatcatttgtagtaaaaaaggaaacatagaagctgttgctcttgtatttgctcaggacagggacaggtctttgggaactattaggtttcatgttgcattgtcaaatggtgtttccactgtgggtcccagatacaaggcagcctcagttaaatcaaacagtgctgattgttcaacatggctaactgctaggagggaagggcaacaggaaaatcttgacggtcagagtattctacttgatatcaacaatttgctggacaatcatgttgagtctcctgatttgcacattggggtaattaaacataggaaattatccactggagcagagaagccaatgccaagaacttgtattgcatatcatggagttgtgggaggtgatgaagagtatctatatgttgatggcattggcataaaaacaggagatatctttcagttctactattcagatcctaatactgccttagcttcattaaccaaggtccatgatgccctcaagagtattcatctggaaaaaaattccaagagttccaagggtgatggagacaacgctaccaatgtttttgggggtattgtttttgcttgttacggccgtggtgaatccttctttggacgtcacaatgttgacagctctcctttcttagagaattttccaggagtgccagtgtctggaatattttgtggtggagaaatggtgcgtccttgtaccactgtgattggtcaatgtgaaggagcaagccccattagttgctgtctgcatgtttacagcactgtctacttagcaatgtcatatactcctccctctgtggaagattagatgccgttcatattttttttcttttcaaaatgtaaatttcttattaagtcggatgcctttttttaccctctgccgtgcacatggatctgagtatcttttggtgtacgagatattttatagtatttgatgattatggaatttttgttgtgctatatgaagtttttgtttactcgagacctgtcctctcaccttctgaagctgaagttctggtaaaaaaaaaaaaaaaaaaaaaaaaaaaaa

SEQ ID NO: 4717 - DNA, 1506 bp, Glycine max
gctgcgaaaagacgacagaagggggaccaacacctgtgcagcaattctctgtcaccaaatttgatctttctttctttctttctttggcgggaatgacagaaacgggggtttctgataatttcaagggcttaatactggcgatgggttctagtgcattcatcggttccagtttcatcttgaagaagaagggtcttaagcgtgctgctgcacgcggtactcgtgcaggagttggtggctatacttatctactagagccgctttggtgggctggcatggtgacaatgattattggggagattgcaaactttgttgcttatatctatgctccggcagttctggttactccccttggtgcacttagtattattgtcagtgctgttttgtctcacttcttgttgaaggaacggcttccgaagatgggggtattggggtgtgtatcctgcattgtgggatcaattgttattgtcatccatgcaccacaagagcaaactccgagttctgtccaagaaatatgggatctggccactcaaccaggttttatgtgatggcaatggtttcggtagttttggccttgatcgtacactttgaacctcgctatggacagactaacatgctggtctacttgggaatttgttcattagttggctcacttacggttgtgagcataaaggccattggaattgcaataaagcttacacttgatggaataagtcaaatagtttatcctcagacttggttttttcttaccgtggccataatctgtgtcattacacagttgaattaccttaatagggctctggatacattcaatgccacaattgtttcgcctgtatattatgtaatgttcaccactcttactattattgccactgcaataatgtttaaggattggtccggtcaggatgtcagcagcatagcctctgagatatgtggattcatcactgttcttacaggaacaatcatattgcacatgactagagaacaggaagaatctaatatgcaaaagacctcaacatggtttataggtgaggatttgatgaagggtgttgagaatgaacacctgatccttatacacgattcggattacctagaacgttgagttttccttggaggttaggttgatgtgcgagaacatcttccatcagtgccaatacaatgacgtgagcgtgtccatggtcacatgatgtggtgcatttgcaatgtgcattgttgttaactggagccatctcagaatacgtgtgatatgctaattgtgatcaagtgccgaatcgttttccaacggaaatgagattgctgtctcattacaacaaatgaaatttttggaacgatcttatgccctggtccattgtccatcttagccagtgtaacttttcttctcatatatattttttttggtaggaagtgagcaattgttcatatagttccgtctgtatttctcatttaattaattattaggtttatcgtttcttttcttgttggcttccgctgaaaatgttcaggatattt

SEQ ID NO: 4718 - DNA, 2466 bp, Glycine max
aaaaaagcagacctaaacacacaccactctccatttcactcccaacacccacacacaaaaaaaatttaattgcaaaattaaatttaattaaattcccattaaaaataaaaaaaaaaacaaagaaacaaactttcgttcaatttcatttttcttttacgtatccaagaagtttctcataaacgattcctcagagagttgaaaacatttttcaactcgtttactgagtggggggttctgctgcttcagctgctactgggtccaatcgttctctactctatgtttgtgtacttgaggtgcatgtggttgatactccatggaaactgtggttggaattggggacaatgacgatggaaggtttgaagacagtggggttgatagtaggcccccccccagttcggctttgtcttcaccgaagcaaatttccaacccaattgtatacaagcttgttcgggttgaaggtgatgggaagttagtgcctgcaacggatgatgaagtaatggaggtgggggattttcttgagtatgaaaatagtgaaatgcatgttgtcacaaacactggacaaagtttggaatgcatatcaattgaaagatcatcttctgggaagcttcgattggagtgtttggaagaggcagatttggggaaactaaatgcaaaattacagattttgcaaaaggtcaaagaagaggagaaacatcgcatatcatgtggatcacctgttcattctcatgaaaatatagatagccagtgttcagctgataaatttcctgtcatggatgggaaggttcaatctgaaactccctgccaggaaattccttctatagcatcaagttttaattatactcatagtaatcaatctgggagtattgatcagtgttccagaccttcagaaggagtaatagagagcggatcatctgcttctgctgtctattccaatttaaagcctgatctttcaatgtcagatggagaaatatgcttggacaagctatcaatcagagaactgcatgaactgtttaaggtaacatttggtcgggaaaccactgttaaagacaaacagtggctgaaaaggaggattgccatgagtttaactaattcgtgtgatgtttcagctacaactttcattattaaagataacaaaatagttagaaaatttgaagaagacagttctggaaatatgaatgctggatctttaatctcttcggaaaatatgactgaagaagatgtcaactttaaggattcatctgctgtagatgcttgtggaattgatgataaccaagttgtttctgaaacaagatcagaaattggattggaagatgagaattatcagacaggacaaagagctgcaaaaagaattcggagacctacgaagagatatattgaagagctctctgaaaatgaatctagagagcacaatccgaggttgtcaatttctaataaaaccgtgggatttggacatgtttctccaacttcgaatgtcaggcctgctagaaatgctttttcagaggcgagaacatatagcaccaggttagactctcttggaggttctaatgtccaaattccttgtgtgtctcgggttcggagaagtcgtccaagaaaagatatcgcgtctcttatgaaattccatccaactggaatgggtgaggctgaaaaactgagtaataagctccttgagcatagttctgatgctggtagtgacttttcagacaaagttttgaagtcaagaatgcctgcaaagtttcatcaaccatcctcttctgaacctgtgaaagagcagtgtccagtaatatgcccggttgagctacggcaggaattgaggccaaaaagggcagatccatccagccatacctcagatgacaataatatagttactgttcctactgcaaaaggagggatgaggaggaagcatcatcgtgcatggactcttgttgaggtgattaaattggtggaaggtgtgtcacggtgtggagcagggaggtggtccgaaatcaaacggctctcctttgcatcatactcatatcgtacctctgttgatcttaaggacaagtggaggaacttgctcaaagctagctttgcactgacacctgcacctgcagatgaggggataaatttgcggaagcatggtacggctcccattcctgagaaaattttgctgcgtgtaagagagcttgctgagatgaattctcaagtgcctccaaattatagctcaagccagttagcatctggtggagggagtgtgcatggagatagatcggggtacttgtaaataaatactaaattccttatcaggcaacaaaaaaaaaatatattaaaaaactaatttctgaactttgttagaccaatcctttcttggatgcatagagagtaagtagatgcaatcttgtagacagttgagagattgattagatgtttatgcactgaaacgttgaatagaatcgtgtcactttttggttctcaaaaaaaaaaaaaaaa

SEQ ID NO: 4719 - DNA, 2018 bp, Glycine max
aaaagggagagaaccaaaaacgaacgaaaaacagagacatcaaagtcccagcggcgtcgccccccccccctgattgagtaaacagcaagaagcagcagttgcagaagcatcaacacaccgtttccatggggaactgtaacagcgaaccctcttcccaaacccagccacattccgatcaccaccatcatcacccccaaccctccaacggcatcactgtccttcctcccaattcgaagccctccgtaggccgggttctgggccggcccatggaggacgcccgctccacctacaccttcggccgcgagctgggccgcggccaattcggcgtgacctaccaagtgacccacaaacacacgaaacagcaattcgcgtgcaaatccatcgccacgcgcaagctcgtccaccgcgatgacttggaggacgtccggcgagaggtgcagatcatgcaccacctcaccggccaccgcaacatcgtggagctcaagggcgcttacgaggaccgccactccgtcaacctcatcatggagctctgcggcggcggcgagctcttcgaccgcatcatcgccaagggccactactccgagcgcgccgccgcagatctctgccgccagatcgtgacggtggtccacgattgccacaccatgggagtgatgcacagagatctcaagccggagaacttcctgttcctcagcaaggacgagaactcgccgcttaaggccacggacttcggtctctctgtcttcttcaagcccggcgatgtgtttaaggatcttgtcgggagtgcgtactatgttgctcctgaggtgctgcgcagaagctatggacccgaagctgatatttggagtgctggggttatattgttcattttgctctccggtgtccctcccttctggtcaaaaaaggaacagggtatctttgatgctattcttcgtggccatattgatttcacatcagatccttggccttccatatcgagtagtgccaaagatctggtcaagaagatgttacgagctgaccccaaacaaaggctctcagcagttgaagtccttgatcatccttggatgagagaagatggagcatctgataagcctctagatgttgctgttttatccagaatgaaacaattcagggcaatgaacaagctaaagaaagttgctctgaaggttattgctgaaaacctttctgaagaagaaatcattggcttgaaggaaatgtttaaatccatggacacagataacagtggaacaatcacttttgaagagttgaaagctggtctgccaaaactgggtactaaggtttctgagtctgaagtaaggcagttgatggaagcggctgatgtagacggaaatgggaccattgattacattgaatttataacagctaccatgcacatgaatagaatggaaagagaggaccacctatataaagcttttgaatattttgacaaggatagaagcgggtacatcacaatggaagagttggaatctacccttaaaaaatataatatgggtgatgagaaaacaataaaggaaatcattgtggaagtcgatacagacaatgatggaagaattaattatgatgagtttgtagccatgatgaggaaaggcaaaccagatttagtaaccaacagacgtcgcaaatgattacgttgatcataaattgcctgtctaactgggttcgtagacagacaggaggaggctcaggctctacacgtttttgtgatacggaatacgttgcattcaattcgacactctttactcacatgttgtttttgagagctgttctataacaaagtatttctgcttctttgcctgctagtttgcgggtctcgtgggacaatttactctcgagtttgtaattttttaacatagggaattaaattttaacttggctctttagtaaatgattttttcccttccatataatatatgtttattctgattccttttaagtaatatttatgttgcagctcttgcatgtaccattgaagtatattaatattaattcagaccaaccat

SEQ ID NO: 4720 - DNA, 1024 bp, Glycine max
gaaaaaaaataaaattatatttctttaaatgtgaacttaattaacattagatgtcttttaattagtagtagtagttaagaattatggagcaaagtccattttagtccttgtgccggccacatcgttttaagacccgacacagacacacttggtcttcctctgaccaagaccaacgaaccaacctcttcctccgactaccgttctcctcctattttgaccttagtccatgggaaactgcagcagcggggccggagcccccaccacctactccgacgaccatccccaccacaacggcataaccgtcctccctcccaactcaaacccttcaccccaactccccaagcccccaccgacctcctcctcctcctcctcgctgggccgggttttgggccggcccatggaggatgtccggtccatttacatattcgggcgggagctggggcgcgggcagttcggcgtgacgtacctggtgacccacaaggccacgaaggagcagttcgcgtgcaagtcaatcgcgacgcggaagctggtcaaccgcgacgacatcgacgacatccgccgcgaggtccagatcatgcaccacctcaccggccaccgcaacatcgtcgagctcaagggcgcctacgaggaccgccactccgtcaacctcgtcatggagctctgcgccgccggtgagctcttcgaccgcatcatcaccaagggccactactccgagcgcgccgccgccaactcctgccgccagatcgtcaccgtcgtccataactgccactccatgggagtcatgcatagggacttgaagcccgagaatttcttgttgctcaacaagaacgatgattcccccctcaaggccacagattttggcctctccgtcttttttaagccaggttagttacttagttagttactcgctgtggatcaacttttgaactagtacttggaggaggaggataccaagaagtagaaagtcaaaatgaattaagcaccaaacatttacctattcaggatagaagaaaattagaagtct

SEQ ID NO: 4721 - DNA, 1248 bp, Glycine max
ctttatttattttcttatgtccatttcaggcaatatttaacaatggtacggagagttggtagccatttgtgattctgaaaaacccatcaagatggatcaagacagttctattgggaaagttttcaagttcacacatgttctggctgcctccttcgccggttcagttgccgccgccgccgcctcaagctaccggcgggcaccgtccacggtggtgggagagcagaagaaggttattcccgagctacgtaggacggaatctgggcgtctcggggagatggaaaagttctcccactatgttgcaaggcaaatggggtttgaagatgctgatgaggttccagagctatgcatattggcccaagagtatttgaaaaaatccaaagggtgcgatgaaagcatctttgaatatatttccagtggcaatgtggagaacactgattctctatatgcgaaattagttgaggagttagagagatgcatcctcagttatttagcatttcactggaaccaagctacatctgtcattagtcaggttttgggtgtggagtctcagcagaaaaaaaagctgaagggaattctattggcagctacaagggaacagaggtttgatagagtaaccaagaatctgaaagtgacaagagtgatctctactttggtggaagagatgaaagcaataaatggtgactcgcaatgtacagaagtgatggtgcccatggcccacagtgagaggagtccagtcctgctgttcatggggggtggcatgggagctggaaagagcactgttcttaaagacattcttaaagaatcattttggtcaggagcagcttcaaatgctgtggtggttgaggcagatgctttcaaggagagtgacgtcatatatagagcccttagctccagaggtcaccatgatgacatgctccaaactgctgaattggtgcatcaatcttccactgatgctgcatcatctctgctggtgacagctctaaatgagggtcgagatggtgatcatggatggtaccttatcatgggaaccatttgtggagcagactattgctatggcaagaaatgttcacaaacacaggtaccgaatgggggtaggatataaagtatctgaagatggtacaacaattactgaagattactgggagcaagtaaatgaggaggaagaagaacatcaatcagaggaaaattgtaatggagaaccacgcacacgaaagccttacagaattgagctagttggtgtggtttgtg

SEQ ID NO: 4722 - DNA, 819 bp, Glycine max
ctgtgaaatctctcttgattaccttacaggtgggtcttcctggccaggtaagactttacttgcgaaggctgtggctggggaagctgatgtgccatttataagttgttctgctagtgagttcagctacgtaggccccccccccccaattgtatgttggcatgggtgcctctcgtgtaagagatctatttgcaagggctaaaagggaagctccgtccataatctttattgatgagatagatgctgtggctaaaagtcgtgatggcaaatttcgcattgtcagcaatgatgaacgagagcaaaccttgaatcagttgctcactgaaatggatgggtttgacagcaattctgcggtgattgttcttggagctactaataggtcagatgtcttggatcctgcacttcgccggccaggaagatttgatcgtgtagttatggtagaagcacctgatagaattggaagagaagccatcctaaaagttcatgtttccaagaaggaacttcctttagccaaggatgttgacctcagtggcattgcttgtatgaccactggttttactggagcagatcttgcaaacctagtaaatgaggctgctttactggctggaagacaaaataaagttgtggtggagaaacttgatttcatccaagctgtagagagatctatagctggcatagagaagaagactgccaagttgcgaggaagtgagaaggctgtagttgcacgacatgaggctggtcatgctgtagtaggtactgcagttgcgaagcttcttcctggacagccacgtgttgagaaactaagtatattgccaaggtcag

SEQ ID NO: 4723 - DNA, 1740 bp, Glycine max
  misc_feature (143)..(148): n is a, c, g, or t
  misc_feature (150)..(159): n is a, c, g, or t
  misc_feature (339)..(343): n is a, c, g, or t
  misc_feature (469)..(473): n is a, c, g, or t
  misc_feature (484)..(488): n is a, c, g, or t
  misc_feature (525)..(529): n is a, c, g, or t
atactactttatgggttatgacttgtgaatatgatgcatgacatttatggaatattggttatatgtactaatatgcatatgaatttatatgcatattttcaaatgtatatgacttttgtaaaatcttacgattctatttatgnnnnnnannnnnnnnnngatcgaaggtaaatccatattttgactaccttgctatttacatcattacagagcagatcttgcaaacctagtaaatgaggctgctttactggctggaagacaaaataaagttgtggtggagaaacttgatttcatccaagctgtagagagatctatagctgtaagtcacacttgctcatnnnnntctataagttgctctaattatatggtctttagtaccttactcgaacagttggacatagttgtatggtatggaactatggataaaagtagtctaacttgtattcttgtgatgaccaacattcacacnnnnnatgtatctagnnnnngcacacttgactgttaacacatgtagtttagtcagannnnnctaactgtcaaatgaacgtaaaattgaaaatttcagttttgcaattggttgtgttaaatatggaccaagttacttgtttcagggaatagaaaagaagactgccaagttgaaaggaagtgagaaggctgtagttgcacggctcgagggctggtcatgctgtagtaggtactgcagttgcaaagcttcttcctggacagccacgtgttgagaaactaagtatattgccaaggtcaggaggggctttgggctttacttatattcctccaacaactgaggatagatacttgctatttgtcgatgagttgcatggtcgcctggtgacccttcttggaggacgtgcagctgaagaagttgttttttctggtcgagtgtcaacaggtgcacttgatgacatacgacgagcaactgacatggcatacaaggctatagctgaatatggtcttaatcagaccataggtcctgtttcaatagccactctttctagtggtggaattgatgagtctgggggagcagttccttggggaagggatcagggacatcttgttgatcttgttcaaaaagaggtgcaaacattactgcagtctgcactggctgtagcactttccattatccgagccaatcctactgttttggagggccttggtgctgatttggaagaaaaggagaaagttgagggtgaagagctacagaagtggttaagattggttgtcgcaccaacagagcttgatgcctttgtcaaaggtacacagccacctcttcttccatcgcagacaggttcctgacagttgatagctgtttattatgctagctatgtggactgtaaattggggtatgaattgacaccattgctccgaagccagtgaagttatatctcaaatagcatgaattcacctttacaactttgtacatccctgtaaggtgaattttggcatcatttttaacaagtagccagcctgttatttgtgttataattcactccaccaaatgtccaaatccatgggagatgggaagattcaaatatacacatcaatacctcttcacatgtttcacaattctttaactggtggcacctttactacatgcatgctcgtatatgaatttgttttactgacaatcatttatgttacatgtgatttctgcaaatgtatgtttgtgtacagtttgattttctgaaatatacaaggaaatttaccaagtgctactccaaaaaa

SEQ ID NO: 4724 - DNA, 1500 bp, Glycine max
ggctcgaggcagttctgctgtcattgttcttggagcaactaatcgtgcagatgtcttagaccctgcactccgaagaccaggaagatttgatcgggttgttatggtggaaacacctgataggattggaagagaagctatccttaaagttcatgtttccaagaaagaacttcctttagctaaggatgttaaccttggcgacattgcttgtatgaccactggtttcactggagcggatcttgcaaacctagtaaatgaggctgcattattggcaggaagacaaaacaaaattgttgtggagaaaaatgatttcattcaagctgttgaaagatcaatagcaggaatagaaaagaagactgccaagttgaaaggaagtgagaaggctgtagttgcacggcatgaagctggtcatgctgtggtaggtactgcagttgcaaaccttcttcctggacagccacgtgttgagaaactaagcatattgcctaggtcaggaggggctttgggatttacttacactcctccaacaaatgaggacagatacttgcttttcattgatgagttgcgtggccgcctggttaccctacttgggggacgtgctgccgaagatattgtttattctggtcgagtgtcaacacgtgcacttgatgacatacggcgagcaactgatatggcatacaaagctatagctgaatatggtcttaatcagacaataggccctgtgtcaatttccaccctttctaatggtggaatggacgagtctgggggatcagctccttggggaagggatcagggacatcttgctgatctagttcaaagagaggtgaaagcattgctgcagtctgcgctggaagtatcactttctattgtgcgggctaatcctactgttttggagggtcttggtgctcatttagaagaaaaagagaaagtagagggtgaagagctacagaagtggttaagattggtagttgcaccgacagagctggaaatcttcatagacggcaagcaagggtctctcctcccattgcagacaggttcctgaacatttgagagttgtctatttatgctaccaatgtcgagtgaaacttaaggtatgatttttgacgttggcgggctaaagccagtgcagatatatctcaaacaaatgagttcacccttacaacctttgtatattcctgtaaggtgaattttggcatcatttttaacacgtagccagcctgttatttaactcataattcactcatccaaagccacaggggagataaaaagataaagaaaaatacacagtagtgcttctcaccatctacatatatactggtagttgaatttgttgtatattgactattatttcagtcatgatgtggctgtttgcaaatgtaatttggtatatagttgttgtatacattaacgattctgtgaaatgtaaacggctctgctatatgttacacccaaaaaaaaaaaaaacaaaaaaaaaaaaaaaaaaaaaaaattttaaaagacgggcca

SEQ ID NO: 4725 - DNA, 2374 bp, Glycine max
ttcgagggaaagtcaatttcgtagacatgatataatgtagagaagaaggcacgctcttttgagggtgctccgtgctcctatcagtttcaatatttattaaatttcaaatttttttttgctaattagaattttcttgctgcttatataattgttttaacatcgttggggttgtacaaaaaattggttttggaatttgaagttgtgagtgctgaagatggattcggaaggcgagggtgttaggacaccaaagatgggagtggaagcagaaggggctctgaattcaaagatgaaaggtgctggaaacgtgagcagtaaggatatgattttcagagctgataagattgatctcaagagtttggatgcacagctggaaaagcacttgagcagggtttggtcgaggagcattgagactaaacggcctagagaagagtgggagattgatttggccaaattggatctgcgatatgttgtggctcatggggcatatggtactgtatacaggggtacatatgatacccaagacgttgcagtgaaagtgttggactggggtgaggatggtgtagctactgctgctgaaactgctgctttgcgggcatcttttaggcaggaggttgctgtctggcaaaaacttgaccatccaaatgtgacaaaatttgttggagcttcaatgggtacttcaaatcttaagattccgccaaaaaaccctatgaatgccgacgaagagtcccttccttctagggcatgctgtgttattgttgagtttgtctctggggggacactaaagcaatatttgtttaaaagtaggaggaggaaacttgcttattagattgtgattcagctggctttggaccttgctagggggtatgtcccatttttaacatctctacaattaccaactgcatatcttctactaatataaataatttgttttccccaatatgtgcagtcttaattatctacattcaaagaagattgttcaccgagacgttaagacagagaatatgttactagatactagtcggaatctaaaaatagctgattttggagttgctcgggttgaagctatgaatccaagtgacatgactggtgaaactggaaccctaggatatatggctccagaggtaagtgtttccatgggatcgcctccctattctattagtcctttattatttcaaatacaacttgcaacctttcaagttactttggtataatgggaatacaaaggtttggacctgtgacctcataaaaattatgtaaacccctcagcactagcccaattctagtggcttatggtgctatttctattactatttgtgtgcatacattcagggttgttctgaaacagtcacttccagttattaactttaatcttaagatcacgccacatgtaggttctggatggaaaaccttacaacaggagatgtgatgtctatagctttggcatttgcttgtgggaaatttattgctgtgatatgccttatccagatctaagctttgctgacgtgtcatctgcagttgttcgccaggtcagttcacgcgacaaactattcatatatggaaacacacttccatatcatgtttgcctatatgttgcccatgatacatacatgaattttgtgttcttgcacagaatttacgacccgctattccgagatgttgtccaagcgccttggcaaatatcatgcggaaatgctgggatgcaaatccaaacaagcgtccagaaatggaagaggtggtgaggatgctggaagcacttgatactagcaaaggtggtggtatgatacctgaagatcagagttcaggttgcttttgttttgccccaacccgtggtccctaatccgtgaacccaacataacatcattttgttgcgtgttcaagagattatatcaagcactgcaactggcaattgatattttatggttttgccagttcacagctcaatttcctttccttatggccagaatattgtgaaaacaaaggaagggaattgtattttattttttaaatttttggctaaaggagcgatttcattgcttcttacatattgtatctagtactgaaaactggtttcttttgagcatgaaaatgggttattaattataatctctaaaaaaagttactactactactactactactcgtgcctggctggctacctggagtactgagtttactttggttctttatccctgtttcggtggggaactcaatctggcaatttctgttttctctgagggactatgtgtattctgattgggagaggtctaagattttctaagaacttttagtccaatttttttttagagaaacacattccctaagtgtttggtagaggtctaattaaattaacctttttcattttttttccctacac

SEQ ID NO: 4726 - DNA, 1905 bp, Glycine max
tcgagtagctccgttggccctttctccttcctgcagtactcgcagttcccttctcctcgactcggatcggagcaaagctctcctctgtccacaatcctccgtttcactctctctaaaatcctaacactccgaaatgcccgaaccggaatcgcaaaacggacacgagcaagacccggagccgcagccagaaacagaaccagtgccaacagagcaaacacaaccacaattggagccgaaatcgaaatccacgcccgaaccagaaccaaatccgcagccagaatcggagccagtgccaacagagcaaacgcaagcacaattggagccgaaatcgggatcagaagctgatccagcggtaaacgacgcagatctcagggaaacgacgattcattccaatgaaacgtatgccaatccttctcccactcctcagctacgtaaagacgaaggaagccgaacgttcaccatgagagaattgctgaacggattgaaaaacgattccgaaccggagagagaagatggcaactccccctacagcccagaacaacagcaacagcaggcagaccagaacaacgctgcaatggatttgataaacagcgttgtaggtgtcgacgaggaaggccggtcccgacagaggattcttacattcgctgccaggagatatgctactgcaattgagaggaaccctgaagattatgatgcattgtacaattgggcattggtactccaggaaagtgcagataatgttagcccagattccacttcaccctctaaagatgctttgcttgaggaggcttgtaagaagtatgatgaggccactcgtctttgtcccacactgcatgatgctttctacaattgggctatagcaatttctgatcgggcaaagatgcgtggccgcacaaaggaagctgaagagctatggaagctggcaacacggaactatgaaaaagcagttcaacttaactggaacagtcctcaggcgctcaataactggggacttgctcttcaggaactcagtggcattgttccagctcgagaaaagcaaaagattgtgagaactgctatcagcaagtttcgtgcagccatacagttgcaatttgatttccatcgggcaatttacaatcttggaactgttctgtatggattagcagaggacactttaagaactgggggatcagtgagtgctcaagaagtttcaccaaatgaattatacagccagtctgcaatatacattgctgctgctcatgcattgaaaccaaattattcagtttatagcagtgccttgcggttggtgcgttctatgctaccattaccacaccttaaagttggatatttaactgcacctcctgtgggggcatcgattgcacctcataatgactggaaacgatcagaattccttttggatcatgaaaagcttcagcagatacccagaggagaacataaacaagtaccacctcaaaatctctcaggcagatcactagatgcagtgagtggggataagaagactatcaaagtagatatagcagatattacttctgtatcagcatgtgctgatcttaccttaccacctggtgcaggcctctgcatagatacaagttatggatcagtttacttggttgctgactcttgggaatcattggatggctggctggatgcaattcgtctagtttacacaatttatgtgcgaggcaaaagtgatgtactggctggtataataacaggatgaatataagttttaattgtatcaccaatttgatatgccatttttagcaagaactcattatccagcatttttcacttcgcgaacttgtgtataatattgagtaatgtatggaataattacaataccattgaaaaatcttggtttactcattgaccagtttgttaaccttcttattggttaccatatat

SEQ ID NO: 4727 - DNA, 1542 bp, Glycine max
atttctcaaaaccatttcaagacactacatacccctcccaacccaatcaaatcaaatcttcgttcgaatccttttctctttatcgttcaccgcatcccaaactcaccagatccgtcgtcgattcggttttcccgctttctatttttcgtttcccattttctcccggaacgtgaagttctcgctctgatctcacgtgagagttttggaacctgatgagtgcgtatatgtgggtgtatcgtagtgaaggcgtgttttgagttatcgtcggtgttgaaggaatcatgttctggagggaccgtgagagagagaacaaagagttgaacggtggggtcctatgtggcctggtcagagtcctcgttgttggtgattctggtgttgggaagacttctttagttaacctgattgtaaaaggttctccaattgctcgccctcctcaaacaattggttgttcagttgatgtgaagcatattacttatggaaattcaggcagctcttccagtagtcttaagggtgattctgagagagatttcttcgttgaactgtgggatgtctcaggacatgaacggtacaaagattgtcggtctctgttttattcgcagattaatggtgtaatttttgttcatgatctttcacaaagaagaacaaagactagcttgcagaagtgggcagctgagattgctgcaactgggacattttcagctcctttgggatctggtggtcctggtggccttcctgttccatatatttttattggtaataaagctgatattgctgcgaaagagggtacaagaggaagcagtgggaatcttgttgatgttgcacgccaatgggttgagaagcagggtttgcttccttccagtgaggagcttcctttgactgagagttttcctggtaatggtggccttattgctgctgccaaagaagcaaggcatgacaaggaggctgtggtgaaatttttccgcatgttgatcaggagaagatatttctcagatgaaatacaaataccttcaccagcatggtccattccttctgttcagagacaagctcagcgtatagatgaaaatttcacagaagatgatcaatcttatgatacaagtctaagcagtgatccttacaagtataacatgcttccgccacttccagcacaacgcaatctaacaccaccacccacactctatcctcaacagccagtttcggtgtcggaaaactatagtttccctagattttccttgtcaggctcctcagaaatcagtactgtggcgagaacaaagcgatcagatattaatgtctgaagatctgtgtatttggtaattagtcattgctaatacatgaatgtatacttgcatggaacaaagttatatgcttgtttaaattctttgttcctattgtaacttgtccattgattcattcgtttttaagaggctttctcagtagacggaggagctacttgttcaaagtttggggagaatttaaatgatacgtactcgattcttttacaaaaaaaaaaaaaaaaacatacttttcttttaaaaaaaaaaaaaa

SEQ ID NO: 4728 - DNA, 1122 bp, Glycine max
ggctcgaggatcttgttgaggtggttcctgaacccattagcaagtggcaggatgttggacctgatcactttaacattttggatgccttttatgccgagccgcaacggtatgcctacacctttcagaactatgtgtttgtcacacgggtcatgcaggaaagagagtcatctgctggaatcaagcctcttcgtttgatggagaggagtgttttcagtgacaggatggtttttgtacgagctgtccatgaagctaactggatgaatgggatggagatcagtatctatgactcgtggtttgatcctgtagtatcctccttgcctggacttattcctgatggttttatctatcttagggcaagtcctgacacttgccataagagaatgatgttaagaaaaagaacagaagaaggtggagtcagccttgactatctctgcgacctccatgaaaagcatgaaagctggttatttccctcccaaagtggtaatcatggagtattacctgtcaatcagctgccccatcatattgacaactctttacaccctgatataagagaccgcgttttttatctggagggtggtcacatgcattcaagcattcagaaggttcctgctttggttctggactgtgaacccaatattgatttcagcaaagatatcgaagcaaagaggcaatatgcacgccaagttgcagaattttttgaatttgtgaagaaaaggaacgaggtttcatccaaggaaggaagtagccaagcccaaccacaggtgctgctacctcatgagggtggcctgtggctaccagatggaaagccttttccccaggaagccctcaaatctttggacttcagacgagcagcgtcgttcatgtctggctagtgactgctaaaccttgtgattctgggcaaagatatactactaatgtccccttgttgatgtattcacggtttttattgcatgtaaagattgactttggaccttgactgatgtaaaacagtggcggtatttacggttgcctaatgctttgctgacacactacttggtcgtagattatatattcttattgctgtgattaaaaaaaaaaaaaaaataatttattattattccctcgagaaaaaaaaaaaaaaaa

SEQ ID NO: 4729 - DNA, 1712 bp, Glycine max
gcacgaggttccatctcatatataagagaaagcccggcgtgcccggcctaaagagaatttgcagagccttcagatttagctacctctattattattattactcattactcatttctcgtaccaaacacaacacaacacatcacactcttctctcttctcttctttcttatcccattacaatgcccggtagtttagaaccgttggatttgggtgttcacataccctaccacttcagatgcccaatctcgctcgaactcatgcgagacccagtaaccgtctgcaccggtcaaacctacgaccgcgccagcatcgaggcatgggtcagcaccggcaacagcacgtgtccggtcacacgcgccactctcacagacttcaccctaatcccgaaccacacccttcgccgccttatccaagagtggtgcgtcgctaaccgcgcttttggcgtcgagcgaatccccactcccaaacagcccgcagaccctgccttagttcgctctctcctcaaccaagcttcttccggttctgcccctgctcacctccgcctttcttccattcgccgactcagacaactcgctcgcgactcggacaagaatcgttccctcattgcctctcacaacgttcgccagatccttctccctatcgttttcaacaacggttcggatgagttgaaaaacgaatcgctcgcgctactcgttatgtttccgcttggtgagtcggaatgtgcttcgctcgcatctgattctgtgaagattggctatctatcgcggatgttgacgcataactcgttcgacgtccgagtcaactcggccgcgttgatcgagatcgtcgtcgccgggacgcactcgccggagctacgcgcggaggtgagcagtgtcgacgaaatctacgacggagtggtggatctgctccggagcccgatctcgcacccgcgcgcgctcaagatcgggatcaaggccttgttcgcgctttgtttggtgaagaatacgcggcagaaggcggtggacgccggcacgccggcggttctagtcgaccggctcgcggacttcgagaagtgcgacgcggagagggcgctggccacggtggagctgctctgccggattccggcgggatgcgaggcgttcgccggacacgcgctgacggtgccgatgctggtgaagataattctgaaaatctccgaccgtgcgacggagtacgccgccggagcgctgctctcgctgtgctcggaatcggagcggtgccagcgcgaggcggtggcggcgggcgtgctgactcagcttctgcttctcgtgcagagcgattgcacggagagagcgaagaggaaggcgcagatgctgctgaagcttcttcgggattcgtggccgcaagattccatcggaaataattctgacgattttgcatgcagccaggtcgttgtggttcccttttgaccgttttttaatttttctcctccagtaataattatagtggaaaaaaatgtttagatttcgagaaaaagaaagcttaattagagagtcttttttgtttgtttagattggtaaataaataggtctgtaatgtaattctgtatttaattatttttctttcttctctttgtttttgtatgtaacgattattgtgaagaacgaaagcaagcaaaaatgtttcatcagggagttgtaatttttgtaagatggaaaagaaaaatcaaaatagaggtaaaaaaaaaaaaaaaa

SEQ ID NO: 4730 - DNA, 1760 bp, Glycine max
ggggatcaatcaccaaatacacatcaagtcctgctctctgagtactctcccacagacaagatttttggactttaaaatttaatcaaattcatttcacaaaggagttaagttaactctcccttgaccacattgtttggttaggcttgtttctcatggagcatcatcagcagcaacaattattgtcacacttgtgaggtgagttttgtgaggagtggcactctaaaggtggttaattctgaactcccatgactagtaatgtgccatattttttggaagagagaggggctaaacaaaaattaaaaggaaataagaaaagaaaagaaaagtaaatggccacatcattgaaggcgccccttctcacctacgtaggccctccccccccccccagaaaagcctaatccagctgagaaaaaaaaatggatgtagagaaagccttccacatgactggaggagttggcaaaactagctatgccaagaattcctcactacagaagaaggaatctgataaagtgaagcacataatcatacaaacagttgaggagctctaccttgcaaccactccaaagagcataggcattgctgatttgggctgctcctctggaccaaacaccctatcaatcatcaaagatatctttcaggccatccaaggcataagccacaggatcatgcaccactccacagagttcagggtgtacttcaatgatcttccaacaaatgacttcaattcaatcttcaaggccatcccagagttccaaaatttgcttaggcaagacaggaaaaatgggttcccttccattttcatgggaggctaccctggctcattttatggaagactgttcccaaacagttacttgcactttgtccactcctccttcagtcttcactggctttcaagggttcctccatcactctatgatgagcacaaaaggcctttgaacaaagggtgtgtttacatttgtgaatcaagccctgaagtggtgtctcaagcatactatcaccaattccaggaagatttttccttattccttaggtcaaggtcagaagaactagtagtaggtggaagaatggtgctgatatttttggggagaaggggcccagaacatgttgacagaggcaactctttcttctgggagattctttcccgttcatttgctattctagtctcacagggagaaatagagcaagagaagtttgattcatatgatgcacatttctatgcaccatcaagggaagagatagaagaagaggtgaggaaagaagggtcattgaagatggagaggctagagatgtttgagatggacaagagtaataatgagcaagaaagtagtgagagctatggcacacaggttgctgtggcagttagggccattcaagaatcaatgatctcacaccactttggagaagggatcttggaaagtttgtttgagaattatgcgagattggtagatgaagaaatggctaaggaggatattagaccaatctcttttgttctggttctcagaaaaatatgatactagctatgattattattattattgtacaaaaatattaattatatattaatgttattaattattttggtttgcagtattgagacgtgtttaaattgcagtcatttactgcccatcactgtaatcatcatgatcagtctaatgtcaagtgttggtgtttcagtttatttccttcatgtgtgtatgtatactcttcctgtatggtgtatttaatcatatatttgaagattttcaaatatactaatattt

SEQ ID NO: 4731 - DNA, 1680 bp, Glycine max
tcagctacgtaggccccccccccaatatgccgccacgtccaaatgcagtgccttctacaatcaccattcaccattcaccattcagttgcaacttgcaaccataaccatgacagtacaaacaagagtgttctcatgtcatgataatagatttctctcttcaacttggcatgctcccaaaccttaaccaaacatcgtttgacctgccaactgttacgtacagttttagctgcctcctatgatgggaggagtgtctggcggcggcgacgacgacgtcgttcacatccagcaaccgaacaagcccggcgaccctttcatcatcaccgtcaattgccccgacaagacaggcctcgcttgtgatatctgcagaatcattctcgatttcggtctctgcatcgccaaaggagatgtttcaaccgatggcgtgtggtgttacattgtgttgtgggttattccatactccgtgttgcttcctatgagctgttcttatctgattctcaaagaacgacttcagaaaatttgtccgccttgtttagcctccttttacgtcattcagcaaccttcgagatcttctcctgtctatctgttgaaattctgttgccttgaccggaagggcttgttacacgatgtaacgaaagtgctctcggagcttgaacttaccattcaaaaggtgaaagtgaccacgacccccgatggcagagtcttggacctctttttcgtaacagataacaaggaacttttacacacaagaaatcgacaggatgagacatgtgaaagattgaatgctgttctgcgagactcgtgtatcagctgtgaacttcaattggcaggtccagaatatgagtataatcagggtatctcttctctgtctcctgcattagctgaggagctatttcgatgtgagttatcagataacgaagttcgtgctcaagctcttagccctgatatgacaaagttgaagaaaaccaatgtaacaatggacaattccttaagcccagctcacacgctagttcaaatacgatgtgctgatcacaagggtcttctttatgacattatgagaactttgaaggacttgaatatgaagatttcatacggccgattttcacccaattcgatggggtattgtgatttagatatatttattcagcagaaagatgggaaaaagattttggatccggagaagcagagtgcactctgctctcgtttgaaacaagaaatgcttcatccattgcgagtaatcattgcaaaccgaggaccagataccgaactgttggtcgctaatccagttgagctatctggaatgggaagacctcgagttttttatgatgtcacatttgctctcaaaacagttggaatttgtgttttctcggctgaagtaggacggcattcaacttcagagcgtgaatgggaggtgtacagatttctcttggatgagaactgtgagtttcaattaacaggtgttgctgctagaaataagattgtaaatagggttcgaagaaccttaatgggttggtaagtagtagtatattttaagacaataatatgtattatgtagcatccaccatctggtgttgcaatgtgtgccatgtaccattgagtgtcttctgattattttttatatgttgatgatcaattgttgttcgctttgtaaaaaaaaaaaaaaaagaaaaaaaaaaaaaaaaa

SEQ ID NO: 4732 - DNA, 1665 bp, Glycine max
aaaagaatcagttccctcgcgtccgctccgctgcccccccccccccgccagaagaatcgtggaatcttcatgcaatgcttcttcccattttcacactttgttaacacttaattttctgatcccaatctcgttaagcttcttagcaacaacacaaaatgagcgccatctctttcagttccatccattttcacacttggaaaaaccccaaggggtttggaaaggtgagaaaacaaccacatgggaagctacttgtaaagtgttccagccagagtgggaacccatcttcttcgcaaaatgcggttcgtgttggtgttgttggagctagtggctacactggttctgaggttctgcgactcttggcaaatcatccacagtttgggattgcactgatgactgcggataggaaagctgggcagccaatctcttctgtgttcccacatttgagcacttgggacttgccagatttgatttcaataaaggatgcaaacttttctgatgtggatgctgtattctgttgtttgcctcatggaactactcaggaaattattaaaggcctaccaaagcacctgaagattgttgatctttctgcagattttcgtctaaaagatctttctgagtatgaagaatggtatggtcagccgcatagagcaccagatttacagaaagaagctatatacggattgacagaggttttaagggaggaaatacagaatgctcgtctagttgctaatcctggttgttatccaacttctgttcaacttcctcttgtcccattgataaaggctagtcttattgagcttaaaaatattatcattgatgctaaatctggtgtgagtggagcagggcgcagtgccaaagaaaatttattgttcactgaagtaactgaaggtctcaattcttatggtgttacccggcatcgccatgttcctgaaattgaacagggacttgctgatgcttcaggttcaaaagtaactgttagttttacaccacacctaattccaatgagccgtggtatgcaatcaactatttatgtggaaatggctccaggagtgagaattgaggacctgtaccagcaactgaagctctcatatgaggacgaagaatttgttgttgtgttggaaaatggagccattcctcgaactcacagcgttaaagggactaattactgtttaatcaatgtttttccagaccgaattcctggaagagcaatcattatatctgttattgataatttagtgaagggagcttcaggtcaagctttacaaaaccttaatttgttaatgggatttccagaaaatttgggacttcattacctgcctctttttccttagagtagttgtcttgtccaactagagctccaaatctgaagccacagttccaccaaaatacttgatggagcagaggaaatattttcaagttatgtattttcattctctagattgtaatgtgagattcttcaagaatttagaagggaattggttatgacattggcagggatattatagcaatttctgtcttttttgtcctttgttttgatctgtaatgttagaaatcactgaaggtggtggcgtgtagttttccaagtttgggttttggtttatttgtaatgccaatattttagtggactatgaaatcaccatctcaagtttttgagatttttgtttc

SEQ ID NO: 4733 - DNA, 1482 bp, Glycine max
atgtacgatcgatattctatagtgcacactctgaaattctttatgcaggtggacaagcttaaaagggaactagaaacacaaaacaaggagaaagtgaactgggaaactcgagtacctgagttagagaaaaagattcatgacttgaactcaaaattagaagatcttcaaaagataaatgaggaacagaagaaaaaaattcaaaaaactgaacgtgctcttaaagttgctgaggaagaaatggtgaaggcaaagtttgaggctactgccatagaaaaagagctgagggagactcatggtgcttggcttcccccttggcttgctgttcactatattcatagtaagtcttttgttgatagtcattggaacaaacatgggaaacctgctttggaaatggttactcaaaaggccctagagaaaaaggcacaagctggaaagtgggctgaacctcatgtggaaaccattaaaactaaatgggtcccagctgtaaaagaacagtggtctgtggtgaagacaaatgctgaacctcatgtgcaattattgaccacgaaaactgttgaagtttacgaggcatcaaagaatgcaatttctccccacttaagcaaggcaaaagaatttgtagatccttattatcaggaagctagaaagttcagcaagccatacattgatcagattgctattgcagctaaacctcatgttgataaagtacaggtagttttgaagccctacacaaaggaggttgttcgcacttatgggaagtttttggaatcagctactacatatcatcgccaggtccaagcttctgtccaagagacactgaaaaagcacgagcttactagacctcttgctactaaagagttggaatggtttgcggcctctgcccttttggctttacctattattttagtggctagagtgttttcagctgttttctgtagcaaaaaagtgaataaacctgctcgaaatggaaacaatcaccatgcacgacgtaaacataagcgagggcatctagacaagcacacaacatgaagttggttcctgctttatttttttccctggaaagtttagataatttttcctgttcgcacgggcttattgagggggatgtatctttcctgtcgtgtggggttttgaatattttacttctctttttttgggtgaggtaactttaggatgtttcactgtagaaaagggcacacaatatgtttaggtgtttatgtattatcagtttatcactttgttatatttgttattagaccttgcactcccttttcctgctggttttattttcttaaattcttgacatagtaaaaatgtttcctcataatgtatgtttattagaatcagaactagttcctgtctattgcggttgtctgtggaacttgaaatttattactaaaagaaactaattcatgagttgctcttcattgaaaaaaaaaaaaaaaaaaaaaaaaaactcgagactagttctctctctcctggtgc

SEQ ID NO: 4734 - DNA, 1792 bp, Glycine max
tttttttctgttctccgaactccgaagctttgttggcggcaaagcaaatctgcatagcgatggcgcctccgaagctcttcgtatttgcgctttcagtaaccctgatttttgccatcgttggggccgaagccgatgtttccgtcgaaggagccactccagagcctgatacctccgccatcaagatccaattagatcaactcaattccaagatccaaattctcgagtctcaaatcagtgaaaagttggaagaagtgaagaagaaggacaaaattatagcagaaaaagaaaattccattgaagataaatcaattaccatacaatccttgcagaatgagattgcttctctccagaaaaaagggtcactggatgctgaggagcaggttggaaaggctcatgcacgtgctggtgaactacagaagcaggtggacaaacttaaaagggaactagaaacacaaaacaaggagaaagtgaactgggaaactcgagtacctgagttagagaataagattcatgacttgaactcaaaattagaagatcttcaaaagataaatgaggaacagaagacaaaaattcaaaaaagtgaacgcgctcttaaagttgctgaggaagaaatgttaaaggcaaagtttgaggctactgccatagaaaaagagctgagggaggctcatggtgcttggcttcccccttggcttgctgttcactatattcatagtaagtcttttgttgatagtcattggaacaaacatgggaaacctgctttggaaatggttactcaaaaggccctagagaaaaaggcacaagctggaaagtgggctgaacctcatgtggaaaccattaaaactaaatgggtcccggccgtaaaagaacagtggtctgtggtgaaaacaaatgctgaacctcatgtgcaattattgaccacgaaaactgttgaagtttatgaggcatcaaagaatgcaatttccccccacttaagcaaggcaaaagaagttgtagatccttattatcaggaagctagaaagttcagcaagccatacattgatcagattgctattgcagctaaacctcatgttgataaagtacaagaggttttgaagccctacacaaaggaggttgttcgtgtttatgggaagtttttggaatcagctactacatatcatcgccaggtccaagcttctgtccaagagacactgaaaaagcatgagcttactagacctcttgctactaaagagttggaatggtttgcggcctctgcccttctggctttacctattgttttaatggctagagtgttttcagctgttttctgtagcaaaaaagtgagtaaacctgctcgaaatggaaacactcaccatgcacgacgtaaacctaagcgagggcatctagacaagcacacaacatgaagttggttcctgctttattttttttcttggaaagaaattagataatttttcctgttcgcatgagcttattgaggggatatatctttcctgtcgtgtggggtttcgaatattttacttctctttttttgggtgaggtaactttaggatgtttcactgtagaaaagggcacacagtatgtttagatgttcatgtattatcactgttatattttcttaaattccttgcactcccttttcctgttggttttattttcttaaattcttgacatagtagaaatgtttccacttaatgtatgtttatcagaatcagaactagttctgtctattgcggttgtctgtggaacttgaaatttattactaaaagaaattaattcatgagttattcttctttgg

SEQ ID NO: 4735 - DNA, 2414 bp, Glycine max
ctttcttttccctctctcaattccaagtgggttttatcttcttctttttttctttctccaaaagtgttaaaattttaactttgttttgccttaatttgattgttttatgcagagtagacagtagatttagacacccttttggaaaaggaagtgttttttgagggaaaggagggaattttttgtgtgggagggtggaacccggaattcggtttggttggggtagagaggatgaagattcagtgtaacgtgtgtgaggctgcggaggccaaggttctttgttgtgctgatgaggctgggctgtgttgggagtgtgatgagaaggttcatgcggctaacaagcttgccagcaagcaccagagagtgcctctttctacctcttcctctcatatgcctaaatgtgacatttgtcaggaagcattaggctattttttctgtctagaagatcgggctctgctctgcagaaaatgtgatgtggcaatacacactgcaaatgcttatgtctctggtcatcagaggtttcttctaactggtgtaagagtaggccttgaagctacagaccctggtgcttcctcaacttctttgaagtcagattctggggagaaagtttcagattcttctgtctctagaaaggtttccacagcgccccagccatcaaattataatgaagtgttacccgctgaagttggaggagttggggagtttccatcagccaaggtgtcctttggtggtggttccacagctggaaatatctcacagtggactattgatgaatttattggcttaaacgagttcagtcagaattatgattacatggaaggatcatcaagggtatgttcatagttgttgaaatataccctcttagcctagtatcccctgatcattggttttgtagagtttctatcatttaatgctttgtttttttgactgggttagtattgcagagttcagattcatcttttgtcatagattgtgtatactagtgccccttcagacacactaacacacgcgcgcgcgtgcagggggtaaaaggacagggatggggctgatccggtcttctgagggaatatgccctgttaacatggtcacatgactaaacaactggccaatgtagtataagttttataaatatgttgaatatttgtggtcagaaaaggtgtgagtagacttcaaacagtggaatctgacagattggttggttgaagtgcttgtgcttggtttcattctttcccttatttgtaagcccgttttaaatttggaaaacttgaccttttagaagtgcaatactcagttggctttcacctgaaactaattgctttctgaattaaatattgccaatcgtgaagataaaaaattataatcttaatgatgatgagccgggaatgatcatcctcaatggtgatccataatctagataccctagtcctcttgcatttgagtgcttaaaaacatgatattatttggatgagaatgtggattggaattattgtgcataatttactgatagacacatgtaagacaaattttcgacattcaaattacttcaatcaaacaaagatttgaattatatctatattcgtattttgagaaaatcaagagaatcaaatagaataggaaattgattaatgactttttttttcctttgtgactattctcattcaattgattattttcacatttattgtgtatttgtgtgcttaccatgtacagatagttaggcaaaataccatagatgtcttgtctgtatggttgtatggttctgtaactttttttttcacccttcctttcctgatgagtctgtgcaggctgacggtggtaagcttggggattctgattctcctgttttaagatctggtgaagaggaaatggaggaggaggatgactatttggaacgcgttccagattcgtcgtggacagtcccgcagatcccttccccacctacttcttctgggttatgctggccaaaagaccatactaatctgtatggttcatctgatagtgttctgtttgttcctgacataagcttctctcacctgcaacaatctcagattagtatttttttgagacgccggaggcagctttaatttgtttactctttgctaataacttgaggcattgatttcttttatttctgttatgattctaagttctctcatgttgcagtgaagtgtcatttcattagttacatatttctattcttggctgtctcagccttctagggagtaatctaactctctacatgtcattggaaatttgcatagcaaagcagcaacaaataatgggagtttagaaggcttttactagtaagttgggtcttgtaacattatcaactcctctctagatcctatgtagatgcatctattggattataatagagatctgattcatattaaaaaaaatattggtttgtttgtgtc

SEQ ID NO: 4736 - DNA, 1289 bp, Glycine max
ttgccctcgcgtccgcccacgcgtccgacggctgggagaagacgacagaaggggaataatacaaaagaaaataatagaagaaaaatttttgaataataattaaaaaattccttcatatttttagagataggagacaaaatttacatggatatagtaagtcttgcttgggctgctttaatggtagttttttcattttctctttccctcgtagtatggggaagaagtggactatagggatactcaaaattgagttaagggatcaaagtacccattttgttttctacttgggtttttcaatttcttaactttaactattgaattaaagtatttcatttatactaattaattgagttcaaatataaacaaatataaaatagatctgcatttcagggttctattatattctagtagtgtaatgtattctatgtatatgtatattatagaaattgaaaatactctttcaatcaaacaaagatttgaattatatctatattcgtattttgagaaaatcaagagaatccaatagaataggaaattgcttcctattccaaccgaattcttcttaaaatttctctttcgatgaactgacgcttaaccaggttttatatatatcgaaaatgggggaccgcgtaatccccattcctgcccccctttttctttttttaatatgataccgggattgtaaaaagaatccgaagaataagagttgttttttgattatttcagattcattggaatcaatacaaatcaaatagatgaaactaaaaaaaaattggacgcaattctcagtcagatagtagaaatcaaatatatttgatttctactatctggattacggtgctcggagtccatttttttttttttagactaagaccaaaaattgaaaacctttttcattttttttaatcattgattacattgataaaaatgaagaagtcagatttcagtgaaattagtcactttgacttaccgtttttacgtaaattataagtaaaaaagcagtaggaactagaataaacagtgcagtagcaataaatgcaagaatatttacttccataatctttattatgttttatttctcttaaatttccaataaaaaattcgggatttaatcccatagagatgataaatctttcatcgataattaattcaacaatggtataaattggatttcgatgatatcaaattggatcaatatcacgaataacaatatcttagttatcaaatcgactcatcgtccccttctgtcgtcttctcgcagccgtacgcgcgccgatgcggctcgagag

SEQ ID NO: 4737 - DNA, 1841 bp, Glycine max
  misc_feature (1818)..(1821): n is a, c, g, or t
tacggctgagaagacgacagaagggggtacttattaatgcacaaagcagcttaactcaaaagcagaagcagcaacaacaaacatgtccttaggatccgttctgcactcacagtagttaatgcctcattgtgtgtttcattattattccctaaccaactctcttgaccctgacttcttcacttgtgctttttttttttagatcaacaaattaaagtattaaactttgaggatcagattttggttcttgtaattataatgatggggggtgggaagtttagtagtttttttgttgtttttgtgttgttggtggggtcagggagtgggattggtgtgaattgggggacacagtcaacacaccctttgtcaccgtcgaaggtggtgaagatgctgaaggacaatggcattcagaaggtgaagctttttgatgctgatgctggtatcttggatgctctcaagaagtccggaatacaggtcatggttgggattccaaatgacatgctttatacgctggctaacagtgtggaagctgctgaaaaatgggtttccaagaatgtctcaaaacatgtctcttctggaggagtggacatcaggtacgttgcagtggggaatgaaccattcttgtcaacctacaacggttccttcgaagccacaactcttccagctctccaaaacatccaggcagctctcacaaaatccggtttgagcaaacgtgtcaaagtcactgtccccttaaatgccgatgtataccaaagctcatccgaaaagccatcggatggcggtttcagacctgacatcaacaatgtgatgctgcagattgtcaagttccttaacaacaacggagctcccttcacagtgaacatctatcctttcatcagcctctatgcagaccccaatttccctgttgactacgccttctttaacggctaccagcccgccataaacgacaacggaagaaactatgacaacgtgtttgatgccaaccatgacactctagtatgggcactgcagaagaatggcttcggaaacctgcctataattgtgggggaaatagggtggccaacagacggggaccgaaatgcaaaccttcaatatgcacaacgttttaaccaaggtttcatgtcacgttacatgtctggaaagggtaccccaatgaggcctggtcctatagatgcttatttgtttagtctcatagatgaagatgccaaaagcattcagccaggtaactttgagcgtcattggggcatgttttacttcgatgcacaacccaaataccaacttaaccttgggtcagcacgaggtaacgggctagtaggtgctagtggtgttgatcatttggctaaaaagtggtgtgttttgaaaccctcagcaaaccttaatgatgaccaacttgcacctagtgtggcctatgcttgtcaaaatgctgattgcactagtcttgggtatggaacttcttgtggcaatttagatgtgcatggtaacatttcttatgcttttaatagctactatcagataaatgaccagatggatagtgcatgcaaattccccagcctttccatgatcactgacaaggacccttctgtaggagattgcaagttcagaatcatgatccagacagattctgcggagctacatggaaaagttggatatctaacaacagtgctatgtttttttgtacttttgctattctgtaatccttggttttgatttggcttgcttttcgactcgtatcggatcaagtaaactttgtagcaactagcaagtgtaagaaagaaaacgcgttacaatgttttatcactgcactaatgttgtctgtcgtcnnnnaaagaaaaaaaaaaaaaaaa

SEQ ID NO: 4738 - DNA, 742 bp, Glycine max
cattcattcttatcttcttcttcttctcccaaaagccattgcattgtggtgaatgtttgagtgcagaaggtaaaaaagaaaatggtggtgaagattcgattggcaaggctcgggtgccggaaccacccattctatcgtgtggttgttacggatagcaaaacaacaagagatggcaagcaacttgaagttttaggtttctacaatcccgtcgcaggcaaggatgatgacaaaagaatgagcctcaaactggagagaatcaagtattggctttccgttggagctaagccttcagagcctgttgagcatcttctatttagagcaggtttaggacaatctcatcaattccctgttgctgctctaaatggacatatcctcaaccaagaccaaccaaccattgctgctgatcacaatggtatatctccagaagctatattttctattgccctacaagtttgaagataatagctaccatacatttggagaaggtgggtggttgcaccctcttctgttcaataccacctagaaataaattgataggttatcttgctgtcgacaaactggttagatttgtttcctgggaagtagcaaaagtagctcatctgattttggtttatgtatgcatgtctcacattcttgtcaacacaccacttggtttttatgcttatgcaattcttcttgattctgacaatttattttgaaatattatcctgtttcctttaaaaacaaaaaacaataaaacaaa

SEQ ID NO: 4739 - DNA, 1520 bp, Glycine max
  misc_feature (1412)..(1448): n is a, c, g, or t
  misc_feature (1450)..(1458): n is a, c, g, or t
  misc_feature (1460)..(1460): n is a, c, g, or t
  misc_feature (1462)..(1464): n is a, c, g, or t
  misc_feature (1467)..(1467): n is a, c, g, or t
  misc_feature (1469)..(1469): n is a, c, g, or t
  misc_feature (1475)..(1475): n is a, c, g, or t
  misc_feature (1484)..(1485): n is a, c, g, or t
  misc_feature (1487)..(1488): n is a, c, g, or t
  misc_feature (1490)..(1490): n is a, c, g, or t
aaagtgcttgtcaagtagtatctgccactgaaattgtctgaaatgaaacattctgatcattagataacttatcacattatgcaggcagcagcaacaacaccactctatcaactcgtgagcttcaagccaaagcttcaaactttcccttcaaaatctcaactttgccccttagggacccctttctgcagactaggaatggcttctgtttctgggtttaggttgagacccctgagggctgtgggtggttcttcatcatcttctgcatcaggtgatgatggatttgtcacactgatagagtatgtggcgaaggaaggaatgaatgtgaaagatgatttggtggtgttgcttgatcacattcagtatgcttgcaagagaattgcagcacttgtggcttctcctttcaattacagccttggcaaacaaactggtcatggttctgttggttctgatagggatgccccaaagcctcttgatattgtctcgaatgaaattatcttgtcatcactccgaaaatccagaaaagttgctgtcatggcttcagaagaaaatgatgcgccgacttggataagtgacgatggtccttatgtggttgtaacagatcccctagatggttctcgaaatattgatgcatccattccaacaggcacgatttttggtatttataagcgccttgaggaacttgatgatctacccacagaggacaaagctatgctgaattcactccagagtggaagtaggctgattgctgctgcttatgttctctattcttctgcaactatactctgcatcacctttggttctggaacacaggcattcactcttgatcattcaacaggagactttattctcacaaatccaagcatcaaaattcctccccgtggtcaaatttattcagtaaatgatgcacgatattttgactggcctgaaggtttaaggcaatatatagacactgttagacaagggaaaggtagataccccaagaagtactcagccaggtatatatgttctctggtggcagatctccacaggactttgttgtatggtggtgtggcaatgaatccaagggaccatcttcgtcttgtttatgaagcaaaccctcttagtttcattgtagagcaggctggtgggagagggtctgatggcaaaaataggattctttcccttcaaccagttaaacttcaccaaagacttcctctatttttgggaagcttggaagacatggaagagttagaaagttatggggatatccaacaaaaagttaatcctggttatgaggtttgatgctgctttgtatagcctcatgcatacaaattttgaatattcaaaccattatggtgcctgattaattgtttcagtgttcttcttcacttgtgttttatgtactgcattacccaaaaaaaaaaaaaaaaaannnnnnnnnnnnnnnnnnnnnnnnnnnnnnnnnnnnnannnnnnnnnanannnaananaaaaanaaaaaaaannannanaaaaaaaaaaaaaaaaaaaaaaaaaaaaaa

SEQ ID NO: 4740 - DNA, 808 bp, Glycine max
  misc_feature (792)..(792): n is a, c, g, or t
gatttttgtttaatcttcccatacttattctcttctactggctctttgctcctttactctctccgcgcccccgccagaagacaatagagtgcactgctttatctgagaaagcaagagtgcaagagaagaatgagggtttgatgtgtgagtgatgagagggtgagttgggaagatggagggtgcacaggaggagctagaaagaagaagcaagtttctcaaaagcttgatacagaagaagaaaaccatagagcaacaagagcagcatgatcacctacaacacaacaacgttcgtgtcagagcttgtgacatgcctctccctcttcagagccgtgcctttcgttgtgcacgtgatctcctggattctatgccaccaaagaagcttgatagtaaacgcctggccctcacacttaagaaggaatttgattcttcttatggtccagcttggcactgcattgtgggtactagttttggctcctatgttactcattcccttggtggtttcgtgtatttttccattgacaaggtttatgtccttctcttcaagacagctgttgaaccattagaccattcatagcttccacaattgagttatatgcacatctccttgagaacttaaaataatttaatatttcaaaccaactgatgtgtgaaattacaaattgtaagatttaaagacatttgtactctgaagtatttgatgcacttcagtttcgagtgggagagtatttgagtgtgtaatttgttatgacaagcaaaagatactctttcttcagctcagaaatagattatttntagaagtttcactctc

SEQ ID NO: 4741 - DNA, 1638 bp, Glycine max
  misc_feature (1621)..(1622): n is a, c, g, or t
agtgattatttctctctcctgctgaaattttcatgtaatgaaatgaagaggatctttcctcattttctgccgcaccacacgacacgacacgacacttgtgttcaaaccatgacttgtatgcaaccaagacacccccaaattaaagtcactgtttcacaattcagttcataccaactcatcactataaaaattgcaagagcccctctgtctctgtagccattcttttccaccacaagataagaaaaaagaaaaaatgtttgcagggaaaggggctgtttggttctccagagcggtggcgttggcagcaatcgcggtggtagcttgcgttggccttacacaggcccaacccgaggccaggttcaactgcaacagcgcgaacatccccacgtgtcgcgcgctcataagctactctcacccgaacaccaccaccctcggcgacatccaaaagctcttcaacgtgaaacacatcctcgacatcgtgggagcgaacaacctcccaagcaacgccacaaaaacatacgcggtgggccccaacgaggttgtgaaggtccctttcccgtgcaggtgcagcaacaacacgggactctcggaccgtgttccgctgtacaggatcaagaagggggacacgctgtactacatcgcgacgacgacgttcgcgggtctgatgaagtggccgcagatccaggtggccaataacatagccaacgcgaataatatcaccaccggggacatgctttatattccgctgccgtgtagctgcgacgaggtgggtgggaagagtgtggtgcactatgcgcatcttgtggcgccgcagagcaccgtggaggggattgcggaggagtttggtaccactcagcagatactgctcaaccttaatggaatttctgaccccaaaaatcttcaggcagggcagattctcgatgttcccctccaagcttgttcctcgaatgtgaaaaatgattcattggactatcccttgcttgtcccaaatgctacttacgcctatactgcccatgaatgcgtcaaatgcaagtgtgactccagtaacaatttcatattacaatgtgagccatcccaactcaaaccaaccaactggtctgtttgcccctctatggaatgctcagccaacgtcttgattggcaaaaccatttcctcagattcctgcaatcgcacaacctgcgcctatactggttatagattccacaatatctctgcagaagctgtaactgagaacacttgtgctgtgccgccgactccgagtggttcaggaggatcaactggttctgattcaggagcgtcaaggagcaccttgcaaggcttgttttggagtaatcttttcattgtcattcactttgtcctctttcttgtctatgttttgtagtaaaatagaataccctgcacttccgcagctattttttataatagattagtccactctgtaatttgctgagttcagatagattggttcgtgttgtgagtgttgcaataactgaaccttttgtgtttttcctttgcaatatttgtatcttaaataaataaatatgttccgaagaataagagtgatgtctaatctattttaatgtgattaaaatagttcagataaaattttcctgaaaaaaannaaaaaaaaaaaaaaaa

SEQ ID NO: 4742 - DNA, 1639 bp, Glycine max
gtggtgtgtcattaatttgtgtcaagtattttggttttgctttcccccttgccacgcgtccccattggtgttgcacaattggcattaaggttctattatcacatatgccaaacttgacctttgaaagatatcctaattcctaagtgctaatgctactctactttatcacttgcatctccttccttctgtttttaaagcctctcctctctctcaaaccactcccgtcatgggcaagtgaagtgaggttgatctcccctttgttttacaaagacttgtctgtgaagtccatctctaagttgtttaggaaacgcctttggcttggttttcttggtcaaattccgacaaggatgtctctagtgaacaagtcttcaaaggtggagattattgaggactcccaagacatgtcagtgttggacttgccagagctggtgttggaatgcattcttgaaaagctccctccaccttcactttgtcaaatggccggggtttgccgttccctaagggagagctgtgtgagtgatcacctttgggagaggcacatgaaacagaaatggggcagagttattggtcaagctgcttatagggagtggaaatggcatgctgcttctaaagggaatgttggaactcttagacatggcaagcaaaggagcttgttgaggctggtgtcacttagttggcctttttcatggatgagaaccaaggtagatgcaaataatagcatcaagcagcaaagttatttgcctcctgattcactcatgacatggtatcttgctcttgagactggcaatttctggtttcctgctcaggtctataaccgtgagaatggccatgttggatttatgttgtcatgctatgatgctgagcttagctatgatcctcacactgacaccttccaggccagatatccaccacatggaagaagggcagttgcagtagagcatggcattccatgggaaaggctaagagcaccacctgttgatactcctccacatgatcttcatatttctgattgtctatatgatttgcatcccggtgatcacgtagagattcagtggagaagaaacaaagaatttccttatggttggtggtatggtgttgtaggccacttggaggtatgcgatgggaatgaaaattactgccgttgtcatagtagtgacacagtggtgctagagttcaatcagtacactcctgactcgcgttggaggaagacaactataagtagaaaagatcatagagaggaaggaaatgaagcagatggtttttatggaggaatcagaaagattaagagtgagactgagatttccatttggaaaagcatttggccttctgaagtcttggactaatcagatttaattttccacttagcattatgtcaagactagtattcttattaagcattggcagaggcaggttcttctgcattagagaaaaaggggtataggattctcatcattcaaccaaatgaccgtttgaggctacctatttactttccccttttttattatcacattttttcatggttaagtttagcctgtgatttcaatcaatgtaaattgctcatttatgcactgatggcgtagaatattcattccacaatatatagaatgattaaaatctctgattttctcaaaacccaaaa

SEQ ID NO: 4743 - DNA, 1143 bp, Glycine max
tcagctacgtaggccccccccccaccttatagataactcctaactggagagtccagggtgttggaaggatcagcacgacactgagcatcagcaatggcaagcgcaagtgttggtaaagaactgacgctgtattcgtattggaggagctcttgttcccaccgagtccgaatcgctctcaacctcaaagggcttaaatacgaatacaagcccgtcaatctgctcaagggagaacaatctcgccctgagtttctccagctcaatcctgttggttgtgtccccgttctagtggatgaccacgttgttctctatgactctttcgccattattatgtatttggaagataagtatcctcacaatcctttgctccctcatgatatttacaagagagcaatcaatttccaggctgctagtgttgtttcctcaacaatacaacctcttcataacttgagtttactgaactacattggggagaaagttggccctgatgaaaaacttccttgggcccaaagtataattagaagaggctttaaagcactggaaaagctattgaaagaccacacaggaagatatgcaactggagatgaagttttcctggcagatatatttttagcacctcagttacatgcagcatttaagagattcaacattcacatgaacgagttccctattctagcaagattgcatgagacatataatgagatccctgcattccaggaggctctgccagagaaccagcctgatgcagtacactagttgaaccaataatttgggacagtttttaattttcaactctattattgatcccaccccagaaatatgagttgatattaagttggagaaattgcagcaggagctacttattcagcatccggatgaattcgttgttaaagtattaaaatatgatactcaatatagcaataaggttgccacatgcaatatttattgcacacatcatgtacaattgaaaaaaaaaaaaattggtttcgggtgtatgtctataaagccttatgtttattttccatttcatattcttcccagaatcccagtcaatgtagcttgatggatgattcttaatggtgtttatggttgaattggtgtttcaaaaagttcatttgagtttatgataaaaaaaaaaaaaaaaaa

SEQ ID NO: 4744 - DNA, 1681 bp, Glycine max
ctcgagccgaaacgatctctctttctctctcatacacttttttataataaaaaagcttttcgacttattttcccatgaagtgatcccaaagtatattagagcttactttgtttcttgtctcggatttcataattgataattaattaatttcaccaacttgttggcttttttagttctataaattccccgcttgaatcacacagagtcctctcttccactctctccctctttcctatcacactttctagatagctagcctgtaagatatatatatagatatttcatatatatcctatggtccgtgagtgcccttgttctgtaccaaccctttcttccacatgttgagtttcagcatcgtcctctcttgagtccccatatcaaatacccaccgaattcaaccccccatataacaaatctcctcccatcccatttttcagcaccaaagtttgaaacttttctcaattgggttgaggagagtttgactcaaatttttatttttctaacgaagcagtagctattagaagtgcaaaaattaaatgtccaacatcttcttgttgatgtttgagattcatgtatccgattctcagtgaaatcttcttttccgggtgtatgatcaattccactgttaggcgcaggacccatttagttcaatccttctcagttgctttcctctattggttgtactacgtttcatgatttctaaaccttccttagtctaataatcatctactactagctattattattattattattattatcatcatcatcatatataataaaatctatctgcaatattatttttctgagtttgtgtctagttagtgtctgggtcctggtcctgccaattgtgtcaattaattgtattgaatcataaaagatggcttcctcaagtggaacatcttcagggtcatctctgcttcagaactctggttctgaggaggatttgcaggcggtgatggatcagagaaagaggaagagaatgatatcaaaccgcgaatctgcacggcgatctcgcatgaggaagcagaagcacttggacgatcttgtttcccaagtggctcagctcagaaaagagaaccaacaaatactcacaagcgtcaacatcaccacgcaacagtacctgagcgttgaggctgagaactcggtgcttagggctcaggtgggtgagcttagtcacaggttagagtctctgaatgagatcgttgacgtgttgaatgccaccactgtggcgggttttggagcagcagcaacatcgagcaccttcgttgagccaattaataataatagcttcttcaacccgttgaatatggggtatctgaaccaccctattatggcttctgcggatatattgcagtattgagatccatggtctctgagtctgagatttgatgaggatttcttcttcttcttctaggtttgagtctgttgagaaattgtaatcactaccatatggtgataaggaataataataatgaatgtgtatcgtaaaacggatgggattgttgggtgctggttctgtaaatgtggcatgggccattactgtaatttgtcaccctcctttcctatattattataataataatattgacctacttctctgtcttgaaaaactacaaaaataaagtttttttatgaataaatattaatttttattagaaagattatttgaagagatttt

SEQ ID NO: 4745 - DNA, 1633 bp, Glycine max
  misc_feature (1605)..(1605): n is a, c, g, or t
cccacgcgtccgccccctcttccactctctccctctttcctatcacactttctagatagctagccaaccagagtaagatctaaagatatttcttatatatcctatggtccgagagtgcccttgttctgcgccaaccctttcttccacatcttgcgtttcaacctcttcctctcttgagtccccttatcatcaaatacccttcttcttcaacctccaccaaattcaacccccacataacaaatctcctcccatcccatttttcagcaccaaagtttgaaacttttctcaattgggttgtagagagtttgactcatcaatttttatttttttatttttattttctctaaccaagtagaagtgcaataattaaatgtccaacatcttcttgttgttgatgtttgagattcatgtatccgattctcagtgaaatcttcttttccgggtgtatgatcaattccactgttaggcgcaggacccatttagttcaatccttctcagttgccttcctctattggttgtactacgtttcatgatttctaacccttccttagcttaataatcatctatctaaaatatcataatatcttctactagctagttttatttttattatcacaataaaatctatctgcaatatattgttatttttattttctgagaaatttgtgtctagttataagtgtctgggtcctggtcctgcctattgtgtcaattaaattgagaagggttgtattgtattgaatcatatatcgtatcatataaacatggcttgttcaagtggaacatcttcagggtcattatctctgcttcagaactctggttctgaggaagatttgcaggcgatgatggaagatcagagaaagaggaagagaatgatatcaaaccgcgaatctgcacgccgatctcgcatgaggaagcagaagcacttggacgatcttgtttcccaagtggctcagctcagaaaagagaaccaacaaatactcacaagcgtcaacatcaccacgcaacagtacttaagcgttgaggctgagaactcggtgcttagggctcaggtgggtgagttgagtcacaggttggagtctctgaacgagatcgttgacgtgttgaatgccaccaccactgtggcgggttttggagcagcagcatcgagcaccttcgttgagccaatgaataataataataatagcttcttcaacttcaacccgttgaatatggggtatctgaaccagcctattatggcttctgcagacatattgcagtattgattgagatgcttcatctctgagatttgatgaggatttcttcttcttcttcttctgggtttgagtctgtcgagaaattgtaatcactaccatatgatggtgataaggaataatattaataatgaatgtgtatcataaaaacgggtgggattgttaatgttaggtgctggttccgtaaatggggcatggggcatgggccattactgtaatttgtcaccctcctttcctatataataataataataataataataatactgacctctctatgttattattctcccaatcttttgttatttttaatcgaatgatttgttttaaaaacaaaacagaaaaaaaagtncggacaagggctgctgattctacttcag

SEQ ID NO: 4746 - DNA, 2312 bp, Glycine max
gcggtggggggggccggccgccggtggctttgtcccggggctcttaggcgcggggggggccgcgcgtcgggcggttggggcccgggcccccccgcctttcagctacgtaggccccccccccaaatccaatgatgaatctgtctcctctaaatgcttctccaatgaaccctgcaggaattggttcttcaccttcgatgctaggtccacctcatttccaacagttctatgatcaacaacaccaccatcaacatcctcagtcttttggacttcctggtcggcctgagtatgatccgtcatccaagtctttcaaaggggtctttgggccacttccatctgatgttgcaatggagctcagtaatgtccttaacaatctgaatggtacaaaagaatccatcaaaggtgcaaaactttggttcatgcagagatctccatttgcaccagccctagcagaggctcttagagatagggtctttgcattggatgaagttgagagacaattacacataatataccttgccaatgacatactttttgacagcttaaatcggaggacaagcagtaatgaccttgacaatgaagctcttgcctttaaacctgttttaggctccatgcttgcaagaatttatcataatccacaaagcaatgaggaatacaggaaaagaatgcagcaaatggtggagttctggtcttctaagaaggtatacgatcaagagactatatctttactgaaaggtgagatgattggtgggccacaatcaacttcttttcctggggcttcaaaggatttatcttctgcttcagcagagtcaggttcaggaatactgcagacacctaatcatgttgcccagcagtggcaaactgataggttaggtgctggttcaagtgccttggatcaagatcgtcttgataaattggcagcttcagcacagtcactatcagtacccctagcagctcagcagtttcttccaagttctgctcctcccggtgcctttcctgggtcaatggctataccatcttctgttcaatcagctaaccaagcacctggtgctcatttattgccccctccatcatccaacaccagtgaacaattgccaccatatccattattcccacctggcctcattccgggaatggttaaaaagatgcagattggtagaggggtcccatattctcctttgagccctttggatatcccaactataataccaccatcgactgtaccaccatcagaaattcttcaaagagtgtcaaatttttttaaagaaattggagaggtaaatccttctgagggccctatgaattcagattcaagagatgatgatgaatatgatagagaatatgagagggagcctccagtacgaaagggaggtgcttgcatacctccacccccaaccttgcaggttgatccagagacgggaacctatgctgatgggactgtagaaaggaaaccaggatccagtggctcaggcaggttggggcttggggccacagccaatcccaatgaggtgagtcagtatgatgatgtatatacatcttacaggaagcagagaagcaccaattaccattcatcaatgagtgctagagccgccacaagatgaaagcatctaattaccttttcatccaatattttggattccaggatcttagactagctcagttagctttgtctttattaatgtttctttgaatgactgtagttgagctgatacttttgtttgttatttgcctatggtccaatgtgctttttcagctgaaatcatggatttgatgtatcattccttgaccaaaactgaatattccataaactttaagtcacacatggtaatgggataaaaaatgaatgataatcctattttcctctatattcccttagctgaagtttgattttggtatatggtttaatggagtctttattccttgtaactctctatcctttattcattttagccttttttttaatggattttgtttaattgtaaaaaaaaaaaaaaaaaagaaaaaaaaaaaaaaaaaaaattcctgccgcccgggggatcctctaattataagggggggcccaccgggggtaggtgtgttgagtttgtgggaggtggggggggggggggggcggggggggggggaggggggaaggggggggagggggggggggggggaggagaggaagggggaggggagggggcgagcggggaggagaggaagaggaagacgaaagggcggcgagggcgggaggagagaaggaggcgggaagcgggacgacgcgctcccgtgcgcggccgcggcggcagctgtccagcaaccactgaacagattga

SEQ ID NO: 4747 - DNA, 1129 bp, Glycine max
  misc_feature (20)..(20): n is a, c, g, or t
tcgagtagctacgtaggccncaccccccgagggctactttggggtttctctcttcaaactagggttttacagaatataagctctctctatctttggttttcgtcattcaaatccaatccaatatcaaatatgagtcgtcatcccgaggttaagtgggctcagagacttgacaaggtctatatcacggtgcaattggctgattcaaaaaatgccaaggtggatcttacaccagatggtatttttaccttctctggtagtgctggtgctgaagaccatcagtatgagctaaaactggagctctttgacaaggttaatgtagaggagagcaaaattaatgtaggagtgcgaagcatattctgtgtagtgcagaaggcagaggatggatggtggaaaaggttactgcgtggagaaggcaagcctccacattatgtgaaagtagattgggataaatgggtggatgaggatgaagatgatggtaataatggtgaagtggacttgggagggatggatttctcgaaatttggggggatgggtgctgatgcaatgggagcaatgggagggatgggtgctggtgcaatgggagggatggatttctctaaatttggtggaatgggtgatgcaatggatgacattgatgagagtgatgatgaagagcaagaagtgtcaaagcctcttgaacaggatgctggcgaggcatcaacagagaaaaaagaggctgctccaagcacatgatgccgttgcagttcaaggcgctaccctagaagatgtgtatgaaaattctcgagtgaaattttctctatctgtagcttggattggtagttgttttaagtagagacgttcatgtgtctctcccgtgttggctgaacatttagcgcgtattatttaccagaaaaaatctccttctagttgttgacttaggatattgtataattgagatattttcatgcttgaatggtggtatccggatttctataaatttatgttgcgtatgttttgaacaccccccaaaaacccatcccgtactctctaacatggaagtgaaaacttccaaattgccatgtattgtagacttcagacatgagtgtgtttgcattggttaggaaaagttccaaactagtctgttcatagt

SEQ ID NO: 4748 - DNA, 1852 bp, Glycine max
  misc_feature (1767)..(1767): n is a, c, g, or t
  misc_feature (1792)..(1792): n is a, c, g, or t
  misc_feature (1807)..(1807): n is a, c, g, or t
ctcgattatttgaattgaagataaataagagagaataaggcgttcccccgttttgttgtgttgtgttgtgtggatgtgaaactgggaaaatggggagagcctttgtgtatgtgattcttggaggaggcgtggctgctggctatgctgctcttgaattcgtcaagaaaggagtctctcatggtgaactctgtattatttccgatgaaccagttgctccttatgaaaggcctgcattgagcaaaggatttttgcttccagaagctgctgcccggcttccatcctttcatacctgtgttggtgcaaatgaggagaggctaactccaaaatggtataaagagcatgggattgaattagttcttggaaccggagttaaatccactgatgtgaaacgtaagacactattaacaacaactggagagaccataagttacaagattctgattgttgctactggtgctcgggctttgaagctggaagaatttggggtgagtggatcagatgcagaaaatgtatgttatttaagacatatagcagatgcaaataggcttgtagatgttatgcagtcttgtcctggaggtaatgctgttgtcattggtggtggatacataggcatggagtgtgcagcgtctttagtgatcaataaaataaatgtaacaatggtcttccctgaggaacattgcatggctcgtttatttacctcaaagattgcaaactactatgaagaatattataaatcaagaggagtaaacttcattaagggaactgtgctgtcatcatttgattttgactccaatgggaaggttacagctgttaatcttagagatggaaccacgctatctgtggacatggttgtggtgggaattggaatacgtccaaatacaggtttgtttgaaggccaacttactttggagaaaggtggaatcaaagtaaatgggatgttgcagtcaagcaacagctcagtctatgccattggagatgttgcagcatttccagtcaaagcatttggggaaacacgaagacttgagcatgttgattcagcacggaaatctgcaatacatgttgtttcttccataatggaaccaaacaaaacgggagaatttgattacattccttttttctactccagagtcttcacactgtcttggcaattttatggggataatgttggggaagttgtctattatggagatatgtcaggtagtgcatttggggcatactgggtaagcaagggtcaccttgttggggctttccttgaaggtggaactaaagaagaatatgaagccatagccaaggctactaggttaaggccagcaattgaagacttgactgaactggagagacagggtttgagttttgcagttacagttagccagaaaccggtggtgccacccccagtcgaggttagggcctcggacctacttttggaaaaaccactatatgcttggcatgccacagccggggttattattgctgcatcaatagctgcatttgcatatttttacggaaaaaagcgccgcagatggtgaaacttttaagattaccaattcatggttaagggtgtcaacggattttagacagatctgcaagctgtaacattgataagcctaggactaggatattttgacatgtaattgtgtcctatccaatttgctgaatgaccattcttcagttctattgttcatccgggatgttgtaccaaatacaaaagcaaaatataaatggccatcttttggaagatattcctgtagtaagagtccatgtattatntaatattcctacatattcataaaanatcgtgtttttagtnttattaaaaaaaaaaaaaaaaaaaaagaaaaaaaaaaaaaaaaaa

SEQ ID NO: 4749 - DNA, 1405 bp, Glycine max
aatatacagaggtgtcactagaatcgagagaatagagatttatttctctttctcaaggatcttttggcatgttggaagttgagaaaagtagctagccagctattgtgaaaatatattgagatagtgattttggatactgagtattgactatggtgtgagagagagagaggtcaaggcaccgatggacaggaagatatgaagcgcatctatgggacaatagttgcagaccgcgcggccgggctcgttggggccgtcctggctgtcattaaactttttgactcttctacagtttatttgggtggatatgataaggaagaaaaggccgctagatcttatgatttggcagctctgaagtactggggtcccactgctaccaccaacttccctgtttccaattattcaaaggaagtggaggagatgaaacatgtaacaaagcaggaatttatcgcatcattgcgaaggaaaagtagtggtttctccaggggagcttccatatacagaggtgttacaaggcatcatcaacagggtaggtggcaagcaagaattggccgtgtagctggaaacaaagatctttacttgggaacattcgcaaccgaggaggaagcagcagaggcatatgatattgcagccattaagttcagaggtgcaaacgcggtaaccaactttgagatgaatagatatgatgtggaagctataatgaagagttctcttccagtgggtggggcagcaaagcgcttgaagctttcccttgaatcagagcagaaagctcttcctgtgagcagcagcagcagcagcaatcaacagcagaatccacagtgtggaaacgtgagtgccagcatcaatttctcatccattcatcagccaattgcttctatcccttgtggaattccctttgattcaacaacagcatattatcatcacaaccttttccaacattttcaccctaccaacgctggcacagcagcgtctgctgttacttctgccaatgcaaatgcactaactgcactgccaccaacagcagcagctgagttctttatttggcctcatcagtcttattgatctaatcaaaactagaaatcatcttttgttaatttcctggttatgctaacaaatcaaaagctatagtctctggcacagtttagctgacccccctcctctattattaacccctttaggctgctaaaaaagaaaaaaaatgaggtttttgagttggctagtcttagttactgtaggaagctggatatgtaactaactgctcaagaaatgagaaatatttcgtgcatcataattttgcacaagaatttccttaatggcttatagcttgcagtggagtatgaccgcttttgtttaaaaaaaaaaaaaaaatcgtgttttaaattacagtttataacattcttttgacatg

SEQ ID NO: 4750 - DNA, 1403 bp, Glycine max
tcagctacgtaggccccccccccccccctttttcatctgcataggatttttataattctctcaactaagaaatacaaacgtttctcttccttctgttttcctcctaaattttccatctgaacataccgatatggatattggatgacattgtattagtgtattactctgtctccattatttgtggtcatgatctttcttgtatcacttatcctatgttaattaaattatgttatcgttgtgtcactaatatcaatgtaagttctgtgatgagctgcttatgtctttaaaaaaacatcatctgattatctagtattgataagtaggaatatgctgtgaatatgataagtctttcatgatctcgttacttcactgtgttgtagacaaccacttaagcatagattaacttatttcctttgatgcaccccttgggaaaaaagtaaatcattgcatgtggacatttggttttgttgtctctgatgcaatgtttctcgatcttagtgcaaccatggtcatcatattcactatagagtgttgacatgaacacctcttcattataaacaccctgttaacacttatttttcctattacatcataatacctgtcatacatatacttctctttctttatccctctaggtgtccaatagcatatggatgtctattaatcattttcctgcgctatagtattagagcatggggagactcttattttggtcaatatgttgatgtcttctatgcatactgtactctgattcaattttttccttcagcgacctatcgtaataaatgacctactgatgttgctgtcgaagttgtttgtgcattcttgtttgttgttaaaaagacctgccattgccctttgatccaatttgaagtttttgtttgttttgtttccttaggcaatatgatagagattcatttggtgaggatccagaaagtgaatcatcaaacgaagatccaagcggggcatctctagttactgagttgacttctcaaatggcaaggtcccagttcttgcaagaactaagcacaaagccacctggccttactcaagaggccttggactgtttgcatcaggaagtttttagcagcaatgccagtgagatagggttggattccagggtactgcaggactgcagtatatgtttggagtctttcacagacggagatgagctgatacgtttgccatgtggacataagtttcactctgtttgcttggatccttggattcgctgctgtggagactgtccatactgtcgaagatgtatagttgtaaatactcactcatcattaaacgaggacgagtaattgatttcttgattgactttgttttgttctgtggttgtatgacaggataagaatgctgtaatggagctggttttttgtaaaaaaaaaaaaaaaaaa

SEQ ID NO: 4751 - DNA, 1261 bp, Glycine max
atttttgcctcttggaactttgtcgaaaaaaaaagaagaaaaaagaagaaagtgattggattagggaagaatcgcagacagtgttgggcttcttcatggaacttgctagttgccattgacctctctttcttttcctttcctttttttctccatctctcgcaactcttcacctcaccgcgtcattcgcagcaaccaccgaacactgaatcgcgattcgcagtgtatgacgagcgcttcggagctattccacaccagaaggcatcgattgggacgaaatgctctcgatctagggctcgacaccgaactccacgccgccgattctctccgccaactccgccttcgtcactactacctccgccgccaccacccggagcgtgcatctgatagaattgatgggaggtatcggcggtctttcgtaagtgagagcgtggattctgaagaaaacgtgagaagtagtcttagagggagtagcagcgagagactacccgtaggtgtggttcttgcacgggcaagactccttcagaggttgagaggggaacctctatccacaaacaggcaatatgatagagattcatttggtgaggatccagaaagtgaatcatcaaacgaagatcctagcggggcatctctagttactgagttgacttctcaaatggcaaggtcccagttcttgcaagaactaagcacaaagccacctggccttactcaagaggccttggactgtttgcatcaggaagtttttagcagcaatgccagtgagatagggttggattccagggtactgcaggactgcagtatatgtttggagtctttcacagacggagatgagctgatacgtttgccatgtggacataagtttcactctgtttgcttggatccttggattcgctgctgtggagactgtccatactgtcgaagatgtatagttgtaaatactcactcatcattaaacgaggacgagtaattgatttcttgattgactttgttttgttctgtggttgtatgacaggataagaatgctgtaatggagctggttttttgtaacgatgctgaatacttgtctcttaccttgatatcgtattttttttttatcttttcctggtgacaatgggaaagatgtgggtagctaaatttggtattgtaagacgtgttataaaataataacagtcacgtgaatagtaaatagtatttttaatatttgtattcttatcgggaaaatacctattcatttttatcaagattcatgtattacattttagtt

SEQ ID NO: 4752 - DNA, 1363 bp, Glycine max
agggaccgtttatttcatgaggtgtagattcttgctgctaattcaaatgggggaggacacaaaactcggggggggggtagccaaaaattgaaagcattggaagcacagattttagacctcaagaagaaacaagaaagccatgtgcaactattaaagcaaaaggggaagagtgaagaagctgcaaaaagactgcagactgggatacaatatatcaagtctcagaaggttcagttgcagcataaaatggagcaaggagcagaacaatttcgacaatgggaggcttctcgtgagaaagagctactccagttgaaaaaggggggaagaaaaaatgagtatgaaaggcataagcttgaggctctaaaccagcgtcagaaaatggttcttcaaaggaagacagaggaagcaacaatggctacgaaaaggctaaaagaattgttggaggcccgcaaatcttctccccgtgacaactctgtttattcaaatgggcatctacagcctgggctggtcaatgaaaaatccctccaaaggtggcttgatcaggagctggaggtcatggtacatgtgcatgaagttcgtgctgaatatgacaaacaaaatcaagtccaagctgcactggaagaggagttggctctactaaaacaggatcggttttcagatgggcagactattcccaaaggaaagagcaaatatttgaggctgttatccatgtcaccagatgcaaaagttgagagaatagcttctcttgagaacatgctgtgcatgtcctcaattgctttgaaagccatggcttcccaactcactgagacagaagaaaaggaacggacattaaataaccgaggtcgttggaaccagctacgctcaatgggagatgcaaagaatgtgcttcagtatttgttcaatgctactgcagaagcaaggtgcgaattgtgggaaaaaaatatggaacttaaggatttgaaagaacaactaaaagagcttgtagcactgctacaacaaagtgaagcacagagagaggaacttgtaagggagcaaaaaataaaggaacaagctgttgccatcagattgaatacaccggcattgcaggaaaactctcgatccttgaaacaccttgcggatgaaatgagtggtccattatctccaatgtcacttcctgcaccaaagcaactcaaattcactcctggagttgttaattggtcaggcagggagtcagctacatttttagatgaagcacgaaagatgatacccattgcagagttgtcaacgaagaggctagcagctataggacaagccggaaaactttggaagtggaagagaagtcatcatcaatggctgctacagtttaaatggaagtggcagaagccct

SEQ ID NO: 4753 - DNA, 857 bp, Glycine max
ataaaatatctcagctgcgtaggcccccccccccatccaagaccaagaacacaaaaacacttagtccttctaaaatctcacttctcacatccaaaatctcgtgccagcaaacatggcatccatgacgactatgcttcagaccatggttcccaagaatgcaccgaatctccctcctcgtgttggtgtttccaacaacactactaagatctcatttgctggctcaggtagggtaccgtgcacccggattcagaggaacaggaatagatcttcttccattgtggttgctgcagttggagatgtttcatctgatggcaccacttaccttgttgctggtgccattgctgtggctctcattggaacagccttccccatcttcttctcccgcaaagacacatgccctgaatgtgatggagcagggtttgtgcgtaaggctgatgtgacattgagggccaatgcagcacgaaaggatcaaacccaaatcgtttgtgctcgttgcaatggtttgggcaaactaaaccaaattgacaaatagacaacattatgcttcctacttttcccctttctttcttttcttataatgtaattatataaggataatatattattaatatcccctcctcgtgtttcttcctatgaaatgaacattataatatgtcatgataggagagaaagacacaaatttaacttgttcagaatactaccattttgcattatgtatctgatttgtgtttttctctcccgtatcatgataacccgatgctcttaatctcttgtctaattgtgtgcatatgttgtatgtacttgaagtacacttctcaataagaaagcccaataaatacaaaaaaaaaaaaaaaaaa

SEQ ID NO: 4754 - DNA, 1360 bp, Glycine max
  misc_feature (1281)..(1285): n is a, c, g, or t
tggaccatcttatcgaaaagtcgaggtctaaactctcaagcaaaatattattttcttgtaaaaaaacaagcatgtgaagaacaaaaaaacaaaaatctaaactagatcctcacatgtctgtttaatatggttgcaagggacagaatcacataggcaagctcgtgtaaccctctcattcctcttatcttgcttcattttcatgtggttaacatccttctcctgctaaaaacaacatatataggttgaaatgtacaccctgtcttatccacattccttggaaaatctcaagtaatgctaacgtggccttatccaaatatttttcaaaccatcttcaactcttcatacataaaatctatgctatgtctcatattagcattcaagaccaagaacacaaaaaccacttaattagtccttctcacatccaaaatcttgtgccagcaaatcaaacatggcatccatgactatgcttcagaccatgattcctaagaatgcaccgaacctccctcctcgtgttggtgcttcttccaacaacactactaagatctcatttggtggctcaggtagggtactgtggaccgggattcagaggaacaggaataataggtcttcttcgattgtagttgctgcagttggagatgtttcatctgatggcactgcgtaccttgttgctggtgccattgctgtggctctagttggaacggccttccccatcttcttctctcgcaaagacacatgccctgaatgtgatggagcagggtttgtgcggaaggctaatgtgacattgagagcaaatgcagcacgaaaggatcaaacccaaatcgtttgtgctcgctgcaatggtttgggcaaacttaaccaaattgacaaatagacaacattatgctccctacattgcccctttctttcttttcttattactatgtaattatttaaggataatatattattgatatcccctcctcgtgtttcttcgtcctatgagatgaacattataatatatcatgataggagagaaaagcacaaatttcacttgttcagaaacctaccattttgattttgcattgcgtatctgatttgtgtttttctctcccgtatcatgataccccgatgttcctaatctgttgtttaattgtgcatatgttgtatgtacttgaagtacacttgacaacaagaaagtccaataaatatgatatatgttcgtcctttcttccaaaaaaaaaaaaaaaatgcccctgattgaagaggaaaattagatctttataaacagaaaattaaccctgnnnnnccattaaataatctcaatcggttgcctggctaataactgggaagacgtacaggcattaatacgtatttggattga

SEQ ID NO: 4755 - DNA, 1389 bp, Glycine max
attccaatgctacacaccactacgccacaggaggagcttcctgtttccatttcctctcacaaaaatcacttattatgaacacacgaaaagacatggaccggatcaaaggcccatggagcccggaggaggacgaggctctgcagaagctggtggagaaacacgggcccaggaactggtccctcatcagcaagtccatcccgggccgctccggcaagtcctgcaggctccgctggtgcaaccagctgtccccccaggtggagcaccgggccttcacccacgaagaggacgacaccattatccgggcccatgcccgcttcggcaacaagtgggccaccatagcccgcctcctccacggcagaactgacaacgccatcaaaaaccactggaactccaccttgaagcgcaagtgcacttcaaccatgattgacgacgacaacactcccccgctcaaaagatccctcagtgccggcgctgctattccagtctccactggactctacatgaaccctcccactcctggtagcccctctggatcagatgtgagtgagtccagcgtactggttgcatcctcctcacatgttttccgacccgtgcctagaacaggcgcggttctaccacccgtagaaacaacaacgactttgtcttccaatgaccctccaacctcactttccctatccctccccggtgttgactcatccgaagtttccaatcgaacaactgagccgattcatgccgcacctcctccgccgccacagccacagccacagccacagccgttgaatactatccctttgctcccaatgatgacggtgccctcggtttctccgacggggatggcgccgtttaattttagcgcagagtttctggcggtgatgcaggaaatgataaggaaggaggtgaggagttatatggagttgcacaatcagaagaatgggatgtgttttcaggctgcggtgaatgatgggtttaggaacgcttcggtgaagcgtattggaattagcagggttgattcgtaaatattatcatcgaagaatggaacaacacaagtagagatgaggaaaaaaactaagaacctgtttttttccctgtttttttttaatcaatgttcttaggcaataattttggttgatgtacagcgagacagaactctcgatccctaaagaggctgaatggaaattggaacgaaagagggagatagatgttacccattagataaaatctgaaatctctgttgtaactttttgtatcctctctattggtcctgttctcttttgaaaacaaaaagaaaaaataatcttggaataaacaaattcctccaaatctccttgtaataataaatctattttcttctttctaaacataaatttcaatctcgaattggttcggatt

SEQ ID NO: 4756 - DNA, 1288 bp, Glycine max
cccacgcgtccggtgttgaaaatctttcagctggcagttgcgagcttgcttcaagtgctcctttggttgttcccaatgataacattaccagatatgatgtagatgatattggtgatcagtctcatcctgagatagtgatggagcaggaagagttaagtgattctgaggaagatattgaagaacatgtagagtttgagtgtgaggaaatgacagattccgaaggagaggatggttctggctgtgaacaagctcttgcggttcaaaataaggaggtcccaatttcttctgaagaaaatgttgtgaagtatatggattgtatgaaaaaaccgtgtgaaccaaggggaaattatggtactgaagttgatggtggcctccttacaaatagtactgcactaaatattgctttgactaatgatggacaggatgacagaagtagttcttcatggctaagtttagactcatgtacggcagataatcctgtgctttcaaaggccatacttcaacagagtacgattggtgaagcttctgcttccaaaatcttttcaattggtaaagctgtcagagaggagagacatactgtagacatgatacaacagccaagtctaggtcctcatgtgtctaccactccacgaaaactcaggaagcgttctagcaaatcaaatgcaaatttaaatataggattgactgttgaaagatcaagccgtgatggtaatcatgaaaatggttgattaaagtaattctggcaaatggggttcaaataggattgcctgttgaaaagtcgagccatgatggcaatcttgattgaaattttctggcaaatgaagtgcaaatatgattaactttttgtaagttcaaaccatgatggtaatgctgaagtttgttgattgatgcaccatctgaactaactgagcttgtttttgttgttcgtggctgtagctttggcatctaatatttgttgctattgctggatggcagttaaccagagcttaggagggacaaccctctccccaaggtattttaatggggatccttcatgttttctgggtgcttcaccaagaattgatactttaaatatgtacaattactcgcaatggttgaattgatattgtctctgtaaataatgttgtgagagagggtcataggcaaaattggccttgactctttcataatcactagagattatgttcaaaattttgtaatgcgggcgtccattgtctcctagttcatggtggaattgatgaattgtatagagctaactatatattcttcaccaaaaaaaaaaaaaaaa

SEQ ID NO: 4757 - DNA, 1590 bp, Glycine max
ccacgcgtccgtaacaatgcaggtaacacacgttattctactgggcctgtgcttgctcttcctccgctggtggtggcgccgatggtccaccaccggcggaggcccgaagaacctccctctctggcgcaccctaaggaagaacttcgtgaccgagatgatcacccctctgaggataaaacagtgcagctggatacgaaaatgggccatggaggcccacatgagaaggatccaacaagaggcccgcgagcaagggttcgttcaagttatgagcaactgcaggctcaccatctgcagcatcctcatctgcatctgcttcggcgccaagatcgaggagaaaagaatcaaaagcatagagagcattttgaaagatgtcatgctcatcacgcttcccaagcttcgcagatttcttaccggttttcactccgttgttccgccgtcaggtgaaggaagctgaggagttaaggaggaggcaggtggagctgttggcgccgttgataaggagcagaaaggcttacgtggagggaaataacagtgacatggcgagtcctggtggtgctgcttacgtggactccttgcttggtttggaggtgcctggacgacgacgcttgggggaggaggagctcctgacgctagtgtcggagattatcagcgccggcacggacacaagcgccaccgcgctggagtgggcgctgcttcatttggttatggatcaagagattcaagagaggctgtacagggagattgtggggtgcgtggggaaggatggtgtggttacggagagtcacgtggagaagatgccttacctgagcgccgtcgtcaaggagactttccggagacatccgccgagccacttcgtgctgtcgcacgccgccacggaggagacgaagctgggagggtatacggtgccgaaggaggcgagcgtggagttttacacggcgtggttgacggaggatccgagtatgtgggaggatccgaatgagttccgacccgagaggtttatgagtggggatggggttgacgtggacgtgacggcggcggcggggacgagaccgagggggttcggtgttgggaggaggatttgcccagcgtggacaatggggattttgcatataaatatgctgctggctaagatggtgcatgctttccactggctgcccaatcccaactctccacccgacccgactgagaccttcgctttcactgttgtcatgaacaaccctctcaagccacttattgtgccacgatccatttaacttatacttatagtgctccttctctgcaaactaaggaatatatctgcttctaaaataacatatgagcacaaggctttttttggaagattgctgattgcagtttgttgccatcgaattccaaccttcgtttatcgcataagatattgcacaattttattgtaatggagcggaactccttccaatgtgcgtctcgtccggtctatattagtgaaggtggtatctatatacttactcctttttttcttctttttaattgtcggattttcgaacaatttctatttctatttatttttatttataaaatttaatatcacatttattattcatttaaaaaaaa

SEQ ID NO: 4758 - DNA, 1314 bp, Glycine max
  misc_feature (1284)..(1284): n is a, c, g, or t
  misc_feature (1286)..(1286): n is a, c, g, or t
  misc_feature (1297)..(1298): n is a, c, g, or t
  misc_feature (1300)..(1300): n is a, c, g, or t
  misc_feature (1306)..(1307): n is a, c, g, or t
  misc_feature (1310)..(1310): n is a, c, g, or t
tttttttttttttttttgcgtcgtagctctcgcttggaacaccaatacaacacgcctaagccaaacccaaatccaccgctctttattttcgtcttttctacccttcccggatcccaatccctaatctttctaccactctcactccaaaaatctctaattttttcatctgggaagatcggttgacgaatcgaggatccgatcgcttgcgaggaactagggtttcaatcgatcgcatcacacacaaacaatcatgtttagccggatgttcggtaaacctaaacaggaaaccaatgctgttgccactttggacaagctaaacgagacacttgaaatgctggagaaaaaggagaaagtgctccttaaaaaggtggcagcggaagttgaaaaggccaaagaattcacaagggggaagaacaaaagggcggcaatacaatgtctgaagaggaagaggttatatgaacagcaaatagagcagcttggaaatttccagttgcgtattcatgaccagatgatattgttggaaggtgctaaagctaccactgaaacagtagatgcattaagaactggagcagctgctatgaaggctatgcaaaaagcaacgaatattgatgatgttgacaagaccatggatgagatcaatgaacagaccgagaacatgaaacagattcaggatgcattgtcagctccaattggtgcagctgctgattttgacgaggacgaattggaagcagaacttgaagaattggagggtgctgagttggaagaacagcttcttcagccagcaactacagctcctgcagccccagtgcaggtcccagctgggcgccaacctactcgcccagttcctgcaaagcgaactcctgaagaagatgaattggcagctttgcaggctgagatggcactttgagcagaattttgcaggcattttttgtgtgcatgatgcgtggcttcaatgaggaattgtaaccactattacgtggattcctactcgcttatctgtgaaattattgagctggccagaggatgtatataaaaggtgaaaaaaaaaaggatcataaaagtcgttcaaaacttatttactattattttggatgagttcgaacccccctttccattatacgtaacaattattgatgcatttggctatcttatattttatgtggtcgagtttaacatggtcagtttaatcaatgtatatcttaaacatgctacaacgaagtataaggaataagaatttggttagccaacaagagaagaggaccgagaagaaaaaaaaaaaaaaananaaaaaaggaannanaaaaannaanagat

SEQ ID NO: 4759 - DNA, 996 bp, Glycine max
  misc_feature (924)..(924): n is a, c, g, or t
  misc_feature (927)..(927): n is a, c, g, or t
  misc_feature (936)..(936): n is a, c, g, or t
  misc_feature (961)..(961): n is a, c, g, or t
  misc_feature (974)..(974): n is a, c, g, or t
acgagtacggctgcgagaagacgacagaaggggcttgaaggatgcttcttcaattccctttccttctttcttagctttgaagaccaactcatttcaacttaacccatcaaaaccatcgctctctattttcgtcctttctacctttctccgatcccaatccctaatctttctctcttcaaactctaattttttcatctggggagatcggctgacgaatcgagaggatctcatcgctcgcaagggattagggtttcaatcgatcgcatcacatatcacaatcatgtttagccggatgttcggtaaacctaaacaggaaaccaatgctgttgccactttggacaagctaaacgagacacttgaaatgctggagaaaaaggagaaagtgctccttaaaaaggtggcagcagaagttgaaaaggccaaagaattcacaagggggaagaacaaaagggcggcaatacaatgtctgaagaggaagaggttatatgaacagcaaatagagcagcttggaaatttccagttgcgtattcatgaccagatgataatgttggaaggtgctaaagccaccacagaaacggtagacgcgttaagaactggagcagctgctatgaaggctatgcaaaaagcaacgaatattgatgatgttgacaagactatggatgagatcaatgaacagactgagaatatgaaacagattcaggatgcattgtctgctccaattggtgcggctgctgattttgacgaggatgaattggaagcagaacttgaagaactggagggtgctgagttggaagaacagcttcttcagccagcaactacagctcctgcggccccagtgcaggtcccagctgggcagcaacctactcgcccagttcccgcaaagcgaactccggaagaagatgaattggcagctttgcagctganatngcctttgancaaattttgcagctttttttgtgcntggctccatgaanaatgtaccatatacttgaaatc

SEQ ID NO: 4760 - DNA, 1968 bp, Glycine max
ctttgcgtctgttatgctatccgctacactaggcccccccccaaaaagcagcagcagcatcagtgttgaatctcgttttcccagcagaagaagaaagcaagggcacgcacatcttctcagctgtgagtgagaatttggagagtagaagaagacgcagctgattgtggaaatgtcagtgcaagattacctggacaagcacatgctttcccgaaaactcgaagatgccgtcaatgccgccgttagggccaaaacctccgatcccgttctcttcatctcgaatcacatgagaaaagctgtgcaatcggtcataacgaaaatcaaggcgagacagatcctcgatagcagaggaattccaaccgtcgaagtcgacttgcatactaacaaaggcgtgttccgcgcttcagttcccagcggcaactccaccagcatgtatgaagctgttgagttacgcgacggtgacaaaggagtgtatctcggaaatggcgtggctaaagctgttaaaaatatcaatgacaagatatctgaggcgttgatcggtatggatcctacgcttcagtcgcagattgatcaggccatgattgacctcgacaaaactgagaagaagggggaacttggagccaatgctatattagctgtgtccattgctgcctgtaaagctggtgctgcagaaaaggaggttccactttacaagcacattgctgacctgtctggaaaaaccagcccaacacttcctgttcctgcctttactgtcataagtggtggaaaacatgctgggagtaatctggccattcaggaaatcatgattctcccaattggagcaagcaaatttgaggaagcattgcgaatgggcactgagacctatcatcacttaaaggctgtcattacagaaaaatatggtgcacataactgtaatgtgggtgaagatggtggctttgctcctaatatatccagctttagagaagccctggatcttgtgaaggaggccattagcagagctggttatgatgagaaaataaagatagctcttgatgttgctgctacagatttttgcataggtaaaagatatgatctggactttcaatctcctcaaaagtctggacagaattttaagtcagcagaggatatgatagacttgtacaaggaactatgctctgaataccctattgtgtcaatagaagatccatttgacaaggaagattgggaacatatcaagcatatctcaagtctggggatttgtcaggtagttggggatgatctcttgatgtcaaatgcaaaacgcattgagagagcaataactgagtctgcttgtaatgcccttcttctgaaggtcaaccaagttggaactattacagaggtcattgaagtggtgaagctggcaaaagaagcacattggggggtggtaacgtctcatagatgtggagaaactatagactctttcattgctgatttatctgttggccttgcttctggtgtaattaaagcaggagctccttgcagaggagagcggctagaaaagtacaaccagttacttcggattgaggaggagctcggagatcaagcagtttatgccggtgaagattggaggcaataagaatgaaaaaattcttcatattggtctgtgatatgcttttcttctttaagtttgatacgtgtggttgaagttcatcactgtaccatattcatcaactgctgatgttctattgccattacgtcaactttgatcatttcgtgctattgggctttggagaatgtttcaacgagtattcaacaatctgtacaagatagtgcggcttgtttatttgtctattgttataggggataccaaattacactaattcaatgctttagttaaaattgttctgggcaagtgatattgattatagttatccaattcttcgcatggctttgttccagggcacctccatttacagacgtgacatatcattagatagaatctatcatttttac

SEQ ID NO: 4761 - DNA, 1114 bp, Glycine max
actatttccaaagctataaatcagctacgtaggcccccccccccgaagggttgctcttcttcctcatcctcttcctctgtgaatagggtttctgctttctttaacaatttcagaaggctttcgaatcgattcgattgggtctctcaaagatttgatttcacagtttgcgaagatgcctcgtcccaaaagaaaagcggccccaccaatcacttcctctgatgttgattcttctcttcgcaccgaaccaaagaaatcaaccacgaagcaatttgatcgaatagataaactatttgagtcatatgcaaataagtcattgggtttgattgacccagacgggattgaagcactttgtaaagatgtgcatgtggaccatacagatgttagaatgctcatacttgcttggaaattgaaagctgaaaaacaaggttatttttccaaggatgagtggcaaaaagggctcaaatgtttaggggctgacactctcccaaaattaagaaaggctattaatggactgaagaaagaggtgacagtaccagagtgctttgaggatttttattcttatgcatttcaatactgtttaacagaagaaaagcaaaggagtgtagatattgagaccatctgtgagctgttgaatgtcgttcttagatctgaatttcctactcaagtcaacttattaactgagtatctaaagatccaaaacgactacagggcactaaacatagatcactggagaaatttttatcggttttttaaggaggtaagccttactgatcttcgaagttatgattctagtcaggcatggccagtgatcctcgacaattttgttgactggttaaaagaaaaagaagagaaaatatagttctcacatttctcaagtttaagttcaattttaatctgccaactccgaatgagaaaactgtttgaagcggatatacaattgtatattgctgatccgagtaatcattcgcagttttttttgcagaaaattgttatgattaaatcacatgtaacaacaacttcatacagtttcaactgtcagctatattcctttctcctgtcctggagatattgttttataaaaaaaaaaaaaaaaaatgctcgttttttaacaaaa

SEQ ID NO: 4762 - DNA, 1302 bp, Glycine max
gcatttcatttttttttattttttttttatttagttacttactcctcacactttctctatcgttttcatctctgtttcagatctgagctctcgtatattccccagccatggccgaaaaggtcaccataatgaggctcaaggttgatcttcagtgccacaaatgctacaagaaggtcaagaagattctctgcaaattccctcaaatccgagaccaggtgtacgacgagaagaataacatcgtgaccatcgcggtggtttgctgtaaccctgagaagctcagggacaaaatttgctgcaaaggttgtggtacgatcaaaagcattgaaattgttgagcctcccaagcccaaaccaccacctcaaccagaaaagcccaaggaaccagagaagccaaaagagccacagaagccgaaagagccagagaagccgaaagagccagagaaaccgaaggagccaccgaagcctaaggaacctgaaaaaccaaaggaaccagagaagcccaaagagcctgagaagcccaaggagccagagaagcccaaagagcccgagaagcccaaggaacccgagaagcccaaggagcccgagaagcccaagcctgaatgccctcctccggtgccggtttgtccggcaccggtgccagtgtgtccgccacagccaacacctccgccaccggtggtggttccgattggggtgtgctgtgttccatgctatgaaggtcggcccggtgggccatgctttgatgggtacggcggtgggcccccaccatgttatgacgcttattatggaaggcctgtttatgatagttacggtgggagcaggccttgttacgtgagccgttgcgatgaatatttctgtgaagaaaacacctctgcttgcacaattatgtgatcgatcgcattattacttacttacttcattcatcgaatctctctctcttgtgccgcccatgcatgcaagttgttgcaacggcgcgttcttccatcttattgttggagcgatcatcaccctcatcaatccaaggaataatgatctttgtttttttgtgtttgggagtacaaaatgtttcgtacgtgaaacaaatatagataatatgatatgataccagaggctagctagctaaagaataaatgtttttactgtaatgtatgtaactgatactatatactgtgatatcttacattttcacaagttaataaagtttcttaatttgtgtacgaaaaaaaaaaaaaaaaaaaaaaaaaaaaaaaaaaaaaaagggcggacaatataaaagaataaaaaataacaaacaaatacatgcaaa

SEQ ID NO: 4763 - DNA, 1125 bp, Glycine max
aattgtcagcgtcacgaattcaagacgaaaatgaatatttagtttttttttttttcaaaggtggtattgaaatgtgggtaaggtagctccatttttagtgcagggctttcattacatcgatgccatggataccctctcaaggattagattcccccccacttgttacagccttcagttaccaaaaatctctgcattatctcgtttcccaaatgctttttccaaaaccactcaccaggtttcagtgctaagagtaagagcttctcgtccttcagtgagtaatgcagacgaggatgtcttgcaaatattttttaaggagagagaattaaatggggattttatatcaagagcttccgatttactatggagaagagatttcagaagttctggtgattatgatattagcgagctcaccaacaacacttctcaacaaactgagcagatcatagagactgacaatgatgctggttttttgaaacttacaagaacccaagagtggttaacaggtgacaattctccaccaataaacacgaaggtgactgctaaggcgttgcaggacagcagcgcaagacgcaagaaactgaacatgctcaaatatgaatctctcaagagggaattactgcttctatctgtgggtattggattggcttgtagtggatattgcttggttattttgtccgtacaggttgctataagttatgcgattggagtccttttcagttgcttgtaccttcaactcttgtatcaacatgcagacaacctatccagtgaagatgttcctcaaatattcaagaaaaagaagtcaaagaagtacaaatgaaaacttgtgctttgaatttgatctaattgtgctagttagcattctctgtagttgacattttcttatcccttgttttggtcaaacaatatttcttaaccagaattggtataagaagtgaagaccttgaagatttcttggagaggacaatcaagggtagcggtatatcactttctatctcctaggctagttattccagcaacaatatatggactttggattctgtttcatcagtattttaccaatgacatttttgatttccaggtaatccttggcagcatgtatatcaaaaaaagttatcttaagtcgct

SEQ ID NO: 4764 - DNA, 1069 bp, Glycine max
cccacgcgtccgcccacgcgtcccccgccccgccggtcagctacgtaggcccccgccgcggacaatagagactagagaagagagaggtgttggtgccctaatcgtgagaagaaaggaaagggaaaagaggaaaatggtgtgcataaggaaggcgacggtgaaggaccttctggcgatgcaggcgtgcaacctgttctgcctccctgagaactaccagatgaagtactacctctatcacatcctctcctggccccagctcctctacgtcgccgaagactacaacggccgcatcgtcggctacgtcctcgccaagatggaggaagaaaccaccgactgccacggccacatcacctccctcgccgtcctccgcacccaccgcaagctcggcctcgccaccaagctcatgaccgcagcccagaacgccatggaacaggtgtttggtgccgagtacgtgtccctccacgtgcgcaagagcaaccgcgcggccttcaatttgtacacggagacccttggctacaagattcatgatgtggaggccaagtattatgcagatggggaggatgcttatgacatgaggaagcagctcaaggggaagcagcaccaccatcatcaccataatcaccatcaccatcaccaccaccaccacgagcacagtggtggctgttgttcaggggaggccaaggggaatcctgccaaagccacctgattgaaagaaactaggagacttttagcttggaaaaataaatagtaagctttggttgaattctgttgtgtaaacttgttgtaggtttattgggccgatttgtctcgttatatatgaatttttgctttgctgtattggttaatattggcactccttcaatgataacatgattgtcctttttgttttgttgctgtgaattaacacaacttgttatgtttgttgaccccatttcacaacaacttggttggtggtgtgagcacactagttaattgcacgctctatagattagtgtgtggtgtgtggtgtggcatccagcttctactggagcttcatttgtgttgcaccacaatcccagcatagctgcag

SEQ ID NO: 4765 - DNA, 2308 bp, Glycine max
  misc_feature (2245)..(2245): n is a, c, g, or t
  misc_feature (2249)..(2249): n is a, c, g, or t
  misc_feature (2251)..(2255): n is a, c, g, or t
  misc_feature (2285)..(2285): n is a, c, g, or t
  misc_feature (2304)..(2304): n is a, c, g, or t
gagcagaaatagtagtaggaagcagaagggtttgtcttcagggttgttggcgatggatgtaaaaaggaatccaagaaatggtaacagtggtcctaggcccttgcagaagtcggactctgtcaaagaagttaaattgagtggaaaagcctgtgatgatgggaaggaatctacctctttgacgtcgacggggaggaattcggtggttgaatcaaagattgatggtaaatggggtaaagggctggagtatgctgacaaggacagttctgcgaagcttgtggttgaggaaaagggaaatgaagaaaaccagcaccgttttaattatagggacatttctccaccagaattgttgcaggaagatggaaaaactttggctgcagaaacattaccagcatggggggtggatgaggaccaagaagctaagattgtggaagatgttgacggcaatcaattgagaagtgtggtactagggaggcatgagcttaattcaatatctgatgatttgaaaaggggttctcctgtggctagtgatggaagttctgattcagatacagattctggttcgacatctgattctgaaagtgaacatgagagggaggaaaggagaaagaggagggaaaggattctggctgagaaagcagcagctaaagcaataaatgctatcaaggagcgggagaatatagtggccaaattagagggggagaaggaaagtctagagaaaatacttgaggagcgagctaaacaacaagcgctccaggcttcacagcttcagagcactatgatggaaacaatggaagctgttgagttagaaaagcagaaacataataatactagaatggaagttcttgcacgtttagctaaactggagactgtcaatgctgatcttgcaagatcccttgcagctgtgcagtggagccttgaagttgaggttaagcaagtatcagaactcagacagcaaatcagttcgaaagagttgtttcacgaagaactcagaaggcgaatgaagaatcctcgtcaaactggagcttcacaaaatcaactagtttcaaaaagcgttgagttggaacgggaaatccacgaggcagagcactctttaattaataataaagttgcacagttgcaggaaaaggcaaggaagctagaagctgatattgaaatgacaaggaaggagatagaagagccaacagaagtggaagttgagctcaagcgaaggcttcaacaaatgactgaccatttaatacagaaacaagcaaaggttgagtcactctcttctgagaaggcaagtcttgtattcagaattgaggctgtctcaaggttgctggatgagaacatgtcagcatcaggtgcagcaaacatgaatcctgcctcttcatcaagtgacttagaatcaggattgtgggagctctccaattcaaagttgaagcctatgctaaaagccagaattcattctggcaagatacagcttggatcattgcttcaacaacttgattatatttttgtgactggagcactttttctgaaaaggaactcaacggcaaaattgtgggctttgatatatcttgtttgccttcatttctgggtgttttatattcttttatcacattctagcccatcaaatgagggtagatctggtgcccagatctcactggagaacattaataacactggtggagtatgattgtgttgcgatgtgtcttcacttatgtcattccccgcagtttttaggaggccctcaatacattggatatgttttgtgttacgccagagtatatcatatcatgcacctgcagtggacatgcaggaatgccagtaccagactatgaccagtaaaatacaggactgcatggctttctatatcaatgaattttacatttctttgacgttgtgaaacttcattggacaaggagagactccactaaagaggagcaatgtcctgccattttgtatttgacaaaatggcttatttgggattgagttttgaatgctgatctaatgagaagttttcgtagcctcgcagggattgcaagtttaagtagcaataagtattttgtatgtacagtatagcaacagatgtaaacacagaataagcctttaatcagtgagtgacttgaacagcattcataaccccaaagatgccccatgcagtttcaaaattattgtctcttgaatattgtagaaaaagaaagagaattcgtttttttttgttgttgtatacaattattaataaatatttattcatttgtgtccncccncnnnnngagggcggccgccgccttgagtctcgtcgncccggaaattaattccggnccgg

SEQ ID NO: 4766 - DNA, 1312 bp, Glycine max
ttcgggtcagctacgtaggcccccccgccagagaaaaatataagcggatgtgtgagtttgcatggttggatagcaatggcagcaaagaaggtgtgtgtaacaggtgctggaggattcgtagcgtcttggcttgttaagcttcttctttccaaaggctacattgtccatggaactgtgagagaccctgaacctgctactcagaaatatgaacacttgctcaaactccacggagcttctgaaaacctcactctcttcaaggcagatctcttgaactacgaatctcttcgctcagcaatttctggatgcactgcagttttccatcttgcttgccctgtaccctcaatcagtgttcccaaccctcaggttgaaatgattgagcctgctgtgaaaggaacaactaatgtacttgaagctagccttgaagctaaagtgcaacgacttgtctttgtatcatctttagctgctatttccaatagccccaatttgcctaaagataaagtgattgatgagtcctattggtctgataaagattactgcaaaacaactcagaactggtactgtttttccaagacagaggcggaggagcaggccttggactttgccaaaagaactggccttgatgtggtaagcatttgcccttcccttgttctcgggccaattttacagtcaaccactgttaatgcaagtagcctggctctcctcaaacttttaaaaggtgtcaactcaatggagaataagatccgttggatagtcgatgtacgagatgtagctgatgcaatacttttggcttatgagaagcttgaggcagaagggagatacatatgccattcacataccatcaagacacgggatatgctggagaaactaaagagtatatatcccaactacaaataccctgcgaagtatactgaggtggatgattacataagtttcagctcagagaaactgcaaaggttgggttggaaatacaggtcactggaggaaacactcgttgattctgttgagagctatcgggaagctggccatctgcaatcagaataaatgtgacttagtagaatagaataaaactaagtgctatatgatagtagatacttcagttttttaaaatctttattaggattcgattcgattctagtgtgagtatgaaaaagactatataatgagggatgttgtaggtagtttggtaatctcgggttagtctccagcgtccggaggaatattctagtgtaaaccaagaaaaagtacattttcatactactcttctaaaactttttataagaatacaattgacatcgtcaatgtctaatggtct

SEQ ID NO: 4767 - DNA, 1991 bp, Glycine max
gccgctcgaggcggcgggccggagaatcctaaaaagctttttccacaatgttgggttgagccttttgaatggggtcgttaactttatgaacattgaaggcatgaaagggtattatcataagcacaccaatgggcgaaactgaggagtcgacaaggacaacatgtacgcggccataccactttttgtggcggccgctgagcgccgggccgggtccgggtccggcatccagctaatgtgtttctaccgttacaacttagttctactgcatcatctaatctttttttattttattttgtcggttctgcatcatcatctccttttatacgagagaaggaatcatctattctacactcgaagattaagcaagcaatggctattactacaccttccaattcttcaattctcctctccctttctctattgctcatctccctctccctcgctgagtcgcaatctttcatcggagtaaactacggccaggtcgccgacaaccttccggcgccggaggacacggccaacctcctcaaatccacaaccatcggaaaagtccgtctctacggtgccgatcccgccatcatcaaggccctcgccaattccggcatcggaatcgtcatcggcgccgccaacggcgacattccgagtctcgccgccgatcccaacgcggccactcagtgggtgaacgcgaacgtcttgccctactacccggcgagcaacatcactctcatcaccgtcggaaacgagattttgaccttagccgaccagggtctactgtctcagctcgtcccggcgatgcgaaatgtccaaaatgccctcggcgcggcctcgctcggtggcaagatcagggtctcgacggtgcactcgatggccgtgttgactcagtcggacccgccgtcgtccgggttgttcaacccggcgctgcaagacacgctgaaacagctgctggcgcttctgaaggacaacaaatcgccgttcacgatcaacccgtacccgttcttcgcttaccagagcgacccaagatccgagacgctggcgttttgcctcttccagcccaactcgggccgggtcgactcaggcaacgggaagctttacacgaacatgttcgatgctcaggttgatgctgtacattctgctttgagtgccatggggttccaggacgtggagattgtggttgctgagactggatggccctcacgtggcgacagtaacgaagtgggaccaagtgttgaaaatgcaaaggcctataacgggaacctgattgctcatcttagatcattggttgggacacctttgatgcctgggaagtctgtggacacttacatttttgcactctatgatgaggatctaaaaccaggcccaggatctgaacgtgcatttggtatgttcaaaactgatcgcaccgtgttgtacgatgttggattaaccaagtctagccagcagactccaacaactccggtaactccagcaccaaacactgctggatggtgtgtagcgaaagctggagtttctgatgctcagttgcaggccaacattgactacgcctgtagccaaggtatagattgcgggccaattcagccaggaggctcttgttttgagcctaacacaatagcatcccatgctgcatttgccatgaatctctactatcaaacttctggcaaaaatcaatggaactgtgatttctctcaatcagcaacactcacatcccaaaatccaagttacaatgcttgcatttacactggtgggagcacctgaaaacagaggcttcggcttgatgttaactaataagttttgtggatagaggtgtatttagaattaaattaatgaataagggcttatactttgccctctttttagttatatataggctttcgattttatatagctttaactgtagaggcattccgattctcgttgtgtggcaatccacatttgttttcttttattttacgattccaacccctcccattttttaaatgttaaaaattctttcggcc

SEQ ID NO: 4768 - DNA, 1416 bp, Glycine max
  misc_feature (1292)..(1292): n is a, c, g, or t
  misc_feature (1348)..(1348): n is a, c, g, or t
tctcgagccgaatcggatcgagccgcgcgttaggctggtggcggtgagttggagctttgaccagtttgagcacacgagaattcagtgggcatgtcaatggcaaaaaaacctgtgaaatactctctggttgacgcgtttactgagtcagtgttcaaaggaaaccctgcagcagtgtgtttcttagaagagaagagggacaaaaagtggttgcaaggagtagctgcagagttcaatctatctgtgacatgttacttaactcgcatcaccgagtcccatggaacaacctcttatcctcgttttgatctcagatggttcactcctgttagtgagattaacctttgtggacatgcgaccttagctgctgcgcacacaatattttcatctggtttggtggacaccgatgttgtcgaatttgtggctatatctggaatattaactgccaaaaagatcccagcgatcaatatcactagtgcctcagacttgcaaaagggtgaagctcaggatgggttttatgttgaattgaatttccctgctgatcctgttgtagaattcaattttgatgagacttcacaaatttctggggcattgaacggtgcttccataattgatataaagaggacacaagatggaggcgacttagttgttgtggtcacttccggaagagttgtcgaggaactacaaccacaacttgatgcaatagttaaatgtcctggaagggggttaattgttacggggattgctcctccaggctcagaatttgacttctgtagtcgattcttctgcccaaaacttggagtcaatgaggatcctgtttgtgggggtgcacattgtgcattggcaccctactggagcaagaagctagggaagtgtgatttcaaagcttatcaggcatcagccagagggggagttctcaatgttcatcttgatgagcagaaccaaagggtgcttttgcgtgggaaggctgttaaagtgatggaagggtgtgttctggtctagtcctgttcttagcattgcagattatattattgcatcaaagtatgtttcagatgactagaattgtaactgaaattctgaagtgttacgacactttattttatcacataaaataggcaacctccgagcattatgtgtttcagtgtttgatgtccacaaacatggtataataataatacttgttgatttgaataagatggtcaggtcagtgctttagtttgcaggccctgcgtctggtctcatcagttcaaatcaatgccaaattgggagaaaaaaaaaaatgaaaaaaaaaaaaaaanccgtgactagttctatttttttattttatttttggtcttaaaatttcaagtttctnttaaaggctgtaactattttgcttagtttttaaatacaactacaaaaatccaacttcacattgttttc

SEQ ID NO: 4769 - DNA, 1652 bp, Glycine max
gtttggagactgccgtgttgctggctttgattggtgccaattccactgttgtggcggcggggctcttgcatgactctctggatgatgcttttctgacttatgattatatagttgggatgtttggcgctggtgttgctgatttggctcgagaaggggtttctaaactgagtcacttaagcaagctggctcgagaaaataatacggctagcaagtcagttgaagcagaccgcttgcatactatgttccttggcatggcagatgcaagagctgtcctcgttaaattggcagatcggttgcataatatgatgacactagatgcattgccaggggccaagcaacagaggtttgcaaaggagactttggagatttttgcacctttggccaatcgcttgggaatttctacttggaaggaacaattagaaaatttgtgttttaagcatctcaacccaagccagcatgaggagctttcatccaagcttgtggaatcgtacgatgatgcaatgattacttctgcaatagagagattagagcaagcacttaaagatgaaggcatttcttataatgtcatttctgggcgacataagagcttgtatagcatttattgcaaaatgttaaagaagaaacttaccatagatgatatccatgacatttatgggctgcgcttgattgttgacaaggaagaagactgttacaaggccttgacagtagttcatcgattgtggtctgaggtgcctggaaagctgaaagattacatatgtcgtcccaagttcaatggatatcaatctctgcatactgtggtgatgggtgaaggcaaggttccccttgaagtacaaattcggaccaaagatatgcatttgcaagcagattttggatttgctgctcattggagatacaaggaagatgattgtcagcattcttcgtttgtgcttcagatggttgagtgggctcgatgggttgtcacctggcagtgtgaagcaatgagtagagattgttcatctgttggatatgctgattcagtcaagcccccatgcaagttcccttcacatgctgaggattgcccatattcttacaagcctgattgtggtcagaatggccctgtgtttgttatcatgattgagaatgataagatgtctgtccaagaatttagcgcaaactcaacagtattggatttgttgaaaagatctgggagagcaagctctaggttgacaacatataggttcccattgaaggaagagttgaggccaaggctgaatcacaaacctgttagtgaccccaatagcaagttgaagatgggagatgtgattgaacttacgccagccatacctgacaagtctcttacagaatacagggaagaaatccagcgtatgtacgatcgtgggctaactgtgtcgagcatgggaaccgctgcaagcaccatggttggctcaaggagttgacccgtgcttttggatttcacttccattccaacatgaaattatttagtgacaagttatgtatatagaaaatatttgtacagaacaactgtgttactactttgaacttggctaacttgattcaattatgtgctgaatgattgattttatgtagttgatccaatggtcctgataaattaattacatcccacccactatgattctagagttctggtttta

SEQ ID NO: 4770 - DNA, 1097 bp, Glycine max
  misc_feature (20)..(20): n is a, c, g, or t
aaaaaatcattagtagtggngttttttcgagcgtcagctacgtaggcccccttttttctttcttcctttccttgtttccactacttttcttcccttctttccagaacaacaccacaacacaaacagagcaaaaaaagctccaccaatggcgggttacagagccgacgacgactacgactacctcttcaaggtggtcctgatcggcgattccggcgtgggcaagtccaacctcctctctcgcttcaccaagaacgagttcaacttggagtccaagtccaccattggcgtcgagttcgccacccgcaccttgaacgtcgattccaaagtcatcaaggcccagatctgggacaccgcaggccaagaaaggtatcgtgccatcaccagtgcatactatcgtggggcagtcggtgcacttctcgtgtatgatgtcactcgccatgcaacatttgaaaatgttgacagatggctgaaagaattgcggaaccacacagatgccaacattgttgtgatgctcgtgggtaataaatcagaccttcgtcaccttgtagccgtgtcaactgaagatgggaagtcctatgctgagaaggaatcactttacttcatggaaacctcagctctggaggctactaatgtagagaatgcctttgccgaagttctgactcaaatctatcacattgttagcaagaaagcagtagaggtggctgaaaatggaaccacatctgtgcctgccaaaggagagaaaattgatctgaaaaatgatgtttctgctttgaagagagttggttgctgctcaagctaagattggaaaacatagttcaattggttggtatcggctctgttgtacgtgtaatattctgagaaatacgaactagaagaaaagtgaaatttaatttgtcatagcatgttagactctttgtgtaaccttaaaactaagtttggtgtttcaataggagctgctggtgaagcaagttgattgctagtcttacttgttgtagtgcttttattattgtttttgaaatgttttcacatgcaaagaggttcaagcttggaattacttcattgaagtttgtgtagtattctgcagtgattatggctcc

SEQ ID NO: 4771 - DNA, 1827 bp, Glycine max
  misc_feature (10)..(10): n is a, c, g, or t
  misc_feature (16)..(16): n is a, c, g, or t
agtggtgatncaacgncatgagttcgagtcagctacggaccggtttttttctttacacttcgcctcactctcttttatttcgttcctctattcgctacgtcgtcgttagggtcgtcttcggatcggtggaacttgactgcgccggcgtgaattccgacgctgcgagtggcaccgaattgcgatagcggtgacgaatatgaaggttttcgttaagactctcaaaggcactcacttcgaaatcgaagtgacgccgcaagacacggtttctgaagtgaagaaaaatatagaaactgttcagggtgcagatgtctatcctgctgcacagcaaatgctaattcatcaagggaaagttcttagggatgcttctaccttggaggagaataaagtagttgaaaatactttcattgtaattatgctatcaaagagtaagagcccatccggtgaaggatctactacttcaactgctccatcaaccaaggccccacagacaagtacagttcctgcttcaacccctccagcgtcagtagttcctcaagcttctgctcctgctcctgctcctgctcctgctgcaactggggcactgcctgcatcagttactgcacctatatcttcaccttctcctgctccagccccaactcctgctcctatatcttcaggaactgctgtggaagggtctgatatctatgggcaggctgcatccaatctggttgctggaagcaacttggagggaacaattcagcaaattcttgatatgggtggagggagctgggacagggataccgttgtccgtgctcttcgagctgcctacaacaaccctgagagagctgttgaatatttgtatacaggtatccccgagcaagctgaagctccacttgtagcccaagtgcctgcaagtgctcaacctacaaatcctcctgctgatgctccacaaacagcacaacctgctccagttacctcagctggacctaatgctaatccattagacctttttccccagggtctccctaacgtgggttctggtgctgctggtgctggttcattagactttttacgcaatagtcaacaattccaagccttgcgagctatggtgcaggctaatccacaaatattgcagcctatgctacaagagcttggcaaacaaaatccccatctaatgagattgattcgagaccatcaagctgacttccttcgcctgataaatgaacctgcagaaggtgctgaagggaacatattggggcagatggcttctgcgatgccacaagcagtaaccgtcactcctgaggagcggcaggcaattgaacgtcttgaagcaatgggttttgatcgtgcaatcgtattggaggtgtacttcgcttgtaacaaaaatgaggaattggctgccaactaccttttggatcacatgcatgagttcgaggaacaatagatctcctttcgaatttgccaaattatttcgtgtcatcttttttctcgatgggtctttgttacatactatgtttaatgaggtaatgcttttgataatgtcaaatctcaagtggataagggatgttttattctcctccatattattgcccatgtatttatcatttccagcccgtcgagggtttcttagtatttcatatacatagttgtttgccttgtattactggtattgtgcatccttttaacgtgtgtaattgtgcatgcttgttcattcgcaagtcgatagatgtgtaattcgtttgacacagactgtttctgggttcagttcatgtttttggaaatataatgactttttgctgtcagttttatataaaaaaaaaaaaaaaaaaaataaaaaaaaaaaaaaaa

SEQ ID NO: 4772 - DNA, 1661 bp, Glycine max
tcagctacgtaggcccccccccccacacttcgcctcactctttctttcgttcctttcttcgctacgtcgtcgttagggtcttcttcggatcggtggaacttgaccctgccggcgtgaattccgacgctactcgtggcgccgaattgctatagcggtgacgaatatgaaggttttcgttaagactctcaaaggcactcacttcgaaatcgaagtgacgccgcaagacacggtttctgaagtgaaaaaaaatatagaaactgttcagggtgcagatgtctatcctgctgcacagcaaatgctaattcatcaagggaaagttcttagggatgctactaccttggaggagaataaagtagccgaaaatactttcattgtaattatgctatcaaagagtaagagcacatctggtgaaggatctactacttcaactgcattatcaaccaaggctccacagacaagtacagttcccgcttcaacccctccagtgtcagtagcgcctcaagctcctgctcctgctgcaactggggcactgcctgcatctgttactgcacctgtatcttcaccttctccagctccagccccagctcctgctcctatatcttcaggaactgctgtggaagggtctgatatctatgggcaggctgcgtccaatctggttgctggaagcaacttggagggaacaattcagcaaattcttgatatgggtggagggagctgggacagggatactgttgtccgtgctcttcgagctgcctacaacaaccctgagagagctgttgaatatttgtatacaggtatccctgagcaagctgaagctccacttgtagcccgggcgcctgtaagtgctcaacctacaaatcctcctgctgatgctccacaaacagcacaacctgctgcagttacctcagctggacctaacgctaatcctttagacctttttccccagggtctccctaatgtgggttctggtgctgctggtgctggttcattggactttttacgcaacagtcaacaattccaagccttgcgagctatggtgcaggctaatccacaaatattgcagccaatgctacaagagcttggcaagcaaaatccccatcttatgagattgattcgagaccatcaagctgacttccttcgcttgataaatgaacctgctgaaggtggcgaagggaatatattggggcagatggcttctggaatgccacaagcagtaactgtcacccctgaggagcgccaagcaattgaacgtcttgaagcaatgggttttgatcgtgcaatcgtattggaggtgtacttcgcttgcaacaaaaatgaggaattggctgccaactaccttttagatcacatgcatgagttcgaggaacaatagatctacttttgaatttgccaaattatttcttgtcatctttttctctcgatgggtctttgttacactctatgtttaatgaggtaatgcttgataatgtcaaatctcaagtggataagggatgttttagtctcctccatattattgcccttgtatttatcatttccagcccgtcgagggtttcttagtattcatatacatagttgtttgccttgcattactggtttaatgttcagggttcagttcttccttttggaaatatattgactttttgctgtcagttctatgtaaa

SEQ ID NO: 4773 - DNA, 1429 bp, Glycine max
ctttccatttcttccatcgttccgtttatatatgaaacaagtcacttatagggttgtgagattgaaggggtattattttttcatgcagaaacgagggatcatctaattaaaccagctttcatcagggtgtgggtgatttattgtaagctttttcttattatcttcgattgtgtttacacgtgtgtgttaaaggtggcgaatcctaaagagaagggaaatgaggttgatgacaataaggaattgatattattccatgaagggataatgaacaaccctacattgtcaaggctatttccgggtttgaatagggagagggagatgtctgctatggtctcagctttgacccacgtggtctccggagaggtgccaataaccggtgattcttcttcttcttcttctttggttcttcatcatcaacctcatgatgatactgttattgttacaccaaccatgccttcttcttcttcttcatctacttatgttgttggcacctcttctctcaagagaagtagggaaaatgatacatatacatcatccttattctcacatccaccttcatcatcccctgctatgccaaccagggcagaatatgcaacaagggaaatgggaaattctgtgtacgaatacagaacaacaacagagaatgcaacaagggatgaaggaaggagaaaatacagaggggtgaggcagaggccgtgggggaaatgggcagcagagataagggacccattcaaagcggcaagagtatggttaggaacatttgacacagcagaggcagcagctagagcatacgatgaagctgctcttcgtttcagaggcaacaaagccaaactcaattttcctgagaatgtcactctccgacaacctcaattcactgtttccaatcctccatcttctcttgtatctattacaacatcaatagacccagttgttcacagtactcgacctctccttcttccttctcaggcttcaactgcgaccaatgtttacgagtattttcaactctcgggcttccccaccaacaccaacctttatgatggtaataggatgtttgtgacgtctaatgccatggcttctcatcatcttcaatcttcgtcttcgttgttgtcgtcttcttcttctgcgtttgtttcttctgtaacttctcaggacacttcactttcttcgttgtattctggccagttgccaccatggtcaaaggtttctggtcacagctcgtcttcctccggatgatcctttttgtttaatgtttatggaatctgtatttttcttctttcattatcataatctcttcatttttttttaaaaaaaacattatacttctattatctgtaattgcaagactagcttgccaatacgtacattcatgattcatgactttagatgattaagatgtttatggaggaaattatggtattaaaaccttcac

SEQ ID NO: 4774 - DNA, 2102 bp, Glycine max
tgtgttcttacggctgcgaagacgacagaagggtacgggtgcgatgacgacagattggtacggctgcgagaagacgacagaagggtacggctgcgagaagacgacagaagggtacggctgcgagaagacgacagaagggtacggctgcgagaagacgacagaagggtacggctgcgagaagacgacagaagggtacggctgcgagaagacgacagaagggtacggctgcgagaagacgacagaagggtacggctgcgagaagacgacagaagggtacggctgcgagaagacgacagaagggtacggctgcgagaagacgacagaaggggggtgaccaaatgcaaagacggcattgaaattgaacaatccatcactaacacaagcgcagacaacaacataaccctgctccaaacacatcaatttcaataatgttttcttctgcaatttctcagaagcccttccttcagtccctcgtcattgatcgttacgctcagagcacaactgctgcaaccaggtgggagtgcttggggtttaacaagtcagaaaatttcagtaccaagagagtgttgcgtgcaggggggttcaagttgaattgcttggttgaaaatagagagatggaagtggagtcatcatcatcatctttggtggatgatgctgccatgagcttaagtgaagaggatttaggggagcctagtatttcaacaatggtgatgaatttcgagagtaagtttgatccttttggagcaattagtaccccgctttaccaaacggctacttttaagcagccttctgcaatagaaaatggtccctatgactataccagaagtggaaatcctactcgtgatgctttagaaagtttactagcaaagcttgataaagcagatagagccctgtgcttcaccagtggaatggctgctttgagtgctgttgttcgtcttgttggaactggtgaggaaattgtcaccggagatgatgtatatggtggctcagataggttgctgtctcaagtagttccaaggactggaattgtggtgaaacgggtaaatacatgtgatctagatgaggttgctgctgccattggactcaggactaagcttgtgtggcttgagagtccaaccaatcctcggcttcaaatttctgatattcgaaaaatatcagagatggctcattcacatggtgctcttgtgttagtggacaatagtataatgtcacctgtgttgtctcagccattggaacttggagcagatattgtcatgcactctgctacaaaatttattgctggacatagtgacattatggctggtgtgcttgctgtgaagggtgaaaagttgggaaaggaaatgtatttcttgcaaaatgcagagggttcaggcttagcaccatttgactgttggctttgtttgcgaggaatcaagacaatggccctgcgaattgaaaagcaacaggataacgcacagaagattgcagagttccttgcctcccatcctcgagtgaaggaagtgaattatgctggcttgcctggtcatcctggtcgtgatttacactattctcaggcaaagggtgcaggatctgtgcttagcttcttgactggttcattggcactttcaaagcatattgttgaaactaccaaatacttcagtataaccgtcagctttgggagtgtgaagtccctcattagcatgccatgctttatgtcacatgcaagcatacctgctgcagttcgcgaggccagaggtttaactgaagatcttgtacgaatatctgtgggaattgaggatgtgaatgatctcattgctgatcttggcaatgcacttagaactggacctctttaatgtcttctccacccccccacccaaaaagaaaaaaattcatccttaagaagttggattagcatgttgaggatttgggagcattgctatcctgtctttggattcttgagagtggaaacttgaagtgttgcttatgtgcatgtaataaaatcaatatttcctgtaattttgttgtaacaattgttatccttaccttgcaatatcatgtcatacaagttactattgaagagtggtgaaaatattgccatacgaagattaaaaaaaaaaaaaaaa

SEQ ID NO: 4775 - DNA, 1053 bp, Glycine max
  misc_feature (24)..(25): n is a, c, g, or t
  misc_feature (133)..(133): n is a, c, g, or t
  misc_feature (158)..(158): n is a, c, g, or t
  misc_feature (185)..(185): n is a, c, g, or t
  misc_feature (239)..(239): n is a, c, g, or t
  misc_feature (1009)..(1010): n is a, c, g, or t
  misc_feature (1030)..(1032): n is a, c, g, or t
acgcctgcagtaccggtccgaatnnagggtcgggggcgcgtccgtacggctgcgaagacgacagaagggtacggctgcgaagaccacagaagggtactgctgcgagaaggcgacagaagggtacgggtgcganaagactacagaagggtacggctgcnagaagaccacagaagggtacggctgcnagaagacgacagaagggtacggctgcgagaagacgacagaagggtacggctgcnagaagacgacagaagggtacggctgcgagaagactacagaagggtacggctgcgagaagactacagaagggtacggctgcgagaagactacagaagggtacggctgcgagaagacgacagaaggggggtgaccaaatgcaaagacggcattgaaattgaacacaatccatgactaacacaagcgcagacgacaacataacactgctccaaacatatcaatttcaataatgttttcttctgcaatttctccgaagcccttccttcggtccctcgtcattgatcgttacgctcagagcacaactactgcaaccaggtgggagtgcttggggtttaacaagtcagaaaatttcagtaccaagagagagttgtgtgctgaggggttcaagctgaattgcttggttgaaaatagagagatggatgtggagtcatcatcatcatcatctttggtggatgatgcttccttgagcttaagtgaagaggatttaggggagcctagtatttcaacattggtgatgaatttcgagagtaagttcgatccttttggagcaattagtacccctctttaccaaacggctacttttaagcagccttctgcaatagaaaacggcccctatgactataccagaagtggaaatcctacacgagatgctttagaaagtttactagcaaagcttgataaagcagatagagccctgtgcttcaccagtggaatggctgctttgagtgctgttgttcgtcttgttggaactggcgaggaaattgtcgccggnnatgatgtatatggtggctcnnntaggttgctgtctcaagtggt

SEQ ID NO: 4776 - DNA, 2214 bp, Glycine max
  misc_feature (753)..(753): n is a, c, g, or t
gggtaccgcctgccccacccgtcccactcgcccgcgcacttcgtttccctctctatctctccgccacgcgccaccatgtcagtctcacactccctccagctccgcctcttcacccctccccccaccgccattcccacccacaaccacctccctccccccaccctcctcctcccgcgcgccgcccaccgccgcttcctctccctccgcgcctccttctccccggaaaccctggtctccgacaacaacggcgccccctcccccccgcccccctccgatccgagctccatcgaggtggactccgtcacggaagccgagctcaaggagaacggcttccgcagcacgcgcaggaccaagctcgtctgcactgtgggccccgccacgtgcggcttcgagcagctggaggccctcgccgtcggaggcatgaacgtcgccagaatcaacatgtgccacggcaccagggagtggcacaaggaggtcatcgaccgcgtccgccggctcaaccacgagaagggcttcgccgtcgccatcatgatggacacagaaggcagcgagattcacatgggcgatctcggcggcgcttcctccgccaaagccgatgacggtgagatctggactttcagtgttagagccttcgattcggcgcttccccaacgcaccatcaatggcaattatgaaggcttcgctgaagatgtgaaagtgggggatgaacttttggtggatggaggaatggttaggtttgaggtgattcagaanataggtccagatgtaaagtgccgttgtactgatcctggcttgttgctgccgcgggccaatctcacattttggaggaatggtagtttggtgagagaaaggaatgccatgctccctactatttcttccaaggattggttagacattgattttggtatttctgagggtgttgattttattgctatttcatttgtcaagtctgctgaagttattactcatcttaaaagctatattgctgcacgatctcgtgatagtgatatttctgtcattgcaaagatagaaagtattgactcattgaagaacttagaagagatcgttctagcggcagacggagctatggtggcacgaggagacttgggagctcaaatacctttagaacaggttccatctgctcaacaaaggattgttcaggtttgcaggcaattgaataagcctgtcattgttgcctctcagctacttgaatccatgattgagtaccctacacctacaagagctgaagttgcagatgtttctgaagcagtcagacaacgagctgatgctttaatgctttctggtgaatcagccatgggccagtaccctgacaaggccttaactgttttaaggagtgtcagtttgagaattgagagatggtggagggaagaaaaacgctatgaagctatgttgctcccatcagttgggtcttatttttcagaaaagatatctgaagaaatctgcaattcagctgctaagatggccaataatttagaggtggatgcgctttttgtgtacacaaagacagggcacatggcgtctctattgtctcgttgccgtcctgactgcccaatctttgcttttactaccacttcatctgtgcgtaggcgactgaatcttcagtggggcttgatacctttccgcctgagcttcacagatgatatggagagcaatctcaacagaaccttttcattgctcaaggccagaaatctgatcaaatctggtgaccttgtcattgccgtctcagacatgttgcagtcaatacaagtgatgaatgttccttgagaacatgtttcatttcttttgaaagccaacattgctgcttgttcaaaacctgggatgctgctagagtgctaaaatggggcagagactacatgaatgaattttgttcgttctgtcattttaatttataggacacgacagaagtttgggagagttaatattatggccttgaagttcttagttttaatgcatacaccttcaagctctagatatcttttttagtcgagtgaggcaatagtgtaatagctacccttttaagttgtaaggcacacatttgcattttccatgttttatatcattgcattagctttccacttcaatgttgactaaaatgtgaaggtttcaataaagattccatagtatttgcctatcaaaaaaaaaaaaacatcaaataaatctaaaaaaaaaaaaaaaaaaaaaaattaaaaaccg

SEQ ID NO: 4777 - DNA, 1759 bp, Glycine max
  misc_feature (11)..(11): n is a, c, g, or t
  misc_feature (127)..(150): n is a, c, g, or t
  misc_feature (193)..(197): n is a, c, g, or t
cgacctgcagnacggtgagatctggactttcagtgttagagccttcgattcggcgcttccccaacgcaccatcaatgtcaattatgaaggcttcgctgaaggttaactaacttaatcaaattttagnnnnnnnnnnnnnnnnnnnnnnnntctaatgattgcaatgtgatgtgatgtggcagatgtgaaagtnnnnnatgaacttttggtggatggaggaatggttaggtttgaggtgattcagaaaataggtccagatgtaaagtgccgccgtactgatcctggcttgttgctgccgcgggccaatctcacattgttggaggaatggtagtttggtgagagaaaggaatgccttgctccctactatttcttccaaggattgcttacacattgattttcgtatttatcagggtgttgattttattgatatttcatttgtcaagtgtgctgaagatattactcatcttaaaagctatattgctgcacgatctcctgatagtgatatttgtgccattgcaaagatagaaagtattgactgattgaaaaacttagaagagatcgttctagcggcagacggagctatggtggcacgaggagacttgggagctcaaatacctttagaacaggctccatctgctcaacaaaagattgatcacgtttgcaggcaataagaataagtcctgtcattgaacgcctgtcagctacttgaatacatgattgagtaccctacacctaccagagctgaagttgcagatgtttctgaagcagtcaggcaacgagctgatgctttgatgctttctggcgaatcagccatggcccagtaccctgacaaggccttaactgttctaaggagtgtcaggttgagaattgagagatggtggagggaagagaaacgctatgaagctatgttgctcccatcggttgggtcttatttttcagagaagatatctgaagaaatctgcaattcagctgctaagatggccaataatttagaggtggatgcactttttgtgtacacaaagacagggcacatggcatctctattgtcacgctgccgtcctgactgcccaatctttgcttttactaccacttcatctgtgcgtaggcgtctgaatcttcagtggggcttgatacctttccgcttgagcttcacagatgatatggagagcaatctcaacagaaccttttcattgctcaaggccagaaatctgatcaaatcaggtgaccttgtcgttgccgtctctgacatgttgcagtcaatacaagtgatgaatgttccttgagaacatgttcatttcttctgaaagccaacatagccgtttgttcaaaacctgggatgctgctagaggactaaaatgggcagagactacacgaatgaattttgtcgttctgtcattttaatttataggacgctactgaagtttgggagagttaatattatggccttgaagttctttattttattgcatacaccttcaagctctagatgtcttttttagtcgagtgagatagtatagcgtagttacccttttaaattgtaaggcacatatgcatttcctatgtttatatcatgatattagctgtccacttcaatgttgactaaaatgtgaaggttgcaataaagattccattgtagttgcctatcattatgcacaatgtatttgtcctgtgtaaactaaatgttacagtgcatatccgcagcagttaaatgaagcagtatttggtacagcaagtagctcaaaaaactcgagactagttc

SEQ ID NO: 4778 - DNA, 1375 bp, Glycine max
caattgggtaccgggccccccctcgagtcagctgcgcaggccccccccccattctcagtaccacccgcaccttgtagtgaaggtgagaatttttcaattaagttggagggaaaattgaagaaaaccaatgtttcttcagttgattacagtgaagattcaaaatctatggcaatcaatgatgggtcgtgccagatggcaagcctttgcaccaaggtgcaggattgtcctgaacaagcttgcttgggttctgttcttgcaaaagaacatgataaacgaattctgaacaagggtggtttgagtgtagaaaaatttaaacacaatattgttggccagagttcaaaatctttgattgttgatgagatggacattggtgtagatggggatgatggagttgttgaacgtaaccaccctacttcctcaagcttgacagactcatctaatggctctggctcaatgatgcatagcagttcatcaggctctcggagctttgagaaccaggatcagtccaaagtcaaatgaaccatcattgattgtgggtcgaaactaattgtcaaagctacctatagagaagacaccattcgtttcaagtttgatccatctgaaggttgtttcagactatatgaagaagttgcagcaagattcaaactacaaaatgggttatttcagctcaaatatctagatgatgaagaggaatgggtgatgttggtgaatgatgctgatttgcaagagtgtatagaaatattggatgatattggcacacgtagcgtcaggtttcttgttcgtgatatgccttccgttttaagcagttctggcagtagcaatagctacttgggaggcagctcatagcatatgggatgtggtggacgacttcaatgtgaaaattcgagtcttgctttgacaagttgatgttaatttttcacaatcttctaaaggttctgcatctggaagagtttgaatcttatccacagccacctatgccaagtgcaaagcttcttcatttctttctcaactttgtgcattgccaaattataatttctgagtagctttttggaagatagaaagacgcggttcatatgggagtacttgcatgttatgttaaatatatagttttgtatatattgaacacagcggcagcatagaaatttatagtagtagtagtcagttctgtgatgctgtaatcgcactttgtaattgtatagatagatatagatagatagattgatttcccacaagataatatagctaaaatatgattataaagttgtcttaagctgaccaggatggattgaactggggcaatgggggcgaaacgcggggaacgggcgggggggggagagggggagggggggcccgcaaaaaatggggggggaagggg

SEQ ID NO: 4779 - DNA, 1161 bp, Glycine max
actcgagccgaatcggctcgagtgttcgtgctttattcacacttgcagccaaggtctccccaactataatattcgtggatgaggttgatagcatgcttgggcaacggaccagagttggggaacatgaagccatgaggaaaataaagaatgaatttatgacccattgggatggacttttgacaaagcaaggggagcggatccttgttcttgctgcaaccaataggcctttcgacttggatgaagctattattaggcgatttgaaagaaggattatggtaggactaccatctgtggagaacagggaaaagattttgaggactcttttggcaaaagaaaaggtggacaacgaacttgagtttaaggaacttgcaactatgacagaaggatatactggaagtgatctaaagaacttgtgcacaactgctgcttatcggcctgttagagagctaattcagcaagagaggataaagagtctggataaaaagcagaaagcttccaggggacagaataaagatgtccaagaaagtcgaggacaatccgtagtaggaaatactcaagatgctctagatgaagaagaggaagttaaacaggaaagagttattattacccttaggccattgaatatgcaggatttcaaagaggccaaaaatcaggttgctgcaagctttgcagctgaaggggctggaatgggtgagttgaaacagtggaacgatttgtacggagaaggcggttcaaggaagcagcagcagttgtcttacttcctgtgattttacggaggatgcaaagtacattttcaatgaaactgtaggaacattttcgcggctgcacgatttttcaatgatagtgaggaaaattttccactgaacaggcacctatcaagcaatatctctatattttccgagaatatcttgatgtttcttcattcattccctttagcttaggaactaagctatatacctatggtattttgcccaatatgctacgaatatgactagctataaactaaggtatgctgtccgataatatggtgttttggcagttttgcctacactgaaagcagaaagtggggttatttattagcactatttacgttgtattggtgtttatttgacatgtaatgtatacagtatactagaaataagatgtgatttaatgagacaa

SEQ ID NO: 4780 - DNA, 1326 bp, Glycine max
cgattgggtaccgggccccccctcgtgtcgcccgctcagacccaaaagttaaaaccaaagacaactcgaagaatacaacacaaagcttcggaccttttttggtctctggagttacactacagccacggagctctaggactgcttattaagtagtttattttagaggctaacatgagcttcgctgcaccatcacttggttctgctggtggtagatctgctagaagagcatttgagtttgggagaacctatgttgtcaggcctaaaggtaaacaccaagcaactatagtctggttgcatggcctcggggataatggctccagttggtcccagctattagagacccttcctcttccaaatattaaatggatatgtccgactgctcctactcagccaatatctatatttggtggctttccgtctactgcttggtttgatgttggagatatttcagaagatgctcctgatgatctagaaggtttggatgcttcagctgcacatgttgcgaatttgctgtctacagaacctgcagacattaagcttggtgttggagggttcagtatgggtgcagctactgccctgtactctgtgtcctgctttactgctggaaaatatgggaatggcaatccttatccagccaacccaagtgcagctgttggtttaagtggctggcttccgtgctcaaagaccttgagtaacaagttacaaggggtagatgaagctacaaggcgtgctcagtcctttcctgttttgctgtgtcatggaaaagttgacgatgttgttccttataagtttggtgagaaatcatcaaagtgcttaagttcaactggatttcaggatgtaacttttaaagcttataacgggcttggacactacaccattccagaagagatggatgaggtttgtgcttggctaacatcaaaattgggccttgaggggaacattgcttagttagcaagcaaaatgtgaaaaataattcttttcgtttttggtccattgtaattttatgttattgcagatttgcttagatttctgttgatgatatgcataatatatccgctacgcattttgtaaacactcgagtttgagggcatcttcatgacaaagtactgttattgaaacaaaacacggtggttcttaaagcatggtgatggaatatgctgctaatatattatgctggagagaattctaccatgctagttgggttttcattttgttaaatgatcttatttagtgttggatatagccttggagcgctgatcttctttgagtgagcttctcaagtgaaactaattaccatggttgtacatggtttcattttgtataaaa

SEQ ID NO: 4781 - DNA, 2184 bp, Glycine max
gatgttgttgtgtgcagtgccgtctctgcctaatatgttttggaagaaagaagaaagagtcagtgcgttgcgcgtgtaatggaagctgagcggaagcgcttgaagccacgccttgagcgtcggaacgctatgaagaacatcgactaccaattgaaggacgaggacgcagacgcagacgcagacgcagcttatttgaatcaacggagtttccgagtcaaaggaatcgacggcgaattcgaccgcatccttcgcagcctgggcctctctgggcccgaggactttgccatccctgctgcagcctgggaagaagcccgggcccataaagcccgcagcagcgtccaaccgagagaggggggaataaagggtgttcggcctcccgttttggaaccgccgttcggctccgctgccccccccccccaacaacaaacggagagggttccaccttctgattctgtgtcacgtgatgacgatgttgctgtcgaagctcaaactgaagaggtttctggttttgctgatgaccacgggtcgtttgatattcataatctgtccccaaatggaagtgggtatttccggtcgtggcaaaagggcgatatcctaggaaaaggctcctttggaaccgtctatgaaggtttcaccgatgatgggaattttttgctgtaaaggaggtgtctttgctggatgacggaagccagggcaaacagagccttttccaacttcagcaggaaatatctcttttgagtcagttccgacacgacaacatagtccgatatcttggcactgacaaggatgatgataagctgtatatcttcctcgagcttgtaacaaaaggatcattggcaagtctctatcaaaagtaccgtttaagggactctcaagtttctgcatacacacgacagattttaagtggcttgaagtatcttcatgatcgtaatgtggttcacagggacatcaagtgtgccaatatattggttgatgccaatgggtccgtcaagcttgcagattttggattggcaaaggcaaccaagttgaatgatgttaaatcaagtaaaggctccccgtactggatggcccctgaggttgttaacttgaggaaccgtggatatggactagcacctgatatatggagcttgcgatgtacagttttaaagatgttgacacggcaacctccttactctcacttggaaggaatgcaagcgttatttcggattggcaggggtcaacctccacctgttccagaatctttgtccactgatgcccgagatttcattcttaaatgcttacaagttaacccaaacaaacggccaactgctgcccggctattggaccatccatttgtaaagagaccacttctatctcccataagtcctgtttctccaagtattaatcttttaatgtcgtaagagctctcagtcacctctaacattggcacggggaaaggtcggatccatcaactatttttgattgtttattctgacagatcgagtgataaagacctcaggtttagactggtgaaatatacaggaaaaggtcagtagttttgcagatatatctggagttggaccatacaatctaaagctgatttggttataatcacttacattagattagaccaccatgccggtccctgatgacgggtcttgtgactagatatgtgaaatggagaataagaagacgggcttctgcatttccaccaggagagagctaaggtcatatacttagagctgagctgttcgttctttttgtcaagcaatagttattagagcaacggtttcgagtatttatagtcacaggcactctcccttgacatgtgtaaatagagctagccaagaaagggaagtgtgcacctaacaaaggaagcagcctttattgtattaattgcttgcactttctcttcaattagagcaacaatgaacattcacgttcgatcaattggagcattttcgtagtttataattatgctgattcaggaaagaaaaagtatatactttacgttggattatttcctattactaagcttggtggtagttagtttggcttgatggccctagaaatagaatcagctcgaacagctacacatacgccatttgcatttatttgatacttctaccacttctacatatgtttagctgttgcctatttacataatcaaattgtattataaaaagttaaaaacggttcagctat

SEQ ID NO: 4782 - DNA, 844 bp, Glycine max
ccacgcgtccgccccgcgtccgtacggctgcgagaagacgacagaagggggagatggttgaaggcgaaggcgtttgaaatcgagtaaatggaagcgacattctcttcaacgacggcaagaggatactggaatcagacacgtggttcgacagaacctttgttgctgagagtagatgaggctcgcgatcggaaaccgagttcactgtccattgcgcggcctagcaagttcgtgcagctgtcacttgctcgaaccaggaagagttctttctttaaggtgttatctgctgaaaaggaacaaattcacgttgtagagggaagtcgtgttgatgagttatatgatgcattggttacacgtattctgcctttggtctcagtgtcatcaaatcctaatcacaagcttttagttgggctggctggtcctcctggtgctggaaaaagcactctagcacatgaagtagccagacgtataaacaaactttggccagagaaagcttcttcctttgactctcaggttcaacttccagatgttgctattgtggttcccatggatggttttcatctttaccgatctgaactagacgaaatggagaatcccgaggaagcacatgccagaaggggagctccctggacattcaatccattgcgactacttcaatgtctcaagaatctgagaatgcatggatcagtttatgtaccatcatttgaccatggtgttggggacccagttgaagatgatatctttgtgaaccttcagcacaaggttgttattgtagaaggactatttgctcttgaagatgggaatgaaagaaatatctcttggttgacgaaaaggttaattgattgcc

SEQ ID NO: 4783 - DNA, 1537 bp, Glycine max
aatcggctcgagcgaaggaaagagcgcttaaaagtaaaacagagggaagcaactggtgcaggaacagaaggagaaaggaaaggaagagaagagaagagaaggagaaggagaagggtttggtagttggttacttagtttgtttgattaacgacggcgcactacacgatccccacaatccagaggcttgttattatctccatccatttaatttaattcccacaaccacgctcacctaagtttcaatttcaatcccttttctttttcttttttatttaaaattccaatttcgcgaaccccaaattccctccctccttttccctttctctctgttctgtaacgtagcatttacagcgatcagtttatagtgagtcacttagaggagttttaggtatcatcgatcatctatggcagggtacaagggcgatgacgagtacgattacctcttcaagctggttctgatcggcgattctggtgtggggaagtccaacctgctttcgcgcttcaccaggaacgagttcaatttggagtccaagtccaccataggggttgagttcgccaccaagagcttgaacatcgatgctaaggtcatcaaggctcagatttgggacaccgctggccaggaaaggtaccgtgccattactagtgcttactaccgaggagctgttggtgccttacttgtctatgatgtcacacgccgtgctacatttgagaatgctgcaagatggttgaaagagttgagagatcacacagaccccaacattgtggtcatgcttattggaaataagtcggatcttcgacaccttgttgctgtcccaacagaagatggaaaatcttttgcggagaaggaatctctctacttcatggaaacttctgcattagaagcaaccaatgttgaaaatgcatttacagaggttctttctcagatataccgaatagtgagcaagagaactgttgaggccggcaagaatgccagttcttctgctgtcccatctaaaggacagacaataaatgtgaaagacgattcctccgttttgaagaaaattgggtgctgctcaaactagatgcttcatctatggcagttggtttttatagcctgtttcatcttgtaaatgcctacactggaatcgtgataccatgtagaataaggctagtcttgcatattgttttgaacaatgtttacaatttacaaacatcatccatacgcaggattatgcttccgtgaaacggtcattccaaagacgtgtttcaaacaaataggtctacatcaaagttcatataggttaagctttatttgaaggatttcgatatttgctatgctctaattatggtgcagctattcacagttcgaacgtctgtttagaatttagttttgttgaaatgccctagaccatatggatcttcgttatcagggtagttagttattatttgtttctaaagttaataagtatattggttaaaatttccattgtcttctgaagtttttacggagatgagaaaattatttgtttctaaaaaaaaaaaaaaaaaaaaaaaaaaa

SEQ ID NO: 4784 - DNA, 1685 bp, Glycine max
  misc_feature (4)..(4): n is a, c, g, or t
  misc_feature (19)..(19): n is a, c, g, or t
  misc_feature (25)..(25): n is a, c, g, or t
  misc_feature (27)..(27): n is a, c, g, or t
  misc_feature (30)..(31): n is a, c, g, or t
  misc_feature (33)..(35): n is a, c, g, or t
  misc_feature (43)..(43): n is a, c, g, or t
  misc_feature (45)..(46): n is a, c, g, or t
  misc_feature (48)..(48): n is a, c, g, or t
  misc_feature (58)..(61): n is a, c, g, or t
  misc_feature (63)..(65): n is a, c, g, or t
  misc_feature (67)..(69): n is a, c, g, or t
  misc_feature (75)..(77): n is a, c, g, or t
  misc_feature (82)..(83): n is a, c, g, or t
  misc_feature (87)..(87): n is a, c, g, or t
  misc_feature (91)..(91): n is a, c, g, or t
  misc_feature (104)..(111): n is a, c, g, or t
  misc_feature (113)..(114): n is a, c, g, or t
  misc_feature (123)..(123): n is a, c, g, or t
  misc_feature (132)..(134): n is a, c, g, or t
  misc_feature (141)..(142): n is a, c, g, or t
  misc_feature (144)..(144): n is a, c, g, or t
  misc_feature (151)..(152): n is a, c, g, or t
  misc_feature (161)..(162): n is a, c, g, or t
  misc_feature (165)..(165): n is a, c, g, or t
  misc_feature (168)..(168): n is a, c, g, or t
  misc_feature (172)..(173): n is a, c, g, or t
  misc_feature (182)..(182): n is a, c, g, or t
  misc_feature (193)..(193): n is a, c, g, or t
  misc_feature (196)..(197): n is a, c, g, or t
  misc_feature (214)..(215): n is a, c, g, or t
  misc_feature (221)..(221): n is a, c, g, or t
  misc_feature (224)..(224): n is a, c, g, or t
  misc_feature (227)..(227): n is a, c, g, or t
  misc_feature (233)..(233): n is a, c, g, or t
  misc_feature (235)..(235): n is a, c, g, or t
  misc_feature (241)..(242): n is a, c, g, or t
  misc_feature (244)..(244): n is a, c, g, or t
  misc_feature (247)..(248): n is a, c, g, or t
  misc_feature (250)..(250): n is a, c, g, or t
  misc_feature (252)..(253): n is a, c, g, or t
  misc_feature (255)..(257): n is a, c, g, or t
  misc_feature (259)..(264): n is a, c, g, or t
  misc_feature (266)..(306): n is a, c, g, or t
  misc_feature (317)..(326): n is a, c, g, or t
  misc_feature (335)..(344): n is a, c, g, or t
  misc_feature (349)..(351): n is a, c, g, or t
  misc_feature (353)..(353): n is a, c, g, or t
  misc_feature (359)..(363): n is a, c, g, or t
  misc_feature (368)..(369): n is a, c, g, or t
  misc_feature (376)..(384): n is a, c, g, or t
  misc_feature (389)..(395): n is a, c, g, or t
  misc_feature (398)..(405): n is a, c, g, or t
  misc_feature (427)..(427): n is a, c, g, or t
  misc_feature (454)..(455): n is a, c, g, or t
  misc_feature (473)..(473): n is a, c, g, or t
  misc_feature (477)..(477): n is a, c, g, or t
  misc_feature (491)..(491): n is a, c, g, or t
aaanaaaaaaaaaaaaaanaaaaananaannannnaaaagaanannanaaaaaaaaannnnannnannnacaaannnaaaannaaanaaanaaaaaaaaaaaannnnnnnnannaaaaaaaanaaaaacaannnaaaaaannancaaaaanncaaaaaaannaanaancaanncaccaaacnacaacacacancannccccaacaaaccaaaannaaaaanaanaanaaaaananaaaaannanaannanannannnannnnnnannnnnnnnnnnnnnnnnnnnnnnnnnnnnnnnnnnnnnnnnaaaccaacccnnnnnnnnnncaaaccacnnnnnnnnnnccccnnncncccccnnnnnccccnnccccccnnnnnnnnnccccnnnnnnncgnnnnnnnntggggggaaggttttccccccncccccgcccccggttttgggcccgggnnccccccgctttcttaggnaaanctaagtggggattncccccccgggggctgccagggaaatttcgccagcgagggcccccattttttttgttcccacgttccctctttactgagaacatcctaatcgaaaagttagtgattttctatttttatatcctctgctatttgtaactttccctcttattgcaaaaccaattgaacaactgaacataaaatttctcttttcaacctggaatttgctagtcttgttccacttcgattcagttcaccgatcttcattgcttcctcttttggatccgcttcattcgcgttcaaaccaacgactaatcataactcttctaccggatccctcattttttccctttcctttctgcgtttaattcatatcggagaaggagagagagaaactgcgacatgaacaaagcgactcttccgttgacgttaattggcgatggagacggtgaccgaaaggtgactaaggtggcggagcccggtgacctcgtcattgcgcttcacgtcctcaacaccatcactgctctgtttgcaggtcatgccattggggcaaatcctgcaattcctagaatgtttccaaatatgtttccactggttataagtcagagaaagtcacaaacagaaggctgattgcagtcatgaaattgtctcttgacaagtctgcccaaggagaaagaatttctgacataagcaagaatggtcatattgcttcctacaggttaatgactttgtgtgcttatcagacattgcttatgttagtgaacaagtgttgatgatggagaaaacaattcttaggaagcttgaatagtacttaacagttccaacatcctatgtcttacttggtttggtatatcaaaggctccactccacctgttaaagagatggaacacatggcatttttccttgctgaagtttctttgatccacaatcctactgtaatcttttactggcccttctctaatcgctgcttctgctgtattgatggctcagtgtaccctaggaatgagccctttcgggacaagcactttgaagcactatactggttacactgaggagcaactaagcgtttgtgccaaaatcacggtcaaccttcatgctgctgctgctccaggaagtaagcttagggcagttttcaagaaattctgtagcttggatctttgtgctgttgctcttttttcacaatggaaaagtgtcttggagctgtctcgcaattctggg

SEQ ID NO: 4785 - DNA, 804 bp, Glycine max
gctcgaggccggcgggccggggtttcatagaatctcataatgtccccgagtgtcttgtgctccccacgatttactttcacctcactcccgaacactaccctaattgccctattctctcttccttcgtcccagcgaccacaaatcactgcaattcaaggtttgaacttcaaatggcgagcgctgtagatgcttcaggaaacccgatcccaacgtcggcggtgttgatggcgtcgtcgaagcacattgggataaggtgccactccgagaatttggagtttctgaagtgcaagaagaaggatcagaaccctgaaaattgcctcgataagggtcgtgatgtcacccgttgcgtccttggccttctgaaggatctgcaccaaaagtgcacaaaggagatggatgattatgttggctgcatgtactaccatacaaatgaatttgacttgtgtcgcaaagagcagcaagcattcgagaaaaagtgttctttggaatgaaattatgcactgctgttgtcgaaaataatatcacaggcaatttggagtgagcaaatgagcctgttttccaaaaattcattgaccttttccgtttgtatgacagtgttggaatctataccattaactatgttggtcgtctaaatttttctagagaaatgcatccaagcaagacaaaacaagatcctcttcaaacataataactgacaagaatttttgaagttggaacatgcttgtaatttgatctctacgtttgaaatgcatatttattgtgctttaaaaaaaaaaaaaaaaaaacgtaagagtaatcatgatt

SEQ ID NO: 4786 - DNA, 1396 bp, Glycine max
tcgagtcagctacgtaggccccccccagtttctgtgagctcagctgcccttcggtggcccccccccccgttacctgaagcctcacacgataatgccaggatgttggttattggtgctggcaagatgggaaagcttgtgatcaaacatttggtggcaaaaggttgcaaaaagatggtggttgtcaatagaactgaggagagagttgctgcaatacgtgaagaactgaaggatattgagattatctacaaacccctttcagaaatgctcacctgtgctggcgaagcagatttagttttcaccagtactgcatcagaaaacccattattcttgaaagaacatgtcaaggaccttcctcctgcaagtcaagaagttggaggccgtcgctttttcattgatatctctgttccccggaatgtgggttcatgtgtctcagaccttgagtctgtgcgagtttacaatgttgacgaccttaaagaggttgtggctgccaataaagaggatcgcctaagaaaagcaatggaagcacaggcaatcattgctgaagaatctaagcaattcgaagcttggagggactcactggaaactgttcctactattaagaaattgagggcttatgctgaaagaatcaggcttgctgagcttgagaagtgcttaggtaagatgggtgatgatataccaaagaaaacgcggagagctgtggatgaccttagtcggggtatagtgaataagttgcttcatggtccaatgcaacatttaaggtgtgatgggaacgacagccggactcttagtgagacactggagaacatgaatgctttgaataggatgttcaaccttgagacagaaatatctgttttggaggagaagattcgagcaaaggtcgaacaaaaccagaaatgaaatctaacaccaatcagactgatttattttctcctttagaataagaggaaacatcctcaccttttagtattaatcatcctgcaatatttagttgcatagttgaaacagctgaagtcctccatgctgcgtctgcttggcctaactcgtttgcgttttttgggtcatgcgttttcactgtgttcttccgcatccatttgtctttgtattatacaaaatgaagtgttttggtgagcttcgtatttacatcaaataatattgttataagattgtccccgtatcgggaaattaattgtatgtactgagtttctaatttctgcaatagagacaagatttgggagttatgtattttacatcgatgggacttcttggtacgggtatttggaatcaaactctagtttatctccaaggtgagctacacagttcttttacgtctacattgaagggtggcccggctagcaatggctagctaaagtaatgaaattacaaaagtttgttgaag

SEQ ID NO: 4787 - DNA, 1451 bp, Glycine max
tcagctacgtaggccccccccccccgatgatgcccttttcccttgtgttatatatttttgagcaatctacatcgatgaggtgttgacaaaggaaacgtgtagtacgagggccaatttccaaaaaccttttgtctcgcaacctcacctcttcctccttcaatctctttcggaatttcccaaaatccttagtgggaggaagagatggttctgactcagaagattcacgaagctttcaaaggcaccgtcgagaggatcactggcccccgaaccgtttccgccttcaaagaaaaaggagttctcagtgtctccgagttcgtcaccgccggcgataatctcgttgccaaatgccccacctggtcctgggaatcgggtgatccaggcaagaggaagccatacttgccacctgagaaacagttcttgattactagaaatgtgccttgtcttcggagagctgcatctgttgaagaagaatatgaagctgctggaggggaagttttactagatgatgaagataatgatggctggctagcaactcatgggaaacctaaagaaaccaaatctgacgaggatgagaatttaccttccatggaaagcctagaaatcagcaaaaagaattctattaagaaaattccttcctacatgggagctgaggaggaagaagatattccagatatggcagagtttgatgatacttccaatgttattgaaaatgatccttccacatatctagtcgctcatgaacctgatgatgataatattcttcgaacccgaacttacgatgtcagtatcacgtatgataaatattatcaaacaccacgagtatggcttactgggtatgatgagtcgagaatgcttttgcaaccagaacttgttcttgaagatgttagtcaagatcatgcacacaaaacggtaacaattgaggaccatcctcacttgccagggaagcatgcatctattcatccatgtcgacatggagcagtgatgaagaaaatcattgatgtgttgatgtcacacggagttgagcctgaagttgacaagtacctatttttattcctaaaatttatggcttctgtaattccaacaattgagtatgattataccatggactttgatcttggtagctccagccattgactaagattttagctgcatgttcgggtataacacgggcatattgtccattgttgcttttcattgatccaaatcaccaatacttttctgttatttttctgcgtataatcgttgattgtcacatcacacagttggtgtatatgtcatgtaaattatgtccttgagtcatgactatcagaatgttgaacaaatctcctttccgatgtgtacataattgacatatccattcgtaagacgactatctaatgttatggttgtccctataatataaatttaaacatgcttgacttcttgttcttgtcaaaaaaaaaaaaaaaaaa

SEQ ID NO: 4788 - DNA, 823 bp, Glycine max
agagttgatgatacttccatggtcctgccactcttcaggaaaatgatccttccacatatctagttgctcatgaacctgatgacgataatattcttcgaactcggacttacgatgtcagcatcacgtatgataaatattatcaaacaccacgagtatggcttactgggtatgacgagtcaaggatgcttttgcaaccagaacttgttcttgaagatgttagtcaagaccatgcacgcaaaacggtaacaattgaggaccatcctcacttgccagggaagcatgcatctattcatccatgtcgacatggagcagtgatgaagaaaatcattgatgtgttgatgtcacgcggagttgagcctgaagttgacaagtacctatttttattcctaaaatttatggcttctgtaattccaacaattgagtatgattacacgatggactttgatcttggtagctccagcaattgactaagatggtagctgcatgttcaagtataacacgggcatattgtccattgttgcttttcattgatccaaagcaccaatacttttctgttacttttctacgtataattgttgattgtcacacagttggtgtacatgtcatgtaaattatgaccgtgtgagtcatgactattgctatctggatgttgaacaagtttcctttcagatgtgtacataattgacatacccattcgtaagacgactatccaacgttatggttgtccctataatactataaattagacatggttgacttcttgttcttgtcaattgttaaattaatctgttttgcattcgtaaaaaaaaaaattaaaaaactc

SEQ ID NO: 4789 - DNA, 1497 bp, Glycine max
agaattttttcttctattgaccgggggaaacctggacttaaaacggagatccactgcaaatcgatcaaaacagaaacataaagtgagagaacaccaaatcaaacgcaactcgagatattaataagcttcttcttcgtcagttattaccattcgtggaagagaaaaagaaaaaagtaactaaaaaaataaactgtaataaagagtccaaaatgaaagccaaaacggtgaaaggaaattggagcttgaggacgaacaagctcagcttcccttacgtcttcctcgtctgcatcttcttcttcctcgctggattcttcggtttcactctcttctctcactctcagggcgatggagatggcttgaggccgaggcagaggctgcttgaaccggggaacgaggcggagtacaatttgatgcctgttagagatcttggcgatgattccattacatcgattccttttcaggttttgagctggagacctcgagcactatattttcctaattttgcaactgcagaacaatgtgaaaacattattgatgtggcaaaggatggcctcaaaccatcaaccttggcgttacgccagggagaaacagaggagaataccaagggaattagaacaagctctggcgtgtttgttagtgcttctgaggataaaacagggactttagctgtcattgaggagaaaattgctagagcaacaatgattcccagaagtcatggagaggcatttaatatcctacgctatgaggttgatcaaagatataattctcattatgatgcgttcaatcctgctgaatatggtccacaaaagagccaaaggatggcgtcatttttgctatatttaactgatgttgaggaaggtggggaaactatgtttccatttgagaatggcttgaacatggatggtaactatgggtatgaggactgcattggtttaaaagtaaagccacgccaaggggatggtcttctattttattcattgctcactaatggtacaattgatccgacatcactccatgggagctgccccgtgataaaaggggagaagtgggtggctacaaagtggataagagatcaagaacaggatgattagatgattggcacctgcaatcgagattcgaattccgacatccatcgtagcaattctgtctcataagcaaggtcgtcatcttccatacagtttatttttatatggtcagatgaataatcaagggctaaattcaattagatgctgaaattatgtaacactagtacaaaatttgatagcatgaacgcactactagctgaccattaaattgagacccacattagtcattacccttcaaaaaaaaattactctcttgatctctcatttaagagcgttcttgtctactgtcttaggatagtgttttcttttttaaaacagttatttgatactatctccttgatacgcaccatgggtcaagtagttgattaatattaattagatgttaatcttaaaaaaaaaaaaaaaaaaaaaa

SEQ ID NO: 4790 - DNA, 1318 bp, Glycine max
ccacgcgtccgcaaaactgtagtcggtgatagggctttcttgatctaaagcgcgtaatacttttccttccaaactcaactacttatatatatatatatcagctacgtaggccccccccccaaatctgaaccaaaccacaaacacttaatttctcatctcatcatttctaattctacctcttttctcttgcactaacaatccaagatgaataccaacaacgacaccgaaaaaaaccaatcatttccagaagcacaaggagcatcatcatcatcatcttctccacccaatgttgggactgagaattggggaactcacataatgggcacccctgctgttccaagcagccacccagataacaaaaaagcagctttacaaagtggacaacctcaaccagttcaatactaccatgaccaacatcaacatccctacgtgcaacatagcccagttgacaaaccaagcaacagtcccatggagtcaatccttaacatgttcgattcatggagcaaaaaagctgaagccaccgcacacaacgtctggcacaaccttaaaactggtccatcagtgtcttcagctgcactggggaagatgaatctgactgtgaaagcaatatcagagggtggatttgagtccctttacaagcaaacattcacaacctatccaaacgagaagctcaagaagagctttgcttgttacctttcaacatcaacaggtcctgttgcaggaaccctttacctgtccaatattcatgtagcgttttgcagcgatcgccctttgtgtttcactgcaccctctggccaagaaacttggacatactacaaggtaatggtgcctttgggaaaggttggagtggtcaacccagtgaccatgagggaaaacccatcagaaaagtacattcaggttgtaacggtggaagggcatgatttttggttcatgggttttgttaattttgacaaagcagttaagaacatctcagaaggtatctcacattttgtagcgccaggagtggccgtgccatccactagtggttcggaagctaatcgaaagaactttcagtgatttctagtttttggagtactatgatgtatactaattttgtttagaatttgactttgcggtttgtgtcgtatactagaacaatactttgttgtaaaaaaacttaggagtgtatgctatatatttcatgtgtgctctgcatcttttttccccctctggtgtttttgcatcttttgttaaatacgcccatatttgggaaagttcattttttttcttgtagtaatctaataaaatataataatcagaccaggttgtttggtcttat

SEQ ID NO: 4791 - DNA, 2325 bp, Glycine max
  misc_feature (2253)..(2255): n is a, c, g, or t
  misc_feature (2304)..(2305): n is a, c, g, or t
  misc_feature (2315)..(2318): n is a, c, g, or t
ccacgcgtccgggttagggctgttttggaagtaatcagctacgtaggcccccccccccggttatcgcgctcccatcatttctttttcttctccctcaacacaacacactcactcttctctgcttctgattcaccgaacgttgctatttaagaaccacaatccgtttccatttccatttccatggcgtatgttgaagtatattgtccagctagtgttaagaagcagttggcgaaggagtttgaggagtctctccggataaccgtgcctgatgaacccgatgttgtgccttctattgatccttgcgctgccaacaaagctggtattaaattcgctgattatcaatgtaataatgcaatgggtctatttgctaagatgaaagggaagcagacaggattcaggggtccccaggcagttggacaggccatacttaaccatcttccgcagtctgaaatgatagaatcatgctctgtagctggtcctgggtttgtgaatattgtcttgtcgaagaagtggatagcgcagaggttagagaggttgctgattgatggtattgataagtgggcacctcgacttcccgtgaagacagttctggttgatttttcctcacctaacatagcaaaggaaatgcatgttggacacctgagatctaccattattggggacacattagctcgcatgtttgaattttcacgtgtggaaactcttatccgcagaaatcatcttggtgactgggggactcagtttgggatgctaatagcacacctctttgacacttatccaaacccagaagattttaatgaagcagctattggggatcttcaggcattctataaagcctccaaagtgaggtttgataatgatcctgaatttaagttgagggcacaacagtcagtggtccggctccagagtggagaagaaaagtatcacagggcatggcagcaaatttgtgatattagtcaggctgaatttgaaaaggtctatcaacgtcttggagttcgattggaagcaaggggagagagctactataatgatttaatccctcaaactttggagagattggataatttaggactgattgaagaagatgatggtgctcgtgtgatatttgttgagggtgtaaatataccaattattgctgtgaaaagagatggtggctacaactattcttcaactgatctagcagcactttggaatcgtctaaatgtggaaaatgttgagtggaatatatacgttacagatgttgggcagtggcaacactttgatatggtttttaaggcctttaggcgtgcaggatggctgccaaatcatgaaaatgagttccccaaatgtactcatattggttttggtcttgttcttggggaagatggaaaacgatttcggacacgcagcagtgaaactgttagattggttgagttgcttgatgaagccaaaaggcgttgtaaagcttccctcctcgagcgtgatgctgttaaagattggtctgaggaagagatcgaaaagacagcagaagcagttggttacggggctgttaagtatgctgacttgaggatcaacagattaacgaattacacattcagctttgatcagatgcttaatgataagggaaatactgctgtttatttgcagtatgcgcatgctaggatctgttctattatgaggaaatctggtaaagatatagaagaaataaagaaaaatgggaatatagtgttgaatcatgaagatgaacgtgcattggggcttcatttgatacaatttcctgaggtttttgaggagtcgttgaccaatttgttgcccaatgtgctgtgtgaatacctctataatttgacagaaatctttacaaaaaaattttatactaattgccaggttgtggggtcgcctgaggagactagtagactcttgctatgtgaagcaacagtgactgtgatgagacaatgcttttatctccttggaattgaacctgtatacaggctatgacctacctgaagagcttcaaatgcaaatttttgcaacagatattatttttgtctgcgctggtgtaggaaacttgttcttgctaattagctgttccctagtgtttatgaagggaaagtaggaaaatagtgaacgagatgattgtaattttactcaaaaggctctttaaaatttaatttgatgctataaaaaaaaattacaaaaaaatttaggctttgtatcagtgattttcattctacgttacttttgatcattttgttatttatttcgttgattttaaannntattcggctgaaatttttgtaataagaaggctaaaataaattgcccagnntcctttaagnnnntattaaa

SEQ ID NO: 4792 - DNA, 2518 bp, Glycine max
tacggctgcgagaagacgacagaaggggacacaaaaacggctaaaaccataacaagaatggtgtttggctcaaaaaaaaagaagaagaagaaatgttagggttaggatgcttaaacctcaatcgattctctcacttcccatcccctccctctctaccatcctctcgttccgatttacttaaggttgcgtctcgtagattcgctttatcagtgactaaaacgcagcaatctccagtcactaagccacaatccaccttcaccgctataattgaaatagataacccggccagtgtcaaaaggcaattggcgcagctgtttgacttgtctctgagggcaactgtgcccgatgagccagatgttgtgccgttaattgatgcttgtgctgttaaaggtggcgtaaaatttggtgattatcaatgtaataatgcaatgggtatatggtctaagatgaagggaaagcagacaggatttaggggtcccccagcaattggtcaggctatcgttaacaatcttcctccatctgaaatgatagattcgtgctctgtagctggtcctggatttgtcaatgttgtattgtcaaagaagtggatagctgagagcttacagagaatgctaattgatggtatcaattcatgggcacctcgacttccagtcaagagggctttgattgatttttcctcacctaatatagcaaaggaaatgcatgttggccacctgagatctaccattatcggtgatacattagctcgtatgcttgaattttcacgtgtagagtgtgtaatccgtagaaatcatgttggtgactggggaacacagtttgggatgctgattacaaacctctttgaaaaatttccaaacccagatgatgttagtgaagcagacattggagatcttcagaaagaagaaataaatgggatgccagagatgtggatacaagcttcagaagcacatagccttcatttaagtagaagtgaaacaaagaatatcaaatgcattctataaggcttcaaaagtggcgtcggagggcccccccccccccaagttgagggcacagcaggcagtgtccgcctccagagtggagaaatcaagtatcgcaaggcatggaaacaaattgtgatgttagtagggctgaatttgataaagtctatcaacgccttggagttcaattggaggaaaggggagagagcttctataatccatatattcctggggttctggagaaactagataatttaggactgattgaagagagtgatggcgcgcgtgtgatttatgttgagggtgtagacataccacttattgctgtgaaaagagatggtggatacaactattttacaactgatctagcatcactttggtatcgtctaaatgaagaaaaacttgagtggattgtatatgttacagatattgggcagcagcaacactttgatatgctatttaaggcctataggcgtgcaggttggttaccaaaggatgagaatgcatatccaaaatgtactcatataggttttggtcttgttcttggggaagatggaaaacgatttcggactcgcagcagtgaggttgttcgattggttgatttacttgatgaagctaaaaggcgctgtaaaattgccattcttgaacgtgatacagctaaagattggtctgaggaggagatcgagaaaacatccgaggcaattggttatggggccgttaagtatgctgatttgaagatcaacagattaacaaattacacattcaactttgatcagatgcttaatgataaggggaatactgctgtttatttgctgtatgcacatgctaggatctgttccattatcaggaaatctggtaaagacatagaagaagtaaagagaaacgggaaaatagtgttggatcatgaagatgaacgtgcattggggcttcatttgctacaatttcctgaggtttatgaggaggcatgcacctatttgttgcccaatttcttgtgtgaatacctttacaatttggcagaaatctttacaaaaaaattttatgctaattgtcaggttgtggggtcgcctgaggaaactagtagactcttgctatgtgaagcgacggtgactgtgatgagacactgcttttatctccttggaattgaacctgtatacaggctatgacatataagagcttcatatgcaaattatttatcagatttttttgggatatacaagtataggaaacttcacaatgaaaattgttcaggcaaattcgatcacctcttcccctcttccattttgttaattgtatttgagttgtaacttttacgaaggaaagtaaataatttatagcaatattgttgacaaggtcccatgaaatttatttagatgagttatattttgctttacttgtgttccaagagaaattactagaaaatggacgttatggagtccattgtacatttgtactaaagaaaaatgcaactgtacctgttcttttgtactcttaatctcaaaagtaacaggactctttttattgtttgggaaaaaaaaaaaaaa

SEQ ID NO: 4793 - DNA, 2242 bp, Glycine max
ggctcgcgcccaggaagtatcccaccccatctttgttttccatcgcccaataagaatacattgctgatgacatccttaccacaagactcacagtttcagcaacaaatagatcagcaagctagtctcttacagaggcagcagctgcagcagcagcagcaacagacacagttgcaatcatctccgttgcagttattgcaacaaagcttgtcacagagggcaccacagcaaccacaaatgactcaaatgtcacagcaaaacagctcagaccaacaaccacagttacagatgctacagaaattgcagcagcaacaacagcagcagcagcagcaacaacaacagaaacccctttccacttctagcccacttttgcagtctcagcttctacagcagcaaaatactcatcaacaaaaccagcaatttccacagctgcctctatcacagggtcatcagcctcaacagcttggcaacaatgctttctcaatggagaagcttctcaatggcaacaactactcttcttcatctctgatgcaaacacagcagctttcggtgaaccaaccccataatacacagaaatcactaactaatactagagctccctctactcttacagatggagatgccccatcatgctcaacttcaccatctactaataactgccagatatctccgaatctgatgaaaagaaatcaacaagtatcagccacattaggaggaccttcggtagttgaacccaccaatcatctgatgcaggagcttcatagcaagtctgagatgcagatcaaacatgaattgcccagtgtaagaggaactgatcagctgaagttcaaagggactgttgctgatcagatggaagcttcttctggaacatcttactgtattgatcctaataatatccaccagaacttcccacttcccaacttctgcatggatggggatgtccaatcacacccaagaaataatcttccatttgcctctaatctcgatggattaacacctgatactttgctctcaagaggctatgattctcagaaagattttcaaaacttgctgtccaattatggtggtgctccaagagacattgaaactgagctgtccactgctgcccttagtccacagccgtttggggtgccaggcattccttttaagcctggatgctcaagtgatattgccatcaatgatcctggggttttgaataatggcttgtgggctaatcagactcaacgaatgcgaacatatactaaggttcaaaaatgtggctctgttggaagatgtattgatgtcacccgttacaaggggtatgatgaactccggcatgatttggctcggatgtttgggattgaagggcagctagaagatcctcaaaggactgagtggaaactagtatatgtcgatcatgaaaatgacattcttcttgttggtgatgacccttgggaagaatttgtaagctgtgtccagagcataaagatattgtcatctgctgaggtacagaaaatgagcttggatggggatttaggtcatgttccagtccccaatcaagcttgtagtggaacagataacggcaatgcatggaggggacagtatgaggataactcggcagcctcatttaatcgataaagatgtcattttggagcagtcaacttgtatattttgagacatggaggactaacttaacccttaaaatttcttgttggtgcttctatatatcactagtggaaaggagacatattcattgcaacttgtaagagatgcagttgatggggtagtgtagaagagggttgatacatggctgcatccggttcaatgtcaacacgtttttaatggtagagaagttagatccctagatgtaccaaaaccagattcctttactaaaatgatgcagattctatcttgggatctgcttttcttgtggctgctattgcatgctcaggaatcttttttctttcattttggcaaggtacagccatataggtcagctggtgtataatatatatgattgttattataaagaaaacgctttacttacaattctgtaaatcttgtggttgttaaagttaggtaaccaagtagtgacagtaagaatcaacagtacatgccaattctagcttttgtacaagtgcccacgatgtttcatggtggaaactatggagaagtttattatggatgaaagaaaattcagttctttttcaccattttgcagttttgggtaaaaacaaaataagaacaatcagatatatgggggggg

SEQ ID NO: 4794 - DNA, 1611 bp, Glycine max
gagagagagagagagaatagtcttgcgttttttttttttttttcagctacgtaggcccccccccgtcttcttcatccgtggtgttagggttttggtcggagtagccttttgcttcgtccaatattttggacatggacgccgaagcggaccctcctcaaaaccctatcacaagacacaaatgcttggcatgctataagcaatataagaagaaagagcatcttattgagcacatgaaaacctcgtatcattctgttcatcagccaagatgtggggtatgtcaaaagcactgcaaatcttttgagtctctgagggaacatcttactggtcctttgccaagaggaatttgttcaaagattttctctcaacagggctgtcaactttgcctggcactatttgatagtcccgggtctctcattgatcatagaaaaatatgtcgcatatctgcccctacttgtccaggaacaagcgcattgccctatattgattcccagttcgattgtcaagatttttctgatgaaaaccatgctggcgagggccctggaggagcagttgcaatggactgtgaaatggttggtggtggaagtgatggttctctggaactttgtgctagagtgtgtttggttgatgaagatgagagattaatcttccatacttatgtacagcctgaaatacctgttactaattacagatatgatataactggattgacagaagagcatcttagaaatgccatgccacttaaggaagttcgagaaaagctactgcaaattctacacaatggagaatccattggcaaagttagactggatggtggaaaagcaaggcttcttgtggggcatgacttagcacacgatttggattgtttaaaaatgaattatcctgatcatatgctgagagacactgcaaagtaccgtccgttgatgaaaaccaacttggtcagccattcactcaagtatctcacccgaacatatcttggttatgatatccaatccggcactcatgacccttatgaagattgtatttctgtcatgagactatacaagagaatacgatctcaacttcatccggaggaagaccatggaacaatgactctgagtaacaacattgttggcatgcctgatagctggatatctagggaacttgacaacctcacaccagatgaactttatgccatgtcaagatcagattataagtgttggtgcttggatttgataccaagattgtcagcctgaattattgatctttgcatttgtccataacatatcataagcatatttcttcaagaaccatgggaatggagcatttgcaatgatattctctgtgcatatctttctatgcatcgagttatcttccggacaagaaaattatgagaaaagataggggtgctttatgatggagcttttgtaaatatttagaacgctttgttcaaatcacatgcccttgtttagaatgaagacttacctaccttctcactataatataggctctaactaccgacacaaaacataaatggatgcaaggcttgtgtgataactgcgaaatctaagctaaattgatagttattttttattaataatgataataattttttttaaaaaaaaaaaaaaaaaa

SEQ ID NO: 4795 - DNA, 676 bp, Glycine max
ccgcgagccgccgccttacgccccgcccacactctcttttctctctctacaaacaatatcaagacaacttcatctaattaaccatgaatcaccaacaacaatctcctgtgactgcatatccagcagtgagtcagagcaacccagcagctccaccaccacctgtgggttatcccacaaaggatgatgttccttcccaacaaaatgttccaatcaaaacctctactaggggtgatggcttttggaagggatgttgtgctggattgtgctgttgctgtgccctggattgttgtctctgattgaagttatggatttgggcttatcctctctgtcctttgtcattttctttactaatttaattttgtacttgtctaataagggtatttgtgtcctccgagacagcaaaattttatttatgtatgtgatggaatttgtatcttgttgatctttttttaactttggatagggaatcaatcacatggaccattgttgcaattagaaaccataacccctcctaagttttatcgttttcaatcaagaatttgatcagttattagtattactggctgaatctacgttattcataatcataagaatattgtgttccaattccaaggaaatgaataggtaaatttggtaaccaaaaaaaacccacgcgtccgcggacgcgtgggtcgac

SEQ ID NO: 4796 - DNA, 1416 bp, Glycine max
cccacgcgtccgcaaacttccttcgcttgtagtactgccctaattccccaaattcgggtcttttttttttcttttctttctttttttccttcttcgtcccagatcccggtggccttttccctctctttctctggaaaattcccccgattttctcgagaaagtgaaacggaattatgagctttcaggacatcgaggctgggcggcccttcagttcgaggcgcgggttgatgaacgggaagcaagacccgacgcaagcggtggctgccggaatattccagatcaacaccgccgtctccaccttccagagactcgtcaacaccctcggaacccccaaagacacccccgacctccgcgaaaaactccacaagacaagactacatattgggcaattggtgaaagatacatcagctaaacttaagcaagccagtgacattgatcaccatgctgaagttaatgcaagcaagaagattgcagatgctaaacttgcgaaagattttcaggcagtgttgaaagagtttcagaaggcacaacgtcttgcagctgagagggaaacagcgtacactccttttgttccacaagcagtccttccttcgagctatacagctagcgaagtagatgttggttctgataagtcaccagaacagcgtgccctgcttgtggaatcaaggaggcaggaggttttattcttagataatgagattgccttcaatgaggctattattgaggaaagggagcaaggcattcaagaaatacaacagcaaattggtgaagttaatgagatcttcaaagatcttgctgtgcttgtccatgagcaaggagccatgattgatgatattggctccaacattgagaactcccatgcagcaactgcacaagcaaaatctcaacttgcaaaagcttcaaaaacccaaagatcaaattcctctttgacatgcttgcttttggtgatttttgggattgtgcttctcatcgtgatcatagttcttgctgcttagtcaaagattgtctcaattccattatggagcaaatgcatatatacagggaagcagatagcatctcccttgctgatgatgtcacttgattggtgttttgccgggtctggtggttgactggagtttgttgcatctgatttcagttcatgatgtgggaattcccataattttgttgtgtggttttatgtgctctctatgttagtgtttggggttttaaaatgtgtcacggattatggtgtaagttctctccatgtttctttaattaaaaagtatttaattctttgattgtcctttacctgtaaatgcaacgctaaaactggctagctgtgctgagtgctggctcttcggcaaaaccttcgtatatggtattttgtttttgttttagtgcttttctttttcagaattgcaaaaaaaaaaaaaaaaa

SEQ ID NO: 4797 - DNA, 503 bp, Glycine max
tcattacctagaacatcctaatcgggggacaatcagctaatcccacactctcttttctctacctacaaaaaaaaaaaatcatctaagttctaacgatgaatcaccaacaacaatctcctgcagtgactgcatatccagcaggggctcagagcaacctagcagctccaccaccacctgtaggttatcccactaaggatgatcttccttcccaacaaaatgttcctgtcaaaaccactaccaggggtggtggcttctggagcggatgttgtacggcactccgctatggttgctgttgcatacactgtctgcaatgttttttctcctcttgaacatcccttcactttatggatttgagcttgttctctctgtcttttgttattttctttaccagattaattttgtatcttgttgatctttttgtactttgtggaagggaactaataacatgcatggaccattattgcaattttcagttaagaatttgagcaaaaaaaaaaaaaaaa

SEQ ID NO: 4798 - DNA, 1619 bp, Glycine max
tccgggctcaggcaattcttttttttttttttttttctttttttttttttttttttttttttttcctgcataatcaaattttattaactcgttcttgtaaattgaaaaacccgtctcacatataataattactcccgttacaatgtataatcaaatttcaactcattcttctaattcaaaaatccatatcactaatcacatactagatattaaccagaattattgacccgtcatggtcctgcagtgtagagtggcaactaacaatccattaaccatttcaattgacagtaactgttctgtatgcataagcaatagtacatgacatggttttctccttctttttcttgctcatcttattcctgctatttcatttacggataacaataacatacaatacaactgagccaaggaatgtaagtagccttttgaaaactgactttcaaggcacagttactaggaatagaacttcctaatttaaagaataatttcctaattcccttccaccctcccataattcagagtaaattgaaagaatgaaacgtaaagttataaaggtcagcagaagctctggcttttaactggaatatagggcccatataaattggtattgaagatctgaaaaatcaccgcactatgcaccatgtaaaacctcgagcttcttaatagaaatagtccaaagaagatctgaatcagactgtactgtaactatttccccttttacaatattggatgtacttactaaacctccaaaactcatcgctgtgtcattgagatcccatttgagtcctgtggatgtagagcttccagaaggcatcccaatgggaatgagtccacaatgcggaccctcaacagaagattcaataaagatttgatgacaatgattctttggaagaagatgaatgaggcaatcatcagatagaaggataattcgtgtgttggaaaatcggcacagcacattaatatttccaatctcatggtcgaatctcccaccaagtgctccagcaacaagaatgcatagttctgatccatcaacatttggggtgaggtcacgtatgtatgccacacatttgtgtaaatctgtggtgtcctgatcatgagactcatcaattatcttagttcccagctttgcatagaagtcaagtacttctgtcctgattgaatccatgtctcctttaattacatcaggcttgtacctggtgcgaacatgggaaggttgttgatgagggaagaaaagaggcatttcatcatacaccctattggcacctccatcagcgcaaactcgtacttgagcgtggtcccagagcagaggagcaaatctcggtaggctttggttgagaacaacgagagcgtactttagagaaagcgaacacgtcgtgttaggattctccggcggaagaagaaagctcgaacaatggcacatcaattccattgtttttaagagacaatacacgagatgcttcttttgagattgagatgtttctttatgctcacaaacttctttgtgacgctggttcacgttcatataatactatttttttttttgttggttttggtcaacggctactgtattttctaacacgtccaagaaaatcttggggggggggggcctacgtagctga

SEQ ID NO: 4799 - DNA, 1358 bp, Glycine max
  misc_feature (17)..(18): n is a, c, g, or t
  misc_feature (974)..(975): n is a, c, g, or t
  misc_feature (987)..(987): n is a, c, g, or t
  misc_feature (1021)..(1021): n is a, c, g, or t
  misc_feature (1139)..(1139): n is a, c, g, or t
  misc_feature (1147)..(1147): n is a, c, g, or t
  misc_feature (1184)..(1184): n is a, c, g, or t
  misc_feature (1226)..(1226): n is a, c, g, or t
  misc_feature (1236)..(1236): n is a, c, g, or t
  misc_feature (1317)..(1317): n is a, c, g, or t
  misc_feature (1345)..(1345): n is a, c, g, or t
  misc_feature (1347)..(1347): n is a, c, g, or t
tcgagtcagctacgtanngcccccccccattaatgaaaagaatcacagcacacgatcctcgtattttttatttttgaaaaactgttcctgctctttttgtgacaagaagggtcttagatcccttagtttttggtgaatacccacccgagatgcgctctatccttgggagtaagatgccagtgttctctcctgtggagaagagtctcataaaaggaagcctagacttcattggcatcaatcactatggaactctctatgcctataggactgctccctctctacttgttctcttggagcagatcatccaatagcaggttttctagaaagaactgcaacaagagatggcattccaattggtgatccgacaggagtaccagatttctttgtggttccaaggggtatggagaagcttgtagagtacattaaaataagatatcgtaatatgcccatgtatattacagaaaatggtgggtgaacattgattacataactacaaaaaaatttctgttttcatttctgctacgcacaatttttttgaaaaatgtcattgtcattgtatttctatttttttaatgaaataaaattaaacggaagccactctatcatttctactttatttctggttttctaatgtttgtatcggaatgaaagcatcttcgaaaacagaaacaaagaaaagggagttgtacttttatgattgttaatgaaaatatgaaatgaaaacaagaaaggtgtttccaaaatctcattttctcccattgtgttttaaccttgcattgttgcttgatcacttaatattgaccattgtatcttgagctaggagaccaataacagtgatcatggaaggtcactttttgttatgtatatttgggttttgaggattgagttaattaacaaattttggattactacataaaatttgtttcaggatattctcaaccgcctaagccggatgtgacaatacatgatttacnncaagatttcaancgaatagattatcataaagcctaccttgcagctntgctcagatccataaggaaaggtgcggatgtaagaggatatatgatatggtcattgttggacaactttgaatggacaagtggctatgacataagatttgggctatattatgtggacanaggcactnttgaacgaattcctaaactttctgttcaatggttttntagtttcctcaacaacagtagccaccccaacataacagaacncttgagcaancaacatattgaaagcaaagatgtgagaaatgttggttttgattttatttgaactatcccgtcaaacacggttaacattttnttactcatatcaatttattgtttttggncncaaaaaaaaaa

SEQ ID NO: 4800 - DNA, 1814 bp, Glycine max
tatagggaattgtggtaccctttcctataccgcaccggaattttcgcgcgcgccccaccggtccgctggaaaagctgcgccttgtgttgacactactttgctgtgttcattttcatgtccaaagttctcttggatttgaagatggaatcagcagatctcaattcccagaagggttcctcttcggaacatgcacttcctcataccagattgagggagcacctcttgaagatggcaaaggtttaagcaactgggatgtttttagtcatataccaggaaatataaacaatgatgagaatggtgacattgcagatgatcactatcatcgctatttggaagacatcgagttgatgtcctctcttgggataaatgtgtatcgattttctatttcatgggcaagaattctacatagagggatatatggggacataaatccaagtggggttatgttctacaacaagatcatagacaatctgcttcttagagggattgagccatttgtgacaattcatcaccatgactacccgggagaattggaagaaagatatggtgcttggcttagtcccctaatacagagagattttgttcattttgctgaagtttgttttaagagctttggagacagggttaagtactgggctaccatcaatgagccccacctgtttgcagacatgggttttataaggggaacatatcccccgggtcattgttcgccgccttttggaaattgtaatactggtaactctgatgttgagcctctcattgccgtgcacaatatgatactgtcgcatgccaaggctgttgaattataccgcaagcactttcaggcaaagcaaggtggaatcattggcattgttactcataccttcatgtatgaacctcttagagatgaagaatgtgatagacaagccgtgaaaagggccttggcttttgttgtagcctggtccttagatcccttggtttttggtgagtaccctcctgagatgcactctattctcgggagtcagttgccaagattctctcctgaggagaagagtctcataaaaggcagcatagacttcattggcatcaataactatggaactctctatgccaaggactgctccctcactgcttgtcctcttggaacagatcgtccaatacgaggcttcgtagaagcaactggaacaagagatggcattccaattggtgatctgacaggaaacccaagattttttgtggttccaaggggcttagagaagattgtagactacatcaagataagataccataacatgcccatgtatattacagaaaatggatattcgtcaccgcacaaaccaaatgtgacaatggatgatctactacaagatttcaaacgaatagattatcataaagcctaccttgcagctctgcttagagccataaggaaaggcgcggatgtaagaggatatatgatatggtcattgatggacaactttgaatggacaagcggctatggcgtgagatatggactttattatgtggatagacacactctcgaacggattcccaaacgttctgttcaatggttttctagttttctcaacgacacaagccacagcaataaacaagacttgagtgagcagtatgtcagaagcaaagatgtgacaactgctggtttcaaagttgtttgaacttgctgaaatgtatggattctagtgtaaactaagattctttatttatgataaatgctagcagcatacactataacattgttatttgctgaaatttattggatactacaaaaaaaaaagttttacctcatcaaaaaaaaaaaaattatttcacaagttccc

SEQ ID NO: 4801 - DNA, 2260 bp, Glycine max
  misc_feature (21)..(21): n is a, c, g, or t
agctacgtaggcccccccccngattcagctctgaaccagctttgagcttatcactccgcccatagtcgtcttctttaatacgcggtcttctcgcgcttcgcggattacccaagaagaacaaaccaaccaaccaaacacagcaccctcaacgagagagagagagagagagaaattgctaaaagacaaaaaatacttgaaagaacaccatgaaagttctgattaacaatccgaaaccatttctctcatcaccaaactccattttccccaacaacaaccctcgctttcatcttcgcccattccccaaacgccaatggatcgggccaaggctctgtttggcgagggccgcgttggattgggccaccatcgagcaattcgggcttcccgagttcgacgtccggaacccggcgctgtcgtcgtcgtatcgccgttcggagttgcccaggcccaaccagacggtgctggaggcccaggctagggtttgcaccggcccgacccagacccgccccctcgacgaacaacaggccttcaaggtcttcgaccttatcctcagatcagctaggggaggaatgaaagatgaagatgaagtttctaaagcacaacttggggcatttttcgcggggatgacaatccgtgcaaatgcatttcctgaggcgacgcaatggagtgaaggggaaacacgtgcaatgaagacattctggccacttctggttagagttcttccacctgaggttatattcattgcagacccggaagggttaatgatgggtgtgggaagttcaattgggccgcaatatgttggcaatggaaccagtgaaatgcgattggttggtgctcttagggaggtgttggctggtggtcatcttggatttgaggaagtgcaaggtgtgttaaaggatgtccttcccatcaaagagggtgatgaaaagcctcagggagtaagtgaggctttgctttctgcatttttaataggtcaacgcatgaaccgtgaaactgaccgcgaattaaaagcatactgccttgcatttgatgatgaaattggcccccctcctgttgctgatgtcagatcattgactcattatggtgaaccttatgatggtaacacacgcttcttcaggagtacgctattcgttgctgctgttagatcttgctatggagagtcttgcttgcttcatggtgtagattggatggcaccctaaggggggtgtacctgaagagcagatgttgaagtttatgggggcaaatataaatatatccccttccaaggccaaaaaacttcttgaggatgatgaagttggttttgcttacgtaagtcagcgtgaagctcgcccatctctctactctttaattaagataagggagcacataaagaaacgccctccgcttgcaacaactgaaaaggttcagcaatatgtaaaggcaaatggtaaggaagctattgttgctggattttatcatgaaggttacgaagagccattgttaatgctcatgaaaagaaggggagtgcattcaggtttggtagtgaagggagaggaagggggcctctcattgactacaagattgcgatcagctaacacaaccaggggacttcctgtgaactactgttcaggtttccgtgcacttgacatttcatccacatctgaagtgggtggagtggcacgtcatggttttagtcttgaagtcaatgccaaggattacggtttccaacccacagacacaccaagaactgatagatctgtctcgaagaacattgaattgggtttagctgctctctatggagaaaaaggaccagcatatgaccgaattgtcttgaatgccggagttgtggatcacttgcttggagttggtggtgcagaagatatatctgcagccctggatagagccagagaggccattgacagtggtaatgctctgaaacgactcctaaactacattaaggtctcccacaaaataggttgaattatttgagcattgcaaaatacctttcttatacaatgtgttggacataaagggaagaaaaaacctaagatgggtccccccttctttttcccaagtaatgaaagaaaaaaaatggagatacttgagagttttttttttctttatacacatcagttttgaggatttgactacgtctgtataacaatctccaactcgcttagaaaccgcagatagctgctgcttttgtaattaaggtggcatactgatagtcaatgttaaaaaagtttgtgcattgcttttttggacgtaaaaaaaaaaaaaaaaa

SEQ ID NO: 4802 - DNA, 1707 bp, Glycine max
  misc_feature (424)..(424): n is a, c, g, or t
atttctttgtatctactggtgaatgtagggctaaggttactgccgcaagactcccgtattttgatcagctacgtgggccccccccccccccccaccactggcctggggctgcagaggatttgatttatcagcttcgccaagaggaagatggaaggaaacaaaataaaaagggaacaactaaaaagactataacaaaaagggctttgaaagcgtctggtcagtcagatctctcagcaaatgcctcaaaggacctgctccttatgcacaaaccttggtgaaaccatttccccgatgaaggaagattttattatggttcatttgcagcatgcatgtactagctgttgtattttaatggtgtctggcaaccgttgggtttgcaaccagtgcaaaaattttcatatttgtgataggtgttacgaagcanaactaaagcgtgaggagagagtggggctgccgattaaccagagggagaaacatactctttatcctgttgaaattactgatgttccttctgatacaaaggacaaagatgatattcttgagagcgaattctttgacactagacaggcatttctgagtctctgccagggaaatcattaccagtatgatacactaaggcgggccaagcattcctcaatgatggttctctatcatcttcataatccaacggctccagcatttgtgacaacttgcaatatatgctatcttgacatagaaactggtcaaggttggcgttgtgaggtttgccctgagtatgatgtatgcaatgcttgttatcaaaaggatggaggtattgatcatcctcataagttgacaaatcatccatccatggtggaccgtgatgctcagaacacagaagcaagggaggttcgagtagtgcagctacggaaaatgcttgatctccttgttcatgcatcccaatgtcgttctgcacattgccaatatcccaattgtcgcaaggtgaaggggcttttccgccatggcatgcactgcaaaacacgggcttctggaggttgtgttctttgcaagaaaatgtggtatttacgccgtcttcatgctcgtgcttgcaaagaatctgaatgccacgtaccacgttgcagagatttaaaggaacatctaaggaggctgcagcaacagtctgattcacggcgtagagctgctgtgatggaaatgatgaggcagagagccgcagaagttgctaacaatgctggatgagcaatttatacttgtaaatatgtggcactttgaagaaatgctctagacagaggtataccttagtttcacctatgctccgacagcagtgattgtttttgtgaatggaatacgtagggtacatgtagccttgcgtccatctcgacatctttgtcccagaaaaagatctgagttcagccatttagtgctgctgtcctcttctgcaaaggactaacaaggtccggcggggatatttggtggttcgtctgtttttgtaattctttgattttgttaagttacttgttttatgtcagatgccattcttcggtggcgggtgtcctatagtcctaaataggtcacaaatttcttacaaatctgtgggagggagggagggagggatgtcatcaagtcgtttttagttgaccgttttaaagattcaatgcattttgtagaatcttttatttaaagatgaaagtaaataattagaatacgcgcatagttctgctttatgggata

SEQ ID NO: 4803 - DNA, 1840 bp, Glycine max
cgatattatcatggataagattggcattcccacgcgtccgctcccgcgcccacacacccaccgaagctcggcttcagcatctctcatcctctctctacttctcaaagaaagacgcacgcagcgttctaaaaccctaattgggtatatgcaaagagggctttgtagcatgtgcttaaggtatgttttaaacattgcttgtttaattgtcatggtggcattgtgatgcaaaatgtgtgtgagctcatactgagaaggagctcatctgctaagtccatttgaagaggatgtatggaagggcatcatcaggtcttgataggtttaagaaggctcagaccttggaaccattctctgttgctgtcaacgcttcttccagaaatggtgcccaaccctctagtaaagtagttggccattcatctgctttgcctccacaggctcaggcttcttccaaccaatcccaacaacatgcatttcagaagactgtaggagtggaggcagccccgttgttggggcagaatcagcaggtgactcaggttgggggagggcagtcgacgtggcagccgccggattgggcgatcgagccaaggtcaggtgttttttacctggaggttttgaaggatggccaggtgctagaccggattaatctggacagacgaaggaatatctttgggaggcaaatccagacttgtgattttgtgcttgatcatcagtctgtctctcgccaacatgctgctgttattcctcacaagaatgggagcatatatgtaattgatttgggatctgcacatggtacatttgttgcaaatgagcggttgaccaaggatttgccagttgagcttgaagtgggacaatcattgcgatttgctgcatcaacaagagcatacatattaagaaagaatgatgcagctcttttccctcggcctccaccacctacagagattaatttcccaccgcctcctgacccatctgatgaagaagctgttgtagcttataatacgctactgaatcgttatggcatcaacaaggctgatttagtgtccaaatctggtgagtctggtagttcggtaagtggcaaaaataaagattaccaaactgaaagaccatctaagagaattaggaaaacaagagtttccttcagggatcaagttgggggagagttagttgaggttgttggaatttcagatggtgcagatgtagaaacagaacctggtccagttggtgttaaagaaggaagtctagtcggtaaatatgaatctcttgtacagattactgtaataccaaaggggaaagagcagtcctctgtcaaggaggcagattcatccccaaaaggtgtgactgataaactacaagaagtattgaaaaagatcaaaaccccagtcaaaactgggatttatgatgacctatatggagaatcgttatctgtcaaagttggatcttcctgggcatattcacctgcactcagtactggtgaacgatctccagataaggaggatggtgcggggagcggaaagtcacctgttgatggagatgatgatgatttgtttgggtgactattcaacttatgcagactgggttgtgagataaatttgtagtagttctgtatgagtttaacatcatagggagttgaaaacatgcaaaatattatgttgcatgcttcttttgtcatctggagttaattgttccaacgaatccataattgttgatgttttcctctgcatgcccccaccccccttacactaaaagacagcaggttcatggttaaacgatgtgttagtccttgtagtggacccattaagtagcttcatttaagttgtggtttgccaaaaaaaaaaaaaagaaaagg

SEQ ID NO: 4804 - DNA, 1245 bp, Glycine max
aataaatacacaaatctgacatgtatctttaatctttaacattactaaattatacagtaacaatccaatagggttaactccagtggcggtgtgttgtggttgttggttggttgggtaacataatcgcagcgaaaatggggaggggttggtggtggaaagtggcggtgttgggggtgctagtggcggtggtttggagagggtggcagggcggtggatttgacaaggaggcagcgttcagttttgttcgagaatggtcggagaagttagggatttgggcgatcccgctctacttgtcgctccacaccgtctccatcgctctctgtttgccctctgcgatcttcttcgaaaccaccgcccctctcctcttcggtttcttaccttccgtcttctgtgtcttctccgccaaaatcctcgctgcgtcactctccttctccatcggcaggctggtattcaggagttcaagctcagcaatggagtgggcccaaagaaacaaatactttcatttaatctctagaggagttgagcgagatggttggaaatttgttcttcttgcccgcttctcacctgtgccctcttatgttattaactataccttagcggctactgatgttaggttccttttggattttcttcttcctactgctattggatgtctccccatgattttgcaaaatacatctattggaagccttgctggtgctgctgttgctacagcctctggctctaagaaatctcaaatttggtcctacatttttcccgtagttggtattttgtctagtgtagttatttctttgagaattaaaaagtattcaacccaagtttcagtatctgaaatcgcccccaagcaaaactaacactgatgattcgtgacacaccttatatggtagtgaagagccggggggtaccttcgaaaaggtcaagagtcatattttgcggagttagtattattaacactatacacatattactataaatgtttttgttgtgacttgatcaccgtgttgtatggtagctgtacttcagttcagttatttaaactttggttgggatttttttgttcaatttatatttgaaacctttttcactagataaagtagtggaacgtgcgcattaaaaaaaaaaaaaaaaaaaaaaaaaaaaaaaaaaaaaaaaaaaaaaaaaaaaaaaaaaaaaaaaaaaaaaaaaaaaaaaaaaaaaaaaaaaaaaaaaaaaaaaaaaaaaaaaaaaaaaaaaaagggggggccc

SEQ ID NO: 4805 - DNA, 1694 bp, Glycine max
tcagctacgtaggccccccccccctctccaactccgttcatctaccatgacccttcaagctgattcagcaccagtaccaccaccgccaccggattccgcagccaccaacggcatctcccccaccgcagaggaagccccacaaccaccgtcaccaccaccgccgcatccaaccccacctccagaactgcgcgtcccaatatggtggccggaagacgggaacctcagcatggattgggtggacaacctgatgcggtgcttcgattggtcctctcggaacgtcccaccctcggagctcccttcggttctccccgtcggagtcttcgattcgctcatcctcgtcgcctccaagatgctccacaaggagcccaattgcgtcaccgtagaccccttccgccctagctccgatgatgataacactccctccgctgcctcctctgttgtcgtcgtcggcgatgttcacggccaactgcatgatctgctcttcctcctccaagatgccgggttcccctcgcgggatcgcatctttgtcttcaatggggattacgtggatcggggagcgtgggggcttgaaaccttcttgctcttgttggcttggaaggtattcatgccacataacatatatttgctacgagggaatcacgaatcaaaatactgtacatcagtttatggttttgagaaagaagtaatggtaaagtatggcgataaaggtaagcatgtgtaccggaaatgtttggggtgctttgaaggtcttcctttggcttctataatagcagggtgtgtatacacagctcatggaggacttttccgcagtgtaactgtgacgccatcaaagaggtttaaaggaaagaagaaccgtaagattaatgttaatcatgagagcaaaattctctctcttggttccttggaagaattgtctaaggctcggcgatcagttctggatcctccttgggaaggcccaaatttgattcctggtgatgttttgtggtccgatccatcaaaaaatcctggtcttgctccaaacaaagaaagaggcattggcttgatgtggggtcctgattgtactgaagaatttttgaagaaataccaactaaagttgatcatcaggtcacatgaaggtcctgatgctagggaaaaaagggatggtcttgagggaatggatgaaggttacactattgatcatgttgtagattctggaaagctggtcactgtttttagtgctccagattacccacaatttcaggcaacacaggagaggtataacaacaaaggcgcctatgttgtccttcaaccaccgaattttgaaaatcctatatttcatggattttcagcagttactccaaggccgaaggtgaatccctattatgattacaaagaggtgatagactccgatgaagaattggatttggcctccatggtaacttcctgaggattttttgtgagaggaaaatgattggtcagatttgtaaaattgtattgttattttttgaaatacagcttttatcaataacattaattatttattatattatccgatttattaagtttgtgaaatcaattgatcctaaagtagctactggatagttcagttatgacaatattctaaactgatctctgtaacaattgtaaaattaagagttacagaaacctgttggttctcattccgggcctggtttttggttaaaaaaaaaaaaaaa

SEQ ID NO: 4806 - DNA, 1124 bp, Glycine max
  misc_feature (790)..(790): n is a, c, g, or t
  misc_feature (797)..(797): n is a, c, g, or t
  misc_feature (799)..(800): n is a, c, g, or t
  misc_feature (808)..(808): n is a, c, g, or t
  misc_feature (817)..(817): n is a, c, g, or t
  misc_feature (823)..(823): n is a, c, g, or t
  misc_feature (828)..(828): n is a, c, g, or t
  misc_feature (830)..(830): n is a, c, g, or t
  misc_feature (837)..(839): n is a, c, g, or t
  misc_feature (841)..(841): n is a, c, g, or t
  misc_feature (853)..(853): n is a, c, g, or t
  misc_feature (856)..(856): n is a, c, g, or t
  misc_feature (858)..(858): n is a, c, g, or t
  misc_feature (860)..(860): n is a, c, g, or t
  misc_feature (870)..(870): n is a, c, g, or t
  misc_feature (872)..(872): n is a, c, g, or t
  misc_feature (874)..(875): n is a, c, g, or t
  misc_feature (880)..(880): n is a, c, g, or t
  misc_feature (886)..(886): n is a, c, g, or t
  misc_feature (892)..(892): n is a, c, g, or t
  misc_feature (898)..(898): n is a, c, g, or t
  misc_feature (900)..(900): n is a, c, g, or t
  misc_feature (905)..(905): n is a, c, g, or t
  misc_feature (913)..(913): n is a, c, g, or t
  misc_feature (916)..(916): n is a, c, g, or t
  misc_feature (918)..(919): n is a, c, g, or t
  misc_feature (921)..(923): n is a, c, g, or t
  misc_feature (929)..(930): n is a, c, g, or t
  misc_feature (935)..(935): n is a, c, g, or t
  misc_feature (937)..(937): n is a, c, g, or t
  misc_feature (941)..(941): n is a, c, g, or t
  misc_feature (947)..(947): n is a, c, g, or t
  misc_feature (958)..(958): n is a, c, g, or t
  misc_feature (961)..(961): n is a, c, g, or t
  misc_feature (966)..(969): n is a, c, g, or t
  misc_feature (971)..(971): n is a, c, g, or t
  misc_feature (973)..(973): n is a, c, g, or t
  misc_feature (979)..(980): n is a, c, g, or t
  misc_feature (982)..(983): n is a, c, g, or t
  misc_feature (987)..(987): n is a, c, g, or t
  misc_feature (995)..(995): n is a, c, g, or t
  misc_feature (998)..(1000): n is a, c, g, or t
  misc_feature (1002)..(1003): n is a, c, g, or t
  misc_feature (1007)..(1007): n is a, c, g, or t
  misc_feature (1010)..(1012): n is a, c, g, or t
  misc_feature (1014)..(1014): n is a, c, g, or t
  misc_feature (1017)..(1018): n is a, c, g, or t
  misc_feature (1021)..(1021): n is a, c, g, or t
  misc_feature (1024)..(1027): n is a, c, g, or t
  misc_feature (1029)..(1029): n is a, c, g, or t
  misc_feature (1031)..(1031): n is a, c, g, or t
  misc_feature (1034)..(1034): n is a, c, g, or t
  misc_feature (1036)..(1037): n is a, c, g, or t
  misc_feature (1039)..(1039): n is a, c, g, or t
  misc_feature (1044)..(1045): n is a, c, g, or t
  misc_feature (1048)..(1049): n is a, c, g, or t
  misc_feature (1052)..(1052): n is a, c, g, or t
  misc_feature (1055)..(1055): n is a, c, g, or t
  misc_feature (1058)..(1061): n is a, c, g, or t
  misc_feature (1064)..(1065): n is a, c, g, or t
  misc_feature (1068)..(1073): n is a, c, g, or t
  misc_feature (1077)..(1077): n is a, c, g, or t
  misc_feature (1079)..(1079): n is a, c, g, or t
  misc_feature (1081)..(1082): n is a, c, g, or t
  misc_feature (1084)..(1087): n is a, c, g, or t
  misc_feature (1089)..(1089): n is a, c, g, or t
  misc_feature (1093)..(1093): n is a, c, g, or t
  misc_feature (1097)..(1097): n is a, c, g, or t
  misc_feature (1100)..(1100): n is a, c, g, or t
  misc_feature (1103)..(1104): n is a, c, g, or t
  misc_feature (1107)..(1108): n is a, c, g, or t
  misc_feature (1110)..(1122): n is a, c, g, or t
cgaattgggtaccgggccccccctcgagtcagctacgtcgcctcagctacgtcggccccccccaaaaatttactgagaaaatcagataacctctgtcaacacctgtctgtggcgcgcgagagagaaatcggagatgtcatcaaaccctaacgatcctcgtcagccctcggcggcgagaccctacgtggcgccgcagatttcgccgcaggaccttccgatcgactacgccggcttcatcgccgtcatatttggcgtcgccggcgtcatgttcaggtacaaactgagctcttggctggcgctcatattctgcgcgcaatccgtcgcgaacatgcggaatgtcgagaacgatctcaaacaagttatgatggctatgatgttttctttaatgggattgataacaaactactttggacctcctagacccggcaaacaaagttgagatctcaagattttgaggcagaaaaaacctttttgtggggtcttttcgggaattaaccaacaagcgtgaaaggaagttttagagtgtcattgaaatgtttcactgttcttcgtgttaaagatgcttgcgaagactggatacctgcgtatttggataattttatagtttattgatatttatatattagagatggagatggtctgaaatatgaggagagctatatttcctctttatgctactgtaatatttttattgttaatttatttgaaattatagtcttttaataagagtatgtgtttcattttaaaagttaaaagaaaaaaaaaaacctgaaccccccggttccacgantttttanannggccgccncgggggggnctccanttttntnccctttnnngngggttaatttcngcntngntattcatggncntnntggtncctggngaaaanggtatncngttanaatttccnaantnncnnnccgaannttaangngaancctggnggccctatggnggngccannnncntnttttgnntnnctanattccgtngtnnntnntaanccnnngnccnntcnttnnnnangnctncnncnggaannggnnttnttnggnnnnttnnttnnnnnnttantntnntnnnntntatntgtntanatnnttnntnnnnnnnnnnnnncc

SEQ ID NO: 4807 - DNA, 2384 bp, Glycine max
tcagctacgtaggccccccccccacgcaacccaagctatttgccaaaagacaacgtcaatcctatttaagtaaagctccaaattcagatttttctgtactccacacctgagttgttgacttctcatgttaatttgagcataaaccataaacgaatcttgtgctttttccgtgggtttgagatggatgagaatgatgatgatgaaggaaaactatgtgatagatctctctcttcaagaatcaaaggaaaattagattaattgtgacgatgatgatcagagaggaaaagggtgtgaagcctgttctactaaaatttggtttggctttggctctttcatttgctggatttatctactcacgcctcagaaccagaagaatcaagccctccaagtcacgcaaggggtgttctttcagtcatgagaatgaagataatttaggaggaggtataggggcagcattaagtacttgcaatgccatttcagagggaaattttctatgttcttcttttgtggcacaagaagaagcatgcatcaacagggtgataagtgatgaatctcgtattgctctctcttctgacagtacacaaaagggagataaagatgagttcctcctacctgaatttaatgatcttgttaaggacatggactttggagccatcattgtcagaaattcttttaaagaagatatggaagcaccatggttaaaagtaggatcttctatagcatatgctagtcccgagaaggacgactatgagcaagagataagtcaactcaggagcatgattagaatgcttcaagacagggggcgaagtcttgaggttcaactgcttgagtactgtcgtcttagagagcaagaaacagcagtgatagagctccaaaatagattgaaagcaagtaccatggaggtaaagatcttcaatctaaaggttaagaccttacagtctgagaattggagattgaaggaacaggttgctggtcatgcaaaagtgctggctgagctggagactgcaaaagcgcaagtcaaattgctcaataagaaaattaggcacgaagctgaacataatagggagcagatcataactcttaagcagaaagtttccaggttgcaagaccaagaatgtaaagatgttgcttgtgatccagatattcaaataacgatgcaaaagcaaaaggatcttgagtctgaagcagaagagttgaggaaatctaatttaagattgcagatagaaaattctgacttagctcgaagattggattctacccagatccttgcaaatgcatttctggaagacccagcggcagatgcagtgaagcaagaaagcgagtgtcttaaacaagaaaatgtgcgcttgatgaaagaaatcgagcaactacagtctgatcgatgttcagatcttgaagaattagtatatatgcggtggataaatgcttgcctacgatatgaactaagaaattatcaagccccactaggtaaaacagttgcaaaggacttaagcagaagcttaagccctacgtctgagaagaaagccaagcagcttatacttgaatatgcaaatactgatgtaccagggaacattgtggactttgatatagaccaatggtcctcctcacaggcttcttctatcactgacttcggagagtgtgatgatttttcttctgttgataattcatctgctgccagaactaacacaaaccagaccaaactttttggcaagctcaggcatctgatacaaggtaaaggtagtagtcatcaccacagtcatgtttcatcacaagaaaaatctggatatcaagttagcaatcctcctcatttgagcacatcaaccggaactgagggtcttaggagtgagtttgcaactcccattggcacctctagaacctcccttgatttctctagtttgacgagtgtgaaggaaggtgataggagaaattcagatagcattgttgtgggaagctcaaataaattcagtgcatgtaaaaaaggttccttctcagattccttaggcttggaaaacaataatttggagaaatatgcagaagctttaaaagattctagtgtgagtgctacacatgaaagatgtagaagatcagcatcatgtagttagtttattgtaacttattatcaatatgcaaagattttacccttttgaactgtgaatatcatgcattagaaatataggtagtacagtagacaatgtaaattagccgttaggtctagttcatacaccaaccgtgtattaaataagaatgcattttcagtgataggcataccccaaataagaatgcattttcaatcattggcatacttcaatattatcttagttcatattgccactgtacaacattttttaacttggaaaatgatatttgttacaattttttttttc

SEQ ID NO: 4808 - DNA, 1072 bp, Glycine max
  misc_feature (959)..(959): n is a, c, g, or t
acgtacggctgcgagaagacgacagaaggggatgtccccacttatccaacccagtaaacgtggaacacacctgacacctgatccgcgagcgagggtttgtgaagatgacgacgattcgcaggttttgctgcaacgatcttcttcgctttgccgccgtcaatctcgaccatctcaccgaaacattcaacatgtccttctacatgacctatcttgcaagatggcctgactatttccacgttgccgaaggccctggaaatcgaatcatgggttacattatgggtaaagttgaggggcaaggagaatcttggcatggccatgtaactgcggtgaccgttgctccagagtatcgaaggcagcagttagccaaaaaacttatgaatctgctggaagacatcagtgacaatattgataaggctttttttgttgatctctttgtgagagcgtcaaatgcaccagccatcaagatgtatgaaaagcttggctatgtgatttatcgacgagtgctacgctactattctggggaagaagatggtttggatatgaggaaggcattgtctcgtgatgttgaaaagaagtccatcatccctcttaaacggccggtcactcctgatgaattagagtatgactaagtctgcgtttcatgcaacagagttgcatgagcttattgtgtctcaaagtaaaccatgttgtgcttgataggctgtcaagttgaaaggagttgaacatattatgttggaacttcgaaggtttagtaaatgaaaaatgatcctagaagataatcttgctagtaaaatgaaaaatcttgtcttgtatccaatatgttataattaaatatcacttgcgcgtgttatttcattaaaaaaaaaaaaaaaaaaaaatcatactaactttgtgttattctccaaaaaaaaaaaaaaaaaaaaaaaaaaaaaaaaaaaaaaaaaaaaaaaaaaaaaaanaaaaaaaaaaaaaaaaaaaaaaaaaaaaaaaagggggggcccctttaaaagaaccaaattttaggacccggggctggcaaggtaatattttttttttggggcccccaaattta

SEQ ID NO: 4809 - DNA, 600 bp, Glycine max
aaaagattgttataagaagcagaatgatgctattcagaatgcttcattgaaagttctatcatggctgaacatgtgttttaagagtatgattctcccttttgagcagctttatgagactgtagacaactttaatattcagatctattccaaaaacattatcagagatcttttagcaggccaatcaactcacaatggtcagcttaatggaattcaatgcaataatttagttgaatcaatctatatgaattcttcatgtgacatgctgggaaatatagtgcactcgttaaagattgaaggtccatattctggtgtctgtccatccaatggatctttaccttgtataaggtattcagtttctttggctgtagagggtgagaatctgaaagaagttattgaagtttgtgatgagtttgagtttgaagtgggaattggtgctgtggtttcctatgttgaagatgttgtgatgcagatgtctgttggtcagtgcgcttatttctcttcaaacttacttactactgagttgatttttgcttcagctggtgattcagtcaaaatgctggcctcgttatcttctagtgactggtgtatggaatatgaaat

SEQ ID NO: 4810 - DNA, 2579 bp, Glycine max
ccacgcgtccgcggacgcgtgggaagttagcgtagaaacgactaaaatgtaatggtactaattagacgacagtcgtttattgaaaagggcaatttcgtgctagtgtggtagtgtggtacccttaccctgaggtgcaagacaaagtaacctaacggtgcttacaaatattaacagcggaagaagtgaagggcccagacggccaccgtctagggtagggttagggttttaattttcgccacacaacaacacacgctacctcactgcaaagcaatctcgctgcttccgttttcggatttcaatcgcttccactcgcagctcccatggcaaaagctacttccggaaccgtcaatcctcacagccgtaccggagttcgtatcgtcgtcgccggagaccagggcaccggaaaatctagcctcattataaccgccgccgccgataactttccggtgaatgtgctgccggtcttgcctcccacgcggttgcctgaagatctgtatccggatcgcgtgcctatcaccatcatcgacacttcttcccgtgctgaggatagcgataaagttgctgaagaattgcagcgggctgacacagttgtccttacttatgcatgtgatcggcctgagacacttgaaaatcttagtatattttggcttccacatcttcgcaaactagaggtgaaagttccagttatagtagttggttgtaagcttgatttgagagatgagaatcagcaggtgagcctagaacaggttatgtcaccaattatgcaacagttccgcgagattgaaacttgcattgagtgttcagcatctaggcatattcaggtccccgaagttttctactatgcacagaaggccgtgcttcatccaacagctccattatttgatcaagagtcacaaactctaaagcctcgatgcgtgcgagccttgaagcggatttttatcctttgtgatcatgacagagatggtgcccttagtgatgctgagctgaatgactttcaggttaaatgtttcaatgctcctttgcaaccatctgaaattgtgggtgtaaagaaggttgtacaagaaaaattgtctgaaggggtgaatgaacgtggacttactttgactggattcctatttcttcatgcccttttcatagaaaaagggcgtcttgagacaacatggactgtgctcaggaagtttggatataatgatgatatcaagcttgctgatgatctaattccacctataaaatgtgctcctgatcagagtgtggagctgacaaatgaagcagttgagtttttgagggcaatttttgatgcgtttgatggtgatggggatgggatgttgagacctcgtgaaattgaagaattattttctactgccccggaaagtccttggactggaattccatatgaggacgctgcagaaaaaaatgcatttggaggactatcactagaagcgtttttgtcagagtgggcacttatgacacttctaaacccaacttttagtgtggagaatctgatatacattggttatcctggtgatccatcatctgctattcgtgtgactaggaggcgacgcatggatcgcaagaagcagcattcagacagaaatgttttgcagtgctttgtttttgggcctaggaaggctggaaaatctgcattattgaattcttttattggaaggccatattctgaaagttacaatccaaccactgaagatcattatgctgtaaatgtagttgatatttctatggaaaacaaaaaatatcttgttctgagagagattcctgaagatggagtgaggaagctcctgtccaataaggagtctttggcctcatgtgacattgcagtttttgttcatgacaggtctgatgaatcctcatggagaacatcgtctgaactgttggttgaaattgctagccatggagaagatactggctttgaggtgccctgcctgatagttgcagctaaagatgatctggattcatttccaatggctatacaggagtcaactagggttagccaagatatgggagtagaggctcctatacccatcagtgtgaagttaggagatttcaacagtctttttcgtaaaattgtaacggctgctgatcatcctcatttaagcattccagaaactgaagctggaagaagccgcaagcagtaccacaggcttattaatcgatctcttatggctgtttcagttggagctgcggtggtcgtagttgggctggcagcttatagggtatatgctgcaaggaagaatgcgtctggttaaaagacagattttgtgaatggatcaatgtccattagtttgatctgaatgcagcctgctcctggctagatatgtcaagttcaacattcagttggtttttttatgccatctgttgtagagtttgctatttcatttttataaaatcactatttcatttttctttgtcgaggttgaattgaattagcataatttttttcttcttcaaattaccgtagtgttgactcttggcaaacataccaattcgtacaagtaatgttaagtttttactgttttaacacaaaagaaataataaaaaaaattaaataattattacataatttt

SEQ ID NO: 4811 - DNA, 1608 bp, Glycine max
ccgggccccccctcgagtcagctacgtaggccccccccccacgaagcactttcgttcccgatactcatactcggaacaccaactcccatcttcgccttcgggttagggttagggttagggaattagggcttcgaacttcgacgcaatgtcgtccattaacccctcacgagctaccgctccctccgccttcgccacgcgccggccgtgggaggagttcttcgcgctccactcgttcacgcgcccctacaccctcggcgagaccacgctccgtgtgaagcgcaacctcggccacttccgcgtgaactacgccatggtcgtgctcctcttcgtgttccttagcctcctctggttccctatctccctcgtcgtcttcctcgccgtcttcgccgcgtggttcttcctctactttttccgcgatggccccatcgtcgtgctccgccgcgagcttgacgaccgcctcgtcctcgcggcgctctccgccgtcaccgtcgccgggcttgtccttaccggcgtctggctcaacgttgtggtggcgctgctcttcgcggcggcggcggtggcgctgcatgcggcgcttcggaacaccgaggatttgtacgtggatgaattggaagtttctgatggaggtttggtttcggttgttggtggtagccctacgaaacgaacagggtacgctagaatatagtaatagttagttatgagatataactgattttcgttttcgttttcgtttaatcgttttttgtgttactcgcattgcatatatttgaagaaaatagaggttcgagttttaggttttggtttcgcggaaatatgaattgtgtccatatgatagatttacataccgtgttgttagcttggaattggaatagatttcttgcttgttgcttggccccttcttcttatgtttttagaatctcttgtaaattctaagatataggttgaagcattcaatttgtgtatttagagttccaattcaatgtattgtctggcttgatatgctttggtatttgtaataggtttagcaatggtgggtaagatttgttttattttatatcaagtgtaaatgaagaggtaaccattttggttattcatttgtggtttcatatgcatttcagtttgctatcctactaccctctttttttttttagtagattaatatcatgatcaaattaagaacgttatataatataatgttgtgctttttggagtggcttgggttgctgttgtctgaatatctgattttgttgaattagacttgcttgtgttatgctactaagtgttgcagatccttttgtagcctgctgtgaatcaattactgagacttgtaactgtacaacatttgagagaattgaatagagaaccatggaatgccaattcatcattctcttatgtttagctgcaattagctgacacctaagttagttaatgttagctacctctttttagttagtcagttggccatttgggttgattgggatctgatctctcaaaacatgtgtataagaacagattgtaaaccacatgcaatcagactctgactattgaaactcttccctcttttaaaaaaaaaaaaaaaaaaaaaaactcgagactagttctcctcgt

SEQ ID NO: 4812 - DNA, 1129 bp, Glycine max
gcagttctctagaggattctattcggtgaaatagaatacgaactacgaagtgcaaacatccgaagacaccgagcgacaaagatcgacgatgacggacgaaaccgaagaattggaaccgttgtttgattacagccgggttcagcctctgaaccccatcgacctcgatgatgattttgatgattacgaggatgtgatttgcgttgatagtaaaaagaggaagaattcccaggctgttgggaatgagaagactaatgggaaaggagtaacagtggtggacattgaggatgatgattggttgcctcctccaccaaagatcgcaagtaatgcacagaagaccacggacgaggactcaactttgaaaaaattgagattaaagaagcaggaacttgcctggtttgctgaatcagcaaaagaattgttaaaagatgttgaagagtcatcaaaattggaaattaataattcgttgcagtcttctgtggttggtgtagatgagaaaagtacagagcattctgaaagagcaaagattgtcatttccgttcaggacaaggatggaacaaagcagattcgtatgttcatggatgacaagtttgaaaggattgtcaaaacatatgcagagaaaatcaagtgtaacctgaaacagatagtattgtcctttgatggtgataaaataagttcgtctgaaacccctgctagccttgggatggaagacgatgatattattgaagttcatgtcaaatcaagttgatcgaggtcttcaatcatggattcatggagctcaaactgacatttcggggccacgtttgggagttacatataccctagaaggtttttttttttttttagcatctttattacaagaaaaacaatgccagttcataatgtatttgcaatagtgggcccaactgtacaacactttttttttttttacagaattgtctagtattgctctttttggtggatgtttctttggtttatggtataggtttctgataaagcggaaaccctcctgttattagatgtgcattgcatttgggcttttgcaagcagtttgcttggttgttcaaatagatgtatgtcaagaggaagctcaattttgattcggacattctaactataatcatttataagg

SEQ ID NO: 4813 - DNA, 928 bp, Glycine max
  misc_feature (149)..(149): n is a, c, g, or t
aaataaacgctgtaagaagtttagtggccatgggaatgggatgctccagatgctctatttctgcactattattccccctgtttttctttgtcctttccttcatctttttctttccctggaagaaacaaaaccatcttacccatcacttngcttttgctcctccttcggtcccccccccccccaaaaactcagacaaccacacaaatattagaacctctctttctccctcaccacaaccaccaccaccaccatttgagcttctttccaacattaatcctgcaaacgacaattacatgtataatggcactgttcaaagtagtgtcattcagaaggacttgactagtttggagaaaattgaagaaggtttagcgcaagcacgggcctcaattcaggaatatatcctatcaaggaactatacttcacaaaggagagaaagttttgtccccaaaggatccatttaccgaaatccccatgcttttctccagagccacatagagatggtgaaaagattcaaggtgtgggtttaccaagaaggggaacaaccattagtacatgatggtccagtaaacaacatatatgcgattgaaggtcaatttatggacgaaatagacaataatgataagtggagccaattcagggcaagacatcctgaggaggcacatgtgtttttccttccattcagcattgccaatgtggttcactatgtctacaagcctatcctaaagcaatctgactacgaacctgtccgtttgcaactcttggttgaagactatattagtgttattgaagataaatatccttactggaatagaagcaaaggtgcagaccattttttgctttcgtgtcatgattgggctccaaaaagttccaatggcaatcctgaactttttcttagtttgattagggcactttgcaatgctaacacttc

SEQ ID NO: 4814 - DNA, 1730 bp, Glycine max
tttgtgaacaaaattgttatttgaacacaacatatatcccataattgatactccacatacaaaaaaagaaaagaaatggattcaccacttcatatccaaaagcctcatgttgtatgtgtaccattcccagcacaaggccatgtaaacccctttatgcaactagccaaactccttcattgtgtgggtttccacataacctttgtgaacactgagttcaaccacaaccgttttgttaagtcccatggaccagactttgttaagggtctccctgatttcaaatttgagaccatacccgatggcttgccgccttcggataaggatgcaactcaggatgttccagcactgtgcgattctactaggaaaacttgttatggtccattgaaagagttggtgatgaagttgaactcttcttcccctgaaatgcctccggttagttgcagcttcgctggccccccccccgggtttgctggaagagtcgcaagggatttgggcatacaagaggttcaactttggacagcctcagcgtgtggttttgtgggatatttgcaattcgaggaactggtgaaaagaggcattcttccattcaaagatgaaaattttgctattgatggcaccttggataagagtttaaattggatttctgaaatgaaggatattagactcaaagaccttccaagttttatcagaacgaccactttggatgatactatgtttgatttcttgggttctgaggcacgaaacactttgagatcatcttcaatcatcattaacacattccaagacttggatggagaagccattgatgtccttaggatcaagaaccctaacatatataacattggcccacttcacttgattgataggcattttcttgagaaagaaaagggcttcaaggctagtggatcaagtttatggaaaaatgattcaaaatgcttagcatggctagacaaatgggaacctaactcagtcatatatgttaattatggaagtataacggtgatgacagagcatcacttgaaagaatttgcttggggactagcaaatagcaagcaacatttcttatggataataaggccagatgtagtaatgggtgaatctatatctttgccacaagagttctttgatgcgatcaaggacaggggatatataacaagttggtgtgttcaagagaaagtgctttctcatccatcagttggggcctttctaacccattgtggttggaattctacacttgaaagtatatctgcaggtgtgcctatgatttgttggcctttctttgccgagcaacaaacaaattgcaagtatgcatgcacaacttggggaatcggaatggaaattaaccatgatgttaggagagaagagatagcaaagcttgtgaaggaaatgatgatgggagaaaagggaatggaaatgagacaaaaatccttagagtggaagaagaaagcaataagagctactgatgttggaggatcatcttacaatgatttctataagttaataaaggaggtttttcattacagtgttctttaagtccttattttataatcaggtgtattaaggtttattagttatataaaaatacctttcttaagttataatgggatgacaaacatgatgcaattggtttggcctaattactgttagtttaaaatgttttcatttatatttatcatgtcacgtgtactaaaattttaatattgtaactctttgtgtaagcatccatgattgtt

SEQ ID NO: 4815 - DNA, 1714 bp, Glycine max
aatacattctatcttatctattgaaactttacttaaatttaaatcgtccttcacaatacttatccattttcatggcttgatggaccaacaattgtcgctcgcataacgcgcatccctttcaatatatagtgattttccgtacacaaaactcaaaattttttccccactataaataatggcataatctctaaagtccgaatcatctcatattctcatcaagttattatcaaataattaattaaattcctcgtggaatcttgttgaagccatgtctacagctggtcaggtcatcaagtgcagagctgcggtggcatgggaagcagggaagccactatcgatagaaaccatagaagtggcaccaccccagaaaggtgaagtgcgtttgaagatcctcttcaactccctttgccgtacagatgtttactggtgggatgctaagggccagactccgctgtttcctcgtatcttaggccacgaagcttcagggattgtggagagcgtgggcgagggtgtgacacatctgaaaccaggtgaccatgcactcccaatattcactggggagtgtggtgaatgcacttattgtaagtctgaagagagcaacctgtgtgagctactcaggatcaacactgacaggggtgttatgctgagtgatggaaaaacaaggttctccaaaaatggccaacccatttaccacttcgttggaacctccactttcagtgaatacactgttctccatgaaggatgtgtagccaagattaaccctaatgccccacttgacaaagttgctattgtcagctgtggattctgcacaggttttggggctactgtgaatgttgcaaaaccaaagcctaataatactgttgctgtctttggcttaggagctgttggtcttgctgcctgtgaaggggcaagggtttctggtgcatctagaatcatcggggttgatttacttcccaatcgatttgaacaagccaaaaaatttggggtcactgattttgtaaacccgaaagatcacaacaaaccagtccaagaggtcattgctgaaatgactaatggaggagtagatcgtgctattgaatgcactggaagcatccaagcttcaatctcagcatttgaatgcactcatgatggttggggtactgctgtccttgttggtgtgccaaagaaggatgttgaattcaaaactaatcctatgaagttcatggaagggagaactcttaagggtaccttctatggtcactacagaccccgcactgacattcctggtgttgtggagaagtacctcaacaaggagttggaactagacaaatttatcactcactctgtgccattctcaaagatcaacactgcatttgatcttatgctgaaaggggagggcataaggtgcctcatctgcatggaagagtaaatcaatgatgaatgatgttccctgctgtgagaacaatgtttctgtgttatgtgaaaagagaattgaataaatttggcatgcaattcggttgttggattcatgctatatgagtgtgtaaagaggtaacggggggtgatgactttcttggtcattgtcgtggctttgtgacttctattgcaaatgttgtcttgtaactttgttgtattttcggcaatatatctatatgatatctatctttctatcttttttttgtgaaaaaaaaaaaaaaaaaaaaaaatagaaagctaaaaaaaaaaaaaaaaaaaa

SEQ ID NO: 4816 - DNA, 679 bp, Glycine max
ttgccacgcggccgccaagggggaaaatgtcttccaaatacattttcatgtgcctcctagtaattctagggatggtactttttgcaaccacttccctggctgatcatcatttactttcaacagcagaatctcctatgtcagaagttgtccatcgttatagttacgatgatcatgattataatcccaatcactattatgatcattatcataaccacaatcatcatcaccatcatcatcacaatcatcatcatgattttgatgatcacgatcataattgtggtgatgacaatcaagatcataatgataatcatggttatgatcaccagattcaaaacccacacgatggaaaacactggccttctaccacacaaaatgagccttcaaaagtagaaaacaagaagccacaagaggagcacagttaggtggaggatggccattataagcttcaccacaagaagggtccatggagagaagcatccttaattaggattttagtctaagtaccatggactattgtgaaatatattgtttaattaaagttgagcgtacgttggttcctgaaataaaggaatttaatgttgttttaatttcttgtaatagtatatgttggtgtcaggtgtcagctttgatcagtttgggctttggtgaaggaataaagatgcgcatgctacatgcctga

SEQ ID NO: 4817 - DNA, 1368 bp, Glycine max
ttttaatgcaagtgaattaaaaaacacatcaataaactccgaacaaaaaaaaaaattcacgaatatcaaaaacctaggctgatttcatgagaggttttcgcctataaactttattcatttctctccttctctctctatattatatatcttccctcctatcatgtcatatcatgcattgcaagtagcaccctaagtctttaaccccttcacctcacacacacgacatttgtttctctacgccagctcattcattatattcattcaaccccatcaccaacccaacccttctctctctctctctctcttctctctctctcaaacatttagacgttttctctgtcagatctcaaggcttaacgtggtgttgggtcttcctcggcatcgcgttacccacatagttttctgggcaaaaacagagtcttttggtggggaaaatggcgaacgggttagagagagaaagtgggttgacgacgttgttcagcgaggaggagctgagagaggtgagtggggttaagcgtgttggggactgtgtcgaagtcacgtgcgggtgcacgagccatagatacggtgacgctgtgggaagacttagggttttcgttaatgggtaccttgaaatcacttgcgaatgcacccctggttgccaagaagacaagttgactccttctgcatttgagaaacactctggaagagagactgccaggaaatggaagaataatgtctgggtaattgttaatggtgagaaggttccattgtgtaaaacagtgctgctcaaatactacaatcaggtgtcaaaagctgcaaatggctcccatagatcccaaaatggccgggcttgtcaccgtgatgagtttgttcgctgcactagttgcaataaagagcgtaggtttcgtctgaggactaaagaggaatgccgcattcaccatgatgctttggcagatgcaaattggaaatgttctgatcttccatatgacaaaattacgtgtgatgatgaagaagaaagagcaagccgtagagtttacaggggatgcactcgttctccaacatgcaaaggttgcacttcttgtgtgtgctttggctgtgatatctgccgcttttcagattgcagctgccagacttgtgctgactttacaaacaatgccaaagcttgattccttcatatcatattctctgctattttctcacttcacatcatgtgggctatttatgcctttccccctataagaatgtttaatttaattttcctaattgcacaattaccagtctgactgagttcaccattcattgttctcacattgactggatcataaatttcaatcttagctattattctctttcaaaaaaaaaaaaaaaaaaaaaaaaaaaaaaaaa

SEQ ID NO: 4818 - DNA, 1669 bp, Glycine max
  misc_feature (13)..(13): n is a, c, g, or t
gcgcccacgcgtncggcccccggtccggccttccctttttgcccccctcgctctcaccctcctcttcacacattttctgtgcgctctaacaaacattctcgttcacactttcagattgtgtgaagatgggggcgggtggccgaactgatgttcctcctgccaacaggaagtcagaggttgaccctttgaagcgggtgccatttgaaaaacctccatttagtctcagccaaatcaagaaggtcattccacctcactgtttccagcgttctgttttccgctcattctcctatgttgtttacgacctcaccatagccttctgcctctattatgttgccacccattacttccacctccttcccagccctctctctttcttggcatggccaatctactgggctgtccaaggttgcatccttactggagtttgggtcattgcccatgagtgtggccaccatgcattcagtgactaccagttgcttgatgatattgttggccttgtcctccactccggtctcctagtcccatacttttcatggaaatacagccatcgccgtcaccactccaacactggttctcttgagcgggatgaagtatttgtgccaaagcagaagtcctgtatcaagtggtactctaaataccttaacaatcctccaggcagagtcctcactcttgctgtcaccctcacacttggttggcccttgtacttggctttaaatgtttctggaaggccttatgatagatttgcttgccactatgacccatatggtcccatttactctgatcgtgaacgacttcaaatatatatatcagatgcaggagtacttgcagtatgctatggccttttccgtcttgccatggcaaaaggacttgcctgggtggtgtgtgtttatggagttccattgctagtggtcaatggatttttggtgttgattacattcttgcagcatactcaccctgcattgccacattacacttcctctgagtgggactggttgagaggagctttagcaacagtggatagagattatggaatcctgaacaaggtcttccataatattacagacactcatgtagcacatcacttgttctccacaatgccacattatcatgcaatggaggctacaaaggcaataaaacccattttgggagagtattatcggtttgatgagactccatttgtcaaggcaatgtggagagaggcaagagagtgtatttatgtggagccagatcaaagtaccgagagcaaaggtgtattttggtacaacaataagttgtgatgattaatgtagccgaggcttctttgaactttcccttgtgactgtttagtatcatggttgcttattgggaataattttgttgaaccctgatgttggtagtaagtatctagacagttgcatagcggttttgtttacagaataagatatagcctctctgaacagtttgattattgcaccatggtttgcaatcggtgcatgtcgaccaagtttctcaagactgtggagaagcttattcttgttccagttcttgaatccaagttgttaccgtattctgttattattgacttagaatccttaaccttttctgctgttttctcatgatcgtcactcgcaaatgaatcacatttcaaacttagggtgcgaaaaaaaaaaaaaaaaaaaaaaaaaaacac

SEQ ID NO: 4819 - DNA, 1647 bp, Glycine max
tcagctacgtaggcccccccccccccccatctttgccccctttctcactccctcctcttcacacattttcttagctctctccaacaatccctctcgttcacactttcagattgtgtgaagatgggggctggtggccgaactgctgttcctcctgccaacaggaagtcagaggctgaccctttgaagcgggtaccatttgaaaaacctcagtttagtctcagccagattaagaaggccattccacctcactgtttccagcgctctgttctccgctcattctcctatgttgtttatgacctcaccatagccttctgcctctattatgttgccacccattacttccacctccttcccggtcctctctctttcgtggcatggccaatctattgggctgtccagggttgcatccttactggtgtttgggtcattgcccatgagtgtggtcaccatgcattcagtgactaccagctgcttgatgatattgttggccttatcctccactccgctctcctagtcccgtacttttcatggaaatacagccatcgccgtcaccactccaacacaggttctcttgagcgagatgaagtatttgtgccaaagcagaagtccagtatcatgtggtactctaaataccttaacaatccaccaggcagagtcctcactcttgccgtcaccctcacgcttggttggcccttgtacttggcttttaatgtttctggaaggccttatgatagatttgcttgccactatgacccttatggtcccatttactctgaccgagaacgacttcaaatatatatatcagatgcaggagtacttgcagtatgctatggccttttctgtcttgccatggcaaaagggcttgcctgggtggtgtgtgtttatggagttccattgcttgtggtcaatggatttttggtgttgattacatttttgcagcacactcaccctgcattgccacactacacttcctctgagtgggactggttgagaggagctttagcaacagtggatagagattatggaatcctgaacaaggtcttccataatattacagacactcatgtagctcatcacttgttctccacaatgccacattatcatgcaatggaggcgacaaaggcaataaagcccatcttgggagagtattatcggtttgatgggactccatttgtcaaggcaatgtggagagaggcaagagagtgtatttatgtggagccagatcaaagtactcagagcaaaggtgtattttggtacaacaataagttgtgatgattaatgtagccgggggcttcttgtccgtcaggtgggatggtttgaactttcctttgtgactgtttagtatcatgcttgcttattgggaataattttgttgaaccctgatgttggtagtagtatctagaaagtagcatagcgtttttgtttgcagaataagatatagcatctctgaacagtttgattattgcaccatgttttgcaatcagtgcatgtcgactaagtttctcaagattgtggggatgcttattcttgttccagttcttgaatccaagttgttatcatattctgttattgactcagaatctttaacccttaaaaaatatttctcacgataaaaaaaagtcattactcgcaaaagatttacctttc

SEQ ID NO: 4820 - DNA, 1975 bp, Glycine max
  misc_feature (1663)..(1666): n is a, c, g, or t
  misc_feature (1697)..(1721): n is a, c, g, or t
  misc_feature (1731)..(1736): n is a, c, g, or t
  misc_feature (1813)..(1818): n is a, c, g, or t
agcatgtgatctggagaagaaaatggagacccaaagcaaagaactctgggatttgaaggacgatctcaaaaagcacgttacaacaacagagttgcgtgaaatgttggaagccagtggtcaagattcaacaggatcagaacttgatttacgtgaccgctgtgctgatggaatgatgtttggagcacttgatctttgcccaatatgttctggctttctgcgttactctggaggaatgtaccggtgccatggatacatttccgagtggagtaaatgttcttactctacctgtgaaccaaaacgtattgaagggaagtggaaaatcccaaaagaaacaaataatcagtaccttaaaaagtggttcaaatctcaaaaagggaagaaaccagttaggatattgcctcttccatcaccaaggaaatctgctgaaagtcaaatgattgctagtcagcatcatcattcatcaaatagtggaaatttgcgagatttgaaagttgctatctgtggattacctaatgactcaattgcagaatggaaacgcaaaattgatggcataggtggggtgtttcatgcaaaagtaaataaggatactaactgcttggtggttgttggatcactcaatgatgaagctgagatgcggaaggcaaggaggatgaaaaaaccaatagtcagagaggactatttgattgactgcatagaaagaaagaaaagacttccatttgatatgtacaaggttgaaatgattggtgagacttctagcatggtcaccattaaagtgaagggacgtagtgctgttcatgaggcttctggcctacaggattccggccacatacttgaggaagggaaaagcatatataacacaactttgaatatgtctgatttgtctactggtactaacagctactacattctccagataatcgaggatgataaggggtccgattgctttgtgtttcgtaaatggggtcgagttggaaatgacaagattggaggaacaaagctggaggaaatgtcaaaatctgatgcaatatgtgaattcaaacgattattctatgagaagactggaaacccttgggaggcgtgggaacaaaagactatccagaagcaacctggaagattttttccattggatattgactatggagttaacaaacaggtcccaaaaaataaaaaaaatgatgctgacagcaaattacctcctccattaatagaattgatgaagatgctcttcaatgtggaaacatacagagctgccatgatggaatttgagattaatatgtctgaaatgccacttgggaaactgagcaaaagcaatatccaaaaggggtttgaagcattgacagagatacaaaatctgttaaagattagcaatcctgatccatccgtcaaggaaagcttactcattaatgccagcaatcggttcttcaccatgatcccttctattcatccacatattattagggatgaggatgactttaagtccaaggtgaaaatgttagaagcccttcaagacattgaaatagcctcaagattagttggatttgatgctaacaatgatgattccattgatgataattataagaagcttcactgtgatatatctccacttcctcatgatagtgaagagtttggtttaattgagaagtttctccataatactcatgcnnnnacacatacggtatgattatatttggtatagnnnnnnnnnnnnnnnnnnnnnnnnntggcgtgagnnnnnncatttctcacaatgtacatgtttccactatctttgtaatccatttatgcaggactggagtcttgagctagaagaagnnnnnncacttgaaagggaaggtgaatttgataagtttgctccttacagggataaacttggaaacagaatgctcctatggcatggtaggttgtagatatgtgatgcttgctactagttacttgtatgtttgctgttgtgaaatattctcctatgacgcaatga

SEQ ID NO: 4821 - DNA, 1368 bp, Glycine max
ggaagaagaaaaaaaaaagcacgcttatgtggaagttagtaataagaaaagagaaaaaaaaagtaacaagatgtgacttcgatcctacggctgcgagaagacgacccccccggacagcagcagagcaaaagaaagaaagaaagaaagtgcaacttcctctgttttgctcccctgtttaagccttatcataagcttagaatggcacacaaggaattttccattgccctagtgactctcattgttctctttgtcaacacgaacctccaaggtgccacggctgactatggtggtggttggcagagtgctcatgccactttctatggtgggggtgatgcttctggcacaatgggtggagcatgtgggtatggaaatttgtatagccagggatatggaactgacactgtggctctaagcactgctttgttcaacaatggcttaagctgtggatcttgctatgaaatgagatgtgatgatgacccaagatggtgcaaacctggctctattaccgtcactgctactaacttctgcccaccaaacccatctttgcctaacaacaatggtggttggtgcaaccctcctttgcaacactttgatatggctgaacctgccttccttcaaattgctgaatatagagctggaattgtgcctgtggccttcaggagggttccttgtgtgaaaaagggaggaataaggttcacaatcaatggccactcttacttcaacctagttttgatcaccaatgtggctggagctggtgatgtgaattcagtgtccattaaagggtccaaaactgggtggcagcccatgtcaagaaactgggggcaaaactggcagagcaactcatacctcaatggacaatccctctcttttcaagtcaccaccagtgatggcagaactgtgacaagcttcaatgtggcaccagccaattggcaatttggccagaccttccaaggaggccaattctagagacattattgcaatgagggatagaaaatagtgcaaaaaaaaaaaaaatgtttgtatacctattattaatcacctcattggaagaaccattaagtgtcattaataggtattgattcttgtaactgtgattctgaaaggccagtgttttttattttattggtctaaaaagtagctgaggtgtttatatggcacccgctggtcacttcgcatataatatacatatatggagagttatgtgttatcctgtgtgtggtggtgctgcttttcttcaatccaagttaataattatattcaagagagaaatcttttttgcgtgaaatatttgtttcacatttcccatcaattatgagttgttaaatgattaaatctatttgattagtatttactatgttgattgttatt

SEQ ID NO: 4822 - DNA, 1277 bp, Glycine max
tatcgcttacggctgcgagaagacgacagaaggggacagcagagcaaaagaaagaaagaaactgcaacttcctctgttttgctcccctgtttaggccttttcataagcttagaatgacacacaaggaattttccattgctctagtgactctcattgctgttctctttgtcaacatgaacatccaaggtgccactgctgactatggtagttggcagagtgctcatgccactttttatggcgggggtgatgcttctggcacaatgggtggagcatgtgggtatggaaatttgtatagccagggctatggaactgacactgtggctctaagcactgctttgttcaacaatggcttaagctgtggatcttgctatgaaatgagatgtgatgatgacccaagatggtgcaaacctggctccattactgtaactgccactaacttctgccccccaaacccttctttgcctaacaacaatgggggttggtgcaaccctcctttgcaacactttgatatggctgaacctgccttcttgcaaattgctgaatatagagctggaattgtgcctgttgcctttaggagggttccttgtgtgaaaaaggggggaataaggttcacaatcaatggccactcatacttcaacctagttttgatcaccaatgtgggtggagctggtgatgtgaattcagtgtccatcaaagggtccaaaactgggtggcaacccatgtcaaggaattgggggcaaaattggcagagcaactcatacctcaatggacaatccctctcttttcaagtcaccaccagtgatggtagaactgtgacaagcttcaacgtggcaccagccaattggcaatttggccagaccttccaaggaggccaatactagagacattattgcaaatttacaatggggggtagaaaatagtgcaacaaaaaaaaatgtttgtatacctattattaatcacctcattggaagaaccattaaaagtgtcattaataggtattgattcttgtaactgtgattctgaaaggccagtgttttttattttattggtctaaaaagtagctgaggtgtttatatagcacccgctggtcacttcgcatataatatacatatatggagagagttacgcgttatcttgtgtgcggtggtgctacttttcttcaattcaagttaattaataattatattcatgagagagatctttttgcttgaaatatttgcttcatatatctcataaattatgagttgttaaatgattaaatcaatttgattagtatt

SEQ ID NO: 4823 - DNA, 1066 bp, Glycine max
tctacggctgcgagaaccgcccccccatcacagcagagcaaattaactacacattcccctgttttggctcccctgtttaaccaagaagcttccaatggcaccccatgcatcttcttttgctctagttcttctcatttttctctttgttgaaatgcacttccatggtgccactgctgactatggcggttggcagggtggtcatgctactttctatggtggtggtgatgcttctggaacaatgggaggtgcatgtggctatgggaatttgtacagtcagggatatggaaccaacactgcagctctaagcactgctttgttcaacaatggcttgagttgtggggcatgttatgcaatgaagtgtgatgatgacccaagatggtgcaagcctggcaccataattgtcactgctacaaacttctgtcctccaaactttgctttggccaacaataatggtggttggtgcaaccctcctctacaacactttgatatggcagaaccagcattccttcaaattgctcagtatagagctggaattgtgcctgtggcatttagaagagtgccctgtgtgaaaaaggggggaataaggttcacaattaatggccactcttacttcaacctggttttgatcaccaacgtcgcgggtgcaggggatgtccatgcagtgtccatcaaagggtccagaactagctggcaacccatgtcaagaaactgggggcaaaattggcagagcaactcctacctcaatggacaaagcctctcttttcaagtcacccccagtgacggtagaactgtcccaagcttcaacgtggccccatctgatttggcagttcgggcagaccttcccaagggggtcagttttaggaggaaaaggaaataggaatgttagctacccacattttattttgaaaaaaaaaaattgtgatggattaaaatttgttaaagattacgaatttgggaagtctcatatttaaataaaaaaaattattaaataagatgtaaaatttattaaaattggtaatttttaatcaattttaataaatcatataaaaaaaaaaaaaacacccac

SEQ ID NO: 4824 - DNA, 1560 bp, Glycine max
  misc_feature (7)..(7): n is a, c, g, or t
tcagctncgtaggcccccccccccccgagaatcgatcacacagcttttgttctagcacttcgctgtctgaggttcgttccaaagaaaaacatcgtcaatcctcacgacagctctgctctgctctgcttcttttgttttcttatttttcttctgaaaccctaaattttgtctgctctaaactttgggatctttcacacttgaaaaaaactgcttcttgtgcccgacccagcacaattctcatactatagatctttgaatcaaatataatttctgatcattttgttcgcacagcttttgttctagcacttcgctgtctgaggttctggattctcagtgtttgcggagcgcagcatcatcttttagggaagaatggatcatcaagggcatagccagaacccatctatgggggttgttggtagtggagctcaattagcatatggttctaacccatatcagccaggccaaataactgggccaccggggtctgttgtgacatcagttgggaccattcaatccaccggtcaacctgctggagctcagcttggacagcatcaacttgcttatcagcatattcatcagcaacaacagcaccagcttcagcaacagctacaacaattttggtcaagccagtaccaagaaattgagaaggttactgattttaagaaccacagtcttcccctggcaaggatcaagaagattatgaaggctgacgaggatgttaggatgatatcagctgaagcaccagtcatttttgcaagggcatgtgaaatgttcatattagagttaaccctgcgctcttggaatcacactgaagagaacaaaaggcgaacacttcagaaaaatgatattgctgctgctatcacaaggactgacatctttgatttcttggttgacattgtgcctcgtgaggacttgaaagatgaagtgcttgcatcaatcccaagaggaacaatgcctgttgcagggcctgctgatgcccttccatactgctacatgccgcctcagcatccgtcccaagttggagctgctggtgtcataatgggtaagcctgtgatggacccaaacatgtatgctcagcagtctcacccttacatggcaccacaaatgtggccacagccaccagaccaacgacagtcatctccagaacattagctgatgtgtcgtggaaattaagataaccaggcactggaatcagttgtgaatgtcaaactgaatggttgggaaggtcgatactacatagcgagcagaagctgtagctgatagtttacatgcaatgcagactataaacatatgtagataatgtgctagggaaaacttaaccttatctttgatttagctggaaaaaatggtatttttcattttaattcacaggtcatcagatgataatatttatttactggtgcatagcaggatttttacttgagtttaaacttgtcatgcgcccaaaatatatcccatctttttcattcatcatgcttccttgttatacctacctatctgtggttcgctttgtgggaaaattgagttatcacatgatttgcgcacaagttgtgcaagaac

SEQ ID NO: 4825 - DNA, 1146 bp, Glycine max
tcgagtcagctacgtaggcccccccccccccccagaatcgatcacacagcttttgttctcgcacttcgctgtctgaggttctggattctcagtgtttgcgaagcgctgcatcatcctttggggaagaatggatcatcaagggcatagccagaacccatctatgggggtggttggtagtggagctcaattagcatatggttctaacccatatcagccaggccaaataactgggccaccggggtctgttgtgacatcagttggtaccattcaatccacacctgctggagctcagctaggacagcatcaacttgcttatcagcatattcatcagcaacaacaacaccagcttcagcaacagctccaacaattttggtcaaaccagtaccaagaaattgagaaggttactgatttcaagaaccacagtcttcccctggcaaggatcaagaagattatgaaggctgacgaggatgttaggatgatatcagccgaagcaccagtcatctttgcaagggcatgtgaaatgttcatattagagttaaccctgcgttcttggaatcacactgaagagaacaaaaggcgaacacttcaaaaaaatgatattgctgctgcaatcacaaggactgacatctttgatttcttggttgacattgtgcctcgtgaggacttgaaagatgaagtgcttgcatcaatcccaagaggaacaatgcctgttgcagggcctgctgatgcccttccatattgctacatgccgcctcagcatgcgtcccaagttggagctgctggtgttataatgggtaagcctgtgatggacccaaacatgtatgctcagcagtctcccccctacatggccccccaaatgtggccccagcccccagaccaacgccagtcatttccagaacattagttgatgtgtcgtggaaattaaaataaccaggccctggaatcagttgtgaatgtcaaactgaatggttgggaaggtcgatactacatagcgagcagaagctgtagctgatagtttccatgcaatgccgcctataaacatatgtagataatgtgttagggaaaacttacccctatctttgatttagctggaaaaaaaggtatttttccttttaattccccggctcctccgatgatatatttttt

SEQ ID NO: 4826 - DNA, 1777 bp, Glycine max
gaaggaaaaggaggtcttaaaatgagaatgaagaatttgctattgcttggacttgggggattcggggcccaacggaacatagcatagtatttgatgttgatgaatagtacgtaataggtcagctacgtaggcccccccccctcgttctcgcagcaaacaaacaaaccccccacccaacgcattcttcaatcttccccttcgcgtcttttgggtggtttggtttaggacatttcacaaacacctcctctcccctccattttccatttccattcttctctccactataaattctccttctctttctttctcgtaatcttcgcctcccttcaactccaccctctctccttcttacctccttgaccatgatgagtttcgccatggattcagtttcggtgttaaaccctaaactctcccactcccattcctctctcccattcagcaggttcccccattccctcaacttccaccccttactcaaaccccgcgcagttaacgccgccgtcccccctaacggcctcgccgcctgcttcctcaccctccaccgacggaaaccgttaaccgtcgctttcacagcttctcaccaagactcggaacacagagagattgaagtggagaaggagcgtgacgtccatgcaggctctgaagaatctcaggaagcgtggaagcaggttctggagacgtttagggaacaggcagagaagtttcagggcgtttctcaagaggcttatgaggtgtattctaagaaggctgctgtcattctgacagatgccacggagcagttaaaggtgctggcagataagacaaagaacgagttgagtgtggcagcaaaggaaatcactgacgaagggaaagagtatttgtctgcagcggcggatagttcaccagaggtgaaggagattgtggaaacgtttacctcaccgcctgaggatattcagaaattgtctggagtgagggacttctatgttggtgtaccttatggtttgatgctttctcttggtggcttcctttcctttatggtaactggcaacactgcagcgataaggtttggggtgattttaggtggtgtcctcctggctttaagcattttaagtctgaaatcctacaaaaaaggacgcacctctcctctcgctttgaagggccaagctgctatagcaagtatattgtttctgcgggagataagctcaataggcaaaggatcatcttatttcactgccttgatcagtggtgcagtggtggcattctatatctatagaatagtactggaacgtaatcatcaaaagagctcaaacttggaaactgaaccaggaaactagttctatgatgagtgtaaaaaattgaagatctgcatgaagatcaggtaaaatactgaagatcgagttgaagatagtcagtaaattttggtgatcattttttatcatatagtttttcacgggctgggtcatcaagactagagactcactgctaagggttatggtttcataccttgaaaaacggagctcggagaatctggaaataatttctagttgtggtttttttctggaaaattactaatatcatattatgagtaaccttaaccggttacagattctaatgtacaagaaaaaattagatatggtgtttagggctttgtcttcttcaaattgcacttataaaacattaaaataagtacctgctgcttgcatttttaaccccacaagtgagtgaaatttaaacacttaatagttacgtaagcctggaattgtgaactaataagataagattagatctccattttatt

SEQ ID NO: 4827 - DNA, 1475 bp, Glycine max
  misc_feature (1421)..(1421): n is a, c, g, or t
acccacgcgtccggctccctctcctctcttctcttctgttcaaacaatgtcgcaaacgttgcatgctttcgtcgccaaaaatcttggctgtggaatggcagaaggcaagtgtctcccatgttcaggtgtttctggaagaactgctgctgtatattcctactcttctctaggtcatcacagaattcattcccgtgtccaagttagaggactaaagtgtggctttaggggtgcatcttttgtatgtgaagcaaagaggaacccagatttctcaaggcaaaacaagcacgggtcctccagaagcagaaatcggaacagtgatgggagagacagctttgagagctttgacgacgatatgttttcattaaaaaatggaccgcctgtgtctctttcaacctcaggaaaattccaggccacttcagcccctggtcctagggagaaggagattgttgagctatttaggaaggtccaggctcggctgcgtgagagggctgcttccaaagaagaaaagaaagttgaagcctcccgagcgcaaagtaaagagaacagtactgtagattcgctcctcaaactactgaagaaacactcagttgagcaagtgaagagaagtagtgggggaggcagaggaaaagattttagttcggaccaaatgcaagaaagtaaccaatatgatggaggacgaaatgctaaaatttctgatttggatagtactcctaaggatgagccccaagaggacaatgtcttctcctcctcggtagccaggcctcggtcaaatttccaaagaaggtctcccgttcctcgtgtaaaataccagcctgtctctaacgatgaggatgatacggatgtagtgccagtaggtagtgaggatacagagaacaatcaggatcagatagatttgaagcttgatgatgaagccgagtctgactctgaatctgatgttgattcaaaggatgagctgttcttcccaaacatagggatggctgaattgtctgaggatgatgactccgagcaaacctataatgatgaaagtgtggaggagcagccggtggctcaacatgaggattttagtgcactgaagctgtccgaattgagggcacttgcaaagactcgtggcctgaaaggattctcaaaaatgaagaagagtgacctcatggagttgctaactgagacctgattctgatggatgatatacgagaagaaaaagggtcaaaacaacacatgccatagtaacagattttttttcttttcttgtttttgacttgacattctatctgatgtttctttgtgtttttttttttttttgccactctaatataatttttccaagtacttgaggttgagattttgtggaacattagagtaatcatgatatctttgcctcggagaatttttaaatttgtagttatatttcccgggatgatatncttgtagctttttggttattgagagattacatcattgtcctagtattttgttta

SEQ ID NO: 4828 - DNA, 1758 bp, Glycine max
aattcggctcgaggccccatgaagcgaaattgcaaaaataaaaacctaggtggcggaaacctaggtactgcgactggagtggttccctcagacatatctgtaacgctgcttcttctgtgaggcatcaatggagacaaaagctttgtccttcgctctgtctctcaatgacctcaccaacaaccgcttcacttccaatacgccacatgctgccgccaaagtttccgtctttaccgtcagatgctcttcttcgggtagtggagagaggccttggaagaattcagatgctagacttgtgcttgaagatggttcaatttggagagcaaaatcgtttggtgcttcagggacccaagttggcgaggttgttttcaatacatcattgacagggtatcaagaaattttgactgatcctagttatgctggccagtttgtgctcatgacaaacccacatattgggaatactggcataaattttgatgatgaggaatcaatacagtgtttccttgctggacttgtaattagaagtttgagtatcagtacctctaactggagatgtaagaagcctctgggggattacctagctgaaaggaatatcatgggaatttatgatgttgatactcgtgcaatcacgcggcgattgcggcaagatggcagtcttattggtgttttgagcactgacaattccaaaaaggatgaggaactgcttcacatgtctaagtcatggaacatttgtggtaaggatctaataagtggagtatcatgcaaaacttcacatgaatgggttgataaaacaaaacaacaatgggagtttagtaaagtgcctggagaggctttccatgtagttgcttatgattttggaatcttccgcaccagacttaggcgcctagcatcttatggctgcaaaatcactgttgtgccatgtacatggtcagcatcagaaactttgaagatgaagccagacggggttcttttcagcaatggccctggagatccgtctgctgttccttatgccgttgaaacagtgaagaatattatcggaaaggtgcctgtttttggaatttgcatgggccatcaattgctaggccaggctttaggaggtaaaaccttcaagatgaaatttggtcaccatggaggaaatcaccctgttcgtaaccttcgaagtggccatgttgaaattagtgcccagaaccacaactatgctgttgaccctgccacactgccggaaggagtggaggttactcatatcaatctaaatgatggaagttgtgctggtcttgctttccccgctcaacaacttatgtctcttcaataccaccctgaagcatcccctggacctcatgattctgactatgcttttagggagtttgtagagctaatgaagcaaggaaaaaacagaacaaaagaaagtctacaccaactatcagcagcacaggctttggatgcataagtggttgaagggagctgctcttgttcgttcggggcaaaaagaataatgcatctgctgaaaaattacgaagttatgagtccatttctatgattttgtagatgagtttattaaggttttctagggatctataagattaagattttctcatgttcatttcctttgcaagggtaagcacggccatgattgtcataaacctcaatgaggcctaatgtactactgctcatcgcagtcaacaccaaaattttggttgctggcatcaccaattttatgagagtaattactaatgattgtttcctgttaaaaaaaaaaaaaaa

SEQ ID NO: 4829 - DNA, 1701 bp, Glycine max
ccgcgtcagcgacgtagggctccccccccccggcgactggagtgagtggttcttcagacatatctataacgctgtttctgtgagagcatcaatggcgacaaaagctttgtccttcgctctgtctctcaatgacctcaccaataaccacttctcttccaatacgccacacaccgccgccaaagtttccgtctttaccgtcaaatgctcttcttcgggtggtggagagaggccttggaagaattcagatgctagacttgtgcttgaagatggttcaatttggaaagcaaaatcgtttggtgcttcggggactcaagttggcgaagttgttttcaatacatcattgacagggtatcaagaaattttgacagatcctagttatgctggccagtttgtgctcatgacaaatccacatattgggaacactggcataaattttgatgatgaggaatcaatacagtgtttccttgctggtcttgtaattagaagtttgagtatcagtacctctaactggagatgtaagaaggatctgggggattacttggccgaaaggaatatcatgggaatttatgatgttgatactcgtgcaatcacgcgccggttgcgtcaagatggcagtcttattggtgtcttgaccactgacaattccagaacggatgaggaactgcttcacatgtctaagtcatgggacattgttggtaaggatctaataagcggagtatcatgcaaaactccacatgaatgggttgataaaacaaagcaacaatgggagtttagtaaagtgcctggagagactttccatgtagttgcttatgattttggaatcaagcataatatacttaggcgcctagcatcttatggctgcaaaatcaccgttgttccatgtacatggccagcatcagaaactttgaagatgaagccaaatggggttattttcagcaatggccctggagatccatctgctgttccttatgccatcgaaactgtaaagaatatcattggaaaggtgcctgtttttggaatttgcatgggtcatcaattgttaggccaggctttaggaggtaaaaccttcaagatgaaatttggtcaccatggaggaaatcatcctgttcgcaaccttcgaagtggccatgttgaaattagtgctcagaaccacaactatgctgttgaccctgccacactgccggaaggagtggaggttactcatatcaatctaaatgatggaagttgtgctggtcttgctttccctgctcaacagcttatgtctcttcaataccatcctgaagcatcccctggacctcatgattctgactacatttttagggagtttatagagctaatgaagcaagggaaaaacagaacaaagggaaggctacaccaactatcaacagcacatgctttggatgcataagtagttgaaggaagctgctcgcgttcggggcaaaaagaataatgcatctgctgaaaaattacgaagttatgagtccattactatgattttgtagatgagtttattaaggtttcctagggatccataaagattatgattttctcatgctcgcgttcgggccatgattgtcataaacctcaatgaggtttaatgtacttattacttatcgctatcaacactaaattttggttgctggtatcaccaattgtaagagcaattaataatgattgtttcctgtcaaaaaaaaaaaaaaa

SEQ ID NO: 4830 - DNA, 1891 bp, Glycine max
tcgagtcagctacggtaggccccccccccaaaataatttccccttccactttcttgaaagaactaatcattgaaaatttggtgtttcaaatcctatccgaagttccttataccgtgtttacactcaaaggattagaatgcaatatataataactcagtagctactagttgtagttcaacctccttcctccatatacgtttattctatctcactttcctattacagtatctttacctcaatggcaccaagttctgcagtgccagatgaacaggttgttgttggagaggagattgagcatgtaagagtggtcactttgaacaggccaaggcaattgaatgccatctcaccagaactggtttctcagctagcaacatatttggaaaagtgggagaaggatgagaaagcagaactagttattataaagggagctggtcgggctttttgtgctggaggagatttgagagtcttctatgatggaagaaaaataaaggatgcctgccttgaagtggtctacagattttactggctttgctatcacattagtacctataagaaaacccaggttgcgcttgttcatggaatttcaatgggtggaggtgcagctttgatggtcccattgaagttctcagttgtaacagaaaaaactgtttttgccactcctgaagcaagttttggatttcatactgattgtggtttctcatactaccattctcgtttacctgggtatttaggtgaatacttggcacttactggaggaaggttgagtgggaaggaaatagttgctgttggagtggcaacccattttgtcccttatgagaaaattgttgagctagagaagcgcctgattagcttgaattctggtgatgagaatgctgtaagatcagtaattgaagaattttcttcagaagttaaactggatgaagagagtatcttaaacaagcagtcaataattaatgagtgcttctcaaaggattctttagaagaaattataaaatcattggaagctgaagcatacaaggaaggaaatggatggatagatgcagttttaaaaggaatgaaaagatcatcaccaactgcattgaaaatagcattaagatcggttcgtgaaggaaggaatcaaacactacctgaatgcttaaaaaaggaattcagattaacaatgaatatactgcgaactacaatatctaaggatatgtatgagggtattagagctctcaccattgacaaggataatactccaaagtgggaaccttcatcgcttgacaaagtagaggatggaaagttggacttgatctttcagccatttgagaagaatttggagctgcaaattccagaaagtgaggaatacaggtgggatggtaaatatgagaattcagcttatgctcttccaaattgagaaattcctatgtctgttaaatgttgcttcttttagaattcccccaaaaatatgtcatggatttctgtactttctggtatgcattaatccaggctactttttgagttcttgaacaaatttcaacagatgaaagaagttcatgaagagtagtcctctaagtttggagtattaatttttggtgtacaatgacaataccaagatttgaacttagaattttatgcaaattactcaaactccttactactaagctgttgtgggttgaatggtttcatgatacgagagagcattgataagctggttgttgcttcttgcacttgctctattgcttcctccacattttattgcatttggaaagcccattctaaggtcccggttggatcagtcggactgaactcagtctcacaactatgccaatttgtattatgcatactttaatttttaaattcttgggtccacctttaatttataatttataatttataatcagttcatcct

SEQ ID NO: 4831 - DNA, 1501 bp, Glycine max
aaacggatgccattgctgcaccccgtgaaagctctatccctctctttctttgttttccgtggaaaccaacctatcttcctttgttattttcattctgataaaacaaacatattttcttccacctttttccatctttgcaaaggggataaagggttgctagttgctaccatttatggttttattccgccatttggaggaaccttatgctcttaaaacaaataaaacccaaagggttctcttgaaaaacaccagaactttcatctaatcaaaacacgtgttggccaaaaacatcaccttctctttattatcgcatgcaagagcttttttagatgctcctttgtgttcaagattgagagaaaacataacctgggtatgatatgactacgagcatgccccgttaatgtttcaacggtttttgtttctttggttcattttcagacacccccatattcttcttctcaattgaaaaccttggtttttgaatctcccctgttttcctttgtgtgcttcaagttctttttgtctttttctagatacctatgtcgtctgtgccggcacgaacagggcgacatagacagcgttatgaggacaatttgcgccttgtctctgggtgtgctcccccttgttggacaaaggacaacacagatcaaatgggggaaacccgggagataatagaagtacttatggtttcttcaccaaaacgtgatgaccttgtattcccaaagggtggatgggaggatgatgagactgttacagaagctgcttgccgcgaggctttagaggaagcaggagttaaaggaatactaagagaaattccactaggaatatgggagttcagaagcaaaaccagtcaaggcttatgtagcgtggaaggaggctgcagaggatacatgtttgccttggaggtgactgaagaacttgagacatggccagagcagaaaaaccacgctcgccaatggttaaacataaaagatgcattcaaactcagccgatatgactggatgtgtaatgcacttgaggcatttttgagagtaatggcagaagacagaaagcctgagaaccaagaccagaatgtggaacttgaacccccttcaattgtagaagatatgccagaatgccaaagtatgtcacctaactgctataagagatcctctactatgcagcaccatggtatgcctcctaaagccaatcttctgtcacgtgctactcgagaaatagccatccactttggttattgacattatcaggaggacacttttgaaatatgcttatgtaatggatcaacattgtgcaataactccttaaaattgtgaaagaaaaaactatgaagttattatggcttggatgcacaatccatcaacttcattgttgtaggctctttctttctttctttccaatgtgaccatgatgtaaaatgtggtggtgaaagtctcaagtgtatatgatcttaacagttgtttgcttcaccccaaaaaaaaaaaaactcgagactagttctctc

SEQ ID NO: 4832 - DNA, 1899 bp, Glycine max
tcagctacgtaggcccccccccccccatgcctcttcttctctcggaagaagttcaattctttactcaaactttgtgttcactctttctcttttttggtgttagttcggtgaatcatggagaacccaatcgacggtggcgagttcgtgtacctttccgggttcggcaaccacttctcctccgaggccctcgccggagctctgccggtggcgcagaacagccccctcgtctgcccgtacggcctctacgccgagcaaatctctggcacctccttcacctcccctcgcaaccgcaacctcttcagttggttttatcggatcaagccatcggtgactcacgaaccgttcaagcctagggtacctggtaatggcagaattttgagtgagtttaacaactccaacagttctgctaacccaactcagcttagatggaagcccttggatgcgcccgattcgccaacagatttcattgatgggttgtccactgtgtgtggttctggcagctccttcatgcgccacggatatgctattcacatgactccttgtcactactgaatgtggaaggttgaaagtttctccaggtgaaattgctatattacctcaaggctttcgtttttctgtgaatcttcctgatggtccatcccgtggttatgttgctgaaatttttggtactcattttcaacttcctgatctgggaccaataggtgctaatggcccttgcttcccctagggatttccttgttcccactgcttggtttgaagataaatcttatcctgggtacaccatagtgcagaaatttggtggtgagctctttgatgcagtacaagatttctctcctttcaatgttgttgcttggcatggtaattatgttccatatatggtgggtgtttttcccttcttcattgtttcaagagaatgacttatgattacaatcatattatcttcagtgtgttagggttataatttctgtgagagaatttatgcatcttaattaatttggcaactattcttttcacttgcagtatgatttaaacaaattctgcccttataatacagttctgtttgatcatagtgatccatcaatcaatactgtgttgacagcaccaactgataaacctggagtggcattgcttgattttgtcattttcccacccagatggctggttgctgagcatactttccggcctccatattatcatcgcaattgcatgagtgaatttatgggcctcattcatggtggttatgaggccaaggctgatggatttcttcccggtggtgcaagtctccatagttgtatgactccccatggtcctgataccaagtcatatgaggctaccattgcacgaggaaatgatgtaggaccttgcaagatcactgacacaatggcttttatgtttgaatcgagtttgataccccgtatcagtcaatgggcctcagaatcaccgttcttggaccaagattattaccagtgttggattggcctgaaatctcattttgcagttactaagacgtctcctgaaaacccaagcttgggaaatggagattgaggagtgaaatgggtgttgcgacacaggcagttagaccaccaaaagattgggtttctttgtacataaaaataaatgtaattacaaaaatataatttaggtgtgtcaaaagtgaactcaacccaattggtgggaatcaaatggtttcaggcaagttttatgtacagtgcaagggactggaatctttaagatctgtcctaaagagggtctgtgttaatcacaatctataagttaggttgtttttggttgtgcgttattttcatgcaggattcctaagaagtaggagctcataacttttgatttaacaatcatttgaaatcttccaacggaaaacaaacacgtacttagacaaaaaaa

SEQ ID NO: 4833 - DNA, 974 bp, Glycine max
gtccatcccgcggttatgttgctgaaatttttggtactcgttttcaacttcctgatctgggaccaataggtgctaatggtcttgcttccccaagggatttccttgttcctactgcttggtttgaagataaatcttatcctgggtacaccatagtgcagaagtttggtggtgaactctttgatgcagtacaagatttctctcccttcaatgttgttgcttggcatggtaattatgttccatataagtatgatttaagcaaattctgcccttataatacagttctgtttgatcatagtgatccatcaatcaatactgtgttgaccgcaccaactgataaacctggagtggcattgcttgattttgtcatttttccacccagatggctggttgctgagcatactttccggcctccatattatcatcgcaattgcatgagtgaatttatgggccttattcatggtggctatgaggccaaggctgatggatttcttcccggtggtgcaagtctccataattgtatgactccccatggtcctgatacaaagtcatatgaggctaccattgcacgaggaaatgatggaggaccttgtaagatcacggacacaatggcttttatgtttgaatcgagtttgataccccgtatcagtcaatgggccctggaatcaccgttcttggatcaagattattaccaatgttggattggcctgaaatctcattttacagttactgagacatctcctgaaaacacgaactagcggaatggacagtgaggagtgaaatgggtgttaaaagtgaactcaaccaaaagattgtggaatggacaattagaccaccaaaagattgggttgttttgtacatgtaattaaagaaatataatcgagtttaatgtttatatactaaatattggaaaataattttatattatcatttaattataaattatcatttgaattacttttaaaaaaaaaaagaaa

SEQ ID NO: 4834 - DNA, 685 bp, Glycine max
aacgaaatcttcctctgaaatcatagtaaaatacatccccactgaagttcaagttcttgtgtgtaaaatggccaacattttcctacacaatgggggcaacacttgcaaggctaccctctatctcttattcataaccacaaccttttttatcgcaaactctgcaaggattctagatgaagtggaatcccaaccccaagccataggcaatctaccagcacctggagctaccaatccttcactcacaacagctccagtcaccaccacaccacagatagatcctgccaccactttgccaagtggccaaacatctgcacccaccaccatatcacagcaggtaggtcctgccaccactttgccaagtggccaaacacctgcaaccgccgccaccatgaaccctgctactacagaagactctggagaggaagatgataaccaagtagagccaccagttccagaaacagaagctccagctgctgtcactgcaccggctgaagaggaaactccagctatccctagtgcggctccagtgacaccaaactctgtggcaaaagagccatctttttctttcttcatgcatgacatccttggagggtcacgtccatcagcaagaggggcacctccatcagcaggcgacactgatgtcactggcctaccattctcaaagctcaacaacaacctcttacca

SEQ ID NO: 4835 - DNA, 2290 bp, Glycine max
  misc_feature (703)..(703): n is a, c, g, or t
  misc_feature (2236)..(2236): n is a, c, g, or t
  misc_feature (2246)..(2246): n is a, c, g, or t
  misc_feature (2259)..(2259): n is a, c, g, or t
  misc_feature (2262)..(2262): n is a, c, g, or t
  misc_feature (2266)..(2266): n is a, c, g, or t
  misc_feature (2268)..(2268): n is a, c, g, or t
  misc_feature (2277)..(2277): n is a, c, g, or t
  misc_feature (2280)..(2280): n is a, c, g, or t
  misc_feature (2284)..(2285): n is a, c, g, or t
gtttgtaagagtagaagagctgtatattgattcaatttcttgtttttccttcagaactcataagaattgagcaagtattgattttgattactaatgctgtggtgggttttggtcaaaatttcagaatcttaatggaaaactcagaccacgacgaacccgaaaagaagaggcctcatctcacctctgtctcttcccgcactcctcgaaactccatcaactctcctaccaacaacaaaactgctgacgcaggagtcttacagttccagaatcagcagcttgttcaacagatagacatccaaaaacatgctttgcatgatcttgaagaaaaaattagagaattaaaaggaaagcaaagttcctatgacgacttgttaattgcattgaaccaactctggactcagttggttgatgatatgattcttcttggaatacgagctgggagaggcaaaggcaaagacacattgcaacatttgactgacattgataatcctcaaggttcagttcctttgtgtcctgctgaggatatgtttctatgtagattaatccagaaagattccattaaaggaatcagtgatgatgagatcattagttatgttgaggaggcccttgctttgcgtcagtcatatacaagggagctgttgaaactcctgaaagataccattgatgatcagatgggaaagagcaggcagtatagctccagttntacatggagatttcggctcgagcttctgaagatgctataatccaaatgtctaagattgatgatatgacgaaagaggaggtagataatttccgtgaagtggttgatactctccatgcaaaacataaagagtatactgttgctattcaaaattctatcaatgagtgctcacaagatcaatctgagattaaacgccttgcaggtgagcttgatgagattgtggctgaacttgaagagagtagaagaaaactagtcaatctggaaatgcaaaaggatgcagcaataggaatgaattcccccaatgcagatgcagtgaatggaaacctgtctcctgaaaacattgctgacagaactatgggtttgcgtgaattgaaggattcaattgaggaagcaaagatagtggaggctgatcgtctttctgagcttcaagatgcacaagaagacaatcagaccttgacaaagcagttccaagatcttcagaatgaactgaaagatgataagtatgtatgcacttctcgaatatactctttggctaatgatcaacttcaacattggatgactgaattgacccgatataaaacatcagtagaatctctgcaggctggcaatgttcatgttgcaaaatgggagaatgaactaaatttgaaattggagtctgctgatagtgcaaggacagatccttggcaattctgaccataggattgatgacctagagcttcagttgcagaagtgtattattgaaaagaatgatcttgaaattaaaatggaagaagctaaacaggatactgggagaaaagatatcaaatctgagtttcatgttatggcttcagctttatctaaagaaatgggaatgatggaaggtcaattaaagcgatggaaagatgcagctcatgaggctgtatcattacgtgagaaagcacattcactaagagaagcattgagcacgaagacaagtgaacttaagagccttgcaaacaaatgtgctgaacaggttttggaaatcaagtctttaaaaacattgactgaaaagttacagaaggagaatcaggaattagagtttgttctggatatgcatggcctggagaattatgataaaagatattcggaagtaagagaatctgaaagtaaagctcactctcaagctgaaatgctgaaaaatgctttagatgagcatagcctagagttgagagtaaaagctgctaatgaagctgaagctgcttgtgaacaaaggctttctgccgcagaagctgaaatagaggacttgaggtccaagctggatgcatctgagagggatattttggagctgactgaggctgttaaagttaaagatgctgaggcagaggcatatatatctgaaattgagactattggtcaagcatatgaagatatgcagacacagaaccaaaatctgttgaaccaggtgatcgagagggatgactataatattaagcttgtatcagatagtgtgaagacaaaacaggcgcacaacactttaatgtcccagaagcaggcctcacctcaccaacttctcctctngaaatccagncgggttcccccgnganaacnangatcttttntcnctgnnttaat

SEQ ID NO: 4836 - DNA, 2436 bp, Glycine max
tttcaatccaactccaactcactcagatcatcaatcatgctatattgtcatcagtcatcttaattaccattaagggttggttagatcattcacattcaccctttgttcttttggtctaccctgtaaatcagctacgtaggccccccccccaaagggcacagactattgctgatgccatcaccattacaaggccacataacaccatttctccacctcggtgacatcctcttctcaaagggcttctccatcaccattctccacaccatcttcaactccccaaacccttcttcctaccctcacttcaccttccacgccatccccgacggcttatcagaaacagaagcttcaacactcgacgccgtgctcctcaccgacctcatcaacatcagatgcaagcaccctttgaaggaatggttggcttcttcggtgctgtctcatcaggaacctgtttcttgcttcatttccgatgctgcacttcacttcactcaacctgtttgtgacgagttgaagctcccgcgccttgtgctcagaactggtggagcctcgtcttttcttgtttttgcctcgtttccacttcttagagaaaagggttacctccccgtacaagaatctagattggatgagcctgtggtggatctcccaccactcaaggtgaaagatcttcctaagtttcagtcgcaggatcctgaggcattctataaactagtttgtcgctttgttgaggaatgcaaggcatcttcaggggttatttggaacacctttgaagagttggaatcatctgctttgacaaaattgcgccaagatttttccataccaatataccctataggcccttttcacaaacacttgcttacaggctctgcttcttctactagcttgttgaccccagacaaaagttgtatgtcttggttagaccaacaagatcgtaacagtgttgtttatgtgagttttgggagtattgcagcaataagtgaggctgagttcttggagattgcttgggggttagccaacagcaagcagccgttcttgtgggtgattcgacctgggctaatccatggttcagaatggtttgaaccattgccaagtgggttcctagagaatttgggaggaagaggctacattgtcaaatgggctcctcaagaacaagtgcttagccatcctgcagtgggagcattttggactcataatggttggaactcaactctagagagcatatgtgaaggggttccaatgatttgtatgccatgttttgcagaccaaaaggtcaatgccaaatatgcaagcagtgtttggagggttggggtgcaattacagaataagctagatagaggagaggtagagaagaccattaaaacactcatggttggggatgaagggaacgagattagagagaatgccttaaatttgaaggaaaaggtaaatgtttccttgaaacaaggtggttcgtcttactgtttccttgatagattggttagtgacatattgtcactgaaatctgctacatctagagttcactgatatctttactaacaatcaaccggccacatgtattgcaaaaagcaattcaatttatgaatcaacaaaatagactgaaggaaaaagctgtcatcaaattgtaattcaatcaaatgctgatatagcacataatatcagctaccaattcctcttaccttgtctacagtttacttgtacttttattagtctacaattttttgcttatactcctctaggtttatctgtagtgggataaggcttttattgtttgttgtttattccactaggtttatttcctaacattaaagattaggtttatactgtataactcatacatattgcctttgattttttatttttaggtggataatggatatatagctagtcgatttctatctaaaacagtctcttccctctttcttctatgtcatgccttccaatcttatgcttgcattcatatcaaacttggctagacgtgagccattttgatgcaaaactccacctaggtaggatatagaataagactactatgcatgcaattgactagctagtaaaaaatagtgtgtgcttcattgtcatattaaagcaaataatatttcagttgaggcacaacgtaaatgcccacctatatatatcaatctcatgttaaacttcttaaattatcctaccatttgtttgttgaaggaaagctcaagttgttctgcacctgttgtttccctatatcagaaagtcttatgttatctaccatctgtcgtttgttcaggcaaagcaccatttgaaagtaaaaaaacttattatgctttcttgattttcctcaaccaaaacaataattatgaaaaaaataaaataaaaggctaatatgtacagtcactgtcagagtccaataacattgtttcttgtccagttcacagctttattctgtttagacctttctgcaggtcg

SEQ ID NO: 4837 - DNA, 925 bp, Glycine max
gaattcggcacgagctctctctctctctctctctctctctctctctctctctctctctctcgcagatactattcaagagttgaaggaaatggctgaagcacaactacgagaccagcatggcaaccctgtcccactcaccgatcaatacggtaatccggttatcttaactgacgagcgcggtaatcccgtccaactcactggtgtcgctaccaccgctaccggcacagcaggttctgggtttgggtcctatggtaccggtgcttacggtggtggtgcaagtgcaaccaccgttgcagatcttttggcaacccaaccaaggagtggcagggaggctagagagcttcgtcgttcctccagttcaagctctagctcgtctgaggatgatgggcaaggtgggaggaggaagaagggagtgaaggataaaataaaagagaaactaccaggggtaggaggagggaataataataaggagcatgcacacacaacaactgctccaaccaccgccactaaccaccctgctgatcagcatgagaagaagggcataatggagaggatcaaagaaaaattgcctggccaccacacccactgaaaacctgcgttacattaccatatgtttgcgcctgtctgtcttatatatgtaacataaagtactatatatgtcatgggctgagtatcttgtgcaattatgctctttatattatgttcagaatatatatctgattatgtcactatcttgattcttttgaatcatgtatatggatgtgttccatcttctctttgtatgcaccttcgattaatatctcggcctcgatcgcatcagtgtgacttctgcttttattttataataataacgcttctttataatatcaaaaaaaaaaaaaaaagaatttatataaatattataattttttaaaatatttatttt

SEQ ID NO: 4838 - DNA, 911 bp, Glycine max
tttccattcattaccgaaacacaaatttacattaagcatagtacaaaacaatgaagaccaaactgctagcatttctcctcttctttgccttgactacaaaaccactactacttggagcagctggagctgctccagagccagtgattgatacatcaggcaagaagctgagagctgatgcaaattaccatatcatccctgcagtgcccttcaccatatgtggctttgttggctgtttcactggtggaggcctttcactagacagcatagatgaatcttgccctcttgatataataatcgagaaagccaatgaaggcctaccactgagattctcaccagttaacaccaaaaaaggtgttattcgtgtctccaccgatttgaacatttttttctctgattctgatgaaaggtgtccacaccattccactgtgtggatgcttgatcaatttgatgcctctattggacagacatatgtgaccactggtggtgttgttggaaacccgggtgagcacacaattctgaattggttcaagattcagaagtatgaggatgcttataagctggtctattgccctagggtgtgcccctcttgccaccatctgtgcaaggatattggaatgtttgtggatgccaataggagaatgcatctggctctcagtgatgatcccttcaaaattaagttcaaagaagcctgagatcaaagctctttcaaatgatggcaaaattaaatgacaatccatgaatacgtgtgtttataatgatcgatccttgaaattatatttctttgtgaagaattagtaaatgaataaaaaaattaagagtgtatgtttttgtcctgctgttacaactttaatttcactattaaataataaatacaatttttaataaaaaaaaaaaaaaaaagaaaaaaaaaa

SEQ ID NO: 4839 - DNA, 881 bp, Glycine max
ctcgagccgctttgatcctagtggcaccattttagtgacagcttccattcagggtcataatataaatgttttcaagataatgcctgcaagtgggactttgtcagcttctgttgttggtcgttcttatgtgcatttgtacaggttgcaacgtggctttactaatgcggttatacaagatatcagtttcagtgatgacagcaagtggattatgattagttcttcaaggggaactagccatctatttgccataaatcctcaaggaggacatgtaaatatccagtcctttgatgatagttttacggcaaaaaatagtggattaggcactacaactaatcatgcagttcgtcggtctcatagttcggccatgcaaatgcctaaacagcagagcctgtttgctactggccctccgatcacactttctgttgtaagcagaattaggaacggagctaatggctggagaggcaccgtaagcggtgctgctgcagctgcaactggtaggaaaaatgccctttctggggccattgcttcatctttccgtaactataaaggcaatgaaggcaacttttccaaggcaaagtatcaactgttggtcttttcacccactggttccatggtacaatatgctctgaggacaataactggtcaagattcagctgttgtttctggattgtcccctgcttatgaatccattccacaggctgatacaagattagttgttgaggctatccataaatggaatatatgtcagagtcatagtcggagagagcgagaagataatgtagacatatatggtgagaatggaatttccgacgtcaataaaatatatccagaggaagtgagggagaagatagacaccattagcccaaaaatcaagaatggag

SEQ ID NO: 4840 - DNA, 1022 bp, Glycine max
accagtatgcacccatcgaataccaatactaatatcttccatcacttaatagggcgaaagaaaaaaagagcttcttcttcttcttctctgcatcatcacaatggctgaagtacgttcacaacaaccccagcatgttcaagtccacgcaagcacaacacacacaccacaacaataccgttattaccaaggtggcgccaaaacacaacaccatggcggcgaaggtggcggcgttatgagcctcttcccggagatatccctcacgggctcccaactcctcgccctcctcgccggcgtccccctcggcggcatgttgctactcctctccggggtctcgctcatcgccagccttgtggggctggcggtggcgacgccgctcttcattttcttcagcccggtgctggtgcccgccgccttcgtcatagggatggcggtgaccgcggtgctggcggcgggcgcgtgcgggctggtggggctggtgtcgttctcgtggctggtgaactgtctccggcagatgccacgggggacgacgacgaagacgacgatgatgcggccggagcaggcaaagcggcacgtggcggacatggcagagtacgtggggaagaagacgaaggatgttgggcaagacattcagacaagggcacatgcacagggaacaaccgggatggtatagtgcattcagttatcatcagacaagaaaatggtttcagtttgtgtttatgtctatgacttgtgagataaacgtactagtatctatgtgttttgaattatggagagtttcattttgtgttccatgcacggttttaaaattgcatgcggttagctaaaacaaatctttgtgattgctaaaatgtgactgatgcaatcatgggattgccattgcggttgcagatctcagtttaaaaccatgttttcatgttgtgtcatcacttcctctggatctgctcatttacatgagttgttgaatattccatcatgtgtaatcagtaataatattaataatgcatgcatttttctttcggttt

SEQ ID NO: 4841 - DNA, 1203 bp, Glycine max
aattttctactatttatattgctccctatagaagccttttgtgctcccacgcgtccggctgcgagaagacgaccgagggagatatttctaactcccccaacacttccttatcttatatcttctcctcctccatctttgagattctcaaagaaacttctgaagatggctggcatagcattcggaagcttcaatgattctgtcagttttgcctccatcaaggcctacattgctgagttcatctcaacccttctctttgtttttgccggtgttggttcagccatagcctatgctaagttgacatcagatgcagctcttgatccaactgggttggtagccgttgctatttgccatggttttgctctcttcgttgctgtttctgttggagccaacatttctggtggccatgtgaaccctgctgtgacctttgggttggctcttgggggccacatcaccatcctcactggtctcttctactggattgcacagcttctcggctccatagtggcatccttactcctcaagtttgtcactggctatgatactcctatccacagtgttgctgcgggaattggagctggtgaaggagtagttacagagatcataatcacatttggattagtgtacacagtgtatgccacagcagcagaccctaagaagggttcgttgggcacaattgcacccattgccattggtttcattgttggcgccaacatcttagcagcagggccattctctggcgggtccatgaaccctgcacgctcctttggccctgctgttgtcagtggtgactttcatgacaactggatttactgggttggccctcttattggtggtggtttggctggtcttatctatacctatgccttcatccccaccaaccatgcacctctcgctactgaattttgatttcatggtccacattgttgccttgtgttaatttctgattcgtaataaagttggagtacgtcattgttttctagcttgtaagaattcatgaggttggtaatctagtttttctttttcttaaaaattatatttttcagatttatggctttccctagtatagtgttgcattgattaacatctatcaaatgaggagaagcttacagctgtttttagataatcattctcaacttttatctacatgtctggatattaccctgaatgttaagatagtataaaaacttttgaactcccctgatt

SEQ ID NO: 4842 - DNA, 1805 bp, Glycine max
tcagctacgtaggccccccccccgctggtccattcccaactacgatgcgtgtgagcttcagattctgaagagagagagagtgaagactcaaccgacgactctctctctctaactcgcattgtgttccgttgtgttctgtttcagatcgtggttcgtcacttcgttgttcgtgaagttggttcagattctaactgttctattccctcatcaagagtcatgagcttgttctgaggtctgattagcttgctaattgggttggagaaatcattgagttaaaagagagaaatgggagctattgctggagaagagctgctgaaatgggagaagatgcaaggagtgagcagtcgcgaagagaagattctggtgtcaataagactgaggcctttgaatgagaaggaaattgctgctaatgaatcagcagactgggaatgcattaatgatactaccatcttgtaccggaacacgctgcgtgagggttccacatttccaagcgcctacacatttgagtatttcggggtgattgtgtcacaaggcaggtatatgaggaaggagccaaagaagttgctctttcagttgtcagtggaattaactcaagtatttttgcatatgggcaaacaagtagtggaaagacatacacgatggttggaataactgaatacgctgttgcagatatttttgactatataaagaggcatgaagaaagagcatttatattgaagttctcagcaattgaaatttacaatgaaattgttagagacctcctcagcacggacaacactccacttagactacgtgatgatcctgagaaagggcccattttagagaaactcacagaggagactctacgggactgggagcatttaaaagagcttctagcctacagtgaagctcagagacaggtgggagagacatacctaaatgaaaagagttctagatctcaccaaattataagattgacaatggagagttctgccagggaattcctgggcaaaggcaactcagcgaccctagtagctagtgtgaatttagttgatttggcagggagtgagcgcgcatctcaggcatcatcagctgggatgagattaaaagaaggttgtcatataaaccggagtttacttactcttggaacagttattcgtaagcttagtaagggaagacatggacacatcaattacagagactccaagttgacacgcatactgcagccttgtttgggtggaaatgctagaacagctatcatttgcactttgagccctgcacgtagccatgttgagcaaaccagaaacacacttctttttgcttgttgtgcaaaagaggtgaccactaaagcacaggttaatgtcgtgatgtctgataaggcattggtcaagcatttgcaaaaagaggtggctagattggagagtgagttgaaaactccgggtcctgctacctccaattgtgattatgcagcattattgagaaagaaagatcttcagatagaaaagatggagaaggagattagggagctaactaagcaacgtgaccttgctcaatcaagggttgaggatttgcttcgcatggttggaaaggagcagatatctggaaaagtagtttctattttgtaattgctgaaattgttttatatatttgagatcatgcctctaaattgggattgtttttgttcaggctagcattaataatcatctgaatctgcaggaaggggaagatatctgggaagatgactgttcagtatcagagtcatcaagcatttgtggtcctcatcgtcctaatacacacattagagagttcaacaatcctcattataa

SEQ ID NO: 4843 - DNA, 1239 bp, Glycine max
tcgagcagctacgtaggccccccccccccggactcaacaagaattacatacatacattattcactgaatagaaatctaaaagtctttggatttgggttcggatctgttccaaatttccaatatatttcagagagaggcagaaaaggaagaagtaaaggagatggtgggaccagtgaggcctcagtttgtgctctttggctcttccattgttcagctcagtttttctctccaaggttggggtgctattcttgctcacttgtatgctcgcaaggccgatataattctgcgaggatactctggttggaattcaaggcgtgctgtgcaagttctggatgaaattttcccaaagaatgccactgagcaaccagaattgataattgtgtactttggtggtaatgattctcttcttccgcatccaagtggccttggtcaacatgtacctctgcaagaatacattgaaaatatgagaaagattgctatccatctgaagagcctttcaaagaagactcgccttatatttctcggtgctcctcctgtcaatgaggcacaaatttatggaaccagtgtgctacaagggcagcgattaaggaacaatgaatcttgtcgaatatattcagaagcatgtttggagctgtgccgtgagatgaacatcatggcaattgatctgtggtctgcactccagaaaagggttgactggagagaagtttgcttcacggatggaattcatcttacttctgaggggagcaatatagtggcaaaagaggtattgaaggtcatcaaagaagcaaactgggaaccttgcctgcactggaggtcaatgccaactgaatatggagaagattcaccttatgatcctgttggccctgatggaaagacaagtttaaatatctccaactggaccttccttgaaaccaaggaatgggactagagttatgtgtatttgaaaactatagacatgccccattacatagaatcctaagcaataaataatcacaaaataacaggaatttagaactgtggctaaaggaaaatatatctgcatcatttttcactggtttttcaccatgtgagtgggatgaattggtgactataattgcactttgattgagccaattggctaaaaaaaaaaaaaaaaaaaaaattttgtctttcgctaaggttatatactatacttatactggattggtggagccattatagttacgaactcatatgatcattgtggcctgtaaaaaaaaa

SEQ ID NO: 4844 - DNA, 833 bp, Glycine max
acaaaaccctttgagacttgatcttccttaaaccctacgcacgccttcgttgttctcgtagacttggaattttttcattcccaggcggcgatggcggattcttcaagcaactcaaaggatcaccacaacacgcgcgtctaccacccttaccaggacctcaacgtccccatccagaagctctacaacctccccaccgcgccggagcacctcttcccggaagaagccgccaggacccaccgctcctggggcgacaacctccaatactacactggctccggctacctcgccggtgccttgatcggagccgccaggggcaccgtccagggcctccgtgaggctgagtccggcgactccctcaaaatccgactcaaccgagtcctcaactcggggggccacgcgggtcgcagactcgggaactcgctcggcgtggtgggcctcatcttcgcgggactcgagagtgggatgacctacttaaggggcaccgatgacctcgtcaacagcgccgtcgccggactcggcaccggaacgctctttagggccgccgccggaccccgatccgccgctattgccggcgccatcggcgggatcgccgccgccgccgcggtttccgggaagcaagctttgaaaagatacgttccgatctaggaaacaattaggttaacgaccatggggatggtggtacaaattagattaatattttggaattaattgtcttccttttttttttatcattatagtgtttgttgctattagtttcatattgcagttgtaatttgtaaaaccctctccataaattcatgtatttagttttaaagctaaaaaaaaaaaaaaaa

SEQ ID NO: 4845 - DNA, 1633 bp, Glycine max
tcgacccacgcgtccgcattttcatccctctcggtgctgtgtttagcttccttcttcttcttcctctttcttcttcttctgctgcacccacaaatcaaaaccccccttttccaacccaatttttctccataaaccctagattcaacgaacccgccgaccaagctcgaacctcacgtcgcaaaaaaacacttcttttcccctctccgaggttgtcgtgtcggagcatagccatgttgttccctcgaggaaattgatgatttttcataacattggggtctcgttttgcttgtggggtcaccttgaaggagggaaaagtaacgagctttggggctgaatcgtggtgggtctgttgagtatgcatagatctggagctacgatggcgtggaacgtgttcaagttctgcactgctctgcgtggattgggctcgatcatgatcctgttggttcttggcgttgttggtgccacttactatgctgttgttttgaccaattatggccctgctttgtatgctggaggacttgattctcttgttgccttggcagtgttgatcttgtttcatagcttgttggttatgctgttgtggagttacttttctgttgtttttaccgatccggggagtgtccctccaaactggaagcctacaattgatgaggaaaggggagaggctgatccgttggttgggacagagtttagtaatctgccgtctgatcccaatccacgggttcggtactgtcggaagtgcaatcagctcaagccgcctcgatgccatcattgttcagtttgtgggcgctgtgttttgaagatggaccaccattgtgtgtgggtagtcaactgtgtcggggctctaaattacaaatgtttccttcttttcttgttctacacttttcttgagacgactctagtgactgcatccttgctgccacatttcataacattctttagcgatggagaaattcctggaacacctggctctcttgctacaacttttcttgcttttgttttaaacctagcctttgcactgagcgtcttaggatttctcatcatgcacatatctttggtggctgctaatacaaccactattgaggcatatgagaagaaaactactccaaaatggcgttatgaccttggtcgtcgaaaaaattttgagcaggtttttgggatggacaagaagtactggttcatccccgcttattcagatgaagatatacgaaagatgccagctctacaaggtcttgactatccttcaaaacctgacttcgattcccaatagttcttctgacagctaatatatatccacatcatgtaacaaaagtcatggagactcttcacaaccctatacttcactctctaacacaatgtagtgtgtaagtaaatgtgcccccctcacaattcatctgcaatgactcctagaatgatgtcttgtttatttttatttttttttaaattgttttttaaaggtgcttgtttcatgtcgaaatgaagggagcaatggggggcagggtggtgtgatgctggtttgaggggctaatgtgtttatgttcccttaatgataacaatgcaatattctcacctttcctttttattcaaattttgagtgaaatagcaattattttagtgccgaaattaaaaaaaa

SEQ ID NO: 4846 - DNA, 1185 bp, Glycine max
tcccacgcgtccgtacggctgcgagaagacgacagaaggggattctgattctgtccatccaaatcttaaaaatattcagtgaagatcaacctcaatggcatctcttggcgtgcgaccagttcttccccctccattaacttccatctccgacccacctcctcttttcgatggcaccaccaggttgtacatcagttattcttgcccctatgcacaacgtgtgtggatcgctaggaactacaaggggctacaagataagatcaatttggtccctattaaccttcaagacaggccagcttggtataaggagaaagtctaccctgaaaataaggtgccatccttggagcacaatggcaaggtgttgggagaaagtcttgatttgatcaaatatgtagatgcaaactttgaagggacacctttgtttcccagtgatcctgccaagaaagagttcggtgagcaattgatatcccatgttgatacattcagcaaagacctgttcgtttcattgaaaggggatgctgtacagcaagccagtcccgcttttgaatacttggagaatgctcttggtaaatttgatgatgggccattcttgcttggccaattcagtttggtggatattgcttatattccatttgttgaaagattccaaattgtctttgctgaggtgttcaaacatgacatcacagaaggaaggcctaaacttgcaacatggtttgaggagttgaataagctaaatgcttataccgagactagagtcgatcctcaggagatcgttgatcttttcaagaaacgcttcctgcctcaacagtgaacgttgtattgctgcaggcttcctctaaaatgtagactctgcccatatagcgtcctttcattcacgggatgggatgcatctgcagtcaaatgtcggttgtgtttatctgccagagttgcaggatagtttgaagtcataatcacgttcatttttcagcttgtttgtttgatgtcataataatgtttatgtaccagtttgtgatcactgatcaatatgatataatgaccaatatggtattattatcctatttgaactatgttatatcacgtactaagctatgatatctcaagtgtccgtgacctgtcagcaaaggtttattgcatgaaaattatgcatggttaacaatatatcacctcgcaaattttaatattagttaa

SEQ ID NO: 4847 - DNA, 1159 bp, Glycine max
ggtccggaattcccgcgtcgccagacaccattctgattttgtccatccaaaccttaaaaagattcagtgaagaacaacgttaatggcatctcttggtgtgcaagcagttcatcctcctccattaacatccacctccgacccacctcctctttttgatggcaccaccaggttgtacatcagttattcttgcccctatgcacaacgtgtatggatcgctcggaacttcaagggactaaaagacaagatcaatttggtccctataaaccttcaagacaggccagcttggtataaggagaaagtctaccctgaaaataaggtgccatccttggagcacaatggcaaggtgttgggagaaagtcttgatttgatcaaatatgtagatgaaaactttgaagggacacctttgtttcccagagatcctgccaagaaagagttcggagagcaattgatatcccatgttgatacattcagcagagacctgttcgtttcattgaaaggggatgctgtacagcaagccagtcccgcttttgaatacttggagaatgctcttggtaaatttgatgatgggccattcttgcttggtcaattcagtttggtggatattgcctatattccatttgctgaaagattccaaattgtctttgctgaggtgttcaaacatgacatcacagaaggaaggcctaaacttgcaacatggtttgaggagttgaataagctaaatgcttataccgagacaagagtcgatcctcaggaaatcgttgatcttttcaagaaacgtttcctgtctcaacagtgaaacgttgtattgctgcaggcttcctctaagatgtagactgagccaataaagcgtcctttcattcaatggatgggatgcatctacagtcaaatagaagttgtgtttatctgctagagtcgtaggatagtttgaagtcataatcatgttcatttttcagcttgttttgtttgatgtaataataatgtttatgtaccagtttgtgatcactgatcaatatggtgtaatttatcctataatttatcctacttgtgtagttgtgttatatctcaagtgtctgtcaacaaaggtttattgcatgaaagttatacatggttaataatatatcacttcactaacacgttgattgattaattaacaagctta

SEQ ID NO: 4848 - DNA, 589 bp, Glycine max
ggaagcatatttgagactaactcggagagaaagagagagagagagagaaaaatggctgatacaagtggaggagatgcagtgagaccggtggtaatatgtgataacaagtgtggctgcacagttccatgcactggtggttccacttgcaggtgcacaagtgtcggcatgacaactggaggcggtgatcacgtgacatgctcgtgcggagagtactgtgggtgcaatccatgctcatgtcccaagactgcggcttctggaactggttgcagatgtggcacagattgctcatgtgcctcttgccgcacttaacatcataccttaattaagtctcaaacttcacaaatcttgaatgtgctttaaatctagctatgtactagatagtctcgttcaatgttagtgttcaaattgtggatgtgatttctaatattagtctactactctatatgtagaggcctttctttatgtggaataggtataacatgctgttatgcccgttttgtacttgaaaactatcttataatgaataagaatatgtgaattttgagtattataaaaagaaaaaaaaagggcggccgctggtggaaaaaga

SEQ ID NO: 4849 - DNA, 617 bp, Glycine max
tacggctgcgagaagacgacagaaggggaagcatttgagactaactcttagagagaaaaaaaaatggctgatacaggtggaggagatgcagtgagaccagtggtaatatgtgataacaagtgtggctgcacacttccatgcactggtggttccacttgcaggtgcacaagtgctggcactgccacaggagggggtgatcacgtgacatgctcgtgcggagagcactgtggttgcaatccatgctcatgtcccaagattgcggctgctggaagtggttgcagatgtggcacagattgtgcatgtgcctcctgccgcacttagtatcacaccttaaggcttaaacttcacgttttattttatgtcttcaaatcttgaatacgttttctatatattagtcttgtttaaagttcaaagtgtggacgtggtttctacttagtactcaaacgtattagtaattggtatcaaaactgtccaacaacagtctattgagaatggtactttctcttcgatttttaccaataaaaaaaatcttcgtttaacatattggtatatctcgttttgtatttctaaataatcttataagagtatgtgaattttgaataaaaaaaaaaaaaaaa

SEQ ID NO: 4850 - DNA, 1425 bp, Glycine max
accaggttgagaaggggttttagaagtccacatttttcagatttgattcgcgttcctcttctctcttctcatcatcaatggcgacccccattcctccccctcctgccgccgccgccgccgccaccaaggtcgattacttgaaccttccatgtccgattcccttcgaagagctccatcgcgaagctatgatgtctttgaagccagatctttttgagggcatgcgttttgatttcaccaagatgctcaatcagaagttctccctcaatcacagcgtgttgatgggacctactgaggttccttctcagtccacggagacaattaagattccaactgctcactatgagtttggctcaaccttcattgatcaccctaggttgttgctctggggcagaattttgactgatgggaggctcaatgccagagtcaagtgtgatttgtccgaaaatctcacttttaaagccaatgctcagctcacaaatgagccgcatatgtctcatgcgatgatcaactttgattacaagggaaaagactataggacacaatttcaacttggtaatggagccttgctaggagcaagttatattcagagtgtgacacagcatttatcattgggtggggaggtattttgggctggtcagcatcggaagtctggtattggttatgctgctcgctacaacactgataagtcggttgctacagggcaagttgctagcactggaatggttcttctaagctatgttcagaaggtatctgagaaggtttctctagcatctgagtttatgtgcaactacttgtcaagagatgtcacagctagctttggttatgactacatccttagacagtgccgccttaggggaaagattgattccaatggctgtgtcgctgcttttttggaggagcggttaaatatgggtctgaattttattctttctgcagagcttgaccacaggaaaaaggactacaaatttgggtttggtttgactgtgggagaatgaataaaccgaactggagctgtgttttcattgctgtacccagcttagcaagctttcttgcatctttttccttgttggagatttttctttccaaaaaagaaaagaggaaatatcgtttgtgtcgggaaacactatttacaatccacaagtagctgcagaattttcaatagtcatcaatttatttggaacttgggcagaaaaaactcgatttatttggatctattgccctgttttcccttgagggggatgtagagtgatatcagtttaatccatattgtgagatcaatttccataatgtttcaaaaaaaactgtatccggccctgtcctatacttaagtttaaatgacccatgcatgcatgggatggaatcgtcgcagcaagaatgacttggtccgtcatttttctggctgaattcaatgcatactttagtgat

SEQ ID NO: 4851 - DNA, 1171 bp, Glycine max
  misc_feature (1164)..(1164): n is a, c, g, or t
accggtaccggaacttccccgggtcccactactctgtgttatattttgtcctcttattctcatctgatctcacgcacccacaccattctacactcccctctctcactcactcacactctcttctgtcatagctgtaccacgtttttcttctccatctcagcctctgtcccaacaccattctcatggctgctctagctctagcactgcttcttctggctttcactggcacttcaagtgctacatggtgcgtttgcaaggatggaagcgacgcgatcctgcagaaaaccttggactatgcttgtggagctggtgctgactgtaatcctctccaccaaaacgggccttgtttccagcccaacaccgttagggcccactgtaactacgccgtgaacagctacttccaaaggaagggtcaagctcaagggtcctgcgactttgcgggaacagccattgttactgcatctgaccccagctctggcggtacttgtgtctacccttctagtgtcagcgctgcaggcactggtacaactccagtgactaccacaccaaccatgggcaccactcctacaactggaactccatcaacaagcaccggcacgggcaccggcaccggcacaggcaccactccatacagcacaacacctggagtattaggaggcattggcagtggcatgggaccttcaggatccggcatgaatgacgaaagtcacggtggcattggacttgtacacagcagtagtttcttctcgatggcgctcttctctgccttcatgatgatgctctgctggggttgagaatgaaaataaatggggcttggcctgggtatatggtgcaaaatgccgtatgtcactgtattaatgtgaatgttattttctaggtgctgaacttgggacgttagtttttggggttcttataatctttttctccaccttccactagctattgggtttttgattaattaattggaattcggttacaatttggctccaacttgttcttaatcttaagctcctactctgtacaaagaagtgcataacgctgtcaattagatggatggacctggtgacaccaatgctatgtatttttcaacaaaaaaaaaaaaaaaaaaagaaaaaaaaaaaaaaaaaaaaaaaaaaaaaaaaaaaaaaaaaaaaagcggccgtntagagga

SEQ ID NO: 4852 - DNA, 849 bp, Glycine max
  misc_feature (781)..(781): n is a, c, g, or t
  misc_feature (818)..(818): n is a, c, g, or t
tggtgagtaacgctaacactggcaaaggcaagatgattcagacgtatggattggtgtatgcttcaggaaggagttaaaccgttcattatggtcttgtcttcccccaacaaccgtttccttctcttttattcatgacacaccacactctctctcacatcttccatctcctccatctttctcacacttttctcccacatcacaatcacatcattacgttgcattaatacaatggaccaaacaaccgccgctgccaacgaggttgtccgcgagttccccggcctcctccgcgtctacaaagacggccgcgtcgagcgcctcctcggcaccgaaaccacccctcccggcaccgaccccggcaccgccgtccaatccaaagacgtcaccatcaacgccgaaaccggtgccggcgtccgcctctacctccctcccaccgccgccgcccaaaaactcccccttttgatctacatccacggcggcgccttctgcgtctgcaccccctacaaccccgcctaccaccaccacctcaacgccctctccgccgccgccaacgtcgtcgtcgcctccgtccactaccgcctcgccccagagcaccccctccccgccgcatacgacgacgcctgggaggtcctccagtgggtcgccgcctccgacccggagccctggctcaactgccacgccgatctaagcaccgtcttcctcgccggcgacagcgctggagccaacatcgcccacaacaccgccatgcgaggcaccacacaaggcttcgggaatttaaccctcnaggcatggtcttgcttacccatacttcgggacgatanaaagacgagcttctggagtatctatacccta

SEQ ID NO: 4853 - DNA, 1134 bp, Glycine max
cgaagaacaaactcatagacaacctcaaacttcaaacccagaaaaagaaaataaaatcaactttcattccgtttctttctttctttccctttgccaaattttacattaattacatgacatggcataatacacatcacaccaccctctctctctatatataccgtacctctcagattcagacagaaacccagttgcttccttttattcctgtaatccatgaaataaaattgctagcttaatagtgatccgtatagaagactagggaacttgtttgctatggcaactctgagcaattcaactaatatcttttggcaagattgtcaaataggaaggcctgaaaggcagaagctacttaaccaaaagggatgtgttgtatggattactggactcagcggatcaggaaaaagcacattggcatgctccctaagcagagaactgcactcaaggggaaagttatcttatgtccttgatggagataaccttcggcatggactaaacaaggatcttggttttaaagctgaagatcgcactgaaaatattcgcagaactggagaagtggcaaaactcttcgctgatgctggtttaatatgtgttgctagtctgatatctccttacagaagagatcgagacacttgccgtgccatgttacctgatgcaaattttattgaggttttcatgaacatgcctctagaattgtgcgaggcacgagatccaaaaggcctctataagcttgctcgtgcagggaaaatcaaaggttttaccggcattgatgatccttatgaaccacccataaactgtgagattgaaataaagcaggaaaatggggattgtccaacacccactttgatggctggacaagtagttacttacttggagaataaaggatttcttgaatcctagggtttttaagtttaatcacatttgtaatgggattattctctcataatgatgtttcttctaaatgaagttaaaaaaggaatcctaggaagtgcaggtagcagagtggtgagaggataaatggactgataaagttcatcaatcataaataataattaataattgttgcaattcattctataggttggtcaagaatttcagcgtatttttcggcgtttgataaaaaaaaaaaaaaaa

SEQ ID NO: 4854 - DNA, 928 bp, Glycine max
  misc_feature (909)..(909): n is a, c, g, or t
  misc_feature (911)..(913): n is a, c, g, or t
tggatactactttccttatcaattttattgtattaattctagatgcgctcagctacctaggccccccccccccagttaaattatcatattgagactctagggaggagccattcgccaagaactgtactacctcctcaaagatgagaatgatgttcatttcacatttgggagcataggtggaaatgggattaatcaggcaagccagggcatggccttgtcgaaattctgcctcaacattgcaggggataccccatcctcaaatcgcctttttgatgccatagtaagccactgtgttcctgtgatcatcagtgatgaaattgagctaccctttgaagatgacttggactactctgacttttccataattgtccatgcctctgacgccatgaagaaaggctacttgctgaatctcctttgttcaatcaagcgtgatgagtggaacaagatgtgggaaagattgaagcagattacacaccactttgagtatcagtatccatcccaacctggggatgcagtgaatatgatatggctgcaagttgaacgtaagatatcttcgataaggttcaatttgcacaggaagaacagataccagagatcttagcttcgtgttaagactaactgaaatgctgagattctgttacattagaatctgctgaccttggtcagtcaagttcaacatgccagtggaagacacaaacctactcatgttttgccactagcaagcttctttttcttccttttaattttttctttttgctgaataacatattgttgatgaaaaatagattttatattttaatgtcgaagcatacctcattatttgtcctcttcttggcatatgaatcttaggaaaaactaaaagcaaaaaaattgattggaatatactattagtttaaaaaaaaaaaaaancnnnaaaaaaaaaaaaaaa

SEQ ID NO: 4855 - DNA, 1600 bp, Glycine max
atctatgtaacttcccactttgcgtttaccctttttactttatctctctctctctctcattcatttacaagttccaagttcagagttccattacacaacacaacacacctatttgtagttgtagacaagacctaggaagccacataaatagacccaagaggttaacttttaggcatattatgcgaacgaggagacgcctctcttatcttccaaccatgtcttgccggaaaagacaaaagacttcgccggacaaaacctccgattgcttcgactctctccctgacgacctcgtcctctctatcctctgcaagctcagctccaccgccacctccccctccgatttcatcagtgtcttaataacgtgcaagagactaaactccttaggccttcactctcttgtcttatcaaaagcttcccacaaaacattctcagtcaaggccaaaaactggtgcgactctcttcaccgtttcctcaaacattgtgccgacgccggaaacattgaagcctgttacactctcggcctgattcggttttattgtttgcaaaacagagggagcggcgcggcgctgatggcgaaggcagcgatgaactctcacgcgccggcgctgtactcgctcgcggtgatacagttcaacggaagcggcggcacgaaaaacgacaaggaccttcgagcgggtgtggcgctttgcgcacgcgcggctttcctcggtcacatcgacgcgcttcgggagcttggtcattgccttcaagacggttacggcgttaaacaaaacgtaacggagggtcgacggtttttggtgcaagccaacgtgcgtgaactcgccgccgtgctctccgccgggaataacaagcgtccctggctgacgtggagccaccaacctgtcccccacccgaggctccggtcggaaaccgggtcgggttgtccgctgttaagtgattacggctgcaacgttccggcgccggaggttcacccggcgagtcagttcatgtcggagtggtttgatattcggggcgggtttccgagtgcgggtatgagactctgttctcaatcgggttgcgggcgacccgagacaaggaggcacgagtttcgaaggtgttcggtttgtggtgtggtgaactattgctcacgcgcgtgtcaggcgcttgattggaagtttcggcacaaggcggaatgtgctcccgttgagaggtggctcgatgacgacgacgaagatgtcgccggcgagaatgacggcggagatgacggagtaatgatggttgatagttagaaaactagactatttttacaaacgttaacggtgacggtaagcctgcttggaagtttcgacgggtatgaatctatttttaacatggggtaaaatggggggaaaaatctcatttattaccgtggctttgcaagtgcaacttcaatgacagggttttgcttcgacctcttttccttttacttttactgttgtatagaaccgtaaattaattctcctgaaaaacaaaatgaaggggatattttttattatagagcaactatcatccttaattaattgttaattctgcaaaattaaaatatatgaactttttatgtttgtcaaaaaaaaaaaaaaaa

SEQ ID NO: 4856 - DNA, 1338 bp, Glycine max
aactcacacacccttctcttctctctttcaattccttcccagctcttcattgaagaagctatggactttctaaacttcttgcttaacttgttggtccctccaggcagtatgatcaccttggctttctcatggcctgcactttgcttcctcaatttttgtgagtggctttgtaatagtatatatggtgaggatatggataataaagtggtcataatcaccggcgcatcttcaggcattggagagcaaattgcatatgagtatgctttgaggagagcaaatttaacgttggtggcccgcagagagcacaggctaagagggatcgctgagaatgcaaagagattgggtgcaagacatgtgatgattatggcagcagatgttgtgaaggaagatgattgtaggagatttgttaacgaaaccataaatgtctttggccgtgtagatcatcttgtaaatacagtgagtttgggacatacattctgctttgaagaagctacagacacatcagttttccctgttctcctggatattaatttttgggggaatgtttatccaacatttgtggctcttccttaccttcatcaaagcaacggtcgtattattatcaatgcatcagttgaaagttggttgcctatgccaaggatgagtttatatgctgctgcgaaggcagcattagtgaacttctatgagacactgagatttgagttgaaagatgaggttggaataacaatagccacacatggttggattggaagcgaaatgacgaggggcaagttcatgctggaggagggtgctgagatgcaatggaaggaagaaagagaagtgcaggtgacgggtggaccagtagaggagttcgcaaggttgatagtatcaggggcatgtagaggagatgcatatgtgaagtttcctagctggtatgatgtattcctactatacagggtgtttgctccaagagttcttaactgggcattcaggcttcttatttcgccacaagggacaagaagagcttcttcttatgtagggactggcaaacacatcgaagctgtgggtatggtgagacctatggctatgctggagggaacctcacctacacacaatgccattggtcctcttaccttctctggccagctgatcagccagcacaagctcgattaattccaacatcatatcctccagaaaattatgaagccatctactttttctatacatatatatgcttttatcatttattgcattcttgctatcaccatgcttcgtgaaactatgtcatgttgttggactttgttgtcaaaaatgaaaataaacttgtcttgattgccaaatccaaaaaaaaaaaaaaaa

SEQ ID NO: 4857 - DNA, 1110 bp, Glycine max
tctcgcggccgcctgcggcagcgccgctttctagtgagggtcttagtgtccgttcagcaacaattggtggagaaaagtatttgttaccatttggaggctataatgggaggtatagcaatgaggtttttgttatgagacccaaggcaaaggataccatgcgtcccaagatttttcaatcaccagctgccgccgctgctgcagcttctgttacttcagcttatgcattatctaagtccgagaagttggatttcattcaactagatgatataaattccaagttatctgcaaatggtcatcctaaagatgatgtcacggataaagttgaagccattaaagaagaaaaacggttattggaattgtcaattgctgaagtcagggctgaaaattctaagcttggaggcgagatagaagaaataaataatactcatgctgagttgaccaaggaactccagtcagtccaggcacaacttgtggctgagagatcaagatgctttaacttggaggccaaaattgcagaactccagaagttgctggaatcaatgcagtctgtggaagatgaggtacaggctcttcgtgaaaagaaatctgctctggaccaggagatggagctcgctgcaacagctgagaggaaaagttctggttggcgatggtttggtgggagtgaaacatgataaatatgtggccatgagggcaaatgtcaactaagagtgatttagagttgagtctgaggaacctcaactgcttatattctattactgtagttcatgcagaaaatgaaatttccttattaccgaacttttacggtgtcatcttttgatttgaaatgcatgatggactccaattttgaagaactgaagtctgaaactttcaagagatggggaacacaagtttttttttttttttttttgtatcgttaatttgtaccttgacaggtttacagtttacttttgactgattcatttcatgctcaagtgtccattaaattctataggatatacatttcattttattcatttgagtatatattggcatcttattcacatgttttattcccttataaatataattatgttcaatttttggttttgttaaaaaaaaaaaaaaaaaaaa

SEQ ID NO: 4858 - DNA, 1629 bp, Glycine max
atatacacaaagagagtgacgagaaagaaaaatggtgtggaatttgtccctgtcagcaactagggtagggttccctccgccaaacccaaagaaagagtagaagaaacctacaaaactcatctctataaacaactccgtttgtcactccggcggctttagcaatcactccctccgttttgcgttttggattcatttatctctatcttctgctgctttatcttaaaggccaagcgataaataacctctctctctctctctctctgtgagattgagaatccgatccttcgtttccgaaattctcgcgagatggacgagaacctgctcgacgatattatccggaggctcgtcgcggcgaagaacggtagaacgacgaagcaggtgcagcttacggaggcagaaattcgacaactctgtgtttcctccaaagagatctttctcagtcaacctaatcttctcgaactcgaggctcctattaagatttgtggagatgttcatggccaatactcagatcttttaaggctgttcgaatatgggggatacccgcctgaagcaaattatttatttctcggagattatgttgatcgtggtaagcagagcatagagacaatatgtttactcctcgcctacaagatcaaatacaaggagaatttctttcttctcaggggcaaccatgagtgtgcatccatcaatcgtatatatggtttctatgatgagtgtaagaggaggtttaatgttcgcctctggaagacatttactgattgctttaattgccttcctgtcgctgctctgatagatgagaagatcctttgcatgcatggtggactatcgcctgatcttaaacacttggatcagattcgaagtattgctcgtcctattgatgtgccagatcatggccttctatgtgaccttctatgggctgatcctgataaagatcttgatgggtggggagaaaatgaccgaggtgtatcatttacatttggggctgacaccgttgttgaatttcttgaacatcatgatctcgatctgatttgcagagctcaccaggttgtagaggatggatatgagttttttgccaagcgtcagctggtgacgatattctccgcaccaaattactgtggtgaatttgataatgctggtgctatgatgagtgtggatgacaccttgacatgctctttccaaatacttaaatcttctgaaaagaaagggaaaggtggatttggcatcaacacatcaagaccaggaactccaccccataagggtgggaagaattaacattcccgagctatacaaggtcagtgagctgaatggaggcattcattatttgtattaggtcaaaggcttatcgttctgctgcctggcattcacaacatataaagcatgacgccttccctccttggcaacgaaactaaagactggcaaggaacaaggcacttcgttgtgcgacttcgattgaccctttccctttctttctccctttctcctttctgatagtttttttttttttttttttaatgtacaatgcaaattcaaacttccatatggaggaatcctgaatatcttattttgtcgccagaattttaatttagattaaattcaaaatttcgaccctttcgtttttctccttgctta

SEQ ID NO: 4859 - DNA, 1756 bp, Glycine max
  misc_feature (4)..(4): n is a, c, g, or t
  misc_feature (53)..(53): n is a, c, g, or t
  misc_feature (1756)..(1756): n is a, c, g, or t
agcnacgtaggttcccccccccccaaaaatagacaaagagggataactgaagnaaattcacaagattctgataagcttggtcgaagggattctaaaagggactacttaaaggatagtttctgttcggcaccatgaaatgaaagcacctaaagttcaagattctttgtcttggggaaagcgaaagagccaacaagtggtagctgagggtgccggggtcatctctgctgcagtatcttcccctacgtaggcccccccccctggaaactttatgcatgattttggtagcaagatgagtaataattctgatggctctgttttagaaagtagtgaattagaaaaggtttcgttggaagcaaacacacctggagaaagaagtgtggtagtcaagaatgagatgagtgaaaaccagttggcagctaaggttatgcaacttcgtttgaagggaaagcatgaagaagctgacaaactgatgcaagaagcaaaagttatgaacacaaagcaaggaaatcaagatcattcaattagatcaggaactgagggaagttctagcaggtatgctatgcagaagatatcttctgagcagaagaaaggagaggatgatggtgatatgcatcttgctcacaagatcatgcagaacaagcagtttagggcttctactcaggctgatgatgaatatgactttgaggatggtccaagcagaaagagtagaaagaagcaaggaggtgatgatcacaagagtatccaaaagaagacaaatcgattcttgactcagcaagagcgctgcctattttgtttagaaaatccaaatcggcctatgcatcttgttgtttcaatcgcaaatttcacatatcttatgttgccaaagtggcagcctgtggtgcctggtcattgctgcattttacctattcagcatgaatcagctacaagaactgtagacgataatgtctggacagaaattcgaaacttcaagaagtgcctaattatgatgtttgctaagcaagagaaggaggtggtgtttcttgagactgtgatgggattggcacagcaacgaaggcattgtatggttgagtgcattcccttacccgaagatattgccaaagaggctcctttgtactttaaaaaggcgattgatgaagctgaagatgagtggagccagcacaatgcaaagaaacttattgatacaagtcaaaagggactgcgcaattcaatacctaagcactttccatattttcacgttgaatttggtctaaacaagggttttgtccatgttattgatgatgaaaagcagtttaacatcagccttggcttgaatgtcataagaggcatgctacatttggcagaggaggacatgtacaggcgacggcgctacgaggctgtggaggtacaaaagcaagcagttgaaagcttttccaaagagtggaaacattttgactggacaaaacagcttcatgaaacttaataacaaacattttacagattaggtcattttttatttaagaattaagttaatatacattaatatttgctcatgtgccgtgaaatgctgtaactttactgatagaaacgaattttgtactgaacacccccttttataataaaagtgaaataatgtttcgtttcataaaaaaaaaaaaaaaaaaaaaaaaaaaaaaaaaaaaaaaaaaaaaaaaaaaaaaaaaaaaaaaaaaaaaaaaaaaaaaaaaaaaaaaaaaaaaaaaaaaaaaaaaaaaaaaaaaaaaaaaaaaaaaaaaaaaan

SEQ ID NO: 4860 - DNA, 3456 bp, Glycine max
ggtgtgttgaggagggaatcaaggaatcttttgaagggtgaagagagtaaagaggtgaagtgttggtgggttttgctcagatttcttctctgtgttgagggtttgaatgctggggaatgggttatgctgcacttgaagtttctgtttactcagatgctgattacttagacttttaggggatgatattctgattagtgattttgggaggaaactggacatgagtatgcttgtggggatatgctcgaaccgcgagaatctgatatacctgtcctgtttctggtcctggttgtgcttcccttggtggcttacatcttacttggaaaatggagtgaaactagtaagaagagagataggataaatttgcttgcccatttggctgctgaagaagctctaagagctgaagaaatggccgtggctgatgtaattcctccagtgtctgcttcaaaaaatgaacatcatgtgtgtgctaggtgctctgctccagccagaactcgctgctccagatgcaaaattgttagatattgctctggaaattgtcaaataatccattggaggctaattcacaagcaagaatgccagcaactggaacctcataaatcaagctcatttcctctggctgtttcagttgaggaatttggtcatggggatggtagttacttttatgaaaatttgaacaaccagttcttaggtccctctttgaagcagactttaagggagagtgcacctttggactatttggttcaccctctgacgggcactgctgctcctactacagctgatttttctgtatttaataactttcaacattctgcttttgaaagaacttcccataaatccaacagagaaacattgagaagagataatggctctatatatgaatcttctattgaatcttctgattataaagctagcagttctctctcaagtgtggtaccaaaggaggcgtttatgagacagaagtcaagaaagagcagtgattctgtgttggaagaagaaatttcaaatgtcagttctggtggctttggagtttatattaacagatttgatgcatcaaaaaacatgatccatgagaatgacagccatcaaagtcaatatggaaatgcattggtaacaagacacaaatatggacgctcaaatgtgtcaagtgctgcaaacaatgataacggtgtagatgaatttgaaacggacatcaccactaaaggtgtaagtgtagtcaaagggggaaattatcattctgatgaagcagcacaatacaaacgcccttctgaatcgacaatcaaaggaagcatgaaagctaaaaagatattacatactcccaagaccaaatcttctaaatcaccaaagtcaacatcaaagacatcagctgacttttgttgctcagaaatagagaagaaaggaaaaactgcagatgaacttaaagttgctggaaatagtgataccatccctttacatggtaatggtagcaatgggactgcaaacactggaattatgaaaatgatgggcttgaggaaatcaacaaagcctactcctctagcctctacggaaagcatggacgtaaagtgcaagaaggtgaagaaaataaagatgttgtttccttatcgatgaatttgtaaagatttttcagagtgatgtctttggcatataccccaggggcctgttaaattgtgggaacagttgctatgccaatgctgtcttgcagtgcttaacttctacaaagcctctagtcatctatttgctttatagatcgcactcaaaagcttgttgtgctaaagattggtgtctcatgtgtgagttagagcaacacataatgattttaagagaaaatggggctcctctatctcctagtcggatactttggcatatgcggagcattaactgccatatgggtgaaggaagtcaggaagatgcccatgaatttttaaggcttctaattgcatcaatgcaatctatatgcttggagggacttggtggtgagaaaaaagttgatcctagaatacaagaaacaactttcatacaacatacttttggtggccgtcttcaatccaaggttaagtgtttgaattgtaatcatgaatcagaaaggtatgagaacattatggacctgaccttggagatattgggttgggttgagtcactggaagatgcgctgactcagtttacttcccctgaagatttggatggagagaatatgtacagatgtggaaggtgcacatcatatgttcgagctagaaagcaactgagcatacatgaggctcctaacatcttgactatagttctgaagagatttcaggaaggaagatatgggaaaattaacaagtgcataacttttcctgaaatgctggatatgattcctttcatgaccgggacgggtgatattccaccactttacatgctttatgctgttgttgtgcacctggacacactaaatgcatctttctctggacactatgtttcatatgtgaaagatctgcaaggcaattggttcagaatagatgatgctgaggtacagccagtgctaattaatcaggtcatgtcagaaggagcatatatcctattctacatgaggtcctgtccccgtcctccggtagaacatactatgaatgccatgcagcaatctgtttatgattcttcaaagcacaatccaatggaaatgcagaaacctaataaaccaggacatagtaggcatggcagtcgtcagttttttgtcccagagccatcacctaatactaggccagaaatcaccactcacattattgacaccaccaatggcttccttagaaaaagcaccaataggaatgccctgccggtgacccaaacttatgccgaaaacgtcaggcgtgagttttcagatgccacatcaagtgactggtcccttttcactagctcagatgaggcttctttcacaactgagagcaccagggactccttcagcactgtagactatggtgattcatgcaacatggatccaatttcatctatcttcaactaccccccagaaaagtcctacttgaagttttcacatagtaggccagttaccagggtcttccctgaaaagggtcatgttaaacaagtacagaggattgatcattccaaaagggtcagccattcttcttcaaatgaacatccaccaaatgggaattgtggcatgtatgtatattatgggagtaatcctgtgtgtggtactacccagacttctagtcagtgtgaattttagtctttggggaatcctaacttgttgaactgattattagatgcagtaggtgctgtgcctcaaagttttcaatacttagttgattgaggcatatagttcttttaagcacagatgtattttttttttgttattgataattgtaaagatgacggcatcgatcctttagttatctattaatccatcagtcttttcctagtggtaaaaaaaaaaaaaaacatatttgagactatttttaaacttgagtt

SEQ ID NO: 4861 - DNA, 890 bp, Glycine max
tcccggtcgggtgcagaggcccccccccgattcacgcagctgaataaagaaaaaagcctttcatagtgagatagccctagaaatgtttcgtgaatctttgtttgctctctttctactttctgccttctcctcctcactcctacctttaaccactgctcaagattacgttctcgacacggacggtcacgcggttgaaaatcacggtacatactatttgttgccagcgaaatcaggaagcggcggtggtggaatagaggtagccgcaactggcaaagaaagttgcgctctcactgtagtgcaatctctgaacgaggactccatggggctaccattgaagctttcaagcccatccatcactacgtctcacttcaccgaatacacttcgttgagcatcgagttcacttcggcgccggcgccgtgttcgtccgcttcggagtggaccgttgtcaagggattacccgaaggacgcgccgttaaacttaacgattacgggaacaccgtagagggtgactttgcttttgtatgtgctaagagagaattttaccgttgcaataaatcgtatcagcttattttctgtccatatggtcttatgaggtgtgaagatgttgggatctctattgacgatgatggaaacaggcgtttggtgatctccgacgggaatccattcctgtttaagcttcagaaagttggttcatcttcttctgcatgaagcacctccgtgtagtttctcctagtgagagacgtgtgcaagatgatgcttgataaataaatgatttggttgtaactaccgaaggattagataaaactaatcaaagcttatatatgctacgttttcggttgcttaaagaaaaaaaaaaaaaaaaaaaaagaaaaaaaaacaaaaagggggg

SEQ ID NO: 4862 - DNA, 1649 bp, Glycine max
tacggctgcgagaagacgacagaaggggatacacaatacttcctttcacagtgtcttccatcctcttccaactttcacactttcacttgctctctctttgctcttatcccttttcttttttcttcttttcctttgggttttctattctcagtttgcggtgtttgatagaaataatggatcggaacgggccaaagatcaaaagtacaattcttcaccatctctatgagaagcagagacagagcccttactatgacaatctctgtcgccctgtttcagatttgcttccatttattgccaatgggatcagaggtgtcactaccaacccagcgatttttgaaagagctatttcatcctcaaatgcctacgatgatcagttgagggaattggtaggggcagggaaggacatagaaagtgcttattgggaattggttgtgaaggacatacaggatacttgcaaacttctggagccaatttacaatgaaacagatggggaagatggacatgtatctcttgcagtttccccaaagctagcaaatgacaccaaggggacaattgaggcagcaaaatggcttcataatatggttggaagtccgtgtgtttacatgaaaattcctgccactgatgaatccatctcttccatgaaggaggtcatttctttggggataagtgtaaatgccactctcatattctgcctccctaaatatgaagcagtgattgatgcttacttggatggccttgagtcttgtggcatgactgatctctctaaggtttcaagtgcagcagcattctacatcagtagagtggatgttacacttgacaagaaacttgagcaaattggtactactgaggctcttgatctcaaaggaaagggtgcggttgctcaagcagtcttagcataccaactttaccagaaaaaattttctggtccaagatgggaacgcttggagaatagaggtgccaagaagcagaggttgatgtgggcttcaacaaatgtgaaaaatccatcttaccctgacacattttatgttaattctcttattggaccagatacaatttcaaccttaccagtacaagctcttcaagcattcatggaccatggtattctttcaagaactcttgatgcaaaagtatcagaggctcaagacatttacaatgcaattgagaagttggggattgattggagttctgttggatcagaactggaacatgaggtgctggattctttcacaaaaagctttgacaatgtgcttgaatgcatgcaaaagaaggctaagcttagggatttcagcagagcatatgaaccgtgctttcaggataactagtacaagtctaagacaaaaatattcggaacttgtttttttctgcgacacttgttgcatatgcagcatgcaactgatgcggttgaagcttagaactttggcgtgtaactaaaataatattatggagtatggactataaataaaattaaagcgattatagcatataagaaaaaaaaatgtagtagtggtaagcgtgggatgtgttgggatgagtttatctttgttcttatctgacccagaactttgttaggtcagtttcttgaatctgaactggtcccaatcaaggcccgaaaaatttagaataaaatcaggtcccccggtttccctatt

SEQ ID NO: 4863 - DNA, 1694 bp, Glycine max
  misc_feature (133)..(154): n is a, c, g, or t
  misc_feature (429)..(434): n is a, c, g, or t
ccacaacttcactttcttgtcagcactggctgtggctaaaaccaaaacttgttcatttcctgcaaaaggcaccacaacaataataagcaagacaacaaaattacatgctggttagcataccttataggcatcnnnnnnnnnnnnnnnnnnnnnnaacaatgtcattttaaatcaaattcattgtatgttatctaaattattttgtaatatcttctaacactgattagcaaacaagatacaagaaacagatttggcaataatggaaatttcttgagaacaataaattaggtaaagaaccaaaagcaatggagtcagagtagcagcttacccattggaatgggtttaggagcccatgaaatgcatgaaatgtcacctgcaagtgaagaaaataatcaaggagttgaagatcacagatagaaaattacttgnnnnnncagttgcaattaaaggaaatatcaaaatggtggatgcttggacatactatcatgggctttttcagctgtatccagaacctttccagtctcaacacataaccactgcaatgtggaaccatgggtcgcagccaaaaaatttccatcaggggaaacactcatgcgatcatagtgcaatgtagtaccggaagaatcatgaagaggaattgggaacacctttagcgtctttggatcctcatcaagatgatagcgaacttcgggattccatattctcattgaaccatccttggatgcagtgattatttgctcagagtttggcgtaaagcataaccaagtcacagcactcttatgcccaataaaaagcataacatttaaaacttccttcacagatccatcctttgcatatacaatctcccagatcttcacatcggcagtaaatgctgctgctgcaataaaacgaccgttgggtgatatagtagccatgttatttttcaattgatttgtatcgacatgcccaacactcttcccagtttttccatgccaaagaatgatgtcagtcccttctgaacatgaggcaacaattgtacttccatccgcagtgccataagttgcggaggctccaaacatagtaattattgacttcttatcatgaactttgtgatgctcccacttaatttcggggagaggaagctttgcttgtggtttgtcttcagaggttttaggtttctcttctccatacatgtataatgaacagccggacagagtataagacgccacaacaatggaggatgcatcatcagaaaatgcaactgctgttggatgaccaccggctggcaaattaatcctcagaaacttgaaacttttacttgaagcatcatccaacttaaatactctcacaactccatcagcacaagctgttgccaaatttcgtccatcgggggagaagcatatccctgtcactgcatcaccatgacccttcaaggtattcaaatccaacggatgatgtcgcttgttttgatccttgtcggaggaatggggtttggagagaggcttcttgggaggggctttagaggataagggtttgggattgggatcggcgatagattggatttcggattgccgcttccggtagtaggtgctgaaaaagagaaatgcgatgatggcacccaagagaagcgataacgctacaatgggtaacgctggatccattgtcaaagtggggcccccgtatgctgactcgagggggggcccggtacccaatcg

SEQ ID NO: 4864 - DNA, 787 bp, Glycine max
  misc_feature (712)..(712): n is a, c, g, or t
gaattcaatatcaacacaaatgataattaataaataaaaaaaacgccctttcgtggtcgtttcgcccctttccacgttttcatactttgcgcaccaatcttgctctctgctttctctcgatcagggtttcccctcgtctccgagctcgtttcgttctcgaagaatcgatctgcgataatgactcgcggtaaccagagggatcgtgatcgcgaaagggctcaggctagaaccggtggtaaaggcaagcagaaagatgatgggttgacccctgaacagcgcagggaaagagatgcgaaggcgctgcaggagaaggcggcaaagaaagcggcacaggatgcaggagggaataatgcaggtggaaccaaaaaataggcaataattcaatgagtggtttgagttcgacattgttgtttgtagacatggaatttatggaaaatttatgttgcgttattcgtggagtatgatgtgtttattaatgtaatttgtgacagatgaataaataagttgtgcttctttgaaaggtgttgtcgctggggggctgaatcaataacttgtatctttgtttggaataaatagtatttggcaatgatattgtgtttgctcccctgtcttaatatctgaatggtttgctgttgctacttttgtgatgactcattctgtgccaaaaaaaccacccccccaacaaaccacccaacggaacaaaaaaaaaaanggggccccttagggccctcagggggcccccctacgggaaaccttcccccaaatcaagtttttgggggccaggggg

SEQ ID NO: 4865 - DNA, 783 bp, Glycine max
tcttgggaattgtgttaagtagtcattggcaacaaggatattatataaatatattctgccctttccggggccgagaacgttttcatactttgcagcatccattcttgttctcttctttctttcgatcagggtttcccctcgtctccgggctcgtttcgttctcgaataatcgatctacgataatgactcgcggtagccagagggatcgtgatcgcgaaagggctcaggctagaactggtgctaaaggcaagcagaaagatgatggattgacccctgaacagcgcagggaaagagatgcaaaggcgctgcaggagaaggccgcaaagaaagcggcacagggtgcaggagggaataatgcagctggaagcaaaaaataggcaataattcaatgagtagtttgagtttgccgtttgttgattgtggacatggaatttgtggaaattttatgttgcattattcatggagtatgatgtgtttattaatgtaacttgcgacggaagaacaaataagttgtgcttctttgaaagatgttgtcgctgggggcagaatcaataacttgtatctttgtttggaataatagtatttggcaattatattgtgttctctcccctctcttattgtctgaattgctgttgctacttttttgatgactcattgtgtgccaaacacagttctttgaatcagcaatgtttaattttataatgtgaagctgttcatatgaaaaaaaaaaaaaaaaaactcgagactagttctctcaaaaaaaaaacctcgagttttggtttt

SEQ ID NO: 4866 - DNA, 1331 bp, Glycine max
tcagctacgtaggccccccccccggtccaaaacagagaaacacgcacatcatcttacatacataccactgttcacaaccatgaattgggttcgcggagagcctctcggcagtggcagtttcgccaccgtcaacatagccataccgacaaacacttccactcagtttctttcttccaccgccgtcaaatcctcctatgttcacacctcgtctatgctgaaaaacgagaaggaaatactcgattgccttggagcttccccttatgtcattaactgtttcggcgacgatcacacggttgaaaacggagaagagtattacaacattttccttgaatacgccgcaggtggttctctcgctgatcaggtaaaaaaacacggagggaggctcccggagtcttacgttcggcgttgtacgaggtcgctcgtcgaaggtctaaaacatattcacgacaacggttatgttcactgcgatgtgaagcttcaaaacattctcgttttccagaatggggatgttaaaatcgcggattttgggcttgcaaaggagaaaggggaaaaacaggggaaattggagtgccggggaacaccgctgtttatgtctccggaatcggtgaacgacaatgagtatgaatcgccggcggatatatgggcccttggctgcgccgtcgtggagatgctgactggaaaacccgcatgggatgttcgcgggtcgaatatctggtcgttgttgattcgaattggagcgggagaagaattgcccaagattccagaagagttatcagaagagggaaaagattttcttttgaagtgtttcgttaaggatccaatgaagaggtggagcgctgagatgcttttgaatcaccctttcgtcaacggtgaaaccgtttcgtttcagaaagttaatgagccgttgccgttaccgtcgccgtcaccgaggacacactttgatttaactcactgggcttccaccgtaacggcgttgcttccgtcttccccggattctgatgagtggcgtatgtgggaatccgggtcgtcgtgttcgccggagaatagactccggcggcttgtaaccgttcagacgccggcgaattggtcagaatcggatggctggacaagcgttaggtgaagtacttggaagtgcagcgttgattgttccatggtcatcagatcttacggctcacattcgatcacgttcgttgattctttgtatttcattagttctgaattaagtagagataggaggattgctagccgccacctttggccaagtgtacagagattcatttggttaatatcacaattttgtttctttaaaacaaaaataaaaattcccttgc

SEQ ID NO: 4867 - DNA, 1733 bp, Glycine max
ggctcgagtgaataatgtttgttgagcaatctgaatctctcccgcctcaccgaaaacctatcaaggtcatgatgaacaagaggccattaaccgccgtctacaacaaggcgatccccgatctttgcaatcgagaactcggccaccttcccccaaggaatttcgctctccgtcttggcgcctccgaggatcttgtccttcgacttgaattactgaggaatctgcaaaaacacagaggttgtgtcaacactgtgagcttcaatgcagatggtgacactctagtctccggttccgacgattggggggttattctctgggactgggaaactggccgcattaaactctccttccattctggtcattctaacaatgttttccaggccaagttcatgcctcactctcatgatcgtaccattgtcacctgtgctgctgatggacaggtgagacatgctcaaattcttgaaaatggacgagtcgaaactaagtgtctggccaagcatcagggaagggctcataagttggctgttgagcctggtagccctcatatcttttatacctgtggtgaagatggattagtgcagcgttttgatctgagaactggggctgcaacagaactttttacatgccagccaatcaaggataggtggagttacatgccagtcatccatcttaatgcaattgcaattgatccaaggaaccctaatctctttgcggttgctggctctgatgagtatgctcgactttatgatattcgcaagtataaatgggacggatcaactgattttggtcaaccaaccaacttcttttgccctccacacttgattggcgatcagcaagttggaataacaggcttggccttttctgaactaagagagctgcttgtgtcatacaatgatgagcttatttatctttttacccaagatatgggtttgggaccaaacccccctgatcctgtgtctcctaaatctatgaacagtgatgcaagtgaaattggatttagtcatggatctgtgtcatctcaatctaacatggatgctgatgacaaaatcaccccacaagtttttaagggacacaggaattgtgagacagtgaagggtgttaacttttttggacctaaatgtgagtatgtggtgagtgggtctgattgtggtcggattttcatatggaaaaagaaaggtggtcagcttattcgtgtcatggaagcagataagcatgttgtgaactgcattgagtctcatcctcatacaatggttcttgccagcagtggtattgagaatgacatcaagatatggactccaaaggcccttgagaaagctactttgcccaaaaatattgagcagaaaccgaaggctaagggctggatgtaccggatagcttatcctgaagacctaatgcaactgatttcacttccaagacgaagggtcaggacagaaagcaatggagaaaactcatctacagatcgagaccttctacaattgatactgacattcaatgccaatagtgacagttctaacgaagatgatgacgatggtgatacaaccagccaagacgacttgttcagttagttgagggttacacattgtccaaacttggcctttctaagaaaaatgctagcaactgtaaataatataggattaataataactcttgactggaatattgcatagtatgtctaaacaatattctacatacaattgtcgtaaaatttatttcttgtcttttttttttaaaaaaaa

SEQ ID NO: 4868 - DNA, 1779 bp, Glycine max
tgcgtcagctacgtaggcccccccccaataaaggaagcttctttctagttttgtgattgaagctgcgatggaggaagagacctccgatgcaatgaaccttgatttgaatctgggcccaggcccagaacccgaaactgggcccataagcaatgaagctgtgaacttggacgattggataggggagcctcttcagagaatcagcgaagctgtgaggtatagggcacggcaacggtggagatggcgccaacttccgctaccgcctcctgaatttcatgctcactttccaactgaagctacgcggcattttcaaataccgcctgaggctcacaatatctccgtggaattgaaccactttttggtcaattctggcaatggaagcgccttgcaggccggggaaggcagtgtggcggccgaggagagaatggaggaggtgccgaaggcttgtgagaatatcaatggtgtggcagaggatgaggcttcgcagaagaagggtgatatagaaaagggtagtggcaatgatggggacttttttgattgtaacatctgtttggacctggctagggatcctgttgtaacttgttgtggtcatttgttttgttggtcatgtttgtataggtggctgcatctgcattcggatgcgaaggaatgtccagtttgtaagggagaggtgacacttaaaagtgttaccccaatatatggccgtgcgaacaatgtccgtggtcctgaggaggattctgcacttaagatccctcccaggccccaagcgaagagagttgagagtctgagacaaaccattcagagaaatgcatttgcactccctgtggaagagatgattcggcgtcttggaagcagaattgagcttacacgcgatttggttcagccacctgaaccggatgctgcccgtgaaacagctgagagaactacttccttgctaaggttcttgactgcgcaagggatacgtagagagcatcagaatctagtggcacccccagaggatgtaatgggtttggcacaaaacaatgttaatacttctgaggcaggggatccccggactagggtgcagtcccatttgcttcgaagaacacaatcacacagagcaacactttctactctttcatcagcactaacttccgctgaaaggttagttgaggcatatttccgtagcaatccattaggtaggaaccaagaacaacctcctcctccagttgaagacagagattccttttcaagcattggtgctgttataaattcagagagtcaactggacactgctgtagagattgattccatggtatccttgtcaacatcctcttctaggaggaggaacgatgcttcaagagtgtctgatgtggatagtggagattctcgtgctccaaggcggagacgtttgaactgataaaagtctgttagatgctcaagttttactattctatcatgtatcacatatgataataatcttccaacacctatgtaagtgcttcatgctttcttgttaccttatattatgaagttttcaccatttacaagttttggtagatttaagatggtttcagattaccaccggttgcggtttaagaatctcctttgacgattgagccatttatagagtcttgtcatccaggaactgatttttgctatagaataaccaagctactttagcatttaggggcatttggaagagattacaagtagcatattagacttcatggaattggcttatgattttttaacgtttttttaaacttatttcaataaaattcataatgaaatttattcatc

SEQ ID NO: 4869 - DNA, 2135 bp, Glycine max
atcattattatatttttaattagaatgtgactctttttaacttgttcattggctcactcttagaatagtaattttgatccataagcaaattagacatgatatgctcatttacgttaatgataactgactattgctaactatgttttgctgtctaccttctcttccattcgggtgacacagtactgagatgcttactgggtaacactttattaagctcttaaaagaagggtggtaagaaaattaatttcacgaagatttgtatagttctagaaatctctgagggtaggattacaaagaaagggaagaaaaaaaaatcctcaacattaaagaatcttcatgcaggtcatggcctctagaattctttcaactctacattatgtgtgttcttcttctgcctcagccacaaaacgatgtttaggcctatatagtcattggcagagaagtataagtggaattgctgcgtctgttgttgctgatgtggagcctagcatagcaccagtgcaaattgatcaaagtcagcttctaattgatgggaaatttgttgatgcagcttctggaaaaacttttccaacttttgatcctaggactggagatgtaattgccaatgttgctgaaggagatgctgaagatgtaaatcgcgctgtccatgctgctcgcaaggcttttgatgagggaccatggccaaagatgacagcttatgaaagatcacgtataattttgcgctttgctgatttattggagaaacacaatgatgaagttgcagccatagaaacatgggatagtggcaagacttatgaacaggctgcaaatgttgaaatacccatggtagtacgattgttccgatattatgcaggttgggcggataaaattcacggtctaacagttccagctgatggaccataccatgtccaaactttgcatgaaccaattggtgtagcagggcagattgttccttggaatttcccacttcttattttttcatggaaggttgcacctgcattagcttgtggtaatacagttgtaatgaaaactgcagagcagacacccctttcagccctttatgtgtcaaagctatttcttgaggcaggacttcctcctggagttctgaatgttatctctggctttggtcctactgctggtgcagcactgtgtagtcatatggacgttgacaagcttgctttcacaggatccactagcactggtaaacgtgtacttgaactgtctgcacacagcaacctgaagccagtaactctggagctgggtggaaaatctccattcattgtgtgcaaggatgctgatgttgatgcagccgttgaggcttcacattttgctttattttttaatcaggggcaatgttgctgtgctggttctcgcacatttgtccatgaaagcatatatggtgaatttgttgaaaaggctaaagcccgtgctcttaaacgtgtagttggagaccctttcaaaaatggggttgagcaaggtcctcagattgattctgtgcaattcgagaagatcatgaaatacataagatcaggcgttgaaagtggtgctcaactggaatctggtggtcaaagaattggctccaaaggctactacatccaacccactgttttctcaaatgttcaggacaacatgttgatagcaaaagatgagatatttggtccagtacaatctatcttgaaattcaaggatctagaggaagtgataagaagagccaatgcaacttcctatggcctggctgctggagtttttactaaaaatatggacactgccaacaccttgatgcgagcattgcaagctggaacggtatggatcaactgctatgatgtctttgatgcagcaataccttttggtggatataagatgagtggtcaagggagagtaaggggaatctacagccttagaagctaccttcaagttaaagctgttgtcactgctttgaagaatcccgcatggctgtagttttcccactacctgagtgttcatgttcataatgtcttatctagaaaaaaaactacatctttcatggaacattcctaaggcattgaattagccaaagttattacacaactaaagcttttctgtgccaatctttgctaactcaacttaccttctgttagaatatcacccttggtgtc

SEQ ID NO: 4870 - DNA, 2142 bp, Glycine max
ctattattaagcgtccaatggatttgggaacagtaaaaagcaagttagctgctggagaatatgctggtccactggaatttgctgatgatgttaagcttacattttcaaatgcaatgaactataatccgtctgggaatgatgtccatctcatggctgataccctcaataaatattttgagttgagatggaaagcaattgagaagaaactgccaaaaagtgatgttctgccaatacctgcaaagccagacaatagtgaaggtgtaaaaactaaaagacaagcgcctccttcaaaaaagaggaaaattgcctcattaccccctcaacctaaagttatgccacctacaaagaaggttatgtcggatcaagagaagcatgatctaggtcgagaattggagtctcttctgggagaaatgcctatgcatatcattgatttcttaaaagaacatagttcaaatggtagagaatgtggagatgacgagattgagatcgatattgatgatctcagtgatgataccctgttcacattacgaaagcttttggatgactttttgcaagagaagcaaaagaacaaagcaaaagttgaagcatgtgaagtagaggtgttgaatgattctggaccaagcaattcctcattgcaaccatttaaaggtaatgatccagcggatgaagaggtggacattggtggaaatgagccccctgtgtcaagctattctcatgtggagattgaaaaggatacaacttacagagtgaacaaaagcctaagcccaggcagctcaaatgatacagactctgatagttcttctgatagcgaagccgatgatgttaaagcaagtccagcaaatgtagcaaaggcaccagaaaatctgggttctgaagctcagttggatgaaatgaccatggctgctgctactcttgaaagaaatcaatctgttagtggcttagatcaacttgaggataactctcagcataagccaagttcttttgattctgattgccaacaagatggggacagtgctccaactgagagacaggtctcacccgataaactttatcgagctgctgtattgaagaaacgatttcttgataccatcttgaaagctcgagaaaagacactgacacagggtgaaaagggggatcctgagaaattgcgccaggaaagggagaaactggagatggagcaaaagaaagaaaaggctaggctacaagcagaagcaaaggcagctgaagatgctcgaaagcaggcagaggaagaagctgctgcagaagccagacgaaaaagggagcttgagagagaagctgcacggcaagcattgctccagatggaaaagactgttgaaatcaatgagaattctcgaattcttgaagatttggaactgcttagagctgtacccactgagcaattgccaagttctgtagatgagacgagtcctgcacactctcaggatggtctgggtagtttcaagtttgggagtagtaaccccttggaacaactaggattatatatcaaagccgatgatgaagaggaggaaggagagccaccctgtattccaaatcctgtaaatgatgtagaagagggtgaaattgattaaaagttacgcacacatattgtatgataaattgaggatcgaagtatacttaatcttgatcccaaaaaagttccacaaattaatgcattaacatcataagtgggacggagcatattttcttgtggaagcattcagtttctagaaaggtaatatattcagttttgggctgtgatggcaatagaggagcagtttgagcagaaagtaagctatgtttcgggctgtttgcaatgaaaatagaagtaatacatcaaccttgtttttatcaatactggctggtggctagaggctaaagcatcgcatcccttcgtagttcgtatggattatgttgtacaaaagatagaatttgtgaacatacactgctgtagctccatctttggatacttcgcacttgtatttgtgtctggctattcctttattaacttataattttggttaaaattttaagggatgtttcatcttcagacattgtaaacgtttaggtatacagcgtaagttaaggaaacaagatatgattggcccaaaaaaaaaaaaaaaaaataaaaaaaaaaaaaaaaaa

SEQ ID NO: 4871 - DNA, 1896 bp, Glycine max
ggctcgagagagaataaagataaggagaatgaaactgaagggaattcaatggggaggaaaatcatgagcaagatagtaaagaaatgacagatgagagcaatcaaagagaagctgagaaagaagaacatggcaagattcaggaagagacttcatctgagaatcaggctcaggatggggggaaaattgaggaagagcatcgagaggaaaattatgcaggagataatgcctctagtgctgtagacaataaatcacaagacgacacctcggatgaaagttccaagacagaagaagaatctgacaaaaaggaaaagaatgagtttgagtctcagaaaaatggtactgaaactacagaagtggctgattctactgtcacaacaacaaacagccaaggaaatgaaaatcagacacagtcagagaatgattcacagaaaagtgttacatcggagtcaaaatggcagcagcaagagcagaataaccccacaaaggtagaggaatccggtgtagaaactcatacaactgaagcattggaaaatgaagataactccaaggtagaggactccaatgcgcggagtacgacacaaaaaactgaagattcttcttctaactcagatgcctcggaagagaaggctgagacacatgacagcaatgcaacgaacggtgaagacaagaacaaggacacctcgactaattctgctcaggacgaaaacaccagcaacaattatgtccaagaaggaaatgttgcgtcatccaacaatgacaataaagatgctagccaagatgttcaactcacttcctctgatacttcctcagaacaaaagaaagatgaatccttgaatctagaaagtaacactgactctgctcagaatgacaatgtaaactctgatcaaagcaacaaaaacagtgatggaagtgctaatgacaataaagatgctagccagtcctatacttcatccgagcaaaacaaagaaggatcctcaaactcagataacaatgctagcaaatcagatacttcatctgatcaaaacaacaaagagggatcctcaaactcagataacaatgctagccagtcagatacttcatctgatcaaaacaacaaagagggatcctcgaactcagataacaatgctagccggtcagatacttcatctgatcaaaacaacaaagagggatcctcaaactcggataacagcagtgatgctaaccagaatggctctaacagcaatgaaaatgcaaatgacaatgggaatgctagtcatgaagcacaaaacaatgctgatgcgggacagggcaacaatgaggccactgttgagagtaaggcaagtgaaaatgaaggtggtgctcaaaacgaaacagtggagtcacaaaaagaggaggaatctgcacactccggcggagatagcaattctaacttgaatgatcaaggaagttctgatcattcaatcactcaggaggataaagaatctcgcgtggatttgggaactctaccacaatccaatgcagaaaacaataacattgaggttactgctgctgagtgataattcagatagagtaattgtatcaagcttcttttgatcctacttctttttttctatttttgttgtgccatgtattgtttctttagttggatattatgctatcaagttttttgctttacacagggtcagattaagaatttagaaagacctagagttctatttgtataaatcatttgctattattcatatgtaacctgaacccttttatgtaagcaataattatgacgtctaaaatatcatcaaagcaaagttccttctcttttagtataaaaaaaaaaaaaaaaaaaaaaaaaaaaaaaaaaaaaaaaaaaaaaaaaaaaaaaaaaaaaaaaaaaaaaaaaaaaaaaaaaaaaaaaaaaaa

SEQ ID NO: 4872 - DNA, 999 bp, Glycine max
acggctgcagaagacgacagaagggggagtgtgacgataggagtggaaacgacgtgtcgcttcaatttgaagggaagtgcagtggaacgtgcaaaagaagtgcatcaatctggttcttctgggtagggcttgtgttgtgatagagtcttacagagaagagtgtgtgtgtgtgataattgggataagctctaatcaatcaatttcaatggcatcatccaattcgactcagcaagaagggaacaaacccgcaaagagaaaacccgtgttcaccaaagtggatcagctcaaacctggaaccaacggtcacacgttggtggctaaggtcttgtcctccgacaccgtcgtacacaaaccgagaccctcttccgcacacaacctcaaacccactgtcatcgccgagtgcctcatcggcgacgacaccggaaccatcgtcttcaccgctcgcaacgaacaagttgatatgatgaaggctggagctacagtaattcttcgcaatgcaaagattgacatgttcaagggatcaatgaggatggctgttgacaaatggggccgtgttgaggtaactgatcctgcagattttgaagttaaagaggacaacaacctatctctggttgaatatgaattggtgaacgtggttgaagaataatcccacagaagagtgcaaaaatagctttatgatttgtttatggtgcaatggataccctaaaggtaaacttaacgggtgatggatggttggtatacattctcactttaattagcctgtatttcccctttaacatgcttgacattttgagttaagtttatgtcacttgaacaatcttgtgtcaagcaatcaatatttgctattatcttcatcagcaactgtattcaatgaacttaagaaaagtataatattttgataatataattatccttatcaaccaaaaaaaaaaaaaaaacaaagaaaaaaaagaaaaaacaaaaaaaaaacaaaaaaaaccttaaaggggccgcccccac

SEQ ID NO: 4873 - DNA, 1305 bp, Glycine max
ttcacattttatgttaagccgctaatcaccacccacccaacaagttaatagcattccgcaaaatggctgccaccaccttagtctctgaagtcactctcccctcctcctccggccagcggaagatgccgctgatgggcctcggcaccgcgccggaagcaaccagcgcggttaccacaaaagatgctgttcttgaggccatcaagcagggctacaggcactttgatgctgcttctgcttatggtgtggaacagtctgtgggagaagccatagctgaagcacttaagcaaggactaattgcatccagagatcaactcttcatcactaccaaattgtgggtcactgataaccatgcccatactattcttcctgccctgcagaaatctctcaggacacttcaactagaatacatagatctctttctcatccactggcccattgctactaagcctggaaaagttgtgtaccccattgaagtatcagagatagtggaatttgacatgaagggtgtgtggggatccatggaggagtgccagagacttggcctcaccaaagccattggagtcagcaacttctccatcaagaagcttgaaaaattgctctcttttgctaccatccctcccgcagtgaatcaagtagaagttaaccttgggtggcaacaacagaagcttagagatttctgcaaggaaaagggtattactgtaactgccttctcacccctgaggaagggtgctagtaggggtgctaattttgtgctggacaatgatgtaatcaaagaattggcagatgctcatggcaagactgcagcccagatttgtcttcgatggctatatgaacaagggttgacttttgttgttaagagctatgacaaagagaggatgaagcaaaacttggggatttttgattggtcactgactgaggatgattacaagaaaataagtgaaatccaccaagagaggctcatcaaaggaccaaccaagcctcttcttgatgatctatgggatgaagaatgagcagtcacctaaatttcatagtttgagtgttttctggttactcttgagagaataaagcaaagtgtcaccattctgttggtgccagatattgctcgagaattttaattaaataacccttgcgaatgttgattatagtgacactacgctattttccatgtgatgtggacgcaatccaaattccaatttaatttcactaaatcttcttacttttctggcaggaaaaaaaaaaaaaaaaaaaaaaaaaaaaaaaaaaaaaaaaaaaaaaaaaaaaaaaaaaaaaaaaaaaaaaacttgg

SEQ ID NO: 4874 - DNA, 1071 bp, Glycine max
tctcgagccgattcggctcgatacggctgcgcgatgacgtcacatggggggttttggttgggattcaaaccaaccatccgcactgtgcatccctttcttccttcttcgtcttattattctccaaaacttccttcttactcttcttctttctgtttcgcaccctccaaacgacgttgtttctcgtcgttcagccatgtcgtacgactacctcttcaagtacatcatcatcggtgacacaggtgtagggaaatcgtgcctgctcctgcagttcaccgataagaggttccaaccggttcatgatctcaccattggtgtcgagtttggtgctcgcatggtcaccatcgattctcgacccattaagcttcagatatgggatacagctgggcaagagtcttttagatccatcactaggtcttactacagaggagcagcaggagcacttctagtttatgacattacaaggagagacacatttaatcatttagcaagttggctggaagatgcccggcagcatgccaatcctaacatgaccatcatgctcatagggaacaagtgtgatctgtctcatcgacgcgcagtgagcaaagaggagggagagcaatttgcaaaggaaaatggacttctgttcttagaggcttctgctaggaccgctcaaaatgtagaagaggcttttataaggactgctggaaagattcttcagaatattaaggaaggcgtctttgatgtgtccaatgagtcatttggtataaaagtcggctatggacgtccccaaggtcaatcaggtgccagagatggaactgtttcagccagaggtgggtgttgcagctgattgagagggaaacaactttgaatctaatccttttgtgcatctatttttgaattccctgtctccgccgagtgtatactctttagacttgacatagaacttttggatagcactacaatttcatgtatagttctaatctcaaaggccttcttgggacagatttcactacataattttcagatctactaaatgtttaatggttggctgttgtgcccatgaatgggaggaaaaatataggggggccc

SEQ ID NO: 4875 - DNA, 1067 bp, Glycine max
  misc_feature (3)..(4): n is a, c, g, or t
  misc_feature (10)..(11): n is a, c, g, or t
  misc_feature (891)..(891): n is a, c, g, or t
  misc_feature (1009)..(1009): n is a, c, g, or t
  misc_feature (1058)..(1058): n is a, c, g, or t
ttnnaccggnnaattcggccttttcttttagtcgatgatcggagggattaaaaaaaaaacctattctcctgatatggtctactcttgtgggtggtgggtaggaacaattcccagtgttctcagattggaatcccattgactctaccatggccacgccctctgatccttccaaccaagaagctgttgtaagaaggagaaacaacggaccccctattaagttcctccttcctctcatatatgcccctgttctccctctaattcgtctatcgctgcggcataaacccgtcttgagagatcgcttgtttactgctgtgttggctggggcctttgctcatggcttctatttggtaacagatctgtatgatattgagagcaagtgattaagcagagcatgtttcagacatttcttcggcatcatttacatcacaacctcaggtcttcaataaatttcttcgaccactatttacagctaaacattctggtaatgccttaaatagcattggtcgattttcaagatgtaagaatatttttttcaattatattgacagattattatgttatgtacgccttatagttgcatcttgtattgcggattttgctttctctagaataactatggaattcggaggctgttctttgatcttttttttctctcttgatatcaatgctatttcttgtcagcttgatgttgatttctgtaataattagatggtctaagtggattcagaggatcaatatgcatgtcctttatcgccatggataatcttgttcactcgctccagggggtgaacctcacgccctgcgagaagcacatcatggagaagatccaaggccgcggcgatgacgatgatgatgatgacgacgacaatcacattctcaggaccatgcggngaagaatcaactacataaggaggaacgaaggaaaagacgaagacgaagaagaagaaggacacatgcagaagtgctgcacagaaatgagcgagctgagaagccccaaatgccagtgcanagcgctgcagaaagatatgggagaccagagcgaggaactggaggagaangcagagaaa

SEQ ID NO: 4876 - DNA, 831 bp, Glycine max
ctcgagccgctcctgcacccatcaatagcaaaatgaccaagttcacaatcctcctcatctctcttctcttctgcatcgcccacacttgcagcgcctccaaatggcagcaccagcaagatagctgccgcaagcagctccagggggtgaacctcacgccctgcgagaagcacatcatggagaagatccaaggccgcggcgatgacgatgatgatgatgacgacgacaatcacattctcaggaccatgcggggaagaatcaactacataaggaggaacgaaggaaaagacgaagacgaagaagaagaaggacacatgcagaagtgctgcacagaaatgagcgagctgagaagccccaaatgccagtgcaaagcgctgcagaagataatggagaaccagagcgaggaactggaggagaagcagaagaagaaaatggagaaggagctcattaacttggctactatgtgcaggtttggacccatgatccagtgcgacttgtcctccgatgactaagaagttaaaagcaatgttgtcacttgtacgtactaacacatgatgtgatagtttatgctagctagctataacataagctgtctctgagtgtgttgtatattaataaagatcatcactggtgaatggtgatcgtgtacgtaccctacttagtaggcaatggaagcacttagagtgtgctttgtgcatggccttgcctctgttttgagacttttgtaatgttttcgagtttaaatctttgcctttgcgaaaaaaaaaaaatttgctcttcaaaaactgtttctttgctcataaaagtataaaaagattcattccatcgttaaaa

SEQ ID NO: 4877 - DNA, 807 bp, Glycine max
agttttagttcatgagcgtgccacgtgcccccactgtcaccgtccagacccaattttccgtccaagttcattttcccggaaaatcttcttggaagattcccctgttttttccttgcaattgggcactgtaaaaagggatttttttttttttattttcagtgtggagcatctgggaaaaaatggcagcaccaacgccgattcacaaaactgaagaggaatggaaggtcattctctcccccgagcagtttcggatccttcgccagaaaggaactgaattgaagggtacaggagaatataacaagttttttgaagaaggaatttacaactgtgctggctgtgggactcctctttacaagtcttcaaccaagtttgattctggttgtggttggcctgctttctttgagggttttcccggcgccatcaatcgaacccctgacccagatgggaggaggactgagataacctgtgcagcctgtggtgggcacttgggtcatgttttcaaaggagagggattcaagaccccaactgatgaacgccattgcgtcaatagtatttctgtcaaatttgttccgggaagtgctactttttcaatatgaaaccttacttgctctattggaggtgtctattgaaagattgtcttgtttgtggtcttttacagacagctagctagctagctctcaagaataaaatcgttttcttgtttagtcttttgcaatggctttctgtttcatcgagtaaagatttggtaagtctgcatgaatcatacataaatcagcatttcttgaaaaaaaaaaaaaaaaaaaaaaa

SEQ ID NO: 4878 - DNA, 841 bp, Glycine max
tcgagtagctacgtaggccccccccccccaacacgatccattagaagaaagaaaattaagcaaataacaagaaagaaacaatgaacgacttgttctccggttccttctcccgcttccgcagcgaccagtcctccccggaccgccaccacgacatcgagatgggcgccaccgcctccggcggcggtcgcggcggcgaggtgaaccttgacaagttcttcgaggacgtggaaggcgtgaaggaggaactaaaggagttggaaggtttggctcagagtctaaggagcagccacgagcagagcaagacgctgcacaacgcgaaggcggtgagggacctgcgcgcgcgcatggacggcgacgtctcggcggcgctgaagaaggcgaagctgatcaagctcaagctcgaggcgctggagcggtccaacgccgcgaaccggaacatgcctgggtgtggaccgggttcgtcctcggaccggacccggacctccgtggtcaacgggctcaagaagaagctgaaggatgctatggagagttttaacgagattcgccagcttgtgtcctcggagtaccgcgagaccgtgcagcggcggtacttcaccgtcaccggcgagaatcccgatgacaagactctcgatctcttgatctccactggtgagagtgagactttccttcagaaggccattcaagagcaagggagggggtgaattctggacaccatcacggagattcaagagaggcatgatgctgtcaaagagatagaaaagaatctcaaggagttgcaccaagtgttccttgacatgacagtgttggtgcaacatcaaggtgagcaattggatgatattga

SEQ ID NO: 4879 - DNA, 2403 bp, Glycine max
tcgcgcgcgcgggtttttcacatacaaactggcaacttggtgactggtgcatgctcccagttgtggaccaaaaggaagagatgattcaagatgcatctacttgtgatgcttataatgagcatggtatggctagaggatataagagaagaaatcttaacgttggggaattatttctaattgagaagataaagaccaaagttgatgttgtttggcaaaatggtgaacatactttgggattggatccacacaacttagtcccagtgaatgtcataaacactcatgaattttggccccagcagtttgtgctggaaaaaggtgcttccgatgatcctcttaagcctagcaatcaaagatggggtgttgttctttccatggatgcaaaagagcatactgtaaaggtacactggagaactgttcccacatctgagacagataatttagctggagacacaatgattgaaactgtgagtgcctatgaacttgtcgagcacccagattactcctgttgttttggtgatattgtgttcaaggaggctcaaaaacagcttggctaccaagctgataaagataatgcgaagtcagtgactgacttgaatgtggaagttcctctgataaactgggaccaaatcagtcatccgaataagtatgcagataacagttacctctcctgcattggcaatgttactggttttgaagatggtgacatggaggtgaaatgggctactggtttaacaaccaaggttgcaccttatgaaatttttcgaattgataagcacgaaggttcaactgcaacccctgtttcttatgaagcaaatgttgaggagttgactcaagagatgattgtaagtcaaccatcagacaagaagggaaagggcttgttagattgtgatggctatagagataattgtgagcatccaggagaaagtagttcctcttcccttccacaagctgcctttgaacttttctccagtattaaggccagcatattcaaaacacttggtgtaacatcactttctggcaaattctgcccagtccctacgtttgaagagggaaatgaatctggttgtcttgataagaaagatttggacacttgtggccctgaatctgaatcacatccagtgagcaagatgcagtcttctggagacatttgtgacagttgtgaagttattaggactcataagaggaatgattttccagtttctttagacaacaaaaacagtttagatcagttgaagcagtttgatgtaattgataattgctcagatcaccactttattcaagaggggaaaggattgacatcatctcagtttaaaaagggttgggtgaagaaggtacaacaagaatggagcatcctggagaaaaatcttcctgaaactatttatgtccgtgtttttgaagaaagaatggatctcatgcgagcagccattgttggtgcatcagggacaccttatcacgatggcttgtttttctttgatatatgtttccctccagagtatcccagcgaaccccctatggtgcattataattccggcgggctacgattgaatcctaatttgtatgagtccgggaaagtctgtctgagtctcctaaacacgtggactggtacagacaccgaagtttggaaccctggagcttccacaattcttcaagtccttctttctctgcaggcccttgtacttaatgataagccttatttcaatgaggctggatatgatcaacaaattggtagagccgaaggggagagaaactcagtgagttacaatgaaaatgctttccttgtcacctgcaaatccattttgtatctattaagaaagcctcccaagcattttgaggcattggtggaagagcactttagacaatgctccaaacatatacttttggcttgtaaggcatatcttgaaggagctcctattggatgtggttttggtggtggaaaagctgagcatgaaaaccaaaagggaacttctactggatttaaaataatgcttgctaagctcttcccaaagctagtagaggcattttctgacaagggaatcgattgcagccagtttgctgagatgcaaaagtaattgtctgttctaccttgttgtgaataagccgtccagctttctgtcaaggatattcaaactttatgtgtaatattaatttgttttcacttatcttgtataatatcaaatgtgtgcttgataaaaaaataccaatatcctcttgtaaaccaccaccccctcccaaaataaaagaagtggtgaagatgtattgataataaaaataccctgtggtatgtaatgtatcatatgtactatgtaatggcttgaagatgtgagaatgtaaaataagaagcacagtgattggagtggtttacttgaaaaaaaaaaaaaaaaaaaaaaaaaagagaaaaaaaaa

SEQ ID NO: 4880 - DNA, 1521 bp, Glycine max
gtaagtggcatagattggaagagaccgcaagaaaaggcaacgaaagaagcgatagaacgcgttccgctaagcattaaataaaagccgttaaattagaatcggagatttaagctggaggaggatattctgaaatcccatccaatcgaaggctgtgaagtgtgtgatgcactctatccttctttctcttgaacccataattccatgactcggcgttgctcccactgcagcaacaacggccacaattcccggacatgcccttcgcgtgggggcggaggtgtgaagcttttcggggtcaggctgacggatggatcaatcattaagaagagcgccagcatgggcaacctaaacctctcctccgccgccgcacatcaccaattccattcatctccttcttcttccaacctcgccgccgccccctcatcccccaatccaagctccccatgctccgaccctccccaaggttacttgtccgatgaccccgcccatgtctccaccttcgctaaccgccgcggtgatagaaaaaaaggtgttccatggactgaagaagaacatcggctgttcttaattggtctccagaagctaggcaaaggagactggcgtgggatagcacgcaattttgttgtatcaaggacccctactcaagtagcaagtcatgcccagaagtattttatccggcagagtcatgctaccaggagaaagagacgttccagtctttttgacatggttccagatatgtcttcagatcaaccttctgtgccagaagaacaagtgttgcttccaccttcccagaactcacaaccttgcaatggaaaatcacagccttcattaaatctctccctcaaatcagaatttgaacccatggagactacttctcaagaaaatgcgcaacagaccaatgaaactatgatgggatcaatcggactgacaccaatggctcctcatggattctttcctgcatatttacctgttccatttcccatgtggccatcaactgtggctcccccgtttgaagaagttaagggaggagagacatcccaccatcagatccacaagccaatcccagtcattcccaaggaacctgttaatgttgacgaacttgtgggaatgtctcatctaagcattggggaagcaaaggtacgtgatagagagccttcccctctttccttaaagttgttaggagagccctcaaggcagtcagcattccatgcaaatgctccagttggtacttcggatttaaacaatggcaaggacaacgcaattcaagctgtctgagcttgtaaggtccggtgaagacagcagcagaattaagccttcttttggtcatttttcatttgtactatcatatataattttgttttcctgatccctagcattttaatcttccaattagtagcaagttatatggtggtacgtagatcaggttagatcaattcttggaaaatacttattctaactgtaaacaaatgaagcttaaataaagaggttctgttcctctaggtttgggcaaaaaaaaaaaaaaaa

SEQ ID NO: 4881 - DNA, 2080 bp, Glycine max
gttgtgttgcctaataataacaagccagacaagtcacagccagttttgccaaccgagaatggtcctgacaccaagtcccagttgccaaaactggtattgaagccttcaaatggttctgtgaaccctccgcgccggcggacgcgtgggcacaaggaactgtcatcgaccattcatgggcagcgttcggaggttgcagttcggtggagaccattgaagcttgtttatgatcatgacattaggcttgcccagatgccggtcaattgccattttagaggactaagggatgtagtaagcaaaaggtttccttcgtcaagttctgttctgatcaagtataaggattgtgatggtgatttggttactataacctctactgatgaactcagactggcagagtctagtgttgatagccatcttgtgaaagaacctggggaagataaaagtgattctgtagcaatgctgagactgcatattgttgaagtcagtccagagcaggagccacctttattggaagaagaggaagaaaaaccagttgagaatgaagggggcatgggagaagagaatggatctcattcttctctcggcgaatctgtctctgaagtagctgataccgtcaaggttgataagactgtgaaggatactccaaaggaaaagccaggaaccacaggagatactgaatgcaaagaagtggagatggatgattggttgtttgagtttgctcagcttttccgctctcatgttggtattgatccagatgctcatattgacttgcatgagcttgggatggagctttgttctgaggcacttgaggaaacagttactagtgaggaggctcaggatctatttgacaaggcggcttcaaagtttcaggaggtggctgctttggctttcttcaactggggtaatgttcacatgtgcgcagctaggaagcggattcccctggatgagtccgctgggcaagtggtagtggcagagcagcttcaagtggcttatgaatgggtcaaggaaaagtattctttagcaagagagaagtatgtggaagcactctcgatcaaaccagacttttatgagggattgttggctctggggcagcaacaatttgaaatggctaaacttcattggtcttttgcacttgctaagaagatagatctatcaggctgggattctaaggagacacttcaactttttgacagtgcagaggagaagatgaaagctgcaacagatatgtgggaaaaactggaggaacagagggcaaaagagctaaaggacccaaatgcaaccaagaaagaagaattattgagaagaagaaagaaacaaggtgctactgaaggtgagtcctccagtgttggaggtcagggtgaaatatctgcagaagaagctgctgagcaagcagctgtcatgagatcacaaattcacctcttctggggtaatatgcttttcgaaagatcccaagttgaatgcaaattaggaatgactggatggaaggaaaacctggatgctgcaactgaacgctttaagcttgcaggagcttctgaggcagatgtttcgatggttctaaagaatcattgctcaaatggagatgcaaaagatggagatgataaaaaggttgagaacccacagcacaataagactgttaaaccagagatcaacaatgctaatcaagtatgagataaatggtgtgactttgaaatctcttttgcatctgttccgttgagtcttgaaataggactctggagtctggacaaaggatatgcttgttgttcagagttcagaagagggatatctaatttttttgaaatagaaattgaaaatttagggtgccttaactaaatggttctgctcttttttttcttttctctgaagttctcagtgatctaatgaagggagattattttttaacattatttgcacaatcatttttgtcccctgctatgttcgtagtgctgatgcaacttagttgaggcttgcttacttgctgaaatcttgacatttgttctgttaggtcttatttatatgttgaatgtgttattgagtgtataagttataacttgaagttttatagggttatgccaaaaaaaaaaaa

SEQ ID NO: 4882 - DNA, 1489 bp, Glycine max
  misc_feature (728)..(728): n is a, c, g, or t
ggctcgagtttctataaatcttcatacatctcctttcccacccgctctctcggcccgcggcggatccctcacaaaacaaagccttctttttcttgtgtgatctcacaagcccctaaaagccaccatgtcttccttcaagagcaaataccaagatgagttgattgccaatgctacttatattggcaccccaggaaagggtatccttgcagctgatgagtcaaccggcacaattgggaaacgtttggcgagcatcaacgtggagaatgttgaaacaaacaggcgcattcttcgtgagctcctattcactgctcccggttgtcttgagtgcctcagtggtgtcatcttgtttgaggaaaccctctaccaaaaatcagctgcaggagtacccttcgtggacatactgaagaaaggaggagttctcccgggcatcaaggtagacaagggcaccgttgagctcgccggaacaaacggcgaaaccaccacccaaggcctcgacgacctcgcccagcgctgcaagaagtactacgaagccggcgcaaggttcgccaaatggcgcgcagtgttaaagataggtccaaacgagccctctccgctctccatccacgagaacgccaacgggcttgcttgctacgcggccatctgccaagaaaacggccttgtacccatcgtggagcccgagatcctctccgatgggccccacgacattgcgaaatgcgccgacgtaacgngagcgtgtgctggcccgcgtgctacaaggccctaaacgaccaccacgtgctcctcgaaggcacgctgttaaagcccaacatggtttcccccgcgtccgaggcggcacgtgtgacggctgaggtcatagcggagcatacggtgagggcgctgcagaggaccgtgcctcccgcagttccggcgatcgtgtttctctccgggggacagagtgaggaagaggcgacggtgaatttgaacgcgatgaatcaactgaaggggaagaagccgtggtcgttgactttctcttatgggagggcgctgcagcagagcacgctgaaggcgtggggtggaaaggacgagaatatccccaaggcgcagagcgcgttgcttgtgaggtgcaaggcgaattcggaggctactctcggaacttataagggggatgccacgcttggggaaggggcttctgagtcacttcatgttaaggattataagtactgagaggtctgagattgttttttttttttggaatggaattgtttctttctttctttttttgaactgttttgtaggtttatggatattctcggtcgtaggtggtaatgtgagaataataatggctttagctgctgctgctgcattggcctgatcggcgtttactttttttctttcttttactatgttattttgttattctatttttacactgcttaatctattttttatattagaaaccaagaaaaatgtactacttctaaattctgagtgcactgtttcttcgaatccc

SEQ ID NO: 4883 - DNA, 1893 bp, Glycine max
  misc_feature (1872)..(1872): n is a, c, g, or t
  misc_feature (1874)..(1874): n is a, c, g, or t
  misc_feature (1882)..(1882): n is a, c, g, or t
  misc_feature (1891)..(1893): n is a, c, g, or t
acgcgtccgccttctcatccgtgcctgcttcgttgctcccccccttttttgccatatttcccaaataaaattccccgattaaccttcgtgctacccacgaaatctatttttcttcccatttttttctgagcatttagctgtcgcttctttttgtttgtttttgtcatcctcggcagatcaggttttgtttttgcttctgctccagctttggaagatccacaatctctctctgagtggatggtttagtgtatatttttaagatactgatataaaagtatgggaagcagtgagatggataaaactacaaaagagaaggagtcaaagacgccgccaccacctacatcacaggagcagtcttcgaccaccggcactggaacaattaatcctgagtggcctggctttcaggcatattctcctatacctccacatggtttcttggcatcaagtccccaggctcacccttatatgtggggtgtccagcaatttatgcctccctatggtactccaccacatccctatgttgcaatgtatccccctggtggcatttatgctcatccatccatgcctccgggatcttatccttttaatccttttgccatgccttctcctaatggcattgctgaggcttcaggaaacactcctggcagcatggaagctgatggcaagccttctgaggtgaaggaaaaattgccaatcaaaagatcaaaaggaagtttgggtagtttgaatatgatcacagggaaaaataatgaacatggtaaaacactggggacatctgctaatggaattcattcaaagagtggtgagagtgctagtgaaggtgaaggtaccagtgaaggaagtgatgcaaattctcagaatgactctcaattaaaatcagggggccggcaggattcttttgaagatgaaccctctcaaaatggcagttcagcatatactcctcaaaatgggggactaaatatacctcatacagtggtcaatcaaaccatgtctatcatacctatctctgcaggtggtgctcctggagctgttcctggtcccacgacaaacttaaatataggaatggattattggggtacaccaggttcatccaacattcctggacttggcagaaaggttccatctactgcagttgctggagggatggttactgttggatcacgggatagtgctcagtcacaactctggctacaggatgaaagagagcttaaaaggcaaaggcggaagcagtctaacagggaatctgctcgcaggtccaggttgcgcaagcaggccgagtgtgatgagttagctcagcgtgctgaggctttgaaggaagaaaatgcttctctccggtcagaagtaaatcgaatcaggagtgattatgagcagctactctccgagaatgcagctctcaaggagagacttggggaactacctccgaatgatgatcatcatcataggtctggcaggaatgatcagcatgtgggtaatgacactcaacagagtgggcagacagaggccgtgcagggtggtcattagcaccaaccaaccacttcatgctgcctttcagggagataatctaacttaaatagcaagagcaagatcttgtttcggataggttgtagttcaaattgtattaatgctgaccatttatcgtcttaagatctgtttaatgttatgtgatccttcattcctaatttaccttttttttaactcattcaaaacgacctggattgtatgtagtgtgtgaattctgtgtcataccttatctgcagcttcaaagttagtgttctcattaagtaagcaatatagttaacgaacctgggtgttgtccattatatcatttcctgtacaaataatttatcgggaaaataaataaaagagaaaatntntaaaaaanaaaaaaaannn

SEQ ID NO: 4884 - DNA, 1584 bp, Glycine max
ggctcgagacttttgttcgtactgtccagcatttaccataatgctataattttaagaattttgataattctaattctatgatggtatgatatgattactgtcttgtcgggtccgataggaactttagccaatcagttttttgaatccaggaagctttcacaaccaaccttttccgatctttctctcaaaccggctcgcatttccagaaaaaccctgagcttgaagatggcccaagttgctcaaaacccttctcagcagcagaaagtcataataactaacaagtatggcaataaactagtgggcattttgcatgaatctggaaccaaagagattgttatcctatgccatggtcttcgatccactaaggaagacgatatcataaaaaatcttgctgctgctctagaaaatgcaggagtcagttcttttcgctttgacttcactggaaatggggaaagtgaaggttcatttgagtttggtcactattggagggaggttgatgatctgcatgatgtggttcaacactttcatggggcaaaccataaagttattgcaattattggacacagtaaaggaggtagtgtggtgcttctttatgcttctaaacatcatgacattaaaacagttgtcaacctctctggacgctatgatctgaaggcaggacttgaagaacgccttggaaaagattatttggaaagaattatgaaggatggcttcattgatgtgatgcagtcaggaagttttgattaccgtgtgactttagaaagtttgatggatcgattagatacaaacatgcatgaagcatgccttcagattgataaagaatgcagggtactcacagttcatggttcttcagacccagttatccctgttggagatgcatctgagtttgccaagattataccaaaccacaagctaattatcatagagggagctgatcattcatacactaatcatcaagatgaattagcctctgttgttgtgaaccgcataaaggaagccttggtccatttttctaatgatgtgtaattgtggtagaccttgcagttacgagccaattgaaattgcaacaggtgacaaaatttcagttgtggatgaacatgcctatgatgttctgcagcatgtttgagctcttctagtttttgcttataaaattggtgaatcttgcatcatgatgaaaataatggcgagagaaatatctgggagtatacaatgtcatttttaaattatcaattatgacaaatgcaatatgtaaacagttatctcatggtagcatatggtagccatagtggggggttattcccacattttaagggtctggggacacctcagtattatagaataagtgtaaggaaaccttatggtaaagactgtttagtcgtcacctgtttgatgaacatcttaaaaatgatgaaaatatttgtaagattgatttctagattgtgggtggcgtgaggatcccatcatactcacaaagcatgtgccatgagtccatgcttgttcaattcattgtcctctatatatcctgtgatacgaaaacatacaatatgaatgaaaattggtagtgatctattgtcatagtaaaaa

SEQ ID NO: 4885 - DNA, 2455 bp, Glycine max
gaacaaaggttacttcttgatgatatccgaaaattgtctctttggtgtgacccttctgtggatccacatcaagaaaaggaaagtgagggatggatgatatctggtgggagatctttgttggtccagggactgaagagagagcttgtaattgctcaaatatctagaaaggcagcatctgcgtcattaaggacggctcttcaaaaagctgcgcatctacggctaacagaaaaggagaagaacaaaagtccttcctatgctatgcgcatatctttgcaaatcaacagagttgcttggagtatgcttgttgatggtaaatcctttgctgaagctgagattagtgacatgatatatgactttgaccgggattacaaggatgtcggcattgctcggcttacaacaaaatattttgttgtcagaaactgcctgcctaatgtcaagtcagatatgcttttgtcagcatggaatcctccatccgaatggggaaaatagagatttatccccttaagatccatttaacagagacgatgtacagaatgatgtgggaatatttcttcccagaagaagaacaagattcccaacgtcgtcaggaggtttggaaggtttcaaccactgctggtgcaaggcgtgtaaagaaaggttcatcagttcttgaagcttctgcttcaaacagtcacacaacaaaagagtctgaggcttcatccaaatctggcatatctgcaatgctatttcccacatcaagtcagcctccagcccatgttgactcagctcaagcatccaaaacacaaaatgtcaaagcaaaccctggtaatggtgcaacccttgagttgagaaggacatcatcttttgacagaacttgggaagagactgtggcagaatctgtagctaatgaacttgtgttacaaagcttttcttcctcaaaaaatggccaatttggttctactgagcaacaagatgaagctgctaagaataaatcaaaagattcaaaaggtgtgaaaggtggtcgttcatctcatgaagaaaaaaaggtggctaagtcacatgaagagaagagatctaggccacggaagatgatggagtttcacaacatcaaaattagtcaggttgagttactggttacatatgaagggcaaagatttgttgttaatgatctcaaattactgatggatcaatttcatcgaaccgagtttactggaacttggcgaagactcttctcgcgagttaagaagcacatcatctggggagtcctaaagtctgtaactggaatgcagggtcggaaatttaaggacaaaggtcagagtcagccccctggtgctggtgttcctgaaattgatcttattttaagtgacaatgaaggccaggcaggaaaatctgatcaatatccaccatcttggcctaagcgtccaagtgacggtgcaggtgatggatttgtaacatccattagaggactgttcagtactcaacgtcgcaaggcaaaggcatttgtgctccgaactatgaggggagaagcagagaatgattttcaaggtgattggagtgaaagtgatatggatttctctccttttgctcggcagctcacgattacaagagctaaaaagcttattaggaggcacactaagaagttccgttccagaggacaaaaaggttctacttcacaacagagagaatcgctaccatcatcaccacgagagccaactccatttgacagtgattcttcaagtggatcctcaccatatgaagattttcatgaatagaaatgttgtcatctaaaggatttcttacttttccgctgagcatgacgcaggttacatctagttcttaaatactctgaaggtagggcctcggttgaaagctatagacatcttgaacagaggggcgcttggaatggaaagagaacttggggctatgcatgcatggttgatgttgattgctattcattgtgtattttctgtcgcaacccaagtcatgagtgaaaaagagccttgcttgctttcatctcacacctaacatctatgcaacatcgctcgcacatctaacatttctattccttgacaacttcagtcaccggtgaagagccatgcgttcatctcttaacgtgttttcgggttgtatattcctgtagcttctggtcaatgttcaatttttggcttcttaatttatgagaaaataggagcctagaggttgacatgattatgtatatacatttgattatattttggaaaatagaataaaagcaatatctttttcgcagagatccttatttagaattaaaataaaattgatggacacaaaactttgtataatgagagattattctaaaccatttcccaaaggaataatgcttgtgtagaaagtactgagctgcaggatatttattttagtacattttttttgtgtgaatatttagtacattatcctatcaaaccaatacagagcattatccattatcttctcagag

SEQ ID NO: 4886 - DNA, 872 bp, Glycine max
ttttttttttttttttttgagcccaaatataaggaacagtttattgggcccacggtaatgggtctgtgacaaccgtgagcccataagggaagaaagtgaaaaaaaaaaaaaaaaaaagcggaagcgaactgcagaaacgcaatcagaggaagagaagagacactgaggtcgttggcgagaatgggaagaaagaaggggtatgttgagttcgaggagtcgccgccggacgattttgatccggcgaatccgtacaaggacccggtggcgatgctggagatgagggagcacatcgtgagagagaagtggatccaaatcgagaaggccaagatcattagggagaagctccgctggtgctaccgcatcgaaggcgtcaaccacctccagaagtgccgccacctcgtcaaccagtatctcgagtccacccgcggcatcggttggggcaaggacggtcgccacccatctctccacgctcccaaggttgaccctgttgagtctgaatgaccttcctgtggacaataataacaaaaaaaagggaagaccgtttatccaactaatcatattgctgaatcggatattgggttggagaagtgtttgttgcagttattgtgttcatgttcttttttttagttgaacttcctgcaaactacaactgtattttgacttagccttggctcattagtcttatgttgtttgttaccatttaaatgtaaacaagaaaggaaaggctatgaacaaagtacatcacaatcagattatgaaataagtttattcgttccctgttgattgtaatgttatccattccgaatattcaaagtaagactctttgaaactcaaataccatacatcgatatgtaatcatgaaatttcaccag

SEQ ID NO: 4887 - DNA, 756 bp, Glycine max
  misc_feature (8)..(11): n is a, c, g, or t
ccggtccnnnncctgtttcgacgccacgcggccgacctcagctacgtaggcccccaaactcaatcagaagaagaagcaggcgagttgagagagaatgggaaggaagaaggggtatgttgagttcgaggagtcgccgccggacgatttcgatccggcgcatccgtacaaggacccggtggcgatgctggagatgagggagcacatcgtgagggagaagtggatccaaatcgagaaggccaagatcattagggagaagctccgatggtgctaccgcatcgaaggcgtcaaccacctccagaagtgccgccacctcgtcaaccagtatctcgagtccacccgcggcatcggttggggcaaggacggtcgtcatccttctctccacgctcccaaggttgagcctgttgaatctgattgactgtcctgtggataaataaataaaaaagaagggaagactgtttatccaactgatcatattgctaaatcggaaactgggttggaggagtgcttattttgcagttattgtgttcatgttgtttttatttagttgaactttctgcaaactacaactgtattttgacttagcctcggctatttttccttggcttattagtcttatttttgcttgttaccatttaaatgtaaacaagtatggaaatgctatgagtacatcacaatcagattatgaaataagtttatttcgtcctccatgttatgataaatgctacattaataataaagaaaaaaaaaaaaaaaaaa

SEQ ID NO: 4888 - DNA, 810 bp, Glycine max
ccacgcgtccgtaccgctgccagaggacgacagaaggggcactgaggtcgttggcgagaatgggaagaaagaaggggtatgttgagttcgaggagtcgccgccggacgatttcgatccggcgaatccgtacaaggacccggtggcgatgctggagatgagggagcacatcgtgagagagaagtggatccaaatcgagaaggccaagatcattagggagaagctccgctggtgctaccgcatcgaaggcgtcaaccacctccagaagtgccgccacctcgtcaaccagtatctcgagtccacccgcggcatcggttggggcaaggacggtcgccacccatctctccacgctcccaaggttgaccctgttgagtctgaatgaccttcctgtggacaataataacaaaaaaaagggaagaccgtttatccaactgatcatattgctgaatcggatattgggttggagaagtgcttgttgcagttattgtgttcatgttctttttctttagttgaacttcctgcaaactacaactgtattttgacttagccttggctatttttccttggctcattagtcttatgttgtttgttaccatttaaatgtaaacaagcaaggaaaggctatcaacaaagtacatcacaatcagattatgaaataagtttattcgttccctgttgattgtacatgttatccattccgaatattcaaagtaagactctttgaaactccaataccatacatcgatatgtaatcatgatttttcaccatcatgttggatttgagggtgccaagcattttcttcacccgagcc

SEQ ID NO: 4889 - DNA, 1530 bp, Glycine max
ccttattttgcggatcccatattgactcagagacccacaaagctgtcctggtgctaccctttgaatggttggtagtatttggataaaaaatagtataagtgaaagaaaaaagtctgtagattagatcagaattgaatccaagtggtgcagaattcagagcagcatttggtgtccaaaagaagaggagtaataggagagaggtgataaaggtgtcaagaatggggatacctggtgttgatggagaattgaagaagattttgaacgctaacatggacgaagttggtgctagaaggcgtgcacgtgaggccttcaagaatattcagcttggaattgatcatatacggtcgcgggcgccgtgcgcgggggtaaaaatggaagagtcatatgagaagaactcaaagggcctagaaatcttctgcaaaagttggcttccgagtgcatctaagccaaaagcagcagtgttttactgtcatggttatggagacacttgctcctttttctttgaaggaattgctagaaagctggcatcatctggatatgcagtttttgccatggattatccaggatttggtctctcagaaggactccattgctatattcatagttttgatggacttgttgatgatgtcattgagcattactcaaaaatcaaagaaaatccagagttccattctcttcccagcttcctatttggacagtccatgggtggagctgttgcattaaagatacacctgaaacagcctaaggcatgggatggtgccattcttgttgcgcctatgtgtaaaattgcagatgacatggttccaccaaaattcctcactcatatcctgattggtttagccaatgttttaccgaagcataagttagttccaaacaaggatttagcagaagcagcattcagagatttgaagaagagggaacagactgcttacaatgttgttgcttacaaggataaaccacgtttgaagagtgctgtagaaatgcttaaaactaccgaagaaatagaacagcgattgaaagaagtttctctaccaatattcatccttcacggggaagctgacactgtgactgatccatcagtgagcaaagccttgtatgagaatgcaagctgttcagacaagaagcttcagctttacaaggatgcctaccatggtcttcttgagggtgagcctgatgaaataataactcaagtttttggtgacatcatatcttggctggatgagcacagcttgaaacacaatcaatcttcctcttaataccgattaattaattttgccatctcttaatccaaaagatgaatattcattcagcttgttttcagcaatggaaaatagaaagctgctattgtttccataaaagtagagtatcgaattttgaagttgtcttttgtttgcaacttagtgagttactagaccataaccttgttctatgtaaataacatacttttttggataagctatgtaaataacataacatataatgttcatatctttacataacaatgaaaagaaaaggaaaaaaaaaaaaaaa

SEQ ID NO: 4890 - DNA, 1561 bp, Glycine max
  misc_feature (821)..(821): n is a, c, g, or t
gtcgacccacgcgtacgccttattttgcggatcctcatattgactgagagaccacaaagctttcctggtgctaccctttgaatggttggtagtatttggataaaaaatagcataagtgaaagaaaaaagtctgtagattagatcagaattgaatccaagtggtgcagaattcagagcagcatttggtgtccaaaagaagaggagtaataggagagaggtgataaaggtgtcaagaatggggatacctggtgttgatggagaattgaagaagattttgaacgctaacatggacgaagttggtgctagaaagcgtgcacgtgaggctttcaaagatattcagcttggaattgatcatatattgtttaagaccccatgtgatggaataaaaatggaagagtcatatgagaagagctcaaagggcctagaaatcttctgcaaaagttggcttccgagtgcatctaagccaaaagcagcagtgttttactgtcatggttatggagacacttgctcctttttctttgaaggcatgtagctggaattgctagaaagctggcatcatctggatatgcagtttttgccatggattatccaggatttggtctctcagaaggactccattgctatattcatagttttgatggacttgttgatgatgtcattgagcattactcaaaaatcaaagaaaatccagagttccattctcttcccagcttcctatttggacagtccatgggtggagctgttgcattaaagatacacctgaaacagcctaaggcatgggatggtgccattcttgttgcgcctatgtgtaaaattgcagnatgacatggttccaccaaaattcctcactcatatcctgattggtttagccaatgttttaccgaagcataagttagttccaaacaaggatttagcagaagcagcattcagagatttgaagaagagggaacagactgcttacaatgttgttgcttacaaggataaaccacgtttgaagagtgctgtagaaatgctacggctgcgagaagacgacagaaggggattgaaagaagtttctctaccaatattcatccttcacggggaagctgacactgtgactgatccatcagtgagcaaagccttgtatgagaatgcaagctgttcagacaagaagcttcagctttacaaggatgcctatcatgcacttcttgagggtgagcctgatgaaataataactcaagtttttggtgacatcatatcttggctagatgagcacagcttgacacacaatcaatcttcctcttaataccgattaattatttttgctctctggattcaaaagatgaatattcattcagcttgtttccagcaatggaaaatagaaagttgctattgtttccataaaagtaactagagtatcaaattttgaacttgtctgttgtttgcaacttaagtcagttactagacataaccttgtttttatgtaaagaacctattttttttttcgataagctatgtaaataacatataatgtttatatctttacttaataaagaaaagaaaatatagtggggacccaggc

SEQ ID NO: 4891 - DNA, 988 bp, Glycine max
tctcgagccgaatcggctcgagacggctcgagaagacgacagatgggggtgacaatctttcttagctagatcagtgcctcatttttctttcagttttcctgcttcttctcttcttcaactggttttgagattgccattttcttatcttgtttagtttagcttgtttggttgagaggaattaattattttgtataaaacaatgaaggagagtgtaggaaaccctttgcgtcttcaatctgtgaatcatatctccctcatatgcagatcagtggaacaatcaatggatttctatcagaacgttcttggattttaccccatcaggaggcctggctctttagattttgatggggcatggctattcggctacggaattggaattcatttgctagaagcagagaaccctgaaaagttgccaaagaagaaggaaattaatccaaaggataatcatatatctttccagtgtgagagcatggttgcagtggagaagaagctgaaagaaatggaaattgactatgtgcgagcaacggtggaggaaggtggaatccaagtggatcaactgtttttccacgaccctgatgggttcatgatcgagatatgcaactgtgatagcctccctgtgattcccttagttggtgaggtggcaagatcatgttcccttgtgaatcttgagaagatgcagaatcagcagcagatacagaaaatgctccagcaactttgatgagccttttctgttatgttatgtgatcagagcatcctcacggatcacgaggacttgttgcttttttttttatgtggttgagttgtcaatgtgtcattctgttccttttgttttgttttctttaattgtgttatataataataaacaatctgccaaatagatcagcgcttttgcaaccattgattagagtgtttcatagtggagtttgctttgctgctctctctttttaatttaatatgacttctggtaaagtacttcttttagtcaaaa

SEQ ID NO: 4892 - DNA, 889 bp, Glycine max
cccgggtcgcacccacgcccgtccgttcggctgtcgagaagacgacagaagccgtgacaatctttcttagctagatcgccatttttgcttacaattttcctgctacttctcttctttaactgttttctgttttgtttttgagattgccattttcttctacttttttacaacaatgaaggagagtaccatgggaaaccctttgcgccttcaatctgtgaaccatatctccctcatatgcagatcagtggaacaatcaatggatttctaccagaacgttctgggattttaccccatcaggaggcctggctctttagattttgatggggcatggctattcggctacggaattggaattcatttgctagaagcagagaaccctgaaaatttgccaaagaagaaggaaatcaatcccaaggataatcatatatctttccagtgtgagagcatggagccagtggagaagaagctgaaagaaatggaaatcgattatgtgcgagcaactgtagaggaaggtagaatccaagtggatcaactgtttttccacgaccctgatgatttcatgatcgagatatgcaactgtgattcccttagtaggtgaggtggcaagatcatgttctcttgtgaatcttgagaagatgcagaatcagcagcagatacagaaaatgctccaacaactttgatgagctttgtgttatgtggtgaagatcttgagagcatcctcatgatcacgaggacttattacatttttttttttaatgtggtcgagttgtaaatgtatcattttgttccctttgtttagttttgtatgttatataatataataataaacaatttgccaaatagatcagtagcggcgtagagcttttgcaaccatttaaaaaaaattatt

SEQ ID NO: 4893 - DNA, 2074 bp, Glycine max
ggctcgagttagtgagtaagtgaggaagcattgagagttggtggaaattaaggttaagaatcaaactgatcaaggagtattcaggatatcatggacgagaatggaagctcaagcaatgcaccaaagaacaagagaaaccttcctgtctccgttttcttcaaagatgcaagacatgttttcaagatggattccattgctaaggagatacttgggattgcattcccatctgcactggctgttgctgctgacccaattgcttctcttatagacacagcattcataggccatttggggcccgtggagcttgctgctgcaggagtgtccattgctttgttcaaccaagcttcaaggattaccatcttccctttggttagcatcacaacttccttcgtagctgaggaaaataccattgaaaaaatcaatacagaaaagaagttaagtgataaggctaagtccaaagaacaagtaatgctcgatgatcattcccttcaagacatagagaaagttgcatccaaagagaacaatgagactgagaatgtggaaatgaatgattgcaatacaagtatatgcaagtctacctctgatactagtagtagtagcagtaacaagagtgtgccaaaagatggaaggaagaagcgacacgttgcttcagcatccacagcattactttttggcacaatccttggtctccttcaagcaacaacccttatatttgctgcaaaacctctattagctgcaatgggtctaaaacctgattctcctatgctaaaccctgctattaaatacttgagattgagatcattaggtgctccagcagtgcttttgtccttggccatgcaaggaatctttcgaggattcaaggacactacaactcctttatatgttattctttcggggtatgcattgaatgtcattttggatcccgtgcttatcttctactgcaaattgggcatcaaaggtgcagccatttcacatgttctctctcagtacttgatggcattggccctcatggtgatattaactagaaaagtggatcttgtacctccaagtattaaagacttgcagattttcaggtttcttaaaaatggaggtctgttgttggcaagagtaatagctgtgacattctgccagaccttggcagcctcattggcagcaaggtttggtccaattcctatggctgcattccaaacctgcttgcaagtgtggctcacatcttcccttcttgctgatggtttggctgttgctgtacaggcaattctagcttgttcctttgctgagaaagattatgaaaaggtgcttgttgcggcaacacgaacactgcagatgagttttgttttaggagttggactctcttttgcagttggagttggattgtattttggagctggaatcttttccaaaagtgttcttgttgtgcacttaatcagaataggcctcccgtttgttgctgccacacaaccaatcaattcattagcctttgtctttgatggtgtgaactatggggcatctgattttgcatattctgcatactccttggtcaccgtgtcattggcaagtgttgcttcattgtttcttctctctaagagcaaaggtttcgttgggatatggattgcactaaccatctacatgagtcttcgcatgtttgccggtgtgtggaggatgggaacaggtacgggaccatggcgttttctcagaggccgctcaatgtcttgatgatgagatgacatctaacaaaagaaatttcattgttgagcagaaaatgttttgtatcacttttcaccatttaggaccagttgtctttattcaaaacatgatttatgcactatacaactatggtgatagtcttattatatattatattggacgggttcattttacacttgcaagtgttatattcaaagtatctttctttttttttggcctatgtttactgtatggtctctgtttaatgatgtatcctctgcttattgtaatattttgtcgtatttagaagattattcttcgtactgttagtagtatgtaaactctgagtgcatgtatacaaatgagaaaaataaattacttttttcaaaaa

SEQ ID NO: 4894 - DNA, 839 bp, Glycine max
cccacgcgtccgtacggctgcgagaagacgacagaggggttcggctgcgattagtctagcagaaacaattagagggtttaaattgattctttctggagaattagatggtcttcctgaacaagccttttatttggtaggtaatatcgatgaagctactgcgaaagctacgaacttagaaatggagagcaatttgaagaaatgactttaaatctttgtgtactgacccccaatcgaattgtttgggattcggaagtgaaggaaatcattttatctactaatagcggacaaattggagtattaccaaatcatgcgcctattgccacagccgtagatataggtattttgagaatacgtcttcttaaagaccaatggttaacgatggctctgatgggcggttttgctagaataaccaataatgagatccctgttttagtaaatgatgcggaaaagggtagtgccattgatccccaagaagcccagcaaactcttgaaatagcagaagctaatttgaataaggcggaaggcaagagccaaccaattgaggcaaatctagcttttagacgagctaggacccgagtagaggctatcaatgtgatttcataacaagttgatgcgtccgaatatcggaatacctaaaaaatggaaaatgaaccagtaagaaaaagatagaaaaaaaataaaaagatgagtagaaaaccttattagacccagcagtgaatggtatctaataagttctaactatattttacctactattggatttgacccaatgactccccccgtatgaaagcaatactctaaccactgagttaagtaggtcatttacccccccccccccc

SEQ ID NO: 4895 - DNA, 1351 bp, Glycine max
ccacgcgtccgagcagaacggccataatagcaggttcagtatgtggggttggagctgcactcattcttgccgtcatcccccgtccgctctacaaacgccacaggcgcatcaaagaagcacaagcacgcctagccaaagagcgtgaagggattctgaatgccagtaatggtggcagagccgctaaacttttcagtggcaaagagttaaagaaagccacaaacgacttctccagtgaccggcttctaggtgttggaggctatggtgaagtctacaagggcattcttcaagatggcactgttgtggctgtcaagtgtgccaagcttggcaaccccaaaggcactgaccaagtcctcaatgaggttcgcatattatgccaagttaaccaccgcaaccttgttggtttacttggttgctgcgtggaactggagcagcctattatggtttatgagttcatagaaaatgggacacttcttgatcacttgcaaggtcaaatgcctaagagccgtggcttgcttacatggactcatcgccttcaaattgcacgtcacaccgctgagggtctcgcttaccttcacttcatggctgtgcctcctatctaccatagagatgtcaagtccagcaacattctgctagatatcaagatgaatgccaaagtttcagattttggattgtctaggttggctcagacagatatgagtcatatctctacttgtgctcaggggacccttggttaccttgatcctgagtattataggaactaccaattgactgataagagtgatgtttacagttttggggtggtgctacttgagcttttgacagctcagaaggcaatagattttaacagggctgctgatgatgtgaacttggcgatttacgtgcatcagatggtggccgaggaaaagttgatggatgtcattgatccagtgttgaagaatggagctaccactatagagctagagacgatgaaggcagtggcgtttttggcattgggttgcttggaggaaaagagacagaatcgaccttcaatgaaagaggtggcagaagagattgagtatatcattagtattgcctcggcaaaggtagtggagaactagtttcttttgatgttaatgatgttgttgagttgtctgatgttttttttttttggattttgtaacttatgctttgtgtttgttgttgctagactaaatttttagttctagactctagcctcttgttttgcacatgtattatgtatatgtattacctttggtgaatgaaaagaagttctgcagtaaaaaacaatttgcaaaagctgtttcaaatcctcgttttgctaagctgaaacatcaaacgttcaaggttttgc

SEQ ID NO: 4896 - DNA, 1383 bp, Glycine max
attaaaccgagaagtcagcccatatatttttcgttgtttagtgtggtttgctggaggaaatgaattggaagttgaagatctgaaaccctaattatccatcgatcgatctggtgtggagggtgtgaattgtgaatttgtgattgtgggaaaaagatgccgcagaggcactcgaagaacaacaacgatcttgcgttcttcacgtacgatgagaagcgaaaactaggttatgggacccagaaggagaggttgggcaaggactccattaagcccttcgatgcttgctctctctgcctcaaatccctaattgatcctatgagctgccagaaaggccatctcttttgcaaagagtgcattcttcagtgcctcttgtctcagaagaaagacattcaaaggaagcttgcagcccatgctgctcagcagaagcaagaaaaagaggaggaagaagagaagttgatgttgcaaaaggctaaagagcttgatgcatttgatcaacaaaatcatggtgctgtaccacaatacagcgacagaaattatagtcgtgataagaatggtttccatggggcaaacagtgtgaaggtcacttcctatgaggaggaagcccttcggacaatgaaggcattttggttgccttctgctacaccagaagcttctattaaagtagatgcaccttctaacagtactatctgtccggaaggcaatgagaaactgaagttaaagacacttttccctgtgcagtttactgaggatactactgagcagaaaaaatccaaggctcttgacaagacctacatttgccctagctgcaaagttactctcaccaacacaatgtcgcttgtggcccttagtacatgtgggcatgtattttgcaagaaatgtgctgacagatttatggctgttgataaagtttgtcttgtttgcaacaaggcgtgtaaagagagaaatttggtgaatttggagaagggagggacaggttttgccggtcatggggatcatcttgaagccagagacttcaagcatttgggaagcggtagtggtttagggctggttagacctgcaatgaaaacttgacgctttattgatttaggttgttgggtgtatgatatagtccattcaggagaagaaaattgtgctttaacttctcttgatgaagttaccttgttaccgcgatacacattattatctgtcttattatcttatgatgttctacttcgttttattttatttttacttttttttttggtttatcccagataaacctttataacgtaaaaaatcagcttgattcattaatgactagcgattggcaatgttaaatgtaaatggatgcattctctgctgtattcttatttattattgtgaaaggatgctggctgtcaacactgt

SEQ ID NO: 4897 - DNA, 3079 bp, Glycine max
  misc_feature (61)..(66): n is a, c, g, or t
  misc_feature (320)..(324): n is a, c, g, or t
  misc_feature (366)..(393): n is a, c, g, or t
tacgtgaggatatctttgtgttacttatactgcagttttctctaacaaatcctccttagannnnnntaacttacaaagatgaatacagtaagtacgtacggtgaatggtataaggataatgtagataaccatattctctttattaagaaggccagcaagtacactcacattgactgtacattcttttggtgttgcttttacaggactctccagaagtgcatgctaatgcagcagaaactctctgtgctattactcgatttgctccaacagggctttctgccaaaatctccagcccgaggtagatttgttccgggacttcnnnnngttatgagtgcaatcctacatcagttacttgaagtttatgcnnnnnnnnnnnnnnnnnnnnnnnnnnnnatctatttgcagctttataggaagattattccatcatgctcttgaagtctctcggccaaaatctgttctcgttaactctttatctgtatgcatatctttgctagaccccaagagacatacttttggcgcttattatacatataaccgccaaatgactaatggatctactgtgactgcaaatcctgagactgttgaaggcatgcttgaaagcctaggtgatttactcaagctcttagatgtttcttctgctgaaaatctcttgctaactacttttggcaagttacaaccacctcttggtaaacatcgtttaaagattgtagagtttatatcagttttagtaactgttggtggtgaagctgctgagaggaaattgattgatcttggagctgtacaaagaattattcacttgttcctgctgcgcccgccccccccccttttgcatcacctcgtggaaaacattataatgtcttgcttggagagtaagaattcttctcttctggaacaccttctccgtgattgtgattttgttgggaaaattattcaagcagaaaagcaattcacgttagaagctgatacaaacaagccaacaatacctgctgaaggtaaatcagcacccaggataggatgcattggacacataacccgtatatctaacaaacttatccagttagggaataacaacagtgtgattcaggaacatttgcagggaaatagtgactggacagattggtacttgagtgttttatcaaatcgcaatgctgtggaaaatgtctatcaatggtcgtgtgggagaccaacagcgttgcatgacagaaatagggatagtgacgaggatgattatcaagatcgggactatgatgttgctacattagcaaataatttgagtcaggccttccgttatggcatttacaataatgaagacattgaagaggttcatggctctcttgaacgagatgatgaggatgtctattttgatgatgaatctgcagaagttgttatatcttctttgcggttgggagatgaccatgaaagtgggtctctattcacaaattccaactggtttgctttcgaggagggtagagatcgagtaggcaatgaacgctcaacaggttcccttgcttctccatcacctactgctgatgaggtttttgtaaaagccagtggggatgttgttgttgctggtgaagatgaggagttagctgacactgccaacatctccagaagcaggactaaaatttagaacatggtgggaccgataaaccagttgagtgggttgagtggagggaatcttcagatgccaatgacccttctgatgttcttcccaacggagtacttgagatagaacctgggagcaataatcctggtgtagctgaatcatcatctccatcatccagtgttgcattaacaaaggatgagcagatagctactgatgagccatcagcatctctcaatgtctcaagcattgaaacctctgacagaaacaaggacaaaactgagccaactcaaggagttgaaactccaagcacacgtgcatctgccacttctgtggatgacccagtcaccgaggttggaggagtccgtaacaaggacacaactgccaacaaaaaagctgtggataggcctgtcactgcagtggaaggagacagtaacaaggtcacaactaccaacaaaaaaacagtggatgagtcagtcactgtggttggaggagacagtaacaaggatacaactgtcaataaaaaagctgtggatgggtcaaccactgaggttggagggaacagtaacaaggacacaactgacaacaaaaaagaagtcgagcatgagtaggataatgtaaattattgtgtactggcttgggtggctaatcatgcaacattaatcaggtgggaagatacatcctggaatttggcagggcaagagcatttaggacctctctgcccactgtatgtttttttaataggggtattgaatttttattcccaccaacttctgaagctagaaattcaatgtttgatgaggctttagctcatgcattaggtgctactgaattcttcacctgttcatatcaattgtttagcttttgcccatttaggtgctactaaattttcaccctcttcaactttaactgttcgtataaaaatacgtctccccgttccgagtgtgttggtatgtgaagatgagttccttgattgacttgttcaattgctcaaaagtaaccttgtatgatgatttttataggaagtggttgaactcaggttcaggtcacgtgggtctttagcattgcaaagctccatggttgcttataaggacttgcatttcataaagcatactgaaaagtgagaaaaggccaaaaattggtgggaaggggagggacgtttctgtaattacgagttttcggatgaacaatattcgttacattgttacatactttgaacctttgggttctgaaacttgtattgacttgttccagtatattgtacaagttcccttccaaatcaccctagttggttttagacttacattggattgctatgcattgtcattttgtgggtttacaagaggggattaatgtgctggtaagtatttctcgattttgtttatattcaattattgatacccatttggtgacttttgactgtaagaatgaataataaattcgaaagaaataaattatatatcccgacccccc

SEQ ID NO: 4898 - DNA, 1155 bp, Glycine max
tcagctacgtaggccccccccccccccgaacaagtaaaataaacaaaagccaaaggaacaaatgaataatgttttatgttacattacatagtattataatattctcacgctattcactactctccatttggcctcagttgatcatacacactcttcttcttcttcttcttctctcttcttgcttgcaatatggacatgaattcctcaggtggtgcctgcggttggctttatgattatggctttgatatccctgttgctggttctgacttcatggcttcagactctggtggtttcagttgggggccccagagttacaacttcaagggtccttcaaatatgagcttggaaatggaatactcactggattcaactgtcatggaaaatggtccttcaaagcggttaaggactgaatcatgtgcatctggctccaaggcatgtcgtgagaaattgcgaagggataaacttaatgagaggtttctggaattgagttcgatcttggagcctggtagacagcccaaaacagacaaagttgcattattaagcgatgcggctcgagtggtaatccaattgagaaatgaagccgagaggctgaaggaaatgaatgatgaattacaggcaaaagttaaagaattgaagggtgagaagaatgagcttcgtgatgagaagaataggctgaaggaagagaaagaaaagttggagaagcaagtgaaactgacaaatatacaacccagcttcctacctcaagccccagatgctaaagggcaagttggtagccacaagctgatacctttcattggataccctggaattgccatgtggcagtttatgtcccctgctgcagttgatacttcaaaggatcatctgcttcgacctccagttgcataaagtggttagcaatagcatccacttctttgttgtatgtgttctttacatgtgttatatttttgtgtttaagttatccatcctgtctaatgtgtgttttctaaagtcactggtagaaagtgtgctcggaaactggttaatagtataagtttgtgctgttgctgtctgaactatgataagaaagtgctacatgtcatggctacaaagtgtgttgcattattaaaaataaaagtgagtttaagtggttctttgctgcaaaaaaaaaaaaaaaaa

SEQ ID NO: 4899 - DNA, 1636 bp, Glycine max
ttaaacaggaatataagaatcctcaaattcattctctcacatattccatagtacatgttctgcagaaatttaatgaacaaagtgacccttctagatgatagtagccgggtaatgcagatcaattaaaagaaaaaaaataaaaaataatattcactggaaaagaaactacagtgagtaatactgaaacaggcctgaaaatgataaacatagtaaggaatttgtgagaactcattcgtcagatcacaagctttcaattcttctgtgtgtggtttgagaagaattctaacagcagctattctactatcaccatctttgtcatgggcaaagtaattcagcgtctctacttttaaaccaaggattgagttatattggttcatggcatatacaagaaattaccgagagcttctttgactcatttcttggtctttgcctttttggaacctggagtttttttctttgctatcttcgcttgtggttttcctcctgtacttctacctcttttctttccagcacctgatgttttgtcagccttccctttggaattgccattagcttgttcctcagcattctcattttgatcagtttggttagttgacttctggatcttgccagcctcctcatccgaatcaaagaagaaaccatccagtgtcccttcaaccatagtttcagcttcatacacattagaatgtggcttcagctgtatgaagtcattcatgatggcctcaacctttgcctctgactgcccaaagctaacaacgcaaaacgtccggcaaggaactatagatgttttgtatattgttcctttcaagtctaaacacatttcctgatccccagatggtgaatctgaaattataatccgtccaacagctcccatatcaccactcagatcaatggagtcaccttgacactcaatgagtgcctttgtacgttgaactttctcagaaagcatcaaaggcaaccttgcggaggaaacatttggttcagcaggcttaggcttttcacaaggttcttcctcttcaactgtcaaatcaccaataccttttccctttgcactggcctttatttccttccctttaactggtgtatgatcttctatatctatttgtttttgtgaagacttctcttttgaaccctttttggatggagatttaccaagaacaagtccatccacacactctccttcacctgatatttcatgtttatggtctatatgcttgtcgatgtttgattcattcgctgtctctttttcctctttatttccttctttgggctttttcttgtctactttctttcttttggatggtgtttgttcttctactttaggacttgcagcttctggtgtctttcccttgctctttgtgaccttcagaaatctgggtgactttggagaagccccttcaacatcagttttatcttcattccaagatccaccatcacgtgaagacccagaatcagaggacagcgtcaaccgcgaatgagatggcacctgaaaagaacgcaaccaatccggggagctctcccttgaactgctcattatcagagatgaatgctaaacgaaaaccggtttgggcccttcagttcactgctgctgctgctaccaaccgagagcggggggggggcctacgtagctgctcga

SEQ ID NO: 4900 - DNA, 1353 bp, Glycine max
  misc_feature (1304)..(1304): n is a, c, g, or t
  misc_feature (1306)..(1306): n is a, c, g, or t
ctttttgttgttgtctttgaacgtatactacgctaacttctctttcccgaatcttttccaatctcccttcgccgatccttcgcgcgttccgccaccacctccgccgttctcagctccccgcttccggaaaattatgtatagtgttttcttggctgcttcatagtcctccctcccttgccaccggtgaatatttgattggcaatcctgtccttattagtcaagttttagaatacaaagaagcttcaatggccaagaaaccaggaccaagatccagtaaattgtcagtgtacctttacattcctaatataattggatacatccgggttcttttaaactgttttgccttctcccaatgtttatcaaacaaaatcttattctctattctgtattttttaagctttgtatgtgatgctgttgatggctggtgtgcccgcaaatttaatcaagtgtcaacctttggagctgtgctggacatggtaacagacagaattagcactgcttgtctacttgtagtcctttcccaactgtacaagcctggccttagcttcttgtcattgctcgctttagatattgccagccactggctgcaaatgtacagcacattcttgacgggaaagactagtcataaagatgtaaaagacagcagcagctggcttttcagggcatactatggaaataggatgtttatggcttactgctgtgtctcatgtgaggttctttacttaatcctgttttatcttgccgagaatcaaacagagaaactggttgacgttatatcaagtaatttacaaaagatatcattcctttctcttctaatgggtactagtttatttggatgggcagtcaagcaaattataaatgttatccagatgaagacagcagcagatgcgtgtgtgctttatgacatcgaaaaagaacacaagaactgatgtttcttccacgaccaggatccccttgtctttgtttttcagtaccatgtgcgctcaaagattaatatgaattatcccagatggcaattgggcttgaattgttcagttttctataatttgtaatgaaagaaaaataacatactgaactgaagaatctacctttctatatagcaaaaagattctgtagcgcaaggttcagttcttttttgtttagccattgttaatcacactgcgacgctaagaaagatttgttcagttttgaaattgcaaatccttttataggattggctgatcgtgtacttactgcttgtacttgcatgcgtttgatgaattgacacgatgtcatgccatatgttctaattctaaaaaaaaaananaaaaaaaaaaaaaaaaaaaaaaaaaaaaaaaaaaaaaaaaaaaaaaa

SEQ ID NO: 4901 - DNA, 706 bp, Glycine max
tacggctgcgagaagacgacagaaggggaagccttatccaccctcaatctcttccttcccaacagttccacacgttttctttactcctcaagcccttcagtgccatttttttctagaaaaaaactgtttccagttttattcaatccacaactgaaaacagaggactctgtttttgtgctgagaaaacaaaaaaatggcttccctttatgatgtgcttggtatttcagtgggtgcaagctgcatcgaaataaaggctgcttacagaaagctggcaagaacataccatcctgatgttgtggccatgaatcagaaggaaagctcagcgaaccaatttatgatgatccattcagcttactcaactttatctgacccagagaagcgagctcaatatgacagagaaatctatagatacagaagatcagcaaatatggaagcaagaaatcagacattttcctatgctggaagtgcaaggaaatgggaaacagaccaatgttggtagcagatcgtgtaatcatgttactcatgtacattattattattaaccattttgttcttttttttcttcttttcttttaagtttttgttatgtcattcatttatgttatccttcttcacaatactatcctagactgtatagttccaccatacttactggatctcctgattcaagcttcatgtgattttatgccacgctgatttgatccgt

SEQ ID NO: 4902 - DNA, 2011 bp, Glycine max
  misc_feature (1993)..(1993): n is a, c, g, or t
  misc_feature (1996)..(1996): n is a, c, g, or t
  misc_feature (1999)..(1999): n is a, c, g, or t
  misc_feature (2001)..(2003): n is a, c, g, or t
  misc_feature (2005)..(2010): n is a, c, g, or t
taactaacgaatggacatccattcaattattatttattcgttacgaccttccacctttttctggtgtgtgcgttcctaacattattgtttcctaccaagttctctgtctggggagttcttagcaccaccaccagcttctgcagtagctttaagctacgaaagattttccttgaccatggggcaaaagcatttagtgacggtgttctgtttatgggctttaacatgttcccttcttccatctttctcctttggaattctgagaattggtttgaagaagagacctctagatcttgatagtattaatgctgctagaaaggcaagagaaggtctaagatctgtaagaccaatgatgggtgcacatgatcagtttattggtaagtcaaaaggtgaagatatagtacctttgaagaattatttggacgctcaatattttggtgagattggaattggcacacccccacagcccttcactgtagtgtttgacactgggagttccaacctttgggttccatcatcaaagtgctactttactcttgcttgctatacccataattggtacacggctaagaaatcaaagacacatgtcaaaaatggaacttcatgtaaaataaactatggaactggatcaatatctggtttcttcagtcaagataatgttaaagttggcagtgctgttgtcaagcatcaggatttcattgaggctacccacgaaggaagtcttacctttctgtcagcaaagttcgatggaatactgggacttggatttcaggagatctcagttgaaaatgctgtgcccgtatggttcaaaatggtggagcaaaaacttatcagtgagaaggtgttctctttttggcttaatggggatccgaatgcgaaaaaaggtggtgaattagtttttggtggtgttgacccaaagcacttcaaaggaaaccacacttatgttccaattactgaaaaaggttactggcagattgaaatgggagattttttcgttggaggtgtttcaacaggtgtttgtgagggtggctgtgctgctattgtggattcaggaacatctttgcttgctggtccaactcctgttgtggctgaaatcaaccatgccattggagctgaaggagttctcagtgtagaatgtaaggaagtcgtttctcaatatggagagttgatatgggatctcttggtatcaggggtgaaaccagatgacatatgttcacaagttggtttatgttcttccaaaaggcatcaatctaagagtgctggaattgaaatggtgactgaaaaggaacaggaagagttggcagcgagagatactcctttgtgttcttcttgtcagatgcttgttctttggatccagaatcaactaaaacaaaaggcaacgaaggacagagtattcaactatgtgaatcaactgtgtgagagcctgccaagtccatctggagagtcagtgataagctgtaatagtctttccaagatgccaaacattacgttcacaattggaaataaaccttttgtcctcacaccagagcagtatattctaagaactggagaaggcattacagaagtctgccttagtgggtttattgcttttgatgttcctcctccaaagggtccattgtggattcttggcgatgttttcatgagggcatatcacaccgtctttgactatggaaatctccaagttggctttgccgaagcagtctaattacgctttctggaggattttctttgtaaatttgttaagcgtgttgtaaataagctgttataattgtagctctggttactttttgaaaccacgaatgtatttatccatttaagacgtagaagtatcccacttgcaagtgttgtgtgctttttatatgaaaaaaccatcctcatttcattccgtgtttgaccaaaaaaaaaaaaaaaaaatgtccttttcaattaggatacttgtaatgtgccatacccatgcgaaatcttattcttctttcacctgagttccaatggatanctnctntnnncnnnnnnc

SEQ ID NO: 4903 - DNA, 1347 bp, Glycine max
gtagaatgtaaggaagttgtttctgaatatggagaattgttatgggatctcttggtatcaggggtacgacctgatgatgtatgctcacaggttggtttatgtttcaaaagggctaaatcagagaggttaggatttggtcttttaaatttgtaagaagcattttttatatatcaatgttttgtatgctctttttgtcatatttgattcagtatacttcgattgagtaatgatttaaagatgtttgatggatgcttaataattctggctgtgagcttaaagtcaagttctgagtataatcaagtatacaatatgcagaaattttctgcaaaaataattgtcaaatgaaatcaatcatgctattggagctgaaggagttctaagtgtagaatgtaaggaagttgtttctgaatatggagaattgttatgggatctcttggtatcaggggtacgacctgatgatgtatgctcacaggttggtttatgtttcaaaagggctaaatcagagagcaatggaattgagatggtgaccgaaaagggacaaagagagttatcagctaaagatactgctttgtgcacttcctgtcagatgcttgtggtttggattcagaatcaactaaaacaaaagaagaccaaggagatagtattcaactatgtaaatcagctgtgcgagagcttgccaagtccaaatggagagtcagtagtagactgtaatagcatttatggattgccaaacatcacgtttactgttggagacaaacctttcaccctcacccctgagcagtatattctgaaaactggagaaggcattgcagaagtttgccttagtgggtttattgcttttgacattcctcctcctcgaggtcctctctggattcttggcgatgttttcatgagggtatatcacaccgtctttgactatgggaacctccgagttggtttcgccaaagctgcctaacaagacatctaggagattatatagggcatgttttaataagcttgttagtgtgttgtaaataagctttctgtaactactatggcacaggtttacattatagatctcaagaatgtacttgtgaaactatgcaccttgatgtattgtgttgtatttgaagggaccattttcattaaatgtcatgtagaaccgtatagattattataccccctatgttatatgccatgtcaatgtggatagcatggatggcctaaaatttctgctctatttaaattctctggccaatgatgatgctaatggaatatgatgcacaaagcatctgattatgaaacctatttaaccattactgattttgagacattaataatatttttctacaatttttttttaaaaag

SEQ ID NO: 4904 - DNA, 1572 bp, Glycine max
  misc_feature (1513)..(1513): n is a, c, g, or t
  misc_feature (1515)..(1515): n is a, c, g, or t
ggctcgagaattggtacacggcaaataaatcaaattcacatgccaaaaatggaacatcatgtaaaataagctatggaactggttcaatatctggtttcttcagtcaggataatgttaaagttggcagtgctgttgttaagcatcaggatttcattgaggctacccacgaaggaagtcttacctttctgtcagcaaagtttgatggaatactgggacttggatttcaggagatctcagttgaaaattctgtaccatactggtacagaatggttgagcaaaaacttatcagtgagaaggtgttctctttttggcttaatggggatccaaatgcgaaaaaaggtggcgaattagtttttggtggtgttgacccaaagcacttcaaaggaaaccacacttatgttccaattactgaaaaaggttactggcagattgaaataggagattttttcattggaggtgtttcaactggtgtttgtgagggtggctgtgctgctattgtggattcaggaacatctttgcttgctggtccaactcctgttgtggctgaaatcaaccatgctattggagctgaaggagttctcagtgtagaatgtaaggaagttgtttctcaatatggagagttgatatgggatctcttggtatcaggggtgaagcctgatgacatatgttcacaagttggtttatgttcttccaaaaggcatgaatctaagagtgctggaattgaaatggtgactgaaaaggagcagggagagttgacggcaagagataatcctttgtgttcttcttgtcagatgcttgttctttggatccagaatcaactaaaacaaaaggcaacgaaggacagagtattcaactatgtgaatcaactgtgtgagagcctaccaagtccatctggagagtcagtgataagctgtaatagtctttccaagatgccaaacattacattcacaattggaaataaaccttttgtcctcacaccagagcagtatattctaaaaactggagaaggcattacagaagtctgccttagtgggtttattgcttttgatgttcctcctccaaagggtccattgtggattcttggcgatgttttcatgagggcatatcacaccgtctttgactacggaaatctacaagttggttttgccgaagctgtctaattaggctttctggaggattttctttgaaaaattgttaagcgtgttgtaaataagctgttataacaattgtagctgggattcactttatggaatcacgaatggatttatccatttaagacgtagaagtatccacttggaacttggaagtgttgtgttgtgtgctttttatatgaaaaaaccatcgtcttcactctttattttattccgtgttgggcagaatattatgccttttctgtccctttcaaaattaggatacttgtaatgtgccatgctgatgccaatacttgtcctgctttctccagtcaatgacttgtgccaatggaaaattactaatgtcattatctgctaaggcnanaaaaaaaaaaaaaaaaaaaaaaaaaaaaaaaaaaaaaaaaaaaaaaaaaaaaaaaaa

SEQ ID NO: 4905 - DNA, 1359 bp, Glycine max
  misc_feature (1275)..(1279): n is a, c, g, or t
gtgagatctctctattcctggaacgtgcctttgttcgattggaagcatggttccattggttcaaacttgaaatgaagacactgtcatctggactggatgattatccacgagcttcacacccaagtgaagatgaacaccacttggatcttagatgttggatgttacttgcagcagactgtatgcattccattcaagagttgttggatatggaaagcaagcctggcatggattatggttctactgctaagttgctattggattttgagttactgaaccagatgcattttgatgatggatacggagcttactttgattttggaaatcatacagagaaggttcaacttaaatggaaagaactgcaggctggacaaaattatgctactcgccaacttctccgggatgttatggatatgcctgtattgagattggttcctcacattggttatgttagtttattcccgttcatgggaaggatcattccatctggatcacggattctggaaaagcagcttgaactcatttcaaatcgcagcctcttatggaccaactatggattacgttctcttgccaaaacaagttccttgtacatgaaacacaacacagagcatgaccctccatactggagaggcccagtttggataaacatgaattacagaattctttcagcactccaccattactccaaagagaatgggccatatcaggagaaagctaaagccatctacgaagaattgagaagcaatttaattagaaatatagtgcgcaattatcaacagacgggatttttgtgggaacagtacgaacagacgaagggtaagggaaaaggggctcatccatttactggttggacatcgcttgtagtattaatcatggcagaagcatatggaaatatttaggataaacacagcttggtggaggctattgtaacaaacattccttgcttccttctcattttccgtccatgaataccaaggcagtaagtgtgcatgtaacgttgttgtttaaatatgcatagattttataaaatatctatttttgaagcctcaaaaaaaaaaaaaaaaaaggtaaaaagagaggcggatcggattccgtccaagctaaaacaggggaaacgttgaaaagtggaacgccatcgcatcgccgtaaacgttcagagttacttcagcggttgtaacctgtactaactctagagtaatcttctatatctatatcctaaaataaatcacagtcaaagcaggtgtttggttttcagttggatgtcactccaagttactnnnnnattttgattttaccaactgtgcttgaggctgagctatctgtatcagctgatactaactagttgctgccaaatcatgttag

SEQ ID NO: 4906 - DNA, 731 bp, Glycine max
  misc_feature (363)..(363): n is a, c, g, or t
  misc_feature (388)..(388): n is a, c, g, or t
  misc_feature (395)..(395): n is a, c, g, or t
tcgaccgaatcggctcgagtacggctgcgagaagacgacagaaggggggagaagaattaagcactcggttgcagaacagaacaaacttctttcactctttcgcttctgaatcttcaacaatggtgctcgaggcgacgatgatctgtatcgacaattctgaatggatgcgtaacggtgattactctccttctcgatttcaagctcaagcagacgctgtcaatctcatttgcggtgctaaaacgcagtctaatccggaaaatacagtgggagttctcacaatggcagggaaaggcgttcgtgttttggtcacccctaccagtgatctgggcaagatcttagcctgcatgcatgggctagatatangtggtgagatgaaactagctgctgncattcangttgcccaactggcttctaagcatccgcaaaataaaaaccacagcagaggtttatggcctttgttgaaaccctgtcaagcatgaaaaaaaaatgttggaattgttggaaaaagttaaaaaaaaaaagggtccccttgaattggaattttgggaaaaaaatagggggaaaaaaaaaattggaaccccccccccatgtttaaaaaaaagaacccccccactttttgtggtcccccggggccaaaggcgcttttgagggctttaaaaacaccctttttttcggggggggggaaaggggaaagggtttccccctctcctccccccccacacaggggggat

SEQ ID NO: 4907 - DNA, 872 bp, Glycine max
gacagcacaagttgtttatcggaacgttgccacaaacgttgttgttttcagataaacacgtgactatctatctatcaatctccatctctgagttcaaccgaaccaaactccgaagctatggcagagctccaaaccaaggttgaacctgttccagtcccggctctggctccggtggagcccgagccaccgctggctgaggcgccgccgctcgagcagaaagcggtggtggtgcctccacctgttccggcagcagcagaggaaaccaaagctcttgttgttgtggagaaggagaaggagaatgagaagataccagaacctgtaaaaaagaatgccacaggtggatcccttgatagagacattgctcttgcagaaatagagaaagagaaaaggttgtctaatgtgaaggcatgggaagaaagtgaaaaatccaaagcagagaataaagccgaaaaacatctctctgctgttgctgcttgggaaaacagcaagatagcagctcttgaagctcagctgagaaaaattgaggaacaaatggagaaaaagaaagccgaatatggtgaaaagatgaaaaacaaaatagtcttagttcacaagcaagcagaggagaagagagcaatggttgaagccaagcgtggtgaagaaattctcaaggcagaggaaatagctgcaaaacaccgtgcaactggaaccactccaaagaaggcctttggatgcttttaaattttttattattcttttgtgcttttgtgtcttatgtcatagcaataatgaaattttgtccaaaaaaaaaaaaaaaagtttttaaatgttgtttatgcgtgtacgaaatggaaagggggacattatgaagtttgtgacatacaggacagcct

SEQ ID NO: 4908 - DNA, 1260 bp, Glycine max
atcatatactactaatatgaccgatggatgatgttacatgtatgatggtgcagtaatttcactatttatccgtttgaatttcgcgacactttaaattcaaagctcagctgcggtggcccccccccccacagcacaacttgtttatcggaacgttgctataaacgttgttgttttcagataaacacgtgactcactatctatctatcaatcgatatctccgagttcaaccgaaccaaactccgaagctatggcagagctccaaaccaaggttgaacctgttacggtcccggctccggctccggtggatcccgagccaccgctagctgaggctccgccgctcgagaagaaagcggtggcggtgccaccacctgttccggctgcggcagaggaaaccaaagctcttgttgttgtggagaaggagaatgagaagataccagaacctgtaaaaaagaacgcctcaggtggatcccttgatagagacattgctcttgcagaaatagagaaagagaaacgattgtctaatgtgaaggcttgggaagaaagtgaaaaatccaaagcagagaataaagcccaaaagcagctctctgctgttgctgcttgggaaaacagcaagaaagcagctcttgaagctcagctgagaaaaattgaggaacaactagagaaaaagaaagcagaatatggtgaaaaaatgaaaaacaaaatagccttagttcacaagcaagcagaggagaagagagcaatggttgaagccaagcgtggtgaagaaattctcaaggcagaggaaatagctgcaaaacaccgtgcaactggaacctctccaaagaaggcctttggatgcttttaaatttttattcctttttttgttgttgtgcttttgtgcctgatgtcatagcaataatgaaatttttgtctataatattttcatgtttgttttttaaatgttgtttatgtgtgtacgaaatggaaagggggacactatgaagtttgtgacatacagaacagcctctagatctttttgttaagatgaagtgttctatgctgtttattcatttgttttttccataacagaatcattctattcaccaagcaatagattttctctctcttcaatattaagaattattctggaatgaatcaataattcatcttgaaattataatgttcagtaaaaaaaaaaaaaaaaagtgcagcaacatctgaagctgagaataagacaagtgatttgatggatgatgagaatgccctactacagcaggcact

SEQ ID NO: 4909 - DNA, 910 bp, Glycine max
  misc_feature (695)..(695): n is a, c, g, or t
  misc_feature (725)..(725): n is a, c, g, or t
tcagctacgtaggcccccccccccggtttcggagaagaattaagcactcggttgcagaacagaacaaacttctttcactctttcgcttctgaatcttcaacaatggtgctcgaggcgacgatgatctgtatcgacaattctgaatggatgcgtaacggagattactctccttctcgatttcaagctcaagcagacgctgtcaatctcatatgcggtgctaaaacgcagtctaatccggaaaatacagtgggagttctcacaatggctgggaaaggcgttcgtgttttggttacccctaccagtgatctgggcaagatcttagcctgcatgcatggactagatataggtggtgagatgaacctagctgctggcattcaggtggcacaattggctcttaagcatcggcaaaataaaaagcaacagcagaggattattgtctttgctggaagtcctgtcaagcatgaaaagaagatgttggagatgataggaagaaagttgaaaaagaatagtgttgcacttgatattgttaattttggtgaagaagatgaggggaagacagagaagctggaagcactcctcgcagctgttaacaataatgataccagccacattgttcatgttccatctggtcctaatgccctttctgatgtacttataagtacacctattttcactggtgatggggaaaggtgggnaagtgggttttgcagctgctgctgctgccngctgcagctggtggtgtatcaaggaattggagttttggcgtggatccaaacttggatccagaattggctcttgctctaagagtttcaatggaagaggagcgagccaggcaggaagcagctgcaaaaaaggctgcagaggatgctgcaaaaaaaaaaaaaggaaggtgagcagcaagccagctcac

SEQ ID NO: 4910 - DNA, 1551 bp, Glycine max
ttgaaacaattcatcagctcatacacgtaatttcttttcctcttttcctcttatccaattctaatcacgatcagacattaaatgtaaacacttctctatcaaaaatttgaacttagttcgcctcacacttttgttttgtcaccttgtgagagactaattccctctaataaacgcaacgttgttcatcagtggcacatacatatacagcatcacaattctttgaagggtgaaaaagcttgatcaagaattgaagcatattgatcttcagccatggctacacccttggcctaccaagagcaccttccggcggcacccgaatggctgaacaaaggtgacaacgcatggcagctaacagcagccaccctcgtcggtcttcaaagcatgccgggtctcgtgatcctctacgccagcatagtgaagaaaaaatgggcagtgaactcagctttcatggctctctacgcctttgcggcggttctaatatgttgggtgcttgtgtgttaccgaatggcctttggagaagaacttttccccttctggggaaagggtgctccagcactaggccagaagttcctcacgaaaagagccatagtcattgaaaccatccaccactttgataatggcactgttgaatcacctcctgaggaacccttttaccctatggcctcgcttgtgtatttccaattcacttttgctgctattactcttattttgttggctggctctgtccttggccgaatgaacatcaaggcttggatggcttttgtgcctctttggttgatcttttcctacacagtcggggcttttagtctttggggtggtggctttctctaccaatggggcgttattgactattctggcggctatgtcatccacctttcttctggaatcgctggtttaactgctgcttactgggttggaccaaggttgaagagtgacagggagaggtttccaccaaacaacgtgctacttatgcttgctggtgctgggttgttgtggatggggtggtcagggttcaacggtggagcaccatatgctgcaaacattgcatcttcaattgcggtgttgaacacaaacatttgtgcagccactagcctccttgtgtggacaactttggatgtcattttctttgggaaaccttcggtgattggagctgtgcagggcatgatgactggacttgtatgcatcaccccaggagcagggcttgtgcaatcctgggctgctttactgatgggaatattatctgggagcattccatgggtgaccatgatgattttgcataaaaagtcaaccttgctacaaaaggtcagggtttcttaactcacatcacaaatttttccccacaaaatacttatagtactcattttatccttcactttcattttgtcttttttttttcatctctttttccatttttatcatatcatttgttacatctattactcactctttctctatatttttatttatttatctttccatccatagactcttacatttataatttaagcatagactttaggtgtagcttcacttttgcagtgcacgtgtttg

SEQ ID NO: 4911 - DNA, 2152 bp, Glycine max
  misc_feature (21)..(21): n is a, c, g, or t
  misc_feature (2122)..(2122): n is a, c, g, or t
tcgagtcagctacgtaggccnctcagctacgtaggcccccacggcggagtcaaatattcctcaaaacaacgcattcctttcactgccccttcccaattcccttccctgattgtcaattggatcttcatgagttcaacaaccactggagcatacttcgtttcctgtgttgcgggaaacaagaacaacgacctcttctgctgggttttgctctgcttgctgccaaaatttttgggaactccatttgcctacatcaactttctcttgattcaggccattgacaggaatccatcggcggtggaggttttgggaaacttcggggtggttaacctatagtctttattagtttggtcgtcagcagcagcatatttagatcccttattgttgagtggtgtgagaaatggtgtcctctcagttttctgcttttactttggctggctacaaaccgtctcagactcagttactctttcctgcaaagcttgttgatactgtgaacacagagcatattgagctggatttctctgatgtctttggtcctgttacgttagatttgaataacattgattccactaccagtgagcctatggaagaagtgaacgagctggtttatgatgacccaccagtgatttacactcgctcacattctctggttggcccttcaacttgtgttagtcaatcacttaagcttggcaaactcaccatacatgagactgaggattcattggaactagtggagcatgtcaatggagaggccattaaagacatcaaagaatcttcctttgttgaggaatcattgaaagatgaagatgggaatctcatgaagatccacagagttagcattgacgatttcgagattttgaaggttgttgggcagggtgcatttgcaaaagtttatcaggtgaggaaaaagggtacttctgaaatatatgctatgaaggttatgcggaaggacaagattatggagaagaaccatgctgaatacatgaaagctgagagggatatttggacaaagatagaacacccatttgttgttcaactcagatactcttttcagacaaaatacagactgtatcttgtgctggattttgtaaatgggggccatctctttttccagctttatcaccaaggccttttcagagaggatctagcacgcatatatacagctgagattgtttctgcagtttcccatctccatgcaaatggaataatgcatagggatctaaagcctgaaaatatcctactagacgctgatggccatgttatgttgactgattttggcttagctaaacaatttgaagagagtactagatcaaattcgatgtgtggtacattagagtacatggcacctgaaattattcttggcaaaggccatgataaggctgctgattggtggagtgtaggtgttctactgtttgagatgcttactggaaagccgcctttctgtggtggaaaccgtgacaaaattcagcagaagatagttaaagacaagattaagctgccagcatttttgtcaagtgaagcacattcactgttgaaagggctgctacagaaggaacaagctaggcgcttaggttgtggacctcggggtgttgaggaaattaaaagccacaagtggtttaaaccaatcaattggagaaagttggaagcaagagaaatccaaccaagctttaggccagaagtagctggtgtgcactgtgttgccaactttgagaagcgctggactgatatgcctgttgtggactcaccagctgccagcccaaatggtggaaacccctttaaggatttctcttatgtgaggcctgcagcctcttttcttcaaaggaataaccctgcttactagccagcttgaaatggcgttggcttaagatgccaacatgaaacattttcatgtgcccttgacttgtgtgaactttgcaggttgtgggttcattcacttattatgtgcaccttgctgcggctctctgcaaatgtattgagctgtcatgtatgcagaaaataaattactttatttataaaaaaaaaaaaaaaaaaaagacataacatgcggcccctcgcctggttccccataggaattaagaattttttgcaaataaccagctttatgatttggaaatgaagaattganagatatttgcaattactttaaattttaagt

SEQ ID NO: 4912 - DNA, 2293 bp, Glycine max
gggacccccgcggccgctttcgtttcgttcactgccgtttccctctctctcacactcacactcacactcctcccaaaaacccaaaaccctaactctctttcgcacactttctcacgctcgctgcagccatgaattgctccatctccggcgaagttccggaagagcccgtcgtgtctcggaactccggtctcctcttcgagaagcgtttgattgagcgacacatttcggattatgggaagtgtccaattactggagaaccacttactatggacgacattgtaccaatcaagacaggcaagatagtgaaacccagacctgttcaggcagctagcatccctggcatgcttggaatgttccaaaatgaatgggatggattgatgctatctaattttgcattggagcaacaattgcacacagcaagacaagagctgagtcatgctttgtatcagcatgatgctgcttgccgagttattgcaagactaaaaaaggaacgagatgaagctaggtccttacttgcacaagcagagaggcagttccctgtttctgcaccaaatgccataacagcaaatgcccccgtcctgagcaatgggaaaagagctgctgaggatgaggatctggctcctggtgcaaagaaaattcatcctggaatatcttctagcataatttctgagctaactgattgcaatgctgctctttcccagcagagaaagaagcgacagattcctccaactttggctcctgtcgaagctctagaggcatatacccagatatctagtcatccctttcacaaaacaaacaaacaaggcattatatctcttgatatcctttattctaaggacttaattgcaactggaggtattgatacaaatgctgttatttttgaccgcccatcaggacagatattatctacactcagtggtcactctaaaaaggtgaccagtgtaaagtttgtagctcagggtgaatcattcctaactgcttcagcagataagacagttcgtctatggcaagggtcagatgatggtaactataactgcaggcacatcttaaaggatcattcagctgaggtgcaagctgtcactgtccatgcaaccaataattactttgtgactgcttcacttgacggctcttggtgcttttatgaactttcttcagggacgtgtttgactcaggtttatgacacttcaggttcttcggaagggtacacatctgcggcttttcatccggatggtctcattcttggaaccggcaccacagaatctcttgtcaagatttgggatgtaaaaagtcaggcaaatgttgctaggtttgacggacatgctgggccagtaactgccatatctttctctgagaatggatacttccttgcgactgctgctcatgatggtgttaagctttgggatctacgtaaactgaagaacttcaggaattttgctccatatgattcggaaacaccaacgagctccgtggagttcgaccacagtgggtcctacctagcagttgctggttctgatataaggatttaccaagtagcaaatgtgaaatctgaatggaactgtatcaaaaccttccctgatttatctggaacagggaagaacacgtgtgtaaaatttggtccagattctaaatacatagctgtgggatcaatggaccgaaatcttcggatattcggcttgcccggtgaagatgctcctactgagtcataaaatgcctcagttgtacaagccaaagtcttgctctggagtaaacagttgctacctgctattggtgcttggtctaaatatctatgatgagattggaaaagttaatgaaggtagtggtttctttgattattcagtcttgctcctcacatggcatgttgcgtatgtaggatggaacaaatgtactttcaggctttgtgcagcaacattacgatgccttgatcatggctgctaaccttagtgatagaaagctgcaatatttgccttagtcatcaaaacctcaaagcttatgttgtccgtagataattttgtaacgtcaattgtttaattagtgagataactgatttgtcggccaatacttactatcggaaatttatatggttgtagctattcttgttcggggtgttttgttgacattaaaagaaatgggtgatagacatcaacttcttctagtagacagcttatgatgaaaaacaattccttttgcttctggatattacgttaatagatacaaaacaaactataacgaataggaagtgatgacattgtttaccttgtccaacgtaaaaatatattcaagtttccatctgcca

SEQ ID NO: 4913 - DNA, 1478 bp, Glycine max
aaaaaatctccttctggttctggcgcgcgtccccacagttaccactttttttcttcttcccatcaaaaaagaaataacctttttacatggtcatggtcacagactccaaacccatcattccccgccgcggcctcgtcgtcggcaactactgccatgacgtcctccaccgcgacggcgaggccgtcgccgagaccctcggcggcgctgcctccttcatctccgtcatcctcgacgccctcaccctccccttccacaccgtctccagggtgggccccgacttcgcctacgccgccgccacttccaaccatccccccttgataatcccaacctcccaaaccatgctcttccacgcccacttcggttcggtctacccggaccgcctcctgaaccgcgtccgatcctgcgattcaatcctaccctccgacctaccggaccagactcgattcgggttcggactcgcggtcggggtcggcggtgagattctcccggagacactggaaaaaatgctatctatctgcgaccacgtgttcgtcgacatccaggctctgattcgcaggttcgacaacatcaacggtcgcgtgagccacgtagcgctgagagacagcgggttcttccacctcttgccgcgcgtcgcgtttctgaaggcttccgcggatgaagccgtttttattgacgtggaggaggtgaggaagttgtgttgcgtggtcgtcacgcacgggaaggatggctgcgaggttttttgtccaaacggtgcgtttaaggtggcgccgttcgtggctgatcaggttgatcccaccggcgccggggactgctttctcggcgggtttgcggcggggattgtcaggggtttggccgtgcccgatgctgctctgttggggaacttctttgggtccattgctgtggcgcaattgggaccgcccaagcttgacttcaacttgattcagatcgttaaggatgagatgcacaaaaggaagctgcagggtattcccttcttagaaagaagagatgagtctccagggtttcggaagccacctgaacaagatcaattctatgcatctcttgttactgccaaagccataattatgtgccagattcaagaatctggacggaatctactaagctctcctaaagtgttggagcaaaacaacgctaagacgatactttcactgacttctgtgcacgaggaaccaattccaagcgttgatggtaaaccctaatatgggatggttgaagttccaaaactcactgtaattctccagttcacttccttttcatatcaaatagagatctattagcttccaggattctttcattttatggggccttttctacaccgagggtgtacggatagattttttaatccaaggatcatacaaggggaaaaaataatcccaaagtttatagaaagtagaaaaataattaatttcagatatattttttacttgaataagcaataatatccccttagattaatattt

SEQ ID NO: 4914 - DNA, 2956 bp, Glycine max
  misc_feature (109)..(109): n is a, c, g, or t
agtgttagaatcagcacacttattcacaactagccctagggtagtagaccgatgatctgagaaaatatatgcaaaaacacaaaaatcccaccatgcaataatacattanaataggaacttaagaattcaaagagaagacataaagatataatttatgcttacatacttccaggcaccatatggatatggatagaaaaaattgtgagattaaccacagcctctctccggcctccgtacatattgtaaggtggaaagcaaagctcgtaaattcccctcttttcctgcagcccagcgcttaatttcaaaatccagtgtttcggcaagcctatgtctctcagcttgttctctttgagtttgtaagtcccgctgattcttctccgccaatgctttagcagcacgctccttagtcctgtggtggcgctccaacctggctcgtcgcctttcttcagtttccccttcaacttcctgaaactctccagatgttggagcagctccaaaaattgaggaaagatcatcaccaatattagtggatgatgatgctttcttcatacttgtagatgcacttgtagatttccttgttacatcggactgaaattgggattcaaaaacattgtctgaagagttagccctaggaggccttggaacactgctagctcgtgcacccatgccaaagaaggattcaagatcattttcattcttttgttggttcatccttgcagcagctgctgccctttctcgggcctcagcagcagccctttctacagcggcacgttccgctttaactcgtgcttctacttcagcccttgcagctgtagctctttcccgtgtttccctatccttcacctcagcagcagctttttcagctctttccttcgcctctgcagcagccctttctcgggcttcagcttgtgccctttgcactgcagccctttcagcacgtcctcgagcttcagcattagctttctcaacagcagccctctcagctctttgccgtgcttcagcagctgctctttcacgtgcttctctagtagctctctctacagcctgtcttgccctttccctctctagtcgctgttgttctctttctttctcctccctttctttcataagtctcctctgctcctttccttccttctccttttgctgccgttctcggtcaaacctttcctggttttcttgctcctctagcacagttctctcatctttttccatttgcacagcttctttgctcctagcagcctttgaatactctctctccctaacttcctttgcatgcctaaacttggcttcagctctatccatggcctccttcatagccgcagcagcagagttcatctctaattcttcatcaggaagaccatttgcactctcattatcattaccacgacttctgcccattgcaaaatcatcaagttcatcaaactgagatgaaggggatacccttccagcagcaggagcagacttaggtccctgagagaatcgggtagagccaggaaaagaagaaaattcattagtcttctttctagcattggtagaagctggtgaagttgttcctgacttgggaatatgtactggtcgtggaggagggggtcttgaaggtggtggagcagtagttggttgtgtaaaaagaggaatctctgataccgtcagccatatatcctcgcttgcttccaagttatcttcatatttcggagacatatctgcctgaacattggtttgtctaaaatccacattatcatatggaggggaagtaggccttgggccaactggtttatcagaatcagatgaataggtaggcatgtgaaatgggacatgtggaaattctcgatcattttcaacaggaatcttgttttgtgtgtgcctctcaggactcctcccagatattttatcaactggttctttatctccagtccaacttgtgcttgtattcaaccttggggaactgctacccttcctgctatttctctctgatgagaaagctggtgcagattttccaagaccatcaaaaggatcaatatcttcatatactttgccatttgaagttgaagaactatcattttttgtgcttccggaactactaaatttactaatttcctccaacgggtccataaagtggcctgcagatgaatccactggggctgaagctgattcaaatactttgaaagggtcttctgctgcagtggggattgttttagatgcactggcagttggttctgaggataaaccgatatcaggagtgtgccttccaccagatgatgacctactgtgtccgaatccagcaagcaaatcatcaaaatcggaaacacctttctcatccttctccgatctcttcccatccaaactcttcgattccttcccaaacccgccgagaagatcgtcaaacgcggcgccacgaccactctctgtcgtcgtggcgaaaacatcatcgaatttaacctttgaggtgctcttcagccccggcacaccgtcgaaaatgtcatcgtcgtacaccggtttgtcgtagaccggaggcggcggcgagttggtggacctggcagggggaccgccgtacatggaatccaaatcgaagggggaatcggagcggcgattgtcggatccggcgccggcgaggagatcgtcgaagttggaggaggatcgcgatccgaaatcgaggttgagagatgcggagttggaagatcccttgcatcggcgacccattggcccgcatttgccctggggtttgaggccgaaatcggaggtgaagaggccatcgaaatcgttcatcgttggatctggtgtgtgagggtgcaggggaatggtgtggtggtgcgatggaaagagcatgcgaaggggaacaatggcggtcgcgtggtgcgattcctccctccttttgccgaattggagaatttgccaagaccgattcaccttgtttaaattcttctttttcttttttctgttcacggacgcgtggtcgacc

SEQ ID NO: 4915 - DNA, 2162 bp, Glycine max
cgaagcgcctcgtacaaggacacaagaagtacgacaaattaagacagggcctaagagaaggtgttgtagagaggatacagcgagagcaaaatgtattctcattgggttcgattgatgcttctcattgcttgcattcttccagctttggttgaatgcagagtgaggcactacaaatttcatgtggtgtctaaacaaactaatagattgtgttcaagcaaatctattgtcaccattaatggcaagttcccgggacccactctttacgccagggaagacgatacagtgttggtcaaagtcatcaaccaagtcaatcacaacgttaccatccattggcatggtgtgaggcaattgagaactggttgggctgatggacctgcatatgtcacacagtgcccaattcaaccagggcaaacctatgtatacaatttcacactcacagggcaaagaggaacacttttgtatcatgcacatgttaattggctaaggtcaactctctatggtgccttggttatcttgccaaagagaggtgtgccttatcctttcccaaaaccagatgatgagttggttgtggtattaggagaatggtggaaatctgatacagaagctgtaatcaatgaagcactcaaatcaggattggcaccaaatgtctcagatgctcatactattaatggccttccagggacagttaccaattgttctacacaggatgtttacaacctgcccgtggagagtggaaagacctaccttttgagaattgtcaatgctgcactcaatgaggagctattcttcaaaattgctggccacaagctcactgtggtagaagttgatgccacatatgtaaagccattcaagattgaaacaattgtgatagcccctggccaaaccaccaatgtgcttctaaatgcaaaccaaaaatctggcaagtacttggtagcagcttctccattcatggatgctcctgttgctgtggataacttgactgccacagcaacattgcactacaccggcactcttgctgccacccccacaattctcaccaccccacctcccaaaaatgctacccaaattgccaacaacttcatcagctctcttagaggccttaactccaagaaataccctgtcaatgtcccattaacagttgatcactcacttatcttcactgttgggttgggaattaacccttgtccatcttgcaaagctgcaaatgggagcagggtggtggctgctatcaacaatgttacatttattatgccaaccattgccttacttcaagcacattatttcaacatcaaaggggtgttcaccactgatttccctgccaatccaccccatgttttcaactactcagggcctggaccagccaatttgaacaccgaaaccggcacaaaggtttacaggctaccattcaacgccacagttcaggtggtgctacaagacacaggaatcattgcacctgagaaccacccagttcatcttcatgggttcaatttctttgttgttggaagaggagtaggcaatttcaaccccaaaattgaccctaagaactttaaccttgttgatcctgttgaaaggaacactattggagtaccagctggagggtggactgcatttagattcagagcagataatccaggagtttggttcatgcactgccacttggaggtacacacaacatggggactaaagatggcctttttggtggacaatggcaaaggtcctaagcaatcagtgatacccccaccaaaagatcttcccaaatgctaatgtgtcaatcatcaattaattatgcaatacacaaaagaaaggccttccaatgccaaaacaaaagaagctttggagggatacagagaagccaggcaaaagaaaagtgagtgaagaagaaagggttatttaataagcgagtatcccaaatgttttttctttgagcaaataggagaatttgttcaaccacatttaataaaatggagcgagcattttagttttcctctttgcaaattcaattttttaagacacgttgtgtatgtattggaatcaacaagtgtatgctcttgtttgtttcaggaaatacaataagggttatttacttcgttaaaaaaaaaaaaaaagggcggccaacgactagtgagcaagaaaacccgggaattaataagaaaccggtccct

SEQ ID NO: 4916 - DNA, 809 bp, Glycine max
  misc_feature (674)..(674): n is a, c, g, or t
  misc_feature (738)..(738): n is a, c, g, or t
  misc_feature (741)..(741): n is a, c, g, or t
  misc_feature (743)..(743): n is a, c, g, or t
  misc_feature (763)..(763): n is a, c, g, or t
  misc_feature (809)..(809): n is a, c, g, or t
cccacgcgtccgcccacgcgtccgtcagctacgcaggccccccgtgcagatgaagtgtctccgcctctggtctcttctcttctcgcaagcggagccccaatttctccttcacgaaccctaattcactcttcccattcgaaatctcgatcaccttttcgattcaacctttctctcctcgctaatctcttcgttcgcctcgcacatcaaggtgagggattgaaattgaatcctcaagatgccagctacagcaggaagggttcgcatgcctgcgaacaatagggttcacagcagtgcagcgcttcaaacccatggtatatggcaaagtgccatcggctatgatccttatgcacccaataaggaagacaagaaggattcttctcaaaatctgccaaatgcagagcctgatgctgagaatgcatatgctagcttccaggggcttctacagcttgctaagataacaaatgctgaggtggatgtatcccgtggggcctgcaaaaagtgtggccgtgttgggcacctcaagtttcagtgcaagaactatgtgaaaattaaggatgaaaatgagaaggatcctgaagcaatgcagcctgtggggttggttggattggataaaaagttgaaggctgacaaggtggataagagaaagcaatgttgagagctctgaagaggagganggatagtgaaaggttcagattctgagaattggattcttgagaatggagaagaattattggctgnaangncctgggaaagaaaattagtnggggaagagaaggttctttttaaaaaagaaaggggggattttgggn

SEQ ID NO: 4917 - DNA, 1398 bp, Glycine max
tcgagtcagctacgtaggcccccccccccaacaattcaacatactcctatactctatttttcgcgtcacataaacaaaaaaaataaactggggagaagcatgttgttgatgttgggactatgcttcctattgttctctgcatttccacttgcgttctctgagagatgccacccacaagacaagaaagcgttgctccaactccagaaggacctcggcaacccttatcacatcatatcctggaacgcaaaggaggattgctgcgagtggttctgctgcgttaagtgtgacgagaaaacaaaccgcgtcattagcgttgccttatcatccccttttccagacaccaatctctcggcccaaatacctccctctgtgggtgacctcccttacctcgagtccctcgtcttccacaaattccccaaactcgtgggcccaatccagcccgcaatcgccaaactcaccaaactcaagtaccttgatctctccaacaacaatctctctggcccaatacccgattttttcgcgcaactcaagaacctcgacgatatcgacctttcctttaacaacctctccggccccataccaagctcgcttggtaaactgcctaaactcgcgtatctagatttgagccgcaacaagctcacgggctcaattccggcctcatttggatccttccaaaagcccgggccggctattatgctctctaaaaaccagctttcagggcgccttcctgcttctttggccaacttagactcggacaggatagacttgtcaaggaacaagctcgaaggcgatgcctccatgcttttcgggagcaataaaaggacgtggtctcttgacctttcaaggaacaatttcgcgtttgatctatctcgcgtggagattccccacaagaccctggcaaggttggatctcaaccacaataagatttatgggagccttcctgtggggttgaccaaagtcgaacattttcagctattcgacgtcagctataatcagttatgcggtctcataccgaagggtggagaattgcaaaagatcgataagtctttgtactctcacaacaagtgtttgtgtggctctccactatcaccttgcaaccataagcagatgactgtctaagtcgatttcatactttgataagtattcgtattttcatgtgtgtttgtgtgactttccaatttcacctttcaaccattataagcatatgcctatcaaagttggtttcatcagattaattattctgatttcaataaaatcgattacttgtttttctgtattacgtttatatggagtatcgtggtaatggattattagccccacttcgagtgtgaattgtaacattcgtgataattaatgttttgtaaggcatgtcatatatgtaaaaaaaaaaaattagct

SEQ ID NO: 4918 - DNA, 866 bp, Glycine max
tacggctgcgagaagacgacagaagggggtacaaacaaatgcttctgaccatatgatcaaaatacatgattatgtgtttgtagactgtaattaccatgataaatcaagcaatcggagcagctggagttgtaagcaaagaatgcaggtccgttgtcaatcaatatggacaaacaatcttggaattgctcttggctgaagcaaagccaaaaaagatctgctcacaaattggattgtgtacctttgatgggactcatggtgttagcatgggtatcgagagtgtggtggataagaatgaaaaaaaatcatctggtggcattcgggatgctggttgttctgcatgtgagatggctgttatttggatgcagaaccagctgaggcagaatcagacagaagataggataatagactatgccaatgagctttgtgaaaaattgcctaacccaatgggaccatcatccgttgactgtggaaagctctcttcaatgcctattgtttccttcactattggtggaaaagtttttgatctttcccctcaggagtatatactgaaggtgggagaaggtcctgaagcccaatgcattagtggctttactgctttagatgttcctcctcctcgtggccctctatggatccttggagatgtcttcatggggcgttatcacacaatctttgattatggtaagctgagagtcggatttgctgaagcagcatagagaatgttcttgagtctcaccggacgacaaccgcacttttttagtagtttattttctttcgtcttctttttttgggttcagaaaattggttataccaaacaagatattacatcatggaagcacaacttccatctgaatattttcaaccgttac

SEQ ID NO: 4919 - DNA, 1215 bp, Glycine max
tcgagtcagctacggtcggccccccccccgaatcccaagagagttggaaaacaaagtatagagtgaaagaatgggtgagaaaagcaagattttgatcataggaggcaccggctacatcggcaaacatatagtggaagcaagcgcaaaggctggaaatcccacttttgctttggtgagggaatccacactctctgacccctccaaggcacaactcatccacaattttgaggctttgggcgttaatttggtccgcggggatctgtacgatcatgagaagttggtgaaagctatcaagcaagtagatgtcgtcatatccacgctgggtcacctgcagcttgccgatcagctcaagatcatcgctgccattaaggaagccggtaatgttaagaggtttttcccttcggaattcggtaacgacgtggatcgtgtccatgccgtggaaccagcaaaatctgcattagctatcaaagcccaaattcgacgcagcattgaagccgaaggcatcccctatacgtacgtttccagcaactacttcgctggctattttcttcccacattagcacaaccaggtgcttttgctccacctccacccaaagacaaagtcattatcttgggcgatggaaatcctaaagcaattttcaacaaggaagaggacattggaacctacaccatcagggctgtggatgaccctaggacattgaacaagattctctacctcaggccccctaagaacatttactcgttcaacgagcttgtggccttgtgggagaacaagattggcaagaccctcgaaaaaatttatgtaccagaggagaaggttctcaaggacatcgaagaggcacctcttccaatcaatgtggtattagcaatcaaccactcagtgttcgtgaagggtgaccacaccaactttgagattgagccatctttcggggttgaggcttctgagttgtacccggatgtcaactacaccaccgtggaagaataccttggtcagttcgcttgagaatttaaaaggagaaagatgctcttgtgatcggatatttaaataatctgagttgttgatttggagagtggaagattgtgttttatgtcaaaagatcgctatgtgatgtaatcttgcctttcatgtgtagaatgttcctacttgaatggttgaaaaataataaatgacttacgagttgagataaaaaaaaaaaaaaaaaacaactcgagact

SEQ ID NO: 4920 - DNA, 1151 bp, Glycine max
ctaagaaagaaatgtctttaggaaacatctgtagtcctattttccatttgtctcactcacccttcttgaatcattctttccttcaatcacaccacacccccggtggttggagccataaattaaaaaaatataacatcctttggcctttatggaaccaatttacatgttgcttgcagacattcattctattggaaaccccctaaaaataagattcacagtggggtacaagtatggacaaagaagactaaactttatacccgcaaagatgaaaaatacaaaagttggcaacgacctaccctataacaaaaactcccctactatacatcccaaccatcgtttctactgtcaaatccccatttacgaccagctaaacttccatacatctctgaaaatttcatcaggcaatggcttctcaactgataatgtactttcgtgtttcggctaatcgctgcaccagaaaactttgaagtgtcaattgcccaagctggtttcacataatcaacagtccttgacgatgagcttgcatttgcatacaaatagtttaagagcacgtcttcacagttaaatatcttgtccaccagttccctacctttctcggcttccttgctcccgtacctcttgaaagccacttgagaatcaataaaagctgcaccagtaagaatcatgttgtaccccttatgcgaccgggcgtatttttctcccctatattttaacgggctcccatcaatgagccgaggatagaatccaacaatccgatctgggtgctgacgccacacattaaaacctcgctcgatatcatcgcatggcatcataatatcgtcatcaagctcaaggactgctcgtgtctttatcaatggatcggccctgaaccgattattcagagagttatttttctcttccctgatccttactggtactgcagaatctagatcactcaattttggagggactcccttgttccacaccaccactatctcccgcacagaagagcatcttgagtaatgtttcacatacatcttcaaattccaaagtcgagcatcataggtcattgttagtaaggtgaattgggaatattgccctttcaacgggtaaggctcttccgaaccattaccaccataaatatttttcactcctatgcacatcaatccaac

SEQ ID NO: 4921 - DNA, 1240 bp, Glycine max
aagtcaagaaccaatcttgagagcactacgagacacccaaattgagtctaattcttgagaaggaggtttcttcctctgggtcattgagattttctccattctccaaaaaaaaacaaaaaccatgtctggaattgtggttgttttcgactttgacaagaccatcgtcgatgtcgacagtgacaactgggtcgtcgatgatttgggtttcaccgatttgtttaaccagctccttcccaccatgccttggaactctctcatggataggatgatgatggagcttcattcaaatggtaaaaccatagaggacattgaagaggttttgcataggattcccttgcaccccagagttatacccgctattcaagcagctcatgctttcgggtgtgatttgaggattgtgagtgatgcaaacatgtttttcattgagaccattctgaagcacttgggaataagggaatacttctcggagattaacactaacccaggttatgttaacgaagaaggaaggttaaggattttgccttaccatgacttcaacaaagcttcccatggctgcactttgtgtcctccaaatatgtgcaagggtttaatcattgatagaatccaagattcaatttcacaagagggtaacaagaggatgatctatcttggtgatggtagtggtgactattgcccaagcttgaggctaaaagagagagactatatgatgccaaggaagaactttccagcgtgggatttgatatgcaaagaccctttgcttgttaaggctgaaattcatggctggagtgatggagaagagttggagcaagttctgttgcacttaatcgccaaaatttcaatggaggaaaattctcagttcatttcatctgattgcaagctacagactctctctgtctctgctttggagggtttgcctaaagtcctcccagttagaccataatttcttagtatctaaaaaaaatgtatcataactcaaaaaggggtttttcttttttcgttgattaaccttcatcactaaaattgttaatgttggaagtggtccaaaatgggcagctataatttctagcagatacaaatagtggtttgctctagatccttgcggattggttatttttatgtgtttattattattttacagtggaaattatttgactaaatctgtaagctgaaataagcatgaatgaatgtgaaaataatgaaaagagatggatgccttgtagacaaaaaaaaaaaaaaaaaa

SEQ ID NO: 4922 - DNA, 1106 bp, Glycine max
cggacgcgtgggcggacgcgtgggcggacgcgtgggcggaacgaggccaagccaacaagaacacaaacagagccttattcttgagaaacaggtttcttcttcaaaacaaaatgtctggaaccgtgattgttttcgactttgacaagaccattgtcgatgtcgatagtgacaactgggtcatcgacgaattgggtttcaccgatttgttcaaccagcttcttcccaccatgccttggaactctctcatggacaggatgatgatggagcttcattcaaatggtaaaaccattgaggacattgaagaggttctgcgtaggattcctttgcaccccagagtgattccagctcttcaagcagctcatgctttagggtgtgatttgaggattgtgagtgatgcaaacgtgtttttcattgagactattctgaagcacttgggaataagagaatacttttcagagatcaacaccaaccctggttatgttaatgaagaaggaaggttaaggattttaccttaccatgacttcaacaaagcttcccatggctgcactttgtgccctccaaacatgtgcaagggtttaatcatagatagaatccaagattcaatttctgaagagggtaaaaagaggatgatctatcttggtgatggtagtggggactattgcccaagcttgaggctcaaagaaagagactttatgatgccaagaaagaactttccagtgtgggacttgatatgcaaagaccctttgcttgttaaggctgaaatccatggctggagtgatggagaagagttggagcaagttttgttgcacttaatcaacaaaatttcaatggaggaaaatgctcagttcatttcatctgattgcaagctacagactctgtccgtctctgctttggagggtttgcctaaagccctcccagttcgaccataatttcttagttgattaaccttcaagaaatgtatcataactcaaaagggtttttcttttttcgttgattaaccttcaagaaagcttcactaaaattgcttatgttggaatggtctaaaatgggcaactataatttctatcaaatacaaatactggtttgctctaaaaaaaaaaaaaaaa

SEQ ID NO: 4923 - DNA, 1625 bp, Glycine max
tcagctacgtaggccccccccccggtggcaacaacagctaactattagtgactataatcgatcaattttcaattttcaattgtgcccatcttcgttgctgccaccatgcataggatcaacaccgcaaggtccattttttctgctgttttcagaagcaaatctcggcctcactctgctgctttctccacctccttgctcttcgacgaaactcagacacagtttaaggaaagtgttgctcaatttgcaacggaaaatattgcccctcatgcttcgaaaatagaccaaacaaattatttcccaaaggaggtgaacttatggaaaagcatgggggaatttaatctccttgggattactgcaccagaggaatatggagggcttggcctaggttacttgtatcactgtatagcaatggaagagattagccgtgcttcaggatctgtaggtctttcttatggtgctcattcaaacttgtgtatcaatcagctggtgaggaatggaagccctgctcagaaagagaaatatttaccaaagcttatttctggggatcatgtgggagctttggcaatgagcgagcccaattctggttctgatgttgtcagcatgaaatgcaaggctgatcgtgtagatgggggctatgtacttaatgggaacaagatgtggtgtactaatgggccagttgctcaaacattagttgtctatgctaaaacagacataactgctgggtcaaaaggcattactgcattcatcattgagaagggaatgcctggattcaatactgcccagaaattggataaacttgggatgcgaggaagtgatacgtgtgagcttgtctttgagaattgctttgttccagacgaaaatattcttgggaaagaagggaaaggagtctatgtcatgatgtctgggctggatctggagagacttgttttggcagctggtcctcttggtattatgcaggcatgtcttgatgtcgtccttccttatgttcgacaacgagagcagtttggtcgtcctattggggagtttcagtttatacaggggaaaattgctgacatgtatacttcattacagtcttctaggtcttatgtgtattcagtagctcgggattgtgacaacggaaaagttgacccaaaggattgtgctggagctatactttgtgcagctgaaagagcaacccaggttgctttgcaggcaatacaatgtttaggtgggaatggttatgtgaatgagtatcctactggtcgtctcttgagagatgccaaactctacgagattggtgcaggaactagtgagatcagaagaatgattattggacgtgaactcttcaaggagcaataacatgccaccataccttatatgtggatggtgttgagccccttgggaaattcccttgcagatgtttgttaaactaatgctacattcatcaaacgagaattgatcattggtccaaggaataaaattctgccatattacatttttatatactttgaaaatcttcaaagcgatcatccatcttagaaaacaatgttgtaaaactatcaacagcagttgacacagataataataacttaagtatcttaatcaaataattcaagattcaaatcttatttgaatcttactcgagc

SEQ ID NO: 4924 - DNA, 844 bp, Glycine max
  misc_feature (1)..(1): n is a, c, g, or t
ngcatgcacgcgtacgtaaccccgcccgccgcgcatcgggttccccgccgaaagacgacccagggggaccacattccaaaacacaaacacatacattgtagtatcacttttgtctcggaatttgttcttttgagttatggcaagcttaaaggttgcatgtgtggttttgatgtgcatggctgtgatgagtgcaccaatgatggtgcaagccgtgtcatgcaatgatgtttctgtgaacctagcaccgtgcctatcttacctgatgcagggtggagatgttccagaatcgtgctgtagcggagtgaggaacattctgggttctgccagcaccacctttgacaaacaaaccgtgtgcaaatgtcttcagcaagctgctaataactatggcatcaacgacgaatacgctcaggcactccccgcccgctgcaatgtcagcgtcccttacaagatcagccgatccaccaactgcgactccatcaagttctaaaggagcgggtagctttgccaatttcttccgcgggataatgaggcaacgtatgctgtaacacttgttatcgttatcattaaaataaaagaaagcgagtgtgactcgggttccactcatgtgagcctgttattgtattagtttctgtttcagatactctctagtctttgttgtttcggtgtgattaaatgtatcttagttgattgttgctcgcaacaattaatcacgtatttgatataataattccaagctactttgattgttgcaaaaaaaaaaaaaaaaaaaaaaaaaaaaaaaaaaaaaaaaaaaaaaaaaaaaaaaaactcgaagggggggcccagtacccattcgcctataaaa

SEQ ID NO: 4925 - DNA, 696 bp, Glycine max
cgattgggtaccgggcccccccccggtccggctacgtagcccccccccccggaacaataggagcatcatggttaggctatggtgctcttctctctcaattacacttttattccaacagctcatcagattgtgcatttcttggagtgtgcaaaccccaacacccccattgccaatcctccctctcccaacatattcccagttgaaatggcaacaaagggagatcataatgtttttccattttggtgtgaacacattcagtgacagagaatggggcactggccaggaaaacccagcaatcttcaatccaacggggctcaacaccacccagtgggccactgtggcagcagatgcaggagtttcattgatgatattaactgcaaaacaccatgatggcttctgcctctggccttccaagtacactgaccattctgtcattagcagcccctggcaaggtggcaagggtgatgtggttcaagactttgtcaatgcagccactgcacaaggaattgatgtaggggtctacctttcaccttgggatagacatgaccctagatatggcaatgatttgctctacaaccaatactacttggctcaactacaagagttgctcaagaaatatccaaatgttagagagatttggttcgatggagcaaagggtgccaatgcaaaaaatatgacgtattacttttcagattg

SEQ ID NO: 4926 - DNA, 1616 bp, Glycine max
  misc_feature (1572)..(1572): n is a, c, g, or t
gaaacatctcttgtcctattttctatattttgtatcaaaatccaaaggcatctcttgcaggacttgccatgtaatttctaagagtttgtgtgtgtgtgtgtgtacacatacatatgcattttattcttcttcatagaattattgcttttttgaaatttgattctatcctgaaaagattgcttcatatgtttccttgaaaatgtttaaagtaaagccttcttcaattccatggttcttggttttgctattttagttctaggatttattcccctaattttgcttttccaatctgcgacctcccccccccccaattttattcatgcgcttttcttaaagtttccttttcgaataatgactgataatctgaagaaactgatatttgtctttctcctcaatcatattaatattattcttcacctggagatcttttctgttgaaaatggtgttcatattgcagtatgctgtagtatatcaattttgcattcattctttacacagtagaatggataacaagtattggtaaatttactttttcttcgatgggatctctgttgttaggttctgaatttgatcatggggtatattgattgagtcgttaacctacctctcttgtgtagtatttttagtagttttgggtaacaaccttggtgatctctactccctggattctgatttctcaacagccttggtgatctctactccctggattctgatttctcagattttgcctatagtttctacttttcaattggcctagtatgagctttccttgatttacttctccatgatttttgcgttgatctctcacagaagatcggtgaatgtgtggtgtattgtggaaacagtggctgtcttattacatgatttggtgatctctactccctggattctgatttctcagattttgcctatagtttctacttttcattggcctagtatgagctttccttgatttacatctccatgatttttgctttgatctctcacagaagatcggtgaatgtgtggtgtgttgtggaaacagtggctgtcttattacgtgatttggtgatctctactctggattatgaatctcgtatttgatttataaacttttcattggttaccgagaactttatttatttcagtgcgattttgtgttgatccacctgtgttcaattatgggcattttacaatagtgcttcatgattgttgagtccctagggaagataagaaatgttgtttatgatttatcttctcaacaggagcaataagggatgggttttcacttttgtttcgagaatctgcatttgggtttgaagaactacgcaactcttctttcatagttttcttgataacttttatatggaagattagatatatctaggtgttgaactacttgcgcttatttgtttgcagcagggagtcatgagatttctcttttggattgaagattaaataatgaaagatattgtgcgattcttgataaaaaaaaaaaaagaaaaaaaaaaaaaaaaaatctgcagcccggggatcactagtctagagcgccgccacgcggtgagctcagttttgtcccttagtgaggtattncagcttgcgatcatgccaagctgttctgtgtgaatgtatcgctc

SEQ ID NO: 4927 - DNA, 870 bp, Glycine max
gcgagaagacgacagtcggggattcttaggttgggaaaccgaaacaagtaacgagagaccaaagtagccaagaacgaagcttgacgttgtcttgaagtcattacaatttcatacccacattccgctttctttggaacactctcgctttcgccttcttccttcacactcagcaaatgagtcgctatccagaagttctgtgggcacaacgttctgataaggtttaccttactgttgctctacctgatgccaagaatgtttctgtgaagtgtgagcctcagggtttgtttactttctctgcttctggggttcaagaagaagcctacagctttagcttggagctgtacggatgcattgaacctgagggttgtaaaactaaatctggcttaagaaacatactatgctcaattcagaaaggagaaaaaggttggtggaagaggctattgaagtctgaagagaaacctgctccatacttgaaggttgattggaacagatggtgtgatgaggatgatgaagagtcaacctctgatttggtatctgatgatgatgctcggtttgttggtgaagatgatggaagcagtgatgacgaaggaatgctgtatcttcctgatttggaaaaggctaggggatagaagctctcactgtactgacagatttagggagcatggttgacatggaatcatattcatatggaactatttacaataggggcagagatagactatttgataagatgcaccgtgatgtgattgttgctgccttgtatatagaatctaagctaattagtgctttgaaaacagtcttgacattttgtgtgactacttgggaccaattcttatgagaggtttctttgaagggaatgctggttgcatc

SEQ ID NO: 4928 - DNA, 1327 bp, Glycine max
atcttaaagacgaaccaaaatgagagagagaattattcatgatatgttttgttcttaattggaaaattgtaatgcatgcacactctcttgaagggtaagtttctgagaattttctgtcactttctcggcaaaaaattatgtcttccctctccaatcttgaacgctttctcctacgcgtcactccagatgttccgtcactcactcttcagagctgctgtagtgatctaaatgcacaatggctacctcctggcaaagacacaatcgaatatttcactctgaaagatctttgggactgctactatgaatggagtgcctttggtgctggcattcctatgatattggaaaatggtgacactctggtgcaatactatgctccatatctgtctgctacccaaatctatatcagtaaatctaggattcggaaagagtacggtgaaggagttgaagttgaatgtgattccttgagcgaggacagtgcaagtgataacctttctagatcacccagtaacaattctagcaaagcatgggatgatgcttctttggattcaggctctgaccaagtgggttcatgcacaacaaaggatatgcttggcgctctttacttacaatactctgagaactctccaccttaccagcgggttccattttctgagaagataaccgagttagctaaaagccatccaggattgatgaggttgaagagtgtggatatttcccccacaagttggatggctgtttcatggtatcccatttattccgtaccatgccacaaaaataaaagggaccaaacaagcttcctcactttccattcactttcatctttccaagactgtgcaagcaaatatgacgaaattcacacagggaataacaaaagttgtttaattgattggcgaagtattgtgggagagaaatgcaagaaaaaagagaggggttgcatgtctctctctccttttgggttagccacgtacaaaatgaggaaaaacatatggttaaatccctataacaataaccaagtggtgaccgatctatacaacgctgcagactggtggttgaagcatatcaacgctgaccaccctgacttcaacttcttcacacgccaacctaccttgtagattggtttgtgttgtgttcatcaccaccagctcaatgcccctttgctcagtttgctactctcatttcggtatcagaatttgcttagtttggtactctgaccttcaccctaggtccaactctgagaacattaataaataaaatgtaaagtttagtttaatgggttcatgtaaagtgatatttatcttagcttctttacccaaaaaaaaaaaaaaaa

SEQ ID NO: 4929 - DNA, 1561 bp, Glycine max
gtttaatgggcaccttttgtcaaggagctagcgggtattgtggagagaggaagagacaattcaatttcatgctatcctgttgttgaaacttcacccacggacgcccccccccctatagttaaggctccggctaatgtgaaatggaagactagggagcttgccactgaagttgctttcaatgctgttaactctctagaaggtgctggtgtgtttgcagttgaattgttcttgactaaggatgggcagattttattaaatgaagtggcgcctagacctcacaatagtgggcatcacacaattgaatcttgctatacctcacaatatgagcaacatttgcgggctgttgttggtcttccacttggtgatccatcactgaaaactccagctgctatcatgtacaatatattgggtgaagaagaggggggtcttggttttcaattagctcatcaattgatcaaaagggcattgaccatccctggggcaactgttcattggtatgataagccagagatgagaaagcaacgaaagatgggccatataaccattgttgggccttcccttagcaatattgaaagcaatcttgctgtattggtggaagggaaagaattagatggcaagactgcagttgcaccacatgtggggatcataatgggttctgattcagatctacctgttatgaaaagtgctgctgaaatcttagagatgtttggtgtgcctcacgaggtaagaatagtttcagctcacaggactccagaattgatgttttcttatgcctcatctgctcatgaacgaggcatacaagtcattattgctggtgctggtggtgcagctcacttgcctggtatggttgctgcccttactcccttgcctgttattggcgttcctgtgcgtgcttctaccttggatgggattgattcactcttgtcaattgtccagatgccgagaggtgtccctgttgccactgttgcagttaataatgcaactaatgctggattgctggcagtgaggatgttgggtgttgccaatgataatcttctgtcaaggatgagtcaatatcaagaggcccaaaaggaaagcgtattgggcaaaggagataagttagaaaaacatggctggaaatcctacttaaacaatagttaattatccccattaatttggtgattattttttaggctcatttctcatttttggtcaactacaaaattttgatagaaaagatttcacatggagggtgtatagacccatggtatcaataagtaggttaagaataattcgagctatatgttttgttacctaaatcaacaggttttctattttctattgctaacatatagcaacagatgaaaattgtgtaatctggcagaaaatccttgtattcacattgatattgactgttatcaaaataagtccctgccagtgttgtgggatagatttgatcagctggaaagcaaatgatgagccaaaatgtagaacctgtattttattttggctgctaggtgaagtcgggagctaattttggttataaaaattcctagtggtcctttgcttcttggtattatga

SEQ ID NO: 4930 - DNA, 1678 bp, Glycine max
ggctcgaggtcccgcctccggtttgttgcagttgccggcgcgggtgcgattgcgatggtgaaatcgaacgagaacggttctggttccgtttcggtgcctcctttcctgaaaaaatgttacgatatggtggaagaccgcaacactgattctatcatccgttggagcgatggcggtgacagctttgtcatctccgacatcactcaattctccgtcacgctccttcccacctatttcaaacacaacaatttctccagtttcatcagacaactcaatatctatggtttcaggaaaattgatacggattgctgggaatttgccaatgagaactttgttagaggtcaaaagcatttgttgaagaatatacgtagaaggaaacatccacacagtgcagatcagcaaaaagcattgccacagcaagacaattgtgatgaaccatcacaagaagcaccgtatcatggcctttggaaagaagttgagaatctaaaacttgataaaaattcgctcacgcaagaattggtcaaacttaggcaacaccaggaatctgctgagaataagttgctgctcctgagtgatcgccttcaaggaatggaaaagcatcagcagcagatgttatcatttttagtcatggttgtgcaaagccctgggttcatggttcagcttcttcatcctaaggaaaataattggcatttggctgaatcatggaatatattggatcaagataaacaagatgacaagccagttgcttctgatgggatgataataaagtataaaccacctgtaggtgaaaaactaaagcctgtagttcctctgtctcctggtttcgaaaagcaaacagaacccgagctttctgcagaagggctaaaagacttgtgcgtcagttctgaattcttgaaagtgcttctggatgaaaaattatctccattagaaaatcattctccatttctcctaccagatttacctgatgatggttcatgggaacagctttttctaggtagtcctttcatgggaaacattcaagattctaataaagaaagtgaggggcacaccaatggtggaatggagatggaaccaacaatatctgagactccaaatgaaaattctcgaacttttgaatcgatgattgtagagatggagaaaactcgagaatgagttggagttgtatgcacatggtgggctgtcttcttggaatccatcagatatttttcagctgggctgtctcatactgagctaatggagctttagtttctgaaactaacaatatatagggaaggaagtaataatgtccatcagatatttttcagctgggctgtcttcacagattacttcacactataattatattatagtattaagtcgcaattattttctctcccatcttccttcagcagttgttagatcctcttctagaatccatattttggcttcctgatacatggtgtcggagatcaggagttgtatggtagtgcacaagtgcggcgacctatatatatagcggatcaattatttcttttatggaaaattgtaagggaaaacggcaactttattttttgtgccacattaaacagtggcacttgccttcatatatattataaaatttcacgaaaaaaaaaaaaaaaaaaaaaaaagggtttgcacacaccccgctctgataatgctcttttcccttctcccttacctc

SEQ ID NO: 4931 - DNA, 741 bp, Glycine max
ctcagaggcgtgtttggctttggggttcgggttgcgaatgaaggagtgagagcgagtgctgtatagaatcccatatttgattagggaaattaaaacagaaaacagaacccttcgaaaacccaaaaccctgtttggcgtcgcggccatggatttccaagtggtcgttctcggcggtggcctttccaagaagctcctccctctcgtttctcaggagcttccgaacgcgttgcttccggtggcgaatcgccccgttctctcctacgttctcgagtacttggagcttagcaacctcaaagatctcattgtggtggttgaaggcgaagaagcggttcttcatgttggggcttggatttcgggggcttatgctgatcgcctccacgttgaggttgctgcagttcctgaggatgtggggacagcgggtgcaattcgggccatttcgcatcacctaacagctaaagacattttggttgtcagtggtgatcttgttaccgatgttccacttggtgctgttgcagctactcatagacggcatgatgcagttgtcactgctatgctttgctctgctcctgtaagtggaccttcggagtcagtatcctctggtgggaaagacaaaatcaagaaacctggccgttatgatttgatagggctggaccccacaaaacagtttttagttcacatagcaactggagcagaagttgaaaaagatcttcgaattcagaagagcatgctccctgcagttgg

SEQ ID NO: 4932 - DNA, 1771 bp, Glycine max
cttacgcctcgagccgcttcactccaaaaaaatactactaaagagatgagttttgcaggttttctttctcttcaatcaatgtctgctacctgcggcttcttcttcttctccttcacccttctcttctccttcttctccttcctcgtcttcatctccaggatgaagccctggtgtaactgcgatctttgcaagagctacttgacggtgagttggctgaaaaagttccccaatctctgcgactggtacactcatctcttgcgtaaatccccaaccggcaccatccacgttcacgtgctggggaacaccatcacctcgaatccccacaacgtggagcacattctcaagacgaatttccaaaactaccccaagggaaaacccttctccaccatcctcggcgatcttttgggaagaggaatcttcaacgtcgacggcgaatcgtggaagttccagcgcaagatggcgagtctcgaactcggcagcgtggcgattcggacgtacgcgatggaattagtcaacgaggagatccacgcgcgactgatcccgatcatggaatcaaccgcgcgtggcgaattaaactccgtctgcgttttggatttgcaagatatactacgaagattctcgttcgacaacatatgcaaattctcgttcgggctcgacccgggttgtctcctaccgaatctcccagtctcggacctcgccgtcgcgtttgacctggcctcaaagctctccgccgaacgcgccatgaacgcgtcgccgtttatttggaaactaaaacgactcctcaacataggatccgagaagaaactgagagaaacaattaacgtcgtaaacgacgtcgcaaaagagatgataaagcagagaagagaaatggggttcaagacgcggaacgaccttctctcgcggttcatgggatcaatagacgacgacgtttatttaagagacattgtggtgagttttctattagcgggtcgtgacaccatcgctgccgggttaacgggcttttttatgttgttatcgaaaagcccggaggtggaggagttgattagggaggaggtgggccgggtgatgggcccgggccaggagtttccttcgtttgagcaaatccgcgaaatgcattacctgaacgcggcgattcacgacagcatgaggctgttcccaccgattcagttcgattcgaagttcgccacggaggatgacgtgttgccagatggcactttcgtgagaaagggcagtagggtaacttaccacccttacgcgatgggccgaatggaaaatatttgggggcccgattgtcttgacttcaggcccgaaaggtggctgcgtgatggggtgttcgtgccagagtgtccctttaagtaccctgtttttcaggctggtgtaagggtgtgtttggggaaggacttggctttgatggagatgaagtccgttgtggttgcgttggttcgcaggtttgatattcgggtcgcccaaccggatcaggagccccggttcgcgcccggtctaaccgctactttgagaggggggtttccggttcgggtttgtgaaaggaaatgaatagataaaggagttcacaacatgaatgtgaatggaatcatgaaatgaatgagtgaatgaaggaacagttttcgtgtaaataatataatgttgcagttaaatcgaacgtttttctttttttttctcctcttttaaacaggcgtctttttgaatttgcgtttatgtttattattgcccagtgaagtaaatactaaagccattgcaaattttggatttt

SEQ ID NO: 4933 - DNA, 1879 bp, Glycine max
caatttttattagtagcatggcactacagtgaaccaaacccattatatgtatcacacattccaaccctccttctcacatttcctttcttttactctccccccccccccccataaaaaaatatagagagagatgagttttcaaggttttctttctctccaatcaatgtctgcaacctgcggcttcttggtcttcgccttcacccttctgttttccttcttctcgttcctcgtttttgtctcgaggatgaagccgtggtgtaactgcgatgtttgcaagagctacttgacggtgagttggctgaacaagtttccaaatctctgcgactggtacactcatcttctgcgcaaatccccaaccggcaccatccacgtgcacgtgctggagaacaccataacctcgaaccccgtcaacgtggagtacattctcaagacgaatttccaaaactaccccaaggggaaaccgttctccgtcatcctcggcgatcttcttggaagaggaatcttcaacgtcgacggcgaatcgtggaagttacaacgcaagatggcgagtttggagctcgggagcgtcgctattcgaacgaacgcgatggaattggtcaacgaggagatccacgcgcgtctgatcccattcataatgggatcagtcacgcacgacgaattaaacgactccgtctgcgttttggatttgcaagatatattacgaagattctcgttcgacaacatatgcaaattctcgttcggtctcgacccgggctgtctcctaccgaatctcccagtctcaaacctcgccgacgcgtttgacttggcctcgaagctttccgcggaacgcgccatgaacgcgtcgccgtttatttggaaactaaaacgactcctcaacgtaggttccgaaagaaaactgagagaagcaatcaacgttgtaaacgacgtcgctaatgagatgatcaaacagagaatagaaatggggttcaacacgcggaacgaccttctctcgcggttcacgggatccataaacgacgacgtttatttaagagacattgtggtgagttttctcttagcgggccgtgacaccatcgcctccgggttaacgggcttttttatgttgttgtctaaaagcccggaggtggaggagttgattagagaggaggcgggccgggtggtgggcccgggccaggagtttccttcgtttgaacaaatccgcgaaatgcattacctgaacgcggcgattcacgagagcatgaggctgttcccaccgattcagttcgattcgaagttcgccacggaggatgacgtgttgccagatggcacttttgtgagaaagggtagtagggtaacttaccacccttacgcgatgggccgaatggagaacatttgggggcccgattgtctcgagttcaggcccgaaagatggctgcgtgatggagtgttcgtgccagcgtgtccttttaagtaccctgtttttcaggctggggtaagggtgtgtttggggaaggacttggctttgatggagatgaagtccgttgtgcttgcgttggttcggaggtttgatattcgggtcgttcaatcgggccaggagccccggttcgagcccggtttaaccgctactttgagaggcgggttgccggttcgggttcgggtttgtgaaaggaaatgaatagcaagtatgtggttgataaagtcataaagccataaaggagttcacaactagaatgaaatcatgaaatcaatgaggggatggaagaaccgttttcgtgtaaataataatgttgcagttgaattgaaagttttctttttccccctcttttaagctggtttcttgctgaatttgcgtttatatttattattacccggtgaagtaaatactaaatactataagcgttgc

SEQ ID NO: 4934 - DNA, 1392 bp, Glycine max
tcgagtcagctacgtaggcccccccagtatcagctacgtaggccccccccccttttttttcaagtcaaattgatcttttaatttaacaaattactttatttcattttacattaacgatgtaatcaaatgattctttaccatgatctttattcactcaagtaaaattttcttgcagctttaattatgttatgggcatggaaaattttgttgacagtgccactgtttattgtgattttgactgtgattttgacgtgtaaatggagaaaaagacatttgtcaatgtttgaaagtattgaaaattatctagaacaaaataacttgatgcctattagatattcatacaaggaagttaagaagatggcgggaggttttaaagacaagttgggtgaaggaggatatggctctgtgttcaagggaaaattgcgtagcgggtcttgtgtggcaataaagatgttaggtaaatcaaaaggaaatggccaagattttattagtgaagttgcaaccattggaagaacatatcatcaaaatatagtacaattaattggattttgtgttcatgggtcaaaacgtgctcttgtctatgaattcatgcccaatggatctcttgataaatttattttttccaaagatgaaagtatacatttaagctatgatagaatatataatatatcaattggagtggctcgtggaattgcttatctccactatgggtgtgagatgcagattttgcactttgatatcaagccccacaacattctactagatgaaaacttcaccccaaaggtctctgactttggattggcaaaattatatccaatagataatagcattgtcccaaggacagcagcaagaggaacaattggatatatggctccagaattgttttataataatattggaggaatatcccataaggctgatgtttatagctatggaatgcttttgatggagatggcaggcaagaggaaaaatctaaatccccatgcagagcgttcaagtcaacttttctttcccttttggatttataatcatattagagacggggaagatatagaaatggaagatgtcacagaggaggaaaagaaaatggtaaagaaaatgatcatagttgcactttggtgtatacaattgaaaccaaatgaccgtccctcaatgaacgaagtagtcgaaatgcttgaaggagacattgaaaacttagaaatacctccaaagccaactttgtatccaagtgaaacgatcacaaaaaattaaaaaatcaagtctataatgagataatatcgaattatttcataagttcttattattctatataaattaatcccttggtaaagtacactattttgacaatacacgataaacatttatttgcttctcaaaaaaaaaaaaaaaaaa

SEQ ID NO: 4935 - DNA, 1001 bp, Glycine max
tttttttttttttttttttatatataatactacttcaaaaaaatcattaatttctcaaacatgtccgcaaaacttcttatccaaatcaaagaaatacaaaaagtgaacaatcccgtggcagaaaatccttactcaaaacataatttccaaactactcaatcattattttctcctctcttccccttcagaagatatatatcatttacaactagaaaaactgagacaaagccctgggaatttagcaccatacaaggaatatgtacagataaatccattgtcaaaatgttgaaaataactaccaaaattcatcatcactacccatctgttttttcttgatatcgatccgtgaaaaacatcttaactgcaatagaggttaagatcaggtacttggaaatgtgaccccttattctccatcatgtttgtgtcaaaacgcgttctctttacgcatggagactcatcaatcacagagttcaccccacaatacattgaaggacactcgaatcctttagccatttccattaacatgccctgcaactcttccaaaccgtaatgctttccctctcgcctcacttgagccatatgggacaacatttcttccacaaaatcagaaaagccctcatcctcttcctcttgaggatcatacaagcccgcatcatacatagttcttttcttactatcagacaacactgaataggcttcttgaatttgctggaatttgcgcttagcttcacccagcaaagaaggcgaccttgtgcacttatcaggatgccattgcatagccagcttcctataagcacgtctaatctcatccacgttagaatctgagctaacaccaagaacgttgtagtaagaagtagaagacccttctccacgagcatccattgtcacaatcagcttctaagttctaaccattaaaaataaaggggcttttgcgttacttctttcagctcatgtaattgcaccctcttggctctttgctcttgacacagtacgtgaacaat

SEQ ID NO: 4936 - DNA, 845 bp, Glycine max
  misc_feature (10)..(10): n is a, c, g, or t
cccacgcgtncgacggctgcgagaagacgacagaaacacattccattttctaaaatggcaagcaacaccaccatggtagacgagcgtgcaggggcggagatcgtgtatggcgcggaggaatgccaccgcagctccatggagctcctggaagagcttggattccccaaaggggtgatgccattgaaggaccttgtggagtgcggccgggttcgcgaaacggggttcatttggatgaagcagaaggcgccaagccagcacttcttcgaggcaaccaagaccctcgtgagctacgcggcggaggtcaccgcctatgtggaaaagttcaagatgaagaagatgaatggcatcaagagcaagcaagtgttcatttgggtgccaattgctgagatgagcattgatggggacaatgggaaaaagatactcttcaagacccctatggggcttggtaagtcctatcctgccacagcctttatgaccatagaggagaaggaaaagaacctgcagcttcagggtaaggaagagatcaaagatatatgattatttaatcacaagttcatttggattgagggtctagaaccatgtacttgataatttgtttttgatttttgaataatagatgaatctgctgagaatttgattataaaaaagtatagaatcggctagctagactggaatgtgtgttccctatatatgcaatgttgatttgatgatgatgataataatatgtattgaaagatatatgacccaaatttcagatgagtaaatcctagaaactaacagcttgtgcttgaaaatgtttgtgaattagtttatcattctagaaatgaacttccttttcttttccc

SEQ ID NO: 4937 - DNA, 2207 bp, Glycine max
cgggaggttgattgccaatgacaggctggataggtgtgtggggatttatgttgaggtgaggagttcgaatgtgagggcaagtttgcaggcgctaaatttggattaccttgagatttctgtggcggagttcaatgatgtgcagagcattgaggggtatattgcccagtgggggaagcatttggagttcgcggtgaagcatttgtttgaggctgagtataagctttgcaatgatgtgttcgagaggattgggttggacgtgtggatgggttgcttttcaaagattgctgctcaggcgggtatacttgcgtttcttcagtttggcaagacggtcacggagagtaagaaggaccccattaagcttttgaagctgttggatattttcgcatcgttgaacaagttgaggctggatttcaaccggcttttcggtggtgcgccgtgtgttgagatacagaatttaacaagggatcttattaagagcgtgattgatggggctgcggagattttttgggagcttttggttcaggtggagttgcagaggccaaatccacccccgatggatggtaatgtgccgagattggtgagctttatcactgattactgtaacaagctccttggggatgactataagccaatattgactcaggtcctgatcattcatagaagttggaagcgccaaagctttcaggagaaactccttgtcaacgagattttgaacatagtgaaggctgttgaacagaatgtggagacttggatcaaggcttatgatgatcctatactgtccaacttttttgctatgaacaatcactggcatctgtgcaagcatttgaaggggacaaaacttggggagctcttgggggattcttggttaagggagcacgaacagtataaggactattactctaccatcttcttgagggacagctggggaaagcttcctggacatttgagtagggaagggttgattcttttctcgggagggcgtgccactgcccgtgacctggtcaagaaaaggttgaagaagttcaatgaagttttcgatgagatgtatgcgaagcagacaagttggatcatgccagaacgagatctgagggagaagacatgccagcttatagtgcaagcggtggtgcctgtttaccgcagttacatgcagaattatggtcctttggttgagcaagatgctagctctacaaaatatgcaaagtacacagtgcagaagctggaggaaatgcttttgtgtctatatcggccaagacctgtaagacatggcagcttgagaagttcaacatttagtgcaaaatatgggaatggagtacccgatcttcgcagaacagcatctgcagttgtgtaatttcctagtcatgtatttctgaagactgaacagcattgataatctttccccctcatcagatggatggctactgtatataattttcctctgggccctgtggtgcataagattggctttgcttagattctgagaaggaagttcctgagctctgccattcaaatatctgatttattttcatgaacatgaagcttagcttcccttctgagatgaaaagctggttactatctcccttgcaccgaggtttctgctaaagctttccatctgtaaaacagtaagttatgaaattcccataaatatgtatggaccttgattatgaggttttttggtcatactgcccgcttaagtaattttattcaatcttcatcttcatctattctgttgtttgtagcagcagcatcattttaatttgcaaattttgtgtacaattttttagtatacatggacgtagaagaagtttagattaacagaatatttcgtcattagttttgaaggggctgaagttgttaattgtaaatgcagaaacccttgagttgcttgttccatgtactttctttaaggatgtctttaccaaaataagatgtgtaatttggtaatgaattcgtggggaggccaaggaaaataggtttttatattcaattgtctttctgcaaaaaaaaaaaaaaaaaaaaaatatcgataccgtccacctcgagggggcggccggaactcaattcgcccaatacgcgaccggactaggcgcggcgcgcggggcgagttgtacaccttttgacagggaacacgggtggcggacccgcgccgacgctcgccacacgttctccgtgcccgcccacccctgccagtatcgaaacagggccgagcc

SEQ ID NO: 4938 - DNA, 1721 bp, Glycine max
ctctctctctctctctctctcccccacacacacacactctgatgttttggatttggcttaagtgactgtgttctgtttcttcaattgcacaaattgttggacttctaaattccatcactttgaagaatagtgtgataagtatcagctacgtgggccccccccccatgacgaagcagaaaattcgcaacgctcttttggtgcacttggtgattctcttcttcttttctacatcggttgtttcagcgagagttgtgtctctcttgcagaactacgggaacccgattttcagatcaaattttcattctatttacgacacttccaagtacggtgtgtttcaactgagtaacgggttgggtaaaacgcctcagatgggatggaatagctggaacttctttgcatgcaatatcaatgaaatggtcattaaggaaacggctgatgcactggtatcaacggggttggctgatttaggttatgtgtatgtcaacatagatgattgctggtcttctgtgacaagaaatctgaagggtcaactggttcctgatcataagacatttccatctggaatcaaagctctagcagattatgtacatggaaagggactcaagcttggcatatattctgatgctggggtttttacatgtcaagtccggccaggatcaattttccatgaaacagatgatgcagatttatttgcctcttggggtgtagattatttgaagtatgacaattgttacaatctgggcatccctccaaaagaacgatatccgcctatgcgtgatgctctcaatgcgactgggcagaagattttctattcactctgtgaatggggcgttgaggaccctgctttgtgggcagacaaggttggtaacagttggcgcacaactggagacatcaatgattcatgggcaagcatgacaaccattgctgatcttaatgataagtgggctgcatatgctgggcctggaggatggaatgacccagatatgttggaagttggcaatggaggcatgacttaccaggaatatcgtgctcacttcagcatctgggctttagcaaaggctcctctattgattggctgtgatgtaagaaatttgactgctgaaacacttgagattttgagcaataaagaagtcattgccatcaatcaagactctcttggagtccagggaaggaaagttcaagtttctggagcagatggttgcagacaggtttgggcaggtcctttgtcaggaaaccgattggctgttgctctttggaatcggtgctcaaaagtagctactataacagcttcatgggaagcacttgggcttgaatctggggttcatgtttctgtgagggatttgtggcagcacaaggtagtaactggagatgcagtgtcatcattcagtgctcgagttgatatccacgactgtcaactgtacatttttgctccatttacagtatcccactctgtagagtagctcatacctcacacacctatgactatgttttggttttggtccatcagtgtagaaagtgaacctctgcgtgtttattttctcctattttgttgcatcatttcaggatttctcgagtatcaaatcatgcgcatcaatagtgattagacttaaaatgatgccataagtaatgcatgtccttattatcatttttttcttttttgatgacaaaacaaaccatttcattatcaattggattatcaataactttaaggccataaaaaa

SEQ ID NO: 4939 - DNA, 795 bp, Glycine max
  misc_feature (773)..(773): n is a, c, g, or t
gagcagctacgtagcccacgcccccgccagcgcgaacgcgaacactcttagccatggctatccgaatcaactccttcactctctcttccgctttacctaagatggagctaagaggtggaaattcgcgcctctgggttagctcacagatgatgccgcaaatgcgaaaggaggctcgtggacgacgagtttggaggcgaagaaaattgataaaaaaggatgaatatatgcaccccaaaatggagcgcattcctttcatggaggagcaggtaaggattgtaagggaacagggaaagctcttgacgatggacatagagaggttaatgttatcagaagataatcggtttgattttgtgaatgagatagcagctgaggccaattcttatgttgagaacaacagggatgagtatggaggtgagaaaaaggccattcttcatgttttgagcaaccgaatgaatgatactggaatttacaggccagaagcatattatgagcctgatcccttcaagcccggacctcattatttgagagaagaatttacataagcccagaaaaaaaatgttatgctggcatcttaaactagggacaagaatttacatctttgcttcacttagcttaattgatttctgtcttaattagctgttgtttgtatgtatgcaaatcaaagccatcttctaaccggaaataaaatacaattaaaaggtagtattttctactcattctaaggatgttgaaaatggattataactagcattgcatttgttttcacagtttanaagtgtaatctcttgcaatccc

SEQ ID NO: 4940 - DNA, 820 bp, Glycine max
aaagttttgattagattccagatagcgcgaacactcaacgatggctatccgaatcaactccttgactctctcttccgctttacctaagatggagttaagaggtggaatttcgggcctctgggttggctcgcagatgatgccccaaatgcgaaaggaggctcgtggacgacgagtttggaggcgaagaaaattgataaaaaaggatgaatatatgcaccccaaaatggagcgcattcctttcatggaggagcaggtaaggatggtaagggaacagggaaagctcttgacgatggacatagagaggttaatgttgtcagaagataatcggtttgattttgtgaatgagatagcagctgaggccaattcttatgttgagaacaacagggatgagtatggaggtgagaagaaggccattcttcatgttttgagcaatcgaatgaatgatactggaatttacaggccagaggcatattatgagtctgatcccttcaagcccggacctcattatttgagagaagaatttacataaaatgttatgctggcatcttaaactagtgacaagaatttacatctttgcttcacttagcttaattgattttcttcttaattagctgctgttgtttgtatgtatgcaaatcaaagccatcttcgaaccggaaataaattacaattaagaggtattattttccactcttttcaaggagaattgaaatggattatgactagccttgcatttggtttaagaaaaagattaaatcttgaccggacttggtttccgtggttttttctagaccatggattacctagaatttttaaaatc

SEQ ID NO: 4941 - DNA, 1837 bp, Glycine max
aatctcagctacgtaggccccccccccacagacacattgcagctccagcttttcccttgcttccctctctcacacagcctgtcatgcctaattattaaccctgtgattctcttgttttaaaatttgagccggttgttttgttgtttgtgtctaactaaagggttgaacaagaacaaacaaccaagagtttttgatgatgtttctatgagctttctccaaattccttcttgaagtgcactatcttggattgatccttcctttaactttccttttccaaccatgactcaacgagagccatagagaattggccacttgttttgttagaattggttttatattagtgaaactaacctatgggaaaaaatgctggcatgagggaggaagatgctcaatgaacttcatcacagaaagctgcaattttggtacttcttacaacaggcatgggaactaaaattgaatattccataaatcttctagcatcctcagtagacagcaacaacattgtgggtggtgtggatgtctgggagcattatcagaacaaagtagagactaacaaacattgtagtattggagtgaataaattgcaagatcccatggataggatgctcgacagaaacaacatagagtccatcaaaaagacaatgcagatgcatgaggaaatcttcaaacaccaggtgagggaactacaccgggtatacagtgttcaaaagatgctgatggataacctaagaaaggaaactaaacaaaagaaattttggacccctatgaatggcatagacataagccattctcatttccttcaacaacaacaacaaactactactactacactaatttcatatgggcctgatttccatgttcgaagtttgagagaggacttatgctcaaaggaaaggagtggaagctgttctggagagaacataaagaggaaaattggttttgacctagaaaggcctgctgagagagacatctttggtggatctgatcagcatgaggcaggacctagctcctacactgcccttgagagatgtaaaataagcagcagcagcaacaatgatggatttgatgaagaaatggaagtggatttgactttaagcataggaggaggaagtcaagttaataagaagaatagtagttgttgtaagaaaccttatctgcttccattagggtgctcaaactcacccaatgggaagaccagggagctaaattcttctgtctctttccaatcagatagggtgggagattgcagtgaccccaccactcctatcagcagctcaagtgtgacatttgatcaagagagaaaggggccacattggctttctcaaggtttaaagcttaaataagagagaatttcactacaacaaaaaaattaagttttctgataaagattaattatcaacaaaattaatggatatttcatatcaatgacatgttataagaaaaaaaaaaacttaaataggaaagagagttttaacttttttattgtatgatgatgtatccttcctttctcaactctacatgggccactgaatttttatggttcaagtgttcagattcttagactagattttttttttttacttaattccaataaatggataacttaaactcccacttctgagtgtccctttctgtaaataggtagagtgagtttgatgtgcttcttagttcttaagttactttcttgtcctacataatattttcaaacctaaatgctattcattgtaaaaggagaacctagtactacttggcactatatgtgaatttaagtatacaaggagtggcctttgtcaaaagactacatcaaatcaaaattgttgaggttcctttttggccc

SEQ ID NO: 4942 - DNA, 1585 bp, Glycine max
gcaacaaagtcacaaatcacacatacacacactcaaatacatacactagtagtgtggtgtgtgcccttcctttatccttttgctttttgtgtgcaattaacacacactcacacaaaaatgacggcatgccaagattggccagagccagtgattcgagtccaagccttggctgcaagtggcttagccacaatccccgaacgtttcataaagcctaagtcccaaagacccactaatagtaacaattatgctccaaagaccaattcctctcaaattggtcatcataagaacaataccaccaacagcaacatcccagtgattgacatgaagcacatctacggtggtgacgagggaaagagggctgagacgctccggctcgtgtcggaggcgtgccaagaatggggttttttccaggtggtgaaccatggagtgagccatgagttgatgaagggggcaagggaggtgtggagggagttctttcaccagccacttgatgtgaaagaggtgtatgctaatacacccctcacttatgaagggtatggaagcaggttgggagtgaaaaaaggggccattttggattggagtgattacttctttctccattacatgccttgttccctaagggaccaagccaagtggcctgccctcccaacatccttaaggagcatcatctctgaatatggtgaacaaattgttaagctaggaggaaggatacttgagataatgtcaataaatcttggccttagagaggattttctcctaaatgcatttggtggggaaaatgaccttggtgcttgcttgagggtgaatttctaccctaagtgcccacagcctgacctcactcttggactttcctctcactcagatcctggtggcatgaccattcttctccctgatgaaaatgtatcaggacttcaagtacgcagaggagaagattgggtcactgttaagccagtcccaaatgctttcatcatcaacatgggtgaccaaattcaggtgctgagcaatgcaacttacaagagtatagagcacagggtgatcgtgaactcagacaaagatcgcgtttcattggcctttttctataaccccaggagcgatataccgatccaaccagccaaggagcttgtgactaaggataggccagcactatacccaccaatgacatttgatgagtatagactttacattaggacaagaggaccaagtggaaaagctcaagttgaatctttgacttccaaatgagatgagattccaattgagcagtagtttgcagtgcacaaaattaatttgcatatgaataatttatcatctttgtgtttgtctcaatatcagactcaattaatcaagtatcatatcccacttaaattctatgtaacactttactctgtatttttcttatctcaaatataatatatggttgagttattgcaaaaaaaaaaaaaaaagaaagaaaatgaataatggggagtggcagtgttgtcaaagtggccagctttctcctctagttgccatagtgggatgctaactaaatctcactatttatgcttgaggaaaaaagataataataaacatgttttttttcttttct

SEQ ID NO: 4943 - DNA, 2150 bp, Glycine max
gtgaagggagctccccaccggccacagtccacagcacatgttgtacatgtcaaatttatacagccgctgctaattacctcatatcagaaattaatcataattaataataatcaatatttcaaactaagaaaaagactgacgtggacggtgaaatggagatatattcagctacgtaggccccccccccaaaaagatagatatgatggaggagatagaccccagaagtggtttctgcagctccaattcaatcttctacagcaagcgtaagcccctcccactccctcccaacaacgccttagacgtcaccaccttcatctcctcccgcgcccaccgcgccaccacagccttcgtcgacgccgccaccgcccgccgcctcacctacacccagctatggcgttccgtggagggcgtggcagcctctctctccgtggacatggggatccgaaagggcaacgtggtcctcatcctctcccccaactccatccacttccccgttgtgtgcctggccgtcatgtccctcggcgccatcatcaccaccaccaaccccctcaacaccacccgcgaaatcgccaagcagatcgccgattccaagcctctcctcgccttcacgatctctgatttactccccaaaatcaccgcagctgcaccctctctaccaatcgttctcatggacaacgacggcgccaataataacaataacaataataatatcgtggccactcttgatgagatggcgaagaaggaaccggtggctcagcgcgtgaaagagcgcgtggagcaggacgacacggccacgctgctctactcctccggcaccacggggcccagcaagggcgtggtatcgtcccaccgcaacctcatagcaatggtccagatcgtgctgggtcggttccacatggaggagaacgaaaccttcatatgcacggtccccatgtttcacatatacggcctggtcgccttcgccacggggcttctggcttccggctccaccatcgtcgtgctctccaagttcgagatgcacgacatgctctcctcgatcgagaggttccgcgccacttacctcccgctcgtgccgcccattctggtggccatgctcaacaacgccgccgctatcaagggcaagtacgatatcacgtcgctgcattcggtgctctccggtggggctccgttgagcaaggaggtcatagagggctttgtggccaagtatcccaacgtcaccatccttcagggttatggtttgacggaatccaccggcgttggggcctccaccgactccttggaggagagtcgaaggtacggcacggcggggctcttgtctccggccacccaggctatgatcgtcgatcctgaatccggccaatcgcttccggttaaccgcaccggggagctctggctcaggggtcccaccatcatgaaaggttatttcagtaacgaagaagcaaccacatcaacccttgattcaaaaggatggttaagaacaggggatatttgttacattgacaatgatggattcatatttattgtggatcggttaaaggagctcatcaaatacaagggatatcaggttcctccagcagaactagaggccttgctactgactcatcctgctattttagatgccgctgttatcccgtatccagataaggaagctgggcagcatccaatggcatacgtggtgaggaaggctggaagtagcttatcagaaactcaagttatggattttgttgcaggacaggtggctccgtacaagcggattcgaaaagtggcatttatttcctccatacccaaaaatccatctggcaaaattcttcggaaggatctcatcaaactcgcaacgtctaaactctgaatagatgagctttttcgtaatatattttttctatcggagttggacaagtgaggaaataatctttagctccttttttgctgtaattttctggcttgtttacttttgctgctttcatattatctgttctttgttcaacagtctattgtaatttgtagagaacaaagtgctgtgagtacaccttataggcaataaaattgtctctttgtaatttcttttttcaattggaataacttctctatcagtttgtcatcagacttgtagaccaatatttaaaatagatttctcaaaaaacatagaaaaa

SEQ ID NO: 4944 - DNA, 1274 bp, Glycine max
tcgagtcagctacgtaggccccccccccgaagaaagaaaagagaagaaacgaagatagaatgtgcacagccctaaagacgaattaccagcttagcgaggagatcggtcgcggtcgtttcggcaccatcttccgctgcttccacccactctccaacgaaccctacgcctgcaaactcatcgacaaatccctcctccatgactccaccgaccgcgactgcctccagaacgaacccaaattcatgaccctcctttcacctcacccaaacatccttcaaatcttccatgttttcgaggacgaccaatatctctccatagtaatggatctctgccaaccccacacgcttttcgaccgcatggtcgatggtcccatccaggagtcccaagccgccgccctcatgaagaaccttctggaagctgtcgcgcactgccaccgcctcggcgtggcccaccgcgacattaaacccgacaatattctgttcgattcggcggacaatcttaaactggcggacttcggttccgcggagtggtttggggatgggaggagcatgagcggcgtggtggggacgccgtattacgtggcgccggaggttctgttggggagggagtacgatgagaaggttgatgtgtggagctgtggggtgattttgtatataatgttggcggggattccccctttttacggagattctgcggcggagatctttgaggctgtggttagggctaatcttaggttcccttctagaatcttccggacagtgtcccccgccgccaaggatctcttgcgaaaaatgatctgtagggattcttctagaaggttctccgcagaacaagccttgagacatccttggatcttgagtgcgggtgacacggctgaactcacttgagaatgtagctagagagagacatgacctaagttacatggtgcagtgtagctaattttgctccttttgtcttttctctctactgtctcaataaggtggtctactcgtggtggcagaggaaggaacggaacagagcacgcttctgtagatttttgttttgttttaggaatcttatatctgagactctgtatgagtcgagagaatcttgtttttccactctcggtgattttctctctgtgtagtagaaagtgagaaagtgggtgatctcccagactctcttcccccttgtagaaaggagtttgtttgctgatatccttctggttttttgtatctgtaaatcataaataaacaataattttgaatggtgtttaatttaaaaaaaaaaaaaaaaaa

SEQ ID NO: 4945 - DNA, 1234 bp, Glycine max
cggccgctcgagccggcaggccgggattgatagaatgtggtcagccctaaagaggaattacgaggttagcgaggagattggtcgcggtcgtttcggcaccatcttccgctgcttccacccactctccaaccaaccctacgcctgcaaactcatcgacaaatccctcctccttgactccaccgaccgccactgcctccagaacgaacccaaattcatgtccctcctctctcctcaccccaacatcctccaaatcttccatgtcttcgaggacgaccactatctctccatcgtaatggacctctgccagccccacacgcttttcgaccgcatgctccatgctcccttctcggagtcccaggccgcctccctcatcaagaaccttctcgaagccgtcgcccactgccaccgcctcggcgtcgcccaccgcgacattaagcccgacaatattctcttcgattcggcggacaatcttaagctcgccgacttcggttcggcggagtggttcggcgacgggaggagcatgagcggcgtggtggggacgccgtactacgtggcgccggaggttctgttggggagggagtacgatgagaaggttgatgtgtggagctgtggggtgattttgtatataatgttggcggggattccccctttttacggagactctgctgctgagatctttgaggctgtggttagggctaacctcaggttcccttctagaatcttccggactgtgtcccccgccgccaaggatctcttgagaaaaatgatctctagggactcttctagaaggttctccgcagaacaagccttgagacacccttggatcttgagtgcgggtgacacggctgaactgacttgagaatgtagctacatgctgtagtagtagtgtagctaattttgcccctttgtcttttctctctactagcttaataaggtctactcgtggtggcagaggaaggaacgcttctgtaaattttcatggtgcaagtagttttttttctttctaggaatcttatatctgagactctgggtatgagtcgagagaatcttgttttccactctcggtgattctctcttttgtagtagaaagtgagaaagtgggtgatctcccagactccctccccctagtacaaaggaggagtttgattctactatccttgtagtttttgtatatgtaaatcataataaacaatcattttgaatgaatgtaaatggtgtttaatcttctgaaaaa

SEQ ID NO: 4946 - DNA, 1843 bp, Glycine max
  misc_feature (1830)..(1830): n is a, c, g, or t
tggaatgaatggttacagatttgacactggcaaaggagaatcaaactagctttgaggagtatttaagcaataatcccaatgcagaccctcgcgtcgcttcggcagcccccccccccactactggcttctggcctagttacaaatcttttgatctcaatcttcctgcagaaatgataaggtgtgttgaagttttcatagaattttatcaaactaaaacgaagcacagaaaacttacatggatttattccttgggtacgtgtaatataagtgggaaatttgacccaaaaaccgtggagctgattgttacaacctaccaggcttcagcattactgctttttaattcgtctgatagactgagttactcagagataatgactcagttaaacttatctgacgatgatgttattagactgctccattccttatcatgtgccaagtacaagattctcaacaaggagccaaatacaaaaacaatattgtccactgattattttgaatttaattccaaatttactgacaaaatgaggagaatcaagattcctcttcctcctgtggatgagaagaaaaaggttattgaggatgttgacaaggacagaagatatgctattgatgcctcaattgtgcgtattatgaagagtcgtaaagttttgggctaccaacaattagtcatggagtgtgttgagcagttaggtcgcatgtttaagcctgacgtcaaggctattaaaaagcggattgaagatttgatttctcgtgactacttggaaagagacaaagataatgctaatatgttcaagtacttggcttgacatgatctaagtaattgtgcaaatgaagtggttactgcaaaatcaaaacaaaaggatcatgcttgaacttgtgcaaaagaaatgagtttttcctaaaaattttcttgaaggagctgtgagtgcttgtatattttgcctccatgtagatgtgtgatcatgttgggaaattgtaatcaattccataatccagctcactgatactttcaccatctttttggcttcaattccttctcgcaacatatttgatgcccgtctgttatctgcttcccttccctccctccccccagaattgtgtaagcgctccaaggaaattgtattttgattatcagcttagaaatcatcaggtgaatgggtatgccttttaaatctaaacccaactgctacggcctatggatcgacattatttgtctatgaatatatttcgcggcgacatctctactctatatttggtagtggctatgctattttaaaactattcgaagatgagattatcccaaggattaatttatggtattgctgcatgaatatagatctttactatctcgagtcgttgtagttcatgatccgttcataggcacgtagacgtcgctttttacgtcattttcatcatgtttatgattcatttttggtttaaatagttggatttatagttttcatgtaggtaattttagtttagtgatacttgattggaacaaatatcatgtcttaaatcaataaaagagttcaaaatattgctcaaaaattaaaatatatcacattgaatgacaacattcactcaaatttaggagttaaaaagctaaaatgagtcttttaaaagataaataaaagacaaaaagaaaactagtaaaaaaataaaacaattctcacagttccaacttttaacagatgagaagaatcttccataaatcaattcacaaacttctaattgagactaaattagcaatctgagaaaaatcatcagcatatgaaacatgttgctcctgaaacataataacaaatttctgcaggtcgatccagaggactnccccgggtaccga

SEQ ID NO: 4947 - DNA, 1789 bp, Glycine max
cggtccggattcccgggtcgacccacgcgtccggaaggatttgttttgaagagggagggggggtcatgtgttccctttccttttcccatcaatgcttctgccttcttcctcttctcttcttcgctctttcttttggaccctttcttttccctccttctccttcacctaccatttttagggttctctctccgatttcactctctcaatctacctaccccgatcgcttctgtttttcttctccacatttcaaatctatttcgctctggataattattgcttccttcctcgtgatcttctccatacctatcaattttgaattagcgtgtgcgaatattcatcgtttgagtgcagatttcggtgggtttagttcggcaacatgtcaatgagtgagcggaagactattgacctagaacagggatgggatttcatgctgaagggcatcaccaagctcaagaacattctcgaaggcttgcccgagcctcaattcagctccgaggactacatgatgctttacacgaccatctacaacatgtgcactcaaaagcctcctcatgactattcccaacaactttacgacaagtataaggagtcttttgaagagtacatcgtatcaacggtattaccttctttgagagagaaacacgatgaatttatgttgagagaacttgtgaagagatgggcaaaccataaaattatggttcggtggctttctcggttctttcattatttggatcgatactttattgctcggaggtcacttccgccccttaatgaagttgggttgacttgcttccgcgatttgatttacaaggaactaaatgggaaagttagagatgcagttatttcactaattgatcaagaacgggagggagaacagattgatcgagctctattaaagaatgtattagacatatttgttgaaattggaatggggcaaatggatcactatgagaatgattttgaagctgccatgctcaaagacacttcttcttattattctcgaaaggcttcaaattggatcctagaagattcttgtcctgattatatgctcaaggctgaggagtgcttaaaacgggagaaagatagggttgctcattacttgcactctagtagcgagccaaagttattagagaaagttcaacatgagttgttatctgtgtatgcaaaccaactccttgagaaagagcactctggatgtcatgctttacttagagatgataaggttgaagacttgtcaagaatgttcaggctattctctaaaatacctcgaggcttagatcctgtttccaatatatttaaacagcatgttaccactgaaggtatggctttggtgaagcaggctgaagatgcagctagcaacaaaaaggcagaaaaaaaggatattgtaggtctgcaggagcaggtttttgttcgcaaggtgattgagctgcatgacaagtacctggcatatgtgaatgattgtttccagaatcatactcttttccacaaggctcttaaagaggcttttgaggtcttttgcaacaaaggtgttgctggaagttcaagcgcagaactgcttgcctccttctgtgataacattcttaagaaaggaggaagtgaaaaattaagtgatgaagcaattgaagaaactcttgaaaaggtggtcaagctgcttgcctatattagtgacaaagacttgtttgctgaattttataggaagaaacttgctcgaaggcttctctatgacaagagtgccaatgatgatcacagacgaagtattttgaccccactgcaccaacgatgtggtggg

SEQ ID NO: 4948 - DNA, 2956 bp, Glycine max
ggctcgaggcatgatcaatttttttggttcttgatttccttcttttctcttggtttgtgttgtcgttgagaagtcgcacataatcttcttccttctcgattttcctctccttcgacgattcttagggtttcgcttcgttcaccaacgcgcgtggtttctcttctcttcacgattttggggtcgaaatttggagtttagtttgccggcatgtccatgagtgagcgcaagactattgacctagatcaaggatgggattttatgcagaagggcattttgaagctgaagaacattctagaagggcttcccgagcctcagttcagctcggaggactatatgatgctatacacgaccatatacaatatgtgcactcagaagccgcctcatgactattcccaacaactgtatgacaagtacagggaatcgtttgaagaatacatcgtatcaacggtattaccttctttgagagagaagcatgatgaatttatgttaagagaacttgtgaaaaggtgggcaaaccataaaattatggttaggtggctttctcgtttctttcactacttggaccgctactttattgcccggaggtcacttccgccacttaatgaagttgggttgacttgcttccgtgatttggtttacaaggaattaaacgggaaagtgagagatgcagtgatttcccttattgatcaagaacgtgaaggagagcagattgaccgagctttattgaagaatgtattagatatatttgttgaaattggaatggggcaaatggatcactatgagaatgattttgaagctgcgatgctcaaagacacttctgcttattattctcgaaaggcttcaaactggatcctagaagattcttgtcctgactatatgctcaaggctgaggaatgcttaaaacgggagaaagatagggttgcccattatttgcactctagcagtgagccaaagttattagagaaagttcaacacgaactgttatctgtatatgcgaaccaactccttgaaaaggagcattctggatgtcatgcattactaagagatgacaaggttgaagacttgtcaaggatgttcaggctcttttctaaaatacccagaggtttagatcctgtttccagtatatttaaacagcatgtgactgctgaaggcatggcattagtgaagttggctgaagatgcagtgagtaccaagaaggcggagaaaaaggatattgttggtttacaggagcaggtttttgttcggaaggtgattgagctgcatgacaagtacctggcatatgtgaatgattgtttccaaaatcatacactttttcacaaggctcttaaggaggcttttgagatcttttgcaacaagggtgtcgctggaagctcaagtgcagaactgcttgccactttttgtgacaatattcttaagaaaggaggaagtgaaaaattgagtgatgaagcaattgaagaaactcttgaaaaggttgtcaagttgcttgcctatattagtgacaaagatttgtttgctgaattttataggaagaagcttgctcgaaggctcctttttgacaagagtgccaatgatgatcatgagagaagtattttgacaaaactgaagcaacaatgtggtggtcaatttacctcaaagatggaaggaatggttacagatttgacattggcaaaggagaaccaaacaagctttgaggagtatttaaccaataatcctaatgcagaccctggaatagacttgacggttacagttttgactactggcttctggcctagttacaaatcttttgatctcaatcttccagcagaaatggttagatgtgttgaagttttcaaggaattttatcaaacaaaaactaagcacaggaaacttacttggatttattccttgggaacctgcaacattagtgggaaattcgatccaaaaactgttgagctgattgtaacaacttatcaggcttcggcattgcttctatttaattcctcagatagactgagttattcggagataatgactcagttaaacttatctgatgacgatgttattagactgctccactccttgtcatgtgccaagtacaagattcttaacaaggaaccaaacacaaaaacaatatcttctaccgactattttgaatttaattcaaaatttacggacaaaatgaggagaatcaagattcctcttcctcctgttgatgagaagaaaaaagtaattgaggatgttgacaaagacagaagatatgctattgatgcctcaattgtgcgtattatgaagagtcggaaggtgttaagttaccaacagttggtaatggagtgtgttgagcagctaggtcgcatgtttaagccggatgtcaaggcaattaagaagcggattgaagatttgatctctcgagactacttagagagagacaaagacaatgcaaatttgttccggtacttggcttgatgtggtcttgacgattttgcaaaagaagtggtggttactgcattcgatacaaacagcaaaacaagagcatcatatttgaacatgcaaaatatcagtttctccatagtttccttggaaggaggagctgcgagtgcttgtacattttgcctccatatccaggtatggattactgtagatgtgtgctcctgttggagaagttgtaatgaattccataagtagggccagctcactggtaccttcacttccttttccttttgattgctgcagttccatatgatgacaacttagttgatgcctgtgttaattatttcacccaacccccataaaggaaatagaaatcgtgtaacactagtttcagttaaattgtagttttattgtcgtcttcaaaaccatcaagtgaatgggtatctcaaggatttcaagataaaaaaaaaaaaaaaaatcgccgggtaccccccgttctgccggtgaatgctttatatgataattccgaggaaatggatcttatactttc

SEQ ID NO: 4949 - DNA, 983 bp, Glycine max
  misc_feature (18)..(18): n is a, c, g, or t
  misc_feature (35)..(36): n is a, c, g, or t
  misc_feature (42)..(42): n is a, c, g, or t
acaaggagcccaaaaacnaaaacttttttcttccnntaaagntttttggtcttaattataaatatacggccgcacacggggagattcaaggttcctcttcctcccggggatgagaagaaaaaagtaattgaggatgttgacaaggacagaagatatgctattgatgcctcaattgtgcgtattatgaagagtagaaaagttttgggctaccaacaattagtcgttgagtgtgttgagcagttaggtcgcatgtttaagcctgacgtcaaggctattaaaaagcggattgaagatttgatttctcgtgactacttggaaagagacaaagataatgctaatatgttcaagtacttggcttgacatggtatgaataattgtgcaaatgaagtggttactgcaaaatcaaaacaaaaggatcatgcttgaacttctgaaaaaaaaagagaggagtttttcctaaaaaatccttgaaggaggagctgtcagtgcttgtatattttgcctccatgtagatgtgtgatcatgttgggaaattgtaatcaaaattccataatcctgctcactgatactttcaccatctttttgggttctgattgctgcaattccttctcacaatgcccgttggttatatgattcccttccctccctccccccaaaattgtgtaagcgcttcaaggaaattgtattttgattatcagcttagaaatcatcaggtgattgggtatgccttttaaatctaaacccaactgctatggctcgacattaatttgcctacgataatatttcacaacgacatttctataatttgtagtgtccgagggcggccgaccgtgaggggatcgaattatcccaaggattaatggtattgctgcgtggatatggaatggatctttactatctaatgccattcttgttcgtgattcgtacaaatgttcgtagaagtcactttttacgtcaataataaaatatttattattctaatt

SEQ ID NO: 4950 - DNA, 1532 bp, Glycine max
gtcagctacgtaggccccccccccccccattgaatatttggggtagtctttgctccacaatctgtcactattcagctacgtaggcccccccccccccccaaaaattcttcttttcacaccatcttctgcacttgtcaagtttttgatttttgcatccttatatctctaaccaaaccctctctacttccacacaccaattcttagcaggatcattccaatataggcaacaggattgtaatggggaattccgttctctttatctctttcttcatcttcagctttggtttcttggaggctcaaaaggctccagcagtttatgtgtttggagactcacttgttgatattggcaacaacaactacttgagtctctccattgaaaaggcaattcttcctcactatggcattgattttccaactaagaaacccactgggagatttagcaatggcaagaatgctgcagatttaattgctgaaaaattgggcctacctacttcaccaccttatctctccctagtatctaatgtccacaacaacagcaacaacgtatcttttttgcgtggtgttaactttgcctccggaggtgctggaatattcaatgtctcagataatggttttaggcaatcaatacctttgccaaagcaagtggactactactcactagtgcacgaacaactggcacaacaaataggagcatcttctcttgggaaacacctctcaaagtccatcttcattgtggtgattggtggcaacgatatctttggttactttgactcaaaggatcttcaaaagaaaaacacccctcagcagtacgtggattccatggcttccacattaaaagtgcaactacagagattatacaacaatggtgcaaagaaatttgagattgctggtgttggtgcaattgggtgctgccctgcatacagggtcaagaacaaaacagaatgcgtttctgaagccaatgacttgtcggttaaatataatgaagctcttcaatccatgttaaaggaatggcaattggagaacaaggacataagttactcttactttgatacttatgctgccatccaagacctcgttcacaatccaacttcatacggatttgctaatgtgaaagctgcatgttgtggatttggtgagttgaatgcccaaattccgtgcctgccaatttcgagcatgtgttccaatagaaaagaccatattttctgggatgcattccatcctacagaggcagctgctcgcatctttgtggatgaaatttttaatggaccttcaaaatacatatctcctattaatatggaacagttactggccatctgaattggcaaataaattagttagtcctttgtaatgtgcttttcttttttgttaagcaaaaatagagcacaaaaattaagaaaaaaagatacacaattagctaaatcccaaagttattagtgaatgtctattttaattatggtcgaaaaaattagattgaacacatttggattaatctaagagtatgaaagagttagttcaaaaaaaaaaaaaaaaaa

SEQ ID NO: 4951 - DNA, 1419 bp, Glycine max
  misc_feature (1)..(1): n is a, c, g, or t
ngtcaagttttgatttttgcatctttatatctctagccaacccttctctaattccacacgccaattctaatcagcaggatcattccaatatgggcaacagaattgttatgggaaattcccttctctttatctctttcttcatcttcagctttagtttcttggaggctcaaaaggctccagcagtttatgtgtttggagactcacttgttgatgttggcaacaacaattacttgagtctctccattgaaaaggcaattcttcctcactatggcattgattttccaactaagaaacccactgggagatttagcaatggcaagaatgctgcagatttaattgctgaaaacttgggcctacctacttctccaccttatctctccctagtatctaaggtccacaacaacaacaagaagaacgtatctttcttgggtggtgttaattttgcctccggaggtgctggaatatttaatgcctcagataaaggatttaggcaatcaatacctttgccaaagcaagtggactactactcacaagtgcatgaacaactgatacaacaaataggagcatctactctcgggaaacacctctcaaagtccatcttcattgtggtgattggtggcaatgatatctttggttactttgactcaaaggatcttcaaaagaaaaacacccctcagcagtacgtggattccatggcttccacattaaaagtgcaactacagagattatacaacaatggtgcaaagaaatttgagattgctggtgttggtgcaattgggtgctgccctgcatacagggtcaagaacaaaacagaatgtgtttctgaagccaatgacttgtcggttaaatataatgaagctcttcaatccatgttaaaggaatggcaattggagaacaaagacataagttactcttactttgatacttatgctgccatccaagaccttgttcacaatccagcttcttacggatttgctaatgtgaaagctgcatgttgtggacttggtgagttgaatgcccaaattccatgcctgccaatttcgagcatttgttccaatagaaaagaccatattttctgggatgcattccatcctacagaggcagctgctcgcatctttgtggatgaaatttttaatggaccttcaaaatacatatctcctattaatatggaacagttactggccatttgaattggcaaataaattagtcacttagtcctttgtaatgtgctttccttttttgtggggttacttgttatcaagcaacacactggaacccaaaaaatgaagagagaaaaaaacatcttattagattaaacatttggattaatctaattgtacgaaagagtgagtttatgaacttttagctcaagtgatttattttatatttactaaaaaaaaaaaaaaaaaaaaaaaaata

SEQ ID NO: 4952 - DNA, 1549 bp, Glycine max
  misc_feature (124)..(124): n is a, c, g, or t
acacgtaactagataatcaattccgatgtatcttgtcgaaaaaattagttcagttgttaaggatcagacttatatcttactaagacatgaatttgaatctcactgacgattttaaagaccttcnttggtggctgatatgtaaataccttattctttgagtcttatggcttactagataaactctggaatccaactcgtctaaactttttctcagataaaaaatatctgatgtatcacatccaaaagtagggccccttttttagtatatatatatatatcttttctgcatcacaaattcaacctcctactccttccaaaaattcttaaggatggccacagcagaagaaatttcaactttgaaactgttgcgccaatatctcttgggggatatttcagacccttttctcaccaatctcattccagtaaaacttgaagacccctcatcaggacttgatatgggttcaaacttctcagaacaaagcagcttctgcaagtttctggagtgctttgattttgaagcagaagtggtaggtctcacttctcatcataaggtccaaagctccattgcaacaagtccaccccagaatttcaattttccagaagaaccaatggtgtcaatgaaaaaggaagcaacatgttatgcaacaaggcattacagaggagtgaggagaaggccatgggggaagtttgcggcagagattcgcgaccccaaaaagaaagggagcagggtgtggcttggcacatttgacactgagattgatgctgctaaggcttatgattgtgctgccttcagaatgaggggtcataaagccgtgttgaatttccctctagaggctggaatgtctcatccagagcccaacagcagtggcaggaaaaggagaagagagtacacaacagctgccacaagttcaaggcatgttatgtcatgagaaataattcagtgtgggagaaccatgtttttcttttggcattttttgccagttacacaagttaaagcaaggttttatagttacactacagttgagcatgatgagatctgttatttaaatccttgagttatggttaagggtgaaattgaattaaacccaagaatgaaacagctcataaagaaacctacttctacttttttatacaaggctctcaaagtagaatgtgtgatagtcaccactcaccttagttcattagataatgaggaaaattcttattgcatcttaactttatctttattcgcgccgttactaaccatatcgatagtggcttgttttcatcatttactgtaatagtcagcttttttcacaaggataaggtattatgggatgttcagtggagtatttaagtggcttggctttcccttcttaattggcagctaagttataagggagggtttcccaagtgcttggatatgacaatgatttttgctttcctagttacttaattataattataggatttattagaatttatcatttcctattttttactcaaattttacttgtaaagaatgtacaacgacttgtgaatataaatgaggaaaataatcttgtctcct

SEQ ID NO: 4953 - DNA, 1030 bp, Glycine max
cacgaacagagagagaaaaaaaaagaaaggtatcgtataggaagaagaagaagctctggattccacctcttcccgtccttcgagacggttgttaggctgcttgcgcgtcagcttcgcctgggccccccccccccagagttgcttttacattcctccatcccttccgcaacagagcagtagcaagaactcctccacctgctggaaccagaggagcactggatcagcaagaggtcaagagatattccggtgctttacctacttcaaagctctccaataatttttcttccatgaaattacatcctcctttagcttcaggtgtgcaacggaagcttgatatggtaaatcaggatggaattaagaacgaaaagccagtgaggactactaaaccaaaatatcgacagccaggaaaggacagcagcccaacttctatgagcaaagggaggtctgtacgtggggtttcagagacagctgaaaagttgcgcaatttgtcagttaccaatcgaagacaatcatcaataggaatagggcaaccccgtcctcctccaccaatgaaggctggagggaattggatttctgaatctggaaacttcatccttgggcccgcacagcagatttcgactggaagaactttcgcaagaaaagttgccggatgagtaaatgtgggagatgattctataatgctcaatgttgtgaatgtgtgtcctaatataaaatataaatgtgtggttagacatatattctgatgactttgccgaagtcgtctaaactacaaaactagttgtactgcctgtgtgtgttattacttgttggtaatcgtttcgtacttgtgggacatacagagctcagttgatgctttttactataaatataaataaaggtttccctatttgtatcattaagaatattctacagctgtgagcctgtgacttggtacacacattgggtaggggtgttcataaatcttgtctatgttctctctataagattataataattttgttaagactctgggataccgagaaatattttg

SEQ ID NO: 4954 - DNA, 2242 bp, Glycine max
aacgcataaattaggtgcgtgttgtgaattgtgtgagccaaagagagagaaagagaagaagaagaagaagaagaagaagctctggattccacctcttcccgtccttcgagacggttgttgtgctgcttgctcttcaggttgacctgggattgaatctaaagaatcttgatttacattttgagatatggagggagtttgtttctggacaaattgctaccagtatcggttttttgcattccaagaagtgcttgattggcgagttttcatccttggagattttcttcgggtttcctttgttaattgcacttagggttctgctccgctttaatgatcagcacagggtacgtgatgctacattcttctgatacaggtgctgcatcttaagtgcacttgtacaatgcattgctgacccaacattcagttaaaacttttggtaaatcttcttcttggggctgaagcatatagatttgtgactgaatattggattctgcctgcatctttgagtgaagcatttgcattgaatcagtgcggactgtagttattgaaatttgtctccttgttgctctcgatgggtattgttgctgacaatacatcagttaccggatgtttctgaaataaatcctacatagattagatgaagtagaccttactatagttctgaagtcttgggtcaaggtgattttagctagagagtgatgctatcgctttgatcagccattttagtgggacctgagaagtgtcagtatgatctctggttcttgttcatttctaccacctttgtcctgccactatttcaaagccgtgggtttattaatgaataaggctgagcagcccatccatctgaaagtttctgcttccatgccttcttttgctatgacagaaaattgatggtggattttgctggaccagcaggaacctgttaatattttatacgcctctgagcatcatctacatgagataaatgccatttatccttagtgtttttgttttcatttgttgaataaaggaagtgctgctttgtgttccacgggaacaatggagaggtacaagttaattaaggaaattggtgatgggacgtttgggactgtctggagagctattaataggcaacctgggggaagtcgtggctttccggaaaatcaatcacccaaatattgtgaagctgaaggaagttattcgagaaagtgatatcttgtacttctgtttttgagtacatggaatgcaacctataccaacttatgaaagacagggaaaaactgttttctgaaggtgaagttagaaattggtgttttcaagttttccaaggccttgcttacatgcaccagcgtggatacttccatcgcgacctgaagcctgaaaacttgctggttaccaaggattttatcaaaatcgctgattttggcctagcccgagagatcagttcacaaccaccctacactgagtatgtctccacacgatggtatcgtgctcctgaggtgctgcttcagtcttatctgtatacctctaaagttgacatgtgggcaatgggtgctataatggctgagcttttctctcttcgtcctcttttcccaggtgccagtgaagcggatgagatttacaaaatatgtggtgtgataggcaatccaacctttgaatcatgggcggatggactcaaacttgcaagggatattaactaccagtttccacagcttgccggtgtgcatctttctgctttaattccgtctgctagtgatgatgcaatcagccttattacatcactttgctcctgggatccctgcaagaggccaacggcttcagaggcacttcaacatcctttcttccagagttgcttttacattcctccatcccttcgcaacagagcagtagcgagaactcctccacccgctggaacaagaggagcactggatcagcaaggagtcaagagatattccggtgctttacctacttcaaagctctccaataatttttcttccatgaaattacatcctcctttagcttcaggtgtgcaacggaagctggatatggtaaatcaggatggaattaagaacgaaaaaccaatgaggactactaaaccaaaatatcgtcagccaggaaaggacagcagcccaacttctatgagcaaagggaggtctgtacgtggggtttcagagacagctgtaaagttgcgcaatttgtcagttaccaatcgaagacaatcatcaataggaataggggcaccccgtccttcttcaccaatgaaggc

SEQ ID NO: 4955 - DNA, 1029 bp, Glycine max
cccacgcgtccggggactgtctgtagagctattaataagcaaactggtgaagttgttgctatcaagaaaatgaagaagaaatattactcttgggaggagtgtgtaaacctgagagagggccagccacgtcgggccccccccccaccaaatattgtgaagctgaaagaagttattcgagaaagtgatatcttgtactttgtttttgagtacatggaatgcaacctataccaactcatgaaagacagggaaaaactattttctgaagctgaagttagaaattggtgttttcaagtttttcaaggtcttgcttacatgcaccagcgtggatacttccatcgtgacctgaagcctgaaaacttgctggttaccaaggatttcatcaaaatcgctgattttggactagcccgagaaatcagttcacaaccaccctacactgagtatgtctccacacgatggtatcgtgctcctgaagtgctgcttcagtcttatatgtatacctctaaagttgatatgtgggcaatgggtgctataatggctgagcttttctctcttcgtcctcttttcccaggtgccagtgaagcggatgagatttacaaaatatgtggtgtgataggcaatccaacctttgaatcatgggcggatggactcaaacttgcaagggatattaactaccagtttccacagcttgccggtgtgcatctttctgctttgattccgtctgctagtgatgatgcaatcagccttattacatcactttgctcctgggatccctgcaagaggccaacagcttcagaggctcttcaacatcctttcttccagagttgcttttacattcctccatcccttcgcaacagagcagtagcaagaactcctccacctgctggaaccagaggagcactggatcagcaagaggtcaagagatattccggtgctttacctacttcaaagctctccaataatttttcttccatgaaattacatcctcctttagcttcaggtgtgcaacggaagcttgatatgggtaaatca

SEQ ID NO: 4956 - DNA, 2202 bp, Glycine max
agtgttactcattccggattcagttgcagttgcagtgacgttttctctgcttgagatattactaattatttaaaaattatggatggatgagatgaaaatcgacaagtatttgtctggcggagataacgacggtagatgaaaatcgacatgtttcaataaatcagatttaatccaagggtccagattcgttaatagtagtagatggaaatcgaatccattaccaaaatttagtaaagtacttatgattatcatattatgtaataacagtcacatgcattaatatgaatatatagtttgagtttgagcacaagccaggttgagagatggagggaagtatccggtgctctgccaactacgttcctctcactccaatcagcttcttggaccgcgccgccgtcgtttaccgcgacagactttctcttgtctccggtgacgttacctacacgtggacccagacacaccaacgctgcatcaaacttgcttcttccatttctcaacttggtgtcggtctttctcccctcgatgtggttgctgtattggcccctaatgttccagctatgtatgagctgcattttgctgttcccatgtcaggggctgttctctgcacgctaaatacacgtcatgattctgcaatggtttccttgttgctaaaacattctgaggccaaacttgtttttgttgattatcaattacttgatattgctaaaggagcacttcaaatcctgtcaaaaatcaccaccaagcttccccatttggtcttaattttggagtctggacatccatcacctccccatgctaaaggaaccttgacatacgaggatcttatagctaaagggagccttcaatttgaggtgaggaggccaaaggatgagtgggatccaatctcccttaattacacttctggaactacatcaaaccccaagggtgtgatctatagccacagaggtgcctatcttaattctctggctacggttcttcttaacgagatgaggtctatgccggtatatttatggtgtgttcccatgtttcactgcaatggttggtgcctcccttgggccattgctgctcagggtggcactaacgtctgccaaagaagtgtcaccgctgaagggatatttcacaatatttttaggcacaaggttactcacatggggggtgcaccgacagtgttaaacatgataatcaattcaccacccaaagtccggaagccgcttccgggaaaggtccaagtgatgacaggtggtgcaccaccgcctccggatgtgattttcaggatggaagaactaggatttaatgtgactcattcatatggtttgacagaaacttttggtccggcatcaatttgcacttggaaaccagaatgggacaatctgcctcaagatgcacaagcaaaactcaaggcacgtcaaggagtggcccatgttggaatggaaggcctagatgtgaaagatcctcacacaatgaagagtgtaccagctgatgcaaaaaccatgggtgaggtgatgttcaggggcaacactgtgatgaatggatatctgaaggacttgaaagcaacacaagaggcatttaaaggtggatggttttggactggtgatttgggagtaaagcatcctgatggatacatagagcttaaggatcgctcgaaggacatcatcatctctgggggagaaaatattagcacaattgagttggaaggagtgatttttagtcatccggcagtttttgaggcagctgttgttgggagacctgatgattattggggagagacaccttgtgcatttgtcaaactgaaggaggggtgcagtgctacatcagaggagataatacaattttgtcagaatcgattgcctcgctttatggctcctcgaactgtggtgtttactgatctgccaaagacatcaactggcaagacacagaaatttgttctgagggagaaggcaaaggccatgggaagcctgactaagaagaacactagccggttataaagcacatttattctgtcatttgaatgcaatgtttgtcaatgttatgtgctttcaggttgttattttcgtttacatataaaataaaatctgtccatttgtatgaatagacacttatgcatagttgtaacaagaaaaaaaagactcttatgcaaagtcaattgggccccacttctagacttttttttctcatctaaaaaaaaaaaaaaagagggcggcc

SEQ ID NO: 4957 - DNA, 2311 bp, Glycine max
aactaaaagttagacatcaattacgaggatctagcctcgtgccctgtcccccctcttttcttttcacaaatactgtactgatctttattagaatagatctaaaatatatgtattggggggagggggtttggatggcatgcttacatttggacaagtctttactatacaggaatggcacgtggaatgatggaggagagtgtgacatggaaacagagccagaaaatgaccctacaaaacttgaaattgaaccatattataacatatttgtttctggtgttgtcaaacagatgcaacacgagagcaggaaagtccactttttgaacatcacatatctttcagagttgaggaaagacggtcacccttccaagtaccgggaaccgggcactccacctgatgccccacaggattgcagccactggtgcttaccaggggtgccagacacgtggaatgaacttctctatgctcaacttctatctgagaaatttggcatcaacaaattttttccagaaagaggataacaaagcagtccaattttcatcagatcacaaagaatagtttcgctagctatacataaatcggcattgcttctgatcatttatcttcatccacttcctcatctgagcccatattactggctgtcatttgctttactttctcaagctgcctcaagagatctaacctttctggtgcataagtggatggaattagagatggcacatatctctgaatagcagccaacattgctgcatgaccaacggcagtaactggaagaagcatcaaaacaccaataggaacaaccgaagccatgtcagtcaaggttcttttaagtgttttcttctccttctcggtcaattcatcccctatcaatgcccttctaagtaaacccatggcagcagcaacatcaatagcgagcagctgagttccttgccagacatccgttcctgtttcttttagtttgccaaaagatttttccaggatattttctttcttctcaaccctggccatctgaatacccccagcatcatcgctatatggggcaccatcatcaataaccagtaaatcttcattattttctgattgataggcacttctttgaactcgtttctcaagttctattagctcatttcgcagaagctcaaagcggtggatttcattgggttcttggtccacaacccctaggtttggtgcagacagttcaatattattttcataaggatccacatcagactccaagccaggctttttggtgacaggacgtccaaagatgctccagaatccacgggattttccaacatttcttttgctcctgtccacccttacattagcattctttctgcttttcccttttatatactcgtcctcttcaccaactggtgtgtaggtccgaccactgtcaaccccctcttgcagagaatcagcttttgctctaaaagatgcctccaggaattcagcttctttccaaagtttccgtattttctccaagtcagaacaggctgctttcaaatgctcttttccagaactagagcttgatacgtgcaactcttgaagcaacttttcaagtcttacaacagtctcttcaacacttttcaatgcctcatcaaaagaacctgactcttttatagttgactgaactgtagatctacgtctatgagctgctttcttgccttcggtctccaatgccttatccctaatcatcccaagttcttccatgcattccatcaacttcttgtgccctgtcgacagaaactcagctgctttcacatttgaagggctctccagccatgtactgtatttaataaagctctgcatccaatgagagcaaacatcaaaagcttggcgcactgcttcagcattgggaggaccttcatgtttacttctacccttctgtcgtcgtctcgcagccctggtgattcccggataaaatggaagccaatccaactcttcacaaactacctctacgtacatttgatatgaactaatggatgagagctgagggtagtataaaatactgcctccaataagatacctgatgaaatcttcaattggatcatctagagtatcaaaaccatttgtcaaaagaaatgaccttgtacttctgcctaaagcaataaagaacccaaaaacagccaaatccttctccaagacctcaatactttcagatgttgtcaatcttgaccatattttttccttatcaatagcttgctgtagctgcttctgagcaagatttacccagaaaacaacctcttctgaaccccacttctcttttgctctacatgaggcagcccgaggaccaaaatgtacaagaaattct

SEQ ID NO: 4958 - DNA, 2756 bp, Glycine max
ccacgtccttaccgaaaactagaggccagggtctgtagtgtgcgggtgggtttgtttatctcaaacacagaacagaggtgtagagaagaaagctctcaaaagtatggcggcggagtcatcactgagggtggcgactcccactatttgcaacctcaatggttctcagagaagaccaaccactctctctccgcttcgcttcatgggttttagccctcgaccctctcactctctcacttcctcttccctttcacacttcttcgggagcacaagaattaactccaattcttcctccatttcacgccaacatgctccaagaagaaacttttccgttttcgccatgtccggcgatgatgcaaagcggagtgttccattgaaggattaccgcaacatcggcatcatggctcacatagatgctggaaagactactacaacggaacgcattttgtactatactggaaggaactacaaaattggagaggtgcatgagggaacagcaactatggactggatggaacaagaacaagagagggggattaccattacttctgctgcaaccactacattctggaacaagcaccggatcaacattattgatactcctggtcacgttgacttcaccttagaagtggagcgtgctcttagggtgttggatggagctatatgcttgtttgacagtgttgctggtgtggagccacaatcagaaactgtgtggaggcaggctgataaatacggtgtcccgcgaatttgttttgtcaataaaatggaccgtcttggagcaaacttttatcgaacaagagacatgatagtaacgaatttgggtgctaaaccacttgtaattcagttaccaattggttcagaggataactttaagggagttatagaccttgttaggaataaggctatagtttggtctggagaagagctgggtgccaagtttgatattgtagatgttccagaagatcttcaagagcaggctcaggaataccgagcccagatgatagaaaccatagttgagttcgatgaccaggctatggagaactacctggaaggaattgaaccggatgaagaaactataaaaaaattaataaggaagggaaccatatcagccagttttgtgccagtgatgtgtggctcagctttcaaaaacaagggagtccaaccattgctcgatgcggtagtggattatctaccatcaccacttgacttgccagcaatgaagggcagtgaccctgaaaacccagaagaaacaatagagagggtagcaagtgatgatgaaccatttgctggactggcttttaagatcatgagtgatccatttgtaggctcccttacgtttgtcagggtgtatgctgggaagctaagtgctgggtcttacgtactcaatgcaaacaaagggaaaaaggagagaattggtagacttttagaaatgcatgcaaacagcagagaggatgttaaagtagctttagctggtgatattattgcacttgcaggtttgaaagatactattacaggtgaaacattgtgtgaccctgataatccaattgtgcttgagcggatggacttcccagatcctgttattaaggttgctattgaaccaaaaactaaagctgatgttgacaagatggcaactggtttaatcaagcttgcacaggaagacccttctttccacttctcccgtgatgaagagataaaccagacagtgattgaaggaatgggagaattacatcttgaaatcattgttgatcggcttaaaagagaatttaaggtggaagctaatgttggtgccccccaagtaaactacagggaaagcatttccaaaactgcagaagtgaagtatgtgcacaagaaacaatcaggtggacaaggtcagtttgcagatatcaccgtccggtttgaacccatggacccaggtagtggatatgagttcaagagtgaaatcaaaggaggtgctgtaccaagggaatacattcctggtgtgatgaaaggattggaagagtgtatgagcaatggtgtgcttgctggctttccggtcgttgatgtacgagcagtactcacagatggttcttaccatgatgtagattcaagcgtgttggctttccagttggcagcaagaggagcttttagggaaggaataagaaaagctggaccaaggatgcttgagcctataatgaaggttgaagttgttactcctgaagaacatctaggtgatgtaattggtgatctcaactcaagaagaggacagatcaacagttttggtgacaaacctggtggccttaaggtggttgattccctggtacctcttgctgagatgttccagtatgtcagcacactcagagggatgacaaagggccgtgcatcctacacaatgcaattagccatgtttgatgtggtgcctcagcacattcagaaccaacttgccaccaaagagcaagaagttgccgcttaatgtacttgcttggtctcctaacaaggaactttttacctttgatagttgtattatgtccattgtcaaatagttgggtttgtttttggtattttttttattgtaattttccttgtactatacaaggttagccaacaaaaaaaaattctgaagaaaaataggaaacgatttttcttcccaagttggagaaaatgaactgctatggagagcagataatactgcatttttgttgtttgggcggggaagacgtggaaacttggatttgcaaaaccatattgagaacaaaaatttatttacctatctttagttttta

SEQ ID NO: 4959 - DNA, 1221 bp, Glycine max
ggtcgctgaagaattcgcctacggggtgtgggggatgagaagatgatgaggaaacattggtagaagaaattgaagagagagagagagagagagagagagagagagagggttggattggttttcttcttccttttctctaaagagaatctaatctcaatcctcattacagatttcttcattcctctctcagtcttttctgttttccccctttgacatcctcgttttcgccgaaacaaaaacaactaagattttttgtttgttttgtttttcttctccttgttgttatttgactcggttgtctgaataggttgttgcagcagggtcgggagccacagctatgcagagccaagttgtgtgcaatggttgtaggagccttctgctttacccaagaggggcaaccaatgtttgttgtgcattgtgcaacacaattacctctgttcctccccctgggatggaaatgtctcaactttattgtggagggtgtaggacattgctaatgtacacacgtggagctacaagtgtgagatgttcctgctgtcacactgtaaaccttgttccaccagcatctaatcaagtagctcatgtccattgtgggaactgccggacaacactcatgtatccttatggagctccatcagtcaaatgtgctctttgtcactttattactaatgtcagtacgaacaatggaaggcttccaatccctgtccatagacccaatgggacaaccaatgctggaacattacctactacttcaacatcaatgccccaatctcaaagtcaaacagtagtggtagaaaatccaatgtctgttgattcaagtgggaaattggtgagcaatgttgttgttggggttacaacagataagaaataacgccgtcacatataaaaggtacagttcacgtcatgacgcattaccacagttgctgtcacaggaagatattgtttgtgtatatgaatatatatgatattgcagcctgcaattgttgaattgaaattgatatttttccaatataagagctggacgaatatcatgtacgtatgtatgaatgtatatgaggtggacaagtcgtgaaaagggcttaaaacctgttttgtgtgattaccaaagcctactttgttgtttccttggtagccatacccaaatcaattagttcattcacattatatgtttgacttgtaagtcctaaactagtaaatggtatttctttcatgtcttgcgcc

SEQ ID NO: 4960 - DNA, 768 bp, Glycine max
cccacgcgctgcttctgtgttctctgtttctcaattcaactttccatcaaggcaacggcaatggcagagctgcaatcgaagtctgaaactgcccctgctccggctccggttgtggctgaggtgccatcgaacgacgccgttgcaaagaaagcttctgaaacaggggaatccaaagctattgtttctgtatccgagaagacaccagttcctgcaaacaagcaaagctcaagaggatccattgatagagatatcgctctggctgaagtagagaaagagaaaaagttgtcctatgtgaaggcatgggaagaaagtgagaaggccaaagcagagaacagagctcaaaaacatctctcagctatcgctgcttgggaaaacagcaaaaaggcagctcttgaagctgagcttaaaaaattggaggaacaactggagaaaaagaaagcagaatatggtgaaaaaatgaagaacaaggtggccttagttcacaaggaagcagaggagaagagggcaatgattgaagccaagcgtggtgaagagattctgcagacagaggaaatggctgcaaaataccgagcaacaggaaccactccaaagaagactataggatgcttttgattttttttgcattttgggtctgatgtccaaaataatttctaattgccaattttgtatgtggtttctcctgttttgttctcaatgtttgttgtctatgtgcaaaaattagtccaaataaaacataattttttaaaaaaaaaaaaaaaaaaaaaaaaa

SEQ ID NO: 4961 - DNA, 884 bp, Glycine max
tcgagtcagctacgtaggcccccccccccctcactctgcttctgtgttctgtttctcaattcaactttccaacaagccaacggcaatgccagagctgcaatcgaagcccgaaactgccctagctccggctccggttgcggctgaggtgccatctaacgacgctgttgcaaagaaagcttctgaaacagaggaatccaaggctactgttgttgcatcagagaagacaccagttcctgaaaacaaacaaagctcaagaggatccattgatagagatatcgctctggcagaagtagagaaagagaaaaagctgtcctatgtgaaggcatgggaagaaagtgaaaaggccaaagcagagaacagagctcaaaaacaactctcagctattgctgcttgggaaaacagcaagaaggcaactcttgaagctgagctgaaaaaaattgaggagcaactggagaaaaagaaagcagaacatggtgaaagaatgaagaacaaggtggccttagttcacaaggaagcaggggagaagagggcaatgatcgaagccaatcgttgtgaagaggttctcaagacagaggaagtggcggcaaaataccgagcaacaggaaccactccaaagaagaccatagggtgcttttgatttttttgcattttgtgtctgatttccaaaataatttgtaattgcccattttgtccgtggtttctaatgttttgttctcaatgttttctatgtctaagaaatagtccaaataaaacaaaattttgtaaatgtcttttgttttgatcatctagcttgggcgaaatgttctatgcaaaggtggtttttcctaagagtactactctaatgatcaactaattgagtttctctttaaacaaaaaaaaaaaaa

SEQ ID NO: 4962 - DNA, 2030 bp, Glycine max
ctctccccccgcccccacttgctccgcagaaacacactctctgcacaccacattcccagaaacatcctcaacaacacatccgaaaacaaacacaaaacgcaaaaccagagcctctctctctctctcgctctgtttctctccacagaagcagagaatgcatcgcttcatcgtcctcaccattctcctctccctcaccctcgcagatggaggttccattggagttaactacggtcgaatagcgaacaaccttccctccgcggttaaggtcgttcacctcctcaaatcgcaaggactgacacgtgtcaaagtctacgacaccgacccagcagtgctccgggcactatccggatccggaatcagagtgacggttgatcttccaaaccagcaactcttcgcagcagccaaagctccctcctttgcatcctcatgggtcgaaaggaacgtcgccgcatactacccacacacccaaatcgaagccattgcggtcggcaacgaggttttcgtggacccacacaacaccaccaagttcctcgtacccgccatgaagaacatccaaaaagccctcaccaaacacaacctcgacaaagacattaaggtttcctcccccattgcactttccgcactagcaaactcttacccttcctccgccgggtcgttccgacccgaacttgttgaacccgttttcaagcccatgctagacttcctccgcgaaaccgggtcataccttatggttaacgtgtacccgttcttcgcgtatgagtccaacgctgacgtcatctctttagactacgctctgttccgtgataaccccggagtggtggatcccggtaacgggttgagatattataacctatttgacgcccaaattgacgccgttttctccgcgctaagtgctttgaaatacgacgacgttaagatcgtggttaccgaaacaggttggccttctaagggagatagtaatgaggtgggtgcgagtgtagacaacgctgctgcgtacaacgggaatctcgtccgtaagatcttgaccgctggtgggacccctctcaggcccaaagcggatctcatcgtttttctgttcgcgctttttaatgagaaccagaagcccgggcctacttccgagagaaactttgggcttttctaccctgacgagaggagggtttacaatgttccgttaacgacggaggaactcaaggactaccacgatcgtccggcgccggtgagcggcggcggacagcagaagggaacgccggcgccggcgccggttgtgagcggcggggtctccaagagtaccactggaaacacgtggtgcgttgcaaacccggatgcggataaggttaagctgcaggcggctctagatttcgcttgtggtgagggaggtgctgattgccgtccgattcagcgcggttccacgtgttacgatcctaacacgcttgtggcccacgcttctttcgcgttcaacagttattaccagaagcagtcgcgcaagggtggtagctgctatttcgggggtacgtcgtacgttgtcacgcaggagccgaagtatggtagctgcgagtttcctactggatactaaaagctgaagaggacagagatattcccgcatgagaatatgcgtctggctgattttgctttgtgtaaagtatgttatgaggtgtctggaagtgtgaaactaggaagagaagataaattacttcttggtggttatattagttttaagattttttggggttatggattatgttagttaataaatgttgacttttcttccagttggtgggaactgggaatggggtagctaaattaatttaacggttgggactaaagtaatttgtatctaagtttttttttttttttttactttgcagtagactttatctttatgattcctgaagtggtcatagttgttcttcaggtttcgtcatattttaagccaatagtttaagagaagtacctttttcttccaaaaaaaaaaaaaaaatttttaaatttttgttccgaaggattatatgaaagaaatattaacttccagc

SEQ ID NO: 4963 - DNA, 1008 bp, Glycine max
ggatagtaatgaggtgggtgccagcgtagagaacgctgcagcctacaacgggaatctggttccggcgcgcgggaccgctgctgggacccccctcaggcccaaagccgatctcaccgtttatctcttcgccctttttaatgagaaccagaagcccgggcccacttccgagagaaactttggccttttttaccctgacgagaggagggtttacaatgttccgttaacggtggaagagctcaaggactaccacgaccgtccgtcggcgccggtgagcggcggcggacagcagaaggagacgccggcgcccgttgtgagcggcggggtttcgaagagtaccactgggaacacatggtgcgtggcgaaccccgacgcggataaggtcaagctgcaggcggctctagatttcgcttgcggcgagggaggttctgattgcggtccgattcagcgcggtgccacgtgttacgatcctaacacgcttgttgcccacgcttcgttcgcgttcaacagttattaccagaagcagtcgcgcaagggtggtagctgctatttcgggggtacgtcgtacgtggtcacgcaggaacctaggtatggtagctgcgagtttcctactggatactaaaagctgaagagggcagagatattcccgcatgaggatatgcatctggctgattttgctttgtgtaaagtatgttatgggaaggtgtctggaagtgagactaggaagagaagataaattaattgttggtttatattagttttaagattttttggggttatggattatgttagttaataacgttgacttttcttccagttggtggaaactgggaatgggttagctagtaactacattaatttaactttggggactaaagtaaattgtatctaagattttttttttactttgcagtagactttatcttttgtgatttctgaagtgatcgttgttcttcaggtttcatcatatttgaagtacctttttcttcccctgccaaaaaaaaaaaaaaa

SEQ ID NO: 4964 - DNA, 1397 bp, Glycine max
atttgttgcggctgcggggtggcggttgtattgtaggtattggtgggtgaaatcaaaaaccctagccctcactctcatcactttttttgagctatgtttcaagagagttagttagggataatagggcagggaagaataagagggatgtacaaagaacgagagcgagttggtgtttctgtttccgcttccaaatcggaggatcggaagcgaatcaacgacgttctcgataagcacttggaacgatcctctccttccacttctcgccccatcacctccgcctccaagaattccaacctccaagtggaggaatctgaaacggagagtgaagagtctgatgttagtggctctgatggggatgacacctcttggatctcgtggttctgtaatctcagagggaatgagttcttttgtgaggtggatgatgattacatacaggatgactttaacctatgtgggttgagcagtcaagtgccctactatgattatgcccttgatttgattctcgacgtcgagtcgtcccatggtgacatgttcacggaggaacagaatgagttgattgaatcagcggcggaaatgctttatggtctgattcatgccagatatgtgttgaccagcaaaggaatggctgccatgcttgacaaatacaagaactatgattttggcagatgcccaagagtttactgctctggacagccctgccttccagttggtcaatcggacattcctaggtcaagtactgtgaaaatatactgccctaggtgtgaagatctttactatccacgttccaagtatcaaggcaacattgatggggcttactttggaactacatttccacacctcttcttgatgacttatggacaactgaagccacagaaaccagcacaaggctatgttccaagagtttttgggttcaaagttcacaagccataaagctgaagttgaagctttcatgaaagtaaaaatctgcccgtgtctcatttaactcttccttatggttctctttgcaacatccggcaaatcatatgctttccaaaccagtacaatctaggcatctgttttaattgttataggagcttgttgtaaagaaatatgcagacatgcgaagcaagtgcttagtttcagcttcagattcaatgagaaagtgcttaggtacttgatgatactttttaatgactgtttacgaattgtattcttgcgattaacttaatattgtctatggttatgtctcgaactacaaataccctgctatttttatattgttttattccatttctcccaatttctgtagcctttgaatttgtggatttgctcccaatggattcatacattactaatttccaagttcacttgcttggatgttatactcagctatccaacattattggttatttggaaaa

SEQ ID NO: 4965 - DNA, 2565 bp, Glycine max
cttcactttcacctaggactctgcccccactttctgaaggcaataaagccagcataatgttcaactctctgtctctttttcctttctctctcctctctctttcttcccaccttctctgatgaaagtctcaacacaaagcaccttcttcttcttctcttattgacttatggccaccacagagactcatttctggatcttctggtgtaaagacctttaaaagtttagtatttgtcaacttgaactggtgtatagtgctagagagtaaagtttgaaacctatcttgttactttcatcgtcagaagcttacaggttgaatccatattttttctccttggaaaatgatgatgatgtttgatgagatggggctttgtaataatttggatatgatatctgctccccttggagaggaggatattaccacccggcaaactgatcctgaggtaattgttgaggatgattttactgatgaagaaattggggtagatgaactcgagcagaggatgtggaaggacaaaatgcgtctcaagcgactgaaagaacaaagtaaatctaaggaaggaattgatgcagtgaagcagaggcagtcccaagaacaggctaggagaaaaaagatgtcgagggctcaagatggaatcttgaagtacatgctgaagatgatggaggtttgtaaggcccaaggatttgtctatgggattattcctgagaagggaaaaccggtgactggggcatctgataatcttcgtgaatggtggaaggataaagtccggtttgatcgaaatggtcctgctgccatagccaagtatcaagctgataacactatcccagggaggaatgatggatgcaattccattggtccaactccacacaccttgcaagagctgcaggacacaaccttgggttctctcttgtcggcactcatgcagcactgtgatccccctcagaggcggtttccattggagaagggtgttcctccaccatggtggcccacagggaatgaagagtggtggccccaaatcggtttatcaaaagatcaaaattctcctccttacaagaagcctcatgacctgaagaaggcgtggaaagtcggtgttctgactgcagttattaagcacatgtctcctgatattgcaaagattcgcaagcttgtgaggcagtccaaatgtcttcaagataagatgacagcaaaggaaagtgcaacctggcttgcaatcatcaatcaagaggaggccttagcaagagagctataccctgattatatccccccattagcctcagctggaggtagtggatctttggtgatcaatgatagcaatgagtatgatgttgaagggggtgaggatgagcctaactttgacgtggaagactgcaaacatgagaatcttcacacatccaatcttgggatggaaagagtgagggtaactctgccagttcaacagccctctttttcaataaagggagagactgttacaaatttggatttcattcggaagaggaaggtttctaatgacttcaacatgatggatctgaaaatttacacatgtgaacaccctcagtgcccttacagtcaagttcgccttggtttccctgaccgaatttcaagggacaaccatcagttgatttgtgcttatagaggtacttcagattttgggggtccaagttttcctgttaatgagataaagccagtcgtacaccccccgtcctttgttcaacccaaatctactgctcagcctggtagtatggttccacctgttattgatctaactggacttgaagtttcagataatggccagaaaatgattactgaccttatgactaactatgacacaaatgttcgaggcaacaagaagacaagttcctgtaatcacttagctgcagaaaatttcgaccttcctcagcatgccatgcagcagcaacaggacaacttcattcgcggtcaaggaatcactgcagaaggcaacatctttgatgaagctaacatgcccaacaatcatcacatgtttgcaagagaagaaggtcaatttgaccgtttcaaagctttgaatgctccctttgagaccaatcacaacaacaacaacttccactcaatgtttggttccctttgtgatttggcatcatttgatttcaaggaggatatgcaaggagtagggatggatactcttcagaaacagccagatatttcaatatggtaccagtgaaaatgacaagttgaatctggaagctcgttatccacatcatgaattcttattttcatgtgatgttccttcagccaagtcttactggaattttcttcacatgtaattctgtaggcctagtagaactagatatttttgacttatcctttacaggtctagtagttgttacaataaaaaacttatatgtttagcccttgtgtgctttttttttttttatcagtctagccttgttacttaagattactattctatgcaagactgggatataaataagagttgaagtttcttccaaaaaaaaaaaaaaaaaaaaaaaaacatgtattaataaggtaaaatacttttacaatatcattttagaaatattttttatgat

SEQ ID NO: 4966 - DNA, 2354 bp, Glycine max
cacgcgtccgggtcgcgttcctttcttccttccttctttttcccccctacaaacaaaaacaaagcaacattcccttttctatctgtttccttcgcgaaccagcaacaacccccggcgcacgatagcgccatcgctttcgttacgcggttggtaaccgtctctctttcatcaccgtttttatttccattcacaaaaccaacaacctctctgtgatttttcttcactgttctctctctgagcaaaaccgaggatccctcatagtattggtcaaatattggctaatgtggatggggcattcatctatgtacaagcgcactccttcgagagataattcaaacatggaggacgtggaagaaaactcagatcttttagacatcggcctggacaagggaacctcaaatccttcattgatgctttctttaccgcatgtacttgtggcgaccatttcttcattcctttttggataccatcttggagttgttaatgaaccacttgagagcatttctgtggatcttggcttccgtggaaatacattggcagaaggtctggtggtgagcatatgccttggtggtgccttgattggatgtctactaagtggttggattgctgatggggtggggcgtcgtagggctttccagttgtgtgctctgccaatgataattggtgcttctatgagtgcggcaacaaacaacttgtttggcatgcttgtaggaaggttgtttgttgggactggcttgggcctgggccctcctgttgcctctctgtatgtgacagaggtttctcctgcttttgtgcggggcacctttggagctttcatccagattgccacatgccttggtctaatgggagctttatttattggaatccctgtcaaagaaatttctggatggtggcgggtttgtttttgggtatctaccattccagctgctatacttgccgcagctatggtcttctgcgcagagagtccgcattggttatacaagcaaggaagaactgctgaagcagaagctgagtttgagagacttctgggtgtatcagaagcaaaatttgcaatgtcggagttatccaaggtagatagaggtgatgatactgatactgtaaagctgtcggaattgcttcatggtcgtcattctaaaggtatacatttttcctggtttgtctctaggatagttgagtgtatttgctgttgttgttatctcttgtcactgatttccttaggtttccaaaagttattttttattcacgagttcgttttgcagttgtttttattggatcaaccctatttgctttacaacagctatctggtataaatgctgtgttttatttctcttcaactgtttttaaaagtgctggagtcccatcagacattgcaaatgtctgcataggaatcgccaatttggcaggatctatcgtttcaatgggtttgatggataagcttggaaggaaggttctacttttctggagtttctttggcatggcaatagcaatgatccttcaagccacaggagcaacttcacttgtatcaaacatgggagctcagtacttttctgttggtggcatgttcctgtttgtcttaacatttgctctcggagctggcccagttccaggtctccttctaccagaaatctttcctagtcgaataagagccaaagccatggcagtctgtatgtcagtgcattgggtgataaatttctttgttggactactgttcttgcgtttgctggagaaacttggtccacagctgctttactccatgtttgctaccttttgcatcatggcagtaacttttgtaaaaagaaatgtggtggaaaccaaagggaagtcacttcatgaaattgagatcgcacttcttcctcaagactagatctctattcatttgattgctctaattttgcatagtttttcggctgagcagattgtgtttcgtctattttggttgaccttaacattacaaggggaagctcaggaactatgcattgttttgctgcaacattagtacgaagaggcttaggtattatggctagctgtgatgtagtaggtggtactattagcggcttacaacacgagacccttctgttgttactcgcggcttgtgattctatgatttggcatccacgtaaagggagacataattcatcaggggggatctatgcatcccataatattccataaatgtactactttatgtaatattatatatgtttctgtacgtgacattatttttaatcgcttcaattttgtcccattttggatacgaagtagtctagcatgtaaattctgttgcagagtatatcgaggaaaatgggaagaagctttgtgtgattaagaaataaaaaaaaatcgtcattcgcctc

SEQ ID NO: 4967 - DNA, 1816 bp, Glycine max
ggctcgagggcgtcgtagggctttccaattgtgtgctctgccgttgatcccgcgcgcggctatgagtgcggcaacaaacaacttgtttggcatgcttgtaggaaggttgtttgttgggactggcttgggcctgggccctcctgttgcctctctgtatgtgacagaggtttctcctgcttttgtgcggggcacctttggagctttcatccagattgccacatgccttggtctaatgggagctttatttattggaatccctgtcaaagaaatatctggatggtggcgggtttgtttttgggtatctaccattccagctgctatacttgccacagctatggtcttctgcgcagagagtccacattggttatacaagcaaggaagaactgctgaagcagaagctgagtttgagaggcttcttggtgtatcagaagcaaaatttgcaatgtcagagttatccaaggcagatagaggagacgatagtgatagtgtgaagctgtcggaattgcttcatggtcgtcattctaaagttgtttttattggatcaaccctatttgctttacaacagctatctggtataaatgctgtgttttatttctcttcaactgtttttaaaagtgctggagtgccatcagacattgcaaatgtctgcataggaattgccaatttggcaggatctatcgtttcaatgggtttgatggataagcttggaaggaaggttctacttttctggagtttctttggcatggcaatagcaatgatccttcaagccacaggagcaacttcacttgtatcaaacatgggagctcagtacttttctgttggtggcatgttcctgtttgtcttaacatttgctctcggagctggcccagttccaggtctccttctaccagaaatctttcctagtcgaataagagccaaagccatggcagtctgtatgtcagtgcattgggtgataaatttctttgttggactactgttcttgcgtttgctggagaaacttggtccacagctgctttactctatgtttgctaccttttgcatcatggcagtaatttttgtaaaaagaaatgtggtggaaaccaaagggaagtcacttcatgaaatcgagatcgcacttctaccccaagactagagcatcttatgaagctctattcattgattgctctaattctgcatacttccagctgagcagattgtgtttcatctattatggttgaccttaacagtacaaggggaagctcaacgcaggaactatgcattgttttgctgcaatatttgtacgaaagaggtttaggtattatggctagctgtgatgtagtaggtggtactattagcggcttacttacgacacgacacccttctgttgttactcgagccttgtgattctctgatttggcatccacttaaagggagacataattcatcaagggggatctatgcatcccataatatttccttaaatgtactactttatgtaatattatatacgcttctgtacgtgacattatttttaatcgcttgaattttgtcccattttggatacgaagtagtctagcgtgtaaattctgtctgcagagtttatcgatgggcggaagcttcgtgagcttaagaaatagctatgatccgtaattcacctcatgaggttgatttatgtaaatcaaaagttgcctccaaggttaattggtacttccacaaaactagtggaataattataagaatcctgaatctgagtttggtagtttaattcaacattgtattcggctgtttcatcaaaatccaaccttttccaagtttgtaaagagccaaaaaaaaaaaa

SEQ ID NO: 4968 - DNA, 2142 bp, Glycine max
cagctatctagcttgttctcttttattttttttcggttcaccggcggcatggggaactgcaacgcctgcgttcgagtcgatgacgtggcagactcaaaccgcggcaaaaagaataagaaaaccaaaccgaacccctacgcggaggaagagatacgctccggcgttccgatccgtgtgctgaaggacgtgacgtcacggagcctcatcggcgacaagtacgtgataggccgggagctaggtcgtggcgagttcgggataacgtacctctgcacggaccgcgaaacgaagcaggagctcgcgtgcaagtcgatctcgaagcggaagctgagaaccgcgatcgacgtggaggacgtgcggcgagaggtggcgatcatgtcgacgctgccggagcacgctaacgtggtgaagctgaaggcgacttacgaggacgaagagaacgttcatctcgttatggagctctgcgccggcggggagctcttcgaccggatcgtcgcgcgggggcactacagcgagcgtgccgccgcgaacgtggcgaggaccattgctgaggttgttaggatgtgtcacgccaatggtgttatgcatcgagaccttaaacctgagaattttctctttgcgaataagaaggagaattctgttctcaaggctattgactttggactctccgtgtttttcaagccaggggagaggttttcggagattgtggggagtccttactacatggcgccggaggtattgaaaaggaattatgggccagaggtggatgtgtggagtgctggggtgattctttatattttgttgtgtggagttcctccgttttgggcagaggacgaacgaggggtggctttggcaatattgaggggagtgattgacttcaagagagaaccgtggcctcagatttcagatagtgctaagagtcttgtgcgccagatgttggagcatgatcctaagaagcgcttgacggctgaacaggtgcttgagcattcctggttacaaaatgcaaagaaagcttcaaatgttccattaggagatattgtgagaacaaggcttaggcaattctctttgatgaatagattaaaaaagagagcacttcgggtaattgcagagcatttgtctgttgaagaggtagaaataatcaaagacatgtttacattgatggacacaaacaaagatggcaaagtaacatatgaggagctgaaggttgggttacggaaggttggttcacaattggctgagccagagataaagatgctgatggaagtggctgatgttgatgggaatggagtacttgactatggagagtttgtagccgtgacaattcacttgcaaagaatggagaatgatgagcatttccgcaaagcattcatgtattttgacaaagatgggagtgggtatatcgagttaggggagctagagaaagcattaacagatgagtcgggagatactgatactgctgtattgaatgacatcatgcgtgaagtcgacactgacagggatggtcgcatcagttatgaagagtttgtggccatgatgaaaactggaactgactggagaaaagcatctaggcagtattcaagggagagattcaagagcttgagcataaatttgatgaaggatggctcacttcagcttcatgacgatattagtggtcaagctgtagtggtttgagtccgaaattgtaatcttagtgctcactcagtttctcatcttccttcaccacttaatatgcttgaaaacatggtttctttactctccctgaaagcaaacaacaagtttagtgttggagcaaaaaaaagcatactgatttaccttgggttggagttgggttgcttaggttttggattggatgttattagatgcctgaagcttgaagcatgcgttggatggttgcatactaaagtcgttttatagcttgtcagcacaagttgcgcgggcacatgctgcaggcctcaaaatgtcacatattctttgtatatctttgtcgtgttgttcttgttttgataatttcattggtaattgtgatttttctaattgatgggctaaaaacagttgggatttgtctcattggcggtgtgatcgaacttctaatgtaaagtacctgtaaaagcaattcaaagttcaaaatatagatatcttgtgccc

SEQ ID NO: 4969 - DNA, 1697 bp, Glycine max
ctcgagccgaatcggctcgaggtgggtttctttttttaggggagaggtttgtggagattgttgggagtccttactatatggcgccagaggttttgaagcggaattacgggccggaggttgatgtgtggagtgctggggtgattctttatattttgttgtgtggtgttcctccgttttgggcagagaccgagcaaggtgtggctttggcgatcttaagaggtgtgattgacttcaagagggaaccttggccacagatatcggagagtgccaagagccttgtgcggcgaatgttggagccggatcctaaaaagcgcttgacagcggaacaggtgcttgaacatccctggctgcaaaatgcaaagaaagctccaaatgttccattaggagatattgtgaggtcaaggcttaagcagttttctgtgatgaatagattcaaaaagaaagctctgcgggtaattgcagaacatttatctgttgaagaggtagaaataatcaaagacatgtttacattgatggatactgacaaagatggcagagtaacatttgaggaactgaaggctgggttgaggaaggttggttcacaattggctgagccggagattaagatgctgatggaagtggctgatgttgatgggaatggagtacttgactatggagagtttgtagctgttacaattcacttgcaaaaaatggagaatgatgagcatttccacaaagcattcaagttttttgacaaagatgggaatgggtatattgagttacgtgagctagaggaagcattagcagatgagtcaagagaaactgatgctgatgtattgaatgacatcatgcgggaagttgacactgacaaggatggtcgcatcagttatgacggctgcgtgaagacgacggaagcgggaactgactggaggaaagcatccaggcaatattcaagggagagattcaagagtttgagcctaaatttgatgaaagatggctcgcttcagcttcatgatgaaattactggtcaagctgtggtggcccacgcgtccggtaatttctttctgtaacctcatgccatgctcactcagttactcatttttcttgcaccgcctattgtgcgtgaaatgaaatatatcatttgcggaatctctccacggagcaagttttgggcaggtttgagttttagtgtttgaagcattcaaatgatcttgagttggagttggagttggttatcttagtggcttggatgttagatgcctgaagcctgcgttggaggattgcaattgcatactaaagagggttcattgttcatagcttaacaccaaaaagtgtggggcacatgctacagctacatacccgaaaaaaattacatattctttgtatatgtgttatatttgtgtttgataattccattggtaaatgtgatttttctaactcgtgtgcagaaaaccagttataggatttgtctcattggcgacatgaacttctgagaaagtttatagaaagtctaggcatctgctagttgaagctatttaatttgtctgaaaatgtagctatcttaagccctcattttttcatttcccccacttgtttataaattatcctttgcccctattatgaactttatggttaatttgcatgaggtagaaacaatctgaaacagctctaaagggtaaatacatttggttggttgggttcaacatatgcctaattac

SEQ ID NO: 4970 - DNA, 2245 bp, Glycine max
  misc_feature (2201)..(2201): n is a, c, g, or t
tatacggctgcgaaagacgacagaagggactccagataacagctggagatccgtggtgctccagcggaggggttgcacctgatggtacctttgtgagtgctggtggttttgacaccggagcaagaagcgttagatatatgggtcctaattgccaaaattgtgaatggagggaatacgacaacatattcggagcagacagatggtatgcaactcaacaaatccttccaaacggagaattcattttggtaggagggcgtagatcattcagctatgagttcatcccagtagaaggccaaaggggcgagaaaccctactttttcccattcttatacgaaacttcagacatagatgagaacaatctctacccttttgtgcacctttccacagatggaaacctcttcatcttctctaacaatcgttcccttcttctgaaccccaccacccacaaaattgttcgcacctttcccgtcttacccggtggctcccgcaactaccctgcctctggcatgtctgcccttctccccatcaaccttaacgaccccgccaccgccaccaaggctgaggtcatggtttgtggcggcaaccttcccgatgccttccatattgccgagactaccaaaatcttcctcccagctcttcgagactgcaacaggttaaccatttcggagccatttcctgagtgggagagcgagttgatgccttcagggagaacaatgggagaccttttggtcctccccaatggggacctcttgctcatcaatggtgcaaccatgggtacggctgcatggtgggatgctgacttgcctaactacacgcccgtgttgtacaaacccgaggaccctaaagggttgaggtttacggtgcttaagccaagccaaattgcgagaatgtaccactccacttccacggtgcttcccagtggaaagatttgggtttctggaagcaacacccacaatacctatagggacgtggataagttcccaactgagacaagagttgaagctttctctcctccttatttggacgccaactttgacaagtataggccacaaattgacgaggatgcttcggagaaagagttggcgtatggtggtttgtttgaggcaagtttctcggtggaagatggagctgagttaaccaagaataacattaaggtgtccatgtattctccacccttcactactcatggcttctctatgggacagaggcttttgtttctcaagattgacgagttaaacgtacaaggccaagaagggtcttacagggttagagtggaggcgcctccatccaatgccatagctcctcctggatactacttgctcttcgtcgtttaccgtggcttgcctgcagccaagggaatgtgggtgcacattcaatagagattttctaattcttcatttaatttgtatgctcaatcgaaattctaatttattagaaaagactttagtttctaattactatacattcctattgcacgggtaatgctgcttattagtatgtgttttgaactaggttatattgcgtggccttcaaatattttatctgtacgtgtttggaaacccattaataacatgagaaatcgcatccatctattagtagacgcgttagtaatactccatttaaatgtgagaaagtgcatcaatgacgtaatatcaaacacattttattaatttgttgcacgaatgctgaattatcatgggaacgacatccgtttggcttttacattgatacatcagattgtctgtgaaggagcatttgcttattgggccgtgttgtgaaggcttctccttttgaatggatatttgtcaaggcttattgaatgttaacatgagaatatatatactatttgagatgagaaggcaagcttttgatatttaaagtatgacttattattagcagcaaatgaaccacctcttcagtagccacactgaaatattgcaactctcatgagagcacacaatagcatgtcacgtggtttcgtggttggcatcagggtacaaattactaccttgagcaactttggttatgtggagttaagataatcttaattctgcggtaacataaattgcaccaccaaggctaacaaattgggggctcattggacatgtggcgtgggagccctttatgtgtggtaattgcaaggcatgtacgccatttttgtattcataggtggctgatagtggggttcatatttagcattnttgaatttctgggtgttttgggttgttggaggctgttaaacact

SEQ ID NO: 4971 - DNA, 2740 bp, Glycine max
agcatatgttgtttgtggtcatcccttacatcagttgatcagaatatataatagcctttgctccaatcacttccgctccggcttcccgcgcccgaccacgcgtccgcagttacaaatgtatgcaactccacaaaggctctctttttgcatgagacatcctctctcttaaaacctccctccttcagtcaaagctcccccaatcatactattcccatttcaccactcacacttttttcctctcgctcttataataacttcctcatatatacacttactctccttcaatagggtaacttttgaatttggtgccccccccaatctttttttttctctattttgttttggagtttggaacatatatagtattgaagcctaaaagattttgaagaaaaaagcgatgagaaactctgaagcaccaacacatggtggcatggagatagaagcaacaaggccttcagctgggaatggttcaacaataaccctaccagggttgagtcctctgagtgagaccctttggagggaaaaggccaacactgcagagatcattggtgatgtctcagcaaggctcacatggaaggatctgactgtgatggtcactctcagcaacggtgagacacagaatgttttggagggtctaactggttatgctgaaccaggaaccttcactgctctcatgggaccctctggctcaggaaaatctactctcctcgatgcactttctagtcgtttagctgcaaatgccttcctctcaggcaccattctcctcaatggtcgcaaagcaaaactctcttttggcactgctgcctatgtgacacaagatgacaacttgattggtaccctaacggtgagagaaacgatatcatattcagcccgtttgcgtttgccggataacatgccatgggcagataaacgtgctttggttgagagcaccatagtggcaatggggctccaagattgtgctgacacagtgattggaaattggcacttgcgtgggatcagtggtggggagaagagaagggttagcattgccttagaaatcttgatgaggccaaggttgcttttccttgatgaaccaaccagtggacttgacagtgcttcagctttctttgtgacgcagacactacgtgccttggcaagggatggaagaaccgtgatagcctctattcatcagccaagcagtgaagtgtttgagctatttgaccaattatacttgctctctagtggcaaaactgtttattttgggcaagcttccgaggcatatgagttctttgcacaagctggctttccatgtcctgctttgaggaacccttctgatcacttcctcaggtgcatcaattctgactttgacaaagtcaaggccactcttaaagggtccatgaaactcaggtttgagggaagtgatgatcctttggacaggatcactactgctgaagctatcagaactcttattgacttctaccgcacttctcagcactcttatgctgcaagacaaaaagtggacgagatatccagagttaaaggaactgtgcttgaagctggaggaagtgaggctagttttctgatgcagtcgtacaccttaaccaaacgttccttcatcaacatgtcaagggactttggatactactggcttaggcttgttatctacattgtagtcactgtttgtattggaaccatttatttgaatgtgggaacaggctacaactctattctggctagaggttcttgtgcatcttttgtctttggttttgtcaccttcatgtcaattggtggattcccttcatttgttgaagacatgaaggttttccaaagggagaggcttaatggccactatggtgtcacttcatttgtcatcagcaacacattatctgcaatgcccttcctgattttgatcacctttctctctggaaccatttgttacttcatggttcgcctacaccctggcttctggcactacctcttctttgtgttgtgcctttatgccagtgtcacagtggttgaaagcttaatgatggcaattgctagcattgtccccaacttcctcatgggcatcattattggagcaggaattcagggcatattcatgttggtctcaggctactttaggctcccacatgatattccaaagccagtgtggcgctacccaatgtcatacatcagtttccacttctgggcactacagggtcagtaccagaacgatttgcgcggcttggtattcgacaaccagacaccggaccttccgaagataccgggcgaatacatcttggagaaagtattccaaattgatgtcaacagatcaaagtggataaacctgagtgtgatcttcagcatgattgtgatctaccgcatcattttcttcatcatgatcaaagtcaacgaggatgttacgccttgggtgagagggtaccttgctaggaggagaatgcagcagaagagtggagcacagaacactactattgcacctgatgttctcactcagtcaccatctctcagaacctatgtttccactcaaacaaaatgaaggcatcaaagtttgactcaaataatgaagctttcattatcaagtagggattagacaaatatatatataacttaaaattcttcttcttatttttatacattcttggtctttaacaatgttgacatatactccagaacttccctaagaatgggatgagtaatatgaaactctggagtgttttattattaagtcttcaacgcccactgttcataattctttctt

SEQ ID NO: 4972 - DNA, 998 bp, Glycine max
cccacgcggccgcgaccctttattctcttacgtctccaactaatcatacagatcgataatcataatcatatctatagctaattaacttaattattttcatccctctactcttcttctctcctctaaactctcttttccattcttgcttcctttgtgggttgtttgagttttctttccttcaatttaattgaaagatggcttgcttggtatctcgctcgggaagggaattgcagaggtacaacaacatgggtggccggcaagttgttgggtgcataccttatagatataaacaagacatagagggtaaaatgagcaacgaattggaagtactagtggttagttcacagaaaggtcaaggattgatgttccctaagggaggatgggaacttgatgaatccgtagaagaagcagcttatagggaatcccttgaagaagcaggagtaatgggaatgattgagcgtgaactggggcaatggaatttcattagcaaaagatatggcatatactatgaaggacacatgttccccatgtttgtcaaggaacaacttgatatatggcccgagaaaaatctacggagaagaatatggatgactgttgctgaagctagagaagtttgtcagcattggtggatgaaggaagcattagatatactggttcaaagaatcgtgtcttcacaacaacgaaaagaagatttatacagcatcggatgattctctaagttttaaaacaatttagtctaggtgggcctaggtcagattgccaagattttgaatcttcaaacattgagagttgttatacagaggattgatttagggagaggaacagaattgtagataaatatggaattgcaattcaatttaatttacacacttatagaacttacgactagacttcctaagagttaaataatttcgttttcaagcccttcttcttgtgtctgtctgtcttatggtttatcaaatatacccagaatttataagcccaatgcccttgggttg

SEQ ID NO: 4973 - DNA, 1119 bp, Glycine max
cgctccggttcccccatttgtcttgcaaactttctgtcgcacaaataactctaaactaagcacttccatacacaaattttctctcccagaagaaatattttcatttcatttcgagtaaaagtaaaacacagttcctgatccatggcatctcgccgccgcatgttgttgaaggtcataatcctcggagacagcggggttggtaaaacatcactgatgaatcagtatgtgaatcgtaaatttagtaatcagtataaggcaaccatcggcgcagattttcttaccaaggaagttcaatttgaagataggttgttcacattgcagatttgggatactgctggtcaagagcggtttcagagtcttggcgtggctttctaccgtggtgcagattgctgtgtccttgtttatgatgtaaacgtcatgaaatcctttgacaaccttaaccactggcgagaagaatttcttattcaggctagtccatctgatcctgaaaactttccatttgttgtgttgggaaacaaaatagatgttgatggtggaaatagcagagttatttctgagaagaaagcaaaggcatggtgtgcttcaaagggaaacataccatactttgagacctcagcaaaagaaggatttaatgttgaagctgctttccagtgcatagcaaaaaatgcactcaagaatgaacctgaagaagaaatgtacctgcccgacacaattgatgttggtggtggtggacgacagcagagatctactggctgtgaatgttaaagtgcagagaattctatggactagctttagttgcttgttttttgccaaaatacaagcgatcctcatggattattagcctgcaagtactttattacctatgcaaaaccaaggacaaaattccaaattttattttgtatctatctagtggattagatgtccaacatgtttatttttcttctatttattcttctttatctttaatgtttgtgacaaatgttcctccatgtcaggaaatgtatgttgaaaattgttttgttcgattgagttatgacattgatgttcctagtttaactatggttttaaattagggtataaattaccccttctggttccggactaaaaaaaaaaaaaaaa

SEQ ID NO: 4974 - DNA, 940 bp, Glycine max
  misc_feature (912)..(918): n is a, c, g, or t
ccacgcgtccgatttattcagcgagaagacgacagaaccaaggactagatatttttttctctctcctcttcgccgctaattaacccttttctccccagcattcaatttctattagtatccaaaccttgattgcgttcttggattttcttgtgggtagggggtttctcctctctttctctgcagtttgatggatcgggaaggaggatccaacgccggatcttgctactactccgttctcgggattcgtagggatgcctccttctctgatattcgcactgcctaccgcaaactcgctatgaggtggcacccggacaagtgggctctgaatcccgcaaccgccggcgaagccaagcgccggtttcagcaaatccaagaagcctactcagttctctccgatcagtctaaaaggtcaatgtacgatgcggggctctacgatcctttggaggaagaagaccaagatttttgtgacttcatgcaagagatgatctcgatgatgaacaatgtgaaagacgagggggacagtttggaggacctacagaggatgttcgtggatatggtggggggagatcatggccatggaatcggcgttgacttgaaccaagatcgaacggctggaaagcgaggacgagtatatggatcgaagggcaacgcgcccaagcgcagcaactctcgcagttagtgcgccgtactgaatccatcttgtaattttctttacacattggatgattgaaatgaaaatccttttactagattggtaatgctctttagttattagttatggaacaatagatcaagtgcaactgtgcaaattgtgctttgcattctaatactgccctttggggcttcttttttttcctgccaaaaatatagtgattcagttcagaggcccaaaaaaaaaaaaaaaaaaaaaannnnnnnagcggccgctctagaggatcca

SEQ ID NO: 4975 - DNA, 906 bp, Glycine max
tatccacgcctcccccgccgcctgcgcccacgcctcgcgggggtagtgggtgggggtttctcatttctctgccgttccatggatcgggaaggaggatccaacggcggatcttgctactactccgttctcgggattcgtagggacgcctccttctctgatattcgcactgcctaccgcaaactcgctatgaggtggcacccggacaagtgggctcagaatcctgcaaccgctggcgaagccaagcggcggtttcagcaaatccaagaagcctactcagttctctccgatcagtctaaaaggtcaatgtacgatgcggggctctacgatcctttggaggaagaagaccaagacttttgtgacttcatgcaagagatgatctcaatgatgaacaatgtgaaagacgagggggacagtttggaggacctacagaggatgttcgtggagatggtgggggaagatcatggccatgggatcggctttgacttgaaccaggatcagacggctgggaagcgaggacgcgtaaatggatcaaagggcaacgcgcccaagcgcagcaactcccgcagttagtgtgccgtactgaatccgtcttgtaattttcttacttgacattggatgatgattgaaatgaaaatccttttggtgggattaaattaaatttgctgaacaactactagtacattagtaatgctcttccttagttatggaacaatacaatacaccaagtgcaactgtgcaaattgtgctttgcattctagtactaaaccggggctgcttctttttttttttttttttcttttttcctgccaaaaatataatactaattcagatcagatgatccccattttcttgccggaaaaaaaaaaaagaataaaaaaaaaaaaaaaaaaaaaacccacgcgtccg

SEQ ID NO: 4976 - DNA, 1027 bp, Glycine max
  misc_feature (1013)..(1025): n is a, c, g, or t
tcagaacaaatctataaagatcgccatgtcttgtgtttgtgtctatccattccatttctttccaacacacactttctctctctatctttgggtgtctttctttttgttcattgttgatgatgtcacgcgccgccgtgctattacacgcgccggaggaagatgcggcggcggaggagtgctgtacctcgacttcgtcgtcgtcgatcgggaggaacagcgacgtgtcgtcggagagatcaatggaggaaggagaaaacgaggtggaaagtgcttaccatggacctttgcatgccatggaaactttggaagaggttcttcccatcaggagaggcatctcgaacttttacaatggcaagtccaagtcattcacgaccctggctgatgcagtgtcttccccatcagtgaaagacatagcaaagccagagaatgcatacaccaggaggcgtaggaatttgatggcattgaaccatatttgggacaagaataatagaaactaccctctaagaagcagtggtggtggcatttgcaagagatcaatcagcttgagtagaagttctctggctcttgcagttgccatgaacaactccgacagcagtagtagtatcacaagcgacgattccggttccagctcgaattcgatacctcctccctctccactaccgccactccatccacgaaacagagtgtcttccttgcggaatttctctccctggagatcattttccttgactgatctccagcagcattgtgccattgctgcaacaataaagatttcaagtccctccattggaaatgaaactgctcatccatcatagtaataaacaaagaggataacaaactatattattattaacttttagcttatttgaatgactatcttgctctagtcctatttgtttgagggagcaacaagttggagaagcagtgcctttgtgtacgtacgatcacttcaaattaacttcactaggatatgatatggcagtccttagggccatttaaaaaaaaaaaacaannnnnnnnnnnnnct

SEQ ID NO: 4977 - DNA, 1089 bp, Glycine max
tcagctacgtaggccccccccccccccatccattccatttctttccaacacacactttctctctctatctctctctctctctctctctggttgtctttcattttgttcattgttgttgatgatgtcacgcgccgccgtgttattacacgcgcaggaggaggaggaggaggaggaggaggagtgtagtacttcgacgtcgtcgtcgatcgggaggaacagcgacgtgtcgtcggagagatcaatggaggaaggagaaaacgaggtggaaagtgcctaccatggacctttgcatgccatggaaactttggaagaggttcttcccatcaggagaggcatctcgaacttttataatggtaagtctaagtcattcacaaccctggctgatgcagtgtcttccccatcagtgaaagacatagcaaagccagagaatgcatacaccagaaggcgtaggaacttgatggcattgaaccatgtcttggacaagaataatagaaactaccctctaagaagcagtggtggtggcatttgcaagagatcaatcagcttgagtagaagctctctagctcttgcagttgccatgaacaactctgacagcagtagtagtatcacaagcgaagattctggttccagctcgaattcgttacactctccctctcctctaccgcctctccatccccgaaatagagtgtcttcttcttccggctcaggtccatcctctcctttgttgcggaatttctctccctggagatcattttccgtggctgatctacagcagcattgtgccattgctgcaacaataaagatttcaagtccctccgttggaaataaaacagctcatccatcatagtaaaaaaaaaaaaaacaaagaggataacaaactatatgttattaacttttagcttatatgaatgaatatcttgctctagtcctatttgtttgagggagcaaaaacttgtagaagcaatgcctttacgtacgtacgatcacttcagattaacttccgtaagatataatgatatgcctggcccttaattagagcatcaaaaaaaaaaaaaaaaaaaaaaaaaaaaaagcggccgctctagagga

SEQ ID NO: 4978 - DNA, 1499 bp, Glycine max
accaactatgtatccaataaggtgggaagttttgctataaataggcataggtacctcccattggaacaacagcacaacaaagctagccaacctcaaataacccttgttatctctctttcattctcacttgtactcatctctttttcacaactttttttgtaccttctgatctaatggcagttccagtgattgatttttcaaagctgaatggtgaagaaagaaccaaaactatggcacagattgctaatgggtgtgaagagtggggattttttcagttgatcaaccatggtattccagaggaactccttgagagggtgaagaaggttgcctctgagttctataagctggaaagagaggagaatttcaagaactccacatcagtgaagctactaagcgattcagtcgaaaagaagagcagcgaaatggagcatgtggattgggaggatgttatcactctccttgatgataatgaatggccagaaaaaacaccaggattcagggaaaccatggcagaatatcgagccgagttaaagaaattggcagagaaactgatggaggtgatggatgagaatcttggcttaacaaaaggatacatcaagaaggcactgaatggtggagatggagaaaatgccttctttggcaccaaggtgagccactaccctccatgtccccatccagagctcgtgaagggtctgcgagctcacaccgatgcaggaggcgtaatcctactcttccaagatgacaaggttggtggccttcagatgctgaaagaagggcaatggattgatgtgcagcctttgccaaatgccattgtcatcaacactggtgatcagattgaggtcttgagcaatggtagatacaagagttgctggcacagggttctggccacaccagatgggaacagaagatcaattgcctccttctataatccttcattcaaggccaccatatgtcctgcaccacaacttgtggagaaagaagaccaacaagtagatgaaacttatcctaagtttgtttttggtgactacatgtctgtctatgctgagcagaagttccttcccaaggaaccaagattccaagctgttagggccatgtgagaaaagcaacttgctttcgtatagaaaatgcttttgcgcttccccccactttttttttttgaaaaaaaaaaaaacttcatcttttactttgttttaagggtattggtactataagacatgcttgatagtagaaaagtataccatttggttatcattctctgcacggatttctccagaatagaaaaccaccatgggtattaattagtcttcctttttctagaattttgctttatctttcaatgttatggggggagctagtgtgaatccatctgtgcttgcattgtacaatagttctttcaaatatattctactctaaagttgtcccccataaatttctctttattggtccttttgtggcggccgccctggtcgggttttccggttatcatcccacatgaaagt

SEQ ID NO: 4979 - DNA, 3550 bp, Glycine max
  misc_feature (3324)..(3341): n is a, c, g, or t
  misc_feature (3356)..(3360): n is a, c, g, or t
  misc_feature (3492)..(3496): n is a, c, g, or t
gtgataggtcagtggggagagaaagacagagacagagaaagcgggtctctttctttttggagtattgggtcagcttcttcggctgcgagaagacgacagaaggggaatgccaaagttggtcacgctctctgaaaatgcagcaacagcaacagcagcagcaggcatgaagagcaacatacacaacaccactccttcaaatatcatcatcatttctcacttctcatccttcactctcttcttctctttcttcccttcactctctctttcgcttcatggctggtctcatcgatctcaacaacgccaccgaggacgatgaaacgccgtcgtctggctcctcctcctcctcctcctcctccaccgtctgccttgaactctggcacgcttgcgcgggtccaatgatttcattgcccaagaaagggagcgttgtcgtgtacttccctcagggacacttggagcaacacctccacgattttccgctccctgcctctgccaacatcccttcccatgtcttctgtcgcgtcctcgatgtcaagcttcatgctgaggaagggagtgatgaagtttattgccaggtggtgctggttcccgaaagtgagcaagtgcagcagaagttgcgggagggggaatttgatgctgatggtgaagaggaagatgctgaagctgtgatgaagtcgacgacgccccacatgttctgcaagactttgactgcttctgataccagcactcatggtggattctctgtgcctcgtcgcgccgcggaagattgcttccctcccctggattacagtcaacagaggccttcacaggagcttgtggcaaaggatctccatggccaggaatggaggtttcgacatatatatagggggcagccgcgaagacacctgcttactactggttggagtgcctttgtgaacaagaagaaacttgtatctggagatgctgttctgtttctcaggggtgaggatggagaactgagattgggaattcgtagggctgctcaactgaaaagtggcagtaccttttcagctctttctggccagcaagggagtcctaccagtcttatggatgtggttaatgctttgtctgcaagatgtgcctttagcattcactataatccgagggtcagttcatctgagttcatcatacctatccacagattcgtaaagagccttgattattcttattcagctggaatgaggttcaggatgcgctttgaaactgaggatgctgcagagcgaagattcacaggattaattgttggaattgctgatgtggatcctgttagatggcctggatctagatggagatgcctaatggtaaggtgggatgacttagaagccacaaggcataatagggtttccccatgggagattgagccatctggttctgcttctactgcaaataacttgatgtcagctggtttgaagaggaccaagattggattgccttcagccaagctagattttccagtttccaatgcgattggaacatcagactttggggaatcactaaggttccagaaggtcttgcaaggtcaagaaatgttgggtgttaatactacttatgatagttttaatgctcaaagtcaccagctatctgatttgaggaggtgctatcctggctcgaactatcctaggattgctgcaacaggaaatagcattggaatctcacaagtgagttccaatgtttccaacaacggcataggctttagtgaatctttcagattccagaaggtcttgcaaggtcaagaaatacttcctagccaaccatatggaagggccctgtctgttgacgaggcttgtggaaatggtcgctttggactttttgatggtttccaggcgatgagatccagaaatggatggtcttcccatgtgagcaacaattcctcacatttgcatcctcctgttccatctgggcaagtttcatctccgtcatctgtgttcatgttccagcaagctgtcaatccagttttaaactcggattataacaaccaaataggtcaggtgatgggagataaagtccatcagcgagtttcatatgcgtctgaagttaaaggcggaaaatttgtatcaaccccctatgagcctcttctccgtggactatctcaggaaggcacaaattcttttggtctttcaaactttcataatcagctggatagttcacgttcacacgattctgtttcagtactgagagctagtcaagagttggttccctcgtgtaaaagtagatgcagagtctttggattttcattaactgagggtgctcccgttgcaagtaaagaggcgactgactcatctgcagttgcttgtgctggaccttcctttacaagacatgttgaagatgatttccatccagggcattcacttaggagcaaggcagtggcaagttattgcaccaaggtaatcaatctttatcctttaagatgcatttgacttcttggatcttggttctaatactacacaattagaagcatgcaggttctataaaatagccacgcaagataacaatggataggtaacaaataaagtgaatgatgtaatactgagttacacctgtcagtattgagctatctaatttccttgtcagagccagttcttgccaaatgagtataatgcttagtgggtttaacaatttcttgttatggcttgtcatacaaaatgactcacatatctcttctactgagacaattttgaacatgttgggtgaaaagcaatggtgttgctgcaccaccttatttgatttactttttatttatcgacaaatgttatttttgtttgccgaggggatggaacctacgatctttctcctcttttcttatcccttaaccatcttacccttacttgattatttgttttgtttctttcgactctcgggagttattaaataatgcttattgtctgcagggtgtgctgcaatattgacttggaaatcttgatgtatgctggtactgatgctggcataaggtagcagaagagaatgtccacagttgttgtacttgtgtgctttgctctagtgacttggaatattgggagactaaaatattgtaactattcgtctaatttagatacttgttaaattggctatgaccacgttctagattctgtattaatcatgtatctacccttcattgacttgtatggggaaaacctctaaacgatgcatgtttatccaccgttttggccatatgaacaaagtaagccaggtggttgtgcataacccttcatttatcttgaattgggcattgattacattagagagcaatagctctcttaatgtttcatgtccttaatgttgtctccatttttactcactgttaaaaaaaannnnnnnnnnnnnnnnnntcttgtctcattgcnnnnngtatggagatgtgcgtcttcttttatagggaccacatgtattttattagagaatcttgttcaatttggatagaagagatgtgggtttatgataacatgacaaaataaatcgataattaaagacatgaacagnnnnnactcttggtccaaagccattagagcttgtactctcaattttccatgaatatatt

SEQ ID NO: 4980 - DNA, 1775 bp, Glycine max
cagctggcagtgcttttgggcctttcaacttttttcacaatggcagatgattcaatcaccaccctcgggcccccccccccccgtgagttggccgaaaaggagcctgaaaatggcgtcttcagactactccgaagtgatgttactcggttccttaccacaatacttattggcacaacggtggtcaatattggggcaactgctctggtcactgaagcagcaactgctatgtttggtgaagctggtgtcagtgcagcaacaggagtgatgactgttgccattttgcttctcactgaaatcactccaaaaagcatagctgttcataatgccacagaagtggctcggtttgtggtcaggccagtggcatggctttccctggtgttgtaccctgtaggaagaattgttacctatctttcaatggggatgctgaaattgcttggcctaaaaggaagaagtgagccatatgtaactgaagatgagctaaaattgatgctaagaggtgcagaattaagtggggcaatagaggaggaagaacaggatatgattgaaaatgtgttagagataaaagacacacatgtcagagaggttatgacgcctcttgttgatgttgttgcaattgatgcaagttcaagcctggtagactttcatcacttgtgggtcacacatcagtactcaagggtacctgtttttgagcaacgtgttgataatataatgggtatagcatatgcaatggatctgctggattatgttcaaaagggtgagttgctggttgattttgaagggtgagttgctagaaagtactacagttggagatatggctcacaagcctgcttattttgtacctcgcgcccggtctgtttggaatcttcttagagagttcagaatcaggaaggttcacatggcggttgttcttaacgagtatggtggaactgtggggattgtaactctcgaagatgttgttgaggaaattgttggtgaaatctttgatgaaaatgactcaaaggaggagatacagaaaaaaactggctacattgtaatgcgagctgagggtgtttttgatgtggatgcaaacacttccattgatcagctctctgaagatttgaacatcaagatgccagagggtcaccaatatgagacggtatcaggctttgtgtgtgaagcatttggatacattccaaggacaggtgagtgcatcaaagtagttcttgaaagggaagatgaagatgataacaatgagtccaatgctgaccagcaggatcagaaggagaagaaccagagtttcaaacttgagatactagctggaaatgccagaaaggtgagcgctgttcggtttgaacgcataaataataatgatgaaatgttggagactaaagtaactcgcatgatccccaaaatcatgaaaagaaaatggaggagtgatgcaaactcagacaatgatgcagaatatgacggagatacatttgcaaagacaccacaggatgacatttctagtgaatatttagttgatcaggaaaattctaacagaggttaagtttgtccgttattcatattttttctcctttctttatacctggcatgcttttgtgccatttttgcaacagcctataagatgaaaaaattgagatacatgttcaaaatgagaagcaatgagttcaagcatgtaaaaccttgcaaaagacgaatttgaggcgtctttgctaacgaaagtctttggtataataaagatgtcaggtttgatcaaaaaaaaaaaaaaaaaataataaaaaaaaaaaaaaaaa

SEQ ID NO: 4981 - DNA, 927 bp, Glycine max
gcggctcgagatgtatttttagccatattcaaaagggggaaattgtatgtgtatcccttccttcccgtctgaaacaaaaggaaaggatgaagcaatcaaaggatccgttcgaagcagcgttcgaggaatcgccgccagaatccccaacggctacggagacagaggcagagacgcaaaaccctactcctcctcctcctcctcctcctcctccttcttctttttctggtgttgctgtagtagcactgaatccacaacagcctcagaatcagaaagtgaagaacaaagacaatgaggaagaggaggaggaggaggacaacatggacgtggagctcgccaagctcccttccaccggcgaccctcacaaaatggccaagatgcaggccattttgtcgcaattcaccgaagagcagatgagtcgatacgagtccttccggagggctggctttcagaaagccaacatgaaaaggttattggctagcatcactgggacccagaaaatttctgtgcccatgacgattgttgtatcgggcattgcaaaaatgtttgttggtgaagttgttgaaacagctagaatagttatgaaagagaggaaggaatctggaccaatccggccttgtcatctgagagaagcatatagacgactaaagcttgaaggaaaagtctttaagagatcatcctcgaggctcttccggtagatggaccaaatatgaatattgtgtgcatcagcatcactagtttgctatagtggcttgcgggtagattaaattttgtagtctgcaccttcttgttttcaacatcttgatgttcatttaactggagctagtgaatgtgaatcaatattagaagtaaattgggaaaatttccccatttctgcaaataagaaatgtgcaatggacacatgtttaggactcaaaaaaaaaaaaaaaa

SEQ ID NO: 4982 - DNA, 1922 bp, Glycine max
  misc_feature (1921)..(1922): n is a, c, g, or t
gttccttcgtattcatcgggtttgagattcacgctcttttttattactctggcctaacggaaaagcctccacatctacatatataaatactaccaaaaattcagttgcacactctgctatttccaccaccataacctcgctctcttcaccctcttcttcttcttcttcttcttcactttgtaactttcgaatcttcttccttccaccgcaatggccaccgccacgcttagccccgccgacgccgacaagctctccaacctcaaatcctccgtcgctgcattgagccaaatcagtgagaatgagaagaatggattcacaagcctcgttgctcgttacctcagtggcgaagcacagcatgttgagtggagtaagatcgagacgcctacggatgaagtagtggtgccttatgactctttggcaccgactcctgacggttctttggaggtgaagaacctcttggacaagcttgtggtgttgaagctcaatggaggcttggggacaactatgggttgtactggcccaaaatctgtcattgaagttcgtgatgggttgacatttcttgatttaattgtcgtccaaattgagaacctcaattccaaatacggaagcaatgttccgttgcttttaatgaactcattcaacactcatgatgacactcaaaagattgttgagaaatataaaaactcaaatattgagattcatacgtttaaccagagtcaatatcctcgtttggttgttgatgactttttgccattcccatccaaggggcagacaggcagggacgggtggtaccctcctggccacggagacgtcttcccatcattagtgaatagtggaaagcttgatgtgctattatcacagggtaaggagtatgtgtttgttgccaattcagacaacctgggtgctgtagttgacttgaaaatcttaaatcatttgattgagcacaagaatgaatactgtatggaggtcactcccaagacattggctgacgtgaaaggtggcactctgatttcttatgaaggaagggttcagctcctggaaattgcccaagtaccagatgaacatgtcagtgaatttaagtctatagagaaattcaaaattttcaacacaaataatttgtgggtaaacttgaaagcaattaaaaggcttgttgaagctgatgctctgaagatggaaattattcccaatccaaaggaagtcgatggagtaaaagttcttcaattggaaactgcagctggtgcagcaataaggttctttgacaaagctattggaattaatgtgcctcgatctcgcttccttcccgtgaaggcaacttcagacttgcttcttgtccagtcggacctttacactttacaagatggattggttattaggaaccaagctagggcaaatcctgaaaatccttccattgaattggggccagaatttaagaaggttagcaatttcttgagccggttcaagtcaatccccagtattgttgagcttgacagtctaaaagtggcaggcgatgtatggtttggagctggtgtaatccttaagggaaaagcaagtattcttgcaaaaccgggtgtgaagctggaaatacctgacggagctgtgatcgcagacaaggaaattaatggccctgaggacctgtgagagaaagctgatgatgagttttgaaatccatgtgactgtgcaatctttgagtattgacagtcttaaactaaaatttgtgtattgcttctagtttggtaggggtaaaaataagaaggcagtttctactgagcatgtctgaagactaagctttgtatttctcataattttgtttttaaacatttcttacaaggactcaaggaggatccgatcatgtttcctttccatatcatattaagcgtttacgccttcatcttttgttgagtaaaaaaaaaaaaaaaaaaann

SEQ ID NO: 4983 - DNA, 3494 bp, Glycine max
cctcgcagccattttctttgacactctccaaacatgttcgccacctttcgactccttcttcttctctcattcctctcactactcaccagcgcccaatccgaagaccagcgtcaaatccttctgaacctaaaatccaccctccacaattcaaattccaaactcttccactcatggaacgccaccaattccgtttgcaccttcctcggagtcacttgcaactccctcaattccgtcacggaaatcaacctctccaaccaaactctctccggtgttctcccgttcgactcgctctgcaaacttccgtcgcttcaaaaactcgtgttcggttacaactacttaaacgggaaggtttcagaggacattagaaactgcgttaagttacagtacttggacttgggaaacaaccttttctctggtcccttccccgacatatctcctctcaaacaaatgcaatacctgtttttaaacaaaagtggattttcgggaacttttccgtggcagtcgctgttgaacatgacgggtctgttacagttaagtgtcggagataaccctttcgacttaacgccctttcccaaagaggttgtgagtctcaagaatctcaattggctctacctatcgaactgcaccctcggatggaagcttccggtaggactcggcaacctcacggagctcaccgaattagaattctccgataacttcctcaccggcgattttcccgcggaaattgtgaaccttcggaagctctggcagcttgagttcttcaacaattccttcacgggaaagattccaaccggcctgagaaacctcacaaagcttgagcttttggatgggtccatgaataaactcgaaggggatttgtctgaattgaagtacttgaccaatctggtttcgttgcagtttttcgaaaacgatttgtcgggggagattccggttgagataggcgaattcaaacgcctcgaggctctgtctttgtacaggaacagattgataggtcccattcctcagaaggttggttcctgggccaagtttgattacatcgacgtgtcggagaatttcttgacggggacgattccgccggatatgtgtaaaaagggaactatgtcggcgctgctcgtgcttcagaacaagctctccggcgagattccggccacctacggggactgtttgagtttgaaacgattcagagtcagcaacaactcgctctccggtgccgtccctctttcaatttggggattgccaaacgtggaaataatcgatattgagatgaatcagttatcaggttcgattagttcggatatcaaaaccgcgaaagcactcggttcaatattcgccaggcagaaccggttgtccggtgaaataccagaagaaatctcaatggcgacgtcgttagtgattgtggacctgagcgagaatcaaatctttgggaacattccagagggaatcggcgagcttaaacaactaggtagccttcatttacagagcaacaagttatcaggttcgataccggaatctctaggttcctgtaattccctcaacgacgttgacctatctcgaaattcattctctggagaaatcccttcctcgttggggtctttccccgctttaaattctctggatctttcagagaacaaactctccggtgaaatcccaaggagtttagctttcctcagattgagcctctttgacttatcgtataaccggttaaccggtccaattccacaggctctaaccctagaagcttacaacggaagcctctcgggaaaccctggtttatggctacgtaggccccccccccccttcccgcgttgccctgcttcctctggcatgtcgaaggacatgcgcgcgctcataatatgcttcgcggtggcttcgattttgttgctctcgtgtttgggcgtttacttgcaactcaagaggaggaaggaagatgcggagaaatacggagagcgttcgctgaaggaagaaacgtgggacgtgaaatcgttccacgtgttgagtttctcggagggagagattctagattccatcaagcaggagaatctcataggaaaaggaggctcggggaacgtgtacagggtcactctttccaatgggaaagaactcgcggtgaagcatatttggaacaccgatgtccctgcaaggagaaagaactcgtggagtagcacccccatgcttgggaacaagcacggtggtggtgggaagtcaaaggagtttgacgcggaggttcaggctttgagctccataaggcacgtgaatgttgtaaagcttttttgcagcataaccagcgaggattcgagcttgttggtgtacgagtatttgcccaatgggagcttgtgggaccggcttcacacgagtaggaagatggagcttgattgggaaaccaggtatgaaatcgcggttggggcagcaaaagggttggagtatttgcatcatgggtgtgagaagcctgtgattcatagagatgttaagtccagtaatattttgttggatgagtttttgaaacctaggattgcagattttggacttgctaaggttattcaggccaacgttgtcaaggattcctccactcatgtcattgccggaacccacggatacattgctcctggttagcatttactactagctcctgtctttttataagaaataagttttagtgtattttgtatgttaatttgacaatctttaatcatgcttattaatgtatggattttgtttgaattggtgtagaatatggctacacgtacaaagtgaatgagaagagtgatgtgtacagctttggagtggtgttgatggaactagtaactgggaaaaggccaactgaaccagaatttggggaaaataaggacatagtgagctgggttcataacaaggcaaggagcaaagagggacttaggagtgcggtggattcgagaattccggagatgtatacagaggaagcttgcaaggtgttgagaacagcagtgctgtgcacggggactcttccggctttgagaccaaccatgagagctgtggttcaaaagcttgaggatgccgagccttgtaaattggttgggattgttattaccaaagatgacagtgaaaagaaaataggagtcaacgacaagtaatgtattgtattccatcctccatagttggttacaaccggactgaagattatggatcatcatgaagttgaaggggaaccaaccacctccacgagttatctataattgatgtaaattttcccggaaagagggaacactgtaaaatattagtcttggcttctttaatgtctattttaaagtggaagacttgtgtagtaaaagggtctgcatctagtactcccaataaaagaaaaaaaagagaagcaaattccttcttccttaatttactaattaaatgaaactggtagtgtccaaataattggttttaatttttatcctatcccagtcagtgtatcataaattggtatttataacataacagggtcgagaatgaaaaaaaaaagcggccgc

SEQ ID NO: 4984 - DNA, 2082 bp, Glycine max
cacgcgtccgctctgcataatttattccaaagaaaaaccatcacccaccacttgtgacactgttttctgacacagacaccattccttccgcggcttcactttaccaccagaacctctctctctctctctctctctctctctctctggaattcaacacgcgttgtggattaaaataaagttaacatctttttctttattttcttctcttcccactacaaagcccaccttcatttttccacctctttattttcccaaatctccatctgggtcattagtttctgagcctctcttgtttttacaaccttttactccattcctcataccaacagagaaaaagggttggttccttttttattcttgtctccttattttgtttcttctgccactcattgcttgctgagagagccttttgttctgagtttttggtttcttggtgagtgcttctgacaatatattggaacttggttttggggattggtgcttttttagggtacccaattgagcattttttttcttcttaaacccataaagtcaaagctctcatctttcttatgttgtaaacaaggtctatgagttgttccttgtagtgcagacaagggcatggtctttttgcagagtttgagtgattctgctacttactatactagttagtttgacatcttgagcgggtgtagaatgggatctggaaatgaggttcactcaattgtggagttcaatttggatgctaagtggcttatagatcccaagcaactatttgttgggcctaaaattggggaaggtgctcacgccaaagtgtatgaaggaaaatataaaaatcagaatgttgctgttaagattattaataagggtgaaaccccagagcagatttctaggagagaggctcggtttgccagagagattgccatgctatctagagttcaacacaaaaatctagtcaagtttattggggcctgcaaagaacctgttatggttattgtaactgaacttctcttaggtggaacattgcgcaaatatctgtggagtatccggccaaagtgcttggatgtgcgcgtagcagttggatttgctcttgatattgcccgagcaatggaatgcttacactctcatgggatcattcaccgtgaccttaaacctgataacttgatcttgacagaagatcataaagcagttaaactagccgatttcggtctagccagagaagagtccttaacagagatgatgactgctgagacagggacatatcgatggatggctccagaactttacagcactgtcactctaagacaaggggagaagaagcattacaaccataaggtggatgcctatagctttgctatagtgttgtgggaactcgtccataataagttaccttttgaaggcatgtctaatttacaggctgcatatgcagcggcatttaagaatacaaggccaagtgctgatgagcttcctgaagatttagctctgattgtgacctcttgttggaaagaggatccaaatgatcgacccaattttagtcaaataatagagatgctgcttcgatatctaaccaccatttcaccgtccaagccagttgttccaatgcgaatcacttctaagaatgctgtattgccaccagaatctccaggtacaagtgctttaatggctgggagagatgattctggagaaaccccaaaaggcaatattgaaggcaggtctaaagggtttttcttctgctgttactgatgacacaatgcactcacaattctttcaatggggccgtcccaaatcacagtgtggcaatctgaataaaccccagcaaatgttacatctagaatcttaacaagaaaaacaagtcagttttgttcaccttgattccatgttctcagcaagagtagcaagccatactcttttaactttggattgacttacttctaacttattagggttgaggttgctgagatgtattgttgtataatatggttcatccaaaggccttcacctcctgcttaatgtatggaaatgacttggataatgaataaaaacggggaagatttttatctttgcatccatgtgattcgtttgtaaacattgtaccgccgattg

SEQ ID NO: 4985 - DNA, 1474 bp, Glycine max
tcagctacgtaggcccccccccccccccccggcaaatatcagttagatgttcagagtgatggacattggcaggtttgaagatgacagcaggcttagaaagatcatgtcaatcactaatgggaggaactaggtattgtgtcttttccctgtgttttgatgtttattggaactcttatcttcttcagagccaatattcagactgtcttcatgccagcagtatgtaatattggattaaaaaatgtcgctgctggggaaattaaattccactggtgtatctaggggactccgtatgctcaagaacaggtcaatataggttccggtccacctgattccaaagttagatggttccgttcatctagcaatgaaccacggtttattaacacggttacatttgacagtaaggatgattctcctacgctggtgatggttcatggatatgcagcatcgcagggtttcttctttcgcaattttgatgcccttgcctcccgtttcagagtgattgctattgatcaacttggttggggtggatctagcaggcctgactttacatgcagaagcactgaagaaactgaggcatggttcattgattcttttgaggaatggagaaaggccaaaaacctgagcaattttatactacttggacattcttttggtggttatgttgcttccaagtacgcacttaagcaccctgagcatgtcaatcacttgattctggtgggacctgctggattttcatcagaatcagaaagaattacaaagttcttatcaacatggaaaggatcaatcctgaaccaaatatgggaatctaattttacacctcagaaaatcatcagaggtttaggtccttggggtcctgatatggtcctcaagtataccagtgccaggtttgttacatatacaactggggaaacgctgacagaatctgaatcgagattactgacagattatgtttaccatactttagcagccaaagctagtggcgagctgtgcttaaaatatatattttcatttggaggactcccgaggtcacctcttcttcacagtgcttcagagtggaaggtgcctaccaccttcatatatggttttcaggactggatgaattatgaaggagcccaagaagcacgcaaacaaatgaaggttccatgtgaaatccttagggttccccaggccgggcactttgtgttcattgacaacccaagtggcttccattcagcagtgttttatgcttgtagaaggtttcttaggcctgatccagacagtgaatcccttcctgaagggctaacctctgcatagagtataatcttgtgtaatgctgtctatgattatatatttcttttacaaattaaactcctttatttattcaagccatgtcctattcatgcttaaatggaatttgcaattgtaacttgtaatggcaattcaaaaaataatgacgtctaatataaatttcattactgaaaaaaaaaaaaaaaaa

SEQ ID NO: 4986 - DNA, 1917 bp, Glycine max
tcgagtcagctacgtaggccccccccaccaattactcaacagcaccgtttcatgagaaagtagcagcaaagtttcttgtggttccttttccatctttttgctctgtttctgacacaagatggtgaagagagtgaggtctgattcgggtccattgtctctgcaaaagcacaaccattggtgtgtgaagttaggagtttcaatcttcttggtgggtctcgcttttcgtcttctcttgtgggattcattcagtttctcatcggtggtggtggagacacctcctcctctggaagatgcaaaagcagtgtcccctgttttctcttcctctgttcttcaggattctgatgagtttccagaaaatgatcagaagattcagacacaaatctctaagaatgaaaaatgtgatctttttgtgggagattgggtgcaagacctatctgggccagtgtacaccaatgagagctgccgtgtgattgagcctcatcaaaattgtatgaagaatggacgtcctgattcagagtacctctactggaggtggaccccacgagactgtaaattgcccaaattcaatcccagaaagtttctcaaactcatgagaaacaaatcattgtcattcattggtgattccatctcccgcaaccaagttcagtccctactttgcgttctctcaaaggtggaaccagctgttgagatctaccatgacaaggaatatagatcaaagatatggaaatttcgttctcacaacttcacactctcagtaatctggacccctttccttgtcaaagcagctatatttgaggacttcaatggagttacctcttcagagatacagctttatctcgacacactcgacgagtggaccaaacagtataagaattttgattatgttgtcattggtggtggaaaatggtttctcaagactgcaatctaccatgaaaacaaaacagtcataggctgccactactgccctggaaagaacttaacagagctgggattcgactacgcgtaccgcaaagtactacaagaagttttcaagttcttcacaaagtctaaccacaaagccactgttctcttcagaaccaccacaccagaccactttgagaatggggagtggtttagtggagggtattgcaatagaactgtgcccttcaaagagggtcagatacatatgatagacgtagattccatcatgagaagtattgaacttgaagagtttgagaaggctgcttctctaggatccaaaagggtgaacttgaaacttttggacacaactcttctttcactgctgagaccagatggacatcctggaccttacaggaagttccagccatttgcaaaagataagaatgctaaagttcagaatgattgtctacattggtgtttgccaggaccaatcgactcatggaatgacataatcatgcaaatgctactcaatgcttaataaacaataatctgtcactggatcatcagggtttgaagatgcttacaaatatgatcatttgaaattcaggattctttgatgcatggtagtttcttccaatacctttattagtttgcaaaggacagatttatacaacaaagccattaggttgagctccgatctgtacatggaactgtatagcttaataaaagcttgccagacacaaatgtaaacgtagcactcaagtataaactcatcttatgtccttttcaccataatttttgtgaggcatgtatacctatttatttttatacttagatgaagagataaagtcacaggattgaataatgctgaagctggtgtgcttggtaagctgcaaagaccaatgcaaatttctcttttcatgtattacggcaaagtttcttgcaaccattgattcgtttcatatgtgtaaataaaacatgtatgaaatgacatttttgttgccatatagcaaactg

SEQ ID NO: 4987 - DNA, 1910 bp, Glycine max
  misc_feature (1902)..(1902): n is a, c, g, or t
  misc_feature (1904)..(1904): n is a, c, g, or t
  misc_feature (1908)..(1910): n is a, c, g, or t
ttcagtttcacatatgcacatgcattctctctctctctctccacaatctcacctcgcgtgtcagaataactcgtgactcactcagtcgccacaacacaaacatggtaataataataaaatactatacatatatatatatacccaccatcgaaaaatcagaacagaacccaaccaaagcagctatggcggcgatgcagaggccactcaagagaaccattgcaatcgccaagcaacgcgcgtgcttttcctctctcctaccctccgccgctgccgccgccgccgccgataccgtcgcgcctccgcagctccccccgttcgatcaccagccgcacccttacaacggtccctccgccgatgaagtcttcgccaagcgcaaaacgttcctcggtccttccgtcttccactactataagaaacctctgaatatcgtggaagggaagatgcaatatctttatgatgatagtgggaggcgttaccttgatgcatttgcgggaatagttactgtttcttgcggacattgccaccctgaaattttgaatgctatcacggagcagagtaaacttctgcagcatgctacaaccatatatctacaccatacaataggtgactttgctgaggcattggcagcaaaaatgcctggaaaccttaaggttgtttattttgttaattctggttcagaagcaaatgaattagcaatgatgatggcccgtttatatactggtaatctcggtatgatttctttgagaaatgcatatcatggggggagttctagtacacttggtctgactgctctgaactcgtggaaatacccaattccagagggccatgttcatcatgttatgaatccagatccatatcatggagcctttggtacagatgctgctagttatgcaaatgatgtccaagaccatattgactacggaacttcgggaaaagttgctggatttatagccgaatcaattcagggagttggcggagcagttgaactggcaccagggtatttgaaacttgtttatgacattatacataaggctggtggtgtctgcattgccgatgaagttcaaactggttttggccgaacaggaagccattattggggatttgagacacagggtgtcattcctgatatagttaccatggcaaagggtattggcaatggtctgccattgggagctgtagttacaactccagaaattgcaagtgtgatggcccaaaagattcaatttaatacctttggtgggaaccctgtctgctctgctggtggacttgcagtgcttagggttcttgataaggagaagcgtcaagctcactgtgctgatgtcggatcttatttgcttgaacgtttgagatttctcatggaaagacatgacatcataggaaatgtcaggggaaggggactaatggtaggcttagagttggttactgaccgaaccaacaagacacctgcaaaggctgaaactgctgttgtgtttgaaaaactcagagaactcggtgtgctagttgggaaaggaggacttcatggcaatgttttcaggatcaagccaccaatgtgtttctccaaagatgatgcagattttcttgtggatgccttggactattctctatctaagttgtgagctgattgtgcatcttgctagcatgaaatgaaatcttcgacaatggagccaaattactacaagccaacaacaaaaagctcatttagttcatagaaatcaccatgaataatgtaatgttctccccgttgagaagagagggggtttccctccctttttgctgaacattataagttgaatgctgactattattgtatataaatttgggtttcatgacatcaaaaagttgcattcaatctgcagagtaatgtttaaatcctcaaaaaaaaaaaaaatgcatgaacatatntnaaannn

SEQ ID NO: 4988 - DNA, 2103 bp, Glycine max
gggggtgtttttttttttttttttttttttttggattaaacccacctgaagggagaaatataattttcaaatgcctgtaaaatactcacgatatttgtatgcttcatcagacccctattttaatattcaggtctggcactttaaactcgtacagtacaagttccctatgttaaaaaatccttaacaccattctatgtcaaaatagttttaaaatcagggaatataattttttttctccctttttccccaatggaacgtcttatttaaaagttcatatatcaactaatagccatttggtcaatggtggggaggatgcaaaattgccttgccaatagtctcatcaactcattaatatctcaagcaaactgcttcaaccacttgtttatttcctagatctttattccaatcacagtattaaccacattttccactgttctagccaattcaacagctgctccaacataagtatcaggtgttaacttcaacagattattctttgcttcttctggaatatctaagccttcaatgaaatctcttatgctctctttggtaactgctcttcctctggttagttcttttaacttctcataaggctcaggaacaccatatcttcgcataacagtctgaattggttcagcaagcacctcccagcactggttcaagtcttcactcaagcgagcttcattaacctgaagcttccctattccttgaagtgtgcttttgtaggcaagaagagaatgacctatacctatacccatgttccttaagacagttgaatcagtcaagtccctctgccaacgtgaaatcggcaacttcatgcttagatgagacagacctccattagctacacctagattaccttcgctgttctcaaaatcaataggattcactttgtgaggcatagttgatgacccaatctccccagccttagtggtctgcttaaagtaacccaaagatatatagccccacacatctctatcaaaatcgattaatatattattgaactggatgagcaaatgaaaaagctttgccatgtagtcatgagtttcaatctgagcaacataaggattaaaacttaatccaagagagtgtacaaactgttctgcaatgtgaggccagttaacatcaggatatgcaacaatatgtgcattgtaatttccaaccgcaccagcaaatttccccactatctcaacctgagacagatccttcctttctctgcttaatcttgcagcaaagatcgccatttcctttcccaaagtagttggtgaagctggctgtccatgagtgcgggaaagcataggaacatgtgcattatctttagccatatcacacaaagctttgattattttatccatgacaggaaacatgatagaattcattgtttccttcagcatcaaggcatgggcaagattatttatatcctcagatgtgcaagcaaagtggaaaaactcaaccaccttagccacttcagcattggattgacacttctgtttcaagaagtactccaccgctttcacatcatgattcgtgaccctctcaatgtttttaacctccgaggcatcctcaacactaaagtcatcaatcaggccttctaagaaagatttagcaccatcactgaaactgggaacctcaacgatttcaggaatcacagacagctgcagcaaccattttatctcaacaagaacccgaaagtagattaagccatattcactcaaaaaaggagcaagttccttaactttgctccaataacgaccatccaatggggacagagccgtcaaagcagagagctcaaaatcgatggaacggggtccaaacatgttgttgtgggtagaggtgggtgtgtgggtgctaaggacggctttgcaggagcaacctctgcgagaggaagaagggaaagaagcatacgaaaaaggaagaaagtgttgtgttgaactttgaaggttggttctaagagggttgaagctcccaagttgggtagcgttagagagtgcagtgaactccatgaaaggcttcggaggaagaaaaaacgcacgaaccctttcacgcagtcacactcgagatactctccgtcttcgacttcgatttcgtcttcttagtaaaaac

SEQ ID NO: 4989 - DNA, 1001 bp, Glycine max
tcagctacgtaggccgacttcttcaaaaagcatggtgtagcagtcatgacaataagagaattgtttgaatttattgtcgatgcatccattactgatgatgccgtggatagttacctagaagaggtgcaacaaaaaattttggctagagatgtgtctgctgaggatgagattgcagactctgtatttgtgcagtcctatattccgaagacactagaggatgtgaagaatgctgaggaggatgtacaacggataacaagtgggaaggacaccaaagatttatactatcagaccattactggacttaaacatgctctgtcattaacacagacttcacagcaaaaaacccaacagcagaaatcaagtcccacaaaggattcaccggttatttctgatgataaatctaacctcttagaggatgatgccgagggtcaatctggcaaggatgaagacgatgaaagtgattctgaagaggattcatgctcagaaagtgaagtagaggatcctgcggatataaaagctgctagaaaagaggctaggaaagagaataagaagaaggtgaaggaggagaaaagagaagcacgtaaaactaaagttcctaaggctgttaagaaaagaaagaaaaagttggctaaagcgaaaaagaccagatagatagttgtagttatatgtaattggccgagttgagtttccctagtagtgtggatttaagatacaaccaaattcaccaaatattttttttaaaaaaatagcaattttgttcactcttactatcttgggagtatcttctacaaggagaggttagaaaacacggtttctgttacctatgtctgcattgccagcttttctttacactcttgctgtttctattaagttgagtggaagtgtgtaatggaaataatttcaatacctacatgcacttccttcgtttagtttttactaagctttcaaattttgttggtttcttctgggaaaaaaaagtgccgctagtattacttttttta

SEQ ID NO: 4990 - DNA, 1522 bp, Glycine max
gcaccaggttaggtgcttaacatttgatcaaacggctgcgcggtggcgtcagaattggatggaaggttgctttagtctccgcaattttctgcttgcttcttcacttttttttttcctctgtctcctcctcaatcttcattgtcctgttctttcccttggtgacaaaccaagactaacacacacagaacatagcttgtgttggtgaggtgagaagataaagaaagaatggcatttgcaggaacaacacagaagtgtatggcctgtgacaaaaccgtttatctggttgataagttgaccgcggataaccgagttttccacaaagcttgcttcagatgccatcactgcaaaggaaccctcaagctgagcaactacaactcttttgagggagttctttattgtaagccacactttgaccaactgttcaaaagaacagggagccttgacaaaagctttgaaggaacaccaaaaattgccaagccagagaaaaatttggaagagaaacctgcagcagccaaagtctcaagtatgtttggaggaacaagggacaaatgtgctggttgtcagaaaacggtttatcccactgagaaggtgactgtgaatggaaccccttaccataagagttgtttcaaatgctgccatggagggtgtgttatcagtccttccaattacatagcacacgagggaaaactctactgcaaacaccaccatgtccaattgatcaaggagaagggcaatttaagccaacttgaaggtgacaatgagaagagtgcaactaatgggaaaatcaatggtgaagaagttgccacggagacatgatgaaagagtcgagtctcagaattgtactttctcaagttccatatttgtgcaccatatgtttctgctgtctctcatgcttttaccattactttgcagtccgggaagctctttacccgtgacaaatatggtattcaattttttgttagttgaactgtgtggatcttcatcatctgtttttggttgttgtgagcgtttgattcagaatgtgtgatttagaagtacatgctactgcacttcttgaaactctcatggacttccaattgatattatgtaaaatcgtctcaatacccaaatttcgtttcctactaaaaagaagggcaatttaagccaacttgaaggtgccaatgagaagagtgcaactaatgggaaaatcaatggtgaaaaagttcccccggagacataatgaaaaagtcgagtttcaaaattgtcctttttcaagttccatatttgtgccccaaatgtttttgctgtttctcatgcttttaccattactttgcagtccgggaagctctttacccgtgccaaaaatggtattcaattttttgttagttgaactgggtggattttcatcatctgtttttggttgttgtgagcgtttgattcaaaatgtgtgatttaaaagtacatgctactgcccttcttgaaactttcatggacttccaattgatattatgtaaaatcgtcccaaaacccaaatttcgtttcc

SEQ ID NO: 4991 - DNA, 1068 bp, Glycine max
tgggtttaggccccctctcagctacgtaggccccccccctggaagtttgctttagtctacgcaattttctgcttgcttcttcacttttttttcctttgtctcctcctcaatcctcattgtcctgttcttcccctaggtgacacacacacgcagagatcatagcttgtgttggtgaggttagaagataaagaaagaatggcatttgcaggaacaacccagaagtgtatggcctgcgacaaaacggtttatctggttgataagttgaccgcggataaccgagtgttccacaaagcttgcttcagatgccatcactgcaaaggaaccctcaagctgagcaactacaactcttttgagggagttctttactgcaagccacattttgaccaactgttcaaaagaactgggagccttgacaaaagctttgaagggacaccaaaaattgccaagccagagaaaaatttggaagagaaacctgcagcagccaaagtctcaagtatgtttggtggaacaagggaaaaatgtgctggttgtcagaaaacggtgtatcccactgagaaggttactgtgaatggaactccttaccataagagttgttttaaatgctgccatggagggtgtgttatcagtccttccaattacatagcacacgagggaaaactctactgcaaacaccaccatgtccaattgatcaaggagaagggcaatttaacccaacttgaaggtgacaatgagaagagtgcgactaatgggaaaatcaatggtgaagaagtttccgcagagacatgaaggagtcgagtctcagaattttgctttctcaagtttcatatttgtgcaccatatatttctactctctcatgcttttaccattactttgcagtccgggaagctctttacccgtgacaaatatggtattctattttttgttagacaaagtgtgcggatcttcaccatatgtttttggttgttgtgagcgtttgattcaaaatgtgtgatttagaagtacatgttactgcacttcttaacactctcatggacttccaattgatattatatacaatcgttacaccc

SEQ ID NO: 4992 - DNA, 1874 bp, Glycine max
aagctcaaccattaagcattgaaaacttagagagagtgagtgagtaagacagagactcagcaaccacgctaccttcttctcttctcttctcttctcttctcttcttcactgccatttcatttccccactctatccttccctccatgagcaccatggattcctcttccatctatggtgtctcacacagacacttcctcaccctcttccttcttttccttctgccactccattctcactctgcattctctcataactcttcttcctcgtctcaaattaactctaattccatccttgtcgcgcttctcgattcccattacaccgaactcgctgagcttgttgagaaagcgcttcttctccagaagctagaagaagccgtcggcaaccacaacatcaccatcttcgcgccgcgaaaccaagccctggaacgcgacctagaccctgaatttaagcgattccttctcgagcctcgcaatcttaggtcgcttcagacgctcttgatgtctcacattctcccgacgcgaatcgcctctcaccactggccctccgacgacctccgccaccgcactctctccgatcaccgcctgcatttggcctccaagccctccggccatagaaccgtcgactccgccgagatcctccgcgccgacgacgtcctccgccccgacggcgtcatccacggcatcgagcgtctcatcgtcccccgatccgtacaggaggacttcaaccgccgccgcaacctcgccgccatctccgccgtccttcccgagggagcgccggaggtcgatccccgtactcaccgcctcaagaagcccgctcccgttcccgccggcgcgcctccggtcctcccaatctacgacgccatggcaccaggcccatccctcgcgccggcgccggcgccgggaccgggaggcccgaagcaccacttcaacggcgagcgccaggtcaaggacttcatccacacactcttacattacggaggttacaacgaaatggctgatattctcgtaaacctaacgtctctggccaccgaaatgggaaggctagtttcagaaggttacgttctcaccgttttggctccaaacgacgaagccatggcgaagttaacgacggatcagttgagcgaacctggcgcaccggaacagataatgtattatcacattattcctgagtatcaaaccgaagagagtatgtacaatacggttagaaggttcggtaaggttagctacgatacactgcggttaccgcacaaggttctggctcaagagtctgacggctccgttaaattcggtcacggcgattcctccgcctacctgtttgatcctgatatttacactgatggtaggatctccgttcagggaattgacggcgttcttatccctcctgaagaagaagaagaacgcactcgccgcaccactccacttgttaaggttgctgctcctaaaccaagaagagggaagttgatggaaatcgcttgtagcatgtttggatcttttggacaagtctgccaatgaaatcgcattctcaactaatcacaaaaataataaagagtgaatgtatgtaaactcgaagaatgttgtagagtagtcatttcaatacaaaggatggatgcatggtgaatctataaacggagagcgagcgattacacggaagataacaaaaacaaattttctgtcattttgcttcatactgtaattacataccatttttttattaaattttattttatgttgattctccgtctttgtgcgtaaataaccgacaccccttcttggttgcctttttttttttttctcttctttctctcatgcttatatgtaagtgaatcaagtcatacataatctactttgttattattattattaaaaaaaaaaaaa

SEQ ID NO: 4993 - DNA, 998 bp, Glycine max
cgggaccgtccatcgctcctgcgccggcgccgggaccgggaggcccgaaacaccacttcaacggcgagcgtcaggtcagcgacgtcggccccccccccccccattacggaggctacaacgaaatggctgatattctggtaaacctaacgtctctggccaccgaaatgggaaggctagtttcggaaggcttcgttctctccgttttggccccaaacgacgaagccatggcgaagttaacgacggatcagttgagcgaacccggcgcaccggaacagatcatgtactatcacattattcctgagtatcaaaccgaagagagtatgtacaatgcggttagaaggttcggtaaggttagctacgatacacttcgcttaccgcacaaggttctggcgcaggagtctgacggctccgttaaattcggtcacggcgattcctccgcttacctgttcgaccctgatatttacaccgatggaaggatctccgttcagggaattgacggcgttcttatccctcccgaagaagaagaagaagaacgcactcgccgcatcactccacttgtcaaggttgctgctcctaaaccaagaagagggaagttggtggaagtcgcctgtagcatgtttggatcttttggacaagtctgccaatgaaatcgctttctcaactaattacaaaaataataaagagtgcatgtatgtaaactcgatgaatgttgtagagtaatgatttcaatacaaaaaggatggaagcatcgtgaatctatagttggagagcgattacaccgaagataacaaaaacaaattttctgtcattttggtctcatactgtaattacataccatttttttattaaattttattttatgttgattctccgtctttatgcgtaaataaccgacaccccttcttggttgcctttttttttttttttcttcttgtttgtatgtatgtgaatcaattcatacataatctactttattattattatgccttccaaaaaaa

SEQ ID NO: 4994 - DNA, 2579 bp, Glycine max
  misc_feature (2146)..(2146): n is a, c, g, or t
gggtttcccattcacaagttttaaaccgccggccagggaaatgaactttggtttcactataacacacccacttcctttgcatgctcgcgttttttttttttgttttttttatatcttcctcccttgttcttgtctcgtgttttttttttttttttttcgctttttttttttttttttctcaaataaattactttcctcaattaaaattctcaatccaaacacaatcttagtgtcacttacaaaattgacaagtaaaaatataccattactctgaaaatacaggatcaaaactggcaaaattgcaaatgacttgatatgccatatatgcttatatcccaaccaataccctacaggctatactttcaccgttgtaataagtaaacaagatacttccatctacgtaaatgattcaaacttggataattttggaaatatattgtaaagctaataacaatatcagctcttgaatctaatgcttctactgatagccgcattaattccagaggattctccaccataaggagcggtcggcctcttgatactctgaacctgccccttgcgattcttaacagctttttgatgcttgagcttgtaattctttctgggattcttttttgctttgttgcgattgcgggttagtcccctattcttctcgatctgagaagaaatatggcgctttccttctacagtctctggcaatgaagagactgaagagttccttgagtaagtctcagcttttgctgccagttttgcagctcgcagttgttccacttgtttgtaaaattcattttctgagtccccacttccaccatcctcctcttcatcggtaacctcattaggtccaagatcagccatttgatcatcatcatcatcctcagtcctaattccagcaccagccaacacccgaagctcatgtttccttcgtctttcaccaatatcatctctctttggtaaatcatcatcaccagaaaccaccttgggcttcttcatatttgcattaaggaactgagaaactcttttggagacagaaccattaatcaatctagcttccccgttggcatccatggtatcatcattaaaatcatcatatgtttcgagcaggccattaactggtttcaaacgttttaatgcattactaggctttggagcaatggagctgtacagacccttgtttttcagtttttcctcgagggaagctctaacttttagcatttccaaactctgtgcgccaatgtgatccttctgaggtttaacttttcttgttttctgtacaccatcctttgaggattccaattcttgtatctcaacttgcttgttaggcaccactgtttcttctgttgatttggcagagacaagaggctgctcttggtttttaacgatagaatcatttgtcgttggagcgttctcaatatctgaatttagtactgtttctaacccattattttctttaagaatgtcctcaagttcaaatggaagttttgtgtcaagttgttttatctgatccaataatttcttgatctcttcaaggcgagctattatgggatgatcatggactggctgcccttcagacttgaggagaaggaagaacgttattgcttggcaataggacagcaaaataagctgcttcaactcaaaataacgcacttctcctttcataactatttccccctttttaaccttgcttaaaaatgggttaatttcacattcgagttgtctgtgtgcctcatttagttctgacaaccaatcaactaattctggagcagatctatataaaacattcatttgctcctcctttgacaaagcattcagttcatcaacactgaaatttatatctctatccagtgactttattgcttcgcttcctttatctgatgcatccttcaaagttaatttctcattatctttgtcttcacttatatccacaaggtcgtagtcttccattgttaaggattttgccttctccctttgtatttgtaatgccaattcttcctcttcttttggggcctcatcatcacttgattgtagctcaaaatttcgattctcagcaccgtgtgagaattttttcccacccaatgtaagtttataatcttcctcatcttcatcatcatcatcggcatcattcatttcatcatcgcctccaccaaanctttccctgtaaatatttcctttgcctaatcatctttgccacaacgttcatccctgtcgtcgtcgtcgtcgtcatcttcaccatcatcctcatcttcgtcatcctcatcttcatcaatatcctgaacatcaaaaatagggagctcctcatcttccgattcttcagcatcatcatttatgtcaagggggacaatgtccctctgcttatgaaaagtatcaatatcgtcgtccatgtcatcactggaataagcaccatggcgagaacttgttttacttttcgagcttttggcatctttcttttgataacttgtacctctcttcttccccatcgtgtgtgttctgttcttcaccgccaaaccccagaactgcacctttgtctcttcttcacactcacgcgtctcgcaccggcgcgtaaggtgagggcggacgcgtgg

SEQ ID NO: 4995 - DNA, 1408 bp, Glycine max
acgagctataccataattattgccgtagttacttcccatttctcttcatataaatactttattgctttgtcctaaataaataaaatcatcaaagctcaaacccctctactcaaaccactctgtttctcttgctctgctattaccctgtttcctgtggaacaaatttccatctagctctcctccgaattaggttttgttctggagaaatgtatgcagagactggtcttctcttcccatatttgaacaacatctctcacggccttcatcagctcgaggagtactgcaaaacccagaagtccaatgcttcaatggatgaccttgttcagtcttctgtcatgtcagagtatgatttggcagcagagggagatctgttcaaagctcctgaacctattattgaagagccaatcatggatatggatcccatgacagccaccatctccatgatatcttgtggggaagatgtctcctcacagggactaaaatccactgatattgatattcttcaaaatgatcagtttctgcatgaggtgttctatgaatgtgaaaaggatctcttagaaaaggcagcaatagagccaccattctctgagattctggaaatcaaggttcctcttctgaacattgatgagaacacaattcaagaaaacaagctgcttcctgacatgcaattagcaaagagtgtcagctcaggaagtttgagctcaatggactggatgcgtggagctgcaatgaagcctgctttcattgatatctctgcaatagatttcaatgcagattatggcatgcggagatcatttagcgaaggagatataaagactcttggtaatggtaacatgaacatcgtccaatcaccccttgagaggccctttcttatcagcaactgcaccagtgaggaacgctttcaaaagctctccagatacaggaataagaggacaaagaggaattttgggaggaaaatcaagtatgcttgcaggaaggctcttgctgacagtcagccaagaatccgtgggagatttgcaaggactgaagagtctgatgtcaagagggaatgaatgacttataactgatttagtaggaagaaagtagagttgagtagctatatctgatcaagctatatggaaaaactcagcagtaatatgtgattagaacttatgtggggattctctgtatgcttgagcagatatttgctgaataaaccaggccccaaacttcttggggtagttcatctcttatctattgtattaacgtccctatagacggaaataaccttccagatatgtatataggtttgttgaataatggaaagaaaaagaaaggattttactatgttcatatatatgatgaaatgacaaggtaacatcaataatttcgttctctaatgtcaattttagttttaatttagttaaaa

SEQ ID NO: 4996 - DNA, 1241 bp, Glycine max
tcagctacgtaggccccccccccccagaaagttcagaatgggcaactgtggacaagtgaaaaaggctaagacatggtagagcttcttctacgagcatcacctcctccacttcacccttcttcttatccgagacaatgcaggacagtgtcaggaaggacattggtgaagtgctcattggaagtcccaagtaaggttctgacaaagcatgtcttatccgggcttgctgcttccttgatatttatttctccagcaaatcagactattgcagcagatctatctcgtgcaccaaataatatatgccaacttgccagtgccagtgagaacgcagttacttcaccatttgagaatgaaaaaggttcaaatctaatgatgatgagaggaatgacagccaaggactttgaccctgtaagatattcaggaagatggttcgaagttgcttcacttaaacgtggatttgcaggacaaggccaagaagactgtcattgcactcagggtgtatatacatttgatagggaagcaccatctatccaagttgataccttttgtgttcatggaggccctaatggatttataactggaattaggggaagggttcaatgtctttcagaagaagatttggagaaaactgagacacagctagagaagcaggaaatgataaaagaaaaatgctatctccgctttcctacattgccattcattcccaaggaaccttatgatgtgattgctactgattatgacaatttttctcttgtttccggagctaaggatcaaagttttattcagatatactcaaggacacctaaccctggacctgaatttatacagaagtacaagtcttaccttgcaaactatggatatgatccaagcaaaattaaagatacacctcaggattgtgaagtaatgtccaatagtcagttggcagctatgatgtctatgtctggaatgcagcaggcacttactaaccaatttcctgatctaggactcaacgcccctattgagcttaatcctttcacaagtgtgtttgacactttgaagaagcttcttgagctttattttaagcagtaactatgttttgttttaatacgtgtacttttgtaacgaatagctagctattcttgatagcagcctgagtgtatcatgtaaagtataaactacctgtctctggtgtcctgtgtatattgatatggtgttttatttttcctttcaaaaaaaaaaaaaaaaaatcctaggttattttatac

SEQ ID NO: 4997 - DNA, 1188 bp, Glycine max
atcattataaatagcctcacttcatccacccacaaaaaacacactctcacagtcacaatggtttcttctaattgctactatcttgcattggtatgctgctgtgttctgctgctgctgaaccccaccgtgggggagcaggacgagcagaacttggtgctccagtaccacaaaggcgcgctcctcaaggggaggatcaccgttaacctgttatggtacggcagcttcaccccaatccaacgctccacaatcgttgacttcataaagtcgttaagctcctccccgggggccccacttccctcggtggcatggtggtggaagacgacggagaagtacaatgggggatccactacgctggtcgtagggaagcaaatcctgcaacaaacttattccctcggaaagtacctcaacggaacacagctactctatctctcctcacgcttcaacgacctcaacgccatcaacgtcgttctcacatcaaacgacgtcggcgtcgacggcttctgcaggagccgctgtgggacccacggatccattaacgggaaggcccgtataccgtacatgtgggttgggaactccgaggcccagtgccctgggcaatgcgcgtggcccttccaccagcccgcttacggcccacagacgccgccgttagttgctcctaacgccgacgttggggttgacgggatggttataaacatagccacgcttttggcgggaaccgtgacgaacccgttcaacgaggggttctatcagggtcctcccacggcgccgttggaggccgtttcggcctgcacggggattttcgggagcggggcgtatccgggttatccgggtcgggttctgctggacaagacgacgggggccagctacaatgcgtacggcggcaacgggaggaagtacctcttgccggccatgtgggacccgcagacctccgcatgcaagacgcaggtgtaaacgacttggctcaatgaatcaaagctcttgtttgttgtgcgtgacgtgtaaattcattttctacgtggtcaatgttttaaatattgatataaataaacaatggaatagaatattcttattttcatttttaaatcttcttactttacttttctgaatttcagaaaggtaaaactgttcgctttacatttattagcaggaataaaaaagcaacttgtaaacccaaaaaaaaaaaaaaaa

SEQ ID NO: 4998 - DNA, 1190 bp, Glycine max
ttcggctcgagagagaatcagaatcacttgtcctcctcttccactataaatacgctcacaagtcacaattctccctcatctcacaatggtttctcattactatcttgcctctcttcttctgctactgctgctcaacccacacaccaccctgggagcgcagaacctcatgctaccctaccataacggcgccctcctcaaaggaaccattaccgttaacctcttatggtacggcagcttcaccccaatccaacgctccataatcctcgacttcattaactcgttaagttccaccgcgggggccccacttccctccgtagcatcgtggtggaagaccacggacaagtacagggggggatccactacaatcgtcctagggaaacaaatcctagaacaaacttattccctcggaaactacctcaacggaacacaactagtctctctctcctcacgcttcgaccacctcaacgccatcaacgtcgttctcacatctagcgacgtaggggttgacggcttctgcaggagccgatgtgggacccacgggtccattactaacgggcagaaggcccgtataccgtatgtttgggttgggaactccgaggcccagtgtccggggcaatgcgcgtggcccttccaccagcccgcttacggcccacaggcaccgccgttaattgcgcctaacggcgacgtcgggcttgacgggatggttataaacgtagccacgcttttggcgggaaccgtgacgaacccgttcaacgaggggttctatcagggtcctcccacggcgccgttggaggctgtttcggcctgcacggggattttcgggagcggggcatatccaggttatccgggtcgggttctggtggacaagacgacgggggcgagctacaattcgtacggcgccgggaacggaaggaagtacctcttgccggccatgtgggacccacagacctccgcatgcaagacgcaggtgtaaacaaaagacttgggtcaacgtgtaaattcttgttttctacatagtcaatgttttagcatattgatatcaataaattgtggaaatagaatattattacttttatttataacttttgagaacaagaatgtttgacctgtacatgtattattatttttgattaagagttgttcgttttgagggtttacaagacgaacgtgtaccaacaatcggaagccag

SEQ ID NO: 4999 - DNA, 1959 bp, Glycine max
tcagctacgtaggccccccccccccggtttttctgtcttaaggcttcattcattgagcttttctcttcttatttctatttctctctccccaaaagcttttgtttctctctgcttatggaaggcccttaaactttcgctctctctgcttcactttctcgcttttgcattttcttgtgaaaaaaaaaaatcctcagaacaaaaataggtcttcttcttctctgatctaccaaagcttcaaattctccttagtttggtttgtctgtgagtttggagtgtaatgtcgccgccgacgctggtaacggaggaggaggggcggagcaccgtggcgtccgattcttcgcaatccttggactgtttctctcagaatggtgctggattgaaagaacggaattacttagggttgtctgattgctcatcagtggatagctgtgcctctactgtgccaagcttgtgtgatgagaaaaaggagaacatgaatttgaaggctacagagttgaggcttggtcttcccggattccaatcgcctgaaagggaaccggatcttttctctttaagctcaccaaagcttgatgagaagccactcttccctttgcttcctactaaagacgggatttgctcgtcggggcagaaagctgttgtttctggcaacaaaagaggttttgctgataccatggatgggttttctcaggggaagtttgctggtaatacagggatgaacgcggtgctatcacctagaccttctggagctcaaccttctgctatgaaagaaacaccaagcaaattgtcagaacgtccttgctcaactaataatggaaccggtcataaccatacaggtgcttctatcagtggcagcgcaccggcttctaaggcacaggttgttggttggcctcctattagatcatttaggaaaaactcaatggctaccaccactaacaagaacaatgatgaagtcgatggaaaaccaggtgttggcgcactctttgtgaaggtcagcatggatggtgctccgtatcttaggaaggtagatctaagaagttatacaacatatcaggaactatcttctgcccttgagaagatgttcctaagctgttttaccctaggtcagtgtggttcccatggagctccaggaagagaaatgttgagtgagagcaagctgagggatcttctgcatggttctgagtatgttctcacttatgaagataaagatggagattggatgcttgtaggggatgtgccatgggaaatgttcattgagacttgcaaaaggctgaaaattatgaagggttctgatgccattggtttaggtatgcattctcagcattgattttttttaccgttattcactgtacctaatgtggaagaccatcacatgaactaatagatccagacccatgtctaagaactataacccgacacatgatcctgtatcacttgaatctagacaaacatcaatatatgctatttcatggaatattagaaacattatatatcaataataatacagggccaagatatcactaataactctgtgccttataaactacaaacaatgtggctcagtttgcttaagtagattttcttgcctcagctcccagggccatggaaaagtctaaaagcaggatttagggtatcctggatttcctcttttgtctaatcaagtgtttattgttggatcctccggaatgggaaaagcaaaggatgatgactgaaatcctggcattggtggtttaacgcccttccacttatttgttttcaagtccctcaagagtttgtcatggtcctgtgttaatttgttaccactgtaatatcatatgaaagctacaatgaaatattagtatttgtggagtctgtaatcattataggaatccgtttgttttggaagaattgaacatctgttacagccgccaccatacggttctaacactatatttgtgatttgcgccaaaaaaaaaaaaaaaa

SEQ ID NO: 5000 - DNA, 2011 bp, Glycine max
aattcggctcgagctattttctatttctctctccccaaaagcttttgcttctttctgtatatggaaggcccttaaactttctttctctctctctctctgcttcactttctcacttttgcattttcttgtgaaaaaaaaaatcctcagaaccaaaatcggttttcttctgtctctgatctctcaaagcttcaaattctccttgtttggtttgtttgtgtgtttggagtatgatgtcgccgccggcggtggtaacggaggaggaggggcggagcaacgtgtcgtcgaccgtggcgtccggttcttcgcaatccttggaccgtttctctcagaatggggctggattgaaagaacgaaattacttagggttatctgattgctcatcagttgatagcagtgcctctactgtgccaagcttgtgtgatgagaaaaaggagaacatgaatttgaaggctacagagttgaggctgggtcttcccggatcccaatcgcctgaaagggagccggatcttttctctttaagcccagcaaagcttgatgagaagccactgttccctttgcttcctactaaagacgggatttgcttgtcggcgcaaaaaactgttgtttctggcaacaaaagaggttttgctgataccatggatgggttttctcaggggaagttcgctggtaatacagggatgaacgcaatgctatcacctaggccttctggagctcagccttctgctatgaaagaaataccaagcaagttgcaagaaaggccctgttcaactaagaatggaaccggtcataaccatacaggtgcttccatcagtggcagcgcaccggcttctaaggcacaggttgttggttggcctcctataagatcttttaggaaaaactcgatggccacgacaactaacaagaacaatgatgaagtggatgggaaaccaggtgttggcgcactctttgtgaaggtcagcatggatggtgctccgtatcttaggaaggtagatctaagaagttatacaacttatcaggaactatcatctgcccttgagaagatgttcctaagctgttttaccctaggtcagtgtggttcccatggagctccaggaagagaaatgttgagtgagagcaagttgagggatcttctgcatggttctgagtatgttctcacttatgaagataaagatggagattggatgcttgtaggggatgtaccatgggaaatgttcattgacacttgcaaaaggctgaaaattatgaaaggttctgatgccattggtttagctcccagggccatggaaaagtccaaaagcaggagttaggctatcctggactgcttgttgtctgatcaaagttttattgttggatccggagagggaaaagcaaaggatgatgatatgactgaattcccgggcattggtggtttatcgcccttctgctgttatttgtttttatggcccttaagagtttctcgtggtattatgttaatttgttaccactataatatcatatgaagctacattggaaggttagtgtttgtggagtctgtaatcattgtaggaatctgtttgttttggacaaattgaacatctgttacagccaacatacggttctaacactatatttgtgatttaaaaaaaaaaaaaaaaaaaaagggcggccgctctagaggagtcaatgaaaaaaaaaaaaaaaaaaaaaaaaaaaaaaaaaaaaaaaaaaaaaacccaaaaaaaaaaaaaaaaacccaaaaaaaaaaaaaaaaaaaaaaaaaaagggggggccccttttaaaaaaaacaaattttaccccccggggttggaaaaaaaaatttttttttttggggccccaaaaaaaaaattcgggggcgggtttttaaaaccggggggggggaaaaaccccggggttccccaaataaaatcctttgaaaaaaaccccctttttccaagggggggaaaaaaaaaaaaggcccccccaatttcccctttaaaaaattttccccccctttaggggaaatgggcccccc

SEQ ID NO: 5001 - DNA, 1670 bp, Glycine max
tttcctccccacgcgtccgtacggctgcgagaagacgacagaaggggactccaaagcttatttgttgctttgtgcttaatggaagggccttgagcttttctttctctctttctttgctctcttttcttttaggtttccactctctctcacacacacactctgcaataatctctcttctcttcttcagtctctcaactactgcctaaccaaaccttccatttccgcaggcagtttcttaaatttggagtctgatgtctccgccactgctggttactgaagaagacgaaggacagagcaatgcctcgatggtagcatctgcatcttcaccctcctcggagtgtttcaccctaaatgaggctagattgaaagaacgcaattacctgggattgtcagattgctcttcggtggacagttctattgtcccgagtttgtctgatgagaaaaaggagaatctgaatttgaaggctactgagttgaggcttggacttcctggatcccagtcacctgaaagggatccggatcttttctcgttgagctcaacgaaactcgatgagaagccactgttctctttgcttcctacaaaggatggaatctgctcactgtcccaaaaaactgtggtctcaggcaacaaaagaggttttgctgacacaattgacccagagtttcctggcaatgcagggataaacatgatgctatcacctaaaccttctggagttaagcctaccacagtgaaagaaataccaagcaaggtattacaagaacatccttctgcagcaaatggaactggtcataaccatacgggagcttctatcagtagcagtgcaccggctgctaaggcgcaagttgttggttggcctcctataagatcatttaggaaaaactcattggccaccacttcaaagaacaatgatgaagtagatggaaaaccaggtgcagctgcaatctttgtgaaggtcagcatggatggggctccctatctgaggaaggtagatctaacaaattatacaacgtaccgggaactgtcttctgcacttgagaaaatgttcagctgtttcactctaggtcaatgtggttcccatggagctccaggaagagaaatgttgagtgagagcaagctgaaggacctcctgcacggttcggaatatgtactcacttatgaagataaagatggtgactggatgcttgttggagatgtaccatgggatatgttcatcgacacatgcaaacgactgaaaatcatgaagggttctgatgctattggcttagctcccagggccatggaaaaatccaggagcaggtgctagttggtattggaactgttgacttcgttttgtttactaaggtgaagttgctggagatattatgagggtgtggaaagagaaattatgatataaatgactgaatgctgggttttgatggttaactgctattcaagatgttgtctatgattacaagtcccagaatagttcctggtcttttgcttgtgttacatttgtttctactataataccctatgaagctaccttgaatattagtaattgtggagtctgtaatctttataggaacctgtttgtttggataagttgaatgtatgttgcaatcagtgtattattgttctcagtgttttgctaagaaaaaaaaaaaaaaaagccgccgctctagaggatcca

SEQ ID NO: 5002 - DNA, 859 bp, Glycine max
ggttggttggcctcctattagatcatttaggaaaaactcaatggctaccaccactaacaagaacaatgatgaagtcgatggaaaaccaggtgttggcgcactctttgtgaaggtcagcatggatggtgctccgtatcttaggaaggtagatctaagaagttatacaacatatcaggaactatcttctgcccttgagaagatgttcctaagctgttttaccctaggtcagtgtggttcccatggagctccaggaagagaaatgttgagtgagagcaagctgagggatcttctgcatggttctgagtatgttctcacttatgaagataaagatggagattggatgcttgtaggggatgtgccatgggaaatgttcattgagacttgcaaaaggctgaaaattatgaagggttctgatgccattggtttagctcccagggccatggaaaagtctaaaagcaggatttagggtatcctggatttcctcttttgtctaatcaagtgtttattgttggatcctccggaatgggaaaagcaaaggatgatgactgaaatcctggcattggtggtttaacgcccttccacttatttgttttcaagtccctcaagagtttgtcatggtcctgtgttaatttgttaccactgtaatatcatatgaaagctacaatgaaatattagtatttgtggagtctgtaatcattataggaatccgtttgttttggaagaattgaacatctgttacagccgccaccatacggttctaacactatatttgtgatttgcgtcacctgcctattcttttcttccattttttttttttatattttgaacaggcattattatttcatatccactattacag

SEQ ID NO: 5003 - DNA, 2900 bp, Glycine max
gtgttatttaaaacagaaatcacatgtatggctggtagcagtaaaggataatattaatgttgaatagcggatttagatgcctacgaaccatgtttttgtcgggtattcctatttcctagtttgattcagctcactgatttcaattacattgcataggcaatttcctcccgcccagcctaggagaccccccctaatttgtaaagacgcctctgaattttggtccaccaccacacccttcttctcatctccaccacaccagaaatggcttccggagctgtgccaactacgttttctaccctcaagacatgggattccagtttggggtttgcaaaaagcatggattttgtgagagtttccgatttgaagagcatgaaatcttctgcgaggaaaagggtgtcaattatcaggaactcaaatcctggccaagatattgctgaacttcaacctgcatccccaggaagccctcttttggttcctaggcaaaagtattgtgaatcattacacaaaactgtcaggagaaaaacaaacacagtgatggttggtaacgtggctattggtagcgagcatcctataagaattcagaccatgactacgactgacactaaggatgttgctgggacagttgaacaggtgatgagaatagcagataaaggagctgatattgtacggataacagttcaagggaagaaagaagctgatgcttgttttgagattaaaaacacccttgttcagaaaaattacaacataccgttggtggctgatattcattttgctccctctgttgctttgcgggtagctgaatgctttgataagattcgtgtaaaccctggaaattttgctgatagacgggctcaatttgaaacattagagtacacagaagaagactatcagaaagaacttgagcatattgaaaaggttttcacaccattggttgagaaatgtaagaaatatgggagagcaatgcgcattgggacaaaccatggaagtctttctgatcgtataatgagctactatggagactcgcctaggggaatggtagaatctgcttttgaatttgcaaggatatgccgaaagttagactatcacaattttgttttttctatgaaagcaagcaacccagttatcatggttcaggcataccgcttacttgtggctgaaatgtatgtccaaggctgggattatccattacacttgggtgttactgaagctggagaaggtgaggatgggaggatgaagtctgcaataggcattggaactcttcttcaggatggattgggtgatacaattagggtttctctcacagaaccaccagaggaggagatagacccttgcagaaggttggcaaatcttggaatgatagcttctgaactccagaagggggtggaaccttttgaagaaaagcacagacattattttgactttcagcgccgatctggtcaattgccagtgcaaaaagagggtgaggaggtggattacagaggtgtactgcaccgtgatggttctgttctcatgtcagtctccttggatcaattaaagatgccagaggtcctctacaagtcacttgctgccaaactcattgttggcatgccatttaaggatctggcaactgtagattcaattttattacgggaagttcctcctgtagatgatgctgatgctcgactagcactcaagagactgatagatatcagcatgggggttataactcctttgtcagaacagctaacaaagccattacccaatgccatggttctagtaaaccttaaggaaatatcttccagagcttataagcttttgccacaaggcacacgcttggttgtgtctgtacgaggtgatgagccttatgaagaactggacattcttaaaggcattgatgctactatgcttctccatgaccttccttatacagaagacaaaattagcagagtgcatgcggccaggcggttatttgagtacctatccgacaattctctaaacttccctgttattcaccatattcagttcccaaatgggattcacagagatgacttggtaattggtgctggttctgatgctggagcccttctggtggatgggcttggagatggacttcttttggaagcgccagacaaggattttgaatttattagaaacacttctttcaatttgttgcaaggctgcagaatgagaaatacaaagacagagtatgtctcatgtccatcctgtggcagaacattgtttgatcttcaagaagtaagtgcacaaattcgggagaagacatcacacctccccggtgtttcgattgcaatcatgggatgcattgtaaatggaccaggggagatggctgatgcagactttgggtatgtgggaggcactcccgggaagattgacctctatgttgggaagactgtggtgaagcgtggaattgcaatggagcatgcaaccaatgccttgatcgatctaataaaagaacatggacgatgggtggaccctcctgccgaggagtaaaagcaagagcttaattttgagattggcattcaaggccatagtaagatgagcattgtcatatccaattattgtacacatgtaatataagataacactcaatgcttaagtttgagcctagttttaagttccttttgagaaagatcccaattaaagcttgttgtgaggaaatcgacagctagaacatgtatacagataacagtgtattgctttgccccatcagccatcaataataatgagaatctcttagaatagtgccagttaaaaaatcgagactagttctctccttgtctatattagccaagcagtatcatttagaattagagggatttaaaataaaacttttcaaatattagggatcaaatgtaaaattcgagtatatattaggaatcaaaaacatatttaagccttatctt

SEQ ID NO: 5004 - DNA, 1046 bp, Glycine max
cgcatgcaatctgctcaaaactctgtcttgctaagctcattgctatttttcggctgcgagaagacgacagaaggggttcctaatgttggacaatttattgatttgctgatctcaattcctgcggaaggacatggtaattcctttgcttatataatgtcagaatggactaagcagcaaggggagatacagggggcatatcaaataaaagtcactacaagtgccctggccttgttgctaaccagtaggcacaatgaattggcaaatatacatgtccagggctatcttattaagtctggcgagggaataactacaagatcaaaagctaaatcagccccagatcaatgggtaatgttgccactttctacaaagatagtggctttattggcagatgcattaactgagatacaagaacaagttttggccgctgatgatgaggatagtgactgggaagaagttcaagcagatggcattgaaaatgataaagaatttctttattcagtatctacatcttcgggaaaagccacggatgaacaacttgaagcaatggcgaaagtatttaatgaggaccaagatgatcagtatgtagatggccttttaagtgttgctgatcctctcaatcagataaacctggcaaattaccttgtggatttctttgttagcttttctcagtctgacagacagttcttagatcacatttgcaagagcttgtctcagtctcaacgaagtgccattcaactggtactgaagagatgagaatttagtgttatctttgagtgccgtctcaaggatgggttgataataccagagagtgaaacaaagtgatggttggaaaccaatattttccattgttcaggttggggaatctgtctgcagttctgaaaggtattctctttctgctgcagtgttcccccttgtatgtctattgattctttttattggatgtgttttgtatgtatcggttatcagttttgcttttaattggtttctgcccatcaattcaccaaatcttttgtctgtatatcaattgtgcatttattagaaaaaaa

SEQ ID NO: 5005 - DNA, 1578 bp, Glycine max
ggatgagcttgttctttgacagtttatgaaaaagcgtccatcgatcagccacgtgggccccccccccccccctccgattctgatggttcagagaaaagccttgattcatttgttatccagctgtttgaactcatgttgaccattgtgggtaatccaagactgggaaaggtggttgtggctaatatcagagaattggtgtactatactattgcttttcttcaaatgactgagcagcaggttcatacatggtctgtggatgctaaccagttcattgctgatgaagaagatgccacttatagttgccgcgtctctggtgtgcttttactggaagaggttgtgaattcttttgctggtgaaggaattttggccataacagatggtgcaaaacaatggttcaccgagtctcaaattagaaaagcagctggtaatgcaagctggtggaggataagagaagctactctttttgccttatcgtctctttcagaagaactgttggagacagaggaaaccggatttgatacaagtagcttgaagcacctggttgagcagattttcactgaagactctctaataggtcctcttgaatatccctttttatatgctcgcatctttacgtcagttgctaaattgtcttctttgataagcaatggtttactagaacactttctttatttagcaatgaaagcaattacaatggatgtgcccccacctgtaaaagtaggtgcctgcagagcacttactaaccttcttcctgaagcaaaaaaagaaattgtccaatcgcaattgttgggtttaatttcatccctcacagatcttcttaatcatgcatcagatgaaaccttgctcatggtacttgatacattgcttgctgcagtaaaagcaggtcatgagtcatcaacattagttgaacacatgatttctcctgtaatccttaatgtgtgggcatcacatgtttcggatccttttatcagtattgatgcactggaagttcttgaggctatcaaaagcattcctggatgtgtacatccattggtttccagaattttgccatctattggaccaattttgaataaaccccaagagcaggctgatggtttggtagctggatcattagatctggtaacaatgttactgaagaatgcccctgctgatgtagtgaaagcaatatatgatgtctcttttaatgctgttatcaacataatccttcaaagtgatgaccacagtgaaattcagaatgctacagaatgtttatctgcttttatatctgagggaagacaacaaattcttgcatggggatctgattctggatcaactatgagaagcttacttgatattgcttcaagactgctagaccccaaattggaaagctctgggtctctctttgttgggagttacattcttcaacttattttgcatttaccaacacagatggctgtacatatacaagacttggttgctgctcttgtcaaacgcatgcaatctgctcaaaactgtatcttgctaagctcattgctaattgtttttgccagactggtacacatgaatgttcctaatgttggacaatttatcgatttgctg

SEQ ID NO: 5006 - DNA, 1886 bp, Glycine max
gagtcagctacgtaggcccccccccccccccacagacacaggtagctttcgcacactcccttttttcgtgcgcaaactgttcccgttggtctctttccctctgcacttcacaatcctaccctctcactgtgctatctctcagcatcttcgcaatcacacccttcccagatggccttgcaaacagctactcctccaacaactcccagtgcccaagttgttggtaatgcatttgttgagcagtattaccatattcttcaccattcaccaggttcggtctatcggttttaccaggactctagtgtgataagccgtcctgattccagtggtgtgatgacatcagttacaaccatgaaaggcattaatgagaagattctttcactaaatttcaaggaatttaaagcagagataaagactgcagatgctcaaaaatcatacaaggaaggagtgactgtgttggtgactggatgcttgactggcaaggataacttgagaagaaaatttgcacagtcattctttcttgctccacaagacaatggctattttgttctgaatgatgtttttaggtatgtagaagaccatgaaccatcagaactgcctccagttactggagatggtgattcagctgctgttacagtaacaccagaactagaacccagtcatgttgctgattcttgtgcaccagagcccacaaattctcatgtgaacaaaggtcaaactgttgctgagaatgcttatgagctatctaataatcatgagagacagatacctgttgagaatgaaggcaatgtagaatcacattttcagtcaaatggtaatgatgattctcaggccacagaactggcttcatcagctcaagacgatgctccaaagaagtcttatgcatcaattgtgaaagtccaaaaagggagttcagttccaactaaagtctatgtgcctactaatacactaaagtctgggcctaacaaaactgagagcaaggtagttgagtcagtagaatctactgaagtgcctgaagcagctttggaaagtgttagcaaccctgaaagtagtgatgctcatgaggaagttgagggtcactccatatacattcgaaatttgcctttaaatgtgacggttgctcagttggaactggagtttaagaaatttgggcccatcaagccaggaggcatccaagtcagaaataataagcagcagggatactgttttggctttgttgagttcctatctctaaattccatgaatagtgcaattcaggcttcacctgttcctattggggggcgtcaagctgtagtcgagataaagagaaccactacccgagttggcagtggcattaatggtactggaagacctaggatcccatctggtaggggtgggttacgaaatgactctttcaggggtcgtgggaattatgttgggggtcggggatacggtcgaaatgattatgtaagccgtggcgggttttctggtaggggtcgtggtcatggagaaggttatcaccaagggagagggagaggcggccggtcaagtggacaaaaacaaaatgctgtttccaactgaaatactggatgatttttgggaggttgttctgagacccccctttttgggtcagttatgagcatggaattcaaccttctaaagtttctcatgtttctttcactgcaatttgcacagttgtagtatttctagttgttattgctatgattttagtgggttggtagtgatcactgatcaggaataggtatagtcttttcttttgaaaaattgaaacatgctatgactggaattagcagtaggttaaccatcagttctcttttatttgttgctatggtgcaacatttttatatctaagttgagattttaattttaagaaaaaaaaaaaaaaaaaa

SEQ ID NO: 5007 - DNA, 1690 bp, Glycine max
actcgagcccttcaatcccacgctttcaatagatagatagggcattcattcatcaccaacatggctcttctaggcttaatgagttttgctgccttgacccttttcttggtcctaacaactgtgcctcgtcaagcacacgcttcaagccgtggcaacttaggcagaaacatcaacccttcagtgtatggcatatgtgcctcttcggtcattgtgcatggatacaagtgtcaagaacacgaggttacaactgatgatggttacattctgagcctgcaaaggatcccagaaggtcgaggtaaaagcagtgggagtgggacaaggaagcaaccagtggttatacaacatggagttcttgtagatggtatgacatggcttctaaacccaccagagcaagatctgccgttgattttagctgataatggatttgacgtgtggattgcaaacacaagaggaaccagatatagtcgccgacacatctcattggacccctctagccaggcctattggaattggtcttgggatgaacttgtctcctatgatttccctgcggtgtttaattatgtgttcagccaaacggggcagaagatcaattacgttggccattcattgggaactttggtagctttggcatccttctcggaaggaaaattggttaaccagctgaaatcagcagccttgttaagccctatagcctatttaagccacatgaatacagcacttggtgttgttgcagccaagtcctttgttggtgagatcactaccctcttcggtctagcagaatttaatccaaaagggttagctgttgatgcctttctcaagtctctctgtgctcaccctgggatagactgctatgacttgttgactgcactaactggtaaaaattgctgcctcaattcttcaactgttgatctattcttgatgaatgagcctcagtcaacatcaacaaagaacatggtgcacttggctcagactgttagacttggggcgttgacaaaattcaattatgtgagaccagactataacattatgcactatggagaaatatttcctccaatctataacctttccaacatcccccacgatctccctctcttcattagctatggtggaagagatgcactttcagatgtccgtgatgttgagaatttgcttgataaactcaagttccatgatgagaacaagcgcagcgttcagttcatccaggaatatgctcatgctgactacattatggggttcaatgccaaggacttggtgtataatgctgttctttcatttttcaatcatcaagtttaacactggatagaatgaatcaagttgtatgaaaagagtgccttcatgtattaggtagctatcattgagatcaatctaagttatctagtggagattaagtaacggctaattacaaaagtaatgaagtattatcactagtgatttgctttggtgttgcaaatggctattgcatctatctattgtgttgcattgtaatgcagaggaaagtggcttttggcttcagttatctaagatgaaaaacgtggatgagatcatttatcaaaagaattataaaaactatgtttccaaaccatgatgaagcatatgtatatgtatgtgtgcaaagtgctcaccactgtttacattatacgtaggaaggtttccaaaaatatatgcatattggcgatggtaaactctcatc

SEQ ID NO: 5008 - DNA, 1545 bp, Glycine max
ggggactgataggagtaggcttgtattttttgatcggaggagtgagtttgagttggaggatttgcttcgagcttcggcggagatgttagggaagggtagtttagggacggtttatagggcggtgcttgatgatgggtgcacggtggcggtgaagaggctcaaggatgcgaacccttgcgcgaggcatgagtttgagcagtacatggatgtgattgggaagcttaagcatcctaatgttgtgagactcaaagcttattactatgccaaggaggaaaagcttcttgtctatgattatctctccaatggaagcttgcatgctcttcttcacgggaaccgtggcccgggaagaattccattggattggactacaagaataagcttggtgttaggagcagcaagaggtcttgcaaagattcatgcagagtacagtgcagccaaagtgcctcacgggaatgtgaaatcctccaacgtgcttctagacaagaacggtgttgcatgcatctccgattttgggttatcactcctattaaacccggttcacgccattgcccgattgggagggtacagggccccggagcaagaacagaacaagaggctatctcagcaggctgatgtgtatagtttcggagtattgttgttagaagttctcacaggaagagctccttcatcgcagtacccttcaccggctcgtccccgaatggaggtagagccggaacaggctgcggtggaccttcccaaatgggttcgctcggtggtgagagaagagtggactgcagaggtttttgatcaggagttgttgcgctacaagaacattgaggaagagcttgtgtccatgttgcatgtggggttgacttgtgtggtggcgcagccagagaagaggccaaccatggaggaagttgtgaagatgattgaggagatcagggtggagcaatcgcctcttggggaggactatgatgtatcatgcaattcgctttcgccttccattcccaccactgaagatggtctagcttaggagtaatgttgaatattgttgtctggtatatataagattaattcatgtcatgttttgtaggtacttgcagtctcctcctctagttgcatggtctaaatgcacattacttattggcgctgttcagtgttctttgtaaaatttgtgagttatttggaatttcattgttgaacgtagcgcaaatctgaatgatctgatcttgagcttgagcttagagtaagtactagtgtgtagttgaattgtataaggtacatttggagtttgcatcaatggacacagtcttgagatataattggtccaattcaatggcattgtcataataaaagcactgaatcagcaattatgaattgggtaacacaattcaatgacattgtcattcatgtgagaccctgaaatcatggaatcatgttaggagcatcaatatgctcaaaactgctgttaaaagctaggcacgcggcatataatttcaatggaagttcatgatgaattaaccgcatgccagaaatagcttgcgactcacaactaatgagttactt

SEQ ID NO: 5009 - DNA, 1596 bp, Glycine max
tcagctacgtaggccccccccccgaaatcggacaaaaacctaaacctaaaccctgcaaagtgttgaatttacagtttagtagtgagtgaattgagaaatcgaagttaaaaagataatagatagtaacagcaccattcaatcactcatcagagatggctaccattgaaagtagaaggaaatcagtggctttggctctctccaagtacttttcattggatcctagtgttgttccagccgatagttcagacagtgatattaagagtctttacttgaacatcatagcggtttctggacatagggttaatcactctgatgaggtgttgaagtgggtagcatttgcagaagccttccccgtggcccttgatgcatgctttgagaatctcaagagattaaatgatgaactgtctggaaaggctgtgcttctgggcaatggattgaacccctctgaagctgatgttatagtgtattcagtggttcattcttccctgatcaacctttcagatacaagcaaggagaaactgccacatgtcttgagatggatggattacatccagcacaagcaagaatttgtaggtttatttgagaaaatattgttgaagaagcctgaatttgagcctctggtaacaaaacctgttggtgctgtggaagctgatttaaaatcaaacaagactgagcaaagtataaagaatgtcaacaagtccgaagcagattcaagcaaggataaaaacaaagctgagggaaaggcaacaggaggaaaatcaactggagacaaagaacctaccaaaggcaaggcaaaacctgctgacaaagaagtggctgagaaagagaacgaagttagcgtcagtttgcttaatattcaagttggattaattcgcaaagcatggaagcatccatctgcagatagtttgctagttgaggagatagatgttggggaggacaaagtgcggcaggttgttagtggtttggcaaagtactgcagtcctgatgagttgacgaatcgtcgtgttgtacttataacaaatgtcaaacctggaaaactacgggatgtgatgtctcaaggactggtcttatgtgcttcgaatgaaggtccaaccattgtggagcccttgctccctccagaaggagcaaaaattggtgaacatatttctttttctgggattgatggaaagccagaagatgtactaaacccaaaaaagaaacagctggagaagattacaccgcatcttttcactgatgacaagggggtggccacatacaagggaataccatttatgacgtctggtggaccatgcacatcatccattcccagagcaactattagataacggagatatggcccattcattgttcttcaccactacagatttatggtaccacaaaatatttaaaagttttaattacgtgaatgagacgttactatcctgttggcaagtttatgttgcagttgcacttgcatggtcttaaatgctacaaatataatcttgaatccaattattcttgagttaataccgtagtaacttcatacacattttgaaaagaacgaaaggctattttaaaattatacaacctacttccaaccaaaaaaaaaaaaaaaaa

SEQ ID NO: 5010 - DNA, 1134 bp, Glycine max
attcggctcgagataatccagagagaggagagagaagtaaaaaggtggaggaagaagcgaaaagcgagtgagggcagtgttgcttaataaaagaaaacgaacggtggtgataggcttcagtctagatctcaatcgtctccaccttgctttcttctccagcgtccgattctctcaccgatctcgcgccaaatacaaattcgtgtcaacccaacccagggttccggcgagcatggccgacggtccggctagcccaggcggcggcagccacgagagcggcgaccacagccctcgctctaacgtgcgcgagcaggacaggtacctccctatcgctaacataagccgcatcatgaagaaggcacttcctgccaacggtaaaatcgcaaaggacgccaaagagaccgttcaggaatgcgtctccgagttcatcagcttcatcaccagcgaggcctctgataagtgtcagagagaaaagagaaagactattaacggcgatgatttgctctgggcgatggccactctcggtttcgaggattatatggatcctcttaaaatttacctcactagataccgagagatggagggtgatacgaagggctctgccaagggtggagactcatctgctaagagagatgttcagccaagtcctaatgctcagcttgctcatcaaggttctttctcacaaaatgttacttacccgaattctcagggtcgacatatgatggttccaatgcaaggcccggagtaggtatcaagtttattattgaccctcttgttgtaacgtatgttttctacgccagttaccaagtgctcacggcatattgaatgtctttttatgttatgtgaatactgacaggagatgttggttcttgtgtccgtttttttttttaaattaaggtttgtatattatctttggattcgaattattatttgaaagttattattatattgtaaatcctagagccctgttgtctgaatccatcaggcggcttggtaaagaccgagattttaggactgattgtaagcataaatccgaatattcttttcctaatttctttgcacaataatgtatgaagaaggctcgagcttcttttataaaaaaaaaaaaaaagaaaaaaaaaaaaaaaaaaaaaaaaa

SEQ ID NO: 5011 - DNA, 2910 bp, Glycine max
cggacgcgtgggcgggccccgggctttctttctctctcttttttttttgccctatctcatagggtttccaccctctctctcatgcatttttgctctcacgagttcttctttgccgttgccctcttattctttgctgtatttggagccttcttttgtgtggaacagagcagatttcacctccctgggttttttgaaccgtgcccatgtctaaagttttcagctttaccggaaatgatgatttctaccatgggggccctatttatcctaacccgaaggaaccatgtctcttcttgtctcttggccgtcaagttgatgtttaccttcctcttcagaagaggtctcgcttcagtgttccatttgatatcagcggagaatggtttgagcagaagcagaagccaaagacatctattgaatctttgccagatgaatgcctctttgagatccttagaaggctgcctgcaggccaagataggagtgtctgtgcttctgtatccaagcgctggcttatgcttctgagcagtatttgcaagactgaaatccacagctacggaagtactggaaatgaaaaccaggaaattagtgacgaaggatacctatcccgaagcttggagggaaagaaggcaacagatgttagacttgctgccattgccgttgggacagcctctcgaggagggttggggaagcttacaattcgtggatgcaattcagatcgtggggtgactaatgtaggtctcaaggcaattgctcatgggtgtccttctctaaaggtttgctctctatgggatgtcgctactgttggtgatgtaggcctgattgagattgctagtgggtgccatcagttagagaagcttgacctatgcaagtgtcctaatatttctgacaagactttaatagcagttgcgaagaactgtccgaatctggctgagttatccatagagtcatgtcccaacattggtaatgaaggtctacaagctattgggaagtgtcccaatctgaggtcaatctcaatcaagaattgctccggggttggtgatcagggagttgctggcctcttgtcttcagcttcttttgctctaacaaaggtgaagcttgagtcactgactgtttctgatctctctctagcagtgattgggcattatggtgttgcagttaccgatcttgtcctaagttgcctcccaaatgtcagcgagaaagggttctgggttatgggtaatggccacggactgcagaaactaacttcaatcacaatcaattgctgccaaggagtgacagatgttgggcttgaagctattggaaggggttgtccaaatgtgcaaaacttgaagcttcgtaagagtgcttttctgtcagacaagggattagtatcatttgccagggctgctccatcagttgagagcctgcaattgcaagagtgccacagaattacccaaattgggctctttggtgtcttttttaactgtggtgcaaaattgaaggttcttactctgattagctgctatgggatcaaagatctcaatatggatttgccagcaatatctccttctgaatcaatttggtcattaacaatccatgactgccctggatttggcaatgctaaccttgccttacttggaaagctgtgtcctcggcttcagcatgttgaattgagtggacttcagggagtaacagatgcagggtttcttccattgctggagagctctgaggctggtctggttaaagttaatctaaatggctgtgtaaatctttcagacagagtagttttgtccatggtcaactcacatggatggactctcgaggtgctaagccttgatggttgtaaaagagttggtgatgctagcttgatggcaattgcaggcagttgcccattgcttgctgatctcgatgtttccaggtgtgcaatcactgatacaggtatcgcagcccttgcacgcggaaagcagattaaccttgaggtactttctttggcaggttgtgcattggtttcagacaagagcgtgcctgccttgaaaaaaatgggctgttcccttgctggattaaatatcaagcgttgcaaaggaatcagcagccgctctgtcaacaagcttcaggaacatctctgcatgtgtgacatcctctactgaacaggaaatgcctcagcagcttttatagttagtgttgctcgttagtgtttttgggttcattcacgatggatcttggtcgtctagtagtcggttctctttttccagaggataacagttatatttaaacctcttttttgcaggtttccattaattggaaatctgttacaaattttttggcactccgttgatgagatgccacttttaaaatatggctgtttatctctgcgagcatagttaccgagttctggagttaggtatctttttttctagtgttggcacctgatgtttttagctctgctttgtatcggttttgccaccatgtgtttccttgtcctcgtttctttgcagcagtacatttatcgagtctgtccagtggtgtttacccaatttttcacgtatttgagcttatgttctttacgtgatttttgggtcttaagttttagtcaaggggcatgttgaagttccagtttatgtggtgttgtcttggtttactttggcagttcttcagagttatgaagcctttgtcctcaggggcgttggtcatggcagcaagttatcctggtctgtcatcacaatcttttcccgttgggatgggttgttttttactaccaaagccctagctttttaagcttcattttttttttttgaacttgtcattgtaaccttctatatcatgtaatgatactgagatatgccctttgtactgttatgtttattttatgaaaaaataataaataaaaaattgtagtcccctgtccaaaaaaaaaaaaaaaaaaaaaaagggcggccg

SEQ ID NO: 5012 - DNA, 1458 bp, Glycine max
ttcggctgcgagaagacgacagaaggggagatacattgcacttgggaacgttcccattcagtgcactcgaatctgtttgcaataaaacgacctctctttcactaccccaagaccttcatttctctttccaccactttctctctctctctctgttttttttttgccctatctcatagggtttcctccttctctccctctcttccatgcatttttgctctcacgagttcttcttcttcgttgccctcttcttcgctgtctttgaagccttcttttgtgtggaacagagcagatttcacctcccggggttttttgaactgtgcccatgtctaaagtcttcagctttaccggaaatgatgatttttatcatgggggtcctatttatcctaacccgaaggaaccgtgtctcttcttgtctcttggccgtcaagttgatgtttaccttcctcttcagaagaggtctcgcttcagtgttccatttgatatcagtggagaatggtttgagcagaagcctaagacatctattgaatctttgccagatgaatgcctctttgagatccttagaaggttgcctgcaggccaagataggagtgtctgcgcttctgtatccaagcgctggcttatgcttctgagcagtatttgtaagaatgaaacttacagcaacgaaagtactggaaatgaaaatcaggaaattagtgatgaaggatacctatcccgaagcttggagggaaagaaggcaacagatgtaagacttgctgccattgccattgggacagcctctcgaggagggttggggaagcttacaattcgtggatgcaattcagatcgtggggtgactagtgtaggtctcaaggcaattgctcatgggtgcccttctctaaaggtttgctctctatgggatgttgctactgttgatgatgaaggcttgattgagattgctagcgggtgtcaccggttagagaagcttgacctatgcaagtgtcctaatatttctgacaagacttaaattgcagttgcaaagaactgtccaaagctggctgagttatcaatagagtcgtgtcctaacattggcaatgaaggtctacaagctattgggaagtgtcccaatctaaggtctatctcaatcaaggattgctctggagttggtgatcagggagttgctggtgtgttgtcttcagcttcttttgctctaacaaaggtgaagcttgagtcgctgaatgtttctgatctctctctagcagtgattgggcattacggcattgcaggtaccgatcttggcctaagttgcctcccaaatgtcactgaaaaaaggttctgggttatgggtaatggccatggactgcagaaactaacttcaatcacaattgattggtgccgaggagtaacagatgttgggcttgaaactattggaagggggtgtgcaaatgtgcaaaacttcaaactttcgaagtgtgctttttt

SEQ ID NO: 5013 - DNA, 1478 bp, Glycine max
cccgggtcgacccacgcgtccggcaaaattgaaggttcttactctgattagctgctatgggatcaaagatctcaatatggaattgcctgcaatatctccttctgaatcaatttggtcattaacaatccgtgactgccctggatttggcgatgctaaccttgctttacttggaaagctgtgtcctcggattcagcatgttgaattgagtggacttcagggagtaacagatgcagggtttcttccactgctggagagctctgaggctggtctggttaaagttaatctaagtggttgtgtaaatctgacggacagagtagttttgtccatggttaactcacatggatggactctcgaggtgctaagccttgatggttgtaaaagagtcagtgatgctagcttgatggctattgcaggtagttgcccagtgctcgctgatctcgatgtttccaggtgtgcaatcactgatactggtatcgcagcccttgcccgaggaaaacagttcaacctggaggtactttctttggcaggttgcgcattggtttcagacaagagcgtgcctgcattgaaaaaattgggccgttcccttgctggattaaatatcaagctttgcaatgcaatcagcagccgctcagttgacaagcttctgggacatctctgcatgtgtgacatcctctactgaacaggaaaatgcctcagcttttatagttagtgttgatcgttagtgtttttgggttcattcgcgatggatcttggtcatcatccagtactcggttctcttttttccagagcatacagttatatttaaacctcttttttgcaggtttcctttaattggaaatctgttacgagttttttggcactccgttgatgggatgccactttcaaaatggctgtttatctctgccagcatagttaccgagttctggagttaggtatttttctttccagtgttggcacccgatgtttttagcactgttttgtatcggttttgccaccatgtgtgtccttgtccttgtttctttgcagcagtacatgtatcgagtctttccagtggtgtttacccaatttttaacgtatttgagcttatgctctgtacgcgatttttgggtctaagttttagtcaaggggcatgttgaagttccagtttatgtggtgatgttgtcctggttactttggcagttcttcagagttttatgaagcctttgtcatcgggagctttggtcatggcagcaagttattatacaggtctgtcgtcacaatcttttccctttgggggatgggttgttttttttactaccaaagcccttgttttttaggcttcattttttttggaacttgtcattgtaacctctatatcatgtaatgatacttactgagatatgccccttgtactgttatgtttattttatgaaaaataatgaatgaaaatttgtaagcccgtccaaaaaaaaaaaaaaaaaaaaaaaaaaaaaaaaaaa

SEQ ID NO: 5014 - DNA, 1801 bp, Glycine max
atggataatgtctgatgtatgcgttggatccaagtttaagagtgatgctgctgaatctcagtttgaattgtcacgctgtagtttgctgccgagtttctcctttacagaaagcacaggtcacgagtatggtcaagaaaggtgcacaaaaaataacacttagtattggtgatggagccaatgatgttagcatgattcatgtctctcatgttggggttggcataagtgggatggagggaatgctacgtaggccccccccccccctgcaagctgtgatggccagcgattttgccattgcacagttccgttaccttgcagatttgcttcttgttcatggccgatggtcatatttgcgaatatgcaaggttgtgatatacttcttttacaagaatctcactttcactcttacccagttttggtttacatttcaaactgggttttctggtcagagattctatgatgattggtttcaatcattatataatgttatcttcacagcgctgcctgtaatcattgttggattatttgacaaggatgtcagttcatctctatccaagaagtatcctcaactatacatggaaggaattagaaatgttttcttcaaatggaaagttgtggccatatgggcattcttttctgtataccagtctctaatatttttctattttgtgagttcaacaaatttaagtgctaaaaactcagcaggcaagatatttggactctgggatgtcagtacaatggccttcacttgtgttgtaataactgtcaacttgcgactgcttatgatatgtaattcgatcactagatggcattatattagtgttggtggaagtatattagcctggtttctttttattttcatatattcagggattagcactccttatgatcgtcaggtgaattccctttctactctgggtgtgttgtgttgaaaaagaaactctggcaatttccttatgacccattaagaatgctgttaacttgagttctgtttcattttctgcaggagaatatttattttgtcatatatgtcttgatgagtacattctacttctatgtcatgctacttctagttcctattgctgcacttttctgtgactttgtttaccaaggggttcaaagatggttcttcccctatgattatcagattattcaagaaatgcatagagatgaggtagatagcactggtagagcacagctgctggagatagggaaccagcttacaccagctgaggcaaggagtcatgctatatctcaactcccacgcgaaatatcaaagcacactgggtttgcttttgattcacctgggtatgaatccttttttgcctcacagctcggtgtatatgctccacccaaggcatgggatgtagcaagaagagctagcatgagatcacggccaaagattgggcagcaaaaataactggagtaggatcattgtacattgcatagtttcggttttccaccttgagagccagcctaggaattctctaaaattaggatgtgccatattaaatatttagtcattttcatttaggatatatttttcttttttctttccttttttctttttgggtgacagggggattagttcaggattcgtcagatgtacattccaggatatttcagcaattagtatagtcaattttgtgaagttcagtacttttcttgtgccttaattcgtggagttcagtacttttctttgtattggatttacctaattagtttttggatatctgcaatgtcggattgttttgttgaaattcatgcacaaagtgttatttatgataacctttctttctgtgct

SEQ ID NO: 5015 - DNA, 1236 bp, Glycine max
ttcccgggtcaccccgcgtccggtcatttataatgttatcttacagcacttcctgtaatcattgttggattatttgacaaggccctcgcgtccgctctatccaagaagtatcctcaactatacatggaaggaattagaaatgttttcttcaaatggaaagttgtggccatatgggccttcttttctgtataccagtctctaatattcttctattttgtgagttctacaaatttaagtgctaaaaactcagcaggcaaggtatttggactctgggatgtcagtacaatggccttcacttgtgttgtaataactgtcaacttgcgactgcttatgatatgtaattcgatcactagatggcattatattagtgttggtggaagtatattagcctggtttctttttattttcatatattcagggattagcactccttatgatcgtcaggagaatatttattttgtcatatatgtcttgatgagtacattctacttctacgtcatgctatttcttgttcctgttgctgcacttttctgcgactttgtttaccaaggggttcaaagatggttcttcccctatgattatcagattattcaagaaatgcatagagatgaggtagatagcactggtagagcacagctgctggagatagggaaccagcttacaccagatgaggcaaggagttatgctatatctcaactcccacgcgaattgtcgaagcacaccggatttgcttttgattcacctggatacgaatccttctttgccgcacagctcggtgtatatgctccacccaaggcatgggatgtggcaagaagagctagcatgagatcacggtcaaagactgggcagcaaaaataatctggagtaggatcattgtacattacttagtttcggttttctaccttgagagccagcctagtaattctgtaaaattaggatgtgccatgtaaaatatttagtcattttcatttaggatatattctttttctttttttctttctttggtcttttttggtggtagtgggattagttcaggttttgtcagatgtacattccaggacatttcggcaattagtatatagacaattttgtgaaatttagaggttgtgccttgattcgtggagttcagtacttttctttgtattggatttacgtaactagtttttggatatctgcaatgtcaggttgttgttgaaattcatgctcaaaaactcgaacctgttctctctctctctc

SEQ ID NO: 5016 - DNA, 1448 bp, Glycine max
atttcttgagggtcgtttgttctcgatccgcttccacgatggaagcgggcgttggtcgggaggtatattgatgaccactgttcatgtcgccgcgccgcagggcgcagaattccttgctccaaaccagatcgttccgctgctgatcggtgcgaccgtcgacgaggtcgagcgcgagctcgtgctccagacgctcgcccgctgtgacggcaatcgcacacgcgccgcgcgcgtgctcggcctgtcggtacgcacgctgcgcaacaagatcaggctctatgccgcctccggcatcgtcgtgccggcctatcaggactaaccagcgcgtggctgcgcggaggtcgatcagtccgtcggcggcgcgcggcgcgacgatgtgctgcgaaacagccggcgcagctaaaaaaatgaggatacgaaatacaaataaaaaataaaaaaaaaaaactagttattttggagtggtttagcccaagaagaagtggaagggtggtggcacttgggttggtagcggcgaagaacgtcgttaatggaagaagagaaagaagcagtgatggtaacaccgggagaagtgttgggtagaaccagcgatgtcaaagctggaagaggagcatacgcggcgcttcacaacaacaccgtatacgcctccctaaccggcttccgccacaccgtacctcccgcccccgactcttccgacctgagaccgactgttgaagtaactggtcacaaggcccatggacctgttccacagcctggatctgtagtcattgctcgggtcaccaaagtgatggctcggtccgcttcagctgatattatgtgtgttggaccaaagtctgttcgagaaaaatttactggcatcattaggcagcaagatgttagagcgactgagattgataaagtagacatgcacttgtcttttcatcctggtgacattgttagagcccttgtgctttctcttggagatgcacgggcgtactttctgtctactgcaaagaatgaacttggtgttgtttctgcagaaagcattgctggtgcaactatggttccagtaagttggacagagatgcagtgcccgttaactggtcaaattgagcaaagaaaggttgcaaaggctgcaagctgactagaatacttcatcgagctggaatctgttctgttttgtagaaatagactaacatgcgttgttgttagggtgagaaattatagccagtttgtattttacattgcaagttggcctacttataaagtatcacaaacctgggatttcaattcactcgtgctatgagcaggattttatttactttttattgtattttttcaatttaaggctattgattactgtcattttaagacatggttcaattttcaactttgaatggaacttgtttcatattagactagtagttaaaaaatagtttaaatgttgctgtcttgcaaaaaaaaaaaaaaaa

SEQ ID NO: 5017 - DNA, 1111 bp, Glycine max
ggctcgcgcgtggcaagaaccattcacattcttccagaatcatcaaagccatcaacgggcttgacttggcaactagctggaagatgaagcaagcaactcttttcttcttctcactcttcctactcctttcctccaccaccatggccatttcaccagcacctgcagcagcaccaaaagccacagcaaaaactcctcctaccccaaaggcaacagcaccatcaccaaaaccattagttcccacaatacctcagtctccagactctcctgactcggtccccgacgacatcaccagaatcctgaaaaaggccaaaatgttctcagtcctaatccgcctcctcaaaaccaccgaaatcatgaacaacatcaactcacagctcataacagccaagagtggcggcataaccatccttgcaccagatgattctgccttttccaacctcaaagcaggcttcctcaactccctaaacgaaggccagaaaatcgaacttgtgcagttccacatattgcccgagtttgtgtccagctcaaactttgattctctaagcaaccctgtgcagacagtggccggtaaagatcccgcaaggcttccattgaacgtgaatgcattaggaaacagtgtcaacatttcaaccggggtcgtcaatgccaccgttctcggggtagtatactcagataacaaacttgggatttatcacgtggacaaggtgcttcttcctctagatttctttataaccaataaggctccagcttcagctccatcaactcttgcaaagtctcccaaagctgctaaggataactcttctgatgacgatcaagaagaaacaaatcagcatcagaataaatctggggcagtgagtgtggttagcattggtggagcaacgttgatgtcgcttgcgatagctttggttgcaaccatgttgagttgatccatttggcagctgcactttcaattttatttgtcaaacacgccattaatttctttctttttaccttttttgtttaaattttggtatgtgtttctgttttcttgtgtattggtgttatatatgaaaaggacgtgaatacttcaatgatcaatgattcagtggctaagccataattgttcctttat

SEQ ID NO: 5018 - DNA, 1316 bp, Glycine max
ctcgatttcagctcttgccttaattcaacacaacgtaccaaaggaggttgaggagtggtcgcagttgcatagcagagcctcagaattgtgctctttgcttacccttcttttacttcctctcttctcttcactctgtacagagacagacactgcacacatttatggccagcgtcggtgatagaaaggaatcagaatggatggataggataatatcagaaggagccatcccacttcttgaaccagataattgttcaaatggttgggctacccctcctggtgatgcattcatggttagaggccctgagtattttacaacaagggttaaggttccagctggtgattatatgctcaaacctctcggttttgattggattaaaagttcagtgaaaattggggagatattaaaggatccaaatagtcgagttaggaaggccattgataacgagtttccagcaggtgataaaccctttgtgtgggccttcaatcttcaagtcccaaccaaggataactatagtgccatcgcatattttacaaccaaagagacagtccttgaggatttgctaatggacaagttcttgaagggtggcaatgcattcagaaactcgagacttaagctgattgccaacattgtaaaaggtccttggattgtcagaaaagctgttggagagcaggctatttgcaaattgggcgtgccctttcctgtaaatattgcacaggggagaatttcatagaagtagatattgatatagggtcttccatggttgcaagtgcaatcgttcatttggcatttggttacatttcaactttgactgttgacttggcttttcttattgagagccaagctgaatcagagcttccagaaaaaatattaggcgctttcagattttctgaccttgatcctgcttcagctagaacaattgagctatcaactgttgtgagttgtgacaatgcacaaacatctttacctactagattgtggaagtcaattggacagggcttttcccatattcttcattcaggtcctctagaagatggctctacttctggttcagaacatactaacgatgtagatcacaaagataatccaactgacatcacgaactgatatactggaataattgaaaggggtaccatttgaggtcattattcttttagccattttttatgattggattcatagcatctgttgtatgacttaattcttgcctatggctgtattttgtaatactaaagaaagttagaaaacttaagagtggccccatttttttttggctggattattatatatatcttttaaagtaaaaaaaaaaaaaaaa

SEQ ID NO: 5019 - DNA, 1620 bp, Glycine max
  misc_feature (1599)..(1600): n is a, c, g, or t
  misc_feature (1611)..(1613): n is a, c, g, or t
ccctggtacttagtcccccttcataggtagctacttgtttaataagttgccaatattctaaaggggttacttagaaaccatagcttaaatgaagaaggaaaagcgacctccggtttgcaattagatactgggtcactacagctatcggctacaccttctttcttatcttaagtccaaccaccccagcactgctctattcccatcttcatccatatttggttcagcacaaaccatccttcataaattaaacaatacatatattaggaattaactaatgcaaaatacccaccacataataatgatggatataagcaaaaccaaattcaacacaactaaaacaactactattcgctttcattataacattgttttcaattgtagaacttgataggaaggatatggtcattgtagggtcactctcaataatattttcccttcccattgcttacagtctctcttcttgtaatttaaatcaaaccttctaccccaattctctctcagagctcagaatctgcagctctaccacttcttccaaaacccctccattatgaagaacgctaacagcaacacaaaactaatccttctccacccttatatccaaaaacaaggaagctccaatcgcctatggcttttagccttcatatccttctttacattagccttccttgccacccttatttacacaagagacacaacctcatcttcctctaccactacctcttccaccccattatctagtttcgctaacacccctttaccatccactgtaatcaacaccctcctccactatgcctccaaatccaacgacaccttccacatgccccactcagacctaaaaaccatctctgacgtgctccgaaagtgtccctcaccatgcaacttcctcatcttcggcctcacccatgagaccctcctttggaaagccctcaaccacaacggaagaaccgtcttcatcgatgaaaaccggtactacgccgcgtacttcgaagaaaaacaccctgaaatcgatgcctatgacgtgcaatacacgaccaaaaggagcgagttgaaggagctgatagcttcgacgaaagaacaggtgggaaacgagtgcaggccagtgcagaatcttctgttttctgagtgcaagttagggctcaatgaccttccaaaccatgtttatgaagtggattgggatgtgatattggtggatggaccgaggggggattggccggaagctcccggaagaatgtctccgatcttcaccgctggcgttcttgcccggagcaagaagggtgggaaccccaagacgcatgtgtttgtgcatgacttctcagggaaagtggagaaggtttctgggaatgagtttttgtgcaaggaaaatttggtcgaggctactcatagtttgggacactatgtgctggaaaaaatggacgatagtagcgttcagtattgtaagaatcattcatcaggatctgcttagttggtgtcttcaatgttactatatatatatatcgtccatctgggtatttaatatagtttccctgtttacttattggttggagcatgttaaagataattctctctttcttctttaatttttttcgtttttcgttttcnngcaccgaaaannnaatttct

SEQ ID NO: 5020 - DNA, 1671 bp, Glycine max
gataattgagcttttcccagtgcagctacattgaatgtcacgcggtttcgagagagaggtatctatgaggtgaataattttggtccttactccttcagttaatgctcttgctgtcaacttttgacttggctacctggtttactagtttaagtcagcttctcatcacaccccacaccatacatatccttacccctttcatttttagctataaatgtgcatcaagcaaaggttaggcttccaccctcccattagaaccctatcaagtaaagagggttagagaaataaaaagagaaagccgacagcacatagatagagagaggaaaacgacttaatattctttttccttgagacctgaaggggctaaggaaaattagaaggacacacaagtataaaggcggtgaaataaaagagaaagacaagaagaagacatgggaagaccaccttgttgtgacaaagaaggggtcaagaaagggccttggactcctgaagaagacatcatattggtgtcttatattcaggaacatggtcctggaaattggagggcagttcctgccaaaacagggttgtcaagatgcagcaagagttgcagacttagatggactaattacctgaggccaggaatcaaacggggcaacttcacagaacaagaggagaagatgataatccatcttcaagatcttttaggaaacagatgggctgcaatagcttcataccttccacagagaacagacaatgacataaagaactattggaacacccatttgagaaagaagctgaagaagatgcaagtaggttgtgaaggtggtagctttggagaagggttttcagcctcaaggcaaatccctagaggccagtgggaaagaaggctccaaactgatatccaaatggcaaagagagccctcagtgaagctctttcaccagagaagccatcttgtaatttatctgcctcaaactcaaacccttcagatagtagcagctccttctcttccacaaaaccaacaacaacacaaactgtgtgctatgcctcaagtgctgacaacatagctagaatgctaaagggttggatgaaaaacccaccaaagtcctcaagaacaaactcatcatctgtgactcagaactccttcaacaactttgctgcagcaggtgctgatactgcttctagtattggagcaaagggaccaccaagcagtgctgaattgtctgaaaacaattttgaatcattgtttgattttgatcagtctttggagtcttcaaactctgatgaattctctcggtcattgtctcctgaggccactgttttgcaagatgaaagcaagcctgatgttattggtgcagaaattatgccattctctttgcttgagaaatggcttcttgatgaggctggttgccaagagaaattagttggttgtggtgatgatgccaagtttttctaagttgggttcattttgtgacatatatgagactgtggaattttttattttatttcataagttataggtagggcctcatcaattaatcttcgctttggccttagagagagaagtttttcaagcctttggtgctagacgtgtatatgttaataactattgaaattatgattattgttatcatactgtgttagatgccacactggaaaacctgcttcttttatgtaaagttgatcctgcgatg

SEQ ID NO: 5021 - DNA, 1919 bp, Glycine max
tcgatcagctacgtaggcccccccccccgtagcccattcagcagcagttcacttcacgttcactgcctggctttcctaggttttcttctcagttctcacctcgcttttcgcgccacctcttcagtcttcattcttctcacttcaagaatcacgacccaaccgtgcaaaccttttcaggtgtgtaaatggggttatctgccaagaaatctagaaaaagaggaaaaagtgacagtgattcagatgactacgataatatggagtatgaagaggtggaggatgattatgatgacgatggtgaggaggaggatgaagaagaagaacatggagaggaagtaacagatgatgaagatgggacaggagaaaatagtgaatggaagaatgatgagatggaacagcttgagaaagaatatagagatcttcatcaccaggagctagatactttgaagaacttgaagcatcataaggatgaagatcttcataagggtcaagctgtgaaaagccagaaggccctctggtacaaaattcttgagcttagattcttacttcagaagccattctcgagctccaatagtttgccacaggaatcaatcaagtctttgttctgtgaaacagatgagacagttagagtagcatattcagatctgctgacttcgtccaaagagactttagattctatattggaactgcaagaggctctttttgctaagaatccatcaattacccaagccacagttggttcagaagggttatcaaaagatttagaagtttctgagcatttggaagacaatcttgaccaagagtggtcacagatttcacagatgcacaagagtatagcttctttcagagacaagtcaatcaacaaatggcagcggatgacacaagtgactactggtgctgctgccattaagggaaaatttcatgcttttaatcaggatattagcaatcaagttgctgcttatatgagagatcctaatagaatgatcaatcagatgcggctgagaagatcagctgttaatatatttggatctgttccagaggttgacgataaacataaagaagctgaaacacgtactgatggtgatcctgaacttctggatgactctgaattttatcagcaattattgaaagaattttttgagacagttgatccttcatcgtctgagaaagcattttatgctttgaagagaatgcaaccaaagaaaagaaaaattgttgatcgtcgtgcctcaaaaagtcggaagataaggtataatgttcacgaaaagatagtaaattttatggcaccactacctgccaatattcctcctatggctccgaagttgtttgagaatctgtttggattgaagacagaaagattatcatcatctgctgcagcctcgtaatcatggttggccgacagcaatatttggcctcacagttttgcccttactttacatatgttgtacactaatttgtcttctacatgatgttgattattgaggaatttgatattttttcctcacaagacaattttgctgtaaatttattcagatgacctcatttctccttaggtgtttgttcaacgaggagtgatacaggttcatgtatgatggtaaccgatgccctagtgcaatggtgctagtataatagattatagttatggattttcaacgtttcagttttgaaaaaaaaaaaaaaaaaactcttccgtgaattgttggtttgatatttgtcgcacagtgccagagtgaatttgagggtcaattttaaattaaaagtaatatgtggagttcgcacatttttttatataaaagaatcagagatcatcgtcatggataattgaaagtccattgatagaagtcaagaacaaaacccaaagccaaccaagggttaatatcagacgaaaagctcctcacttacctagagcttggttctcaaga

SEQ ID NO: 5022 - DNA, 2098 bp, Glycine max
gggacaattccaaatgaaatctgcaatatctcccgattgcaggacttgctgttggatcagaatttcattacaggagagatccctcatgaaattggaaattgtgcaaaacttcttgaattacaattgggcagtaatattttgactggaactattcctcctgagattggtcgcattaggaacttgcagatagctttaaatttgagcttcaatcatcttcatggatcactgccccctgaattaggaaagctggacaaacttgtttctctggatgtttcaaacaatcggctatcgggtaatatcccacctgagcttaagggaatgttgagcttgatagaggtgaacttctcaaataatctgttcggaggtcctgtgccaacatttgtaccatttcagaagagtcctagttcaagttatttgggcaataaagggctttgtggagagcctttgaactcttcatgtggagacctttatgatgatcacaaggcttaccatcacagggtttcttacagaatcatactggctgtaattggttctggtttggctgtttgtatgtcagtaaccatagtggtctttgctgtttatgatcagggagaggcaggaaaaagtagccaaagatgctgggattgttgaagtggtccacgctgccaccccggctccccccccagggacgatttttgttgataatctaaaacaagcagctagatcttgatgtcgtcgttaagagcaactctgaaagacagcaacaagctcagcagtggaactttcagcactgtttacaaggcaatcatgccttccggggtggtcttatctgttaggagactgaagtctgtagacaagacaataatccaccaccagaacaagatgattagagaacttgaaagactaagcaaagtttgtcatgaaaatctagtgcgtcccattggctatgtcatttatgaagatgttgctcttctcttgcatcattattttccaaatggaacattggctcagcttcttcatgaatctaccaggaaacctgaatatcagcctgactggccctctaggttatccattgccattggtgtggcagaaggtttggctttccttcatcatgtggcaatcattcatcttgatatctcttctggcaatgttctcttggatgcaaattccaagccgttggttgcggagattgagatttcaaaacttcttgatccaaccaaaggcactgcaagtattagtgcagttgctggttcctttggttacataccaccagaatatgcatatactatgcaagtcactgcaccaggaaatgtttatagctatggtgttgttctgctggaaatccttacaactagactaccagttgatgaggattttggtgaaggtgtagatttggtgaaatgggttcatagtgctccagtaagaggggatactcccgagcagatattggatgctaagcttagcacagtttcctttggttggaggaaagaaatgcttgctgctttgaaggtcgcgatgctgtgcactgacaacacaccagccaaacgaccaaaaatgaagaatgtagtggaaatgcttcgagagataacacaaaattgagaacaacaagccactcaaagattctattctgtgctgtaatctacaccgttgaagatttgatgtatgcaaatctctcatggatacagaggaaatgatgaattacaacttacaacaactttaaatagtagacttgtatcaggaattatttcatgtggtgaagctggtgtgtcatagtaaaatcaggcattgatagaacttcacctttctagtttgtccaaagggttagttgtgaaatggcagcttatctatttgagttggatactatgttaggtttggggaggataaatgcaagaagaaaccttgaaatgggatatatcagttcctgttgcatataagctagtccacagttttcatattgtatttactcatttgggagatgtatgcacctatcaatcagtctcttcccattgaaactaaaagttctatttatttttgttgagatagcagactgtatatctggattgtgcacatgtataccgtaccttctactggatgttttactgttttaacatccctcccc

SEQ ID NO: 5023 - DNA, 1497 bp, Glycine max
  misc_feature (1494)..(1495): n is a, c, g, or t
ggcccgtgtgtaattgtaaagccaccacaatcgctacccttggctgcaagcttaagcctaagcctaagcctgagacataccatagagaaagtgattcaattaatatattatatggtgtttctcttcaattcccatggagcctaagacacaacctcaagcgaatagtcctccaccaaaaccttgggaacaagcgggttcctcttctggtccagcacctttcaaacctccgtcagctggcaacacaagtgatgtagttgaggcttcagggactgcaaaacctggggaaattgtttctagttctgataggagtgcagctgtcaacaggaatactcttgggaggcctgttccctccaggccatgggagcagaattatggaaacagcacctatggaggatatggttctacaatgaattataattctgggtatggatctggaatgtatggatcttcttatggtggactaggaggtggaatgtatggatcttcatatggtggggggatgtatggtaacagtatgtacaggggaggatatggtggcctgcatgggtcatccgggatgtacggaggtggaatgtataacagtgccttagggggtccaattggtggttatggcatgggtggtggtccttatggagatcaagatccgaacgatccgttcggtgcccctccttctcctcctggattttggatttccgtcctacgtgtgatgcaaggtgtggttaacttttttggtcgaatatcaatactcatagaccagaacacacaggctttccatttgttcatgactgcacttctccagctgtttgaccgctctggaatgttgtatggagagctagctagatttgtgttgcggttgcttgggattagaacgaagtccaagaaggtttacccgccaggtccaaatggacagccgctgcttggacctggaccacacaatccttccggaaatgtaaactacattgaggcaccaaaggctgctccaagtggttcttgggacaacgtttggggaaatgacgccaatcaatgatacggtatgttattctgctaaaagagttcgtccaaatacattgaaaagaagaaacagctgcattcattatgaagatactgaaactgcagaagtcatgtatatcctgggattaaaattgagtttgctattttctctttgcttgcgttggctcttgattttactagaaaggggatcttaaataggataccatccctgcattataccttgtaagcgttttgtttgaatccttacatgtattatcttatccctagcgtaatattgcatacctgcattaagattttcgggcgacctttaattacgtttcttttcgtgtgctcgtaatgtgaatattcctcaagtttgctttacgcatggttctgccaaacatcggtgtgattatatgaagtcggcgttaagttttaggtttaattgcagtttaattccaatattaccgcccatgagtaattttgattctcgaattattaaannaa

SEQ ID NO: 5024 - DNA, 1820 bp, Glycine max
  misc_feature (1783)..(1783): n is a, c, g, or t
gcagatgtgtgttagagtgaagaaagaggttgacattaacaaatcatagcatagcagaagaagaagaagaagagatacatagaaagaaagaaaaaaaaaatgagtttgagggaagacaatgaagagggaagggatctgaagaagccatttcttcacacgggaagttggtatcgtatgagtgggagacaatccagtgtgttcggttccacacaggccattcgtgattcctccatctctgtctttgcttgtgttctaatcgttgctttgggtccaattcagtttggtttcactgctggttacacctcacctacacaatctgctatcatcaatgatctaggcctctcagtctctgagttttctttgtttggttctttgtccaatgtgggtgccatggttggagcaattgctagtggtcagattgctgagtacatagggcgcaaagggtctttgatgattgcatccattcctaatattattggttggctggctatctcatttgcaaaagattcttcttttctttatatgggaagattgttggaagggtttggggtaggaataatatcttacacggtgcctgtgtacatagctgagatatcacctccaaacttgagggggggtttggtttcagttaaccagctctctgtcaccattggaattatgctggcatatctgctggggatttttgttgaatggagaatccttgcaattataggaattttaccctgtacaatattgatacctggcctatttttcattcccgagtcccctagatggctggcaaaaatgggaatgacagaagaatttgaaacttccttgcaagtgctccgaggctttgagactgatatttctgttgaagtgaatgaaattaagagggctgttgcttcaacaaacacaagaattacagttcgatttgcagacctcaaacaaagaagatattggcttcccttaatgattggaattggactgctaattttgcaacagctttctggaattaatggtgttcttttttattccagtaccatctttcgaaatgctggaatcagttcaagtgacgcggcaacatttggagttggtgctgttcaggttcttgccaccagtctaactttgtggctggcagacaaatctggtcgccggcttctccttattgtctctgcaactggaatgtcttttagtctcttagttgttgcaatcacattctacataaaggctagtatatcagaaacttcttccttgtatgggatattgagcaccttgtcgctggttggagtcgtggccatggttattgcattctctcttggaatgggagctatgccatggattataatgtctgagattcttccaataaacattaaaggcctcgcgggaagtgtggcaacacttgccaactggttgttttcctggttggttacattgacagcaaatatgcttttggattggagctctggaggaaccttcaccatatatgcagttgtatgtgccttgactgtagtatttgttaccatttgggtccctgagacaaagggaaaaactattgaagaaatccaatggtctttcagatgaatttccttctctagcagttgctttttttttttcctttcacaagctgatttaagaatttcacattttaatgtatctgggattatcgagtgatccaagtattcatttgattccttcacttgaaaatggggatcctgtaccggcgataagttctttgatgtttttttgtatgagttggcttcttgaacattcacttagactcgtgctcctcctgtatgcacctggnaactgttcctcgttaattcaattcatttttatgttcc

SEQ ID NO: 5025 - DNA, 1300 bp, Glycine max
tcagctactgcgagaagacgacagaagggggcgccttcccaccgtaaaccctaacaataatggagttgtggaacgtggtgtttgtgtgttgtgttttatgttacagtttttgtcacactgcggaggctatcgttaagctacgaggcaatgaaacaataccagcattgattttgttcggggattcgatagttgacacaggaagtaacaataacctaataacggggcttaagtgcaattttcctccttatgggagggatttcgagggtgggataccaacaggaagattcagcaatggcaaggtcccagctgacttcgtagcggaagaattgggaatcaaggaatatatagcaccatacacgagtcctgctttgcagcctggtgatctcctcaggggagtcaacttcgcttctggtggcacgggatatgatcctttgaccgcacaactagtgtcagtcataccgttatctgagcaactagagcaattcaaagaatacataggaaagcttaaaggaaattttggagaagcaaaaaccaacttcatcttgtccaaaagtttagtacttgtggtatcaagcagcaacgacattgccaatacttattttgcaactggagtaaggaaactgaattatgatgttcccaattacactgatatgttggtgcaacaagcctcttctttcgttaaggaattatatggattgggggcaaggagaataggagtgtttggtgcacctccactaggatgtttgccattcgtgcgagcattgtttggaggtctacaaagactgtgctccgaagaaataaacatggcatcaaaattgtttaactctaaactatcttcagagctgcacaagctaaaccaaagtttgcctcaagccaaggtggtgtatatccatatttacgactctttgctcaatatcatccaaaacccaaccaaatatggatttgaagttgctgacaaaggatgctgcggcacagggactgtagaggcggcttttctgtgtaatatgttagatccaacaacctgctcagatgattctaaatatgtgttttgggacagctaccatcccacacagaagacataccagattcttgttggtgaaatcctcaacaaatatacaagcaacttctcttgagacaactccaactgaatttttctttatcttcaatttttaaagagaagtgtccaatcgcaagagtttgaaaagaaatgtattttgtttaattttttataagtgataaccacacctctatcattgtcataatttaaaggtttacaaaaaaaaaaaaaaaaagagaaggt

SEQ ID NO: 5026 - DNA, 1098 bp, Glycine max
caaaatactactagtaccttaataaacaaataaataaataaggtgagagaaaaaaaaaaatgtagaggaacctggaaacttccacgaggttttcggtgaaaaccaaatttggggctttgcatcgcaagatttaccctttccaatcaaaattcttctgccttcccctaccaattctttctctcaaccgatttatctgagtgaggggtttggccaatgacgagtggttttggtgaatcaacgagagcgtctgcaccgagcccatcatgctcggggaacagttcaaacgatgccggtgattttgaatgcaacatatgcttcgatttggcgcaagaccctgtgatcacactctgtggtcacctattctgttggccatgcctttataggtggctccaccatcactcccattctcaggaatgccctgtttgcaaggcccttgtgcaggaagagaaattggttcctctttatggaaggggcaaaacacagactgatcccaggaccaagtcatatcctggaatggagatcccccaccgtccttccgggcagaggccgcaaaccgcgccacccccgccacctcctgaggctaaccctttcgggagttatgggtttggactaatgggagggttcattcctatggcaactgctcgatttggaaacttcacgctttccactgcctttggcgggtttatcccgtccctactcaacattcatttccatgggtttcaggatgccactgtctatgggacaacgtctggttatccctttgggtttaatggctttcatggagggaacacgcggggttttacgcaggcaactggtcaagtgcagcggcaggaggataatgttttgaagaatctgcttatgttgattgggtttcttgtccttcttacggttatttttgtgtggtaatggtcgttctgtgttgaggttacaatgcttcttaaggagttgcttgtgtaaatattttaactggctttatgagggaattgtatgcttgagaatgctgccactttggctctttattaactgtattataagcatctgcagtaaacttgaatgctgcctatttgtctttgcaaaaaaaaaaaaagaatttctgtc

SEQ ID NO: 5027 - DNA, 1175 bp, Glycine max
acaatgtctcattattcatccttgaattctcaagaatggagttcccatcttgatgctattactgttcagaactctcctcaggttcagattctaagaaaccggtcaattgcaaatgcaagtgaaagtaatgggatttctagcaacacttttgatactgcaagaatctcaagtgtatcaagggatggaacaaatggtgtggcatctatggcaaaggaggaaactagcccttcaaattcgtcagcaggagtagatacacttattcccccttcagaaagaaaaaccaattttatcataaaatggaaaagggtactgtggaaatcttgtgtttacatcatcacagttggaatgctggttgctttacttctaggtttaaatatgtcatggactgcaattactgctgcacttgctctcatagttcttgatttcaaagatgctacaccatgtttagagaaggtttcgtattcacttttgatattcttttgtggaatgtttattacagtggatggcctcaataaaactggaattccaagtgctctgtgggacataatggagccctattctcatgttgatcgtgctagtggaattgcaatacttgcaattgtcatacttgtcctatcaaatttggcttcaaatgtaccaacagttctcttgcttggaggaagggtagcagcctcagctgctgcaatttccaaagcagatgagaagaaggcatggctgatattggcttgggccagcaccatatcagggaatctctcattgttgggatcagctgctaacttgatagtgtgtgaacaggcgatccgtgcgccaaacctaccatacacattaaccttctggagtcacctgaaatttggccttccttccacaatcatagtcactgctattggtttgacattcataagatgatatggcatttggctgaaaaggggtcttgttgaagatatttgaacaacatgaaagaatgaaaaaccagtgttcatgtcaatatgtttcaacttatggatacactattaagaaaatgaatgttgatgttctttgttattgatagtttgtgtaaaataaaatatctgcagctagttgccaagtgatgctttgaaattcagtaaaaagggaaaggaaaggcaaatttctagtgttaaataattgaattttacttgttccttttttttattatt

SEQ ID NO: 5028 - DNA, 3189 bp, Glycine max
gtttttggatgcttttcaatgctgctttgatggtccgcccacgcctccgccctcgcgtccggcaaattttaggattcagttgagttctatttgcaaagatcttgtcaaaacacatcttgatatcctggatttgtatgaatattatttacatttttcattagcttggcttcaaaaaaaactcggaagcgcttttgtatatgttggaaccattcttggttgcacaatctaatgaccgtaatccttacaacattgatattgtgaatctgaagaagcttatcccaaaaattgggcagttgttggctcaaacttctttcatgtctaatatacaaaaccttcaactatccgaacgtgcagaagataaactagttgcagatataaagcattcaattcctgatgatgaaagatggaagattatagggacctgcttgtggcagcatatgtctagattcatgatatttaatttgaatctggttcttgccaaacttgaagatggtaaactgtcgggtcctttccacagaaaatatacttatggggagtcttatctcataaatatggattctgaaagcatcagcttgccagagaagattcggttagtcttgtttagcctatgtgatctactgatgacaacagttactcacatttcttcttatcatgttaaacaacaagcagaatttctgtggcagaaagtagggaatgatttgaatgtaatgactcttcaatggttaaaacaaaaatcagaattcagccagaaccaaaacctggacattttggaactggggaacatgaaagataactattcagttaatcagttattatgggatcgctgtgcggatcccaaattgatatctgattgctttgcacaggaaaaactcaattggccaaatgatttggatcagatgaatactaaaggatggaatgatttgtctataattatgacaggactgcataaaactgatgatacatgtggtgatggatgtaaacttagcactagatcttctaatcatgaagttggaactcctgttaaaggaacatctctaagtggcaatgcttctgcaagatcaaaccagaaagatataacttatacaaattttgcagttttccggagtcccgggtcgacccacgcgtccggaatgtacaagagaaatggagaacttttggaggcattgtgtataaactctaccgatcaacgggaagctgcagttgctggcaacaggaagggtataatgttctttcatcgggaagatgagattccttttagtgctaaatcagatgatcttttgtgggccacagctgattggcctcagaatggatgggcaggttcagaatccacccctgctccaacatgtgtttctcctggtgttggccttgggagcaagaaaggggcacaccttgggctgggtggagcaactattggtgtggactcttcagcttggcccagcaatgacttgacaggtggtggagtattaggaatgctaggttatactggtattggtgcctctggattaggttgggaaattcaacaagattttgaagattttgtggatccacttgccactttggagaacataagtaccagggctttgtctagtcatcctatgagaccttttttcttggttggttctagcaatacacacatttacttgtgggagttcaacaaagacaaagctactgctacatatggagtgctgcctgctgccaatgtccctccaccttatgcccttgcatcaatttcagccttgcagtttgaccactttggacaccggtttgccagtgctgcattagatggaactgtctgcacgtggcagctggaggttggaggaaggagcaatgttcgtccaacagaatcatctctttgctttaacggtcatgcatcggacgtcacatatttttcctcaagtggatcgataatagctgtggctggatatagctctaatggtgttaatgtggtcatatgggatactttagctccacccactacttctcgagcttccattttatgtcatgaaggtggtgcacacaccgtgtctgtttttgataatcatgtgggaagtggttctgtatccccccttattgtgactggtggtaaaggtggtgatgttggacttcatgacttccgctatatagctactggaaaggctaaaaggcataagcgtgctgataacattgggcaaagctctgtctcatctttaactcgtgataaggatcaaaatgtagatgggatgctttggtacattccaaaggctcactcagggagtgtcacaaaagtagttaccatcccaaataccagcttgtttttaactggaagcacagatggagatgtcaaactctgggatgcccagagcacaaagttaatacatcactggtcaaagatacatgaaaaacacacctttctgcagccaagttctcgtggatttggtggtgttgttcgggctgctgttacggatatacaagttgttccccatggttttctttcttgcggtggggatggaattgtaaagctggtacggctggacaatcacctgcgtgcccatggaattgagttatgatacttctgagatcctttgtgttgatgacaactctactatgctgcaaatgcttcacgacagtggtcatcatcggtcagaggttatcaaatctgcattattggcttcgtcaacagcttaatataagaaatgtgaacattgctgaagccaccatccattttgaaaaaggattcttcattggtatgttcagatatccaaaacaactgcaacttgggcaagccatacatcccggaacataaacatctcatgctagtgaacctcattgcttctttgaacagattggatgggttcattttgattcgagtcagtctttctgcatggaacaaaactttagtcagtggccgggctataattgtattaagttatgaatacctctcgaggttggcaacatttttgagacaaaacttgtctttgttcttggtgtacattacctgtttgaatttgttgaggcatgtgagtatagtgtatacacacggcaaaaacttagattctctagtgagttttgtttacatttgtagtcatactttgcagcatgtatatattaagaaatagtgtcggtgattttaattagaacttgagaaaagttataatatactactgttcataacttcttgggaatcaaaagcttgaaaccttttccaagtgc

SEQ ID NO: 5029 - DNA, 1879 bp, Glycine max
tacggctgctcagctacgtaggcccccccccccgagcaatagcaacacagcaatagcttctggtgatctcgttttctcacattgctctcttccccctttctctctcctctttctctctcttccattgcttctccataagcaacgccacgcgaggtcaattgcgccatcgccatgactgtgatgactcctgctcccattgaccagcagcaggaggacgaggagatgcttgtcccgcacacggatttggctgagaataatcaccaacccatggaagttgtggctcaacctgatgctgccaacactgtggagagtcagcctgtcgaggatccttcaacatcaaggttcacatggaaaattgacaacttttctaggatgaatacaaagaagctctattcagaaatatttgttgttggtggttataaatggcgtgtacttattttcccaaaagggaacaatgtggactatttgtccatgtatttggatgttgcagattcagctagtttaccctatggctggagtagatatgcacagtttagcttggcagttgttaatcaaatccataataaatactctgtgagaaaagacacacagcaccaattcaatgcgcgggaaagtgattggggtttcacatctttcatgccgcttggtgaattgtatgatcctagtagagggtatcttgtgaatgatactcttgtagttgaagccgaggtttttgttcgtagaattgttgattactggacttatgattcaaaaaaggagactggctatgttggacttaagaaccagggagctacatgttatatgaattctctactccaaactttgtaccatattccttattttcgaaaggctgtataccacatgccaacaacagagaatgacatgccctctggaagcatccctttggctttgcaaagtttattctacaagctccagtatagtgacaccagtgttgcaacaaaggagctcactaaatcttttggatgggatacatatgattctttcatgcagcatgatgttcaagaactgaacagagtcctctgtgcgactgcgagaagacgacagaagggaactgttgttgagggaactatacagaagctatttgaagggcatcatatgaattatatcgaatgcatcaatgtggactataaatcaactagaaaggagtcattttatgaccttcagcttgatgtgaagggctgtcctgatgtttatgcttcctttgacaagtatgttgaagttgaacgtcttgaaggggataacaaatatcatgcggaacaatatggtttgcaggatgctaagaagggtgtcctgttcattgatttccctcctgttcttcagcttcaactgaaaagatttgaatatgactttatgcgggatactatggtcaagattaatgaccgctatgagtttcccttgcaacttgaccttgatcgtgagaatggaaaatatttatcacctgatgctgataggaatgtccgcaatctttacacacttcatagcgttttggttcacagtggtggtgtgcatggtggacattattatgcttttatcaggccgactctatctgagcagtggtataaatttgatgatgagagggtgactaaagaagacactaaacgggcattagaggagcaatatggtggtgaggaagagttaccacagacaaatcctggatttaacaacactccttttaaattcaccaaatattcaaatgcttatatgctggtgtatatacgtgaagctgacaaggacaaagtaatatgcaatgtggatgagaaagacattgctgaacatttaagggagaggttgaagaaagaacaagaagaaaaagagcacaaaaaaaaaaaaaaaaaactcgagactagttctctctaat

SEQ ID NO: 5030 - DNA, 2403 bp, Glycine max
  misc_feature (2268)..(2268): n is a, c, g, or t
  misc_feature (2368)..(2368): n is a, c, g, or t
cattgctgaacatttaagggagaggttgaagaaagaacaagaattaaattatcaccccgcgtccggaaagagcagaggctcacctttacgctgggatggagggggcacgagatgaagaccttgcagagcagattggaaaggatatatattttgatcttgtagaccatgacaaagtgaggagtttccgtgtccaaaaacagacatcttttaacctttttaaggacgaggtggctaaagagtttggaataccagttcaattccagcgcttttggctatgggcaaagcggcaaaaccatacgtatcgtccaaatcgaccattgacacacatggaagaagcacaatctgttggacaattgagagaggtatccaacaaagttcacaatgcagaattaaaattgtttttggaagtggagcttgggctggatttacgtcccattgcaccgcctgacaagacaaaggatgatatattacttttcttcaagttatatgatactgaaaaagaggagctacgttatgttggaaggctctttgtgaaggctactggtaagccatcagaaattttaaccaggttaaataaaatggctggttatgatcctgatgaagagattggactatacgaggaaattaagtttgagccaaatgttatgtgtgaacctattgataagaaagtaacatttcgagcaagccagttagaagatggagatattatatgctttcagaaagctcctgctatagacaatgaacacgtccgctatccagatgtgccttcataccttgaatatgtgcacaatcgccaggttgttcactttcgatctctagaaaaaccaaaggaagatgacttctgcctggagatgtcaaggctctatacatatgatgatgtggtggagaaagtggctcaacaacttggtttggatgatccatccataattaggcttacccctcacaattgctactctcaacaaccaaaaccccaacctattaagtatcgtggtgtggaacatttgtctgatatgctggttcactacaatcagacttcggatatattgtactatgaagtacttgacatccctctgccagaactacaaggattgaaaactctgaaagttgcatttcaccatgctaccaaggatgaagtggttattcataccatcagactcccaaagcagagcactgtgggggatgtccttgatgatctgaaaacaaaggtggaattgtctgatcctgaagccgagcttaggttgcttgaagttttctatcacaagatatacaaggtcttccctcccaatgaaaagatcgaaagcattaatgatcaatactggacattacgtgcagaggagattccagaagaagagaaaaatctgggtcctcatgatcgtctaatccatgtgtatcattttactaaagacacagctcagaatcaaatgcaaattcagaactttggggaaccctttttcttggtcatacatgaaggggagactttggctgaaattaaagtaagaatacagaagaaacttcaagttcctgatgatgagtttgtcaagtggaaatttgcctttttttcattagggcgtcctgaatatcttcaggattctgacattgtatccagtcgttttcagaggagagatgtttatggtgcttgggagcagtatcttggcttggagcatactgacaatgctcctaaaagatcatatgctgttaaccagaatcgccacactttcgagaagccagtaaagatttataattaggaaactggtattgatgagttctcgtcttgcgagggatgaatttggcatattctgctacatctatgggcatttgtaaaaacagggaaaaatagcgaaaggctactctgtataggccataattagtgagatcagcaattccaggtggtttctgcaagttagaatttatattagaattgtggtatgtaattctttctgtcaacggatctcaacactgtctgccgaccactgcccgttgagctttactacttccaactgtgtggaagttgttcaagttgaggtcattgatcatcatcactccactgtatcagtacataagatttttggattagtgagtgtatacagggtatagttggttgactctttttttgttcatcttgattgcttccagattttgttcagtcagtagtgttactttaagtgagggctgcaaaatggtgtgtggcagagttaatgtaatgttgtaaaagagactcgccagcctaaaaatatagtttcctgccgcaccatttgctccatctcatgntgccttttttattttacttttttctgtttcttcgcctcaccattaagccacttttattgattagtgtttggctgttaaagttaagctaaaaataagccangctaaacatatagctcactcacattttgaacttta

SEQ ID NO: 5031 - DNA, 2247 bp, Glycine max
cgaaattcggcgcgagctcacctttatactattataaaggtggcacgagatgaagaactttaagatcagattggaaaggatatacactgtgatcttgtaaaccatgacggggtgaggagtttcaaaatccaaaagcagacatcttttaaccttttcaaggaagaggttgcaaaagagtatggtgtaccagttcaatttcagcgttattggctatgggcaaagcggcaaaaccatacttatcgtcctaatagaccattgagtcacattgaggaagcacaatctgttggacaattgagagaagtgtccaacaaggttcacaatgcagaactgaaattgtttttggaagtggaaccggggatggattcatgtcccatcgcaccacctgacaagaccaaggatgatatattacttttcttcaagctatatgatcctgaaaaagaggagctgcgttatgttggaaggctctttgtgaagtgtactggcaagccattggaaatctcgacgcggctacgtggaatggcccccccccatgaccctgaagaagatattgcactttatgaggaaattaagtttgaaccaaatgtcatgtgtgaacctattgacaagaaagtaacatttcgaacaagccagctggaagatggagatatcatatgctttcagaaggcttcctctatggacagtgaggaaaatgcccggtatccagacgtgccctcatatttagaatatgtgcacaatcgccaggtggttcactttcgatctctggatagaccgaaggaagatgactttttcctggagatgtcaaggctttttacgtatgatgatgtggtggagagagtagcccaacaacttggtctggatgatccatccaaaatacggcttacaccacacaactgctactctcaacaaccaaaaccccagcctatcaaataccgaggggtagaacatttgtctgatatgttagttcattacaatcagacatcggatatactatactatgaagtacttgacatccctctaccagaattacaagggttgaaaactctgaaagtcgcatttcatcatgccactaaggatgaagtggttattcatactattcgactcccaaagcagagcattgttggggatgtccttgatgatcttaaaacaaaggtagagttatctgatcctgaagctgaacttcggttgcttgaagtcttctatcacaaaatatacaaggtcttccctcccaatgaaaagattgaaaacattaatgatcaatactggacattacgagcagaggagattccagaagaagagaaaaatcttggtcctcatgatcgtctaattcatgtgtaccatttcaataaagagacagctcaaaaccaaatgcaaattcaaaactttggggaacctttttttctggttatacatgaaggtgaaactcttgacgaaattaaagtgcgaatacaaaagaaacttcaagttcctgatgatgaattctgcaagtggaagtttgcatttctatcactagggcgtcctgagtaccttcaagattctgacgttgtttccagtcgttttcagagaagagatgtttatggtgcttgggagcaatatcttggtttggagcatactgacaatgctcctaaaagatcatatgctgtcaaccagaatcgccacacatttgagaagccagtaaagatttataattaggaaactgctatattgatgaagatggcattgttatatttctatgggcttgtaaacatggtgaagatggcaaaaggcaactatttataggactaatgaatccagcaattcaggtggtgtctgcagactttaagttaatttgtggtatgtaattctttgtcaatggagtagcattgctctcaacatcttgtatctgccaaccgcagcgccttgagctttttactgcttccgtttttatatggaggttctacaagttgaggtcattgatcatcatcgctgaaatgtatcagtacataagatttttggattagtgagtgtatacagggtatagttggttgactttttccatttttcttgattgcttcctgattttgtccagttagaagtgttaatctaagtgagggctgcataatggtgtagcagagacagcttttttattgtaatgtaaaagatttaccagcctccatatatatctatttggtcagcataaagttttcaccaaaaaaaaaaaaaaaaaaaaaaaaaaaaaaaaaaaaaaaaaaaaaaaaaaaccaaaaaaaa

SEQ ID NO: 5032 - DNA, 1757 bp, Glycine max
gttctgggccggatttcccggtcgaggctctttctgatctctctccccctctctctaacaataaccctcgctgtcgctggttccaattcaccatgaccgtgatgatgcccgctcccattgatcagcaagaggacgaggacgtgctcgtgccggacgcggatttgcctgagaacaatcaccaacccatggaagttgtagctcaacctgaaaatgccaatactgtggagagtcagcccgttgaagatcctccgtcatctagatttacatggagaattgataacttttcaaggctgaatacaaagaagctctattcggaaatatttgttgttggtggctataaatggcgtgtgcttattttcccaaaaggaaacaatgtggactatttgtccatgtatttggatgttgctgattcagccagtttgccctatggttggagtagatatgcacagtttagcttggcagttgttaatcaaatgcataataagtattctgtgagaaaagacacacagcaccagtttaatgcacgtgaaagtgattggggtttcacatccttcatgcctcttggtgaattgtatgatcctagtagagggtatcttgtgcatgatactcttatagtcgaagctgaggttcttgttcgtaggattgttgattactggacttatgattcaaagaaggagactggctatgttgggcttaagaaccaaggagctacgtgttatatgaattctctactccaaaccttgtatcatattccttattttagaaaggctgtgtaccatatgccaacaactgagaatgatatgcccactggtagcatccctttggccttgcaaagtttattctacaagcttcaatacagtgacaccagtgttgcaacaaaggagctgacaaagtcttttggatgggatacatatgattctttcatgcagcatgatgttcaagaactaaatcgggttctttgtgaaaaacttgaagacaaaatgaagggaactgttgttgagggaaccatacccaagttatttgaaggacaccatatgaattacattgaatgcatcaatgtagactacaaatcaactagaaaggagtcattttatgaccttcagcttgatgttaaaggttgtcgtgatgtttatgcttcctttgataagtatgtcgaagttgaaagtcttgagggggataacaaatatcatgctgaacagtatggtttgcaggatgctaagaaaggtgtcctatttattgattttcctcctgtccttcaactccagctaaaaagatttgaatatgattttatgcgggatactatggttaagattaatgaccgttatgagtttcccttacaacttgatcttgatcgtgaggatgggaaatatctatcacctgatgctgataggagtgtccgcaatctttacacacttcacagtgttttggttcacagtggaggtgtgcatggtggacattattatgcttttatcaggccaaccctctctgaacagtggtacaaatttgatgatgagagggtgacaaaagaagataataaaagagcattagaggagcagtatggtggtgaggaagagttaccacagacaaatcccggattcaataacaccccatttaagttcaccaaatactcaaatgcttatatgctggtgtatatacgtgaaagtgacaaggacaaaatcatatgcaatgtggatgagaaagacattgcagcacatttaagggagaggttgaagaaagaacaagaagagaaagagcac

SEQ ID NO: 5033 - DNA, 1501 bp, Glycine max
  misc_feature (1)..(95): n is a, c, g, or t
  misc_feature (175)..(175): n is a, c, g, or t
  misc_feature (228)..(273): n is a, c, g, or t
  misc_feature (275)..(293): n is a, c, g, or t
  misc_feature (1269)..(1291): n is a, c, g, or t
nnnnnnnnnnnnnnnnnnnnnnnnnnnnnnnnnnnnnnnnnnnnnnnnnnnnnnnnnnnnnnnnnnnnnnnnnnnnnnnnnnnnnnnnnnnnnnnaaaaaaaaaaaaaaaaaaaaaaaaaaaaaaaaaaaaaaaaaaaaaaaaaaaaaaaaaaaagaaaaaaaaaaaaaaaaaanaaaaaaaaaaaaaaaaaaaaaaaaaaaaaaaaaaaaaaaaaaaaaaaaaaaannnnnnnnnnnnnnnnnnnnnnnnnnnnnnnnnnnnnnnnnnnnnngnnnnnnnnnnnnnnnnnnntcttacttaccacacacacctcctaaaccaaaattatccaaaaccatgtccagcttcactcatgccaccacactcctccatgcccacatcaaaaccaagcacaaaaaaccctccaccaccaccaccaccaccaccccattaccccataaccattcccccaacagaaggaagctgatttcaacttttctagccacttcaacagcagcactactagtgcatggagtcaccagcaccccacaagcactggcccagagctggggcacgcactccttcatcaaggagcacttcttcgagccggggctctccccggaagacgcggtggcgaggataaagcagactgcggaggggctgcacagcattcgggaggcgctggagaccatgtcttggaggtatatcatgttctacatacgcatcaagcaggcctatcttgaccaggacttgaggactgccttcaccaccttgcctgagagtagacgcaaggagtatgtcaaaactgctaatgagttggtgtctaactttggtgagtttgataggcatattcggacgccaaaggtatatgaatcatacctatactacgagaagacattgaagtcaatagatcaacttgtggccatactagcatagcacaaggaggaagctgcagggtataacggtcttaatttgcaattcttatttttatggtataaagcctcttgttacgttttttttccttccattttaattccgaattgaaatagaaggtattatagcacgaagttcaagcatatattatgtacatgtttgtatgcaacttcaaattcatgaacacaaagaaggttctaaaatgagaagcttcaatctcaatcatgctctgctataacacattgattacatgtacacctagaaaccacaaattcaacattccaaatttgtacacactttgacaccaaatgagaaatgcaaactagggaaattttcatgcacactatgatgaagnnnnnnnnnnnnnnnnnnnnnnnacttggatgagcacacatcacatcagtttcgagagattgctactacggatagcatgattagtattatgaagagagcagcagcaatgtaagagccaatgagggaacccgaaatacgttcacagaagttgttgtattgtaggcagattgcaaaccaattggcacctgtgtttccattgtgtgcaatgtacactatggatgttgctgcaggtg

SEQ ID NO: 5034 - DNA, 1545 bp, Glycine max
tcgatcagctacgtaggccccccccccccaaattaaataaacaaacagaacaagagagagggcatcaccaaagaacacgttcactctcgattttgccttgcaaactgcgatttctctgcagtttcttctaccctccaactctgacctttctttacgcgattttggctttcatcaacttcttattgaaatccttcctcagtcttctcccattttccagagttcttaaaaattgatgcttccttacaagtctttctgagcattccgtttccttcctccagggaaaagttagcgtgtctttaggtcacaggattttgagagatttactttttaatctgcctctgaatcaattctgcaagaagatatataatgtttggttcaaagaaatctcctttgaaggttgctaaacctagctccgttgagtcttggacgaatccatttgattctaatgatgagggaatggataccaaaaagtatagttcctctagaaagacttcttcggagcgtgcacttactacactgggagttaacaccaacccctttgatgatggcactgatgccaataagaaatcttcatcaactttgtatggctttcaatctgccaactggaacaagtataagaatgatttccgtgattctggtggactagagaatcaatcggttcaagaattggagagttatgctgtttacaaggctgaagaaactacaaattcagtcacaaattgtttgaagatagcagagaacataagagaggaggctacccagacactagtcacccttcatcaacagggtgaacaaattaccaggagtcaccatgttgctgctgacatcgatcatgatctaactcggggagaaaagctcttgggaagccttggtggcctcttctccaaaacttggaaaccaaagaagacacgtgcaataaccggccctgttattgttggagatgatccagtcaggagaaagggtaatcacttggagcaaagagagaagttggggctgacttctgcacccaaagggcagtccaagctacggtccccacctcaagaaccaacaaatgcatttgaaaaagttgaggttgagaaaaataagcaagatgatgcactatcagatttaagtgatctgttgggagagcttaaaggcatggctgttgacatgggatccgagattgagaggcataacaaagccctgaatcatctctatgatgatgtggatgagttgaatttccgagtgataggtgctaaccaacgtggacgtcgtttgctcggaaaataagattgattgatttcatcgttgtgtttttctctttgtatccatcatctggtttaatgaagacaatcttttcatttagtttacacttgtgttgcattatatataaaatatgcaacagattaaacttgtcttggtgtcatactacataattcaatttgttcatttatcttgctggttttataagtagagcctctatcaagcaaaaaaaaaaaaaaaaaatgaactgtatctctgtgattgcgaaagtgctgaatgattaatacacagtttaatttttat

SEQ ID NO: 5035 - DNA, 1999 bp, Glycine max
tcagctacgtaggccccccccccgagaaaagatctagtgctcctcacacaccctatcatatcatatgaatgaatctgcactctctttgaaaactgtcacgctttcaccggcgtcggaaacatcgtccggttagggttccggctatcgctaagggcacggatcgtaaaatcttccagaagcttctatgctattactcagtattattaccatttgccaaggtgttgttaggcaccatttttatcacttgaagtcagtcagcaacaacttttctgcgaatttttcaggaatattttcgcctgaaaaagttggagcaaatgtctttgcaaaacaagggattttggatggtaaagggttctggacacattaatgacagagatacagtatttgataatcccaccaaaattgaaccaaaacgacctcatcaatggtttgttgatgctgctgaagtagatttttttccaaacaagaaacaagccgtagaagatgcagatgaaaaatctagtcctggattttcaaatgtaaatattcctccctgggagaacaatcccaattttcattcagtcccaaaccaatttattggccggttatttgggtctgaaaccaggcctgtcaatttcactgaaaagaatacttatgttttggctgatgattctaatgtgagatcaaagatggtcaccaatcaatatggagatgaagcatcttttggtttgtctatatctcattctattgaagattctgaagcatgtgtaaattttggtggaataaaaaaagtcaaagtaaatcaggttaaggaagttgatgtacaggctctggagggacataattttggtaggcagagtaatggtgatctacatcaggcctataacagggaagttgagacaaggtctgcatcaatagggcaagcctttgacaaggatcgtgatgccactttaatgggactcacctacagcagaggggatgcacatgtcagatcatttggtgcctcctttgtcaaaggtgatgactcaatcgtatcgattagtgaatcctataataaagaggacacaaatataatttcttttggtgggttcccagatgaaagggatattatctctgtgggtaggcctgctgcagagtatgatcaattatataatcaatcttcagttcatgtgtcaacaacagcccacgagaaagagttggatgtgtcaagttctgatgcagttgcaagtacacttcaggtagcaaaagttaagtctgaaactgtatccaagaataaacaagagctcaaaacagcaaagaaagaagctccaaacagcttcccttctaatgtcagaagcttgatatctactggtattcttgatggagttcctgtgaagtatgtctcagtgtcacgtgaggaacttcgaggaattataaaaggctctggttatctttgtgggtgtcagtcatgtaactatacaaaggttctgaatgcttacgagtttgagagacatgctggctgcaaaacaaaacatccaaacaatcacatttattttgagaatgggaagactatttatcaaatagtacaggaattgaggagtaccccagaaagtttgttgtttgatacaattcaaacagtttttggtgcaccaattaatcagaaagcatttcgcaactggaaagaatcatttcaagcagcaacacgggagcttcaacgcatttatggaaaggaagaacttaacctataagtcccaaccctttgtgaaaacgtaacttgggatagattctagtgtgcatagtaagatatgtctatttttaccattttcctgtgtcttttatatggctccgcaaccttcagtaatgtgctcctttggatgccttgcttaaaatattcgaagctttataagttagcttatgtacaaatcaatagtattaataggtgctttggtggacagaattatctatattacattatcgataaagctaatgttcttgtgcaatcaaacgagcaagacttctttctaaaaaaaaaaaaaaaaaa

SEQ ID NO: 5036 - DNA, 1699 bp, Glycine max
gtatgctccatattagcagcacttatgttacgttatgcgaaggtaccagtaaaaaggcagcaaggttgattccaagaagtcactggcttctgcaaatgatgtagcccaagagacattctctctggttagaactgtacgagtttatggaacagaagaagaagaacatggaaggtataagtggtggctggagaaattagctgacataagcttgcgacaaagtgctgcatatggagtttggaattttagctttaacattctttatcattcaactcaggttattgctgtgctatttggaggaatgtctattctagcacgtcatatcacagccgagaaacttaccaagtttatattatacagcgaatggttaatttattctacctggtgggtgggagacaatatatccaatttgatgcaatcaggtggggctagtgaaaaagtattccacttaatggatctcttaccgagcagccaattcatacaaagaggggtaacattgcagaggttaacagggcgtattgaggttctaaatgtatcttttcactatccttcaaggccaacggtatctgtagtgcaacatgtgaactttgctgtccatcctggtgaggtggttgcactagttggacttagtggtagtggaacaagccattggcgaatcttttgctgcgtctctattagcctacaaatgattttgatagatgatatccctcttaaagacttggacatcatgtggtggagagagagaattggatttgtgggccaggaacccaaactcttccggatggatattagttcaaacatcagatatggatgcacccgagatgtaaagcaggaggatattgaatgggctgcaaagcaggcctatgcccacaactttatctcagcacttcccaatggttatgaaacacttgttgatgatgatctgttaagtggaggacaaaagcagcgaattgctattgctagggcccttcttagggacccaaaaatattgatccttgatgaagccactagtgcactagatgctgaaagtgagcataatgttaagggtgttcttcgatctgttagaagtgattctgcaaccagaagtgtcatagtcattgcacataggctttctaccatacaagcagctgacaggattgtggtgatggatggtggggaaattgttgagatgggaagtcacagggaacttctcttaaaagatggtttgtatgcacggttaaccagaaaacaggctgatgccatggcatgatttgggtttctgtagcagatattctatttttcctctggcttctttttaaaggctgtaaagtgaggcagcaatttttttttcttgttgctgaccaatgtatttatagtgttatacaagaaaattggtgaagttctcagcaaagaaggaagctgcagaagttttggtttaaaatgcatagcggcttcagaaagatttcaccctacaggttctaaagcagatgcaaaagcatgtaactaggtcgttaggggtattcaatattcacagtcaagatgctgataagcatcagatgtactgtcatactgtagtcccagtgaccgtagtagactgttcattttatacatgtaatttaaatatttagctcttggaagacattctcgttgaagaatacctcctgcccatgtttgatggcactttatactcatgttaaagtctattaatataaattgagttttc

SEQ ID NO: 5037 - DNA, 2080 bp, Glycine max
ctcttcacccatcaaaaaaaatcttttccctttctctctagaatcttcctcatcccctaccttaaattgcttctaccctaagccccaagtaacgtttcactcattcacattcacacactcaatgaagggagttacagtgaaagttgaagaaacaatggcgtatgctaatgctgcttcaactagcccaacaacatcttcaaacctctccccgcaacccatggaagggttgcacgaggtgggtccccctccgtttctcaccaaaaccttcgacgtggtggaagacccatccaccaacgacatcgtttcgtggagcagatcccgcaacagtttcgtcgtttgggactctcacaagttctctaccaccatcctgcctcgctacttcaagcacaacaatttctccagcttcgtacgacaactcaacacctacggttttagaaaaattgatcctgacaagtgggagtttgcgaacgaagggtttttggcggggcagaggcaattgttgaagacgataaagaggaggaggcacgtgacagtgacacagacacagtcacacgagggaggaagtggggcttgtgttgaattgggggagtttgggttggaaggtgagatggagaggttgaggagagacaggacagtgttgatggctgaaattgtgaggttgagacaacaacagcacaactcgagggagcaattgttgtccatggagactaggttgcaagccactgagaagaaacatcaacagatgatgaattttctggctaaagcactcaacaaccaggcttttattcagcagtttcttcaaaggaatgctcagaacaaagagttgcaaggtgcgagaagaaagaggagactaactgctaccccaagtgtggagaatttgcagcaagatcatttcgctttgtcaattgaagaaggatcggctactattgagtcacagatggagtcttttttctcagctgcgtgtaatgatccgttagaatcaaacagtgaactcaaagacccaatattgagttcagttccagttgcaagtgggagtaatttgggggaggtgagtgattctgtttgggaggacttgctgaaccaagacttggttgctggggaccctgaagaggaagttgtgattggtgatttttcacaagttgatgttcctgtggaggatttgattgcggatgctgatgagtggagtgaggatttgcagaaccttgtggatcacatgggttatcttgggtccaaaccgtagtggaaaggaaggattttcattatctagggggttcagataaaactttcccctttgaaccgtggtggtattatttcataaggcttcattgtttttttgttgatatttgtcgtttgataatttctgtgattgtaattgatgtagaatattggatggttctatatgcagcagcgaagatggtaatactagttgaagaagtggtcgacagatattgcctcattatccgtatcctttgtaaagaatatgatgttttgtgaatagctgagtattcgttgtgctagtgatgatgctatttttactcttctgttgcccagtttataactacattgtacatttttgcagggtaggttactcaaaagcagatgttcaatggggtgtgatcgactgggaaaagaagtagtattagtctaatcataatttgttggattctcaaattttcagtgttgagggaggttgtagtaagatcatttgattgattcttgtacggtggctgattccatagtggaacatcaattaacaattctttgcttaccagtcatctcacctgatttaatagaggaataagcattcgtctcccttttcaacttttattttgttcaattatttgtaatcattgagttctgttgctctttctgttaaaaggttatgttgggtacttttttttttttttttttactgaatgttgggtaatttctgagatattactccatctctatctatgaacatttcaattcttctcattaccaagtcagtccttaagttcatgtaaaaaaaaaaaaaaaaaaaaaaaaaaaaaaaaaaaaaaaaaaaaaaaaaaaaaaaaacaaaaaaaaaaaaaaaaaa

SEQ ID NO: 5038 - DNA, 602 bp, Glycine max
ttctcgagccgaatcggctcgagcggctcgagacggctgcgagaagacgacagaagggggcctcaaggtgtgttcataaaaacgaaccacatagcatttctttttcactcttctctcttctattcagccactacctcacaccaccatgagtgccgagaaggtgaaactgactggcagattacgcctatttttcactaatgcaaaaccatacatcttaatgattggcttgcaatttggcatggctggaaattacatcttcggcaaggatgctcttaaccatggcatgagccgttttgtgttcattgtttaccgaaatgctatggctactattgcccttgctccttttgcattttttattgaaaggaaaagtaggcctaagatgacactcccagtctttctacaaataatagtccttggattccttgagccagtttttaaccaaagcttcaattacttggggatgaagtatacttcggcttcattcacatctactatagtgaatgctgtgccctctattacctttgtgcttgcagtcttcgtccggttggagcatctaagacttagggaggttcggagtcaagccaaagtgattggaacattag

SEQ ID NO: 5039 - DNA, 908 bp, Glycine max
  misc_feature (670)..(670): n is a, c, g, or t
  misc_feature (711)..(711): n is a, c, g, or t
  misc_feature (756)..(756): n is a, c, g, or t
  misc_feature (814)..(814): n is a, c, g, or t
  misc_feature (885)..(886): n is a, c, g, or t
attttcactgatgcaaaaccctaatccctttttctctctcaatgagcacagtaccctaaggtaaccacgagaagagatgcctctccaatagcactcggaaccccaaatccagtgccaattcttcaccctcccctccttttcgcagacgaaggcgcattctattctaacgttcacaagataggaaggcaagactaaagattccaccacctgatacaagctagaaaaccgaggtttgaaatggctgtgtcactgtggagaagtcgcactgcttcatctgcactgaacttgttcaccaatgctcttcgccatttctcttccgaggcaacaaactccagtcctcatagtacacgagagagtatgatgtattctgatataaactcacgaattgggagttgcatgccattgtctgcaatgcgcattggaacaatcattcacaacattgagttgaatccagggcaaggtggcaagctcgtccgagctgctggaactagtgcaaagatcttgaaagagcccacatcagcatactgtttaatccaactgccctcaggtgttaaaaagttgattgattctcgatgtagggccactgttggtgttgtgtctaatccaagccatggggatcgcaagcttaggaaggctggacacagccgatggcttggtcgaaggccagttngtccgaggagtggcaatgaatccagtagatcatcctcatgngtggagggagagggtaagaagcaagaagtggtggacgattttggngcgaggatctctcactccttggggcaagccaactaagagtggctacaagactggaccncggaagcgcagaaaggtagtaggatacaacattcactacgcacggttttgtctctgatgtttccttataannatgcttgtaagttgaaataatt

SEQ ID NO: 5040 - DNA, 1023 bp, Glycine max
  misc_feature (1003)..(1005): n is a, c, g, or t
aaccctacttctccttctctctctctctctctccatgagcacagtaccgtaacgtaacgtaaccacgagatgcctctattctagcacttggaaccccaaatccgtgccaattcctccgctccttttcgcagacgaaggcacattctgacgttcacaagattggaaggcaagactaaagattccaccacctgatacaagctagaaaacagaggtttgaaatggctgtgtcactgtggagaagtcgcactgcttcatcagcactgaacttgttcaacaatactcttcgctgtttctcttccgaggcaacaaactccagtcctcatagtacacgagagagtatgatgtattctgacataaactcacgaattgggagttgcatgccactgtctgcaatgcgcattggaacaatcattcacaacattgagttgaacccagggcaaggtggcaagctcgtccgagctgctggaactagtgcaaagatcttgaaagagcccacatcggcatactgtttaatccaactgccctcgggtgttaaaaagttgattgattctcgatgtagggccactgttggtgttgtatctaatcctagccatggggatcgcaaacttaggaaggccggacacagccgatggcttggtcgaagaccagttgtccgaggagtggcaatgaatccagtagatcatcctcatggtggaggagagggtaagagcaagagtggtggacgatttgggcgaggatctctcactccttggggcaagccaactaagagtggctacaagactggacccctgaagcgcaaaaggtagtaggataccatattcattatagctgtttctgatgtttccttatgagatgcttgtaagttgtaataattgtggaaactgtcattcctatttaggaaattcattgaactgattaggttcacagccaatttgtggattttatgggttcaaattttattgttgttaaagtaaaatgtttttgaaatgatcacattttcctnnnaaaaaaaaaaaaaaaaaa

SEQ ID NO: 5041 - DNA, 2062 bp, Glycine max
ttcttcttcgcgaaattcgtatgcgaagaaggaggtaggaattcacgctcctgcattctcagaccgttaggattccaattgtgcctaaatatatcttgtattctgcgaagaagaagctgagagaggttgaagatgggaggagatgattttgattggaatactgatgatgagcttgaaattgagaactataactcttcatcttcgtgtttaacccttcctaatggggatgctggagaggcaagctcgtctgcagttttggctaattccaaggtacttgaccacttcgtcaacatgggattttctagagaaatggtttctaaagtaattcaggaatatggtgaagaaaatgaagataaactacttgaagaacttctctcatacaaggctctggaaagttctccccaaccacagcagcgaattgagccagatccttgttcttcagagaatgcagggagctcttgggatgatttctctgatactgatattttttctgatgatgaagaaattgcaaaaactatgtctgagaatgatgataccttacggtctttggtgaaaatgggctacaaacaagaggaagctttagttgccatagaaagattaggcccaaatgcctcacttgaagaattggtagattttataggtgttgctcaaatggcaaaggctgaggatgctcttctgcctcctcaagaaaagttacaatacaatgactatgctaagtccaataaacgaagattatatgattatgaagtgctgggaaggaaaaagcctaggggatgtgagaagaaaatcctcaatgaagatgacgaggatgctgaagctcttcatcttccaaatccgatgattgggtttggtgtacctacagagtcaagcttcataacacacagaaggcttccagaagatgccattgggcctccttacttctattacgagaatgtagccttagcaccaaaaggtgtttggcaaacaatttcaagattcttgtatgatgttgaacctgagtttgtagattcgaagtttttctgtgctgcagccaggaaaaggggatatattcacaatctccccatccaaaataggttcccacttctaccacttccaccgcgcacaatacatgaggcttttcccctaacaaagaaatggtggccctcatgggatattaggaccaagcttaattgtttgcaaacatgtattggcagtgcaaaactaacagaaagaattaggaaagctgtagaaatctatgatgaagatccacctgaaagtgtacagaagtatgttcttcatcagtgtaggaaaatggaatttggttcgggtgggaaggtataaggttgctccattagagcctgatgaagtagaaacgctgctgggcttcccaaggaaccacaccagaggaggtggaataagtaggactgacagatacaagtcacttggtaattcattccaggttgacactgtggcataccacttgtcagttctgaaggagatgtatcctaatggtatcaatcttctttctctcttttctggaattggtggggcagaggtagctcttcatcggctcggcatccctctcaagaatgttgtgtctgttgaaaaatcagaagtgaataggaatattgttagaagttggtgggagcaaacaaatcagaaaggtaatctatatgacattgacgatgtaagggagctagacggtgatcgcttggagcagctgatgagcacatttggtggttttgatctaattgttggtggcagtccatgtaataatctggctggtagcaacagggtcagccgggatggactggagggaaaagaatcttctctcttctttgattactttaggattctagacttagtaaaaaatatgtcagctaaatatcgataaatttttgtccaaagaaacccctttctgcggttttgtctttcgtccaaataattaggatcttcgtatataaacctgaaacattagagacagatacttctcattccatttttattgccaaagaagggcaacgttttcaaataaaaaaattatcttaaaatttctgatttcaaactcgagactagttctctc

SEQ ID NO: 5042 - DNA, 1497 bp, Glycine max
ctattttggtgtaaaagccgaattcgccccccctcgtccctaccacatatctccccacccatgagcaatacgggcaaaatgtataattattgaacagcggaacatacgatgatcacccgccaccatgcctttgtccgctaaaattagttcgctgcaacgacaaatacaaaggttgcgtatcgtgctagtgctactactactacttgctgctactgtcactgcttgctacacctcactcttcagcttcggagattccctcactgataccggcaacttgtacttcatttcccctcgtcagagccccgattgcttgctccctccctacggacaaacccattttcatcgccccaatggacgatgctccgatggacgccttatcctcgatttcctcgccgagtctctggggcttccgtatgtgaaaccgtatctgggtttcaagaacggcgcggtgaaacgcgggaatattgagcagggagtgaattttgcggtggccggagccacggcgctggaccgcggtttctttgaagaaaaggggttcgctgttgatgtgaccgcaaacttttctctgggggttcagttagattggttcaaggaattgctgccttctctctgcaattcttcttcaagctgcaaaaaagttattggcagctccttatttattgtgggagagattggaggcaatgattatggctatcctttgtctgaaacaaccgcatttggagatcttgtgacttacataccccaagtaatatctgtaatcacttcagcaatcagggaattgattgatttaggggctgtaacgtttatggttcctggaagtttaccacttggatgcaatccagcctatttaacaatttttgcgactatagataaagaggagtatgaccaagctggctgtttgaaatggttaaatacgttctatgaataccacaatgagctgctccagattgaaataaatcggcttcgagtgctatatcctcttaccaatatcatttatgcagattatttcaacgctgcattggagttttacaattctccagaacaatttgggtttggtggaaatgttctcaaagtttgttgtggaggtgggggtccttacaattacaatgaaacggccatgtgtggggacgcaggagtggttgcttgtgatgatccttcacaatatgttagctgggatggctatcatttgaccgaggctgcttatagatggatgaccaaaggtttattagatgggccatacacaattcctaaatttaatgtctcgtgtttcataggtgaaaccatcagagattttaataactatgcaatgaaatataaatcaatgtaaaatatccacgtatttgatgaggtttaagtagtactccaataaggtgattttcactgcctcgtgcagttgtatctgtttaatgaatgaataatgcataacgttttttagctgcacctgtatgtaaaatgatgtttaatgaatagtatatgattgcatgctttagcataatt

SEQ ID NO: 5043 - DNA, 2567 bp, Glycine max
tcagtctccggcgccattgctattgtggacaaaacaagggcgagtcggttcggcttatcgtcttcgtcttcctctgcgtccagcatgagagtgaccaacacgcccgccagcgacctcgccctcaccaacctcgccttctgttccccctccgatctccgcaatttcgccgtccccggccacaacaacctctacctcgccgccgtcgccgattccttcgtcttatctctctctgctcatgacaccataggcagcggccagattgcgttgaatgccgttcaacgccggtgtgccaaagtttcttccggcgattccgtgcaagtgagccgatttgtgccccctgaagacttcaacctcgcactgctaactcttgatttggaatttgttaaaaaggggagtaagagtgagcagattgatgctgttctactggctaagcaacttcggaagagatttatgaaccaggttatgactgtggggcagaaagtattatttgagtatcacggaaataattatagctttactgtcagtaatgctgctgttgagggccaagaaaagtctaattctcttgaaagagggatgatttcagatgacacatacattgtttttgaaacatcacgtgatagtggaattaagattgtcaatcaacgtgagggtgccactagcaacattttcaagcagaaagaatttaaccttcagtcactgggtattggtggcctgagtgcacaatttgcagatatattatgaagagcttttgtctctcgtgttttcccaccccatgtgacatctaagaatcaagcatgtgaagggcatgcttctttatgggcctcctggaactggaaagacacttatggcacgccaaattggaaaaattttgaatgggaaggaacccaagattgtaaatggccctgaagtcttgagcaaatttgttggtgaaactgaaaagaatgtgagagacctttttgctgatgctgaacaggatcagaggacccgaggggatgaaagtgatttgcatgttataatctttgatgaaattgatgctatttgcaagtcaagaggttcaactcgagatggtactggagttcatgatagtattgtaaatcagcttcttactaagatagatggtgtggagtcactaaataatgttttacttattggaatgactaacagaaaggacatgcttgatgaagctctcttaagaccagggaggttggaagtccaggttgagataagccttcctgatgaaaatggtcgattgcaaattcttcaaattcatactaacaaaatgaaagagaattcttttctagctgctgatgtgaaccttcaagagcttgctgctcgaacgaaaaactacagtggtgcagaacttgaaggtgttgtgaaaagtgctgtctcatatgctttaaatagacaattgagtctagaggatctcactaagccagtggaggaagagaacattaaggttacaatggatgactttttgaatgcactccacgaagttacttccgcatttggagcttcaactgatgatcttgaaagatgcagactccatggcatggttgagtgtggtgatcgacataagcacatttatcaaagagcaatgctacttgtggagcaagttaaagtgagtaaaggaagcccacttgtcacttgtctccttgaaggttcccgtggaagtggtaaaactgcactttcagctactgttggtattgacagtgacttcccatatgtcaagatagtttcagctgaatcaatgattggtctacatgagagcaccaaatgtgcacagattattaaggtttttgaggatgcatacaaatcaccattgagtgtcatcattcttgatgacattgagagattattggagtatgtgcccattggtcctcgattttcaaacttgatttctcagacactgctggttctgctcaaacggcttcctccaaaggggaaaaaactcatggttattggcacaacaagtgaactagatttcttggaatcaattggattttgtgataccttctctgttacttaccatattcctaccttgaacacaacggatgcaaagaaggtcctagaacagttgaatgtgtttactgatgaagatattgattctgctgcagaggcgttgaatgatatgcctatcaggaaactatacatgttgatcgagatggcagcgcaaggggagcatggtggatctgcagaagccatcttttctggcaaagagaagattagtatcgctcacttctatgattgcctccaggatgttgttaggttataagttgttgtattaagcgctttctaagttagagtgcatataatccttattgagttgaaatctttttttaacagttcattacattgcttgttacggttcagttacagagatttttttgaatcagtgtttgtttggttgtgctgatagtaattttgagaggaggcaggggtttcgtagtctcatgttttatctttagggctacgacttagttggaaattggaattgtgacctttattcgggattcatcatttatccaaacgtacgtctcatattgaggtatatcgaactcctttctttt

SEQ ID NO: 5044 - DNA, 1457 bp, Glycine max
  misc_feature (1337)..(1341): n is a, c, g, or t
  misc_feature (1414)..(1418): n is a, c, g, or t
aagtcctaagagattcttaacctctctctctctctctctttctctatggcatctgcgacgcgtctggtgcactgcgagctgcgctcggcgaggcccgcggttcggccgagggaaccggccggtccggttcaggttacgatccccaaacccaaacccaaagcggcggaggcggaaggcgcgaacatcgttttgcagccgcggttgtgcactctcagatcctacggttcggatcgagccggggtgcttatcaagactcgcaaggagggtgaccatgatgacgtgtcacccttcttcgccgcgctttccgactatattgagagctctaagaaaagtcaagattttgagatcatctctggtcgtctagctatgatggtgtttgcagcgacggtgacaatggaagtggtgacagggaactctgtgttcagaaagatggatattgaaggaatcacagaggctggtggggtgtgtttgggtgcagtaacttgcgcagcactctttgcatggttctgcagtgcccgaaacagagttggtagaatcttcaccgtaagctgcaacgcattcattgactctgtaattgaccaaatcatcgatggtttgttctatgaaggcgaccctactgattggcctgatgaaccgtgatcattaagtatatataattcttaccatctttgcagatttaatgtgtctaaaaatcatagacacagttagaagatgcaatactaataatatttataaatatataggcagaggaagaatagcaaaattgatgccatcccgatgcagaagaaaaaatagtaacaaaaataaatgatgaagcatcatagatgttgaacctaaatggatactgtaaacgattgttttcactttcttaagaagcactcttagatgatgaaatatgttttatttacatgggtttatcaaacccctctaattatgtgagctaccgttttcaattctatgttatggtaatatatcattcttgcaagtactaactgtatagaatttgcttttaccaaagaggctctcatgtttctcataaaataatggaaagttgaatgatcaaatatcatgagtgattatgaacaagaaacagcttaaaattgtaatttgtaagttcctaaccctttggttatactatattttgatgtcttggctcaaaaccgttaaatgtggaactatgctgcattttcgattacccgaatgcactccagtacgcttgccttctttgccatcgctgccattaaggcttcatgagtcaccttgttgtttttcaagatagaagcagcaaacagaaccgcccatcttgtgagtctttggcacaaaagggctacatttannnnnggtacttatcaaactgtaaacatagatagtatttgaaaacatactgcccatcttgtgagattttgttgctgannnnngctgaggggtggcttggttctgttaataaatctctgcag

SEQ ID NO: 5045 - DNA, 1253 bp, Glycine max
  misc_feature (1139)..(1139): n is a, c, g, or t
cggtccggattcccccgtcgacccacgcgtccgggaaaagcgtgtggtgtcttcttctccggtggatcctcaggcctgtaatttgggattagccactcatgaatcaaaatcaatccattaaatcaaaatacctttctcactgttaactcatcaacaatacctaatttttttggttctttttttcacacttacacatattggctttctcttcctcgtacatataaaaggaagaagcaaagcatctttttcttttttcagtattcacgcctctgcccgcttaattttacttctcaactctctctattcctcgagccatagttggcgacccaccatggcaccagatactactgccttaagttattggttgaattggaggttcttcctctgtgcactatttattttattaactatgggcctagcgtcatttttgatatggaagtatgaagaattcaataaatcaaggaatgagagaagagaaaggcagcgagaaacggctggatcgctttatgagtatgaagcatggaatacatgtcttaaaggaattcatcctgcttggctgcttgcttacaggataatttcttttcttgtgcttttttctttgctgactgccaatgtggttgctgatggaggtggcatattttatttctacactcagtggacatttactttggtcactatttactttgggcttgggtcttgtgtctccatatatgggtgtcgctataaacacaataaaattgattgcaccactgttaatcgtgctgatttagatactgaagaaggcacttatgtggctcctacacttgatgggactccagaattacctaacctgtacaagaattccaatgccaatcaggagccattcactcggaatactgctggtgtatggggttatatttttcaaataacttttcagacttgtgcaggtgctgtagtgctcactgacgttgtattctggcttgtcctttatccaacatatctgaacaccaaagatttccatctgcattttatggatgtttgtttgcactcccttaacgctgtattcctcctcggtgatgcatcattgaattgcatgaggtttccagtgtttcgatttgcatattttattttgtggacggctttatttgtgatttttcagntggatcattcatgctttgtgtttcattatggtggccctatcctttccttgacttgtcatccccatacgcccccttatgggtacttggtgtgggtgtaatgcacatttcatgcta

SEQ ID NO: 5046 - DNA, 1093 bp, Glycine max
aaaagatgcgagcacagacggtgatgacacagtggtgcacaagagcagcagcgtgtgggcaattgaggatgagcactaacactaacactcccaaacacgacgatatcgacgccattttcaaacaaaagcgctttcttcgaacgcaggtcagaaaaaccctcaagtccatcgatccctccctcaaatcccaccaagataacaccgttcaagacatagttttgggagctccgtggttcagatccagtcgcaggttgtgcgcgtacataagctgcgctgctcttcgcgaagtcgacacttcaaaaatcttgtcacagattttgcaacataatagtactactgatggaaaaaaactttatgtgccacgcgtggaggataagaatagtcacatgcgtatgcttcacatatcgcgaattgatgatctcattgcaaactcaatggacatactagagcctactccggttgatgctgatggaaatgcgcgtgaagatgttatgcaggcaaatgatccagttgatttgttccttttacctggactggcatttgacagatctggaagacgtttaggtcgtggtggaggttactatgataccttcctgaagaattaccaagaccttgcaaagacgcgtaattggaagcaacccttgcttggtgcactgtcatattctgaacaaatactggatgaaggagtaataccaatgacttcatctgatcttccagttgatgctctggtatctccggaaggtgtgattcccatcagtaaaactgccttaaacagcatggatctctgacactgacactggacttcaaagctgatcttgaacacttacaatagtgtatctcaataaaattttgtggtttcctttagtgtacggcgctaaaggattgggatctggggttttgtgtagcaagtaaaggataaccaattcatcaagtgacactggactgccttgaattattgcatccactatccttgaccaattggaagtccccatactcgatcattcatatttaaatacagtatgcattctgtaataactgtgaagtttgaagttaactttcctaaagcacatgtgtttcagcaagaatggctatg

SEQ ID NO: 5047 - DNA, 2016 bp, Glycine max
ggctcgtgattaatctatacatattgtttttgtccacaacatgtatccaatccaataatttcccaaggaaggagatgaagaattgacgataggccaaagttgacgacatgtgtcatgtccatggccttatactatgttcaaatgatcctcttgttcccttgccctccatttttaccttcaacaattttctggttatctcccttacactttgcaacctctgattgaaccaaacgttatctttcttcatcatcgtctcatacacacatacataccctttagaaagttcttcatactcttccagaagcagaaaaaagtgcctttttttttttacttctttacttgaagctttctgtgttgtgctgccatggccgtgacacagttcaaccccacttgctcaaaaactcatcttcactcatctcagctcccttttctatcgaggactcttcctagacatcgccactgcactattgcgccacttcatagaactcaacaagctaggatttgttgttctgttgccccaaatgaagtgcaggtgccagctgtgaaaacctcggatcccaagagtaagcctgagtgctatggtgtcttctgccttacctatgatttgagggctgaagaagagacaagatcctggaagaaattaattaacattgcagtctcaggtgctgctggaatgattgcaaatcatctacttttcaagcttgcatctggtgaagtttttggcccagatcaacctattgctctcaaattattgggatcagaaaggtcaatccaagctcttgaaggtgttgcaatggaattggaggactctttgtttcctttgttgagggaggttagtattggtatcgatccttatgaagtgttccaagatgcagaatgggctttgctaataggtgcaaaacctcgaggacctggaatggaacgagcagacttgttagacataaatgggcagatttatgcagcgcagggaagagcattaaatgccgttgcatcccgcaatgtcaaagttatagtagtgggaaacccttgcaatacaaatgcattaatttgcttgaagaatgctcctaacattcctgccaaaaattttcatgctttaactcgtttagatgagaacagagcaaaatgtcagctagccctcaaggcaggtgtgttctatgataaagtgtcaaatgtgacgatatggggcaaccactcaactactcaggtccccgacttcttaaatgctagaattgatggtttgccagtcaaagaggtggttaaggatcagaagtggttggaggaagagttcactgaaaaggttcaaaagagaggtggtgcacttattcaaaaatggggaagatcatcagctgcatcaacttctgtgtcaattgttgatgccataagatctttagtaactcctactcccgagggtgattggttttcttctggtgtatatagcgatggaaatccttatggaatagctgaaggtattgttttcagtatgccatgccgatcaaagggtgatggcgattatgaacttgtcaaggatgtcatatttgatgactacctccagcagcgaatagctaagacggaagctgagttgttggccgagaagagatgtgtggctcacctaacaggcgagggaattgctgtttgtgatctacctggtgataccatgctccctggagaaatgtaacaagcctaaatctcctgaataccaaagcagatattgaaataggtcctgccaacttgtgtcttaaaggtactagttagggaatcaataaataaaatgtttttattcagaatcacggtagggtacgttggtaaatgttgtattttttcctaaaaacttctcacttttgattccttaactagtgtcttaaggtactgttagcattctattattgaaataagatcacacaaatttatgtagaataatggctgttaatggatatgaatgcgaaaataaaaaaaatagaaataataaaagtatgaaatcagtcatttgattttgaaatactaaaaaaaaaaaaaaaa

SEQ ID NO: 5048 - DNA, 2178 bp, Glycine max
gtacgcaagcaagcagcccgggggaagcagatgctgttgtttcagtattgggtgaaatggatgcatggatactttgtccctttttccttcaaggaggtcgttacactattgaagacgtacgctatgttgatgattctgatacgcttgttcctgcaggggacactgagtttgccaaagatgcttcctttggctacaaatcttcaaacctgcgtgattgggtagaggaaaaaacagatggccaaatacttggaagtagtgttgcatctatttctatccaacttttgaggaaaggtggtccagatgcagtttgtcagcatctatgcagtttgcagaaggggtcaatatgcatagttaatgcagctagtgaaagagacatgactgtattttcacttggaatgatcaaggcagaattgatgggaaaacgtttcttgtgtcgcactgctgctagttttgtttctgcccttatgggaatcatctctaagcctccaatattgccaaatgatattggaatagctagagaaaggaatggtggtttgatagttgtgggatcatatgttccaaaaacaacaaagcaggttgaagagctcaaattacagtgtggtcagttcttaaaaagcattgaggtatcagttgaaaaacttgcaatgagtcctattgaggagatggaggaggaaatcagtagagcagctgaattagcagatgtatatcttaaagctcataaagatactctaataatgaccagccgaaatctcataactggaaaaactgccgctgagagtttggacattaactttaaagtgagctctgctttggtggaaatagtgaaaagaataactacaaaacctcgctatataattgcaaagggtggtattacgtcttcagatcttgctacaaaagcccttggtgcaagatgtgcgaaaatagttggtcaagcacttgctggtattcccttgtggcaattaggccctgaaagtagacaccctggagttccttacattgtcttcccaggtaatgttggtaacagcacagcattggcagaagttgtaaagtcctggactagtccaatcagacttacatcaacaaaagaaattcttaataatgcagaaaagggtggatatgctgttggagcatttaatgtatataatttggaaggagttgaggctgttgtatctgctgcagaggaagaacaaagtcctgctatattacagatccatccaggtgccttgaagcaaggaggaattcccttggttgcttgttgcatttctgctgcagagcaagccagtgttcccattactgttcactttgatcatggaacttcaaagcaggatcttgtggaagctcttgacctgggattcagttctgtgatggttgatggctcacatctttctttcaatgaaaatgctgcatacacaaaattcataacattactggctcacccaaaaaatatgttggttgaagctgagctaggaagattgtcagggacagaagatgatttgactgtagaagaatatgaagccagactaacagatgttactatggcatcaaaattcattgatgagactggcatagatgctttggcagtgtgtattggtaacgtgcatggaaagtaccctgcaagtggtccaaatctgagatttgatctgcttaaggagctgcatgctttgagcctgaagaaaggaatttttctggtgcttcatggtgcatctggtttgagcaaagaacttgttaagacgtgcatacatcttggtgttagaaagttcaatgtcaacaccgaggtaagaaaagcatacatggactcccttgttacccccaagaacgatctagttcatgttatggcctctgcaaaggaagccatgaaagttgtggttgcagaaaagatgcatctctttggttcagcaggaagggcataattcctacaaatttactagctaggattattggtgactatcaacttcttattattttgctattatgttgtcttgtagtaaggaatatcactgcctcatgaattcattatttccttcagttcaatagatggtttctgaatttcttatttacttgccttgtccttgagggcaaaggtttccaacggtgatttttattttgtagaatcccaaaatccccgttacagttttatgataattttttgaatagatccccatgagtgttttttttttt

SEQ ID NO: 5049 - DNA, 2493 bp, Glycine max
ctgcagaagggtgatgattacaacactgttccctcaaatctccagaaaatgtttcactacaacacaaagttcgctatggttctcactatctttatcttcatgttctgtttgcgctgttcaacgagtgccaaaagtaacaagaacaactgcgagcgcagctgcggagaacattccctgcaatacccttttggcttctcttctgactgcgaagtcaaactaaattgcagcaaagagaacaaagtcaagatcggtgatttagaggttcagagtgtgacctctgatggcatattcgttagtcttccggtgcagtgcaaccgcaacgtgagtttcttagaccctctctttcgacacaactttgctccctcgtggagcaacacctttctggtgcagagctgcgagtccaacctcagtggctgcgttattcccacatcgagtttcgctggcggccgcaacaaggtggagggctgtgaccgcgaaagtgaagatcttcattgcttcacgcagatgcggaagagtaagagtaatggctccagagaagatgatgacgtgctcatgcgcctagattgggagcgagttggttgtaaattcttgttctctgctcttgcttttgataggagtaaagtgaaggagctctcgctccaatttcagatggttgagttggggtggtggcttgaaggaaactgtagttgctccaacaatgcatcctgcacggaggtgaatcatggtggaggaaaactgggcttccggtgccgctgcgatgaaggtttcgtcggagacggattcaaggacggcgatggttgccggagagtttctgaatgcaaagcttcaacactatggtctggcggatgtaggaaagcagtcaaaattggtgtctttgttggagggatcatagttggagctatccttgtggctgctctgtctcttgtatgttactttaataggcgtcgttcctcttggctgagaaaacaagtaacagtaaagcgcctattacgcgaagctgcaggagactcaactgtccctctatatccctacaaagaaatagaaagagccacaagttttttctctgaaaaacataggctgggaactggagctttcggcacagtttatgctggacaccttcacaatgatgagtgtgttgctataaaaaagatcaagtatagagacaccaacagtgttgaccaagtcatgaatgagatcaggctcctttcttcggtgagtcacccgaatttggtgcgcctcttaggttgctgcatagaagggggagagcagatacttgtttatgagtacatgccaaatggaacactatctcaacatttgcaaagagagaggggtggagtacttccatggacaataagactcaccattgctactgaaaccgctaatgctatagcatatctccattccgcaaatgatcatccaatttatcatagagacataaaatccagcaacatactcttggattataattttcaatcaaaagtggcagattttgggctttctaggcttggcatgtcagaaacatcacatatttcgaccgccccacaagggaccccgggctatgttgatcctcaataccaccagaacttccacctttctgataaaagtgacgtctacagttttggagtggttttggtagagataataacagccatgaaagtggttgatttcgcacggcctcagagtgaaatcaacttggctgcacttgctgttgataggatcaggaagggttgcatagatgacatcattgatcccttccttgagccacatagggatgcttggacgctctattctattaacaaggtggctgagcttgcatttagatgccttgcttttcatagtgacatgaggcctaccatgattgaagtggctgaggagctagatcttatcaggcgcagtgggtgggcgaccatggaggaaaccatatgcatggcttcttcggttgggtccgtgtgttcatcgcctcgaaatggaagtgttaattcacttagaggtgttagttttgagagagctgcaggacttgggagtgagacattgattgttccccacaagactgatgtttttttgcaatcaattgaggaggtgaaggacagctctcctgtgtctgtgcatgatagttggttaagtggaactagctcaccttcaacaaatagcttgttaggacatgtagttcagtgacatatatacttattttgggtggaacacctattatttgaatggcaaaggtcattaatgttttccttttctcttttgtagttgtaggatataaccattttggtgtatgattggcaccaggattctgctttcgtttttctctctgaatcgtactaactcatccaaggcagttaattatgtttgaccaatcctaagtaattaataaacagaattcactattctttgttcccacagaaagtgatatatgaagagctaccatgtacaattgttgctggaaataaccaacgcctgagcctatagctatcttgtttgtatttgttt

SEQ ID NO: 5050 - DNA, 2042 bp, Glycine max
gggcccggccccccccccggtcagctacgtaggccccccccccatacatcttttggcatccaaatcatctgaaatggctagtgctgatgacatcagtggtaaactgaaaagcagttcagacttggttctgtccaaacaagatgaaaaagtagaaaaatctgataaaaatgggctttctgatattgagcagctggttcaagggaagaaattctctagagttgaatttgatcgtttagtggcggtactaaattcaagggtgatggacctttctaatgttgaacaaggaaaggaaattacaaatttgagttctaggaaagatgatgaggggcttgcgatgacacgtggacttccgaaagtttcaaatgagcaaaggcttgaagagtcaactggggccatatggggaacctcaacacctcttggtctgtcaaagggtcaggatgaaattggtgcttcaccaatagagattgctagagcatatatggattcccgtgcattagaagcaggtccctgttctaagaacatgattcatactgttgaaagcactatgttgcatggtgatgaagctgcaataaaaccatatgatccatcaccatcaaagaaatcgtcaacatgttggccgggtgctgtggtgcaggatgcttacataacgccacaaagtcagaggaacagatatggacttcataacttcccccgtactccttattccagaactcttttaacaaagtccaagtccaagttgattcgtatgaaaggagatagcagccacatttcatcaactcctgtccttcactcacagactactatgtatccgcaggataaatctaaagctggagcatcagaaagtggaaatggatctgttggacctattcgtcgaactaggcataaggttggtgcacaattttcttcaagaagagtggcttattcatctctgtatggcccttcacagagacaaagttctggtgttattgaaggtttcactcctgttgcaaagaggacggaacctgttgggacaagctgcactcataagccactaggccttgaggtgggtgttccaacagtacacatgcatagcagtttgatggctatgaagatattagaccatattgatagaaacactcccacacctaaagagaaatctgctgagctcaagctggcaacgaaatggaagaaccctgaatcttctattgatttcagtactatctggtcaaatgaagataatggtttgcttaaattagatgatgttagcccttataaatatgatgggcttgaaggaaagaaatctactctatggaatgaaggtaaggggaagtgccatattgatatgcaacctaaggaggagagtactgataaatctatcgatgtcagaaaagtaggaaatcgggcatctgatgtgaatgctaatagcagcatccctagacttggtaacaatgcaagcactacgcaaaattttggtggtcctcacattttttctatgaagtcttctaaagaggatgctatgaagacaactctcctaagtggtggtcatcctttaggggtaaatcaagaacagaagcttctcactaaccctgctaccattaaaccagctttacctcctatttcgatcaagaagcctgaatcaagatggacgttagcaactgacactggttccggatttacctttcctgtttcagcatccacttctgtattctctgagccaccaactccatccatcacgcctttgctttctgcccgggatcagcaccaattaaaagaaggatctactgaactgtcatacagttttggtttgaaaaagtccagtccagcagtagttttttccttcccttctactagcaatactgctattgagaatgaagttggagacataaagtttaactttggttcaactaagaagccaaggatatcgttctcatttggaaaaaatgctgtctgctcttaaaaataaaatgacaacaatgttccaaacgctatccaactttgtttagttctgattattgtatttttagcctttaaaaaaaaaaaaaaataaaaaaaaaaaaaaaaaa

SEQ ID NO: 5051 - DNA, 1545 bp, Glycine max
ccacgcgtccgcggacgcgtgggatttacacccaccttttattctctctctctctctccttttcttcctctttacttctacactaaatatatcattttccccaccccccatttctttgttgccagttcaggaaaacaaataaagttctcctttgaaacttctctgggctatgttattttgaaagaagttacttcgcatcaataatgggttcaggtgattggtttaagacaataattagcttaagaaaatcaaaagaaggcagatcaaagaaagcaaagggtatcttaactcaagagaaactaaatgcatcaaagtcaaacaattatccaggaaaagaatccagtggtttaacaaatggtattaaaagtgaaaaccttgtgtcagctggggtgtcagttgaaactattgctgcaacaaggatccagactgcatttcgagcttataaggctagaaaagctttacgtcgcatgaaaggatttacaaaactgaagatcctaacagaaggcttttctgttaaaaagcaagctagtacagctgtaacataccttcattcatggagcaagatacaagctgagattagagctcgtcgaatctgtatggtaacagaagacaggatcaggaggaagaaactagagtctcaactaaaactggaggcaaagcttcatgatctggaggttgaatggtgtggtggttctgaaaccatggaggaaatccttggaaggatacatcacagggaagaagcagcagttaagcgcgaaagagccatggcatatgctttttcccatcagtggagggccaactctagtcagaaccaactgcttggtaattatgaacttagcaaagctaattggggttggagctggaaggaatgctggattgctgctcgtccatgggaaagccgtatccctagcttatccgtcaccccggagaaagctcaacataagcagccaagcccaagcaaagttcagaaggataagaacacatcaacaccaaaaactcccgtctcatttaaacctccttcagccaatgcaaaagggactcctccctcggccaacgcaaaaggcacttcaaaagctaggagattgtcttatccaacaactgagaaaactctggtccaaagagtgcaatgagtcctcagcatggtttgctaagacagcacaatttttaagtataaagcctttttggataattcgaattgaactgagtcaaattgattttcaattggttacagtccataaaaaggcaactaaaaagccaacttatttatttattgattgcttccaatttgtgcatatgagcgtgactgaaattcaagccactgcagagaatgtgttaacagacctgcttgtgggtgtgatttgttgatgcttctgtttattatctttttcaatcttgtacattcaaattcaaggaagagacagattgtagataggacaatatatctattttttcctcttctctgctgtaatagaaaatttccaagatgtgatcaagttgttgacttcgccaaaaaaaaaaaaaaaaatattgagcgggcccgtccac

SEQ ID NO: 5052 - DNA, 1026 bp, Glycine max
agctcgagccgttctctctgtattcatatttccttcctctttacttctatgctgatattattgtcccccacttccttttttttcatccagaaatcttgttgcccaagtgagggaaaaagggttgccttggacacttctcaccttgttctctgggttatgttaatttgaaagaagctacgtggcatcaagaatgggttcaggtgattggtttaagacaataattagctcaagaaaatcaaaagaaggcagatcaaagaaattaaagactaagatttatacaagaaaaaagtccaatggtttagcaaatggaatgaaaagcgaaaatctagagtcagatggggtatcagttgaaactattgctgcaacaaggatccaaacagcattccgagcttataaggctagaaaatatttacaccgcttgagaggattcacaaaactgaagatccagactcaaggttcctctgctaaaaaacaagccgttaccactataacttatcttcattcatggagcaagatacaggctgagattagagctcgtcgtatatgtatggttacagaagacagaatcaggcggaagataatacattctcaactaaaacttgaggccaagattcatgacctggaggtaacttgtaaagctaacaggttttcagtgatggtattctggactttttcttttcaaactgatgccagtttgctaatcactctttctactacaatgattatgtgtggtttcattggtttctctgttttaaatatgcatttgtgtcattatttcaaatttctatgtctttctaggtgattagtaaatgcatataactattgaaacggtgtcatgggatgggtctcccatatgagtcagcttcacttctgaggtctaatatcctatagtttggcgtttagacattggaggcatgcgcaaaaaagcaaataatctctcctttgtataaaatctttagacatcaaacatgccctttaccaggtatgtcacctttccctcatttcctcttgctgaatcttcatatc

SEQ ID NO: 5053 - DNA, 2700 bp, Glycine max
gttgcgagatacacactcactcatagcataagaagtatcgcctccatcacttgggagtttggctttttccttttttaacaacaaaaccccaatcgcttccctttgccttctactccctacaacaaacaacaacaactactcctttttccctttcgtattctcttctctttcattgacgatctccacgaagttctttcacctcaaacacacccttaattacatcgcattctcttcctctttctcttaccgtttgaattagattgcacctactcctctctctttcactcttctttttctggatcttcaacttctccctgattttgctgatttgggggattgagttggaaggggaaacatggctgcttcttctgcatctctttctggtgcttctgcttcggatcttctgaggagttcaaccagcggtttcaatggtgttcctttgagaaccttggggaagggaaagttggttttgaagaggagggactttacagttgctgctaaactgaggaaggtgaagaagcatgaatatccttggcctcctaaccctgatcccaatgtgaaaggtggagtgctgagccacctttccatgttcaagccactcaaggagaaaccaaagcctgtcactttggattttgaaaagcctcttgttgatctgcaaaagaagatcattgatgtacaaaagatggcgaacgaaactggactggacttcagtgatcagattctctcattggagaccaagtaccagcaggctttaaaggatctgtatacgcatctgactcctattcagcgggtcaacatcgcacggcaccctaacaggccaactttccttgatcatgtctttaacataactgaaaagtttgttgaactccatggtgatcgggcaggttatgatgatcctgctattgttactggtctagggactatagatggtagaagctacatgttcatcggtcaccaaaagggtagaaatactaaagaaaacattcagcgtaactttgggatgccaactcctcatggttacaggaaggcccttcgcttgatggaatatgcagatcatcatgggttccccatagttactttcattgacacgcctggggcatatgctgaccttaaatcagaggaactaggacagggtgaagcgattgctcacaatttgagatccatgtttggtctgaaggtgccagttatatctatagttattggagaaggtggttcaggtggcgccctagccattggatgtgctaataaattactcatgcttgaaaatgctgttttttatgttgccagtccagaggcatgtgcagcaatcttgtggaagacagctaaagcttctccaaaggctgctgagaaattgaagattacagccactgaactgtgcaaattacaaattgcagatggtgttatacctgagccacttggtggtgcacatgcagatccagagtggacctctcaacagataaaaaaggctatcaaagaaaccatggatgagctcatgaagatgaacacagaagaactgttaaaacatcgcatgcttaagttcagaaagattggtggattccaggaaggtattcctatagatcctaagagaaaagccaacatgaagaagagggatctatctattgctaagatttctgatgctgaactagaagttgaggttgagaaactgaagcaacaggttttggaagctaaggaatcttctcctgttcctccaaaactagatctggatgagatgctaaagcaactgacaagggaggttgatctagaatactctgaggcagttaaagccacgggcttgacagacagtttgttgaaactaagggaggaagtttcaaaagcaaatgcagataatcaaattgttgatccattgctgaaggataagatagaaaagctaagggtggagtttgaacagcaactgcgtgcagctcccaattatggtaggctgcagaataagtttacctatctgagcgaattatgtaaagttaagcttctgtcagatgcaaacaaggacaatgaggctgtcacatttaagcaagagttggagaaaaaagttgataatgccttgagtaatccaaaaataagggaaacatttgaagcattaaaggctgaaattaaaggtgctggtgcatcctcagcaagtgatttggatgacgagttgaagaagaaaatcgttgagtttatgatagaactaaaagaagtaaaagaagtaaaagaggtaatagaaaatcaaattgaaagtttggttaactcatcggatgatattaagaacaaggtactgcaattgaaattggaggttcctaaggctggagagacgcctgattcagaatcaaagagtagaattggtgattttatatttagaacatcatctagaattattatggccatacttcttagagacatgtttggtaattttaaggagataccgtgttaatggtggccaatattttttctataatcttccaatagaggaccagtaggggggaataaaattgaaaaccattttgtatttgtttgagtcacaatgttgcagttatatttagaatgacttcttatgttcttttcttttcatgttcattttgctcttttttaatcatttaaaatgttcaatttctccctaaatagacttagatgaacattgtataaattgtttgagtttgaggaaccgagtaataaaatgacgcttggtgctgtaatgttatttgc

SEQ ID NO: 5054 - DNA, 1066 bp, Glycine max
caagagcggttctgtgtcgtgccaaagaacccatggcgctatctcccccccccaaaccaaatcgagatgatgaatatgcaagaattgaggctgctggaggcaaggtgatacaatggaatggccaccgagtatttggtgttctagcaatgtcaaggtctattggtgataggtatttgaaaccatggattattccggaccccgaggtgacgtttcttcctcgtgcaaaagatgatgagtgcctcattctggccagtgatggcctgtgggatgtcatgaccaacgaagaggtgtgtgacattgctcggcggcgcttacttctctggcacaagaaaaatggcttggcactgccctcagaaaggggagagggaattgatcctgctgctcaagcagctgcagactacctatcgaaccgtgctcttcagaaaggaagcaaagacaacatcactgtaattgtggtggatttgaaagctcaaaggaaatttaagagcaagacatgactgtttcttcaactgcatctgggtgttggaagatgatggaaaactgaatatgatccagtttagtttttttgcccataaatttttcatatgggcatcagaatagcaccctgtacaatacatccacctctccctagaactctctcaactgattaagagtctccttgtacactgccacattgtggccatgtaaatctttgctgcttttgtcggtaggtataggaggtcagttccatgcctatctgtcaccaccatattgtattcattattatgcctccgagaacaaaggctctgtgaggtatttacttcatattgctttaacatgtgttgtttataaaaaaagtagtagctaattggcattgtggtttacaagttgtgatccaccccttctaataatgtagcaaagcaattctctatttgaagcttactcttgaaatttatgtcggtggtggattgatatcattggttatgactcaattccagtggttgtactgcaataatgatggtagggccaattatggacaaggttgcttaagaaaaatctcagctatcttttttgtttacaccaaccc

SEQ ID NO: 5055 - DNA, 1429 bp, Glycine max
ctttttcataagcatcaactaacgtaaaatcttctgccccaccctgcatttcagcagagtgattctgttcactacaatgccatcatcactatcctctttcctccatatggttcctattctctcccttcttgtactctcatgtgtgatttgttctagtagtgctcagggaccaccttcacctggctactaccccagttccaaaattagtcctgttagtttttatcaagggtttagaaacctatggggacctcagcatcagaggctagaccaaggctcattgacaatctggcttgactctaactcaggaagtggattcaagtcacttcactcttatcgatctggttacttcggtgctgccattaagcttcaacctggttacactgcaggagtcattacatcattatatctttcaaacaaccaagaccaccccggaaaccatgatgaaattgacattgagttccttggcaccactccagataaaccatatgtcttgcagacaaatgtatacataagaggaagtggagatgggaatattattggaagggagatgaagtttcatctttggtttgacccaacacaggattttcacaactatggcattctatggaaacccagtgagataatattttttgtggatgatgtccccataaggaggtatcctaggaaaagtgaagcaacatacccctcaaggtcaatgtatgtgtacgggtcaatatgggatgcatcttcttgggcaacagaggatggaaaatacaaagctaattataattaccaacccttcgttggtaggtacaaaaacttcaaactgcaaggttgcactagtgaaagctctgcctcgtgcaagccaccttctttctccccatctggctttggtagcctcagtcctcagcagtttagggccatgcaatgggtccaaaacaactacatggtctacaattattgccatgaccctaggagagaccacactcttatcccagagtgctaagctctagttcgtttcaaaactccttcagaagaaagaaatcgcctctaagatatcaaagctataattattaacttctgaagatcacattccagatgtgcaaaaatcacgtccgaaacgtgaaatcaattaagctatgatgttggtgtgcctcaattctaagttgccctatacactttgcatatttgaattgtaaaatggttttgattattcaggtggaggtggtttttgtgatggtcccacttgctaagggtaattgcaagagtagttgaacgtccaagccactccaatgattggaatgtttttgttgtttatgtaattgtgttgtagtattgtttgggtcctgtcttactgttcaaataaattgattcggatgctttcctcaaaaaaaaaaaaaaaatgaaaagtgacattgaaaaaaaaggaatgctccccttaaaacaaaac

SEQ ID NO: 5056 - DNA, 2909 bp, Glycine max
cggaattcccgggtcgaccccgcgtccggtcgtctgggagagggggagatggaagacggggaagcacccggtcatcttcgctcttgcaaatgtggcgagagattgaagatgaacatgtggtgaatcaagttcaaggaagatctggtgaagtacctcttgaacaaaggagggatgggttggttgcggacctttcacgagaagatagactggatatccaagaaagagggcagcgacatgttatagaagataccgttttgggtgagaatgaatctgaaacatggtcacagtcgcaaagtcagaatgaatcccatgatggtaacgaggacttaaacaattccagctgtgagaactcttctgacttgggagaagttgaaagggaaagagtgaggcaaattttcagggaatggatgaatagtggcgctagggatcatgcatcaaacatttctggaagaaataacggttcaaggggagaatggcttggggaaaccgagcaggaaagggtgagagttattagggagtgggtacaaatgagtagccagcagagaagtgtttcctctggggaaaacagggaagaaccatctgctgaaattgacacgcatattgaacgtgtgcgtgatggactcgttgttaaccagattgggggccaaactgagcatacacggaggggcatacgtaaattatgtggccgacaagctatgcttgatatgcttaagaaggctgagagagaaaggcaaagagaaattcaggagttgttgaaccatcaggccgtgtcacaattcccctatcgaaatcgcattcaggcattgcttagaggcagattcttgagaaatgatagacctgttgataataacaagcccctttctgttgcagaaagtgaattgggcttcttgaggcgaagacaaactgtatcaggtctaagggaaggatttttctgtagaaaggagaacagtggttgcagtcaagcaaccagcaatgcagatacctcatctaatgttgaaattgattttaatacaaatgaacaaatgggatcaagcagggcgccggtagtcccgggtcgaccccccgtccggtctgaccctaatcacagaggaagcaatagacttggggtatcaggcagccagaactgcgtacgaggtaccgcgtgtgagaatttggattggcaagaatctactgctcaagcagatcagttgcagcatttgccaattgaatcactagattgtcaatcatcattcagcgctttgtgttgaaagaggggacaaccctgagcaaaatgttgatgtgatgccaactgaagatgctgctaatgaaattacccaacaaagcttgcgaattgaagattcagagcatagtaataatcaagaattcagtgaggtgcataatgagccgtctgagctgggtggtataaataatagtcaaaacaattcttcaaattacaacattcatatggaggataatgttgttgatgatgtaaattggaatgaatctggtgctctagaaggagaacagccagaagaagtttttgaaaatgaaggaagtgagtggtatcagaataataccgaatggagaaatagcactgaggaaaatgtcgatgataatcagctcagcaatacagcaaatgagtggcctgacaacagtttggcaaacgaggatggagaaaactctcgtctgcaagaatctcatgaagtgtggcaagaagatggtggcttccaagaggctgtggaaaattggttgggaggaccttctgatcatgaaagtgctccagttggtagaattcgtggattttattttcctgaagatgacaacgtgtacagtgttgaactcagggaacttcttaataggagaagtgtctctaacctccttcgcagcagttttcgtgagagtcttgatcagttgatacagtcatatgttgaaaggcaaggtcatgctaacattgactgggaatttcaagaaacaactccttcttctgcctcagtagagcaggaccttgagcagcatagtagggatcaaattgtcggccaggaggaggttactgttagtccacttaacctgccctctttacctataccacctcctctgcctatttgggaccagcaccaccatcgtgacaactggtcacagaatgacataaataatcagcgtctagtaatcgattgggagattattaatgacttgagaattgacatggctcgattacagcaaaggatgaataacatgcagagaatgctggaggcttgtatggatatgcagcttgagttgcagcgatctataaggcaagaagtttctgcagccctaaatcgctctgctggttcatcaggaatacatgattgcgagtcaccagaagataaatctaaatgggaatgtgtgagaaagggactttgctgcatatgctgtgaaagcaatatcgattctttgttgtacagatgtggtcatttgtgtacatgttcaaaatgtgcgaatgagttgcttcaaagcagaaggaagtgcccaatgtgtcaagctcctgtggtggaggtgatacgtgcttattctatacaataatttgacattaatataaaggtcacacttttaacaaaatacaggattctaacaaattttatctcccggacgtttccaggtactctttttcgtatttttttatatatatatttcttactgtgattactgtatttatgtcgagtgcaccaatggaacacatgatggcatttttttggggccatgattctcatatgaataaaaaatgtatgtcgtttatgaagtttcagttttgctccttgtgcgcgtggggatagagattttcgtcattttaattctaggtagctagatggtgccatggtggttataaactcttggagatgaaaactgtctctgcattatttttgtgtttgtaatgttgctctgaagttttaaac

SEQ ID NO: 5057 - DNA, 720 bp, Glycine max
cgagaagacgacagaaggggagggtaaataaacaaaagactgatagataaacggtgaattgcgagattaaacgacaccactgaagcgaagaaaggggcgtacggttctgttgtggttggagatccgaattttgattatcgaatcgcaaaattctgaatcaatcaatcaatcaatcagtaatcagagccatcaacgactgcaatggtctgcgagaagtgtgagaagaaattatcgaaggtgatagtaccagacaagtggaaagaaggggccagcaatactaccgagggtggtggccgcaagatcaacgagaacaagcttctctccaagaaaaacagatggaccccttacggaaacactaagtgcaccatttgcaagcagcaagtgcaccagaatgctaagtactgccacacctgtgcttactctaaaggagtttgtgcaatgtgtggcaagcaagttcttgataccaagttttacaagcaaagcaatgtgtaatggatactcgtgttgtattgggtgccgtgtcttcttttagatgcatggtagcattgcctttctttccatttgtctagttgatcctattgctaactatgtgaagctgtaaagaacaaatacagcgagggattttcagttatctgtcttttgtaatatacttacatgtttattctagatccaaaacatatactatggcgtgaaaattccggttccaaaaaaaaaaaaaaa

SEQ ID NO: 5058 - DNA, 2070 bp, Glycine max
tcagctacgtaggcccccccccccccccccccggcgaaataacaggtggagaatcttgtcctgtcgtcaaaacttattagtatcagtcggtcacatggatctacgaagcaacaacaacaatggactacttcactcttcttagttagttagcctcttcatttcattttcttctttcctcaaaaagactcaacacacccctgttttatgctctctttctgtcacttgtgtttatccaagcacaccaaaaacagagaaaatgaggatggattatttgaagcaaaagtttcccttcaaccacagaaacctcttcctcaaattgctcctcacaatcttcttcataggcctcgctttccgcatcctcttcttccactccctgtcccctcagatttcccctgttttggaatccccatttcctgagaaagtgacattaccagaacctcagacttcaactgttccagaagaagaacatgttcccgaacctccacctgttatagaacatgtttccgaacccccacctgttctcgaacatgttccccaaactgaagatcaactgtctcccactgactcagagaaatgtgattactttaatggggattggatcccgaacccgtcgggtccagtttacactaatgacagctgcgacctcattgaatctcatcaaaattgcttgaagaatgggaggcctgacagagactttctgtattggaggtgggctcccagagagtgtgatttgcctcagtttgatccaaagaggtttctcaacttgatgcggaacaaagcctgggcactcattggtgattccatttcccgcaaccatgtgcaatcgctggtctgcattctttccaaggtggaaaaacctgccttagtctaccatgacgaggaatacaagtgcaaaagatggaactttccctcgtacaacttaagtttgtcagttatttggtcaccattccttgtggaagctgctatttttgaagacataaatggtgtttcgagttctgaagttgagctacatcttgacagactggatagtaaatggacagatcagtacctcgattttgattacattattatttcaaccgggaaatggtttctcaaatctgcaatttactatgagaatgaaactatattgggctgccactcctgtcctaagaggaacctgacagagctggggtttaactttgcttatcgcaaagccttgaaatttgtgatgaacttcatagtgacttccaatcacaaagggttgatttttttcaggacattcacaccagatcattttgagaatggggaatggtttagtgggggaacttgcaacagaacagcaccaattaaagaaggtgaaatggaaatgaaatatttgaacaagatgcttcgtgaaattgagttagaggagtttggaaaggcagcttctgaagcttcaaaaaatggggtgaattttaagcttgtggattttgcttcactttcacagttgagacctgatgggcatcctggtccatacaggcaatttcatccatttgaaaaggacccaaatgctaaagttcagaatgattgtctgcattggtgcttacctgggccaatagactcttggaatgatataataatggatatggttgtcaatgggtaagaaaaagaaagacagttaaaagccccatacagttgtgtatattgagtgaattgttactctctgtataccatgattcttgatattcatatttatacggatggacaatggagattggaggcaaataaattaaatgtagcagaaaggattctaaatatcagcttacagctaattttggtatggaagtgcattggcatggaaatctgtttctttgtctccttttctgtttttggtgcttgtataacgcgccatccgtggttattttaggcaactatagtctatagttctatctttttccattttcttgcaatatatttgatgagttgtgtcgtgttacacagctataaaaatgtaatttaattagttttgaggatggttggataagataaaatgtcagggattatttatacttaattcaatgaatatgttaaaatcaaaaaaaaaaaaaaaaa

SEQ ID NO: 5059 - DNA, 770 bp, Glycine max
atattcatactacaatctcattcttacatatccttcaaacacaagcttctcctgtttccaaagccaaaaaatgtcaaccaccattgatgttcctgaatcaagcaatgttgctaaaggcaaagcagttttagctgccccaccaaggccaggagggtggaagaaaggggtagcaataatggactttattctaaggttaggtgccatagcagctgctcttggtgctgcagccactatgggaaccagtgatcaaacactccctttcttcactcagttctttcagtttgaggctagttatgatagcttcacttctttccagtttttcgttattacaatggctttagtgggtggctacttggtgctatccctacctttctctttcgtagccatcattcgcccccatgcagctggaccaaggcttttcttgattatcttagacactgtgtttctgactttggccactgctagtggtgcttcagctgctgccatagtttacttggcacacaatgggaaccaagactcgaactggcttgccatatgcaaccaatttggagacttctgtgcacagaccagttcagcagtggtgtcatccttcgttgctgtggttgtcttggtgttgttggttgttatgtctgctttgtctcttgggaagcgttgagaattaacatgcttattgcttggggctttgacttaattatctgtgtattattcctcaggttttgaggtttccatcaagttaatgaattgtgttctagtattgatttgggaaaaaa

SEQ ID NO: 5060 - DNA, 1584 bp, Glycine max
tcagctacgtaggccccccccccccttttcttcctcattttattaataatagaagttctgattttctctcaaattctcagaaatcctctcttcttgggctttatcatgtttctcaagtcaacatggtattagagccttgacatttactgatataaaaaaagaaaagccttgacattcaacatgacttgaacatctattccttctgaattgagggaactcgttttctctcaccttctatttcatttcttcactttctaagtttctatcaaattttcccggattttctcagatgatattttccagaaatacagatttctctctcattttttcttgctcagttccattccccatcaaactcaaaatcagaaatattatcattgataaaacaaggaaaaaaaattgagaatccatctagctttatatacgagagtccaagtgtccaactaaccactaaccatctatctaattacttaactaactataaccaactaaatcaatctctataaataaataaaaaaataaaaaactaaatcaatctctaatatctgtaatattgttcactaatcacagctaattcaattcccatgcaaagctggtatgacatttgattctatcagatagaaacaaatattccactgtaataatgcaggatcttggatccaatcttatttggtaagtacccaaaagagatggagatgattctaggaaccaccttacctaaattttccagtaatgacaaagcaaaactgaggcaaggactggatttcattggcataaatcactatgcaagttattatgtacgagactgcatatcatcagtgtgtgaatctgggccaggagtttccacaacagagggtttatatcaacgaactacaatcggagagcttactccgtttgattggctcagtgtttacccactaggcatgaagagtattcttatgtatctaaaagacagatataataacactccaatgttcattaccgaaaatggatatggcaatttgtatgatccagatcttaccgaggaagaatatcttaatgattttaagagaatagagttcatgtctggtcacttagataatctaatggctgcaataagggaaggagcagatgtgagaggttactttgcctggtctttgctcgacaactttgagtggctatatgggttttcagtgagatttggacttcaccacgtagatttttccacgctgaagagaactccaaaattatcagcaatttggtacgagcatttcattgaaaactataaactaactgatagcattgtgcccgaacatggcagagaaaagggaatctggaacaagccaactacccaactcagaaccttagtaagtccagagcctagaatgaataacttggattaatttgcaatgaaataccatatgctttctcttttgaatctttatatttgatccaccacttttcggacttgaacaagattgttaacgacaactaagtcctttcaatcgttcttagcattttttagtgtataaattatactaattatgattaaaatgttatataaattatattgtaaatttaaaatagaaaaaaaaaaaaaaaaaa

SEQ ID NO: 5061 - DNA, 2102 bp, Glycine max
  misc_feature (2083)..(2083): n is a, c, g, or t
ggctcgagttcccattcagctaggtaccccccaaaccggaatttctctctcttcggcacaaggtctaggtttttcactttcttcctccattctcgttccgtcacaacccaaccatggaaacccccgaaaacgccgcatactgttcgtcgtggctgccgccggaagacgaaaacgacagtggcgccaaattggcaaaatcggtgaacaaactcaacgacctcgccgttgcgatacaagccttcaataacaggtacgaagaattgcagaaacacctcgaattcatcgaacaagccattgacacgaggaccaaggagctccgagcactaggctacaattctactcaaggaaccgccgaaaacggcgtcgttcaatcagattcaaatccgaagccagaagaagccaaggcggtagagaaagagaaagaaaaggtaaaagaagaagaaaaagaaaaagaagacgagcttattacgctttgcaaaacgatgaatagccgaggcctgcgtaaatacgtgttaacgcgtctatccgaaacggcgtcgcttcgggaacaggtacccgttgcgctgaggagcgcggcgaagccctcaaggctggtgtttgaatgcattgggaggtttttccttcaggggagcaaagcttacacgaagaactcgccgatggttcccgcaaggcaggtttcggtgctggttttggagcactacttgctctctggctgcgttgggaatgagaaggacgtggaggcttcgttgaagagggaggcggattccgccgcggttgcgtggaggaagaggatgtttgttgaagggggtttgctgaaggcagctgaggttgatgccaggggtttgattctcttcgtcgccggcttcgggattcccagtgttttcaaggatgaggatatatacaacttggtttgtgtcagcaatggcagagaattctccgatgccctgctccagtctcagcccctgcttaagagggtttcagatgttgcagatgggatgatgaaaaagggcatggccgttaaagctgttgatttggcttatacctttgggtttgaagagaaatattctcctcagacagctctgacttcatttctgcagaagtctgaagaaacttggaagaaagccaaacaagacgcacgtgattttcctagtgcactgaaggtagcacatgaaaaatatttggctgctttgcaatctgtagttaaatgtttggaaggtcacaagattgaccctgtaaaatttctgcctgggtggcaacttaagaataagattaccaacttggagaaagatattagtgataccaataaaaaaattgatgagaagtcaatgctcaagagaaaagtggataaaaacaattcatctaacaagatgaagattccagaggctaaacgagcaaggttcaccgggaaagatgcatctgtgctatcaccttcacttgctaccttgcaagagcaaaggatttttagtcgcatggatggcaatagctcatatgatggttcattgtcggcacatttgctggatggtagatcctatggcaattacccgaataattatctcactgcagcatctgcttcggattctttggctgaaaaatatcttggaagtgcagtggcaagtggggctaatatgcttggaggagctatgggtggttcattttctgggtatcagggggatatgtatagatatcatggaattggggaaggggcattgtctcatgataggtcagttggacagagttttgtgggacaatctgcatcaacattgaataatttgtatgggaaaacatccacagaaggttttgcaggtgtgccagagcacctctctgttggtgcttctagtcgcagtggaggttctgatttatatggctttgctgatgctgtttttgatatgtagtcattccagggaagcagttctcctaattattggtgtttgatcagctgggaagcatgtgttttgatcatcctcaacaattttttacctgcccatgggaatgcagaattgtatgatgttaaattttatttctcaacatgcattaatatttatagggatagccataggattgaatatcatctacatggctttgntaaaaaaaaaaaaaaaaaa

SEQ ID NO: 5062 - DNA, 1122 bp, Glycine max
aattggcaccagaccaaatcgggaatcttcactagacctatgtcagaagaatccttagctgctggcagtgaaaacaaggatgaagttgaaaaatctttgcattatttatcaaaccaaattgataatcccacgcgcccccccacgcggccgggggaatttccctctggtattcaattaccaaatgcttcagtaaaaagagtttcacagggaaaaaggaagttactagtcaatggatcagaagatctcttatatagtagcaatatagcctttcaaattgcagcatctataaaacgagcacaatcatgtgacaaggttgtcgatgattccaaaccagcaagagtctgtgaaaaggagaatgattcatctcctaaaattattgcagaaaagctagtagcttctttagatccaactgtgaaaaattctgatttgtctatcagggcttgcaatggacatatcaatttttatgcttctagtaagcaagtgtccctgaacagaagtgttcaaaatgctccagttcctaaaatttctagaatgaagcatgacagtggaggaaattgtttgattggtcaggtaaaaaggcgaaagcttgagatccgtttaaacagatccagttttgatccagaagaatttgctttgtacagaagatatcagctcaaagtacataatgataaaccacaaaatgtcacagagaactcatatcgtaggtttttggttgatactccattaatacaagtttctcccactggtgatagcacagttcctccttgtggttttggctctttccatcaacaatatctaatagacggccagttagtggcagttggtgttatagatatccttcctaaatgtttgtcaagtaaatatttgttctgggatccagactttccctttctatcactaggcaactactcaacttttcaacaaatagatttactaaaaaaaaaccaggtttatgttgctattctacagtactataatctggactactatattcactgttacagcggggatacatacaggacgtcatatcgtccgtgagagcttttatgccctcttggctatcagagggttccatttaacattacatagcgtcgacttgacataaaagcttatattggctta

SEQ ID NO: 5063 - DNA, 1648 bp, Glycine max
cggctcgagactctatatatcggcatcgatggataaccaatgatacgtcgtcgttttgccccccagaacctctgaagaagaagaaatggcgagtagcagcagcaacactccgaaggaaagcgttgttgtcgactgcggaaggcgtcgaacctcttgcggctattgcagatcctctcgtcacaatagcatctctcatggcatgtgggcacatagccttactgtggatgactaccaagatcttcttgatcgtggctggagaaggtctggatgttttctttataaaccagagatggaaaggacatgctgcccttcttatacaattcgcttgaaagcaagtgactttgttccttctaaggagcaacttcgtgtatctagacgaatgcaaaggtaaaaaggcaaaagcttgagatccgtttaaacagatccagttttgatccagaagaatttgctttgtacagaagatatcagctcaaagtacataatgataaaccacaaaatgtcacagagaactcatatcgtaggtttttggttgatactccattaatacaagtttctcccactggtgatagcacagttcctccttgtggttttggctctttccatcaacaatatctaatagacggccagttagtggcagttggtgttatagatatccttcctaaatgtttgtcaagtaaatatttgttctgggatccagactttgcctttctatcactaggcaagtactcggcttttcaagaaataggttgggtgaaagaaaaccaggtttattgtcctagtctacaatactattatcttggctactatattcactcttgcagcaagatgagatacaaagctgcatatcgtccttcagagcttttatgccctcttcgctatcagtgggttccatttgacattgcaaggcctctgcttgacagaaaaccttatgttgtcttatcagattcttccattttacaaaatggagagtcatccctacctcaaactacggaagatgtaatgagaaggggttttgatgatgttggccaagaagatgcaaatgatgttccaatgcttgatgatgaagaaatggttgagtctgaatcagaatgctctgatgatgaacctgacctagaaaccacttcagatgatgatccagaaattgctgatgtcagcaaggttttgctagggataaagggatctcatgtgaaatacaaggatctgcgggttgtctttggtcctgagcagcagagttacttggagtcacaattgcggagatacaggaaggttgtgggtccattgctatccgagcgaatcgtctattcgctcggataatataaatattagtacttgagtagttgagtttaataagatgctactgctaatcttcccagaaaaaaaaaaaaaaaaccctgcaaataagattcatgtattcttctgttggatggtctgatgttggcaatagcaattgtgtgaaccttgaagtttttttataatcaactttcccatgcatttgcatatatggaattcagtgttgtatttcttttctggcgttagttgcttaaatgtggaacacaatggatgtcttgaggtgttagtaacttctaaatttcagcagtttttagtttccttaatcaatgttatgcttcatgaaagcagaggcataaga

SEQ ID NO: 5064 - DNA, 672 bp, Glycine max
atatttaacccacgcctccggtcatatttttttttatttataaaacctaataggcgtttacatttctatttgccattgatttcagcaaatatggaatctgaagcactgatatggggtgacaaactcatactgaagggattgtcattccatggttttcatggagcactaccggaagaaaggaagctaggccagaagttcgtggtagatgttgatgcatggatggatctgaaagcagctggcaaatctgatcacttatcagatacaattagttacacagatatatatgatatagctaaggaaattcttgaagggtcacctcaaaaccttctggagtcagtggcacaaaaaattgcagtgactactctgacaaatcataagcaaatatctgctgttcgagtgaaggttgaaaagcctcatgtggcagttcaaggtccacttgattacttaggcgttgagatacttagacgcagaagcgatttgtcagaatagaaatttcatagttttgttctctctggtttttgttgctctcattctgatttgtattgtttgttttcattgaatgtttcttcttgccattcagtttgatacatcgtcaagttccatttgatataaaggtaactctttccctgagtacacaaaaaaatttcaaaaaaaaaaaaaaaaaaaaaaaaa

SEQ ID NO: 5065 - DNA, 1121 bp, Glycine max
cgtacgcacgctccgaatgctcgtagttcggctcgggattcatatgcatataaaactcaaccgagtccacaagccttacaactgtagaagccgatccagtgtgttggcagcgaaagggtgagacaagaggcttcacctgtaatcagacaattgtggtcaatgcgagagtcataccattacaatgcaagtaaatgaaggacacaacagaccttgctcagacccatttttacagtggagtaaatggcagttgcttgattctcttttacctactggtggatttgctcattcttttggcctcgaagcaacagttcagtcccacttagtgtctaattccaatgaccttaagacatttgttatccatatattggagaatacaggaagcttactccttccttttgtgtactcagcttccatgttacccaatttggaaacttggcataagcttgacaaaatattggatgctaccctaactaatgaagtgggtcgaaaggcatcaatctcgcaaggatctgcattaatgagggtggcttcagctgtgttttccgaggttccctccctcaaaaccatgagagatgcttctctgggtttagagactgtatcttttcatcatgctcctgtatttggacttatatgtggagcactaggatttgatagaactagttctcagagagcttacatgttcatcacaatgagagatgtgatttctgctgctacaaggctaaatttgataggaccccttggtgcagcattgctgcagcatcgggttgctcctattgctgaagttatattagaaaaatggatgaatcgagttgttgaggaagcttgccaaactatgcctttgctagatactgtgcagggctgccatggttacttgttttcaagattgttttcatcctagaaggcaaaatgtggatattgcacttaatattttgatgcatgtaaaaagtttgtttgtaatagtgatgtgcttaagtttttgagttttctaacttcaatgatgccctctcttcattttgctgcagattatgtgatatgttttagaccgaactaattggtacattcattttgtgtactatttgttatagtgtttgcattgttggcttgttcaaaaagaaaaaaaa

SEQ ID NO: 5066 - DNA, 1710 bp, Glycine max
tcgagtcagctacgtaggccccccccccgaaaataaaaaaagagaaaagctacaagagaagaaaaaaaaaaagagagaaaagaaaaaatttgttttataactttttaacttattgttcacttcttcttcttcttcttcttcaatatcttggttctttgatattattctattgagcaaaaaatgggagttccagagagagaccctcttgcacaattgagtttgcctcctgggtttaggttttaccccacagatgaggagcttttggttcagtacctttgccgcaaggttgctggccatcatttctctcttccaatcattgctgaagttgatttgtacaagtttgatccatgggttcttccaggtaaggcagtgtttggagagaaggagtggtacttttttagcccaagagacaggaagtacccgaatggttcacgaccaaacagagtcgcgggttctgggtattggaaagcaactggaacagacaagatcatcaccactgaaggtagaaaagttggcataaaaaaagcacttgttttctacattggcaaagcacccaaaggctccaaaaccaattggatcatgcacgagtatcgccttctcgattcttcccgcaaacacaacctcggaaccgcaaagcttgatgattgggttctatgtcgtatctataagaagaactcaagttcacaaaaggttgaggctaattttttggctatggaatgcagcaatgggtcatcaccttcttcatcgtcccacgtggatgacatgctgggatcgttgccggagataaatgaccggtgcttcaccctgccacgagtgaactcactcagaacaatgcaccagcaggatgagaaattcgggtctccgaacatgggatccgggtttttctcggattgggttaactcgaccgatctcgattcgatttccgaattcgagtcgggttgccaaacccaaagaatggtgaattatgattgcaatgacttttttgttccttctctgccgcccttgggccatgtggactacatggtggatgcacctttggaggaggaggttcaaagtggtgtgagaacccgacgggtcgacgggccggggcattttcaaccgaatccagatacccgattgttaccgggctcaggtgacccattcgggtttgggtttattatgggtcagcaagttgggttcggggttagggagtgaagtgaaggatcagaaagtgtaattgtgtaaataattggggattttagtttaatttgaattctatgaccattgttatggtttgtgttattgattcccgcttggaaaggaaaaattgcaattttggtcatacttttcggctagaacaagatgaaggacggttgacacattatgaaactgagaaaggacgcaatggtgattgcaccacaaccacaacaatgcatgctgaaaagtaattgctttgtaagacattattgcctaaacatgaatcacgttgtacttcaaagcattaatacatagcaactattttccaaagtttagtttagaactttagatattggtatttttatttggctagtgtcccatgcatccttgtagacaacctgattaacatgtaatgaagatatgtccaccatttgctataaagttgtcttgcctcgctgattgtgaaaaaagtgagatcaacgtgtgaaatgaaccctccattttatgtatgaaacaaatggatttggattgatt

SEQ ID NO: 5067 - DNA, 1687 bp, Glycine max
tcgatcagctacgtaggcccccccccccaattaaaaaaagagaaaagcaactagagaaaaaaaaaaagagaagaaaaaaaaacttggttttatcttctttgttattattatattcacttcttcaatatcttggttctttgatattattattcgattgagcaaaaaatgggagttccagagagagaccctcttgcacaattgagcttgcctcctggatttagattttatcccactgatgaggagcttttggttcagtacctttgccgcaaggttgctggccatcatttctctcttccaatcattgctgaagttgatttgtacaagtttgatccatgggttcttccaggtaaggcagcgtttggagagaaggagtggtacttcttcagtccaagagacaggaagtacccgaatggttcacgaccaaacagagttgcgggttctgggtattggaaagccactggaactgacaaaatcatcaccactgaaggtagaaaagttggcataaaaaaagcacttgttttctacgttggcaaagcacccaaaggctccaaaaccaattggatcatgcacgagtatcgccttctcgactcttcccgcaaacacaacctcggaaccgcaaagcttgatgattgggttctgtgtcgtatctataagaagaactcaagtgcgcaaaaggttgaggcaaatcttttggctatggaatgtagcaatgggtcatcaccttcttcatcgtcccacgtggacgacatgctggaatcgttgccggagatcgatgatcggtgcttcaccctgccgcgagtgaactcagtcagaacaatgcagcagcaggacgagaaattcggatttcagaacatgggatccgggtttttcaccgattgggtcaacccgacggatcttgattcagtttccgaatttgggtcgggttgccaaacccaagggatggtgaattatgattgtaatgacttatttgtcccttctgtgccgcccttcggccacagccatgtaaactacatggtgggggcaccaccgtccgaggaggaggttcaaagcggtgtgaggactcaacaggccgatggggccgcatgttttcagcagaacccaaatgcccgattgttaccgggctcgggcgacccatttgggtttgggttcatcatgggtcagcaagttgagttcgggtttagggactgaaggatctgatagtgttgttctgtaaataattggggattttaatttaaattctatgctcattgttatggaaaattgcaattttggtcattcttttcggctagacacatacaatgaatcggtatgaaactgagcaaggatgacccaatggtgctttcaccacagcaccgcatgctgaaaaattaattgctttgcaagacattattgggctaaatatgaatcacgttgtacttcaaagcattacatagcaactattttccaaatttaagtttagtttagagcattagatattgatatttttatgtggttggtgtcccatgcatccttgtagacaacctgatcaacaagcaatgaaccagctgtaaaattgtctagccttgctgattgtgaaaaaagtgagatccacgtgtgaagtgaacccccgtttaatgtgttaaataaatgggtttggattgattagttgaaaaaagttttcaactatgaaaaaaaaaaaaaaaaaagc

SEQ ID NO: 5068 - DNA, 898 bp, Glycine max
tgctgtaacaccaatgaatgatgttaacaatgattcagctcaagatactctaggttctgcagacagagttcctgtagaagataaagaagatggtaaaaatgatttgataggagagaaaagtaatgatgtggctgcagaaacaaaggcagttgagccagaacctccagtttatgcaaataagatggaggctaaagatgcattcaaagcactcttggagtctgtaaatgttggatctgactggacttgggatcggtccatgcgtttaataattaatgataaaaggtatggtgccttaaaaacacttgttgaaaggaagcaagctttcaatgagtacttaaatcagaggaaaaaacaagaagccgaagaaaagcgtatgaaacagaaaaaagcccgggaggattttaaaaaaatgttagaagaatccacggacttgacttcatccactagatggagcaaagcagtgtctatatttgaaaatgatgaacgtttcaaggctgttgaacgtgacagagatcgcagggatatgtttgaaagcttcttggaggaacttctaaacaaggaacgagcaaaggtacaggaggaacggaagcgaaatataatggaatacaggaagtttttggaatcttgtgactttataaaggctagtacacagtggcgaaaagttcaagatcgcttagaggctgatgaaagatgttctcgtcttgaaaaaattgatcgcttggaaatattccaggactatttacgtgatttagaaaaggaagaggaagagcagaagaagatacaaaaggaagaagtgagaaagacagaacgtaaaaaccgtgaggaattccgcaaattgatgggagaacatatcgcttcaggcattcttacagcaaaaactcactggcgtgattattat

SEQ ID NO: 5069 - DNA, 1675 bp, Glycine max
gagagagagagagaactagtctcgagttttctgcttttggttttttgtctttctttcaacagtgtatttttagggttcacctctaccccttgctgatgtttattttatttttgttaaataaaacttcagtttcgattctaaattgttgccggctccagcaacctctgccaatctttaatgggtgtgattgatttctacaacactggtgctttgtgctgggttaagtccaacgccaatctgaagcagcaagtgggtttggcaccaagacccatttgttcatttgaggggaataatcagaggaagtttgtggcaatggcttctaccgttcctgtggagcaagtcaacaatggccccctgcaggtgacaggtgactccttcatcagagagcatctgaggaagttggctccttatcagcccattttgccctttgaggttttatcagctcgccttggacgtaagcctgaggatatcgtgaagttagatgctaatgaaaatccttatggtccccctccagaggtcatggaagccctaggatcaatgcaattcccatatgtctatcctgacccagagagccgcagattgcgcgcagctcttgcccatgattcaggccttgaagctgaatatattcttgcagggtgtggtgcagatgagcttattgatttgatcatgcgttgtgtgctggatcctggagacaagattgtggactgccctccgaccttcacaatgtatgaatttgatgctgcggttaatggagcacttgttatcaaagttccaaggaggccagatttcagcttgaatgttgaacaaattgctgaagttgttaaacaagagaagcccaaatgcatatttttaacatctccaaataatccagatggaagtataattgatgacgaagttctcttaaaaatactcgagcttcctatattggtgatactggatgaagcatacattgagttttcagcaattgaatcaaggatgagttgggtgaagaaacatgataatttgattgttcttcggacatttagcaaaagagctggtttagctggacttcgagtgggatatggagcttttcctttgagtataattgagtatctttggagagcaaagcagccgtataatgtatctgttgctgctgaaatttctgcatgtgcagcattgcaaaatcctacctatctagagaatgtaaaaaatgctttgttgaaagaaagagggagactttatgaccttttgaaagaagttccattcctccggccatttccaagccattctaacttcattctttgtgaggttacatcaggaaaggatgcaaagaagctaaaggaggacctagcacaaatgggtgtgatgattcgtcactatgacaagaaagagctgaaagggtacgttcgtgtgactgttgggaagcctgaacaaacagatacacttatgaagtgcctcaagagactctcgtaggaggaaaatttgatgtaataaatattgtaacacgtcatgctaaactcctcttagctaatctttatatagagccgtcaaaattagaagaaaatatgttgattttggcaagggatgtggatgtagctttatatattattgacctaaatctaccatgataaatattgtgttttgcaaaaaaaaaaaaaaacatcaagaattcctgcagtccgggtgatccacaagt

SEQ ID NO: 5070 - DNA, 1385 bp, Glycine max
gctttattggtaaaggggtgatgtgaattcttgaagttaaaatcagctacgtaggccccccccccccccccccggctgtgaagtgtgaattaaaatatattcaattttgcgtttctctgcctaaaaggattgaaagatgggtcaagcattcggttgctaccaagtcgatcagtcaaatgtggctatcaaggagcattttggaaaatttgatgatgtcctagagcctggatgtcactgcctgccttggtgtcttgggtaccagattgctggtagtctgtcgctgcgagtgcagcaacttgatgttcgatgtgagacgaaaaccaaggacaatgtctttgtcaatgtggttgcatctgtgcaataccgagctgtgtctgagaaagcatctgatgcattctataggcttaccaacactagggagcagatccaatcatatgtttttgatgtcatcagggccagtgtaccaaagttggagttggattctgtctttgagcagaaaaatgatatagcaaaggctgtggaggaggagcttgagaaggccatgtcaacctatggatttgagatagttcagactctcattgttgatatagagcctgatgttaatgtcaagagagcaatgaacgagataaacgcagctgctagattgaggttggctgcaaatgagaaggctgaagctgagaaaatactgcagatcaagaaagcggagggagaagcagaatccaaatatctgtcaggactcggtatcgctcgtcaacgtcaggccattgtggatggactgagggacagcgtgcttgctttctctgagaacgtgcccgggacatcagctaaagatgtcatggacatggtgctggtgactcaatactttgacaccatgaaagagataggagcatcgtcaaggtcctcgtctgtgttcatacctcacggtcctggggcagttaaagacattgccgtgcaaattcgggatggtctccttcaggccactgcctcacagaattaagctttcttggagttgtaaataacaaatagtatgtgtgtcaggtttttttcaggaaatgcttcttttgtttgaacttataaagtctgcatctttactcttcttatatttgatagattcatagcagtgtctattttatgtgtaagtactgatgtgcagttttgaatacttgtttaaggatagtcttaatgtcaagttgcttgtgaatcattaaggaatttgttatgtaagaattacttcccaaaagatgtgtttttcttttagtgtcctatcttgcaagtggatgtgtaaatttgtagttctctatatttactatttgctgcacaatgattctacataacttggcttcttgaatattaaaaaaactacaaactagtcatacataagatca

SEQ ID NO: 5071 - DNA, 1266 bp, Glycine max
tctcgagccgattcggctcgagacggctgcgagaagacgacagatcctgtcccctggctaggacccccccgaatattaaacatcgaatctttgttcaattgcgaggcaaagcaagcaaagcacaacacaagatggggatacttagtccagaacagctccaattcttcaactctcaaggttatcttgtgattgaatctttcgcatgtagcgatgagattgagtccatgatgaagaggatggagcagttggtagatgactttgacccttcttccaccgcctctattttctccaccaagaaccagcaacagtcgactgataattactttttcgacagcgccgagaggatttctttcttcttcgaggagaaagcatttggtaatgatggtaagttaaagcagccgaagcaattgtcccttaataaagttggccacgctcttcatgagattgagccagcattcaaaaagttttcttcttctgagaaagtttcaagtttgatgcgctccttaggttacaagagacctgcagtcatgcagtcaatgtatatatttaagcaaccaggcattgggggtgaagtagtgccacaccaggataactcgttcctttatactgaaccacaaacatgcaccgggctgtggctggccctagaagatgcaaacatattaaatggttgcctttggacaatacctggatctcacaaaaatgggcttgttagaagattcttaagagatgaagatggtgtcaaattcgatcgaccatcaccttcttatgatcaaaaagattttgttcctattgaagtaaaagctgggtctttggttgtcatccatggtgatcttatccaccaaagctttgaaaaccagtctccaaaatcaagacatgcgtacagcttgcacgtggtggatatggttggctgcaaatgggcaccagaaaattggatcagacgaaaagttgagccagaaccactctttgtaagctgaaatttgcaaattgagagaaacgatgtaatgatgtttaatttgcaagcttaaagcgttgtaataatgttaaaccagtttgtgtacttgccactgaacactgattccacgtctttggttttgggatatgaataaatcagaatttgatagtttttacaaaaaaaaaaaagcataataaacaacttttctagaaaaaaactgaaggactatttttggtgaatcattatggttggccctgtttataggtctcagaattcgttccgtttgtcatcctattcatatttttttttttatc

SEQ ID NO: 5072 - DNA, 1328 bp, Glycine max
cccacgcgttcgcacgtatggaagaatgggttgacacgtgtgggtaatatatgacgagagcgtgtgaagagaaaagcctgaaaagaaagagcgagaaaaagaagaaaatgagggtgcagtaccactactaccctttcccttctctggcgtatggttgcagctactgttatgcttatgcgactactaaattaaaacctactcactcactctctctaacactctccaaccaccgtcgcatttctgcgtcacaacctcactcttccaccttctccatcatcaccaacctcttcttcttccaaaaccctaatttcatcacggggaacactctcttcctcaggatgcagagattttgctcagtaagtggcttaagtaagaacaaagcactggtggagaggttgcagcgctatggagtgatcacatcaagtaaggtggctgaagtgatggagacagttgatagagccttgtttgtaccagatggagctgcaccttatgatgacagccccatggccatagggtacaatgccactatctctgcgccgcatatgcatgccatgtgtcttcagttgcttgaggagaatttgcagcctgggatgcatgctctggatgttggctctggaacggggtacctgactgcatgctttgccttgatggttgggccccaaggccgtgctgttggtgtggagcatattcctgagttggtgtctttttcaatagagaatattcagaaaagtgctgcagctgcacaattgaaagatggttccctttctgtccatgctggtgatggaaggcaaggttggccagagtttgccccttatgatgccattcacgttggagcagcagcaccagaaattccccaaccacttattgaccagttgaagcctggagggagaatggtgattcctgtcggaaacatattccaagatttaaaggtggtggataagaattctgatggttctatcagtgtccgcactgagacatctgttcgttatgtgcccctcaccagtcgagaagctcaactgcgaggttactaaaatgaagccaaaatcctgaattttggaaggctaatgcttcagatgttagtgtttggatcttgcttgtgcacatgccgttagaagttgtatagataaagttccctgaattttgtaaggttcatgtttacagttacagatatcagtagttggaacatgaatgcactcctatgctggtagaatttgtatagtatgaagttcatattctgcttagtgaattaattcgttttcatgatgtgcatattttgtaaatatcttgtacacttttcatttaatttattcgcttttataattctttac

SEQ ID NO: 5073 - DNA, 1638 bp, Glycine max
tcagctacgtaggcccccccccccccaggaacaagaaaactgtagaaagagtaagaaggatttggaattgagaatttccatggcggcggcgacgaacttgttagcaacactgggggatctggagagggactccttcgtggctcttctttcgaagctgatcgctgaatcgaagtacgtccagaacaacccgccggagctcattccccaagaggacagagtggtgaagcacgtcttggacgttctgttaccgttcagcaccaccaccggcggtggacccttgctcgtaaaccacgtcacctaccacgccggcagagggaacctcatcgtggagtaccccggcaccgttcccggcaaaatcctctcgttcgtcggatgccacatggacgtcgtgaccgccaatcccaacgattgggatttcgatccattttcgttgagcgttgacggtgataagcttcggggtcgtggaactactgactgtttgggacacgtggcgcttgtcacggaactcatgaggaagctcggggagaccaagcccaatttgaagtcaagtgttgttgctgtttttatcgccaatgaagagaattctgcgataactggtgttggtgtggatgcacttgtcaaagatggcctcctcaataaactcaaggatggccctctgtattggattgacacggcggataaacaaccatgcgttgggactggtggtatgataccttggaaacttcacgtcaccgggaggctctttcatagtggattagctcataaagctataaatgcgctagagctagccatggatgctctaaaggaaatccagttgcgattttactcagacttcccacctcatcctcaggaacaggtttatgggtttgcaaccccttcaaccctgaagccaacccaatggagttatccaggaggtggaatcaatcaaattccaggggaatgtacaatttcaggagatgtcagattaactccattctacaatgtaaaggatgttatgaaaaagctgcaagaatacgtggacgatattaatgagagtgcacagaagctagaatctaggggtccagtttcaaaatatgtcctacctgatgaaaacataagaggaagacttactttatcttttgatgaggcactgtctggagttgcttgtgatcttaattctagaggttttcatgttttatgcaaagcaactgaagaagtagttgggtatgtaaagccttactctattactgggagtttgcctctcattcgggaactacaggaagaaggttttgatgttcaaacttctggctacggcctaatggctacttaccatgcccagaatgagtactgcctctttacggatatgtcccaaggatatcgggtcttcgcgagaatcatctctcaattggaagagtgagaatagcagaggaactaataattctggtgtctcgtgggctatgaagatgttcgtgttcagatatatgaacataatttctgttatattgtgtagagggttcggtattactgacttttcttcagcatgataggcgaaactagttttttccacataaatttctccggggaaaagtacgtttttgataccatgaaaatttaatgctcctttcactttaaaaaaaaaaaaaaaaaaacccggggatt

SEQ ID NO: 5074 - DNA, 1717 bp, Glycine max
  misc_feature (1547)..(1548): n is a, c, g, or t
  misc_feature (1550)..(1550): n is a, c, g, or t
  misc_feature (1560)..(1560): n is a, c, g, or t
  misc_feature (1562)..(1562): n is a, c, g, or t
  misc_feature (1564)..(1566): n is a, c, g, or t
  misc_feature (1569)..(1569): n is a, c, g, or t
  misc_feature (1571)..(1571): n is a, c, g, or t
  misc_feature (1576)..(1576): n is a, c, g, or t
  misc_feature (1585)..(1585): n is a, c, g, or t
  misc_feature (1588)..(1588): n is a, c, g, or t
  misc_feature (1591)..(1591): n is a, c, g, or t
  misc_feature (1596)..(1596): n is a, c, g, or t
  misc_feature (1600)..(1600): n is a, c, g, or t
  misc_feature (1614)..(1614): n is a, c, g, or t
  misc_feature (1617)..(1617): n is a, c, g, or t
  misc_feature (1622)..(1622): n is a, c, g, or t
  misc_feature (1625)..(1625): n is a, c, g, or t
  misc_feature (1627)..(1628): n is a, c, g, or t
  misc_feature (1631)..(1631): n is a, c, g, or t
  misc_feature (1636)..(1640): n is a, c, g, or t
  misc_feature (1647)..(1647): n is a, c, g, or t
  misc_feature (1649)..(1651): n is a, c, g, or t
  misc_feature (1654)..(1654): n is a, c, g, or t
  misc_feature (1656)..(1656): n is a, c, g, or t
  misc_feature (1659)..(1660): n is a, c, g, or t
  misc_feature (1666)..(1666): n is a, c, g, or t
  misc_feature (1672)..(1672): n is a, c, g, or t
  misc_feature (1674)..(1674): n is a, c, g, or t
  misc_feature (1676)..(1677): n is a, c, g, or t
  misc_feature (1683)..(1687): n is a, c, g, or t
  misc_feature (1693)..(1694): n is a, c, g, or t
  misc_feature (1698)..(1698): n is a, c, g, or t
  misc_feature (1700)..(1700): n is a, c, g, or t
  misc_feature (1704)..(1704): n is a, c, g, or t
  misc_feature (1707)..(1707): n is a, c, g, or t
  misc_feature (1709)..(1709): n is a, c, g, or t
  misc_feature (1711)..(1711): n is a, c, g, or t
  misc_feature (1713)..(1713): n is a, c, g, or t
  misc_feature (1716)..(1716): n is a, c, g, or t
tcagctacgtaggcccccccccagcttgaggttcccttctccaaagagaaagaacagcaagcaatcgttacccattacctatttcactttccacaccactctcatcctatatctctttcttccttattcctctgtcaagccactcgataatatgcagagtctttcaccacctacttccaacgcgctcaatttgaagcatgtttttcgcccgcgacttggcgcgtcaagccgaatctctgtcaaatgcgcttttgggtttgagccggtgagctacggagtcggctccagccgagccgattggcagagctcctgcgccatcttagccagcaaggtcgtttctcaggaacaaccctccgctgaccagaacagcggcaccaccgaccacatcgccgccgtcaacggtcacaaagccgccgtcagcgacttccaactcgttccaattggaaacctagcagaggccaacaacaagccgctcccgccgaagccgctcacgatctccgacctctcgccggccccgatgcacggctccaagctccgcgtcgcgtaccaaggcgttcccggcgcgtactctgaagccgctgccggcaaggcctatccgaactgcgaggccattccgtgcgaccagttcgaggtggcgttccaggcggtggagctctggatcgccgatcgggcggttttaccggttgaaaactcactcggcggttcgatccaccggaactacgatctcctcctccgccaccgccttcacatagttggcgaggtccagctcccggtccatcactgcctcctcgctctccccggcgtccgaaaggagttcctcacgcgcgtgatttcgcatccgcaggcactcgcgcagtgcgagcacactctcaccaaactcggcctgaacgtggcgcgcgaggccgtggacgacaccgccggcgctgccgagttcgtcgccagcaacaatctccgcgacaccgccgccatcgcgagcgcacgcgcggcggagctctacggcctgaacgtgatggcggacggaatccaagacgatccgagcaacgtcacgcggtttgtgatgctcgcgagagagcctatcatcccgcgcacggaccgtcctttcaagacgagcattgttttcgcacacgacaaaggaacttcggtgcttttcaaagtgctttccgcgttcgcgtttcgcaacatcagtttgacgaagatcgagtcgcggccgcaccggaaccgtccgattaggctggtggatgacgcgaacgttggaaccgcgaagcactttgagtacttgttctacgttgattttgaggcttccatggctgaggttagggcacagaacgcgttggcagaggtgcaggaattcacgtctttcttgcgagtgttagggagttaccctatggacatgacaccctggacaccttcctcccggggagactagcatcgtctttttcccctcttgccaaaaccatgtattaaatgtgtcatatgaattctgaattttgtgaataaaaaaaaaacaaaaactgattatttaattaaaaaaaaaaaaaaaaaatctnntnccgggggatncntnnnttnancgccncccctgggnganttnccttntgtnctttatgagggtanccncctgngtntnnggnatatnnnnnccggtgnannnttngnttnnttgccnattaancngnnctaatnnnnncgtggnnttgngnctantcntntntntcnc

SEQ ID NO: 5075 - DNA, 2021 bp, Glycine max
cggctccggccgcggcggctcgtgcttctccaaagagaaagaacaccaagcaaagcatagtaacctaattcactttacacctaccaccctccttctaactcaattccatttttcttccttattcctctctcaaaccataatatgcagactctttcgccgcctacttccaacgctctcaatttgaagcacgttcttcgcccgcgtcgagtcgcgcctagccgaatctttgtcaaatgcgccttcgcgtctgagcccgccagctacggggtcggctcgagccgagccgattggcagagctcctgcgccatcttagccagcaaggtcgtttctcaagaacaaacctcctccgctgaccagaacggcggcaccgccgaccatatcgccgccgtcaacggccacaaagccgccgtcagcgacctccaactcgttccaattggaaatctagcacaggccaacaacaagccgctcccgccgaagccgctcacaatctccgacctctcgccggcgccgatgcacggctccaagctccgcgtcgcgtaccaaggcgttcccggcgcgtactccgaggcagccgccggcaaggcctatccgaactgcgaggccattccctgcgaccagttcgaggttgcgttccaggcggtggagctctggatcgccgatcgagcggttatgccggtcgaaaactccctcggcggctcgatccaccggaactacgacctcctcctccgccaccgcctccacatcgtcggcgaggtccagctcccggtccaccactgcctcctcgcgctccccggcgtccgaaaggagttcctcacgcgagtgatttcgcatccgcaggcactcgcgcagtgcgagcacactctcaccaaactcggcctgaacgtggcgcgcgaggccgtggacgacaccgccggcgccgccgagttcgtcgccacgaataacctccgcgataccgccgccatcgcgagcgcacgagcggcggagctctacggcctgaacgtgatggcggacggaatccaagacgatccgagcaacgtcacgcggttcgtgatgctggcgagagagcctatcattccgcgcacggaccgtcctttcaagacgagcattgttttcgcacacgacaagggaacttcggtgctcttcaaagtgctttccgcgttcgcgttccgtaacatcagtctaacgaagatcgagtcacggccgcatcggaaccgtccgattaggctggtggatgacgcgaacgtgggaacagcgaagcacttcgagtacttgttctacgttgattttgaggcctccatggctgaggttagggcacagaacgcgttggcggaggtgcaggaattcacgtctttcttgcgagtgttggggagttaccctatggacatgacaccctggacaccttcctcccggggagattagcatccccttattttgtctttttcatctctccctcccaaaagagaggaaaacaaaaacatatattaaatgtctcatatggattctgaattttgtgaataaaagaaaacataaactcattattttaattatcttaatcttaccccatgtattttcattggtgttcttgtattatctctttctcgtttgtcatattttggggctttagggttatgcaatgaattagaattaagagacgaagagaatacgtacgttgatttttgtacgtagagggatggagaataattagatacgtggtagtgtgataagctagaaagggtagttggtttaatttaaatgcctttgtaataattgtgtgtacactgaattggccgctttggttggtgaatacttgttgtgtttctgttaggaaaaaaggtatacatgggagaggttcctcctgccctgtcattttcttttcttttttggtcattgtcgtattcatattgttgctatggctctttcgtatattctggatttttcggaagtttttcgatacgaaatatgcttaaatggctcgcacatttaatgggaaatgcgagactgggagtagttacaacgttatt

SEQ ID NO: 5076 - DNA, 2152 bp, Glycine max
  misc_feature (1307)..(1350): n is a, c, g, or t
  misc_feature (1376)..(1380): n is a, c, g, or t
ggtgattctcatatctcttcttctattttcagacccagatctccgttttacccacccactattgctgcttctgtaaagtctttaattttgcctttcaggtgtccttggctagattgccaccatgataaagcaaattcttagcaaattgccaaagaaggtgccaaaatctgactcatcagattctgcaaggagtgattctagcaataccactacttttgggaatgtttttcagtgtacaaatgttggaagtaccatttcaagcaaattaaatgttgtgaagcgggtatcatccgttgttttcccagcaagcatgagtgctggagtggaagcagttgacccttgtctgtccttcaaagatgtttcaaatacacagaagcaaagcctgttcattagtaagttgaatctttgctgcaaagtttatgacatgagtgatcctgataagaacaccacagagcaagatctcaaacgaaaaacgttgttggagcttgttgattatgtttcttctggatctgttaagttcacagaaccagcaatcgccgcattgtgtaaaatgtgtgcaactaatttgttcagggttttcccaccaaagtttcgaacaagtactagtggtggagaaacagaagatgaagaacctatgtttgatcctgcctggtctcacctacaagttgtttatgatctactccttcaattcatcaattataactctcttgatgtgaagctggcaaaagcacatgtagatcatgcttttgttctaagattacttgatctttttgattcagaggaccctagagaaagagattgcttgaaaacaattctgcatagaatctatgggaagttcatggttcataggcctttcatacggaaatctgttagcaacatcatctaccggtttgtttttgagactgagcggcataacggaatcgctgagctgttggagatttttgggagtgtcattagtgggtttgccttgccattgaaggaagagcacaagatatttttgtggagggctctaattcctttgcacaaaccaaaatctgttggtatttatcaccagcagttaacatattgtgttgtacagttcgttgacaaggatcaaagactggctagctctgtgataaagggactattgaagttctggccagtgacaaatagccaaaaggagctcatgttcattagtgagttggaagagattttggaaatggctagcatggctgagtttcagaagatcatggtcccactgttccgacgaatggcttgctgcctcaatagttctcattatcaggtagtcacttgattccattggcttnnnnnnnnnnnnnnnnnnnnnnnnnnnnnnnnnnnnnnnnnnnntttaataatgtaattgattgtggcannnnngactatactatgttgaatcatgtgttgcaatatggttatgttgtgatgggtgaagcttaatatattgatgtggtttattcaggtggctgaaagagcacatttgctatggaacaatgagcacattctgaacctgataacgcaaaacagacaggtgattctgcctctggtgttctcagcacttgtacataatgctcgaagtcattggaaccaagcagtgctgaacctgactcagaacataaggaagatgctgtctcagatggatgaagagctggtagttgcatgccaacgcaggattgaggaggaagattctagtgcaagtgctgcagctgagaggagaagagtaacatgggaacgcatagaagctgctgctgctgctgcaagtactagttgtgtccaatcttcttctgtaggtggaggtggagatgttttagtcccagtaaaatctgctacatgctcagtggcatgctaagctctaattgctttgtaaggataaggttctaattactattaatattacataatagtggtgtggttcttgagtttttgtttgtggcaaaaatagggtggtgggtatgtatacaaagaaaatgaaattgtggtgactgagggaaagtgttatttatttatggtttggaggaacagaagcagatgcaaagagcaggtgtggggggtgtgggtttcgggcgctttatttcggccggcaaatattttggaggtggcagcacccggaaacccctggacttcctttttttttaagcttttttcttttacc

SEQ ID NO: 5077 - DNA, 1683 bp, Glycine max
gaagtgaaatctatgtatttaatgtcccctcaaaggaagttttgaggaaggaccaaaatcacatgcattttttcttctgcagagcagcatttgtcgcctcccatttcaccatgtactttgtttctttttattattactaatatcagacattgtacctgaagcatggcccttcccccctaaaaatatcaccaaccactgactcacacaccaacactccaaaccgacgaccataacacaaactaacacctagaaaattaacaactaaacaacccatcttttagtcagaaaccataccaccaaatccaacatgcaaaacctcaatttcctctgcctaaccatcatttccatttctctgatccacaactacagcatcctagtccaagccctgacctcaccctcagacattgcagcactcaaagccttcaaggcctcaatcaaaccctcctccatcacacaatggtcatgcctcgcctcatggaactttacaaccgacccatgctcactccctcgccgcacctccttcatttgcggcctcacctgcacccaagactccacaagaataaaccaaatcactctcgacccagcagggtactcaggcacactcaccccactaatctctcaactcacacaactcaccacactagacctcgctgaaaacaacttgttcggcccaatcccctcttcaatctcttcactctccaacctccaaaccttaaccctccgatccaattccttctcgggcacaatcccttcctccataaccaccttcaaatcactccaatctcttgacctcgcacacaattccctctctgggtatctccccaactcaatgaactccctcaccacactccgcagactcgatctcagcttcaacagactaaccggttcaatcccgaagctcccacccaacttgctcgaactcgcgatcaaggccaattctctatctgggtctctccaaaaacaaagctttgaagggatgaagcaattggaagtggtggagctcagcgagaacgcgctcaccggaaccgtcgagtcgtggttcttccttttgccgtcgctgcagcaagtggacttggccaacaacaccttcacgggggtgcagatctcgaggccactcgaggcgcgtgagggaagcagcaacagcaacctcgtcgcgctcaacctcgggtttaacagaatccgaggctacgcgcccgcgaatctcggcgcgtatcccgcgctgtcgttcctgtcgattcgctacaacgcgctgcgtggcgcaatcccgctggagtacgggcagatcaagtccatgaagaggctgttcctcgacggcaactttttcgtcggaaagccgccagcggggctaatggaggccggcacggcggtttccggcagcttgggggacaattgtctgcatgcgtgtccagggtcgtcgcagctgtgctcgcccgcacagaaacctagctctgtttgcaagcaagcctaccgtggtagaccaacaccgtaatctgttgtcggttaaaattaaaaagaaaaataaattataaataatagatagatttctattctattttttaaaaaggttctttgtatgtagaagtgcgttactatctgaataaaagacgatgtctgtgtaaagtgtaaactatggtctatggtaatgaatggtgtttatatttgttcttgtgaaaaaaaaaaaaa

SEQ ID NO: 5078 - DNA, 1657 bp, Glycine max
acggctgcgagaagacgacagaagggggagtgctcgccgcccggccggctacctagcacccgcgcccaagtcacttcctccaaccctttctttttctcagtatctgtgccccaaccccacttgcttttctgcatttttttttatccttctttgtcctctgtattctaatcccatgcttcttaatcactttctcaattccattgctccctctctaccctgagttttggaccttgccatagattctctcagattttcgctcttccatagtatcttcagaatgctttctgtgagggatttttggaggcggcataggaggaaggttttcgtcactgttggtgttttaggaagtgggtatcttttgtataagctctacggtgctcacaggcatggggttcaggaacttgaaagagaactcgcagttcagagggaaactgaggagcttatgaaggctcagatgcaagctcactttgagaatattcagaggatgtctgatgtaacattgccgcatgctatgcacgagttaagttgtcggatcacagaagagttggatctttctcaccttcttgaaaggttaatacaaggaaagggtcaaccaaacaccttaacccaatcagagaaactagatttatggagtagactcaaaattctaagttttacaagaatgacattgtcagtatgggctacaacaatgcttagcttatatacaaaagttcaagtcaatatactaggaaggcatttatacattgatacagcacgaagccttggaatctctgattcagtagaaagtggagatgtggtcgatagggaggaccagaagaaatttctagatagtgttgattttctctctcagcatggtatgcctgccttgatttctgatatggaagcagcaacaaaagaagttctcaaaggaaagcagttgagtactttcttcaacagcacaacgcttcatgaaactatcatgcagatactcaacaccttcatgagcatggggactccaaattcctggataaagtatatgatacctgaagatgttagaccgtattccacaacctctggcagtgatgacccggtaccatttgacgtgactgaatttgaacaacttatgattgaagcacgggcagtattatcaagtgctgaatttggaagcattgtagagatatctctgaaagcagtggtggatacactggtggagcttatgaggactaaatttagtggaggaagtgtagctgagggcatgccgctggccagagtgttgcctcaagttgcacagatgtgtcctttgctcctcggagaacccagcaaaaatcagttcatccaaatcattaaaaatatacaggaggttgaactttttttcactctcctctatgcaaatatgccacatgagtagtgattaattatttatgtttccaaccaaagagattaaatttattgcatgaaaggcatcgggcagtgtacaaaaaattagacgaggttcaaaagagagatataggtgctaaattgttagctttcatcttttcaatatgacatttcccatttgttgtaattagtgattagtgatgcataatgctcccactttggctcaaacgtggcatttggtggaaaaaaaaaaaaaaaagaaataaagaaaaaataaaaaaaaaaaaaaaaagcggctgga

SEQ ID NO: 5079 - DNA, 1385 bp, Glycine max
atgcatccaacgtgacatccacactcaactcaaaaaccaattccaataatggcgaccttatctatgtcatcttgatcgtaatccccgtcatcaaactctttctttattctacgattcacaatcaaaacccaacaacttcaactctccaatctctatcctcaattcaacccttttggtggcaacttctatttatgctacaaaaaatgctgcgattgcacttcaccaccgcactctctcactttgcttccaaggcctcaccttttcctctcacacccgtttccgttaccgtttccagagctattgtttgcaacaaccccaccaggttcagatcgcaaatgggttctttctccacttcctcttcctcttcctccaaactcttgttccgccagctttttgagaaggaatcttccacctacacttaccttctcgctgatgcctcgcacccagaaaaacctgcacttctgattgacccagttgataggacagtagacagggacttgtcgatcattgagcaactggggttgaagcttgtgtatgccatgaacacacatgtgcatgcggatcatgtcactgggactggccttatcaagagcaaagttccttctgtaaaatctgttatttcaaaagcaagtggtgcaacggcagatctttatgtggagccaggtgataaggtccaaattggtgatctttttctagaggttcgtgcaactcctggtcataccaaaggttgtgttacctatgttactggagatgcacctgatcaacctcaacctaggatggcattcactggagataccctattaatacggggatgtggtaggacagattttcagggtgggagttcagagcagctttacaaatcaatccattcacagattttaacactgcccaagagtacgttaatctatccagctcatgactacaaaggattcactgtgagcactgttggagaggagctgcaaaacaatccacgcataacaaaggatgaggaaactttcaagaacatcatgggaaatcttaacctgtcatatcctaaaatgattgacatagctgtcccagctaatatggtttgcggaatccaatccaatccaaagcaagctgaggcttcataagccttatctgagagtcacacactgatgttatttgacacaaagaccttgcaagcaaaagggggaaaaattgttatagccctttgaattgaagagaaaaatggaaattgtaaataaataaaatggtatttgtgttgtggcccaatataattagaattaggttccagtgattatgctgtgtttctgttgtatctgattgtttatgttaaaacttcctaatcctatacttcaaagccaaattttcagaaaaaaaaaaaaaaaaaaaacaaaaaaaaa

SEQ ID NO: 5080 - DNA, 2942 bp, Glycine max
atttacttgcatcccctgccccgcgatgatggacactttgtctatctagacagcacctttctaccttccttctcagcttcctcaagtttatagctccctctatccatttattaattcagcaaaatgtgtcactgagagagatacaatcatagaattgaagaagaacgcaacatggcgacgtactttaatggaagcactttttaaattcaaccttctgcagatggcggcttgcaaacgctttaccttatgaacccaacttacgtaccctacgctgacgcgccgcaccacccaacaacgctcctcgtcaatcccaacgcacccaacctcgcgaatatcccacacgcgccgccagtgtcaccaaaccaacaacatcaccacgtgattcacgtcagctacgtaggccccccccccggcaattccgatgaccactcccgaccgtcgttgatcggcgaaaacatcgccgccttccacggcttctccggcggggcaggcactgcctccaccgccgcccctcgccttcactataacctctggggtccggtggttgatcagccgggaacgccgtctagcagctccggtggaggcggtttccggcggccgagtcagcagggtttgtctctcagtctttcatcacagcaaacaaattttagatcagtttccggcgagcttgacgtggccggacagggccacgttgccggaattgggaactcgccgatgtcggcgtcgatcggagtttcaggtgttattatggggtcaaagtacttgaaagctgcacaggagcttctggatgaagttgtgaacgtgggaaaaggaatctacaaagaggagaaattctcagagaaggtgaaagcgaatagggaatcaactaattctggtgctgctggtgatggtggagatggttcaagtggtggaggagaaaacagtgcagggaaacaagtggttgaactcagcaccgctcagaggcaagagcttcagatgaagaagtccaagcttgtgaccatgctcgatgaggtagaacaaaggtacagacaatatcaccaccaaatgcaaattgtggtatcatcatttgagcaagcagcgggttatggggcggcaaaatcttacactgcccttgccctaaaaactatctcaaagcaattcaggtgcctgaaagatgcaatctctgcacaaatcaaagccacgagcaagacattgggtgaagatgattgcttaggagttaaagtagaagggtcaaggcttaggtatgttgaccaccatcttcggcaacaaagggcacttcagcaactaggaatgattcagcccaatgcatggaggccccagagaggcttgcctgaacgagctgtttccattcttcgggcttggctttttgagcatttccttcacccatatccaaaggactccgataaagttatgcttgctaaacaaactggactttctaggagccaggtgtcaaactggtttatcaatgcccgagttcggctttggaagccaatggttgaagaaatgtacttggaagaaatcaaggagcatgaacaaggtaatgcctcagaaaacaccaaatcaaaggaatcgagcaaggagttgggttcaacagcaaatgttgcacccgaatcaggtgccattaaactcgatcatctccaatcaaagcaagaaagcttcaaacaccaaaacacttctccaaccgagatctcaacaaactcttcaatgtctccaatgggagggtcccttcaatccccctctggtttccatcttgcaggatcatctgacatgcaaattaggagtccaaagaaaccaagaagttcggaaattcaaaactctccaagtagtatactctcagtgggcatggaaatgaagcataataataatggtgatcatgcaaataatagagaagccaacaacacaaagtttggcaatgaaaggcaccaccagaaagatggataccctttgatgactagcaatgcaaaccatggtggagggtttggagcgttcaccatggaagacatgggaagcagatttaatgtcactactgagcaactggcttcaaggttccatggaaatggtgtttctctcacacttggacttccccacaatgagaacctttctatgccaggaactcaacaacatggatttctctcacagaatatacacttgggaaggagacttgaaatgggaacaaatggaaatgagttttgtgctatcaacactccaccttcttctcactcaggaaccacttatgagagcattgacattcaaaacagaaagaggtttgttgctcatcagttattgccagatttcgtggcctaagtactgatggctaggtagccagctaaaaatattggataatttatgtgagaaatcttagaattctgatgagtgtttctctagacacgctaattaacttggcagaagacttagctagcagcaccaagaaaagaaaaggagagggtttatgttgttttcacatatatatacatgcacatgcatatgcagtcactaattatgaaatgtaccgtgattttggtatactgaaattcctggaatgggaggggttgctagctccctgtaaagattggatagtagtataggattatacttgcagagatttaagttagcttaattaattataggattcataaaagttggggagggggtatatatataatgtatatggtattggatgtagccagttatgtagatggatttgaatgatttcttttgatttgatgttatatatatttgtgcacgagagttattatttgtgtatagaagaagaagcattgctttgtaaaattagatattcctgcgctgtgattctcgtctcatgtgcgtttgtcttctgtgcatagctggttcaaggtggaattaattgtgggagacatgcatgagagggaatatacgcatatgcgtacaatttggacgccttctataaaatagagtttgag

SEQ ID NO: 5081 - DNA, 1087 bp, Glycine max
aattcggctcgagcgaagatcatcctcgtttatctccagttgcttctttagagtctgagaaaaaggttaccaaaagaagctttgacaattggatgagctgtcacctgaaagagagaggcttgtggatgattgtgctcaaacagaccctatgcctatggacagttccgagtctgatgcagatgtccaggagcatttaggaaaggattttagtgcgctggcagatatgtattggcctgattccttgggacctttggatttggaaataccatcatcaactaaataccatagcgaagatctaatttttagtgatagtcttagtggactgaatcgcttgatagccagcagcctggatgcattccagaattgctccttttttgggtttgacaagaaggaagcaccatcaacagttgaggctcgagaatctgccactctttcagattttaaaattggaagtggcatctgagactcgtcatgattggatcttggtaatggttttccatttctggcacgaacacaattggagtttgttaagatttaacattttttcttatactgactggaggtgtgcatgctaaagaattggattgagccacttccaactcttcctgtatatgtttctctaatctgcgtctctttccttttgtacaaaaaaaaatgatcatggaaggatcagtctcctgtagaaatattccttttttaggtgaacatatatcttttttattctctgcttctggatgttgtattttaagaagaccgtcttgcaactccgtggcatggacttgttttctaagctaatggactcctcccctctctttctattatgcaagctaaatatctaatggacaaaaactcagcaaaaaaaaaaaaaaaaaactcgagggggggcccggtacccaattcgccctatagtgagtcgtattacgcgcgctcactggccgtcgttttacaacgtcgtgactgggaaaaccctggcgttacccaacttaatcgccttgcagcacatccccctttcgccagctggcgtaatagcgaagaggcccgcaccgatcgcccttcccaacagttgcgcagcctgaatggcgaatgg

SEQ ID NO: 5082 - DNA, 1450 bp, Glycine max
aaatatttcagaatttatgaaggcatatttgcttagttttcttacggctgcgagaagacgacagaagggggacattgctaaaccttaaaccctaatttttacaatccgagggtgaagagtttgatgggtcagcgaaagaacgacaacaacatcaatcagtgctcctcaagcaaggaagacgctgacatgaataacaaccaccttcgctttgaagaggctgtcgacgagagttccaacctcgaccaatccatgtgcgacatcgaagaatccgatgataaaaccagcgccgactattacttcgattcctactctcattttggaattcacgaagagatgttgaaggacactgtgagaaccaagacatatcaaaatgttatttatcagaacaagtttttattcaagaataaagtagttcttgatgttggtgctgggactgggattttatcactattttgtgccaaagcaggggcagaacacgtctatgcggttgagtgctcccacatggctgacatggcaaaggagattgttgaagctaatggttactctaatgttttgaaggggaagattgaagaaattgaacttccagttgctaaagttgatataattatttcagaatggatgggatatttcttgttgtttgagaatatgttaaattcggtgctctatgctcgtgacaaatggcttgtggatggcggagttgtgctaccagacaaagcatccctccatctcactgctattgaagatgctgactataaagaagataaaattgagttttggaacaatgtatatggatttgacatgagctgcatcaagaagcaagccataatggagcctcttgttgacacagtcgaccagaatcagattgctacaaactgtcagctactcaagacaatggatatctcaaagatggctcctggagatgcttcattcacagtaccttttaagcttgtagctgaacgtgatgactatattcatgctcttgttgcatattttgatgtatcgtttacaaagtgtcataaattgatgggcttctctacaggaccaagatcacgagctacgcattggaaacaaacagtcctatacctggaagatgtcttgaccatttgtgagggggaggcaattgtggggagcatggctgttgctccaaataaaaaaaatcctcgggatgttgatataatgctcaagtattcattgaatggaaggcgatgcaatgtttcaagggttcagtactacaagatgcgttgaacctggtatattggctcgtgttttcccattgtttctccaatttgtaagattttgacaattgctgcttctatttcaagatagaggctgccttttaatggatgtaacttgtttcctattttatttgaattctgtctcatcattgctcaattatgttatcgatgtaatgataaaatttgaagtctaaaagaaaaaaaaaaaaaaaaaa

SEQ ID NO: 5083 - DNA, 1497 bp, Glycine max
acaatccgagggtgaagagtttgatgggtcagcgaaagaacgacaacaacatcaatcagtgctcctcaagcaaggaagacgctgacatgaataacaaccaccttcgctttgaagaggctgtcgacgagagttccaacctcgaccaatccatgtgcgacatcgaagaatccgatgataaaaccagcgccgactattacttcgattcctactctcattttggaattcacgaagagatgttgaaggacactgtgagaaccaagacatatcaaaatgttatttatcagaacaagtttttattcaagaataaagtagttcttgatgttggtgctgggactgggattttatcactattttgtgccaaagcaggggcagaacacgtctatgcggttgagtgctcccacatggctgacatggcgaaggagattgttgaagctaacggttactctaatgttgtaacagttttgaaggggaagattgaagaaattgaacttccagttgctaaagttgatataattatttcagaatggatgggatatttcttgttgtttgagaatatgttaaattcggtgctctatgctcgtgacaaatggcttgtggatggtggagttgtgctaccagacaaagcatccctacatctcactgctattgaagatgctgactataaagaagataaaattgagttttggaacaatgtatatggatttgacatgagctgcatcaagaagcaagccataatggagcctcttgttgacacagttgaccagaatcagattgctacaaactgccagctactcaagacaatggatatctcaaagatggctcctggagatgcttcattcgcagcaccttttaagcttgtagctgaacgcgacgactatattcacgctcttgttgcatattttgatgtatcatttacaaagtgtcataaattgatgggattctctacagggccaagatcacgagctacacattggaaacaaacagtcctatacctagaagatgtcttgaccgtttgtgagggggaggcaattgtggggagcatgactgttgctccaaataaaaaaaatcctcgggatgttgatataatgctcaagtattcattgaatggaaggcgatgcaatgtttcaagggttcagtactacaagatgcgttgaacctggtttttattggctcttgttttcctattgtttctccaatttgtaagattgacatttgctgcttctattttaagatagaggttgccttttgatggatgtaacttgtttgctattttatttgaattctttctcatcattgctcaattatgttatcgatgtaatgataaaatttgaaatctatttattgtttacaattttttttgtttccctcttaccccgaggatgacattgatatgtcaccaagaaatacatgcatgcagccttgcttgggaagtatctgaatctgctgtactgataagtgtccattgtactaaatgaaaactgcaacacactttggggt

SEQ ID NO: 5084 - DNA, 1807 bp, Glycine max
tcagctacgtaggccccccccccgagtatagaaaacaaataatgcaactgccacccaaaccgtgagtgcaaaatctaccaatctcaaacagtgcaaaaacactgcgaaatattttcaaccgcaaaacaaataacattcaatttccaaaattgccataatcaaccatagctgaacagaagaagtcagtaaccatcgtcgtgagcgaagatccataataatacagttacaaattgcaataacacactcattgtggttatcgaaatttgatcgcagcgtcgagaagaatgggaagtttgggagcgattctgaaacatccagatgacttttaccctctgctgaagctgaaaatggcggcgaggaacgccgagaagcagatcccgccggagccgcactgggcgttctgctacacaatgctccacaaggtttctcgaagtttcgccctcgtcattcagcaactcggcatcgagcttcgcaacgccgtttgcatattttatttggttctgcgagctctcgacaccgttgaggatgatactagcatagaaacagatgtcaaggtgccaatactgatagcctttcaccgtcatatttatgatcgtgattggcacttttcatgtggcacaaaggagtacaaagttctaatggaccagtttcatcatgtttcaactgcttttctggaacttggaaagaactaccaggaagcaattgaggacattaccaaaagaatgggtgctggaatggccaaatttatttgcaaggaggtagaaacaattgatgactatgatgaatattgtcactatgtggcgggacttgttgggctgggtttatcaaagcttttccatgcgtctggttcagaagatctggctccagatgacctttccaattcaatgggcttgtttctacagaaaacaaacattattcgagattatctggaagacatcaatgagatccccaagtcacgcatgttttggccacgacagatttggagtgaatatgttaacaaacttgaggatttgaaatatgaggagaactctgttaaggcagtgcaatgcttaaatgacatggtcactaatgctctgatgcatgctgaagattgcttaaaatacatggctgctttacgtgacccgcctatatttcgcttttgtgctataccccagataatggcaattggaacacttgcattatgctacaacaacattgaggtcttcagaggtgtagttaaaatgaggcgaggtttaactgccaaagtgattgaccgaacaaagactatggctgatgtctacggtgctttttttgattttgcttctatgttggagcccaaggttgacaaaaacgatcccaatgcaacaaaaacattgagcaggctggaagctatacagaaaacttgcagagaatctggtctcttaagtaaaaggaaatcttacattgtgaatgatgaaagtggatatggctcaaccatgattgtcatattggtcatcatggtttccatcatttttgcttatctgtctgctaaccaccataatagctagttagtgaaacactgatagcacgcctcgttcatggaatgcgaatttgcatgcatgcaagcaatagtatgatggctgcagttgactatcgtgtattttaattgaaaaatagtcgaatatagcgtcaagagcttcttgtgttagtttggatttaactctatcctacgttcatcccgaaaattatcattattatgtgtgttataagttgattgtattaacatttcacggataaagttggaataccagatgagtggtaccaaaaaaaaaaaaaaaaaaaaaataaa

SEQ ID NO: 5085 - DNA, 2139 bp, Glycine max
tcagctacgtaggccccccccccgtcaatgatttgcatttgtcgattattttcttttcttcttcctctctcttcgttctctctctctctctcttattcctttctctccgaatccacgtcctagatccgttgttctcttcccacagttctcactgaatcaggatccattttgataccaagttgctgttgaatatcgagtttgctctttagagatctgtttccctctagacaacggtctgtgtgacctgttattttagttgaatcgaagccgcgaccaaatcttcctgatctttgcctgaggtgatggcatcggcgggtgtagcacctgcttctggagtaagagatgtgaatgcaaattcggttgctgttgaaaggttgcctgatgagatgaatggcatgaaaattagggatgaaagggaaatggaagcaactgtggtagatggaaatgggactgaaacaggacatataattgttactaccattggtggtaaaaatggccagccaaagcagacaataagctatatggctgagcgagttgttggaaatggatcatttggtgtagttttccaggcaaagtgcttggagacaggggaaactgtggctataaagaaggttcttcaagacaagagatacaagaaccgggaactgcaaaccatgcgtcttctggaccatcccaatgttgtaactttgaagcattgtttcttttcaacaactgaaaaagacgagctttatcttaatttggtacttgagtatgttcctgagactgtccaccgagttatcagacattacaacaaaatgaatcaaagaatgcctttgatatatgtgaaactctatttttaccagatatgtagagctctagcttatattcacaactgtattggagtgtctcacagggacataaaacctcaaaatttactggtcaatcctcacactcaccagctaaagatttgtgactttgggagtgcaaaagtcttggtcaaaggggaaccaaacatatcttacatctgctctaggtactatagagcacctgaacttatatttggtgcaactgagtacaccacggccattgatatttggtcagctggttgtgtacttggtgaactaatgcttggccagcctctattccctggtgagagtggagtagatcagcttgttgaaattatcaaggttttaggtaccccaacaagggaagaaatcaagtgcatgaatcctaattataccgagtccaaatttccacaaattaaagctcacccatggcacaagatctttcacaagcgcttacctcctgaggctgtggatctcgtctcaaggctactgcaatactctccaaatcttcgatgcacagctctggaggccttggttcatccattctttgatgaactgcgtgatccaaatacccgcctaccaaatgggcgttaccttcccccactctttaacttcagagccaatgagcttaaaggagtgcctccaggcatgctggtgaaactgattccatctcatgcaagaaagcagtgtgccttgtttgcgtcatagtgtagcctcgtgtaaatattatctactctgcctgtagaagtgtatgtagtctgtttcaggttgttaatagttggttccttccacctagttctgttaatttgtccccctcacccaaagaaagaaaaatcctccttccaatttcttatatttcttgctgcctgaagaaagccgtttgagaagaagcttcaagttgatataattggtttcctcatcttcaaagttttaacagattgtattaagtattaatactattaattagaagaaccattgtatactcatgtagtatactagaacactagtacgatgtgatccgggaggggatgttttaaagcttgtttgtatatccctgcctccccttaattatgagaaattttactttggatgattatcttgctttcaaagaatagttgttcatgttcccttattcaatgttatggtgggggctggtgagagaaaggagattagggttactacctcctaaggtgtgaatacatgctcataacttagttggtttataccatctcaattttggtttactttgaaaacctaagttatatttcagacttataactttttaagaaaagctacatcgataaatattcgttgt

SEQ ID NO: 5086 - DNA, 1044 bp, Glycine max
tcgagtcagctacgaggccccccccccttttattccatatttttggcatttaatttttcatgtcacttgttttctgccatctttatggtctctttactccagtatttaactttctttgaatttaaggtttcactattttctagaattgatgcttatctggattgctgtttaacttttgcagatgacaaacgcaagagaagctgaacaaatggatgatgaggatgattctattaggaagatgaaggctgctgaggaggctttggaagaaaaacagaagcaaaaaccttcatttgagctatctggaaagcttgcgggtgaaacaaatcgagttagaggtgttactttgttattcaatgaaccaccagaggctcgcaaaccagatattaaatggaggctttatgttttcaaggctggtgaagtgctaaatgagcccctttatatacatcgccaaagttgttatctttttggaagggaaagaagggttgctgatatccctacagatcatccctcttgcagcaagcaacatgctgttattcaattccggcaagttgaaaaggagcaacctgatggtacattattaaagcaagtaaggccttacgttatggaccttggaagcacaaacaaaactttcataaatgatggtcccattgaacctcaacgatattacgaacttagggaaaaggacaccattaaatttggtaacagtagtcgagaatatgtattactacatgagaattctattgggcaatagacattagtctccaatttcgctctatctactcatcaatactgattaaagcagcatttgacctgcagttttttgtaattcatgtccaacttatgtgtattccctcctttcagaagtttctagatcagtttgtcagcaagtttcttgttattattatatatacaagacacgttggacaatttatctttaagttgtataattcaaacttgagccctcaacttaagcaaagttcgctgttgtaaactgataaatttgccttaagaatttaactgcttggttggaacaaaaaaaaaaaa

SEQ ID NO: 5087 - DNA, 806 bp, Glycine max
cccaggatccgagatgtggaaacatttgccgaatctacatacgccgaagcctagaaataaaaaatttaaattaaatattattgctccatccggaattaatttccccacctaccttgggataagtggttgccggaagcttgagacttgaatggtaatgacttgaacacccgattctggtattaatataacttaataagttcatcccgtgaggtaatctatacccgtgctataaggaatataaaaacggacttgtatttttcttttataggatactggaaatgagactacagtaagagtccgggtgtaagctcaagtagtggtagctccgtgaataacaaactctatatttaattcctacccactaagtcaaggagtccagtctgagtagctggatcatcgaaagacttccattagtgaatcgttatagcattttgtatcgatagcgcttctttttgaggagattccgtctttggtccatgcttgcgatctcggttgtgaaattaaaattatcttttggcttggtaatggttttctttttctttagggaatgaatgttgttcctttgtttcatcgcatagaagttttgttttgcccaagtctgaagatagagcgtcgtaaaaaaagaattaattacttaaaggaatgagctctcacaggttgagttttttcggccatattttgcgtataaaaaaaatagcgtatagagaagtccgtcctttcttttgttaaacaggctggctgtgacttcggctcccttaccaaaaaaaaaaaaaaaaaaaaaaccaaaaagcggccgctctagagga

SEQ ID NO: 5088 - DNA, 1527 bp, Glycine max
  misc_feature (1508)..(1510): n is a, c, g, or t
  misc_feature (1518)..(1519): n is a, c, g, or t
  misc_feature (1522)..(1523): n is a, c, g, or t
cctccccccgaattaagcgggcatctgcttaatcgaactattcagattctaaaaaatgagttggtggtgggctggagcaatcggtgctgccaagaagaaattcgaggaagaggaaccgccgcgaagcttccagagcgtgggcctggtgatcggcgtgacgggcatcgtgggcaacagcctcgccgagatcctccctctcgccgacacccccgccggtccatggaaggtctacggcgtcgcacgccgcccccgtccgccgtggaacgccgaccatcctgtcgagtacatccagtgcgacgtctccgatcccgccgacgccgaagccaaactctccgccctaaccgacgtcactcacgtcttcttcgtgtcgtggaccaaccgctccaccgaagcagaaaactgcgaagttaacggcgctatgttacagaacgtgcttcgcgccgttatccccaacgcccccaatctccgccacgtgtcactccagacaggcggcaagcactacatcggacccttcgaattcatcggcaagatcgaatctcatgaacctcccttcgcggaggatatgccgcgtttggatgcgcccaatttttattacacccaagaggatattctttttgaagaaaccgctaagaaagagggtttgacctggtcagttcacagaccccaagtaatctttgggttttcgccttacagtttaatgaacatgattgggacgctcagcgtgtacgccgcaatttgcaagcacgagggtgttccgttgagattccccggcacgagaggcgcgtgggagagttattcttgtgcctccgatgcggatttgattgcggagcagcacatttgggccgcggttgatccctacgcgcggaacgaggcgtttaactgctccaatggagacgtgttcaggtggaagcatctttggaaggtgctggcggaacagtttgggattgaggagtatgggtttgaggaagaaggtttgagtttgtcggaattgatgaaggataagggtcctgtttgggatgagattgtgagtgagaatcagcttctgcctaccaagcttgacgaggttgctgattggtggtttgtggatcttattttctcaggggagggaatgttggatagcatgaacaaggccaaggaacatgggtttttgggattcaggaactccaagaattcgttcataagttggatagacaagaccaaggcttataagattgtgccttgaatttaattcattctcttcttgctgcttctgtttaatttctcatgtgcgtctttgtttgtatttccctgtaatttatatcattatatggaatgaatgaatgaataaaactcgaggatataactcgtatgagtggttgggataatccagagttatgtcttgtgttgtgttgtaattttgtatccacagtttctggtatttagtatttacagaaagtggaagcaaaacttgaatgataagcaagaaccagttttcggtaacgtacctcattgttctttcatttatatcnnnattataannggnnattg

SEQ ID NO: 5089 - DNA, 2145 bp, Glycine max
cggacgcgtgggcggacgcgtggggtctgagacactgtgctccctctcttctctattctatttctatgtgacactctctctcaaaccctatccctccaatccccaatcaatggcgatcctctctcaatccaccgccagcttctccttctccttctccttcgtctccactcggaccgattccactcgcctaactcgcttcccctcccgcgtcaccttccgagcccgctcgccccctcgccgccacgccctcgtctcttcgcgcctcaactcctccaggtcccccgacgccggcggctccctgtcgccggacaacggcagcggtgacgtcgcctaccagctccaccacgacttctctccgcggcgccggcgccgcggctcgccggtgttcgtcacgctgccggtgaattccgtcggccgggagggccgtgtcgcgcggcccaaggcgatgatgttctcactcaaggctctcgccacggccggcgtggaaggcgtggttattgaaatttggtggggattggtcgagaagaacaaacctagggtttacgattggagagggtatgaggaactcgtcgcgatggcgtgcaagtgtggcctttaaggttcgagtggttctcgcctttcatcagcatggcacgggacctgatgatcccaattggtaggtattttcctagtcatgagcctcatactgttgctacgcgtccgtccacgcgtgcgattggatacctattcctctatgggtgcttgatgagatacagaaagatatagagttagcgtattgtgacaggtttggaagaagaaatattgaatacatttcccttggatgtgatattcttcctgtgctacatgggcgttcacctatacaagcgtatgcagattttatgaggaattttagggacactttcgggtctttgcttggtgttatcatcacagtaagggtcgacagattggcatgggtcctggtggggaactaagatatccttcattctcttcacaggagccaaatttggctcggcctcatgaacttggagagtttcagtgctatgataagtatatgcttgcttctctgaatgcctctgcaagaaatattggaaagcgtgaatggggaaatggtggtccatttggtagtggaagtttgatgcaaaatccggagcatactgattttttcaaaaatgacggtggctcttgggacacaccatatggtaaatttttccttgaatggtactcagatatgttgctgctgcatggggagaggatttgtagggaagctgaaactatatttaggggttcggaagtccatatatcagcaaaattggctgccattcactggcactatgtcacgcaatcccatccatcagagttaacagctggttattataatacttctaacagggatggatacttacccattgctcgcatgtttagcaagtatggattttcaatgtgctgctcttgttttgaaatgcaagatgctgtaatgcagaagatcaatccagatggtagtcctgaaggttttcttagacagcttttgctggctgctaggctctgtgatatatcactcgaaggtcaaaatttttcaactaatttggatgatggtgcattcacccaggtgcttaagatgtcaaaattttactcagatgggattgagaagcgatctttctcattcaactttgtaagaatggacaaaagattgtttgaatcccgaaattgggatcggtttactcgttttgtgagacaaatgtctaatggaaacatttttcgagccagattaaattctgttcgtgacgtacggttgaagaccacaccagtggtagcagcagtgggactattgtatcacctatatcagcactcttgaaactagtgttggccttttttctttaggcatatgtagtatttatgcgatcgatgcaagaaagtatgatgacctccggtcgaatgttgttaaatgtgtagtaactgctgattcttcaaatgattcttttattgctttttggcaagaagttacttccccaaggtaacacattacattgccttccagtttttttttttgatatgggtggcatgttatccacttgtacctgtatttccagtagacagagatatagtttaaaaccagttactgttgagatcttggttcttcccagcccc

SEQ ID NO: 5090 - DNA, 872 bp, Glycine max
taacaaaggtggccgtggtaccccggttgggccttattttatagggatcaaaggaaggcccttattggtagcatggagggggaaaaataggtgatttttttgggtgggctggacaaccaagaagaagatccagtggtgtatgtgtcacttgggagtggatacacaatgtcatttgaggaaattaaagagatggctttgggttggagctgagtggaaaaaaatttgtttggtctgtgcgcccacctgccaccaaatctggcactggcaactatctcacagcaggtgaggaaggagaaaccagaactatccttgggtctaataatgaaccatcaaactcttttcctgatgagttctaccgcatacaaaccaatggaattgtgatcacagattgggcaccacaattggatattttgaagcacccatcttttggtggttttgtgtctcattgtgggtggaactcattaatggagagtgtttcatgtggggtgccaataattggattgcctctttttgcagagcaaatgatgaatgctacaatgctaatggaggaagttggcaatgcaattcgagtagaggtgtcaccatctaccaacatggttggaagggaggagttatcaaaagcaataaggaagataatggatactgatgacaaagaaggatgtgtaatgagggaaagggctaaagagcttaagcaattagcagaaagagcttggtttcatgatagtccttcttatttagcactttcaaaaatcactcactcaaatggggtgtgataactcatttgtggtggttaaaataagtactcactttggtacaagaaaattctattctagaataaacaatcattattattgtcttatttaaaaaaaaaa

SEQ ID NO: 5091 - DNA, 1605 bp, Glycine max
attcaatcattagtttcatttcataattcccatctcatggccatctcaaacaataatcatcatgctcttctacttgcttcaccaggaatgggtcacataatccctgccctagaacttgccaagcgtttagtcactcacaaaatcatttccaaactcaccttcttttgtggttcaatcaaaacctctactccatcaaaagctgagacacaaattctccaatcagccataaaggaaaaccttttcgatctaattcaactcccccccattgatctcaccatccatgttagtcctcgtgacaccttagaaaccaaaatagcaattataatgcatgaaatcccactactttttgtgtccacaatatccagcatgaacctcaacccaaccatgatcatcactgacttcttcttcagccaagttatacctctagccaaaaacctaaacctacccacatttgcttttgcaccaaccaatgcatggctcgtcgcacttggtcttcacacccccactttggataaagaaatagaaggagaatatatcaatgaaagcaaaccgatctcaatcccaggttgcaaatccattcacccccttgatatgtttggtatgttgcgtgacaggacacaaaggatctaccatgaatatgttggcgcgtgtgaaggggcagcacttgctgatgggatctttgtgaacacgtttcatgagttggagccaaagacacttgaagcacttggtagtggacacattattaccaaggtgcccgtgtacccggttgggcctattgtaagggatcaaagaagccctaatggtagcaatgaggggaaaataggtgatgtttttgggtggctggacaaacaagaagaagagtcagtggtgtatgtgtcacttgggagtggatacacaatgtcatttgaggaaattaaagagatggctttggggttggagctgagtggaaaaaaatttgtttggtctgtgcgcccacctgccaccaaatctggcactggcaactatctcacagcaggtgaggaaggagaaaccagaactatccttgggtctaataatgaaccatcaaactcttttcctgatgagttctaccgcatacaaaccaatggaattgtgatcacagattgggcaccacaattggatattttgaagcacccatcttttggtggttttgtgtctcattgtgggtggaactcattaatggagagtgtttcatgtggggtgccaataattggattgcctctttatgcagagcaaatgatgaatgctgcgatgctaatggaggaagttggcaatgcaattcgagtagaggtgtcaccatctaccaacatggttggaagggaggagttatcaaaagcaataaggaagataatggataaggatgacaaagaagggtgtgtaatgagggaaagggctaaagagcttaagcacatagcagaaagagcttggtttcatgatggtccttcttatttagcactttcaaaaatcactcactcaaatagggtgtgataactcatttatggtggttaaaataagtactcactttggtacaagaaaattctattctagaataaacaatcattattattgtcaaaaaaaaaaaaaaaa

SEQ ID NO: 5092 - DNA, 1997 bp, Glycine max
gcattatatgcctttggctttattttagaaggtccctcccctgataaacttgtgccactggtgaatatggctttgaatttcatgctcactgctttgatgaaagatccaaataatcacgtgaaggacacaactgcatggactctagggcgaatgttcgaatttttgcatggatcagctctggatactccgattattactccagcaaactgccaacagattattactgtgctgcttcagagcatgaaggatgttccaaatgttgctgagaaggcttgtggtgctctttattttcttgcccaaggctatgaggatgctgcatctgcgtcctctccattgacccccttctttcaagatattgttcatgctcttctcactgtaactcacagagaggatgctggagaatcccgccttagaacagcagcctatgaagccttaaatgaagtagtgaggtgttctaatgatgaaacagctcctatggtggtacaacttgttcctctcatcatgatggagctccatcagactcttgagaatcagaaggtttcatctgacgagaggcagaatgagttacaaggccttctatgtggttgcttgcaggttatcatacagaagttaggatcatctgaaccaacaaagtatcatttcatgcagtatgctgaccaaataatgggtttatttttgagagtgtttgcttctcgaagtgcaacagctcatgaggaggctatgcttgccattggagctttggcctatgcaactggtgctgattttgcgaaatacatgacagaattttacaagtacttggagatgggtctccaaaattttgaggactaccaggtatgtgctatcacagtgggtgtggttggtgatgtatgcagagccttggaggagaaagtactgccttattgtgatgggataatgacccaacttcttaaggatttgtccagcaatcagctgcataggtccgttaagcctcctattttttcatgttttggagacattgccttggcaattggagaaaactttgagaaatacctgttatatgcaatgcctatgcttcagagtgccgcagagctctctgctcatacatctggtgctgatgacgatatgacagaatacactaattctttgagaaatggaattctagaggcatactcagggatcttccaagggtttaaaggttccccaaagacccagcttctgatgccatatgctcctcatgtgctgcaattcttggatagtttgtatatggagaaggacatggatgatgttgtgactaagacagcaattggcgtgcttggagatttagctgatactttgggcagtagtgctggccccttgattcagcaatctgtgtctagcaaagacttcctcaaagagtgtttatcatctgatgaccatttgattaaggaatctgccgaatgggccaagttggcaatcagtcgagcaatttcattttgaggctattgctatttcatggcttctagttcttgcatacatctgcatttgttgcgtgggggtctcaactgcatacatgagtcgggtcatcaccatttttgggaacaggtgttcggtcatttgggtctgcatttcatgtcagcaacaacataacatggtcatggagtctgctttttcatttttatttttaaaaatttattgttctgcattgctatggaggaagtcggtgggtgatgaccaatctttcttctgctaacttggcagaaaagatgtggtttttacgtacaggaggagaaacagggtgaaatgggggaaggagcaagaaaggagatagatgatatcccatgatatctgctgataccgtaactataggagtctatggtggtccagatattatgtcctttacttttttttttcttttcctattactattggctgtagagtgaaacaatcatcttagtccatccatccatgtgtttgggataggtaatgcaacatattttagccgttccttgaaattattcaaataattttttgtctcccgc

SEQ ID NO: 5093 - DNA, 1873 bp, Glycine max
acggctgcgagaagacgacagaagggggaaggggagggtgagtgagagagggagtgacactccaaggagccaagggaaaaacaaaaaacctgacctttccctttctccaaaggatcatcgaactaaaccaaatcaaaatcaaactttgtcacagttattggtgtgctacctccgttagttatataagacccttttataaactccttttaaggcttttcaatctccaatcacttcttcttgtgttgtcataacttcaacaacttctttcttctcgatctcacgatggctcatttggccctgtctcagatggctgtaactgttcctgttggcaacgatttgtctctcagaagatctgcagttaaggcccctaacttgaacttttgggataaatcatgggcaccagtatttactttggacttgaagccaaacaacccaagtttaagaagtcgtcatgtggtatgcatgtccgtgcaacaagcaagtgtatccaaagttaatgtctcacctttagaattggaagatgctaaagaacctccattgaacttatacaagcctaaagaaccctatacagcaacaattgtttctgttgataggctagtggggccaaaggctcctggggaaacttgtcatattgtgattgatcacggtggaaatgttccctactgggaaggacagagttatggtgttattccaccaggtgaaaatcctaagaaacctggggctcctcataatgttcgactatattcaattgcttccacaaggtatggggacttttttgatggaaaaactgccagcttgtgtgtgcgtcgtgctgtttattatgatcctgagacaggaaaggaagatccttccaagaatggcatttgtagcaattttttgtgtaactcaaagccaggagacaaaattcagatcacaggcccgtcggggaagataatgcttttgcccgaggatgacccaaatgctacccatataatgattgccacaggcactggtgttgctccattcagaggctatctacgccgaatgttcatggaatcagtccctgcatacaagtttggtggattagcatggcttttccttggagttgccaacactgacagtcttctctatgatgatgaattcagcaaatacctcaaggattatccggacaatttccgctacaatcgagccctcagcagagaacaaaagaacaagagtgggggcaaaatgtatgttcaggataagattgaggagtacagtgatgaaatcttcaaactcctggataatggggcccacatatatttctgtggtctgaaagggatgatgccagggatccaagatacgctgaagaaggttgctgagcaaagaggagaaagttgggaagagaagctttctcaacttaagaagaacaaacaatggcatgttgaagtctattgagattctctagttcagatttgcagagtagtccccctttgtctctgaaaggaaacaaaacaaaaaaagaacatttttcgtttggtgcatttaatcaataaaattcattaagcagcttgagtattgtagctgttctgtattagtaaattgcaatcatatattgtgcacttgatggatactgaatcgaaaaaccaagccattggtggtggcaatctggtagagtacattttgttaagggcagcaacatattttcttttgccaaattttgaattattctgtcaataaggataatcatcctctgaaatatcagcaaggcctagagtaatttcaagaagtacaagttatttttttatttaatattgtgagaattctgtcatatttcacaataacatcaaagtcttatcccttcaagggaagttgtatttcacaacgattggcaataaacagtggtccacagttc

SEQ ID NO: 5094 - DNA, 1758 bp, Glycine max
gtcagtgcgagggagtgacactccaaggaggcaagggaaaacaaaccaaaaagtctgacctttccctttctccaaaggatcatcaaactaaactaaatcaaatcaaaatcaaactttgtcacggttatattagacccttttataaacctctttcaaggcttttcaatcacaccctttctctaatcacttcttcttgtgctggcataacttcaacaacttattctttgttctcgatctcacgatggctcatttggccctgtctcagatggctgtaactgttcctgttggcagcgatttgtctctcagaagatctgcggttaaggcacctaactttaacttttgggataaatcatgggcaccagtatttactttgtacttgaaggcaaacaactcaagtttaagaagtcgtcatgtggtattcatgtcagtgcaacaagcaagtgtacccaaagttaatgtatcacctttagagttggaagatgctaaagaacctccattgaacttacacaagcctaaagaaccctatacagcaacgattgtttctgttgataggctagtgggaccaaaggctcctggggaaacttgtcatattgtgattgatcatggtggaaatgttccctactgggaaggacagagttatggtgttattccaccgggtgaaaatccaaagaaacctggggctcctcataatgttcgactatattcaattgcttctacaaggtatggagacttttttgatggaaaaactgccagcttgtgtgtgcgtcgtgctgtttattatgatcctgagacaggaaaggaagatccttccaagaatggcatatgtagcaattttttgtgtaattcaaagcctggagacaaaattcagatcacaggcccttcagggaagataatgcttttacccgaggatgacccaaatgctacccatataatgattgccaccggtacaggtgttgctccattcagaggctatctacgccgaatgttcctggaatcagtccctacatacaagtttggtggactagcatggcttttccttggagttgccaacactgacagtcttctctatgatgaagaattcagcaaatacctcaatgactattcggacaatttccgctatgatcgagccctcagcagagaacaaaagaacaaaaatgggggcaaaatgtatgttcaggataagatagaggagtacagtgatgaaatcttcaaactcctggataatggggcccacatttatttctgtggtctgaaagggatgatgcctgggatccaagatacactgaagaaggttgctgagcaaagaggagaaagttgggaagagaagctttcacaacttaagaagaacaaacaatggcatgttgaagtctattgagattctctagtgcaggatttgcagagtagtagtccccttctgtctctgaaaggaaacaaaacaaaaaagaacattttgcgtttggtgcatttagtcaataaaattcattaagcagctgagtaactgtagctgttctgcattagtaaattgcaatgatatattgtgttcttgatggatacagaattgaaaaaccaagtcattagtgtagtgacaatcttggataatggggcaatctttgttaacatattttcttttgctaaattttgaattattattttaataaggattatcatcctctgcaatgcaggaataatgtcaaaaagtctaagatgttgtgcaagtgcttgaacttaaaatgaagaatcatgtgagctcctttaaat

SEQ ID NO: 5095 - DNA, 2020 bp, Glycine max
tttacggctgcgagaagacgacagaaggggacatatgcagtgtggggaaggagtaaacaaacgttggagtcagaaatgaaagagcaaaggaaaaaccatgcagctcactgtcttgtcctaccttatccagcccaaggacacatcaatcctatgcttcagttctccaagcgtttggtgcagagaggagtgaaggtaacacttgtaactgttgtgtccaattggaagaacatgagaaacaaaaacttcacttccattgaagttgagagcatctcagatggctatgatgatggagggcttgcagcagcagagagtcttgaggcttacatagagaccttttggagggttggatcacaaacttttgctgagcttgttcagaagcttgcagggtcaagccaccctccagattgtgttatctatgatgctttcatgccgtgggttcttgatgttgccaagaaatttgggctacttggtgctactttcttcactcagacatgcacaacaaacaacatatacttccatgtttataagaagttgatagagttgcctcttacacaggcagaatatttgttgccagggttgccaaaacttgcagctggggacttgccatctttcttgaacaaatatgggtcctatccaggctactttgatgtagttgtgaatcaatttgtcaacattgataaagcagattgggttcttgcaaacagtttttatgaactggagcagggggttgtggattggctggtgaagatttggccattaaagccaataggaccatgcctgccatctatctacttggacaaaagactccaagatgacaaggactatggtgttaacatgtataatccaaactcagaagcttgcatcaaatggcttgatgaaaaaccaaaagggtcagttgtgtatgtctcttttgggagcatggcagggcttaatgaggagcaaactgaggaactggcttggggtttgggagatagtggaagttatttcatgtgggtgattagagattgtgataagggaaagcttccaaaggagtttgctgacacatcagagaagggtttaatagtctcatggtgtccccaactacaagtcctaacacatgaggctttggggtgttttctcacacactgtggttggaactccacattggaagctttgagcttaggagttccagtgattgcaatgccactgtggacagaccagatcacaaatgcaaaacttctaaaggatgtgtggaaaattggagtcaaagctgttgctgatgagaaagagatagttagaagagaaacaatcacacattgcataaaggaaatattggagactgaaaaaggaaatgaaataaagaaaaatgccatcaaatggaagaatctggccaagagttatgttgatgagggaggaaattctgataaaaatattgcagaatttgtggaagaattggctcaccgctgtgctgcaataaattgatggggtaaaaagttctgtgccacagccaaattatgctatgttaattcttccaagaataatagttgttggtttctttaataggtaaagagaaagcaaggttgtcagtttaaactttaaattagtgtgacaatttgtatgtcttttaaaatctcttttttttagcatttagttctatgtcaattgtgtaagttggtttcctccatcataataagaatttatttctgactcctcaaaacaaaacggatttgattgttgactctactgaaaatctacatgcagttgagttatctggtctaaggtgactttggcacaatagtaattaaggtaaaggggaaaaaatagaattatttatgacatttttttcagctataatatttttctttcactcttgtcctttcctgattacacgtctctcctgtaaatcaagtccattgcattgtattcatttacatttgtgcatacggattgctttcttgagttacaaattacaatgtgtatcatctgctgtagtttgatgaagtgaaaatttacttagatgaagcaattgcagctcaaaaaa

SEQ ID NO: 5096 - DNA, 2129 bp, Glycine max
gataatagtggcataagaggggatctgggtaaagcgagagagctggacaacttgttccgcagcttggtcagctcaagaatttgcagtatttggaactctacagcaataacattactggccctattccaagtgacctggggaatcttactaacttggtgagcttggatctgtacctaaatcatttcactggcccaatcccagattcattgggcaagttgtcaaaattgcgtttccttcggcttaacaataacagcttgtcaggtcctatccccatgtcactgactaatattacagctctccaagttctggatttgtctaataatcatctatcaggagtggttcctgataatggctccttctcattattcactcctatcagttttgcaaacaacttggatctatgtggacctgtcactgggcacccttgtccaggctctcctccattttctcctcctcccccttttgtccctccacctccaatttctgccccagggggtaatggtgccactggagcaatagccggaggtgttgccgctggtgctgctctattatttgctgcacctgcaattgcatttgcctggtggcgtcgaaggaaaccacaagaatttttctttgatgtgcctgctgaagaggaccctgaagtccatctgggacagcttaagaggttctcactgcgagaactgcaagttgcaacggatagtttcagcaataagaacattcttgggaggggaggatttggtaaggtgggccccccccgcttgggcagatggttcactggtggctgtgaaaagattgaaagaggaacgcactcctggtggggagcttcagtttcagactgaagtggagatgattagcatggctgtgcatagaaatctcctccgactacgcgggttctgtatgacaccaacagaaaggctacttgtttatccctacatggctaatggaagtgttgcttcttgcttaagagagcgtcctccatatcaagaacccctggattggccaacccggaaaagagtagctttgggatctgcaaggggtctttcatatttgcatgatcattgtgacccaaagattattcatcgtgatgtgaaggctgcgaacatattgctggatgaagagtttgaggctgttgttggggactttggattggccaaacttatggattacaaggacacgcatgtgacaactgctgtacggggcactatcgggcatatagctcctgagtacctttccactggtaaatcttcagagaaaactgacgtttttggttatggtatcatgcttctggagctgatcactggacagagagcttttgaccttgctcgactcgctaatgacgatgatgttatgctgcttgattgggtaaaaggacttctgaaagagaaaaagcttgaaatgttggttgatcctgatctacaaaacaactatatagaaactgaggtagaacagttaatccaggttgcactgctctgcacacaaggttccccgatggaccgacctaagatgtcagaagtggtgagaatgcttgaaggtgatggcttggcagaaagatgggatgagtggcaaaaggtggaagttctccggcaggaggtggagctggcccctcatcctaattctgattggatcgtcgactcaaccgaaaatctgcatgcagtagagttatctggtccaaggtgaccttggcacagtagtaaattaagaagaaaaaaagaaaagaaaagaatggatttatttatgacttattttttaactataaaagttttcttactttttccctttttggttccttcaagtgccatatcctgtaagtccgctgcattattttcatttacatttgtgcataggggtcgctttgtcaagttgcaatttgtatcatctgctgcatttgatgaagtgatgtttacttagatgaaacaatggcagcttaatctttttgtacacccttgtttcatactcgttcaatctatagtttatatcttatctcattcttatatgttttgtatgatagtaacacccctaaaagctgtggaaccggttcttgctaaaatcccatttcaaatgtggattttattatatggttattaccgaataatgtcccatacatgtgataagttatggtaataatattg

SEQ ID NO: 5097 - DNA, 1582 bp, Glycine max
tcagctacgtaggccccccccccccccacactcttgagagccagacgacagagtgcagcattgctttgcttcgctgttgatccattctggagagagaaacactttttcagttctctctctctctctctaagatggccgacgatccaatgcccacgcgctggtctttccaggacttcaaattgtgttatgatgctaagtttggtagaaagaaagtcgcggagaacggagatgatgctgccggtaaagcggtcagcaatggaaatggaaattcagtgacagtggccattgtgtccaatggcaacaaaagggcatcggaaatggctgtttatgagcagtttcgaagcgaggggcagaatcagattcacacaaatggctttgtgccgacccttacagatgaaaggccgcagaagtctttgcttccaccctttgaatctgcggaaatgcgagctttagcagagagcttaagtagggatatcattcgtggaagtccagatgtgaagtgggaaagcatcaaggggttagagaatgccaaacgtttactgaaagaggctgttgtgatgccgattaagtatcccaagtacttcactggtctgttatcaccatggaagggtatcctcctttttggcccaccggggacaggaaagacaatgcttgcaaaggcagttgcgacagagtgcaatacaactttttttaatatttcagcctcatctgtagtcagcaaatggcgaggtgattcagagaagttagtgaaagtgttatttgaacttgcaaggcatcatgcaccctcaacaatatttcttgacgaaattgatgcaatcattagtcaacgtggtgaagctcgcagtgaacacgaagctagtagacggttgaaaacagagcttctcattcagatggatggtttgacaaagacagatgaactggtttttgttttagcggcaacaaatcttccctgggaactggatgcagccatgcttcgacgtcttgagaagcgaatccttgtaccacttccagaaccagttgcgagaagagcaatgttcgaggaactccttcctcaacagcctggcgaggaatcgatcccctatgatatactggaggataagacagaaggatattcgggatcggatatccgattactctgtaaagagacagcaatgcaacccttaagacgcttaatgtcacaacttgagcagaaccaggatgtggtgcctgaagaagagttgccaaaagttgggccaatcagatctgaagatatagagacagctttgagaaacacaaggccatctgctcatctccatgcccacaaatatgacaagttcaatgctgattatggtagtcaaatactacaatgacaagttgtatttgttattgtaaggtcttccacaatttgattactgttgtaagactagtaaacttcaaacattattttggttatgcaacttttttttgcattcgttcttctccattattagtactgagtatttttacatatctaagtaacaaatgcttgtgattatatttttaaattcactcattctttgcttttacattaaaatattattatgacaaaaaaaaaaaaaaaaaa

SEQ ID NO: 5098 - DNA, 1123 bp, Glycine max
aaaacttgaattaaaattaattttacaaaattgttttttaacaaacacaagttttcatacgctgtcgccgacctatgcacagacttatatagtctctatgtgctagcttactggttttcctttcgtactttaaaacgaagcaaagaaaaatgtcccaatgatatctgaacacgtcaccgttttgactccttcttttggaaccactctgcctagatgctctgcaagtattgggccgtgacgcgttgtccatcaccgacgcgtcagcctaacaaacccgccactgaggcatatttcgttgaatgaatcttagagagagtgagtggcctttggatctgaaatgagtttcttcgatttcatcgtgttgatgatagggtcgctctttctgttcaaagctttcgattttactttctgtgtctccttcttctgcttcttttgattcccccaaatcttcagttttaaaaaccctaatctgctgccatgaggaagaagctcgatacccgtttccctgctgctcggataaagaagataatgcaggcagatgaggatgttggaaagatagcactggctgtgcctgttttagtttctaaagctctagaactatttttgcaagatctttgtgaccgcacttatgaaataactcttcaaagaggagcgaagaccatgaattcattgcatttaaaacattgtgtacaaagctataatgtctttgactttctgagggacgttgttagcagggttcctgactacggccatggccatggccatgctgaggctggtcctgatgatcgggtcattacaaaaagaaggaaagctattggtgatgatggtaatgacagcgatgaagaggctaagaggagcaagatgcttgagttgggccacactggcagtactggtaggggaagaggccgaggtagaggaagaggccgtggccgagggcgaccacctttaaatagagagacatatcatcaggatgctgaatctgagccttgcacttctgttcagccaagcaacccacaaaatacaaccacaagtgttgcatggaatagtgggttctgagtcaaaggaaataccaaacgagcagacctattgccagttcctggttgaaagcacctgattcgctccg

SEQ ID NO: 5099 - DNA, 1644 bp, Glycine max
ctcattgcattgtgaaactttactactctctgctgcgtgcgccccccccccatttaattatggagtatctgcctgggggtgacgttatgactctgctgatgagggaagacaccttaagtgaaaatgttgctagattttacattgcacaaagtgttctggccatagaatctattcacaaacacaattacattcacagagatattaaacctgataaccttcttctggataaaaatggtcacatgaagctctctgattttggtctctgtaagcctctggattgtattgccttgtctacactgcatgaaaatcagaccatagatgatgaaactttggcagaaccaatggatgttgatgatgcggacaatcgaagtagctggagaagtccacgtgaacagcttcaacattggcagatgaacaggaggaagttggcattttcaacagtggggacaccagactacattgctcctgaagtacttttgaaaaaaggatatgggatggaatgtgattggtggtcactgggagcaataatgtatgaaatgctggttggttacccaccattttactccgatgatccaataaccacatgcagaaagattgttcattggagaaatcatttaagatttccagatgatgcccagttaacacttgaggctaaggatctaatttataggttgctctgtgatgttgatcataggttaggtactcgaggggccattgaaataaaggctcatccttggttcaagggtgtggattgggataaactgtatgtcagctacgtaggcccccccccccaagtcaacggggaactggatacccaaaacttcatgaagtttgatgaggttgatccaccaacagcagcaagaaccgggtctggatcctcacgaaagatgctaactaccaaagatctaagtttcgttggttatacttacaagaatttcgatgctgtaaaggaagggctccgtcaatcttttggtgattccatgcaagagtatgcttctaaacgggcagctgaagaaacaagtttacaaatgcttgcatcctctggagatccaatggttccataactttgtgcaaattgaagtccatcctgttgggtttttgtgtacttgctttggctttaaatattcggccaagaacatgtattatggtgtactccaattcctatgccatttgcaagaaaaatgtgtacagcaagcagttgacagcattgtcaaagcttgtagggcaaccccgcgcgtctgtatttgaattttcaacttaggaactgagagttgtgcgactgagtgctcctgtcctggctgcccaggttggctgaggaagacttgccttctctagtggcagttgctggttaaatgttagttatggacaaaaattgctaaggaactattaaagcatcctgaaaattattcgatgtgatgtgtacatttattggaagataacataaattaaactattaaaacaaactatgcttggggatggagtgtggaattgtctttagcagctcagttgcttgccctttttccctttttatctatttcatgtggaaaagtgcaattagtgacgtcaacctcactgtcctggtcactagctaatgcttgattgaatacaaacaactttttcttaaagaaaaaaaaaaaaaaaaaa

SEQ ID NO: 5100 - DNA, 920 bp, Glycine max
cccacgcgtccgtacggctgccagaagacgacagaagggggagaaagtgtggtgtgtgttggagttagagagagaaagaaaaaaaaaaaggttcagaagaatcagataggttagatttatatacaaaataaagaatagatacacttggagttggagttacacattattctctctctcactcacacacactcagagtgcaagctagagagagagagatggaggatctcgaggaggaagagaacggagcggaggaggtgttggggtcaagcttgaccatggagaaggtggcggcggcgaagaagttcattgagaatcattatagggctcagatgaagaacatccaagagaggaaggagaggcgttgggttttagaaagaaaattggcgtcatcggatgtgccaaatgaggaacggatcaacctcatcaaagatttagagaggaaggagactgaatatatgcgattgaaaagacacaagatttgtgttaatgattttgaacttttgaccatcattggaaggggggcttttggggaggttagactgtgccgggagaagaaatctggaaatatttatgctatgaaaaagctgaagaaatctgaaatgcttaggagaggccaggtggaacatgttagagctgagaggaatttgctggccgaagttgccagtcattgcattgtgaaactttactactcatttcaggatgctgagtacttgtatttaattatggagtatctgcctgggggtgatattatgactttgctgatgagggaagacaccttaagtgaaaatgttgctagattttacattgcacaaagtgttctggccatagaatctattcacaaacacaactacattcacagagatattaaacctgataaccttcttctggataaaaatggtcacatgaagctctctgatttt

SEQ ID NO: 5101 - DNA, 1600 bp, Glycine max
agttggaggagcaaaatcgagctttgcaaatggaaaagatgaatacaatgatggcgagccaggcgagagcttcgtttcagaaggtcacgagtaatggaatgagaaggcaatgcactcaattttggggttgctttcgatgatgcaagatgataatttgaagagtgaacagaaacttattgtgaattcaatgctaaggcccagcactgtattgtcaaacttgataaatgatgctatggactactcagcaagggatgatggaagattccctttggagatgaaaccttttggattgcatgccatggtgaaagaggcagcttgtcttgccaagtgcatgtgtgtttataggggctttggttttgtggttgatgttgataagtctttgccagacaatgttataggtgatgaaaagagggtttttcaggtgattttgcatatggttgggaatgcaataaatggtagccatggaggaggggttcttgtatttcgagtttttgcagaaactggaagtcaaggaaggaatgaccaggggtggacagcctggagaccaagctcttctagcggggatgtaaatattagatttgaaatagggatcaataatggtgatcctgaattggagagttcagttccttcagggcagctggcgggtacaaatcgcatgagtgataaggttgaggaaaggttgagctttagcatttgcaagaggataatccagttgatgcaagggaacatatggttagtaccaaatgctcaaggttttcctcaagtcatggccctttttcttcggtttcaactgcggcggtctattgccgtatccatctctgaacctggggaaaattctgagccatccaattcaaattctttcttcagaggtctgcaggtcttgttggccgacaatgacgatgtaaatagagcggtgacgcagaagttgcttcagaaactaggctgtgttgtgacttctgtttcttcaggattggaatgccttagtgtcattggacctgctggatcttcctttcaagtcattcttttggaccttcacatgcctgagcttgatggattcgaagttgcaacgaggattcgcaagttcagaagccggaattggcctgtgattgttgccttgactgctagcacagaagatttgtgggaaagatgcatgcaaattggcatgaatggagtcataagaaagccagttttgttgcatgggattgctagtgaactcagaagaatactattgcagggaaatagtgccatgtgaggactcatgctgcaagttaaagcacttcatcatatcaagaaattaagctataaaaaaatttcagtcacattttccataaaatttggtagcacacagctctctttggctcctattttgcagcaatattttagcttagagatgttgtattataccccaactttcataagaaaattaaatggcatacaaattagttccttaatttctttcaatatgtttcattttgctagtgtcatgtatgtagtttcaattttatgcatcagggtattccataacatttgaacattaatctcttttcaaatgtagatattattaaagtaagttttatttttcttaaaaaaaaaaaaaaaa

SEQ ID NO: 5102 - DNA, 1027 bp, Glycine max
gataataaatcacggctcgagctcggctataatttacgtgatctttcagagggagagagaaaaaaatgcagaagcatggttttgcatcaaagcgtaacgtgttgccgtatcaaacgccgaggctaagggaccactacgttctggggaagaagctgggacaggggcaattcggtacgacgtacctgtgcacccacaaggttacagggaagctctacgcgtgcaaatcgatcccgaagaggaagcttctatgccaggaggattacgatgacgtgtggagggagattcagatcatgcaccatttgtcggagcatcccaacgttgtccagatacaaggcacgtacgaggattccgtgttcgtgcaccttgtcatggagctctgtgcagggggagagcttttcgacaggatcattcagaagggtcattacagcgagaaagaggccgccaagttgataaagaccattgttggggtggtggaggcttgccactctcttggggtcatgcatagggatctcaagccttagaatttcttgtttgatacccctggtgaagatgcacagatgaaggccaccgattttggcctctctgtcttccacaagccaggacaagcctttcatgatgtagtgggaagtccctactatgttgcccctgaggtgttgtgcaagcaatatggaccagaagtggatgtatggagtgctggtgttatcctatacatcttactgagcggggttccacctttctgggctgaaaccgaagcaggaattttcagacagattttaaatggagatcttgatttcgtttctgaaccgtggccacgtctctcagaacatgctaaagaattggtaaaaaagatgttggatagggaccctaagaaaagaatttctgctcatgaaggtggatgtgacccttggatctgtgatgatattgcgcccgacaaacctctggactctgctgttttgacacgcctaaagcttttctcagcaatgaataagcttatgatgatggcattacgggtcatagcacacagact

SEQ ID NO: 5103 - DNA, 2878 bp, Glycine max
aacgaccccccgcgcccgggcggctgcgggttggcgaccgaagggggtgtgtgtttaaattcaataagagactaagttgaagacttgaagccatgagatgaatcacttatctcttgacactgaagattctcttgcaagcttgctgctggagcttgcagccaacaacgatgtttcgggtttcaaaagattaatcgagtgtgaaccttcctccatagacgaggttgggttgtggtatggccgccacaaagagtcaaagaagatggtcaacgagcaaagaactcctttgatggttgctgccacctacggtagcattgatgtcatgacgttgattctttctctatcagaagctgatgtgaaccgatcatctggccttgacaaaagcactgcacttcactgtgcagcttcaggtgggtctgaaaacgccgtcgatgctgtgaaactgcttctagaagcaggcgctgatcggaattctgttgatgccaatggtcgccgacccggggatgttattgtttctccaccgaagcttgattatgtgaagaagagtctggaagagcttcttggaagcgatgattggagtctccttagggtgatgaggagcacatgcaatgggtgttcagcggaagatttgaagatgaagacaaatgaagtgagtgagaagaaagagtaccctgttgatctgtcccttccggacataaagaacagcatatactcaagcgatgagtttcgaatgtactcgttcaaggttcgaccttgttcgagggcttattcacacgattggactgaatgcccctttgttcatccaggggaaaatgcccgaagaagggacccgagaaagttccattatagttgtgtaccttgtcctgaatttcgaaagggtgcttgcaggagaggggatatgtgtgagtatgctcatggggtttttgagtgctggctgcaccctgcacaatatagaacccggctttgcaaggatgggactaattgtgcaagaagagtttgcttctttgcccacaccaatgaagagcttagaccgctctatgtttcaaccggttctgctgttccttctccccgttccagtgcctcctctgctatggattttgttgcagccatctctccttcctctatgtcggtcatgtctccctcgccgttcactccgcccatgtcgccttccagtgcttcaattgcttggcctcagcctaacatcccagcattgcatcttccaggaagtaattttcattccagtagattgagatcttcactcaatgctagagatttttctgtggatgattttgatttgttattacctgattatgatcatcatcatcatcagcagcagcagcagcaacagttccttaatgagttatcatgcctatctccacatgctatgaattgtaataccatgaaccgctctggtcgaatgaaacccttgactccttcaaatcttgatgatctgttttcagctgagagttcttctcctagatatgctgatccagcattggcttcagctgtattttctccaactcacaaatcagctgtcttcaatcaatttcagcaccagcaaagcatgttggcacccctgaatactaattttgcctctaaaaattttgagcatcctttattgcaggcctcgttgggaatgtctccgcgaaatgtcgaacctatttctccaatgggttctaggatttctatgctagctcagcgcgagaagcaacaatttcgcagcttaagcttccgagaactcggctccaactctgctgctgcctctgccgattcttggtcaaaatggggatcacctaatgttaaattggattggccagttggtgctggtgaagttggtaagctaagaaggtcatcatcatttgagcttgggaacaatggtgaggagcctgatttatcttgggtgcagtcacttgttaaggaatcaccagctgaagttaaagataaattggcaaccactgtctcatatgttgcagcagcagctgctggatcctccagtgagggatcaaacattagcacgcaaatggagtctgttgttgatcatgctgtactgggagcatggcttgaacagatgcagcttgatcatcttgtggctcagcaaaactgaaatgagtttctgctgaccctgaggtagttaacaacagaaatgtttcagtaaataataatcatatatattcgtttatgaattttgttgatggaagaaggttacagtaactaagaaaggaagcagtactaagaaaaagaaccacatcactgagcaaaattcattttgaggtttagtgttgcaaaagtaacttagaagggtcaggaaaccactgggtggcgttcacagaattaatgccagtgaagggttttttggctgcctatctcttcaaattttaggtccacattcctgtcaatttttccttccttgaggagcaaatgttgtatcacaatgaagtcctattcctaagtttgatctatcttttgattttgtttctttatattttggggtagaaaccaaagttacagaagggtcattggagtaattccttgtgtctctattttgttccaattttggggatgaaaacacaggttgctggatagtatatggtatttcttttgtaatctggaatcaataattgtcgatgccagggagtgggtaaattaggaatatttgaacattgatcctttgggcatgtaacattcaattgaagtttattgctatattgtttttaatacctatgtctctattctcaaaatgatactacattactgcactatctcagtgttagtagtttctatttgcgttgtataaattactgagttgtattgtagcatcaaatcctgtttatggagtaggtgctgtagattgtgcaggaactaaaatgtcatttatatggaa

SEQ ID NO: 5104 - DNA, 2131 bp, Glycine max
  misc_feature (30)..(30): n is a, c, g, or t
  misc_feature (33)..(35): n is a, c, g, or t
gacgtacgcatggcactgtcgtacgtaagnctnnncggaattcggcccccggggaaaaaaaaacgaataacattttgaggaggttcggtagagtggcgtggcgttttactcacaacatcatcaaaattatcaaatccacctcttccggcaacctcaatttctgctccctaaatcatgcttgcgtttcgatcgaagccttgttgcagttacaaggaaacagcgtccctcgcacttgcacacttcaggcacttggtgttcaactacgcacgcgccgggagctctcggtgccctccacgcgccggcttcggggttcggagaggctacatcgtcgttgcctcgttgggggacccacccgaagtctggtccggcggcgggattgtcgttcgccccgggaattccaatttcgaagtcgccggcggcggtggcgccccgaactccggcgattcaaaagaggggtgctggggtggctccaatttggggaacagtttcccaacgccaaaggaaatttgcaaggggctcgacaaattcgttattggacaagagagggccaagaaggtgctttctgtagcggtttataatcactataagaggatatttaatgaaacctctttgcccaagtggcctgcaggagattcagataatagtgtgaaagttgatgctgctgatgatgatagagttgaacttgagaaaagcaacatccttctaatggggccaaccggatcagggaagacattacttgccaaaactttggctcgatttgtaaatgttccctttgttattgcagatgcaacttcactcactcaggcaggttatgttggagaggatgtggaatccatattatacaagctcctcatggttgcagattataatgttgcagctgcacagcaaggcattgtttacattgatgaagttgacaagattactaaaaaggctgagagccttaatatcagtagagatgtttctggtgaaggtgttcagcaggcattactaaagatgcttgaggggacggttgtcaatgttcctgagaagggagcccgaaagcatcctagaggtgacaatattcagattgacacaaagaatatacttttcatttgtggaggagcctttgttgacttagagaaaacaatctcagaaaggcgtcatgattcttctattggatttggggctcctatacgtgcaaacatgaggactggtaaagtcacagaagctgctgtggcatcatcattattggaaactgttgaaagtagtgatcttattgcatatggtttaatacctgaatttgttgggaggtttcctatccttgtcagtttgtcagctttaactgaaaatcaactaattcaggtcctctcagaaccaaagaatgctctagggaagcaatacaagaagatgttccaaatgaatggggtaaagctacattttacagaaaatgctctaagatcaattgccagaaaggcaatatctaaaaatactggtgctcggggattacgatcgatactagaaaatgtgttggtagatgccatgtatgagattcctgatattagaacagacgatgatgttatagatgctgttgtcgttgatgaagaggccgttggaggtgaggggcgtgggagaggggctaaaatcctgtatggtaagggtgcattggatcaatatctttcagagcagaaaaatgattcagagaccatggaggcatcagctgcagataatgaagccgatacagaacttccttccattgttgccagcatgtaacatgttgcaaatatatattatagttatctttgtacatatagttgatacatttgttgaataatatacaagggttagaatcagatggttccatgtggcttgggctgaaatcaatgtaccatcaatgtagtttccacggtaaactccgtggatttgtttgcacaaatcatagtgaggtaaactaaatgccacatacttataagtgtactgtacctgattcgttatgtaaattttgagtggaattattgaaggaaccgaaaatgtgtatcgtttttatgatccaggttcattcttgtttttgtcctgactaaggccattcaactgaacttttgagtagaacaacatccgattggttaaataaaacattataattgcaagctttatt

SEQ ID NO: 5105 - DNA, 1966 bp, Glycine max
tcgagtcagctacgtagggccccccccccccgtgtgcgtgagcgtgatcagctacgtaggcccccccccccttacactgcgccacctcgttctctccgtctaaatagctttcacttcctcattcttcttcttcgtgcgtgcgtgtttctgtaaaatcgaatctcaagtctctgaatctgaatctcaacacaaccttcgttgttctcaacactgtgttcgtttttgctgccaaggttacaacactgaaagagacaccggagtaacataaataagatggaccaacaaaaccaaaataacactccagatggttcaggagaggtgcctttgaagcgcaaacgtggtcgtccacggaaatacccaaagccagattcagaggagagttcctatatcctagttagtcaaaataaaaggcagaatcctgttcgtgcggaacaagctccagtacctcctggatttgaaggggttaatggaaatcaacagcttcaaaggggtcaagataatcattcaaataatgaattggtgggccaggtagtttctggtgtaatcgaggctgtatttgatgctggatatttgctcagcgttagagttggtgattctgatactactttgagggggctagtcttcaagcctggacgatacgttcctatttcacctgataatgatgttgctccgagtgttccaatgatccaaagaaatgaagtttgcttcccctcaagagctgctcaggttcaaactcctctcccaaaggaaaggaatgaacagcctgtgaatgttcatagagttgaaactcttgcaatgaatggctcaccatctgtacctcaggtacctggaggagctgtcagttctagtaacttagttgcctctaccagaaacagcgtgccttctgtgacgggccagaccactcatcaactacccagaggtaatgtggtgcctgttctgccccaacctaataatttttcaaatggagtgccagtttctaatcaaccatcacaagccaagacccaagtttctctagggagcggagtgattgctgccaaagaaattcctgtagatggaagccatgcactcgtctctctcactcaaaccagccagaatttattgccaagcagtgtgcaaagtgaaggtgtttcaccacataatcaatcttcatccaatgtgttgaatgaagatcaagctaaatctatgagaatgcctggcatgccttttgagcaactggttactgaagttgttaagaggatccaagctccgtcagatgcaatggataccgagactgacaacagtaagtcaggtgacaatacagtagtgaagtatccaagctgtaggcaggaagacaaagttaatgagatggatcaacccatcttgattaagcctcttcaagctgtacagtctctacctcaggaaagctccacatctgctcccaaacctgcagactatactgaaactggcagagtgaatgagcttttgcaggttttgcagcataacaaaacagagaaccaggcatccaccatagcagcagagctaggatctggaaacaagttggatgatataaggaatttaggaactggacttgaagatggtggaacgttcaatcaacaaagcctttctgagcattgaatgcctgatttataaatttttatcattagaagctattgtgccagcagatttatctgtcataaagtaggtatttatctggcatggtgaaatatttagtttttagttctagtctcaaggatcttaaataattttaaacttgcaagccttattgagttttgtggagaaaaggtagcttgttatagttatatttatgtttttacattatagaccataccttcaagtcggatgttaattactttcctagcaatcgattattatccaaaactttaatttaatgtttcaatccatttaatcgggctgttaattgccaaaaaaaaaaaaaaaaaaaaaaaaaaaaaaaaaaaaaaaaaaa

SEQ ID NO: 5106 - DNA, 1933 bp, Glycine max
aagatataaagacggcgaaaagcatatcttcttccctcatgaagcttcccccaagcgaccacgctgtccattctttgccaccctcaatctctgtcctttggcgacctccatccatccatgaacttctccgacaacctccttcggtagacattggagtaacataataagatggaccagcaaaaccaaaataacactccagatggttcaggagaggtgcctttgaagcgtaaacgtggtcgtccacggaaatacccaaagccagattcagaggagagttcctatatcctagttagtcaaaatagaaggcagaatcctgttcgtgctgaacaagctccagtacctcctggatttgaaggggttaatggaaatcaacagcttcaaaggggtcaagagaatcattcaaataatgcaatggtgggccagctagtttccggtgtaattgaggctgcatttgatgcaggatatttgcttagtgttagagttggtgattctaatactactttgagggggctaatcttcaagcctggacgatacgttcctatttcacctgataatgatgttgctccgagtgttccaatgatccaaagaaatgaagtttgcttcccctcaagagctgctcaggttcaaactcctctcccaaaggaaaggaatgaacagcctgtgaatgttcatagagttgaaactcttgcaatgaatggctcaccatctgtacctcaggtacctggaggagctgtcagttctagtaacttagttgcctctaccagaaacagcgtgccttctgtgacgggccagaccactcatcaactacctagaggtaatgtggtgcctgttctgccccaacctaataattttacaaatggggtgccagtttctaatcaaccatcacaagccaagacccaagtttctctagggagtggagtggttgctgctaaagaaattcctgtagatggaaaccatgcacttgtctctcacactcaaactagccagaatttattgccaaccagcatgcaaagtgaaggtgttcctccaccacataatcaatcttcatccaatgtggcgaatgaagatcaagctaaatctgtgagaatgcctggcatgccttttgagcaactggttactgaagttgtcaagaggatccaagctccgtcagatgccatggataccaagattgacaacagcaagtcaggtgacattacagtagcgaaggatccaagcggtaggcaggaagacaaagttaatgagatggatcaaccgcccatcttgattaagcctctgcaagctgtacagtctcatcctcaggaaagctcgacgtctgctccaaaacctgcagactgtactgaaactggcagagtgaatgagcttttgcaggttttgcagcataacaaaacggagaatcaggcatcctccatagcagctgagctaggatctggaaacaagttggatgatataaggaatttagaaactggacttgaagatggtggaactgttcaatcagcaaagcctttctgagcattgaatacctgaattataaatttctatcatttgtggctatttattgtgcctgcagatttatctgtcataaagtaggtaaatatctgacatggtgaaatatttagagtttttagttctagtctcaaggatcttaaataattttaaacttgcaagcttgtggagaaaaggtagcttgttatagttgtatttattgtttttacattagagaccataccttcaagtcggatgttaattacattcctagcaatcgaatattgtccaaaactttaatttaatctttcaatccatttaattgggcagttaaaaaaaaaaaaaaaaaaaaaaagaagggcggcccctctggggatccaagcaaactatataaaaagcccccgaaaaaaaaaaaaaaaaacgggggggcccgtttaaagaaaccaaattt

SEQ ID NO: 5107 - DNA, 1815 bp, Glycine max
  misc_feature (588)..(588): n is a, c, g, or t
cattggactccaagattggcaagcgaaggatacctatttttttaaatatgctttcttggagtattatattagggaatcacgttccaaaagaaagaaaaaattcttggagaatcacaatttttttttttttttgctttctatagttcttaattaagagctagggaattaagggtcgcttttaaatgaaaggtacttgtcctagtgaatgtagatacgtgcatgttcactaacatatttgtgcaactttgcagtggtcatggcaaaccattcttctgggattcggcttcttggtcttcttgctgacaacaagacacattagcttgaggaaaccaaaactattctgggtttcagcagctgccccattgacatcagttattctgtcgaccattttagtctttcttctgagaaatacgactcatcaaatttcagttattgggcacttaccaaagggagttaatccaccatcagcaaacatgctatacttcaatggtccttacttggctcttgctatcaaaactggcatcattacaggggatcttatctcttactgaaggaattgcagtaggtagaacattttgcttcccttanaaactaccaggtggatggaaacaaagaaatgatggccattggtctaatgaacatagctggctcttgttcttttcatgtatgtacaacaggatccttttctcgatcagctgttaactataatgctggagcacagacaacagtttcaaatataatcatggctgcagctgttctagtgaccctcctgtttctcatgcctctgttctactatacaccaaatgttgtcttagcggccattatcatcactgctgtgattggtctaatagattatcaatctgcatacaaattatggaaggttgacaaacttgatttcttggcctgtttgtgctccttttttggggttctgttcatttcagtgcctttaggccttggtatagcggttatcatatcagtcttcaagatcctgcttcatgtcactcgaccaaacactttggttttggggaatataccaggaacacaaatattccacaacataaaccaatacatagaagctttaagagttccttcatttctcattttggctgttgagtctccaatctattttgctaactcaacttatcttcaagaaaggattctgagatgggttcgagaagaggaagagcatataaaagctaataatggagctccattgaagtgcataattttagacatgacagctgtcacagccatagacacaagtgggcttgacactttatgtgaacttagaaagatgctggagaagcgatcacttgagcttgtgttggcaaatcctgttggaaatgtgatggaaaaattgcataagtcaaatattttggattcttttggattaaaaggagtctatctcacagtgggagaagctgtggctgacatttcatcaatctggaaagctcagccttgatctcccatcaaggacgggaaagagaagttaaaggaaccataaaacttaaggggataaactttaaccttttgtttttgcctgcgatgaatacttgtttaaattccggagagtctaatttctgttagtagaaaccttcaaaacaatattaccccgtaaaaagaaaaaaggagtgccttgaaaatcaaggaccttgttcttttactagagtgtttcttatctcaggttgatcagctgatgcctgccgatgttactccttataatttctgctactttagcaattttgttaagagatgtttgataaccttattcatgtagaaaattttgagttgaaaatatgaatacaacctttaacg

SEQ ID NO: 5108 - DNA, 799 bp, Glycine max
gccctttcggagcggccgcccgggcaggtacgcggggattccaatatagcctcaagcacattgaggtcttcaatcaccaaaaatggtaaccactgtggcttcttacaacgtcactccatatcaaccaactcccaatgatcctttatggctatcagatagcgaccaacttggggccctaggccatgtagccaccatctacatttacaaagcaaaacccaacagcgacaccattgagaggttgagaaactctcttagaaagcttttagtgtactactacccagtagctggcaggttgagcttgacaaaaagtggtcgaatggaagtgaattgcaacgcaaagggagtgacgttgattgaagctgaaacaacaaaaacatttggtgattatggagacttttcagcatccaagtcgaccgatgaacttattccaaaagttgatgatactcaacctacagaagagattcccttactgctactgcaaataacaaggttccatggtggtgaaggcctttccattggagttcttttctctcatcctttgactgatgcgactggcctgattcacttcatgaacagatgggcaaagctgactcgaggagaagaactaaaccctgatgaaatgccatttctcgatcgaacactgctcaaattattaccaaatcagggatcagttccaagggttaaactcccagagttgaaggctgcaccacaaacaccaggaaaagaggagaagaagagaagtgctgcattgctaaaactcacatcaagccagatagagagggtaaagaagaagggtaat

SEQ ID NO: 5109 - DNA, 2093 bp, Glycine max
acttcaactctaacccttctctttccttcatttaatttattgcccatcctttctttgtcaaacaccaaagtccaaaccattttttgctccgatcaacatgaagttgatcaataaaccatcgcaactacgttccctcttgagccttttctgctccattttgctgctcttggaattagctttcgtggctgcggaggacccttatagattcttcgactggaccattacctatggtgacatttatcccctaggagttaaacaacagggtattcttatcaatggccaattcccaggccctgaaatctattctgttaccaatgacaatttgatcattaacgtgcacaataacttgaccgagccgtttcttctatcatggaatggtgttcaacaaaggagaaattcttatcaagatggagtttatggcaccacatgccccatccctcctgggaagaacttcacctacacacttcaagtcaaagatcaaattggaagtttcttctatttcccatctcttgctttccacaaggcagctggtggttttggagccatcaaaatccttagcaggccaaggatccctgtcccgttcccagacccagctggtgatttctcccttcttattggtgattggtaccaaatcaatcacaagaagcttcagagtgttctagattttggacacagacttccattccctcaagccgttctcatcaatggtcgtccaagtggcacaacattcacagttgagcaagggaaaacatataggcttagaatatcaaatgttggacttcaaaatacactaaactttaggattcaaggtcatgacatgaagttggtggaagttgagggaactcacaccatacaaaccacatattcttcattagacgttcacgtgggacaatcttattctgtgcttatcacggttgatcaagcacccaaggactactacattgtagtgtctacacgtttcactaacaaaattctcacaagcactgctatccttcactacagtaactcccaacaatctgtttttggcccaattcctagtggcccaaccactcaaatcgattggtcaatcaaacaagctcgttcaataaggacaaacttgacagcgagtggaccaaggccaaatccacaaggctcctaccactatggattaataaacattagtaggacaattaccttggtgagctcaacagcacaagtgaacaagaaacaaagatacgcagtgaacagtgtttcattcacacctgctgacactcctttgaagctagcagattactttaacattggagggattttccaagttggaagcatcccagatagcccttctggtagacccatgtatcttgacacctcagtcatgggtgccgactttcgagccttcgtcgaggtcgtgtttcagaaccatgaaaacatcatccagagctggcacattgatgggtactcattttgggttgtaggaatggacggtggtgtgtggacgcctaatagtcgtaaccaatacaacctcagagatgcagtatcgaggagcacaacacaggtatatcctaagtcatggaccgcaatttacatggcattagataatgtgggtatgtggaacatgaggagtgaattttgggcacgccaataccttggacaacaattctatttgagagtgtattcaccagttggatccattagggatgaatatccaattcccaagaatgctcttctttgtggcaaagctgcaggcaggacaaccaggtgatctctatgagaatcaaatccctcataacaaagatgtttatcaacaacctagctatgtagggaccaacttggtcccattctttacaaattcgtctaccatttctttgtattactaccaaatcaccatcttgttgtcataataattaatttgtcacaattgatttattttttcaaataaatttatttttctgatgcgttagcaaacttgtgttctagtttgtcataatagaatgacacaacttgtttgatccatctacaattctacatgtgtacacttaagtaaaattgaagtgttgtgtttgcatttgaagcattgtattgttgtttgacctgataattcaagtatttgagcc

SEQ ID NO: 5110 - DNA, 1972 bp, Glycine max
ccgatgacggcatgactcagttttccattccataaaattcctttaccttaacttccgtagtagttcatcctcaaaaaaacctttcataacttcttttcttcctccttcttcttcgggttgtgagtgtatacgcatcacgcatggcagctttccttcgacgctggattccacgatggaagattttatcttctccaccctgacgggatagcaaatctttcatgaaattgagaattgctgctgctaataaacaagcttccattgagatgggggagttcaccgggagtggtgagtatgtgactatcggcgaatttccttcctccaggacaaatcactcaaggaaagtttcagttcttcctcttgtgtttctcatcttctatgaggtttcaggggggccttttggggtggaggatactgtgcacgcagcgggtccttttttagccctccttggattcttgcttttccctttgatatggagtgttcctgaagctttgatcactgctgagatgggtaccatgttccctgaaaacagtggttatgtggtttgggtttcatctgctttgggtcccttttgggggtttcagcaaggttggatgaaatggcttagtggggtgatagacaacgcattataccccgtttatttcttgactatctgaagtcaggaatcccggctttaggtggtgggtttcctagagttgttgcaacatggggtctgactatagttctcacttacttgaactataggggtatgaccattgtgggatgggttgctgtttgtttgggggttttctcactccttccttttgtggttatgggatttttggcgattccagacctaaagccttcaagatggacagtgacaaacccgaatgatattaactggaatttgtatctgaatactctattttggaatctcaactattgggattccataagtactcttgctggagaagtggaaaatccgaagaaaactcttccgaaggctttgttttatgctgtgatcctagtagttctagggtacttctttcctcttctaattggtactggtgctgttcctgtcaaccgtgagttgtggacggatggatacttctcggatattgctttgattataggaggagcatggttgagatggtggctgcaggctgctgctgcaatgtcaaacatgggaatgtttgttgctgaaatgagcagtgacgctttccagcttctagggatggctgagaggggaatgttgcctgagttcttcagcaagaggtctcgctacggaacacctctcataggaatactcttctcagcctccggcgtgattttattgtcatggctgagctttcaagaaattgtagctgcagaaaatttcttgtactgctttggaatgattttggagttcattgcgttcattctgttgcggatcaaacaccccgacgcatcccgaccttacaagataccggggggaactgctggagcaattatcatgtgtatccctccgacaatattgattggtgtggtgttgtttttctccacccttaaagtaatggttgtaagccttattgctatggcaattggccttctgatgcagccttgtctcaaatttgttgagaagaagagatggatgaagttttcccatagttctgagctccctgattttggcaatcaggaggacactcgcactttggtgcattaatctgtcctgtttcaataatatggagatgatttgttcttctaggtcttcaagcatgcttgttaagtttatacttctctgaacccaacaaccatagaagggcagctttttatcctacacctttggtaattcaactgtttgtctatgtttttagtttgatcaatagatgggatgccaattagaaacgtggaagatagtgtttagaatgtcttgggaaatacaattatttgttaagtggattatgttatcatttgtcaagaaaaaaatttgattattttccttcccctcaaaccccaa

SEQ ID NO: 5111 - DNA, 1537 bp, Glycine max
tcgagtcagctacgtagtgcccccccccccgggcaatgaatgatttgtgtggaatgggtgagtaaataagtcgataagtgataagtgagtgaaacgccgcattcagaactcagaactcagaagaccgtgtaacgcactccactgcactgttgttctctctcgaacttatcagatgagcagagaaaatacgccagcaatggcaaaggaagaagtctgtgatgatggttcctccagtgttgagaatgtggatttagaatctcatgctcgaattagtctcgacaaggataatggcttgggaacctgtcgtgtgtgccaatgtaccgaatctgataaaaaggcagatgccgcactagaattttagggcatcattccaggttcagaaatgtgtaaaaccaagggggaagtgggatctgatggtggtggcgatggaattcccgaaaatacgtctcttgacagaaataatgagaaaaatgctggtatggtggaatttgtaagccctaatggggaggttttcatttgtaaaagcgatttggaacttggtttgtgtcatcaagataaattagttgaacttggatgttcttgtaaaaacgaccttgctttagtacattatgcttgtgcacttaagtggtttgtcaaccatggatctaccatttgtgaaatatgtggacatatagcaaataatatcagaatttctgacttcaataaggttgttggtgctttgaaggagtatgaagtattgagggaaagaactgctagtggggatcctggtgccgcacatgttcatgcaaatgctgttgtggatcctgatgctgtggctgctatccggaggcaacggctaagtgagattgcactatggttttgtccttataataacagtcacaataacaacatcagcagtgtggacacagtttcacagattgtttctgagcagcctttaagtattgttactgaagatgctgcccccacacagaatcctgcaaccaagtgggccgtggagggtacagggatcctgcttgctacggggctgcttaccatcacccttgcatggcttatagctcctcgtgttggaaagaaaactgctagaagtggtcttcatatcttacttggaggagtttgtgctttagccgtggtggttttcttccgcttttttgtgcttaccagaatcaagtatggacctgcacgttattgggcaatcttgttcgttttctggtttcttgtctttggaatatgggcttcaaggacccatggtgcccacacaacatgatcccatagtgcagttgttatactattgacaagtgtaccaattgttgtcacagtttacaaaatttgtagttaagatcgtcttctcgggaacttgggttactcagttccttggtaatattaaatagtttaatagttatatacatgtttgatcgaaaatttattggtttgttacaataaaagtaaataatgtaaaagttgcaagcctataattatgagaaaagcaatgaaaaaggatttgaactcaatcaaaaaaaacataggattagatttcatc

SEQ ID NO: 5112 - DNA, 2455 bp, Glycine max
gaatgaactccaccttatgtactactagcatttatccctttttttttttttttatacattctttctcttccaccctctttcaaggctccacttttataattccttgtaatttcttcatcaaagtatcaaacttgtcttctctctctctccttttacttcctctgcatatatgatatattcttccaaaatcctcatctaagggttaattttgttccggacaagtttttattattattattattattttttaaatttcagaatgatttacttataggtttctgatccaaggtttaagatgttatagtttccttgaattctcatctgggttcaacctgtttgatgttttgactgaatcagtttgaaatagtggtgattatctgataccaaacataaaagattcagctctttttcttgtttctttgtcacaagacttggattttgagaatctggagacatgggttgttgtgcaagtaaagagtcagagccgcaacacaatggttacagacatgctgggactggtggtgtgcacaaccagaagactcatgaacctttggtcaaccaatcaagagcacctgcaaatcaaccttatcatttacatgaaaagcatgctgcatccactgctcagacagtgcctcaaaatatgccatggaagcctcctggtccagcccttagtcctaaacctgttgttggtgttaggcaagacacaattcttgggaagcagtttgaggatgtgaagcagttctacacacttgggaaggagttgggtagagggcaatttggtgtgacatatctttgcactgagaattcgaccggattgcagtatgcctgcaagtccatttccaagaggaaacttgcgagcaaatctgataaggaggacataaagagggagattcagattatgcagcatttgagtggtcaacccaacattgttgagttcaaaggggcttatgaggataggagctcagttcatgttgtgatggagctgtgtgcaggtggggaactttttgataggattattgccaaggggcattacagtgagaaggctgctgcttcaatttgcagacaaattgtaaatgttgttcatatctgtcatttcatgggtgtgatgcatagggatctgaaaccagagaattttttgctatctagtagggacgaaaatgcacttctcaaggcaaccgattttggcttgtcagttttcattgaagaaggaaaggtatatcgggatatagttggtagtgcttactatgttgctcctgaagttctgcggcgcagatgtgggaaggaaatagatatatggagtgcaggagtcatattgtatatcttacttagtggagtccctccattttgggctgagactgagaagggaatatttgatgccatattggaaggtcacattgattttgaaagtcaaccatggcctaacatctcagacagtgccaaggatcttgttcgtaagatgcttatacaggatccaaagaaacgcattacctctgctcaagttcttgagcacccatggattaaagatggaaatgcttcagacaagccgatagacagtgcagtcctttccagaatgaagcaatttagagcaatgaataagctaaagaaacttgccttgaaggtcattgctgagaatatgtctgcagaagagatccaaggtttgaaggcaatgtttacaaatatggacactgacaagagtggtacaatcacctatgaagaacttaagtcaggattgcatagacttggctcaaagcttacagaggctgaagtgaagcaacttatggaagctgctgatgtagatggaaatggctcaattgactacatagaattcatcactgctacaatgcatagacacaaattagaaagagatgaccaacttttcaaggccttccaatattttgataaagacaacagtgggtttattacaagagatgaattggaatcagccatgaaagaatatggtatgggtgatgatgcaacaatcaaggaaatcatatctgaagttgatacaattatatctgaagtggatacagatcatgatggtagaatcaactatgaagaattctctgcgatgatgaagagtgggaaccaacaacaaggcaagctattctaaatcacaccatctaaccagtctgagggcctggtatccaaaacccctctagagaaaaggtttatacctctgagaagtacttccaaacagtttgtatcactcataggcatgtaaagcttctatttagaatgtttttgagttactatgctcctcatgactgttagtcaactccctttttttcatttctgggacctttttttgcttttcactgagattccatttccgagtcctctttgaatttgttttggacacaaagtataaactcacatagaaaaaggtgatatctcaataagattatacaagtttttgcgcttgaaaaaaaaaaaaaaaaaactcgagactagttcc

SEQ ID NO: 5113 - DNA, 770 bp, Glycine max
  misc_feature (583)..(583): n is a, c, g, or t
  misc_feature (595)..(595): n is a, c, g, or t
  misc_feature (618)..(618): n is a, c, g, or t
  misc_feature (623)..(624): n is a, c, g, or t
  misc_feature (631)..(631): n is a, c, g, or t
  misc_feature (634)..(634): n is a, c, g, or t
  misc_feature (651)..(651): n is a, c, g, or t
  misc_feature (653)..(653): n is a, c, g, or t
  misc_feature (681)..(681): n is a, c, g, or t
  misc_feature (693)..(693): n is a, c, g, or t
  misc_feature (700)..(700): n is a, c, g, or t
  misc_feature (702)..(702): n is a, c, g, or t
  misc_feature (704)..(704): n is a, c, g, or t
  misc_feature (706)..(706): n is a, c, g, or t
  misc_feature (708)..(708): n is a, c, g, or t
  misc_feature (711)..(711): n is a, c, g, or t
  misc_feature (715)..(716): n is a, c, g, or t
  misc_feature (728)..(728): n is a, c, g, or t
  misc_feature (730)..(730): n is a, c, g, or t
  misc_feature (732)..(732): n is a, c, g, or t
  misc_feature (735)..(736): n is a, c, g, or t
  misc_feature (741)..(741): n is a, c, g, or t
  misc_feature (755)..(755): n is a, c, g, or t
  misc_feature (757)..(758): n is a, c, g, or t
  misc_feature (762)..(762): n is a, c, g, or t
ccattctgcatcaaactttggcctctcctcctcctctgtctctctctctctcttcacacttgaatgaatattctttcttgaattctcatctgggttcattccttttctcatgcgttgacaaaatcttcacactttcaaagttggtacctgataaaacttgaaaataaatcttccctttttgtgtcacaaccatgggttgttgtatgagtaaaaaagggtcagagccagaagaacacattgtttacagacatgttgcgggtgctgggggtgctggtgtgtacaataatcacaagagccatgaacccccttctcatcaaccttacccattacctgagaagcatgccccttggaggcctccaccaagcccaaaacatgttcacaagcatgacacaatcactgggaagccatttgaggatgttaaacagcactacacacttgggaaggaattggggagaggccaattcggggtgacttatctctgcactgagaattcaactggttttcagtatgcctgcaagtccatttcaaagaggaagcttgtgagcagagacgacaaggaggacatgaagagggagattcaatnatgcacatttgngtgacatccacattgtggagttnaaggnnctttganganaacaatcattcatgtgntntggactgggccgggggaattttacaggntttgcaaggcancaggaangntngntnaanatanngggtggtaaggngnanccnnctttntggtgtattagggntnnccanaatttttt

SEQ ID NO: 5114 - DNA, 2046 bp, Glycine max
gttcctgtttacaaggctgttaaaagccggggagtttataataacattccctagggcatatcacgctggcttcagtcatggtttcaactgtggagaagcagtgaattttgcaattggtgattggtttcctttaggggctgttgctagcagaagatatgcacttcttaacagggttcctttactgcctcatgaagaacttctatgcaaagaagcaatgcttcttcgtacatgcttggaacttgaagattctgattttccttcctctgacttgttttctcataatagcattaagatttcatttgttaacttgatgcgtttccaacattgtgctcgatggttccttacgaaatcaagggcgggtataagtgtttcttttcattcccatggcacgattctctgtagcctctgcaaacgtgactgttacatagcttatgttggctgcaactgtcacaagcatcatgtatgcctacgtcatgatgctgattctcttgacttcaactgtgggagcaaacacacactttatttgagggaggatattatggatatggaagctgcagccaagatgtttgagcaggaagatgggatattggatgagataaggaagcaaactaaaagtgaccagaacatgtatgcatatcctttgtcaaatatgtttcagggagccgaggcaaatggatacacgccttattgtgagctaaaacttgattctgttgctgaattttatgccactccagagcactcaacaaataatcaagaatacagttcacaatatcaatctgtctttgtacattgctctgaaaatcaaaaaccagtggtgtctgaggtttccttttcttctgccacatccactctttgttctctttcagaatctcttgagagcttttccgctcccaaaaatcaggctgaggagcatattaacatcaatgcaacaagtattattgattttgaagagtttgctgaaagaatatccaacagtgcttgtgaatcttcattatctcctgctgtgtatcatgaaaggtcggttaaaccacggggtgatcttcagagatttgataaaaaacccgttgtaaacgagagtgatgattctgattcagagatatttagggtaaaacgcccttcttctctgaaagcagagaggagaaatatgaatgatgctatgtcttcaaaacatactgcgcagcagggacttaaacgactgaagaaaatccttcctgaaggaaagagcgggcaaccaatggatttcagtagaagcaatgaatcaagttacaaatacggtcaccctgttaaccataaaggtcatgctgaaatttcgtctagggacagatttgcaacgggtaatggtattcccatttctataagatgtaagaagttaggcaacgaggaaataagcatgcaacgagatcacaaccggagagataggttgcagcagacatttagggaaccaccttccatggagcttgagccaaagcgccttaaagtccgaggcccttcatttttaggcttagagagcagcagatcgaattgatgtttcaagttggctcgaaatgactgtggaacgccatcaagagtctgactttgctaacttcattttagcttattggctttctaacaatacagtaaatccaaatgattgattgagggaggaagcagcggcaagatattaacgtattagggtatgaatttacattctttgtgcaggccttaacatttgaggaatctgcacgagtggtgatcctctgggttctcgggccgaggtgtttttccaactttggttggtgaacctgacttgcaaagttaggacttagaaatcggtttagcgacatttatttccatgtaaatttgttttcttcttttcacaagtcgtttaggtcttcttaggaacgtgggtctctccattgttttctcattaaattctatcacagctgcttcccccttctgatgttaatccattctttttgtagcaataggtcctttgtacctagaactacttgaataaagttcaatgaaatttctcattttcactcaaaaaaaaaaaaaaacaaaaaa

SEQ ID NO: 5115 - DNA, 1546 bp, Glycine max
ctcacattttaccttaatttttttattagataacattgtttttgttgagggaggatattatggatatggaagctgcagccaagatgtttgagcacgaagatgggatattggatgagataaggaagcaaactaacagtgaccaaaacatgtatgcatatcctttgtcaaatatgtttcagagagctgaagcgaatgggtacacgccttattgtgagctaaaacttgattctgttgttgaattttatgcaactccagagcactcaacaaataatcaagaatacagttcacaaaatcaatctgtcattgtacgttgctctgaaaataaaaaaccagtggtgtctgaggtttccttttcttctgccacatccactctttgctctctttcagaatctctcgagagcttttctgctcccaaaaatgctgaggagcatattaacaacaatgcaagtattattgattttgaagagtttgctgaaagaatatccaacagtgcatgtgaatcttcattatctcctgctgtgtatcatgaaagctcggttaaaccactgggtgatcttcagaagagatttgatacaaaatccattgtggacgagagtgatgattctgattcagagatatgtagggtaaagcgtccttcttctctgaaagcagagaggagaaatatgaatgatgccgcgccttcaaaacatacagagcagcaggggctaaaacgactgaagaaaatccttcctgaaggaaagagtgggcaaccaatggattctagcagaagcaatgaatcaagttacaaatacagtcacgctgttaaccataaaggtcatgctgatatttcatccagggatagatttgcaaggagtaatggtattcccatttctataagatataagaagttgggcaacgaggaaataagcatgcaaggagatcaccaccaaagagataggttgcaacagacatttagggaaccaccttccatggagcttgagccaaagcgccttaaagtccgaggcccttcatttttaggcttagagagcagatcgaattgatgtttcaatttggctcgaaatgattgtgaaacgccatggagagtctgactttgctaacttcattttagcttatgggctttctaacaatacagtaaatctaaatgattgattgagggaggaagcagcggcaagatattaacgtattagggtatgaatttacattctttgtgcaggccttaacatttgaggaatctgcacgggtggtgatcctctgggttatcgggccgaggtgtttttccaactttggttggtgaacctgacttgcaaagttaggacttagaaatcggtttagcgacatttatttccatgtaaatttgttttcttctcaccagtcgttttaggtcttcttaggaacatgggtctctccattgttttctcattaaattctatcacagctgcttcccccttctgatgttaatccattctttttgtaccaataggtcctttgtacctagaactacttgaataaagttcaatggaatttctcattttcactctaaaaagaa

SEQ ID NO: 5116 - DNA, 1819 bp, Glycine max
cagtgcattcggctcgagacggctgcgaggacgacagaagggggaagatgcccaaaaatgctcacgctcattttatactcggcttgatgtaccaaagattaagccaacctcaaaaggctgtgttagcatatgagaaggcagaagagatcttgctgaggcctgaggctgagattgacaggcctgaattgctttctttagttcagattcaccatgcacagtgcctgatactagaaagttcatctgaaaatagttcagataaagaacttgaacctgatgaacttgaagagattctttctaagctgaaagagtcagtgaagtcagatatcagacagacagctgtatggaacacactgggttttatccttcttaaaactggtcgtgtgaagagtgctgtctcagttttgtcatcattgttgtccattgctccagagaactatgattgcctaggaaatcttgggatagcttatcttaaaattgggaatttggaattatctgcaaagtgttttcaagaattgattttaaaagatcaaaaccatcctgcagccttggtcaattatgctgctcttcttttgtgtaaatatgcttcggttgtagcaggtcctggtgcaagtgctgctgaaggtgccatgactgatcagatcatgtctgctaatgttgctaaggaatgtttgttggctgcagttaaagcagatagcaaatcagcccatgtctgggcaaatcttgcctgtgcattttctattattggtgatcatcgaagttccagcaagtgcttggagaaggtgctcatggctccttgctacagtcatttatagcgtatttattgaggcagccaaactggaaccccattgcatgtctactcgatatgctgttgctttccatcgaataaaggagccagaaagatctcaagatcctagtgaactgctttcgtgtgctggaaatgagatggcttctataataagagacggtgattcatccctggttgagattccaatagcttggtctgggcttgccatggttcataaggctcagcatgagatagcggcagcatatgaaagtgaacagaatgggctaagagaagttgaagagcgtgctgtttgcagtttaaagcaggctatagcagaagatccaaatgatgctgtgcagtggcaccaactcggtattcatagtctctgtgctcggcaattcaaaacatcacaaaagtaccttaaagctgctgttgcctgtgacaaggattgcagctatgcatgggctacccttggtgtctcacttcaactatcagaagaaccatcacaagcggaagaagtatacaagcaagcattgtcgttggcaacaactaaacaagcgcatgttatattatccaacttgggaattctctatcgtcatcagaaacaatatcaacgtgcgaaggctatgtttacaaagtcacttgaactacagcctgggtatgctccagcattcaacaatctgggtcttgtgtttgttgctgagggtcttttggaggaggccaagtattgttttgacaaagccctccaatcagatccattgttggatgcagctaagtctaatttgattaaggttgttgccatgtcaaagttatgcaaaggcctctcctcatgcggtcttaaagaatgatatcggagttcatcaaggataggtagtttttttatttttcttttacctttatcttttgttgtacatccaatttcatttataaaaatggataaaagaggaatgtacttgtatcattacgtgctttcaaaatgagcaattgagtatatagatttttctttttccaaaaaaaaaaaaaaaaaaaaaaaaa

SEQ ID NO: 5117 - DNA, 2144 bp, Glycine max
  misc_feature (891)..(891): n is a, c, g, or t
  misc_feature (899)..(899): n is a, c, g, or t
  misc_feature (2125)..(2126): n is a, c, g, or t
gaactctgggacctgttaaaatggagcctcagcattctgatcaaccattatttttgcagcagcagcaacagcaggaacagcaacagtttctcgacatgtcaagtcaatcgtctcaggctgctgctgcccagatcaatcttttgcgccatcaccggcttttacagttacaacaacaacaccaaattcggctcgaggcagcaacaactcttgaaggcaatgccacaacagcggtcccaactaccacaacaatttcaacagcagaatatgcctatgagatctcctgtgaagccagcatatgaaccagggatgtgtgctaggcggctgacacattacatgtatcagcaacaacatagacctgaagataacaatattgatttctggagaaagtttgttgctgagtattttgctcctaatgccaaaaagaaatggtgtgtttcaatgtatggaagtggaagacaaacaactggagttttccctcaggatgtatggcactgcgaaatatgtaatcgcaagcctggccgtggatttgaagcaactgttgaggttcttccacggcttttcaagataaagtatgaaagtggtactttggaagaactactttatgttgacatgcctcgtgaatatcataattcctctggtcagattgttctagattatgcaaaagcaatacaagaaagtgtttttgagcaacttcgtgttgttcgtgatggccaacttcgaatagttttctctccggacctgaagatatgttcttgggaattttgtgctcggcgccatgaggagctcatacccaggagattgttgataccacaggttagtcagcttggaaacggttgctcaaaaataccagtcttttactcaaaatgcacaccccccatgtatctgttcccngaatacanaaatattgcatattgtttgttgcatcagccccgtcagttggctaaagccttagaagtaccattggttaatgatttaggatatacaaagagatacgtgcgctgcctccagtcagctgcggtggccccccccatgaaagacttgatagattacagcagagaaactgggactggacctatggagagcttagcaaaattccctcggagaacaagtggttcatctggacctcgtggtcaagcacaacagcatgaagaacaattacaacagcagcaacaacaacagatggtggcccataactcaaatggtgatcaaaactcagtacaagctgctgccatgcaaattgcttctagcaatggtatggttagtgtaaataacactgtcaacccagcatccacatcaacctccacaagcactattgttggtcttcttcaccagaactctatgaattctagacaaccaaattcaatgaacaatgcaagcagtccatatggaggtagttctgttcagattccatccccaggttcctccagtacagtgccacaagcccagccaaactcatccccttttcaatcaccaacaccatcctcttctaacaaccccccacaaacatctcaccctgctttaacatctgccaatcacatgagtacaacaaactctccagctaatatttccatgcaacaacagcagccatctatttctggtgaacctgaccctagtgatgctcaaagctcagtccagaaaatcatacacgagatgatgatgtcctcccagattaatggcaatggtggaatggtcggtgttggatctcttggaaatgatgtgaagaatgtaagtggtattcttccagtgagtgccaatacagggctaaatggtggcaatggcttggtgggtaacggcccaatgaacagtaattcaggcgttggggttggtaattatggcacaatgggtctcggtcaatccgctatgcctaatggaatcagatctgctatgaattctagacaacaaaattcaatgaacaatgcaagcagtccatatggaggtagttctgttcagattccttccccaggttcctccagtacagtgccacaaggccagccaaactcgtccccttttcaatcaccaacaccgtcctcttctaacaaccccccacaaacatctcaccctgatgatggcagaaagtatttgggttgggtagagtcatagggcgttggccactgtgctaatatannattttatatataagaaat

SEQ ID NO: 5118 - DNA, 854 bp, Glycine max
  misc_feature (829)..(829): n is a, c, g, or t
cgattggtaccgggccccccctcgagtcagcttcctaggcccccccccctttgaagcaactgctgaggttcttcccaggcttttcgctacgtaggcccccccccccactttggaagagctactttatgttgacatgcctcgggaatatcataattcctctggccagattgttctagattacgcaaaagcaatacaagaaagcgtttttgagcaacttcgtgttgttcgtgatggtcaacttcgaatagttttctctccagacctgaagatatgctcttgggaattttgtgctcgacgccatgaagagctcatccccagaagattgttaatacctcaggttagtcaacttggagtagttgctcaaaaataccaggcatttactcaaaatgcaacacccaatttatccgttccagagttacaaaataattgcaatctgtttgttgcatcagcccgtcagttggcaaaagctttagaagttccattggtcaatgatttaggatatacaaagagatacgtgcggtgccttcagatatcagaagtggtaaatagtatgaaagacttgatagattatagcagagaaaccagaactggtcccatggatagcttagctaaattccctcgtagaacaagtggttcatctggacttcatagtcaggcacaacagtctgaagatcaattacagcagcagtcacagccacccccgcatatggtgccccatacttctaatggtgatcaaaactctgtgcaaactgctgctatgcaaattgcttctagcaatggtgtgacaagtgtaaataattccgtcaatgcagcatctgcatctgcatcnaacaccacagcaccattggtggact

SEQ ID NO: 5119 - DNA, 822 bp, Glycine max
  misc_feature (8)..(10): n is a, c, g, or t
  misc_feature (819)..(819): n is a, c, g, or t
cccccaannnttcacccctgctttaacatctgccaatcacacgagtacgacaaactctccagctaatatttccatgcaacaacagcagccatctatttctggtgaacctgaccctagtgatgctcaaagctcagtccagaaaatcatacacgagatgatgatgtcctcccagattaatggcaatggtggaatggttggtgtcggatctcttggaaatgatgtgaagaatgtaaatggtattctgccagtgagtgccaatacagggctcaatggtggcaatggcttggtgggtaacggcccaatgaacagtaattcaggcgttggggttggtaattatggcacaatgggtcttggtcaatccgctatgcctaatggaatcagaactgctatggtaaataattcaatcatgaatggaaggggaggaatggcgtctcttgcccgggatcaagctatgaatcatcaacaggatatgtcaaaccaactacttagtggactaggggccgttggtggttttagtaatcttcaatttgattggaaaccttctccttgagagccctttgtagatttatgaatgttgtggttcttgacagttgctcatgcaacatgagcaatggtatttgccttcggcccctgatgatatggctgaaagtatttgggttgggtagtcacagggcgtaggccactgtgctaatatatgaatttatatataagaaatgaaaatttgttggctggttgtgtggctgatggggctgatttttcttgtgaattcaagtgtaactttttatattaatttttcttatgagctttcgcaaaaaaaanaaa

SEQ ID NO: 5120 - DNA, 2171 bp, Glycine max
tctcgagccgctcgagccgctcgagccgaaaaatttaaggatagagctggaaggaggcgcaggttcactattaataacgtacactctcccacaccgaaatggcagccattgctaccattttcgtttctatcatacccacttcgccttctccgtttctcactagactcacatcgcgcctccatttcgctgcattccctctgcgttctccaacgaggaaactcatgtcgcacactcttgcacgtgccactcttggtctcacacacccttctaatatcgaaacccccaagatctcttttggtgctaaggatgttgatgtgacggaatggaaaggggacattctggcagtgggtgttacggaaaaagatttggctagagatgcaaactcgaagtttgagaatgtgattttgagcaagattgactcaaagttgggtggtttattagctgaagcctcttctgaagaggatttctctggcaaagttggtcagtcaactgttcttagaattacaggacttggatcaaaaagggttggattgattggtcttggtcagtcaccttccactcctgcaccttttaagagtcttggcgaggccattgtggcggctgccaagtcttctcaagcaagcagtgttgctgttgctcttgcctcttctgaaggactctccgcacaatcaaagcttagcactgcttatgcaattgcttctggggctgtgctgggattatttgaagataatagatacaaatcagaagcaaagaaatcaacacttaggtccattgactattattggtcttgggacaggacctgaactggagaagaaactgaagtacgcaggagatgtttcttccggaattatctttggaagggagcttgtaaattctcctgctaatgtgctcacaccaggggtgttggcagaagaggcagctaagattgcttctacctacagtgatgttttcactgctaaaatattaaatgccgagcaatgtgctgaattaaaaatgggatcctatctgggtgttgctgcagcctcggaaaatcctcctcattttatccatctatgttacaaacctctgagtggacctgtcaatgtcaagttggctttagttggcaaaggtttgacttttgacagtggtggctacaacatcaagactggacctggctgttcaattgaactcatgaaatttgatatgggtggttcagcagcagttttaggaacagcgaaagctcttggtcaaatcaaacctctaggggtggaggttcattttattgttgcagcttgtgagaatatgataagtggaacaggtatgaggcctggagatattgtcacagcttcaaatggaaagactatagaggttaacaacactgatgctgaaggtagacttaccctggcagatgctctggtatatgcttgtaatcaaggtgttgaaaagattattgacttggcaaccttgactggggcctgcgttgttgcccttggaccctcaattgctggtgtgtttacacccagtgatgacctagcaaaggaagtttttgaagcttctgatgtgagtggggagaaactatggaggttgccattagaggaaagttactgggaaacaatgaaatcaggagttgctgacatgttgaacactggtggtcgacaaggtggtgctattgtggctgctctcttcttaaaacagtttgttgatgaaaaggttcaatggatgcacattgacatggctggtcctgtgtgaaatgacaagaagcgttcaacaacaggatttggcattgctactttagtggaaaagcagcatagcttcttgtactaatttattcaaatgccccaactgaaaggttcaaatcttgttacatcgtatgtgaaacacaggatgagataagctcatcttgtgatgtttgtgcttcaatggggtttggttatatgaaataagttatttaaagggatggaaaatgtggtaaaatgaggcattttttagtgtattcaaacttttttctagatacaaaaaacaacctttttgttttttcacatttaccaataattcagtttgcctctcatagtttgttttatttatatttttccgtcggctttcgcaattgtaatactagtatcctatataaaattgtagccttattctatgcctttataaaaaagtaatcaaagggattcattcttggggct

SEQ ID NO: 5121 - DNA, 952 bp, Glycine max
ggtttcgggccggaattcccgggtcgaccccgcgtccgatcttcgtttctttacaaccacttcgtcttctccgtttctcactagactcacatcgcgcctccatttcgctgcattccctctgcgttctccaacgaggaaactcatgtcgcacactctcgcacgtgccactctcggtctcacacatccttctaacatcgaaacacccaagatctcttttggttctaaggatgttgatgtgacggaatggaaaggggacattctggcagtgggtgttacggagaaagatttggctagagatgcaaactcgaagtttgagaatgtgattttgagaaagatcgactcaaagttgggtggtttattagctgaagcctcttctgaagaggatttctctggcaaagttggtcagtcaactgttcttagaattacaggacttggatcaaagagggttggattgattggtcttggtcagtcaccttccactccttcaccttttaagggtcttggcgaggccgttgtggaggctgccaagtcttctcaagcaagcagtgttgctgtcgttcttgcctcttctgaaggactctctgctcaatcaaagcttagcactgcttatgcaattgcttctggggctgtgctgggattatttgaagataatagatacaagtcagaagcaaagaaatcaacacttaggtccattgatattattggtcttgggatgggacctgaactggagaagaaactgaagtacgcaggagatgtttcttccggaattatctttggaagggagcttgtaaattctcctgctaatgtgctcacaccaggggtgttggcagaagaggcagctaagattgcttctacctacagtgatgttttcactgctaaaatattaaatgccgagcaatgtgctgaattaaaaatgggatcctatctgggtgttgctgcagcctcggaaaat

SEQ ID NO: 5122 - DNA, 2056 bp, Glycine max
gggcgagagtttatattgccatttaggcggtgatcgtaactgaaaattggcaatggtgaatcgtcgacgcctcactcgggtggcgacgagcgacgatgaagacgaagcaccgccgcgtccacaacgcacgcggaagaggatgaggcttatcgaggaagataacgatgatgacgagaatgaagaagaaaaagaagaggaggtgccggagccgcctcagcttgcggaggacgctaaacctcttggccaacccgttagggtttcgggaaaaggaagaggcaggaagaggcaccatgattccttcgagttcgatggcatccaatatactctcgaggatcccgttcttcttgtacccgaggagaaaggccaaaagccttatgttgcaattattaaggacattacacagtctatcaatggcaacgtgaaagtgacggggcagtggttttaccgaccagaagaagctgagaaaaaaggtggtggaaactggcaatcgtgtgataccagagagctgttttatagtttccaccgtgacgatgttcctgcagaggctgttatgcacaagtgtgtggtgcattttgttcccagacacaaacagcttccaaagcgtaaggatcaccccgggtttattgtacagaaggtgtatgacactgtggaaagaaaactctggaggctgactgataaggattatgaggaatttaagcagcaagagattgatgtgcttgttgagaagactcagcaacgtattggtgaactacttgaccttgagcccgaggaagcccctgatgacgatggggatcaattgaaaaataaaaaaagcttcaggagaaagagtgtttcacctcttgatgtttcaaaagaggaggaagaaactcttaagagtgaacaacatccaaaatctgaaacaccaacgggttgcataactaatggttcagagtattatcggatattggtagatttcaatgcactaactggagatagccatcgagacaaatggttggagaggttgcttcaacgcattcagtacatgtgtgattctaatgatagcaaagaaagggacaaaggattagggaatgccaattctgatgaaatcaacaatgaaagcaagcatagaagttcagaatcagcaactgactgtcaagataaggttcagaagagttccaagtcttttaactggccagatgttgctgtttcagccatggttgctctcgaaaaagcttctcatgatgctctctcatcagattctatgaagtacaaccaaaagttgcggcaattagcttttaatttccagaaaaatgcagtgttagcacgccgtctattgagtggagagttggagccttcaaaaatattaaatatgacacccaatgaattaaaggagggtttggttgctgaggaaaaaaccaaggagcctgacgagacccagcacttgcaaatgacagatgcccgctgctcaaaatgtatggattgtaaggtgggcttgagagagattatccaagctggaaataatgaacgttatcagctggaatgtgtttcctgtggtcattcctggtatgcctcccgggatgaggtgtctatgccgaccatagatgcatcagatccaaagggaaacataggcacagcgccataggccactgcaaaatttaaagatgtaccgatgaagatactgagcccccgtgaatccaaagtcagccaatgacatcttttaaaagaaaagttaattgtatatccccagaaatgatttggaaagtccaggaaaggtgacgatattgaggctatgagacgtgtatctatcccggctagtgttaagtcatagctaaaaattgtttatgaatagatatagttctcttcctatttgactctgcgcatcgcatacaaaaaaacggttggttttgtgtaatacttcacatgaactagctggttttacctcatacatcataaaggttgtattagccatagcattaaatttcatagtttgactttgattttgtagtattaacttgttcaaatcattaataagcaaaaaaaagaaaacactagttccaaacttagttgtgcttagggg

SEQ ID NO: 5123 - DNA, 2127 bp, Glycine max
aaaaaaattagctggttggtctctttagccatcgtcgactttccaagtttcaactgccaacaataataataataataaattctttattgctaatctttcacaccttttattattattctcatgattcttatataatatacatacatatatatatcagctacgtcggccccgcccctatccgtgctctgtgattccagaccttaatttttctctcattcgcttcaaatttcaggaaatcaattatggctcaaccctcaacaagaataggccttgctggactggctgttatgggccaaaatctagcactcaatattgctgagaaaggctttcccatttctgtttataaccgaaccacttccaaggttgatgagactgtagaacgagcaaaacaagaaggaaatcttccagtttatggctaccatgaccccgaagcttttgttcattccattcaaaagcctagggtgataataatgcttgttaaggctggggcacctgttgaccagaccattaagaccctatctgcatacatggaaaaaggtgactgcataattgatggtggtaacgaatggtacgagaacaccgaaagaagagagaaatcggtggctgaattgggtctgctctaccttgggatgggagtttctggtggtgaggaaggtgctcgtaatggtccctctttgatgcctggtggttcgtttgaggctttcaaatacatagaagatattcttctcaaggtggcagctcaagtccctgacagtggtccttgcgtgacttatattggtaaaggtggctctggtaattttgtgaaaatgatccacaatggcatcgaatatggtgacatgcagctgattgcagaggcctatgatgtgctgaagtcagttggaaagttgtcaaatgaggaactacaaagtgtcttctcagaatggaacaagggagaacttctgagtttcctgattgaaatcactgcagatatatttggaattaaggatgataagggagatggatatcttgttgacaaggtcctagacaagactggcatgaagggcactggtaagtggactgttcagcaagctgctgaattatcaattgctgctcccactattgaagcatcattggatgcaaggttcctgagtgggttgaaggaggaaagagttgaagctgcaaaggtctttaaatcaggtggtattggtgatatcgtgactgatcaacctgtagacaagaaaaaattggttgatgatgttaggaaggctctttatgcagccaaaatctgtagttatgcacagggaatgaatttgatccgtgcaaagagtattgaaaagggttgggatttgaagttgggtgaactggcccggatttggaaagggggttgcattattagagcaatattcttagacagaatcaagcaggcatatgaaagaaaccctaatctggcaaaccttcttgtggatccagagtttgcaaaggaaataattgattaccaatctgcctggaggagagttgtttgccttgctatcaattctggtattagcactccaggtatgtctgctagtcttgcttattttgacacttacagaagggaaaggttgccagctaatttggtgcaagctcaacgagactactttggtgctcatacatatgaaagggttgacatagaggggtcttaccatactgagtggttcaagcttgccaaacagtcaagaaattagattactgtatttgagccaatcaggattttcctaataaatgtaatattttctgctcagactgtatgctgagttgagtttgcatatccacaatgtggtgaagttttattatattatttccaactgaattgcttggcagtttgttttccaacaactatgttgtatctttgctgatcatgcttggtgcttgatacaaaattcccagttcatggtgcctttttaattttcacatttttataagatttcctttagcaccatggatacatgttatgttacagcaggagttgaaatttttagttttatctttaacttgttgagtttaatgttgatctactgtcaagagtgaataagttcgatattgttggacaatattaagaatatcagtagatattgtaaaaaaaaaaaaaaaaaaaaaaaaaaaaaaaaa

SEQ ID NO: 5124 - DNA, 994 bp, Glycine max
tacggctgcgagaagacgacagaagggcaagcaaaattgtgtacaagtcatggaaaatggaggtaacttatgtgatgggaaagaagttgatcagttttatcaaccctctggtggtattgaggttgtcgttgctaatgaggatggtctttcgtgcggatcagatctgaaagagattgacaaagtaaaaattatacaagaaagtgatttgtttaggggggatgcttcagaaggtgctctctgggatatttttcggagacaggatgtacctaaattgcaggaatatctgaagaagcacttcagagagtttaggcatattcattgctgtcctttaaagcaggttattcaccccatccatgaccagaccttctatctgactatggagcataagaagaagcttaaggaggagtatggaattgagccctggacttttactcagaagttaggagatgctgttttcattccagctggttgtcctcaccaagtcagaaatctgaagtcatgtattaaggttgctttggattttgtctctcctgaaaatgttggggagtgctttcgtttgacggaggagtttcgcacacttccaataaaccacaggtctactgaggacaaattggaggtgaagaagatgacaatatatgctatgcaagaagtgataacaaaattagagaaagcaaggtccaggcaaaccatagttccaaagtagatatatctttaacagatcaaagccaattgaaagtgtaaatttttttagtcaagcttttatacaggtgtgatgatgggttctgtatatcgtgactgtaagaacggttccatattttgttttcgccaacacctggatggttttttttttttggaaatcatatatgacttgaacggtgtacatataaatatataattgtcaccatttgatacttaggatctcataatctatacattcggaagctcaaaaaataactccaaaattgagattaatgaactcacgttgtttacgaat

SEQ ID NO: 5125 - DNA, 1742 bp, Glycine max
cggggtggtattataaaaaagagacgccgcctccgcggcgggtattttttttctcgggggagggggggggggggggggggggcggcgcccaaaaaaaaagggggggggggggcccccccctctggagggccgccccccccggggttctcccctttatatttttttcccgccccctcttatttttttgtggggggaatttggggggggggataaaaaaatttcccccccccggggaacccacttttttgcccccctgttttcccccccacaggggcccaatttttcccccccccttaaagggggacaaaaaagggggggccccccccgcggggggcggccgcttttgagaacttatgggtctcccccgggggttccaggaatttgccccggggccccattccctcggaccatccttaatcggaaaagaaaagagttgtttcagtttcgagcgcaaacaagaatgaagggagattggttggaattggagttggagaaggaaataggagacgccatttcccgaacccgattcgcgccccactctaacaccctcctcatctcttcttgggactccagtcttcgcctcttcgacgtcgacgcctctctcctcagactccaagctccctcgcaagctcccctcctcgattgctgcttccaggacgacgctgtggccttcgccgccgcctctgatggactaatccgaaggtatgacttgcattcaggacttgttgatacactgggtagtcacgatgatatggcaacatgtattggatattccaatgaaacatgtcagttggtcacatccggatttgacaaaaagttactgttatgggacatgcatatgaagaagacttctttatgtttgagaagtctagatgcagaggtggactccatgtctgtctctggatttaatgttaccgtagccattggagcatcaatgcttgtttatgatttacgttactttgaccaaccagttgagtcaaaagaggcattcaatggaacacacttaagatgtgtcagttcaattccagatgcagaaggattcgcagttgggtctgtagacggacgagtatcactgcagatttccaatccattcagttcaaacgacattagatatatattccggtgtcatccaaaatcaaaggatggacggcattatttggtatcagtgaacgacattgcattcagtccacttgtatctggtgcctttgccactggtgacaatgaaggttatgttaccatatgggatgctggaagtaggagaagactagttgagttgcccaggtatccaaatagtgttgcatccttatcatacaaccacacaggtcagcttctggctgtagcatcaagccatacttaccaagaagcaaaggaaatagaaaaaccacctcgtatattcatccatagagtggacaacattgatattggatcaatttctgctagtaagagaagttgaagcacttatgctatgcttgctgacgaagatttgtgtcatcagagacacaagtggaggcaccggtgaagaaaatagatgctctttaaaaagggatactgggagatcaagaaaaatattggaggaaaatattaaaagagtttgattgataaagtattatcattaagagtttgatttttggcggtgtttaataaaatcatgtactgtatttttatgtataaaaaattaagttatcattttttaaaaaaaaaaaaaaaaaaagcttatcgaaccgtcgaccctcgaggggggg

SEQ ID NO: 5126 - DNA, 1812 bp, Glycine max
  misc_feature (113)..(113): n is a, c, g, or t
agctcgatcggggctgttccatgacacttaagacacctgggtgatcaaatctacagctgacggcaacaaggcactgggaatgacgctcagtcaaagaagcatgattctagtcnttcttctgggtttcctgggacaaaaggaccttctgatgagatgtgggatgtcatggaaccatctgttgagcaaggtcaagtagccaaagaaacggatatcagcaaggaaacagggaaagcagttgttactagaactgggaggtccttatggggtatgattggtgatattgttcaattacgttggggttcacgtgctggttcctccacttcagctggaacttctgctgagagaaattcaccaaacaagtctgacagtgacacatggttttctgggcaggagcatgaggaaaccactaaaactaatgtcataaaagaaacaagtgtaccaccacaagccatgacttttgataagttaaaaccgggtaaacattatacccaaagtgagggagaggtgtccgacaatacaaaactgaaggacaaaggaaaaaatgttgaagttggattgtcatccccaaatacattggaaagtggatcaatgttagtaggcgtatcttacacttctggagaggaaaatgctagttggactgaagataaaaaaaatttgaaagtcaatacttctggcactcaaaacatggaattaccaatttcagtacctgccagagggccttctattgttggagaaattataagcattggtggatctgacatgtctggagctgaatcagtggttccaatcaaggaatctgttgctcctgggcagtctgaattgtccggctcagagagaaaggatggagagttgaagcaaaggaagtttcaacggaacaggcaagtcttaagagatggcgtcggtggcggggaagaagcctatcaacgtgaacttgagcagcgaagagtagatgaaatgttcatgaaggaagcacttttggaagccaagaaggctgctgatacatgggaggtacctgttggagctgttcttgtgcagcatgggaaaattattgctcgaggctgcaacttagtagaagagttacgggactccactgcccatgcagagatgatttgtatacgagaagcttcaaaccttctccgatcatggagactatcagacactacactttatgtaacgcttgagccatgtccaatgtgtgctggtgctatcctgcaggcaagagtagacactgttgtgtggggtgctcccaataagcttcttggagctgatggtagctggattagaattttccctgatggaggagaaaatgtatcagaacaaagagatatgccacctgccccagttcatccattccatccaaacatgaaaataagaagaggggtcttagccactgagtgtgcagatgcaatgcagcaattctttcagcttagaaggaaaaagaagaaagaggaaccaccgaatggcccttctagccttcctgttactcaccacccatccaagttactcaacaagatacatgacgtcttccacatcatgttctgtttgtaaaagagaatattcacatattttcccatgttttaaatgagcttctaaataaaataatcaaacatgaatgaatgatcattgtgaaaagtacaatgctcaatttctttaagagtattcaatcagttaagctgtcaaagacaataatttcaaaaattgcctactttaatttcaagtaatgacttcaaacgcttaggatgatgactagattgtaatgaaaaaaaaaaaaaaaaaattcctgcggctgcgaattcttcctggtgccgaatt

SEQ ID NO: 5127 - DNA, 1820 bp, Glycine max
tcgagcagctacgtaggcccccccccccccggattcatttcatttcatttcgcaatgggtttctgggggatcgaagtgaaacctggcaggccgtgtccttatcacgctgacaatgtgcgagggaagcttcatgttactcaggctactctaggcattggctcatcatcggagaaaagcattcttcagtgctcttctggacacaaaagtccagttttcttgtgttcattgctaccagataaggttgagtcatgccctttgaatcttgagtttgacgcagatgacttagtggcattctcagttgttggttcacgaagcatccacctttctggttattttgcggccgacgatggggatgatcttagggatgactatgaatatgattcatggggggaggatattgaaggaactgagtcagaggagtcatctgaatatgatagtgaagatggatatgctgatgactttattgttgatagtgataccgacatgtacccatcttcgccagtcccaaatagtggagttgtaattgaggagatagtggatgatgataaacctgaaaatggatatgatccaactaagaaattaaagaaaaagaaacaggtagctcaattgaaagagaaagacaacaaaagttctgggcttccaattgtcgctaagggtgatactgaccttgtggaaagtgaagacgaagacggctttccaattcccactgcagagaaaggggtgtctgtctctcagaaggcagaagcagaaacgaaaggagaacaagcacgtaagaaagcagagaaagccaagaaggaaaaagatgttgatcattctgctagcgtaaaacgaaaagttgatactgctgatgaagatgagccacaggatgggaaaaaaaagaagaaaagaaacaagttgaaagagcatattaaaggggaaagtgatcatgcaactggcaatagcaatgagacaaaaattactgaaccagatgaaaagcatcctgaggagattaaaactacaatcaacctgagtgatgtttctcatgcaaaggatgaagatgatggaaagctatccaataacgaggtccttgccgagaagaaaaacaagaagaaaaagaagaaaaagaccaaagagtctgaaggggaagttgctgcaaatcaaattactataactcctgaaaagcagaatttgtccacctcagagaaaaaggggcagaaacaaactgaaaccaagccatcccaagtgagaacttttccaaatggattgattatagaggaggtatttatgggtaaacccgatggcaaaaaagctgctcctggaaagaaggtcagtgttaaatatattggcaaactgcaaaaagatgggaaaatatttgactcaaatgtgggaagggcaccctttaaatttcgcctgggtgtaggacaagtcatcaaagggtgggaggttgggatcaatgggatgagaattggggacaaacgaaggatcacaattccaccgtctatgggatacgcagacaaacgcgttgggagtataccaccaaattcgtggcttgtatttgatgtcgagttggttgatgttgatcgctgatttctatccctcattgtttcggtttcgaaatggtctggtcccttcgggctgagagaacgttaaactcacatttaccatttttggtcccaagtgtggatcttgagaccaaattagagctcaagttttgtaggaaattttggattgaattagggaattcacagtcttacgagcttaaatatgcaacaaatatagtgtttgctttccttatcaatagtgttgatcattaaatgtgggtttcatttggattgaacaat

SEQ ID NO: 5128 - DNA, 700 bp, Glycine max
tcagctacgtaggcccactattcaagctcttctcactctccgccgccttctcaattctctttgcatctttgcacaaacctccatggcgacgaacacgttcaccggagcttcactctccgaacgctttctccgtctcaagctgaatcagagattggcatttaattcaattgctggccaaaggtatagctcaatttcaagctatgggagaaggaatgtttcttttagctcacagccacggtcaattcgccttacagtttcctgtgctgctaaaccagagacagtagagaaggtgtgcaaaattgtaaagaaccaacttgctctatcggatgactctaaagtcaatggcgagtcaacattcacagctcttggagctgattcacttgatacggttgagattgtgatggggcttgaggaggaatttggtatcaccgtagaagaagatagtgcacagagcatctcaacagttcaggaagctgcagatcttatcgaggagatcatcaataagcagagtccttagagtaaacatgtaccagataaaaaattatttctgctagacatgcatagttttatatattttagtattgcggggtatagtctgaagtgttttatatatttactgcaagtctgtaaccaaagaaataaagtagattttgctccttttcccaatatattttgtgcccgtggtgttcgatttcgaatt

SEQ ID NO: 5129 - DNA, 2582 bp, Glycine max
ttttttttttttttttttcggagaacaaatctgtgtgctttcaaggataggctcttcattcactaaacacgaccatgattgatattatgacactgacagtagatcacaaagcatcaacaaaaatgaacgcaaagcatgctcgacattttagcagagaattcagagaagttggtaaaacataaaaatccgtaggtcacacccactaaaatcctatgtcgtagttcctaatctctccctccaaagtatgtgacattttgaattatatatactcaaaatctactccactaagaaggatgctgtaatccagttcttccatacttttaaaagagctccattaattgctgcgagacagcttgaagtatggatggtgttgtctggaactcttgccagatgttctgataagctgcgagatccatgttcagaaacttggcagcaagatatgcagctccagcagcaatatgatggggtttaaattgaagccacagagaactccgaagcctgcaaaacaattttctgcatcagtagaccatacaagacagacaccactacaaccagcattgctcaatacaatagaggttcataaatagtcaaactaaccatccgaggcaccaacttagcatatgttcccaccatgacagatcatgtcatctattaaaatgagcagtaatataatacaaatagtattcaagattcataccaagaggaaaacacaaatttattaagttttccttaccaactagaaaagcagcaactcaggaagaatacaattccaagaatctgtgcaggattgctgataagagtaccaaactatagcaatattttatactcatctagagaatttatcagacttccagacccaactgtgctgtgggggctctaaactccagaaatttatgcaactaaaaagagaaagcatgcatggagtgctgtgctgcatattgctaacaattgaatctttcaaagctaatgccaatgccatatcttctcaatattttgacctggagagccttgctaccatgcatataggaatgttgactatgaatgcaacttattcaacacactatagaataaatccaatgaatgttcatgttgcaagtgtaaattagaagttcaaaactcactagacaataacatcaaaaaaagaaagcaaaaagaaaagaagagaaattatcgattacccttgcccaaatataacaatttgaagcagaaagctagttgatgagtttagtacaaactttggcatacgtggaaggcacaaggacaaatttataaagattgattagtattgacaaatatgtctcactgttcaagcacatctctaactgtttcaacaattgggagatccttattgtgaccttagggtgtaacgataaacggcttcggggcaacccccttcccaaaaaagaaaaagaaacttctacaagcaaaccctaaccagtctagcactatttttcaaaagcccaaatttgcacatgattaccctttaaatggaatattttcgacttatgacaaggtatgtaggctgcatagaaccactacatcacagccacctgaaatacccactgaccctttttaagaggaacagggataaaaacagaacaggaaaaagaaaagttccacttttttaatcctccttgtctttcgaggttgagcacaggaaatccagtacattataactttcaaactagttgtgcagaactttcagaagcaatgaaggtattaactgtaaatcatattggagaagaaggataaaaagaaaggctgctaggaccaacaccatacaatagtacaaaatttccttaagaattaaaagcataaagacagagccactgtccacaacaacccatccaacaaagaaggttttggagtcatcaaaacatttgagcaatttaactaaagacagaagcaaaatctcttctatgcataatccattgaaatttagcaggccagccataccaacaaataacactggtaccattagtattgatatttcatgaagatgctgaggcatttaaatcataataaagatcaacctctccaaccaataacattttcaaagaactaaggcagacatctaaagaaaggaccaccagatgccaaatgacatgaaggaaagtaaagtgtgagccaacttcagcatgatttttttttggggggggggtgacataaccataattatattcagtaaatatgagtaagaggggcaaaatcatagaatgatagtgtcaaatatttaagctttaggacaggtacttcaaaagttgaacactaaatggcttctcgtttcagattttcaatggcggccgccttcgttgttttaacacacaagaagaacctatcaaaatcatgaacaatgcctaatgttaaaactaaacaaatcaacactacaaggaagtaattctcacaattttcagttaacaaacaaacaacaacaaagcctttgtttgtgccatggttgtcacgtcaaactcttttttagatgcatcaataaattattggataaagtgaaagcatcttatagattgaaaagggaacaaaattaaattcaaatttaaaaaacctggggggaaaaacctcgagcc

SEQ ID NO: 5130 - DNA, 1840 bp, Glycine max
tcgagtcagctacgtagggccccccccccttttaattgaaaaactacttattatctaatatatttggatttgatgtttccagtagctgtaaattggttattgactagtgaccttctgttccagaaagctcttcatgatgttctgagttttagaaaagaaacagatggcatcacagttgatatagcttttcaatggtctgaagatgcatattcagatacaatactgggatatgctaatagtatacgcactattgatggtggcactcatattgatgctatgaatgcttctataacaagaactcttaatagtcttggaaagaagtccaaagttattaaggagaaggatattactctaagtggcgagcatgtgagagagggtctaacatgtgttgtctcagtcaaggtcccaaatcctgagtttgaaggacaaacaaagacaaggttaggaaatccagaggtgcgaaaagtggttgatcaatctattcaggaatatcttactgagtatttagaattgcatccggatgttcttgattcagtactttctaaagctcttaatgcttttaaggcagctctggcagcaaaaagagcaagggaattggtgagacaaaagagtgttttgagatcttcatcccttccaggaaactagctgattgttcatctacagatcctgaagaatgtgaaatctttatagttgaaggtgattcagctggaggaagtgctaagcaagggcgtgacaggcgcttccaggccattctccctctgaggggtaagattctgaatattgaaaggagggatgaagcagcaatgtacaaaaatgaagagatccaaaatttaattcttggtcttggtctcggggtgaagggagaggattttaagaaagatgcactccgatatcataagattattattttgactgatgctgatgtggatggtgcccacatccgaacactgctactgacatttttcttcagatatcagagggctttgtttgatgaaggttgcatatatgttggtgttccaccattgtacaaggttgtaaggggaaaacaagtgcactattgctatgatgatgctgaccttaaaaagcttcaaagatcattccctcctaatgcatcatacaacatgcaaaggttcaaagggttgggagagatgatgcctttacaactatgggaaacaaccatggatccagaacgcaggttattgaagcaattaaaagttgaggatgcagcagaagcaaatattgttttttcctctcttatgggtactcgggtggattttcggaaggaacttatacgaaactctgcaagcatgattgatcttgatcagctagatatttgatggtgcagctagatgtggagaagtggaatgccttccatattaaccatacactacaatacagtcaagcacaaaaaaatttctatatgctggggaatgtggagaggtcttgaatgaaagcaaggctcctgttttttcattggtgccatttgatgatttagaggaagggtttactagcacaaaatggagttgcacttttagttgatgggaaatatttgggaggcatgttggaggttctaattttattttaaaaaatttgtcaagtgcatatgttttttgcccccacctatgtatggtcccaaattttgtaactgcacgtgtaatcatattcaagtacttcagatgttacccttcacaggttaccattaaaatgcaaggttaaagtgtactgtgatcaaactgggtcgagtatttgcagaaatactagaattgaaactttttttgtgttcctaaaaaaaaaatgaacggtcaatgactgaatgaaacgcgtttatggggaggcatca

SEQ ID NO: 5131 - DNA, 1451 bp, Glycine max
agctacgtaggtcagctacgtaggccccccctcagtctcactatcaaacatcactgcaataacataagtacaaaacaacataacatcctcaagcctttgaacatcgttttgcagccatggaaacaggcatagcatgctacactcgcgggcctttcctgcctagtgtttcttccaagcactctccaccctccatctctccatcttttggcttgaggagtctgaaatcgagctctttatttggagaatctctaagagtggcatccaaatcaacactaaaggtttcaaagacaaagaatacttcactcgtgaccagatgtgaaattggtgacagtctggaagaattcctcacaaaagcaacaccagataaggggttgatcaggttgttggtgtccatgggagaagcattaagaacaatttccttcaaagtgaagacggcttcttgtggtggaacacaatgtgttaatacttttggggacgagcagcttgcagtggatttgctagctaatcagcttctttttgaggccttaaattactctcatttctgcaagtatgcttgctctgaagaaaatcctgagctcctggacatgggaggtccagttgaaggtggatttagtgtcgcatttgatccccttgatggctccagcattgtggacacaaatttcacagtaggcaccatctttggtgtgtggcctggagataagttgactgggatcaccggaagagatcaagttgctgcagccatgggggttttgggtcctagaacaacatatgtgcttgctctaaaagacttccctggcacccatgaatttcttctgcttgatgaaggaaaatggcagcatgtcaaagagaccacagaaattggtgaaggaaaactgttctccccaggaaatttgagagccacatctgacaaccccgattatgctaagttgatcgattactatgtcaatgaaaagtacacattgagatacactggaggaatggtgccagacgtcaaccagattattgtaaaagaaaaaggaatcttcaccaacgtgtcatcaccatcagccaaagccaaactgagactgttgtttgaggtagctcctttggggttcttgattgaaaaagctggaggttacagcagtgatggtcatcagtctgtgctagacaaagtcatcagtaacattgatgagagaactcaagttgcttatgggtccaagaatgagataatccggtttgaagaaaccctgtatggtaaatccaggctcaagggtggtgtagctgttggagcagctgcttaatctgttaaacctgcaattcattgtctatttttatctgcttttagaaaaagatatatgctatcttcagacaagtacctgcaatttagtcacatttctgtttatcactataataacaaggtaaatttatgttggtatggctactaaaaaaaaaaaaaaaaaaaaaaaaaaaaa

SEQ ID NO: 5132 - DNA, 1359 bp, Glycine max
  misc_feature (1219)..(1219): n is a, c, g, or t
  misc_feature (1257)..(1257): n is a, c, g, or t
  misc_feature (1271)..(1271): n is a, c, g, or t
agatggctgaagacttgccatcaaatgtgtctgctgagagaaattcagggtctctgtcaattggaggccttaaattatacactcaggacatctcggataatgaaagtgatgaatataatgacggagactcaccagatgaggacagctctgcgtcttctgagccagaagagttacttggatcatctgaaaccaatgactctgaatactcatctgatagtgattcagacattaatgaagaggttgtggaagattatttggaaggagttggtggtagtgacaacatcatggaagcaaaatggttgctaaaacctgttttggatgagtcaaatgatgatagttcttccagcagttgctatgacgaggcattggagaagttgagtggctttgtccttcaagaagcctccagggaatatggcatgaagaaagctcaaccatggaagaaacgctctgtaggttctggacctttagctttggaagacctaatgttggaaaaggatccaagatccatctctgctagaaagaagcatgttcctcgattccctcaatcttggccttcacatgctcagaagagtaaagcttccaaaagaattcatggtgaaaaaaagaaacttcgtaaagaaaggattgctgtaaagcgcagggaaagaatgctgcatcgtggggttgatcttgagaaaattaattcaaaattagaaaaaattgttttggaggaagtggatattttctcttttcagcctatgcattttcgggattgttcacagatacaacgattagcagcaatatatcaaatgcagagtaacagccaaggctcaggcaaaaaaagatttgtgacagtgatgcgaacacagtctacatccatgccatcttcaagtggtagacagcgcctggaaaagttgttgggagttgatgatgatgaggatgccgatttttctgttgctgactatgtgaataagaaatctgtgagtggagacagaagattgggaaagaaaaatgctaaaaggaatgattttagattacaagaacctcaatctgcccagaacaagtactcaggaagccgtaaattgaaagacaagaaagggaatggacaaaagggttcatatgctaatcagccagtgtcatttgtatcaagtggcttaatcaattcagaaactttacaagttacagttgttgatgctgaagagacaaataggaaagggtgtcaccagctctgctaatatanggttcgtttgaagaacacactactgggttttggttcanaaatgatggctaanatgggatacacggaaggagcaggattggggaaaaatggtcaaggtatggcacagcctatttgagttattcaaggcctaatcacttggt

SEQ ID NO: 5133 - DNA, 1584 bp, Glycine max
aaagtactcactctcctacactttcattgcattatattgcattgaacgcaacacaaacacaaacacatggcttcctcgttgttcttctttctaacgttgcttctcctctccgttatctccgccgtcaccccctgcccgccgtcagaacgggcagcactcttggccttcaaagctgccctgatcgaaccctacttgggcatcttcaacacatggtcgggcactgactgttgccggagctggtatggcgtcgcctgcgaccccaccactggccacgtcaccgacgtcagcctccgcggtgagtcccaagacccaatgttccagaagcttggccgctccggctacatgaccggaaaaatctcgccggagatttgtaaccttagcaacctcaccaccctagtcgtcgctgactggaaggccgtctccggcgagatccccgcctgcgtcgcctcgctttactctctccaaatcctggacctttccggtaatcgcatctctggcgagatttcagccgacatcggaaacctccggagtctcaccctattgagtctggccgacaatgagatctccggcaagatccccacgtcagtcgtgaagctcatcagactcaagcatctggacctcagcaacaaccaactcagtggcgagataccctataatttcgggaatctggccatgttgagtcgggcgttgctgagtgggaaccaactaaccggttcgatctccaaatccgtgtccaaaatgaagcggcttgcggacttggatgtatcatcgaaccggttgaccggttcaatcccagtggagttgggaaaaatgagagtcctctctactttgaaattggatggtaattctatgacgggtcctgtaccctccactttattgagcaatacgggtatgggtattttgaaccttagccgaaatgggttttcgggtaccatacccgatgtttttgggtcgggttcttattttatggtacttgatttgtcgttcaataacttttcgggtcggatacctggttcgttatccgcatccaagttcatggggcatttggatctgagctacaaccacttatgtggaaccatcccaattgggtctccgtttgaacaccttgatgcggcgtcgtttagtaacaatgattgtttgtgtggaaaccccttgaaggcttgttgatgggtgacccgaataagtacgtattgggttgttgtcggtgaatattccaagatataatgatttggttatagtgaaggagcccaagtgtgattttaattttatgtgatagtattctgtcatgtgaactgtgatgtaatgtaatatatttagggcaagttgaaatggacaaaaagttatgagggtgctcctggttgcatgtgcatacaagtgagcataggtcaagaaagttctgaatatgctttgtgttgcatgtgggtttcagagctgcatgtgagtttaagagctggatataacgtgaaagatttggatcatgactccatttcccaaaaaaaaaaaaaaaatctacaaccaaagtccaccatattttggaaaaaaattataatgcgatcatcccaatgctacaagacttttatttcc

SEQ ID NO: 5134 - DNA, 1383 bp, Glycine max
tcagctacgtaggccccccccccaatttcggtcgcaaaagtttctaataccacaaagtcgtcatttttaattggggaccgtattcgtagggttgctagtaaacttactggttcaccctctatggtgaagagttctggtgatcggtctcagaagaccgatggaagcgctgatggtttttctgggaatggacctgatttttcttttgaggaggctcagaggtcaaatatggttgccccaacagagtattcatctctggacgatttgctatcttcacttcgtttggtggctcaagaaccccttggagattacagcttcctgaatcctattgtaagcttcttctatgatttcaggaattcgatagttgtggctgatgattctgtaaaagatatattttgtaaagaaaaagttggtactaaaaggaagaaaccgctcacggctggattgcccgaaacatttgaatttgaggatatgagtgacacatattggacagacagggtcattgacaatggtagtgaagcacaaccagcgcaaccgtgtcaaccaccacaaccagcacggagaaaccggaaaaaagaccatcaacttgttcctactgagccagggaagcctgttcaagttagtcgtaggccatattccaggaaacagtattctaacaacaatcacattgaggctcctgcaaaacctcctggttatatagatgagaatgcccctgctgaacttgttatgaactttgctgagttgggttctgttccctcagaaacaaaccttaacaaaatgtttaggcgttttggacctctaaaggaagcagagacagaagttgatacagtaagcagccgggcaagagtggtttttaaaaagtgtgttgatgcagaggttgcttgtagtagtgctcaaaagttcaacatatttggttcaatacttgtaaattaccagcttaattatactcctagtgcattgttcaaagcttcgtctgttgccacaacacaggaccaggagatgcatcttgatctctccaattttgaagttcatatgattgggagtgttgatgatgatgtggcggctaagtttggctgaatgaattgctgaagcaaaattttacctagtggctgctgaagtaggtaggtaaccagaatgttaattcatctggtcgtccatttttctgttaagagatattttttgttgtaggattcctttagttatagttcagtagttttgtaattcattttctagttttctgtatagctttgtcaactgaccctcttttgtagttgccatcattctccatcccgatcgttttgaattctctagtctgaacactgcaaattctctactctgaacctggttctgtatcaatatcgatagtcattcgacattatagttaaa

SEQ ID NO: 5135 - DNA, 1043 bp, Glycine max
cccacgcgtccgcccacgcgtccgcccacgcgtccgtacggctgcgagaagacgacagaaggggaaacaattcaagcaaaaaaagcaacctctcttttcttcacaagctcaaatcaaatagtgagtagaacttcaaaaaaaaaattaaacatgtctactacacatttttcccttctagccatttttctccttctttcactagattctcttggcacaaccatgggtggacgactcatccccccaagtgctccaagtacagttacaaggccactagtttcatcagaagttgaaaactacgtgaagccacagctgaatcacaagctgaaagccttacaaggaagagaagttaaggggtgcttgccaaaaggttcaaggcataactcggctcctagcagattcgtcaactacaagacactaggctctggtggctgctctagaattcattcagggaaaccttgaagatgtttttgtcgaatggaattgaagaacttttttgcatatgggttttcatggtcaagtgtggtagaaacttgaaggatgagaaagtcacttatgtttttactttgcttattattagcatatttggcttcacgtttcggatgtgattttccacgtttagttgtgattttgaaaagctaatagctttagcttccacatcccaaaggtgattcctctgttccggactggtttccaaacatactatatgatggatatattttgcgggttacaattttgaacgatgtgcatgggaaggtgaagatgttagtgacttttcctgctattagatatacatatgtagagctaatgcttgagacattagccaaacgttggagaaagaaatatgatatttatttatttattttgaaatgcttaggatgtaatactgagtaagtaatttgctagaactccgaactaccgagtaatatggctatggtagtgtgtatatcatcgtttagtgtaatatgtagttcaattttgtattatgggtggatatataaccttttgatttgctcccaaaaaaaaaaaaaaaaaaaaaacccaaa

SEQ ID NO: 5136 - DNA, 2178 bp, Glycine max
cccacgcgtccgttttttttcaatgatcacacactttattttttctctaaaatagaattttcagtttaaagcaatcgaatccccgcgccgcgagtttgtgagagattttctagaaaaatttcgcgccccagaaaccctagaggaaccctgattcaatcgattcgctgttgccttcgaatttcgttccttggaagattagggagcaatggcaattgcagccccagggcatctgaacgtgaatgaatcacccatttggggatctagaagtgttgattgcttcgagaaattggagcaaattggcgagggcacatatggtcaggtttacatggctaaagagatcaaaactggtgaaattgttgctctgaagaaaatacgaatggacaatgagagagaggggtttcctataactgccatacgagaaatcaaaattctaaagaaactacaccatgaaaatgtgatcaagctgaaggaaattgtgactgatacaggtcctgagaaagatgaacaggggaagccagatggtaacaaatataaaggtggcatctatatggtctttgaatacatggaccatgatttaacaggtcttgctgaccgacctgggatgagatttacagttccccaaattaagtgttacatgagacagcttttgactgggcttcactattgtcatgtaaatcaagtacttcatcgtgatatcaaaggctcaaatcttcttatagacaatgaaggaaatcttaagcttgcagattttggactggcacgatcattttctaatgaccaaaatgcaaatcttactaatcgtgtcattacgttatggtacagaccacctgagttgctgctaggaacaacaaagtatgggccagctgtggatatgtggtctgttgggtgcatttttgctgagcttcttcaagggaagcctatatttcctggaaaagatgagccagaacaattaaataaaatatatgagctgtgtggagcaccaaatgaagtcaattggcctggggtttccaagataccttattataataaatttatgccaacaaggccgatgaaaagacgtttgagggaagttttcaggcattttgatcatcatgctctggaattgttggagaagatgttgacacttgatccggctcagagaattactgcgaaagatgcacttgatgctgagtatttctggacagatccattaccgtgcgatcccaagagtttacccaagtacgaatcatcacatgagtttcagacaaagaaaaagcgccaacaacaacggcaaaatgaagaaatggctaagcgtcagaaaattcagcacccacagcctcacactcgtcttccccccattcagcagcctggacaacatggccaaatgcggtcaggaccaaaccaaccagttcatggttctcaaccccaagttgcggcaggacctacacatcattatgggaagccccggggtccatctggtgggccaggaagatatcctcccaatgggaacccaggtggaggatacaatcacccaaatcgaggaggtcaaggtggtggtggttatggcagtggaccttatcctcctcaagggcggggggcaccttacgggtccaatagtatgcctggtggcggtcctcgtggcggtggtgccagcggctatgttggagctccaaattatccccaacaaggtggtccatatgggggctcagcggctggtcgtggctcgaacatgatgggtggaaaccgcaatcaacaacagtatggttggcagcagtaaatatacttatgatgatcagtattagtactacaatttggcaataccctgataaatttgagaaggattggactgtttatggatcaagttactgagaagaagaaatgagatatgacctctatggtttgtatactactgagatatttgttctcattacttgaagtgcttggaaacttttgtgatgtatgcatgcaccttaggtaatgtttggggctccttattacaagggcaccacaagagaagagtgaacccccgattttgtagttttttttcgttttcttcactatatacattaattcctgtgcagtatgtatgaatgatagcagcatacttcaaaatgggtaacaagctgctgcttactgagtatcttattggaaaaaaaactcgtcccataaaaaaaaaaaaaaaaaacaccaccccccaag

SEQ ID NO: 5137 - DNA, 1273 bp, Glycine max
tacggctgcgagaagacgacagaacgggactacagccacttctatagcttcaatttataagaatggcactttctcctattcgttcttcttctttctcttcatcagctattgttgcattggctgtgttactgcttcttacagggacctcttcagctaacctctcaaagaacttctattccaagacatgtcccaacgttttcaacactgtaaaatctgtagttaaatctgctgttgtcagagaacctcgcattggggcatctattgttcgtctcttcttccatgactgctttgttcaaggctgtgatgggtcaatactacttgatgacactccaaccttccagggggagaaaactgcagctgctaacaacaattcagtgagaggctttgaagtaattgatgctatcaagtctgaggtcgagaaaatatgccctggtgtggtctcatgtgctgatatcttggacattgcttctcgtgactctgttgttcttcttggagggccattttggaaagttagacttggaagaagggattccagaactgccaactttactgctgctaacactggtgttattccacctcccacatctaacctcaccaaccttatcacaaggtttcgagatcaaggactctctgctagggacatggttgctttatctggagctcacacatttggcaaagcaaggtgtactagtttcagagatcgcatatacaatcaaaccaacattgatagaacatttgcattggccaggcagaggaggtgtcctaggactaatggcacaggtgacaacaatctagcaaatctagacttcagaactccaaatcattttgacaacaactacttcaaaaaccttctcattaaaaggggactcctcaattctgatcaagtgcttttcaatggtggatccactgattcactggtcagaacatacagccagaataacaaggcctttgattctgactttgttaaagcaatgattaggatgggagatatcaaacccttaactgggtcacaaggggagattaggaagaactgcaggagagtgaattaattagaagtgacacataaatttgtttggtgtacactttgtacccttcaaaagggggaagttgtttggtgtgttgggttgtttaagtgatttctcatgacttggaaattgtgaattgtttgtttagttcagtttaaattgtacttgtgtaaccttataattgtattatggaataaattataaggcattttgccttttgtaccaaaaataaaaaaaaaaaaaaaaaa

SEQ ID NO: 5138 - DNA, 1300 bp, Glycine max
tcgagtcagctacgtaggccccccccccccacactacagccacttctatagcttcatttaagaatggcactttctcctattcgttcttctactttctcttcatcatcagctattgttacattagctgtgttacttcttcttacaaggacctcttcagctaccctctcaaagaacttctattctaagacatgtccaaacgttttcaacacggtaaaatctgtagtaaaatctgctgtggccaaagaacctcgcattggagcttctattgttcgcctcttcttccatgactgctttgttcaaggttgtgatggatcaatactacttgatgacactccaaccttccagggggagaagactgcagctgctaacaacaattcagtgagaggttatgaattaatcgatgatatcaagtctaaggtcgagaaaatatgccccggtgtggtctcatgtgctgatatcttggacattgcttctcgtgactctgttgttcttcttggaggaccattttggaatgttagacttggaagaagggattctagaagtgccaatttcactgctgcaaacactggtgttattccacctcccacatctaacctcaccaaccttatcacaaggtttcaagatcaaggactctctgctagggacatggttgccttatctggagctcacacatttggcaaagcaaggtgtactagtttcagagatcgcatatacaatcaaaccaacattgatagaacatttgcattggccaggcagaggaggtgtcctaggactaatggcacaggtgacaacaatctagcaaatctagacttcagaactccaaatcattttgacaacaactacttcaaaaaccttctcatcaaaaggggactcctgaattctgatcaagtgcttttcaatggtggatccactgattcactggtaagaacttacagccagaataacaaggcatttgatactgactttgttaaagcaatgattaggatgggagatatcaaacccttaactgggtcacaaggtgagattaggaagaactgcaggagagtgaattaattagaagtgacacataaatttgtttgttgtaaactttgtacccttcaaaagggggaagttgtttggtcttttttgttgtttaagtgatttctcttgggttgggaaattgtgaattgtttgtttagttcaatttaaattgtacttgtgtaaccttataattttaatatggaataaattatatggcattttgccttttgtagcaggtggaataatgcatataacttcaatcaattatgctacactgtat

SEQ ID NO: 5139 - DNA, 2571 bp, Glycine max
ccacgcgtccgcatcttttgagcaatttaactgttgtttgtcactttcactttgtttcaactctgaaccctgcagggctcgaggttgtgttgtgtgactaaccaaaccaaaccaaaaatccctatcttagtacaagtattttagcttcatcacaacatgaagaacttgtggctttgtttcagttacttgtttcctgcagcaatcattcttgttctgcttactccttcctcagttgcacagctatcaccaagtgagggtagaattctattccaagttcagaagcttcttgagtaccctcaagcccttcaagggtggaatagatggaccaacttgtgcttcctcccttcctcaccttccctcaagatagtttgctccaatggtcatgtcacggaacttacaatcattggaaacaagacctctccatctttacacaatcccaaagaaagtgcttggacttcccttcaaacactgtctggaagattctccattgattctttcttcactgttatgacaaagctttcaaatttgaagatgttgtccttggtgtctttgggtttggggggtcctttaccagccaagatcaacaggttttggtccttggaagtgcttaacattagctcaaatttcatttatgggggaattccacaatctctatcctctatgaggaatctaaggagtcttgttttggttgataatctcttcaatggaagtgttcctgacctccaaaggctaacttctctagaagagctcaacttgggaggcaataatttgggtgctcaattcccttcagtgggaaagaatcttgtcactattatgttgagaaataattcactgagatctcatatccctccacagcttgtgcactttgacaaactgcaggtatttgatgtgtcttccaacgatttttttggaaacatcccatcatttataatctctttgccttcccttcagtacctaaacttggcctcaaaccatctaagtggtaacctatcagtgaatatggcatgtagttcttcactaacatttgtggatatctcacacaaccttctggttggaaaattgccatcctgctttggttcaatgtcttcaaaggccaaagtgctatattctgggaactgtttgtcaaccaaaaataggttgaatgatcaacaacatccattttctttttgcaagagagagggggctttggctgttaagcctccagctaaaaacctgaagaaggaatcaaatttgggtacaaaactagggctaatgcttggaataattgtaggaattgtagtaattggaggacttctggttctactcgttgtgtgcatcattaggaagtccaaagcagaaagatcacctcataaaatggacaaatctgttgctaataaatattctaccagtgtatctcctagaccaattggtacaagacatattcctcaggcaatgaagcaagctgcagttggactgccaccataccgtatcttcacatcagaggaaattgaagatgcaactaacaactttgacccatcaaatttaatagaagagggatcacagggacagctatataaaggttggctcagagatggttcagtggtccttgttaattgtgtaaaaataaagcagaaaggtttgccccacagcatcatgcagcaagtagaggtattacacaatttgaggcacaggcatatggtgagtgttctaggacactgtgtcattactgaacaggagcatccacaaacaacaagcacagtcttcattgtgtttgagtacatctcaaatgtgtcattgagggatcaactttcagatgggaggaagagggaaatgctgaaatggccacaaagaatggcaatgagcataggcattgcaagaggagttcaattcttacacacaggagttgctcctggcatatatggcaacaatttaaagattgagaacattctgttggatgatagtctcaatgcaaaagtcagtagatacaacattccattgccatccaagattgcacatattgaacaaaatgccaccaatcatattggcagcacaaacgatgcagaaaaggaagatatctatcagttgggtattattctacttgaagttatcactggcaaacaaattacatcctcgagtgaaatagaggagctgaaggaagagctggagaatggttcatcagaagcaacatcagtaattagaagcgcaattgatccttcactgaggggaacttatgcatatgaatcaatgaaaactgcagttcagatcaccatcaactgtctctccaaggtttctagtcagcgcccttcaatagaggatgttctttggaatttgcagtacgcaatgcaagttcaagagtcctggaccagcagtggaaacctcagcacaaaattgtaaaccacacttgtcaataaaaaaatgcttgcttacatttccatatgttcattatcataatgaataaaatgttgatgtacatatgtaatttctttcataaggccccaaaatgcaatttggcctgcatttttccatattattgttgttactaaggttttataatactttgaattaggttcctatcaaaatatcaatcccttg

SEQ ID NO: 5140 - DNA, 1137 bp, Glycine max
  misc_feature (2)..(2): n is a, c, g, or t
cnctccctaacctaacatttctagacatcagcaccgcaactttcgaggtcaaatggcggaacgcttaggtaatttgcagtacttcaacatgtccggaaactccttcggaacctccttaccggcctctatttggaatgctactgatcttgcgatcttctctgctgcagcaacaatgagtgcaccatgctgctttacgagtacatgcccaatggcaatttggatgatttgttgcatgccaaaaataaaggagataatttagttgctgattggttcaataggtacaagatcgccttgggtgtggctcagggaatttgttatctccaccatgactgtgatccggtaatcgtacaccgtgatctcaaacctagtaacatattattggacgctgagatgaaggccagagtggcagattttggtgtcgccaagttgattcagaccgacgagtccatgtctgtcattgccggttcctatggctacattgctccagaatatgcttacacccttcaagtcgatgaaaagagtgacatttacagctacggagtggtgttgatggagatcctaagtggaaaacgttcggttgatgcagaatttggcgatgggaacagcgttgttgattgggttaggtctaagataaagtctaaagatggcattgatgacatattggacaagaatgcaggggcagggtgcacctcagtgagagaagagatgatacaaatgcttagaattgcattgctttgcaccagtagaaacccagcggataggccttctatgagggatgttgtgttgatgctgcaagaggccaagccaaagaggaaattgcttgatggtgttctaggtcgatgtgctggggacaatgtggttgttggtggtgacattcctttgccacaaaagccaattgcggatcaatgttaatgtgtttatatgattgaaatgatttttctttttttggatatttttcttattgtgggggattggtataggagaatcattttctattttactttcaatggaatttcaagtgttacttgttctagtttttttttctccagttacatattgttatgactcttgtttgctaatgcttatatattaaaaagtgtgcagctcatatgaatgactgacacatgttgcctccca

SEQ ID NO: 5141 - DNA, 2168 bp, Glycine max
atagacgccatcgtcaaaccctgcttaccattttcacttctctctctctctttagggttttggctctctctctctctctccctccttattcctttctacctctcacatccttctcaatgactaacaacaacgacaacatcgccgtgacagatctcacttccgccctcaatgaagagaatcgcgccgacctagtcaatgctctcaagagcaagattcagagtctggctggggctcattctgatgttctggagactctatcccccaatgtcaggaagcgtgttgaatctcttagagagattcagggtaaacatgatgaaatagaggcagacttcttgaaggagaaagaagctcttgaagccaagtaccaaaaattgtatcagccattgtacacaaagcgctatgaaatcgtaaacggtgttattgaagtggaaggggcagcaaatgaaacaacagatgaatcagaagaggataaagagaaaggagtgccttctttttggctcaatgcaatgaaaaataatgacgtgttagctgaagagatttcagagcgtgatgaaggtgctctcaagtttcttaaagatatcaagtggagcaggatagaaaatcctaaaggattcaagcttgagttcttctttgataccaatccttacttttcaaataccatcttgacaaaaacatatcatatgattgatgaggacgaacctatattggagaaagccattgggacggaaattgaatggtacccgggaaaatgtttgactcagaaggttttgaagaaaaagcctaagaagggttcaaagaatgctaaaccaattaccaaaaccgagagctgtgaaagtttcttcaattttttcaaaccaccagaagtccctgaggatgatgttgacattgatgaagatttggtatgacagtctgtcccaataaacctaaggctaaaaatatgaagcttttgtctattgctataataacttaattttttcaacaggctgaggaacttcagaatcagatggaacaagattatgacattgggtatgcctaattgctaccttttgcttgtatgagctaccttatatatgagctaccttatatttttcttgtccaagctgttgcttgctcttagcataatttttcttgtccaagttgttgcttgctcttagcataatttttcttgtccaagttgttgcttgctcttagcataatttttcttgtccaagttgttgcttgctcttagcataactgttgttgctacttgcacctgtattcttgaatctgttcttagttaatcttgattcctgtgtaggtcaacaataagagacaaaattatccctcatgctgtatcatggtttactggggaggctgttgagggagacgagtttgaagacctggaagatgatgaggatggagatgacgatgaggatgatgaagaggaggatgaggacgaagatgatgatgacggcgatgaagaggaggaagacagtaagactaaaaagaaggtatactgttaattgatatggagtgttgaaaccttggtttattctttattttatttgaggtttgaacgtgagttaatgcatttgtttttcacctgcactgtgttgtcaatttcctctggaatgttgctgcagtcatctgctgttaaggtgagatattttgattttgtgatctgaatgaaattatatggacacatgattttgcccaagatatgtcatgtgttttctgttataaatttgttttgcttgatgttgtatactttacattctttatttttcattgctctggtcattgcattcctgatttccattttgggttataaattttcagaagagtggaagggcacaggctggtgatggtgagcgacctccagagtgcaagcagcagtaattgtttatttcttcggagtgtcatgtggctgatgggtgtttttgaggtcctatggtgcgcctgatggaaaagtgggtttcagtttcatgcaatttttcatggtccttgattcattttcctccttagatcctatagtctgaatttattgagagtccatttcttctttttcccatccattttgagagaatgtggggttatattatagtcagggatgctgtgatttgttactgttggaatttcattccagatacttaaaatatatcataggttgtgctttgttactaaaaacc

SEQ ID NO: 5142 - DNA, 1831 bp, Glycine max
  misc_feature (1812)..(1814): n is a, c, g, or t
ctgcgagaagacgacagatgtgggaggagggttttgacttgtgattttccttcaacacagtcggcaaaatctttcaccaccaacacacagccatggcaggctctcaccttctttctcactcaccctcccttcccaaaacctataactactccttaaaccaaaaccctttatcccaaaatcttttttttccacccctcaaattcaaaagcaccacaaaaccgcgtgttctcagagctgttctctcccaaaacgctgcaaaaaccgcggtagaggacacaaagaacgctcattttcagcattgtttcaccaaatccgaagatgggtatctgtactgtgagggcctcaaggtgcatgacatcatggaatctgttgagagaagacctttctatttgtacagcaagccccagataactaggaacgttgaagcctataaggatgcattggaagggttgagttctataattggttatgccattaaggctaacaacaatttgaagattttggaacatttgaggcacttgggttgtggtgctgtgcttgttagtgggaatgagcttaggttggctcttcgtgctggctttgatcccacgaggtgtatctttaatgggaatgggaaaatcttggaggatttggtcttggctgcccaagaaggtgtgtttgtcaacattgatagtgagtttgacttggaaaacattacagaggctgcaaaaagggctggaaagaaggtcaatgttttacttcggattaaccctgatgtggatccacaggttcatccttatgttgccactgggaataagaactctaaatttggcattagaaatgaaaagctgcagtggtttttagatgcagtgaaggagcttcctaatgagctcaaacttgtaggggcccactgtcatcttggttcaacaattaccaaggtagacattttcagggatgcagccaccattatgatcaactacattgaccaaatccgagatcagggttttgaagttgattacttaaatattggtggaggacttgggatagattattatcattctggtgccattcttcctacacctagagatctcattgacactgtacgagatcttgttatttcgcgtggtcttaatctcatcattgaaccagggagatctctgatcgcaaacacatgctgcttagttaaccgggtgacaggtgttaaaagtaatggatctaaaaattttattgttattgatggaagtatggctgaactgatccgccctagtctctatgatgcttaccagcatatagagctggtttcccctgccccatcaaatgctgagacaacaacttttgatgtggttggccctgtctgtgagtctgcagatttcttaggaaaaggaagagaactacctactccagccaagggtactggtttggttgttcatgatgctggtgcttattgcatgagcatggcatcaacctacaatcttaagatgcggcctcctgagtattgggttgaagatgatggatcagtgagcaaaataaggcatggagagacttttgaagatcacattcggttttttgaggggctttgatgatttattttgtaagaaagaagggtggagaattattgtgtatttggagtttgaatctttccttgtcaatgaatgcatgactcttagctctgtttcttccgttctaattgaatgttgacactcttgataggaacagagaataaagttgatttcagtttagtttttacacagcaataaaatgcctcattccaagttcaatttaatcaaagcgcgaatatatttacattgaaaaaaaaaaaaaaaaaaaaaaaannnaaaaaaaaaaaaaaaaa

SEQ ID NO: 5143 - DNA, 1595 bp, Glycine max
cccacgcgtccgtactcgagtcagccacgtaggccccccgggatttagacgccattgtcaaacccttttcacttctctctagggttttagcactctctctctctctcgttttcgttcttcctttctgcctctctcagtcacacaccttctcgatgaccaacgacaacatcgccgtgacagatctcacttctgccctcaatgaagataatcgcgccgacctagtcaatgctctcaagagcaagattcagagtctggctggggcgcattctgatgttctagagactctatccccgaatgtcaggaagcgtgttgaatctcttagagaaattcagggtaaacatgatgaactagaggcagacttcttgaaggagagagaagctcttgaagcaaagtaccaaaaactgtatcagccattgtacacaaagcgctatgaaattgtaaatggtgttactgaagtggaaggggcagcaaatgaatcaacagatgaatcagaagagaataaagagaaaggagtgccttctttttggctcaatgcaatgaaaaataatgatgtgttagctgaagagatttcagagcgtgatgaaggtgctctcaagtttcttaaagatatcaagtggagcaggatagaaaatcctaaagggttcaagcttgatttcttctttgataccaatccttacttttcaaataccgtcttgacaaaaacatatcatatgattgatgaggatgaacctatattggagaaagcaattgggacggaaattgaatggtacccgggaaaatgcttgactcagaaggttttgaagaagaagcctaagaagggttcaaagaatgctaaaccaattaccaaaactgaaagctgtgaaagcttcttcaattttttcaaaccaccagaagtccctgaagatgatgctgacattgatgaagatttggctgaagaacttcagaatcagatggaacaagattatgacattgggtcaacattaagagataaaattatccctcatgctgtatcatggtttactggggaggccgctcagggagatgagtttgaagacctggaggatgatgaggacgaagaggaagatgaggacgaagatgaggacgaagaggatgacgaggacgaagacgatgaagaggaggatgacactaagactaaaaagaagaagagtggtaaggcacaggctggtgatggtgatggtgagcgacctccagagtgcaagcagcagtaattgtttgtttcttcggagtatcatgtggctgatgggtgtttttgaggtcctatggtgcctgacgggaaagtgggtttcaatttcatgcaatttttcatagtccttgattcattttcctccctagatccgatagtctgaatttattgagtcaatttctcctttttcccatattttgggagaatgtggttatatatttgtagtcagggatgctgtgatttgttactgttggaatttgtacgtcattccagacacttcacatatattataggttgtgctttgttactataatttttcttattaatttatttattcacaattttgttaacttgaatttatattgaggcaagaagttcattttttccccct

SEQ ID NO: 5144 - DNA, 783 bp, Glycine max
gattagatgtaaatgtaaatggaatcggaatgaaatttgtattcctccgaagaggcacagcctgtgcagcagtcggagaagatgccacatctcaatcatttcagcatcgccctcgccggaaataaataaaaaccatattccattcactttttcgctttcccttaattcttccaaatctgcgaattcagacgcacaataatcgaattccctctttctccgcaattcatcctctcttccacgaatcaaaaacaaatccctaactaaccgattcgatccacttcaatggcgggacccaacatggatcagttcgaagcgtttttcaggagagcagatttggacggagatggcagaatcagtggagccgaagccgtctcattctttcagggatccaatttgcccaaacaagtcctcgctcaggtgtgggcgtatgctgatcaggccaaaacgggtttccttgggcgcgcggagttttttaatgctctaaggttagtcactgtggctcagagtaagcgagatttaacgcctgatattgtgaaggcagctttgtatggtcctgctgctgctaaaatccctgccccacagattaatcttgctgctgtgcctcaaccacgcccgaattcgatgcccggtggtgctgggtctgtcgggcagatgggtgttaccgcacccaatttggctcaaagttttccctatagaggacaagggttggcaggtcctggtgcaaacccgcaatattatccttcgcagcagcatcctggcatgagacctcctcaatccatgcct

SEQ ID NO: 5145 - DNA, 1503 bp, Glycine max
atgcagcgtcaccggtgcgcgactccacgcgtccgggacactttaacagcattctctctctctcgagtctcttccccccgactcggcgccccgccacaccccacaacacaacaaacacattctgagactatttatagttatccccattctggttatgttctttctttcttactccctctcaatcaaaccgtgttagggttagaactaagattagggtttctttactttacccgcgtaatgtaatgcgtcgaaaacccccaattctaccctccttccaacaacaacaatgttcggctccatgaacaagatcgtctccgctgaagacaccgacggctccgtctccgaccaccacatccattacagttcccacaccatcgaagacgacggcgccgcctccgatcaccacatccattacagttcccacaccatcgaagaggacggcgccgtctccaaccaccacatccattacagttcccacaccatcgaagaagacggcggcgccactgtcgaagaggtttccgccgttccgccccttgaaatctctatcaacgattctagccagctcacgctctcgtttcgcggccaagtctatgtcttcgacgctgttacacctgataaggttcaagcagtgttgttgctgttgggaggaaatgaactaacttcgggttcgcaatgtgcggagctatcatctcaaaatcagactggtgaggaggaatatcctgcaaaatgtagtctaccacagcgagcagcgtcattgaataggtttcgtcagaagaggaaagagcggtgctttgataagaaagttagatatagtgtacgtcaagaagttgcactcaggatgcatcgtaataagggtcaatttacttcatcaaagaatcaggatggaactaatagttggggttcagatcaagagtcagggcaggatgctgttcaatctgaaaccttgtgcacacattgtggaataagttcaaaatccactccaatgatgcgtagggggccatctggtccaaggtcactttgcaatgcttgtgggcttttttgggcaaataggggcactttgagggatctttctaagagaaaccaggaacactctcttgcaccacctgagcaggttgatgagggcagtaataataatgactttgactgtcggagtggcatccctgcacaacataacaatcttgttaatgataacaaagcttaacaatcttgttaatgataacaaagctttggtatctgatcgttgagttttccactcacaggaaatgcaagtccttgactgtgacattcgcaggtttttagtaattccattcagtttgacctatagaatgtacagtatatagcaaagctctcgtcaatacaagagaggtctatttctatactctctgatcagttgcattaaactgtttatctatgactgtacaaactggaatttggaatgacttgatcgaatacaagagatctattcctataaaaaaaaaaaaaagaaaaaaaaaaaaaaaaaaa

SEQ ID NO: 5146 - DNA, 1870 bp, Glycine max
tcgagtcagctaagtaggccccccccccgtgttctgttctgcaccaccaaataaataagctctcaacaacaatcccaattttcacttcacaaaggaaaggaaaatcttctctcttccctaggaaggttgaatgatttggaaaaatgagttctggcaatgtgaagccagaagaagaagccctagaaaaggagaatgtaggtgttcctgtccctgaaatttcagaaccaaaagagcagaaggctggaagtaactgcaagggaattgagcagattcctttgtctggggaaaatgaagaggatgtgctagttaatataactgggagtgggtccataatttctggtggcaaggcagtggaagatgcttctgaggatgtcactgatgccacgccttgcagttccagttcttttggtgatacagattctggcttagaggatgcctcagcctcggcgttcaccaatacggaagtggaatcgcctatgtgtgatggtgatcaaagtaagacttctctatgtaggaagaacaagacgacaacatcacattggaggaggttcattcaccctgttaggtggcgctgtaagtggctagaattgcaagtgaagaaacttaactctgtagcactgaaatatgataaagagctcgcggcatacgatcatagaaagcagcttgagttttcaaagttctcaatagatgatcttaatgtcaagtcagtacctatatatgatggcattcacacaaataaagttatgaagagaaagaaacggaaaaaagctgaagaaagtgatttatcatcatatgtgtctaattatagtatattctcttactacgagaacaaaaaccgtggcgcttgtattgaagattttcgtggtgatgccttgagaggtaatgcagagattaatattgaggagttaaagtttaatgataagctgccttctgttgatcttgaagataatgataaagccatcaaagacatcattcagaggattgaagaactacagtcacaagttgggaaattgaaaactcggattgataatgtggttagtgaaaatccaggaaagttctgttctgtaactcaattgagcatgattggatcatctgatggatttaatcattctcgccataattctgcttcttttgttggaaatgacaacacatttccggttagttttgttcatgcttcatcacagcttaaatctgagttaaacacagaagatctacttttgactgaaaatccattaccatcccaggacaggataacttcctttatcgaaacgactattaagccccagcttgagtttctccaggaaaataccaaggatgaaattcttatacaaaatcaggcagccaaggaagagttgcatgattttgagagtgttagaaatcagtttgtggagaaaaccaagaaatcagttgaagagcagaaacccatttccgctgctcaagtctcagaatctgtcatggacactgagaatgctgttcctactttgaaagccggttctacatcgaactcaaattttcgtaggataacaaataggagaaggaagaagcctggttcaaagagatggaaacgcagataatctggttaaagctgaatctggatgcaatgattgttgtttcttttgacaactgcaggagctgataatatgtcaatcgtaatgtgtaaattgtagttatgttgtgcatacttttcttacatcgagaaatgagttcaattgtatatgacgtgaataaggatagcatgctcacctctatctttagaggaagcttttgttttttgtcaaaaaaaaaaaaaaaaaaaaagcaatgctgtttcttgatttgcttggggattattgtgtcaggaattaatgagtctcttctctcgttgcctaat

SEQ ID NO: 5147 - DNA, 1395 bp, Glycine max
agtcagctacgtaggccccccccccagaaaataataaaaagtgagatttcataaggatgcttaaatagaagaaagaatttcctaaggggccgtttggtttgagatttcactttgttccctgttttctgatgtatatacaagaaaaagtaaaaatagaaaacaataaaaagtcatcttttactgtactaacttttgaaatcagtaaataaagtgaaaacagaaaatattttctcaaggcaaacatatactttttgaaactggttactaatgtaatactatgtgaattccaacatatatatttatgtagaatggtttgatataaattagttggtctgatattttcaataacattgaaatatgtacttccctacgttgctttacttcttttggaacctgttgccgatattttgggagcgcattattatgggttcttcaatgcaaaagtgaggctttgttaagcatgggcatcagatgtggcagtaaagctttatgtgattctgtagcaagaaaacttatagaggatggagaagtatttccacaaatgtttgtgcttgctcaatgtctattgagatcccaagcgaattgtttaaaagtggttggtttgtgtggtgaagctcttgttgatgcaataatttgtgggatgaaagaaactgggctgagttctaaataaattgggaacaaccatgggtctttgtcaggggaagcatgccagtcggctctaattactcgctgggcgggtgatcatcatatcaagttttggaaacaaggaattgatagaattctccttaatcttcctgattgaaaatattcaagaccaattgtctaaacctgtcttgtcattgaaaaaacaaatatccatggtaaaagagggattaaaagccaattatcatcttggtcttgggagttatctatgagacattcttgggtggcttactattcactgtggagaaaatttaaaccctcatactcatggaacttgagttttgtggatacacttgaaaaatggtgccgaatatgtcaaaaggatattgctgatccttttcaaggcgaaccagtatcaagggctgttctcgtgatgattcattctccacgtaattctatctcctcgcatgctagattcttattattagatgtactgaatgcgaaaggcttgtcatgcttgaaaagcttaatttaatacatactctggattatacagcatccctataaagctatggatcatttgataaacttccactggttattaacttaattgggttgacttgtctttcaagtttaccagagtatcaaagatgtatcatagaaagcaaagggataaaggcaattgctcttcttgtgaaacgatgcttgattcaaattcatactataaaatctggatgctattatcgctttgag

SEQ ID NO: 5148 - DNA, 631 bp, Glycine max
aataattcaaagctccttggtcatcttatcatgactagatttgaagtggttttcatcgctaccccagccctcggcaaccttgttccaattgtggaattcgcggatctcctaaccaaacacaaccctcaattatctgcaaccgttctcactgtcaccacgccgcaacgacccctcataagcacctacgtccaatcccgcgcctcctcagccactaatctcaaactcctccacctccctacagtggacccacccacacccgaccagtaccaatccttcatcgccttcgtctccctccacatccaaaatcacaaacaccaggtcaagaacgagctcctcaacctcaaaaaaaacgagtcaaactcgtttgactcggttcgactcgtcgctctcttcgtcgacatgttctccaccacgctcatcgacgtcgccgccgagctcgccgtcccgtgctacctcttcttcgcgtcaccggcgagcttcctcggcttcacgctccacctcgaccgagtcgacccggtcgagtcggaatccgagttggcggttccgagttttgaaaaccccttgccacggtccgttttgcccaacctcgtgttggacgccaacgacgcgttttcttgggtggcataccacg

SEQ ID NO: 5149 - DNA, 1741 bp, Glycine max
tcggcacgaggaaagaaagaaacacctcctctctctcccacatggcagctttttcataccaataccatccttttcttgttgaccctgcattctttcccaacaacttaaacactcctaactctcctcctcctcctcttccttctcagtttcaacaactccctcatgaaacatcatcttttaatgtcacaaaccaggagactagctgtgttgaccagagctccaagatcaccatcagtgacaatgagccttctgtcactaaaaaccttagccctcagtcctccatggtagtcgacaagcttgaaactggggagcaggtcactcagaaggtgaacattcctgtggacaagaaaaggagaactagaaatggttcttccttcaccagtaacccccaatccaaggatactgcaacagaagggaaaaacaagaaacaaaggaagaacaatggtgggttgaaagaagaggacaaggcaaaagaagagaagaaggatcagagaaagtgtcctgaagagcccccaacaggctatatccacgtcagagcaagaaggggtcaggcaacggatagccacagccttgctgaaagggtgagaagagagaagataagtgaaaggatgaaggtgttgcaacggcttgtgccaggctgtgataaggtgactggaaaggcccttatgttggatgaaataatcaattatgttcagtctttacagaatcaagttgagttcttgtcaatgaagcttgcttcggtgaatcccatgttttatgacttggcaacggatctagacaccctcttggttagaccagagaaactaaataacatggcatcaccatcaccactaccatcaatgtcacattgcaacagccccaacaaccaagccacaacttttgctgatacaaccaccatgacccccaccaacatcttccacactactagtgactatcttttggataattctgtctctttttttcttcaagggcagaggccaaatgtgttctctgaggaggataccggtagtcatttctgggacgcagaggaccagcgacaaaagtttcttcatccatatggattcagcaacaacttatgttcctttcattaatataaaattcacagagctagctgccctacaaaacttcgaacatgttgatttagcttttacactagaagaatgatccaaaaagaaattaggcattaggaggaaaaaccaaagctacgcttggtatcggtatataagtacatcatcatttcagagtaattcgtggcgtaaagagtgtctggcttggttcctagtccatcagattaaagtggcctttgaagatgaataattaaaggggcaccaaaattaatggatgaagaaccaaaaggacagaaaataccgaccaaaataagaccatatctttttcttgatccattgttctgttccagtgatttttgactctccaaggacttattgtgcacaaattccgagagactatcaatcctatatacagagcagacattgaaatttatgttccatgtaaattatatcaaagtattgattcttgtggtggcagttattctgttggtacagttaattttcaccattattgagaaatgaggggttgatgctactgatcatgttcttgacatgactggccatgcatttgtttgttggtctagttagcttttatgtatatgtatctgcagaatcttcagagttttggtatcattatgattattgttgtttttattaaaaaaaaaaaaaaaaaa

SEQ ID NO: 5150 - DNA, 1392 bp, Glycine max
ggtccggattcccgcgtcgacccccgcgtccgagcaaacatatcattgaatttatatgatgtgaaagctacaagaattgaagaccagttgaagttttgtttggatcagcttcaaaaacttgcagaggataagcttcaatctgctgcctcggccccccccccacaaagaaggctgtccaatgttagaagacaatctcagcaggttacggatatggtggtggaaatgcaatctaaaattggcagtaatcgagtgacgcgcatggagttacaagtagaacttgagaaagaaaggtttgccaagaaaagagtggaagagaatctggaggttgctaggagaaagtttacatgccttaaagaacagaatgagggctttttagtaactgaaaagcttcaacaggaacttgaagagtacagggaaattatcaagtgcagtatctgccaagacagggcaaaagaggtggtaattacaaaatgctaccacttgttctgctactcatgtatccagaaagttgctgggagtaggcatcgcaagtgtccacaatgtggtacaagctttggggctaacgatgttaagtctgtttatttgtaactagaaacttggttctctcccggatgtcgagaagaggctggtgttcttttgaaaaagatctggtgtatggatacctacataggaggttcaattgtatgcttagtgccaactgtcgagataaggaacattggcagcgatcaatgagttgcttgtctacatttggaccaaaaatgattattttttgctggtacttaatcttagtaccacctgctcgcatttttgaatctggaatgatgtttagttagcatttttaatagatagaacgaattcggagtcataggaaacgtgatatttgttctttgcagatttatcataatgcatcttccaatgcgatttggagaggggtcatgaaggttggtctttgaccctgcaattaataattcaaattcgaaagcctgaattggccatcatggcaaattttcttggaagttgactccaaaggtggcaaccacgatgcctcacatctgtatttctgtttctcctgctgaaatgacacaagtacaaattttggtttcaggggatttgtatatatgctagagtttataaggggtcgttcaattttgtttataacagcctgtaatttgtgtaatcgtagatgatatgactagatatcattgtaattgatgttgtgaaaagttaagaaagctcaagtttatcatttttttctatttaaaaaaaaaaaaaaaaaaaaaaaaaaaaaaaaaaaaaaaaaaaaaaaaaaaaaaaaaaaaaaaaaaaaaaaaaaaaaaaaaaaaaaaaaaaaaaaaaaaggggggggccttttaaaagaacccaattttactc

SEQ ID NO: 5151 - DNA, 1968 bp, Glycine max
tcgagtcagctacgtaggccccccccccatttaaatctctggtttcttcatttcctgatgaaatggggtctatgcaaatccaactaagaaaatataaagaatcggcttcagatatccattcactgcgtgcagatgtgaagtctgtttctagtattcttgacagaaaggtctgctggtcaacttgctgagataaagagactgcttggtgtggttcaagatttgagggagagtgagcgggacttgaagttgatattggtaatgtttagacgtgagtccattgattcaagggttgtcatggatgcacgggaagcagaatacagagcatgggctcgggttcaaagtttgaaatcatctcttgatgagcacaacttagaacatcgagttaagacagccaatgaagcagaggcaagatctcaacaaaagctggctactgctgaagctgagatagcagacatgcgacagaaattagaagattctaaaaggcaaatgtgtgatctgtctgatgtcttgaaatctaagaataaacaaaatgagaactacatgtctgaaatagagagtattggacaggcatatgacgacatgcaaactcaaaatcaacatctgttgcagcagattactgaaagagatgattacaatattaagcttgttttggagggtgtacgggcgagacagaagcaggactcattgctcatggagaagcgggtcattgaacatgagattcagcaagcaaacatatcattgaatgtatatgatgtgaaagctacaagaattgaagaccagttgaagttttgtttggatcagcttcaaaaacttgcagaggataagcttcaaagttccgtcactttggaaaatacacaaagaaggctgtccgatgttagaagacaatctcaacaggttagggatacagtggtggaaatgcaatctaaaattggtagtaatcgagtgacgtgcatggagttacaagtagaacttgagaaagaaaggtttgccaagaaaagagtggaagaggatctggaggtcgctaggagaaagtttacgcgccttaaagagcagaatgagggctcttcagtaactgaaaagcttcaagaggaacttgaagagtacagggacattatcaagtgcagtatctgccaagacagggcaaaagaggtggtaattacaaaatgctaccacttgttctgctactcatgtatccagaaagttgccgggagtaggcatcgcaagtgtccacaatgttctacaagctttggggctaacgatgttaagtccgtttatttataactagaaacttggttctctccgacatgtcaagaagaggccggtgttttcttgaaaatcatctggtgtatggatacctacataggggtttcaattgtatgcttagtgccaactgttgagataaggaacattggcagcaatcaatgagtgcatgtctcccatttggaccaaaaatgattattttttgctggtacttaatcttagtaccacccgttcgcatttttgaatctgggatgatgtttagcttaacattaatagatagaacaaacttggagccataggaaatgtgatatttgttctttgcagatttatcataatgcatcttccaatgcgatttggagaggtcatgaaaggttgatctttgaccctgcaattaataattcaagttttatagcctgaattggcatcatggcaaatatccttggaagttgactccaaaggtggcaaccacgatgtcttacatctgtagttctgtttctcctgccgaaatgacacaagtacaaattttggtttctggggatttgtatatatcttggagtttataaggggtcgttcaattttgtttataacagcctgtaatttgtgtaatcggtagatgatatgatatcattgtaatcgatgtgaaaagttacaaaaaaaaaaaaaaaaaattttttccatttattttcaatgttgcctgaaattttaacc

SEQ ID NO: 5152 - DNA, 1358 bp, Glycine max
  misc_feature (1136)..(1136): n is a, c, g, or t
gtcggagtccgagtcgactcgccgcgatctcatacatctcattcgttcattctctccgacccattaaattaaacctgttttttttgttttgttgtgttctcttcgaaagcggaatcaatcaatccctcatctcattgctgagatctgcaagctggctatggactacgaaccctacgacagtagcggaactgatgatgaccttccaccaacccatcaaaatagaatttccaggggaggaggaggacgtctcgctgggaatgggagatctgctgttggttcaattccttacccaaggatgtatggtgaaattgatatggagacccaaattcatcagcttgagcaagaagcatacagttcagttctaagagcctttaaagctcaagccgatgccattacttgggagaaagaaagtttgattacagagctgagaaaagaactgagattgtcaaatgaggagcacagagaacttctaggtcgagttaatgctgatgatgtgatacggaggataagggaatggagacaggcaggtggccatcagcctggtgtacttagcactggtcaaggacttcatgattcaattcccagtcccacagtctctgcttctcgcaaaaagcagaagattacaccatctgtaccaccatcacgatcttttggcggaccttctcctccatttcacccccaaacactgactgcgccccaccaaccatcttctgcagcaaaacgtggatctgctcctgggtcaaagggaaagaagcacaaacctggtcaaatattacctggtgtatcttcaatgaagcagtatccttcgtcaggaccaggtggaaggaatcaggtacctaatagagctgccatgggtgagcatgccgagggagcatcatttgattccggtggttggtaggagagtgcggacaaagtggcctgacgacaataacttctatgaagctgttatcacgaactacaatccagctgatggacgacataatctggtctatgacatggggagtgcaaatgaaacatgggaatgggttaatctatcagagatatctcctgaagatattcagtgggtaggtgaggatcctggaatcaatcatcgtggggttttgggggccctggtcatgggatgaaaggtctgttgnacgaatggtgttcaggagctggaagagtagaggagcacaaggtgcaatcagaaagatttttgcatcacagatgcataggaaaaagcgccgatgaaacaatactcaccagaccactaatagaggtgggaagtatcgtgcaatcacctgttccttgaagtgagagataaaaagttgaggattgacagctttatgtgcatgcagattagaccttgagtgaaggtg

SEQ ID NO: 5153 - DNA, 1410 bp, Glycine max
cggctcccccccaagccgccgggctactccgccggcgccgcccctcagttcgcggctcacctcccctacccccaacctccccggcaccgcgtccggcaggcgccccgaccccgggcgccccccggtgcgggggccacggccccgtagcccccccccccccattcccagtcccacagtctctgcttctcgcaaaaagcagaagattacaccatctgtaccaccatcacgatcttttggcggaccttctcctccatttcacccccaaacactgactgcgccccaccaaccatcttctgcagcaaaacgtggatctgctcctgggtcaaagggaaagaagcacaaacctggtcaaatattacctggtgtatcttcaatgaagcagtatccttcgtcaggaccaggtggaaggaatcaggtacctaatagagctgccatgggtgagcatgccgagggagcatcatttgattcgttggttggtaggagagtgcggacaaagtggcctgacgacaataacttctatgaagctgttatcacgaactacaatccagctgatggacgacataatctggtctatgacatggggagtgcaaatgaaacatgggaatgggttaatctatcagagatatctcctgaagatattcagtgggtaggtgaggatcctggaatcaatcatcgtgggggttttgggggccctggtcatgggatgaataggtctgttggacgagatggtgttccaggagctggaagaggtagaggagcagcaaaggggcaatccagaaaagattttttgtcatcacagaatggcataggaaagaaggcgcctgatgatatacaaatacttcacacagacacactaatcaaggaggtggagaaggtattcagtgcaaatcaccctgatccccttgaagttgagaaagcaaagaaagtattgaaggatcatgagcaagctcttattgatgcaattgcaagacttaatgatctttctgatggtgaaagtgatggggctggggctgcccaccatttctcacatgctcaatcaatggatcgagagtgatgagcacctgttaatttgtacaatgagcagaggaggcattaagatagcataattctggaaaagggtgtatttctattgtattatcacataaagattattaccctctaacagtttatagctgtaggcatggttcttgtggattaggcattatgtaggatggcaaatattgtagtttggtaataattatttatttcagtttgaaagttgacctaggaccagctgatgatacttgtataattctgtttcattagtgattagtgtgtggtagtgtataaattcttgtatttgatgtctcaaattggtgtccaaaaatcatggtttctcgtccttttaagtttgtttttaattgacatgtt

SEQ ID NO: 5154 - DNA, 940 bp, Glycine max
tctcgagccgattcggctcgcgacggctgcgagaagacgacagaaggggacagcaacacacattgttaaaagtttctttatttcaagtgaagttagttagttatatttatatacacaatcatgtcaatgagatcaattggtacaagccttagccttatggtatggcttgtaattgcaacatcagcattagcaaaatctgataaccccccagtcctagacacacaaggcaaccctcttgagcctggcaaagattactacatcaaacctgccataaccgacgttggaggccgcgtcactttgttaagcagaaacaatccatgccctctatatgtaggtcaagagaattctgatgcagcagagggcttaccccttttcttcaccccttttgcagaagaagatgatgttgtgaaggtgaatagggacttcaaggtgacattctcagctgcctcaatatgtgtgcagggcacaaattggaatttggctgagaaggatagtgagagtggaaggaggctcattgctgcatcaggcagggatgattactttagaattactgagacaccaatcaaaggttcatattatataggttggtgtcctacagatgtatgccccttttgtaggtttgactgtggcattgttggtggtttgcgtgagaatgggaagattttgttggccttggatggtaatgtgctcccagttgtgtttgagaaagcatactaatatgtgtagcttcaattttgtgtttgaaatttctgttcttgtaatattgtaacagttgtgaaatgattggagctacttggtaggaccaaagaaagatagcatgtctattttctttttcttaatttatagaataaagctcgaaattgttgtgtgtaatttataggataaagttatatatgttgtctttattatatagaattttatgatttcaaaactcaaaaaa

SEQ ID NO: 5155 - DNA, 852 bp, Glycine max
attatccaaaagcattatcagaagcagaaagaacaaaaggttgcagcaacaatggcagccatggctgcactccagagctcaatggccggtctctccctctcttccaaatctttcttaggccaactccttcctcccatcactctcccttctcttcttccgggtaagtcaacagagaagcaatgtcccattgtaatgaggcttaaacgatgggagcggaaggagtgtaaaccaaacagtcttcctatcttgcacaaaatgcatgttaaacttggagatacggtgcaagtcatatctggacgagaaaggggtaaagttggggagattactaaaatcttcaagcataacagcactgttatagtgaaagatttaaatttgaagacaaagcatgtgaagagtagagaagagggtgaaccggggcaaattattaagattgaaggtcctatccacagctcaaatgtgatgctctactccaaagatcagaaggtagcaagtcgtgtggggcataaagtcctagataatggtaaaaaagtccgctaccttataaaaactggagaaataattgatagttcagagaactggaagaaactgaaggaggctactaagaaatctgaagaagctgctgctgctgctgcctagttttacttatgtaattcattcattcactggtaatgtaactctagcaatactagttgtgatctctgctccattttgtgatctaatgtatatttgtggtctgtctattgatctccataaaatgaaacctggctgatcaaatttgtatattgcttgttgagcaattgagtttttttgaagaaatattgtttgtgtaattgacagagtcgttgttcaaaa

SEQ ID NO: 5156 - DNA, 1101 bp, Glycine max
  misc_feature (899)..(899): n is a, c, g, or t
  misc_feature (907)..(907): n is a, c, g, or t
  misc_feature (919)..(919): n is a, c, g, or t
  misc_feature (927)..(927): n is a, c, g, or t
  misc_feature (938)..(938): n is a, c, g, or t
  misc_feature (965)..(965): n is a, c, g, or t
  misc_feature (977)..(977): n is a, c, g, or t
  misc_feature (979)..(979): n is a, c, g, or t
  misc_feature (1001)..(1001): n is a, c, g, or t
  misc_feature (1005)..(1005): n is a, c, g, or t
  misc_feature (1011)..(1012): n is a, c, g, or t
  misc_feature (1017)..(1017): n is a, c, g, or t
  misc_feature (1022)..(1022): n is a, c, g, or t
  misc_feature (1037)..(1037): n is a, c, g, or t
  misc_feature (1042)..(1042): n is a, c, g, or t
  misc_feature (1046)..(1046): n is a, c, g, or t
  misc_feature (1055)..(1056): n is a, c, g, or t
  misc_feature (1066)..(1066): n is a, c, g, or t
  misc_feature (1076)..(1077): n is a, c, g, or t
  misc_feature (1082)..(1083): n is a, c, g, or t
  misc_feature (1094)..(1094): n is a, c, g, or t
  misc_feature (1096)..(1096): n is a, c, g, or t
gcttcctgcacgctactgaaaaagaaagaaaatccgttttatgagggcgcgaggggaagagagactctctctcctcttccttctacacgtttagagagagaaagtgtgtctcatttttcaatcttgcccgcatctttttgcgatttctcatttttctcctgttcctttcctttccgtttctctgctactacttccaactccttccattctcaactttctttcaatctctagggtttaattcgccactcatcgaatggaacctcgggttgcgaacaagttccgtcttggccgcaagattggtagcggatccttcggcgagatctatctcggtacgaatactcagacaaatgaagaggttgcagttaagctcgaaaatgtcaaaactaagcatcctcaattgttgtacgaatcaaagttgtataaaatactgcaaggaggaactgggatcccaaatgtgagatggtttggcattgaaggagattacaatgtccttgtgatggatttactgggacctagtcttgaggatttattcaatttctgtacccggaaattgtctctcaaaactgttctcatgcttgctgatcagatgataaatcgagttgagtttattcattccaaatcatttttacatagggacatcaagccagacaacttcctaatgggtttggggaggcgtgcaaatcaagtttatgccattgactttggtcttgctaagaagcacagagacacctctacccatcaacatattccttacagagagaataagaatttgactggaactgctagatatgctagtatgaatactcatcttggaattgagcaaagccgtagggacgacttagaatcacttggattagttcctatgtatttttggagaggaagtctcccatggtgggatngatagccngtctaatagcanagtatganagatctgtganagaaagttctctttattgagtctctgnccgactccctanantcctttactttcatactgcggnctgnattgtnnaccgnttctntttaaagtttcgggnctttntcgnagatcattnnttttcttatngactttgaannacatnnaatgcccccgntntttgg

SEQ ID NO: 5157 - DNA, 1503 bp, Glycine max
cccacgcgtccgcccacgcctccgattgcctttccatctccccttccgttcgcggcgccaaagttgtcaccgaccccaacaccgcccgctccaagggttacggcttcgttaagttttctgatgaaaatgaacggaaccgcgccatgactgaaatgaacggcgtttattgctccaccaggcccatgcgtattagtgctgctacgcccaagaaaaccaccggtgcttatggtgcacccgccgcgcctgtgcccaaacctgtgtatccggttccggcctatacttcgcctgttgttcaagttcaaccaccggactatgatgtcaataatactaccatttttgtcggtaatttggatcttaatgtgtcagaggaggagctgaagcaaaactctctgcaatttggggaaattgtctctgtcaaagttcagtctggcaagggatgtggttttgttcaatttgggaccagagcatctgctgaagaagccattcagaagatgcaggaaaagatgataggtcaacaagtggtccggatttcatggggtaggactctaacagctagacaggtgatatggcacccgtacatggttatagattcccccgaacaattgtgagattgtgaagatgatgtgtggtgatgtgttaatgccaaatgagggacattcagaacttttaaatcggggtactataaaataatgaaatctaaaatgatatatatttaaaaaaacgtgaatattatatattgtagttgtataaaaataaacatttactagtatcttgtaaattttagttgtataaaaataaattttaggtgcacataccaaaatactagttactaatattcaagtttatatatgaatgaatttaatatctctgattagcttaacaagtagctcgtgtaaggagtaatgtatttgcgctgacaatcttggccctaaattgttctaggacttacctggtggctggggaccacagatggatccaaatcaatggagtgcctattatgggtatggacagggttatgaagcctatgcttatggggctgcccatgatccctcattttatgcatatggtgcatatgctggctatgcacaatacccccaacaggtaagctattgatgttaaattcagttagatactgtattggtttctgtgcagagaataattttattgggctactcatgcacatggattgtttatttttaggttgaaggtgctcaagacctatcgggtatgtctgtgcctaccatggaacaaagggaggaattgtatgatcccttggcaatgcctgatgttgataagttaaatgctgcatacctctcagtacatggaagtgccattttagggcggttgccctggcaaaaaacctgttcgacatccttacagcaagcttaatatctaattgtactgcctggtcaattatgtgcattatatgacaatattctgtagccataaatttagtctgcatagatttaaattaccgtcacatacatacttgagttgttcccc

SEQ ID NO: 5158 - DNA, 2078 bp, Glycine max
tttcaagaagtggggtgcgttttaaataattaatgaatgaattagaatcaatagacaaatggaaagaaaaaaaaggccaatttagatgtgttcgtattctccactccaatagcaacatcaattccaattctgatttggttcggaaagaagtgaagtcataagtaatctctcctctcttgtaaacatggcagccgaaacggaaccaaagaagatcataattgataccgaccctggcatcgatgatgctatggcaatattccttgctctacaatcacccgaggttgaagttattggactcacaaccatctttggaaatgtgtacaccactctggcaaccagaaatgccttgcatttgttggaggttgctgggagaacggatataccggtggcagaaggatctcatgtaacttcaactaatggaacaaaactccgtgttgcagattttgtccatggtgtagatggacttggcaaccagaattttcctccaccaaaggggaagcccattgaagaatcagctgcttcttttttggttcatcaagcaaaagttaaccctggcaaagtcactgtggtcgcattgggcccgcttacaaatattgccttggctatacagctggatccggaatttgctaagaacattgggcagattctgattcttggtggtgcttttgcagtaaatggcaatgtgaatccagctgctgaagccaatatatttggtgatccagaggctgcagatgttgtatttacaagtggggcagatgtacttgcagtggggataaatgttacccaccaagttgtactgactgaatctgatcgagaaaaattggcaagctcaaatggaaaatttgtgcaatacttgaacaaaatcttggatgtatatttctcttaccatcgggaggcatacaatgtcaaaggggtttaccttcatgacccaactgtggttcttgcagctgttgatccttcacttgtaacttgcatagagggtattgtcagagtccaaacgagtggcattacaaggggaatcacaatactctacaacaaacaaaaaaggtttgctgaaatcaatgaatggtccaataagccaaccgtaaaggtagctgtgacagttgatgctcctagagttatgaaattggtaatggatcgtcttgtggactcttgaagtagctatgaagcattcaaaaaattcttgttatatttgtgttttaaattttaaagcacttgagctctactttgcatttcatttcaatttcagtgagaaaataaaaattgtgttgcttcataaaaaaaaaaaaaaaaaagcttctcgtgccggcttctcgtgccgttttttttttttttttttgaaaaagggacaatttgtgcctctatctttatttattttttaaaaatattcataaactgctgaacaatgtccaccagaaagctaaatattcataaactggaaactggcatgttatagaaggtagcatgagtaatatagagcaaattcccagttttcttcagtttaaactcaactgcaaccacagtcaaatttcttccagtcttcaccacagaggcattagctagcaattcttcatttgctggagtggcagagaggtaagaaatgctgatttcccctagaaaaagttccttgtcctcagcaactacagttctagcacaagcattagatagaatctcaaccaaggatccaacagaacctccatgcagagttccatagccattacagatgggtggtttggccacaacggtgcatgaaatccgtccacgttggatgttatcgactttgatgaagctccggtagaaggcgtcgtagaagccacgcgcgttgcagttaccgggaaggggcgtggcagctcccataacgtcaacgaagtgcaaggtctcagaagcatgtctggggtccacttccttggagattttcagcgatggcgaggcacacacgttctctgctttcacagcagccatagaacctcacttgttttttccggagacaccctctctcgtcactcgtgcctacaaacaagtgcgcgcgcaccttccttgtagggcccgacgcgtctttttaataatgtaaggaaaat

SEQ ID NO: 5159 - DNA, 770 bp, Glycine max
cttcccaactcatgagctggcattcagagcaaaacagtatagttttctggtttgtttgaattaacagtggataataatgaattaaaaataaaagattttgctttgacaaacattaatacaataataaatagaactgaagatcaacttccaccaaagatctaaacattcataaactggcaactggcatgttatagaaggtagcatgagtagtataaagtaaattcccagttttcttcagtttaaactcaagtgcaactacagtcaattttcttccacttttcaccacggaggcattaactagcacttcttcatttattagagttccagagaggtaagacatgctaatttccccgagaaaaagttccttgttctcagcagttacggttctagcacaagcagtagacaaaatcacaacaaaggacccaatagcccctccatgaagtgttccaaaaccattacagatggggcctttgacgagaagggtgcaggcgattcgaccgcgttggatgtgatcgagctttatgaaactccgaaggaagccgtcgaagaagccatgcgtgttgctattttccggtgcgataatattggtccccatcgctctgaacagatctaaggtctcagaaacacgtcgaaagtttaaatcctttgaaattttcagtgactgtgaggaggaacactctttttcagtttcagaggaagttttcgctgccattgctattttgaggtgcaacgttgtgctgtgctgtcaattagaaaaaaattcaaatttc

SEQ ID NO: 5160 - DNA, 2116 bp, Glycine max
caagagtactagaggagactgggtcgtgtttttcagaattttgaatactaattgctgcgagaagacgacagaagggggaaggcacagggtgagggagaaagagggtggtagtttcctgggagaggactttttgcttcattttctgagaactgcttctaaaacttttacattatatttggcatcaagagagactgcatgaatattttaagcgagaggcttttgagggcgttggtagtaagaatggatatccatatccacatgctcctcacgtccatttcttgcttattctttatcactctgccgcagtccctctctcaaccaccatctgtcttcaattattcggcttgtaaggaatggccatacaactgtggaacactttccggcatcttctatccattctggggagagaaccgaccccctcattgtggtggcggcgaagcattcaggctgagctgccatgatgatattactactattctaattgcctcacataatttgatggtgaagaacatccacgacaccactcgaaccatgagagtagtgccaactgaccttgaccccaacgtttgttctctgcaatctaagaacatatatgatgacattcatgcgaaggccactcacttcctgtatcccaatccttcattgtacagcaacaacatatgcgaagggtttgaggtaatttatgatgtttctgaaaattgcacaaaatgcctgggaagtgaaggagagtgctggaaggaagaaattgatgaacatgatatagtttcatgctatttctgcccagatggatctcattccctacgctgttctcctccaaaaagaaatccgcggaagttgagactcattataggtcttgcaagtgcactaatgggaggattcatgatatgcatcataatttgctgtactaaatctaagtcatccacacaagtaaaattctcgtttacgataaagaatggccaagatatagaatcattcttaaaaaaccatggagctctatcacagaagagatacaaattttcagaagttaagaaaatgaccaactccttcaaagttaaactaggtgaaggtggttttggtgcagtatacaaaggagagctactcagtggtgttcctgtggccgtaaagatattgaatgaatccaaaggaaatggtgaagacttcatcaatgaggttgctagcatcattagaacttctcatgtcaatgttgtcacacttgttggattctgtttggaaggacgcaagaaagctctcatttatgagtttatgcccaatggttcccttgacaagtttgtatacaaaaagggtctcgaaaccacttcatccttgagttgggataatttctggcaaattgccataggtatagcccgaggactagagtacttgcataggggttgcaacactcgaattttacattttgacataaagccacataacattcttttggatgagaatttctgccctaagatatcagattttgggcttgcaaagctttgtcctaggaaagagagcattatttccatgtcagaccctagaggaacaataggatatgtagctccagaagtatggaatagaaattttggcggagtttcacacaaatctgatgtttacagctacggaatgatgctactagaaatggtgggagggagaaataatattaatgcggaagcaagtcacacaagtgagatatacttcccagattggatctacaaaaggctagagcagggtggagatttgagacctaatggggtgatggcaacggaagaaaatgagatagtaaagagaatgactgtagtgggtttatggtgcgttcaaacctttccaaaggatagacctgctatgactagagtagtagatatgctagaaggcaaaatgaattccctggatatcccccaaaacctgttctttcttctcccactaggtcagtgtcagaatctcccacaagatgaactattttttttttttttgtaatttgggtagataatagatatttcaggttatatactttgtaaaatgaattgtttaacataattagactgtacttttaaaatcaagtggatttcataattctgtcaacataacatgtgactccctcgctctcctgactgaaaaaaaaaaa

SEQ ID NO: 5161 - DNA, 842 bp, Glycine max
  misc_feature (812)..(812): n is a, c, g, or t
cgtctaatagcgccgcatgtcgctgctccttctgtaatccctaacccttctctcaaccatgtttccctcttcttcttactcttgatttggtttcgatgctgctcctccgttggtgttgcttatatcatatatagttaagcttaacaacctccattcaaagttaaagatgcctcgtaccagcactctggagtgctccggttgccctccgcttcgcgctctaacctttgacgcgcttggtctcatcaaagttgtggaggcccgcgataagcaacgaggagctccccaggtcgtagagaggtggggcgaccctgaatcatccaaatgtgtgatggctgtttcaatgattgaccgagagtctcaccctttattagctgtagcgaggaaaaacaaccagattgaagttttgagccctgttaatggagatattcaggctacaatcacggatgccaatgatttagatgttcaatctgaagtgaataatattgttggattgcatttatttgcaaaacaaaattcggaattagcttccagggattgtactctacttacatgcacaaccaaaggaaatgcaagcataaggtccattgaacttgttgattcatctacagtatcctcctgtattgactctccaaaaatatggaatgtatgttctggtggtaacatcttgtgttgcaaggtggatggaaatgagaagtttgctttatttggagggaaaggtgttgaaatgaatatttgggatcttaacaacttcactaagatctggaattccaaacctccgccgaaggataacctcggtatatttacaccgactnggttcacatctgctacatttcttatgaaag

SEQ ID NO: 5162 - DNA, 922 bp, Glycine max
  misc_feature (921)..(922): n is a, c, g, or t
ccacagttggtggtggcggggggagagagagagagagagagatgtcgagattgcgaagactgatccaagcttcagttgatgctactaagaaagttatatccggtaatcttgatgatttgatgccaccaccggagagacccatcttcagcttcaattccaagcaagagttaagcaagtggcatttgtattctgattctgaatttggaggtttgtcctctgcgtctctgcagataactgagtcggaaaatggagcaacttctggaatcttctccgggaacctttctctggatgtctctgaaggctctaaatggaacatcactcggagtggcttctgtggaatgcgctcaaaaaagtttgatggctttattgatttggattcatatgatactattgctatgaaacttaaaggagatggaagatgttatatatctacgatctacacagagaattgggtcaattcacctggacagatggaagataattcatggcaagcttttgtttatgtgcctgaaggcaactggtacattaccaagattcctctagctcgatatttacctacttggagagggaatgttatagatgcacaaatcgaaatgaatccatcccgtgttttgggcatgtctctatctgtcaatgctgagggtggtgtcccaggtgctagatctggaccaggtgatttcagagttgaacttgattggatcaaagccatgagaacagaatgaagtatagattactcataaaaatcaagaatttttctcttcttttagggtgccctttttttgtaataataatgtatcattttatggttcataatggaaaatatatttggtagttattccagcagcagtactcttctggtattattgagtggtatagtaggtccaataatggaagcactttccaacaaaaaaaaaaaaaaann

SEQ ID NO: 5163 - DNA, 1576 bp, Glycine max
acagtttgtttgttggttagaaagttattcaaattattccaaaattttaagcatgggatgcttggcatatgctatagcaatcagctcctgtgccagaaaggggatattactcaaaggtgggcatgttctggatgctctagctacttgtcatactgttgcctttgacaaaacagggacattgacaactggtggactcgtattcaaggcaattgagcccatttatggtcatcatgttagaaacaataaatcaaatgttccttcctgttgcattcccacctgtgaaaaagaagctcttgctgttgctgcagctatggaaaagggtactactcaccctattggaagggctgtggttgaccatagtgaaggcaaagacctcccatctatttctgttgaaagtttcgaatactttcctggtagaggccttactgctactgttaacagcattgagtcaggaactggaggtgctaaactattgaaagcatcacttggatctatagatttcatcacctctttttgtcaatctgaagtcgagtcagaaaagatcaaggaagctgttaatacatcttcttatggaagtgaatatgttcatgctgccctttcagttaatcagaaggtaacattgattcatctagaggataggcctcgtcctggggtttctaatgttattcaagaattgcaagatgaagcaaagtttcgtgtgatgatgttaactggtgatcatgagtctagtgcaaggagagttgcaagtgctgtgggcatcaatgagtttcattgcaacctgaagcctgaagacaagctgagtcatgtaaaggatatctcaagagatatggggggaggcttaattatggttggtgaaggcatcaatgatgccccagcactagctgctgcaactgttgggatagttcttgctcaccgtgctagtgcaactgccatcgctgttgcagatgtattgttgcttagagaaagcatttctgcagtgccattttgtattgccaagtctcgccaaacaacttcactgattaaacaaaatgtggctttagcattgacgtccattgtcatggcttcccttccatcagttttgggatttctgccattgtggttaacggttcttttacatgaaggtggaaccttgcttgtctgtcttaattctgtacgtgctctgaatgaaccatcttggtcctggaagcatgatatatcacatttgattagcgagattaaatctagactcctctctctcaagacaaatatcacgggctcaaacagtatcatgacggcgaatttgtaacgtagtgttgtagtgtattgcatatttatagtgtattgagaaaaatgtcaatatcccttttcttgtatatctgtaggcttctttttcactccagagaattgaacattccattctattggaggttagtttccctttaatcctcgttttcccattcaaatggaataagaaaaatgacattaagggaagaatatgcatatgcatttcggatttggcatttacaatataatgatataatgtttatatgacttaaatttaaaattaagacacttttagtttaaaaaaaaaaaaaaa

SEQ ID NO: 5164 - DNA, 898 bp, Glycine max
cacgcgtccggttggtggctactttggagccaaggcaccccacatcgagtatccggtccgaaccaaccaaattcctcgcgaaattccccagcagaagtacccatcatggctgttagttcttggtgctggcacccttccatttggcaccttgttcattgagctcttctttatcatgtccagcatttggatgggtcgcgtttactacgtctttgggtttctcttcgttgttttgatccttcttgtggtggtttgtgccgaggtatctctagttctgacttacatgcacctgtgtgtggaggattggaaatggtggtggaaatcgttctttgcctctggttctgtcgccatatacatctttttgtactctgttaactatcttgtgtttgatctcaagagtttgagtggtcccgtgtctgcaactctttacttaggatactcactcttcatggttctagcaatcatgctttctacaggtacaattgggttcctctcttcattctggttcgtgcattacttgttctcttctgtcaagttggattgaagtctcaacgctctcacaaattaccattactgagaaaagatttcatcaagaggaccctttgaaatgttcaattttatatgttactgtatttcagttcattattttgttagggaaaatagtaaatttagtgcagctactgtattctgttttgcttaactcatcgctagatattaaaaaaattattcattgcatgatgtagttagtaattcataagttccttggcattctgaagcatgtaatcttattgttggtagttgatgtttggaactgtaattcagatctttatggccttgtctgcgaaaattccaattacaataataaaaatatgatcgcaagtaacaagttgcgcttgataaa

SEQ ID NO: 5165 - DNA, 1229 bp, Glycine max
gaagcttgttgtgggggatgttttccgtgccccatcaaatcctgccttgttgtgtataatggttggtgatggagttcaaattctggggatggctgttgtgacaattttgtttgctgcacttggattcatgtcaccggcctcacggggaacacttatcataggtatgctgtttttctacatgatacttggtgttgctgctggttatgttgcagttcggctatggaggacaatcggctgcggtgatcagaagggatggatttccgttgcatggaaggctgcttgtttcttccctggtatcgcctttttgatcctcacaaccttgaacttcctattgtggggaagtcacagcacaggagccattccattttcactctttgttatactgattttgctttggttctgcatctctgtgccccttacccttatcggtgggctctttggagcaagggcacctcacgttgagtatccagtccggacgaatcaaatccctcgagaaattccccagcagaggtacccatcatggcttttggttctcggtgctggcaccctcccattcggtaccttgttcatcgagctcttctttattatgtctagtatttggatgggccgtgtttactatgtatttggatttctcttagttgttatgattcttcttgtggtggtctgtgctgaggtatctctagttctaacctacatgcacctctgtgtggaggactggagatggtggtggaaatcattctttgcctctggttctgttgccatatacatctttttgtactccataaactatcttgtatttgatctcaagaatctgagtgggccagtttctgcaactctctacttggggtattccctcttcatggttctagcaatcatgttggctacaggcacagttgggttcctttcctcattctggttcgtgtattacttgttttcttcggtcaaattggattgaagactcttcacagtcaaaaaaaaaaaaaattagctctacagatagcagttttccacaggaggaccctcgggaagggtcaattttatgttactttttcagtccattttactagggaaagtagtaaagtttaatacaaataatcaagttttgcttttttcattgttagatataatatcattgtatgataaattcgaattctgaggtttatactgtacttggccgttgcaattcaggaatgtaattctgataatcggattttcatggccctagatgc

SEQ ID NO: 5166 - DNA, 1579 bp, Glycine max
  misc_feature (1211)..(1216): n is a, c, g, or t
  misc_feature (1384)..(1388): n is a, c, g, or t
ccacgcgtccgcacggccttcagagttgaatgttttacggttgaattaactaggagggttgatgagggtggggtgaaagatgtgttaatagatggtggtcatgtgaagggttcattgattgaaaggaaggccaaggctccagggcagttgtatggtgatcatcatgatgtgaagaagaaattagagaagccgggattgactgtcgtggatcatatcggccctggaagggttccaaaggctatagaaggagagcaagttgcggcaggatggccggcatggctttcttctgttgctggtgaagctattaagggatggataccacgtagtgcaaatacttttgagaggttacataaaattgggcaaggaacttacagtactgtatataaggcacgggatgtgattaaccaaaagtttgtagcattgaagaaagtacgctttgacaatctggatcccgagagtgtcaagtttatggcaagggaaatccatgttctgcgtaggcttgaccatccaaacataattaaattggagggcttgattacatcacgaatgtctcgcagcctgtaccttgtttttgagtatatggagcatgatcttacgggacttgcatcaaatcctgatattaagttctctgaaccacagctgaaatgctacatgcggcaacttcttagtggattggatcattgccatagtcatggtgtcctccatcgtgacataaagggctcaaatcttctcattgacaataatggagtcttaaagattgctgattttggtttggcaagttcttatgaccctcaccacaatgttccattgacaagccgagtagtaactctatggtatagaccaccagaacttttacttggagccaatcattatgggggtgcagtggatttgtggagcactggttgcatactgggggacctatatactggaaggcctattttgccaggaaaaacagaggtatgtgtttaggaatctattttccatcatttgtcactcacgataaatgctttgctgcctgactttcatttggctttgatgatatcatatgtttctattttatggaaattcaatagtttaggtcgttagaaatttcttaatacaagaaatttcaaaggattttttttaactgcagttacatgatgcaaatgatactgtttctctatattaaattactatcgcttttattgagtggattctctatatcttgtgcnnnnnncacctttaagtttatggttaaataattactgttgatctcatgtatactagtctactctagactgttgatctcaattttataaattgatactaatactagtattgtgtgtaaataaaggtatctgaaggttaactttatttccttgtaggttgagcagttgcatcggannnnnaaactttgtggctcaccatctgatgactattggcttaaattgcggttgtcacattcaacagtattcaggccgccacaccattataggaaatgtgttgcagatacatttaaggactacccatctaccgcggtaaagcttatagagaccctactttctgtagagccagcacatcgagggtctgcaggcatgca

SEQ ID NO: 5167 - DNA, 2821 bp, Glycine max
tccctttctaactcaagtataaatttttccccttacccattattttttgtcgatcaatttaatgattcattgtcttcaagtggtaggatcaccatcaccctctatttttgaatgttgacaatttattgggttagtgttagtggaggatttcttaattgcgtctttgattggaatcgctgactctgtaattgggtcagtttgaaagtttcaaaagagggcagaggaagcgtggattttcttattcttttgtttttaagggttcaaggaggagaaattcccagctttgttattggagggggatgatgcatgaatattagctggtcagttgcatgatggagttgtaggtggaggatagtgatcgtggttattgattgaaggataataatatattgcatagtagttgaatttgtataatagctttgtgctgcaacatggggtgcatagcttccaagagtgcagctgttgaagacagcagggaaggtgtggcaggggaattcacttcatccagcaaaagggcggcctcgaagatgaaggcttccgtattgaattcggagaaaaggatcgcggacgcgtgggcggacgcgtgggttttggatggtgctgatatgaaagtttcattgattgacaagggatccagtggttcgatgcggtcgagtaataataagaacgggaagaagaaaaaggagaaacctgaattggctgttcttgatcatcctggtcttggaagggttccaaagggtttagaaggagagcaagttgcggcagggtggccaacttggttttcttctgttgctggtgaagctgtccaagggtggataccgcggaaggcggatacttttgagaggtttcataaaattggccaaggaacctacagtactgtgtataaggctcgtgatttgactgaccaaaagatcgttgcgttgaagagggtacgctttgataattgtgatgctgagagtgtcaagtttatggcaagggaaatccttgttctgcgtaggcttgaccatccaaatgtaataaagttggaaggcttgataacatcgaagacctctcgcagcttgtaccttgtttttgaatacatggaacatgatcttacaggacttgcatcaagtgctagcattaagttttcctgaccacagggtaaatgctacatgcaacagcttcttagtggattggatcattgtcatagtcgtggtgtcctccaccgcgacataaagggctcaaatcttctcattgacaataatggcatcttaaagattgcagattttggtctggcaaattttattgacccccatcacgaggctccttcgtccacccccgccccaactctgtggtatagaccaccagaacttttacttggagcatctaattatggagttgctgtggatttgtggagcactggttgcatactgggggaactatattgtggcagacctatattacctggaaaaacagaggttgaacaattgcataggatatttaaactttgtggctcaccatctgaggattattggcgtaagctgcggacgccacattcaacagtattcaggcctccccaccattataggcagtgtgttgctgaaacatttaaagaatgcccatctgctgccacaaggcttattgaaaccctactttctttagatcccacacttcgaggaacagcaactacagccctgaagagtgagttcttttcatcggaaccccttccttgtgatccatcaagtttaccaaaatatcctcccagcaaagagattgacactaaattgtggaaagaagcatcaaggcacggagctgatggaggaaaggagcaaaaatttagaccaggaggtcgacaagagaaagaacctcagacatttatattatccaaagacagtgccgactcctcacatatcaatgcagcaagggcaacgccttccaaactcaaggagccggaatgagttcttcaatcctcacagagaacctgtgtctggacatttggtttttccacaaaaacagtcagaagatcataaagaaacgctaaattatttctccggccctctttatcagaggcctttgcattcaggtccattggttccaggttatggctgtgaaatggttggaagggaagccggtgaacggcggcctcatgtttcaaacaaagtcaacctaccaaaactatctgggttagtggcatctaggacttcttcattgtctggagatcaaaaagaaaatccagttccctcgaggcctcgggaaacaattgaagtacaaatatctttggagtcaactaatggatcagagtcaagaagaaggcatgataccaaacaccattctcagagaattgatcccaggaaaattgaaaatggaaaagtttcaactgaaaccttaattcaggatgggcatggatccatgggaaacaatatctaccacctctctggtccgttactggtttcttcaaacaacatagatcagatgctcaaagagcgtgatcgaaagatccaagaatattcaagacgagcaagaatgtacaagtctggtgagatagctcatgcaaagcaaaattaggatgattcatagtcaattacaattttttttccaattacgcagctagttacattttttaatgaccgtgatatttatctcaaaattatagaaagagaggtaaagggtggaaagtgtgttcatgcacgcttctcttgttaattacatatatagtgtaaattgctaataagaatttgatgttccttccattattcatgttttatccttatgtacatgcgatccaattttgaaaaattgaattactaaagctccatttgtttggtcaaaaaaaaaaaaaaaa

SEQ ID NO: 5168 - DNA, 1364 bp, Glycine max
  misc_feature (152)..(152): n is a, c, g, or t
tcgagtcagctacgtagggccccccccccctattttgccaggaaaaacagaggttgagcagttgcatcggatttttaaactttgtggctcaccatctgacgactattggcttaaatcgcggttgtcacattccacagtattcaggccaccanaccattataggcgttgtgttgcagatacattcgaggcctacccatctaccgcggtaaagcttatagagaccctactttctgtagagccagcacatcgagggactgcagcagctgctctggaaagtgagttctttatgtcggagcctctgccttgtgacccatcaagtttgccaaaatatgttcccagcaaggagattgatgctaaattacgggatgaagccgtaaggcaaggagttgttggaggtagggaacaaaaagttgcctcaggagttagacaagaaaaaggacacagggcaaatgtcacagcaaaagacaatgctgacccaggcttagcagtgcagcaagggacactgttccagctcaaggaaccaaagtgaattatcaaaccctcatagaggatcggtgtctggaattctggttttccctcacaaacagtcagaaaaccaaatgaatgataatttctctgggcatctttataagaggccttcacattcaggcccattggttcctggttctgtctgggcaaaaggcaggaaagaagttgatgatgtgcctcctgtttcaaacagagtgaacctatcaaaactatctgggctagtggcatctaggactttctctgaagatcaggaggttaaaccagttcactcgaaccacagaaaaccaattgaagtaagaaaatccgtggagtccactaatggatcagagtcgagaagaaggcacgatcaaaaacagattgttgatctcaatcaaattgaaagtagaagggtcccggctgaaaaatcaactccgggtgggcgcgagtccatgggaaacaagatatacctctcaggtccattaatggtttcgtcaagcaacatggatcagatgctcaaagagcatgacagaaagatccaagagttttcaagacgagccagaattgacaagtcaagagcaagaggtgagaaagtttttgcacagcggaagtagtcgaattaagataactatttcggattgttcagctgcttacatatttttatgacaccatttatttatctcaaacctaaggaaagaaaagagcagggagaggaagagagtgtattcaatcttacagtagcaatgtagcatatatcatgtaaattgcaggctttataagaagagtttggtctttcttcaactcttcatgtttcacccttatataaaatataagcaattcaatttattatgttctttccc

SEQ ID NO: 5169 - DNA, 923 bp, Glycine max
gtttccgacattcttttacaaatcaaaagcgtttccctagataactgtttctgtaactgtcaaccgtatgttgtatggagtaattctctgattcttcgggcggtgactccgatgaaaattcctatttaagttttttttttttaatgtgccactatattgtattgtcatggcactaacaataactcgttgctaatttatattccaaataggtggatatggcacccttgaagaactactggaaattatcacctgggctcaactaggcatccatgataaaccggtggggttgttgaacgtggatgggtactacaactcgctgctggcattcatggacaaagctgtggacgaaggtttcgtaacaccagctgcccgtcacattattgtttctgcccacactgcccaagaactcatgtgcaaacttgaggaatatgtccccgagcactgtggcgtggcccccaagctaagttgggagatggagcaacagttagttaacactgcaaagtcagatatttcccgttgactaataactaaataattaatcttctacaagctcactaatgcaccatcaaagaccctagatttagtgtataagtataaagtataatataacctcaaccccatgatgtagttgtaagctccacagaatagggcgaccacagtcgtttttagtttagctgtggatctaatcatttgtaatttctatggttcaagttcaagatattcaccatgtaatttctttaattttctttcttgattggctttcatggctgagactatgtattttaattatttcttagttaccaactaattgtgcattagaatttgacctggatgatcatcgaagatatatttatagtaatatatatactatgcattaattttcttggaacagaaaaagcgccgcattaccaccatttactttt

SEQ ID NO: 5170 - DNA, 2351 bp, Glycine max
  misc_feature (1172)..(1172): n is a, c, g, or t
  misc_feature (1202)..(1202): n is a, c, g, or t
ggctcgagtacacactgagcttacttttccccggcgtccccccgcgccccgcagcttcatgggattgaactgcaatcaccacttcaaacaccgtctcaattctgcaactttttctcatttgggttgaactctctgtctcaatgaggctcttcttccactcttcactctgctcttaaactggttaatcaaaagatggagcgcgcgaggctaaacatgagaggccattgctctggttcgactccctcagaagaatctgctctggatcttgaaagaaactgttgtagtcattctaatctgccctcacttagtccaccaacgcttcaaccctttgcttcagctggacagcattgtgagagcagtgccgcttacttctcatggccaagccgcttgaatgatgctgccgaagagagagcaaactattttttaaatctacaaaagggggtgctacctgaaacccttggtcgcctgccaaagggtcatcaggcaactacattacttgaactcatgacaatcagggcatttcacagcaagatactacgttgttacagccttggaacagctattggttttcgaatacggcgaggtgtattaacagatattcctgccattctagtgttcgtttccaggaaagttcacaagcagtggctcagtccaatccagtgtctacctactgctcttgaggggcctggtggagtatggtgtgatgtggatgtggtggaattctcgtattttggtgcaccagagccagtttcaaaagagcagctgtacacagagatcgtagatgacttgcgtgggggcgatccatgcattggttcaggatctcaggtggcaagccaagagacatatggaactttgggtgccatcgtgaaaagccaaactggcagtcggcaagttggttttctcacaaatcgtcatgttgcagtcgacctagattatccgaaccaaaagatgtttcatcgtcttccaccgactttggggcctggggtttatcttggtgcagtagaaagagcaacttcatttataacggatgagctttggtatggtatatttgctgggataaacccagagacttttgtgagagctgatggtgcattcattccttttgctgatgactttgacatgtccactgttactaccttcagtgaggggtgttggagatattggtagacgtngaaaataattgatctacaggctccaattantatgcggggaggggaaaacaagtggtgaagcctggaagaagctctggcttgaccacgggagtagttttggcttatgccctagagtacaatgatgagaaaggtatatgctttctgacggatcttcttgttgttggtgagaaccaacaaacttttgaccttgaaggagacagtggaagtctcatcatgttaaaaggtgacaatggtgagaaaccgcgaccaattgggataatatggggaggaactgctaacagaggccgccttaagttaaaagttgggcaacctcctgagaattggactagtggggtggatctagggcgtcttctcaatctacttgaacttgatctgataacgactgatgaaggacttcaagtggcagtgcaagaacaaagagctgtgtcagccacagtaattggctctacagtcggtgattcctcacctcctgatggtgtacttccaaaagataaagctgaagacaagtatgagccacttggtcttcaaattcagtccattcccttaggagttgtacctagtagccaagacatgaaaccatcaataatggagactgaatttaaattagaagatggaatcaaggttggtcccagtatcgaacaccagttcattccgagcttcattgggcggtctccattgcataaaaacagcatacaggacagaactgcaacagagaacttgtcttcattgaggaataactgtgatgaagatttgtgtgtttcactgcagctgggtgacaatgaagcaaagagaaggcgttctgaagcctcaactagtactgaggaacctcagtgaaacagattatttgcataagctggaaaaactgacttataagtctaatcacctcagaatgtgttgtttatggccactgtggtactgtgtttatgcttagcagctctgacagtgtgcaatgatgtgattggagttcacattgtcattgaagttcaagtaaatttgtgaccttggagagccatttagttcctaaaatgcttgaatttctgaactgaattatgtcacttttcaattaacatgggcatacattgccaattaactgttgctcacatcacatggccctgaccatggtttatatgctgtgataaactgatgccttgagttggatttttatcatgtcattttgct

SEQ ID NO: 5171 - DNA, 1150 bp, Glycine max
ttttttttttttttttttttttttttttaatgcttaaaaaacaattttaactttgattatgaaaaataaaaatccacatttacagaaggatggcccataatcatagaatagtatcttatcagactgcagcgcgaacttctataatacagaaccaaaaacgacataaacaagcaaatacatgtaacagtttctgaatcctttatcaaatttatccactcagctcataaatttgaatctggaatacttaagtgtcgtccaatgcttatcgtacgatcttgatagttgcagagctcagaaaacaaataaactggcaagagtgacaattaggatctgcaggacggtagagagatgcctccacaacaagcagcgattattaaataaagaacaacaacaatcaagcatgtcaataaggccaggagtttaaaatttttcatccaaagagctcttcgaaggcgctttgactgtttcctaaagtgaaatgcactgtcttgcattgttgctgttttatcaacaagaagctcaatccggtcacctctctccaatattttctcaatattgtccaccatgatagtgcgtatctcaccaacttctcccctcacacgattgagggtatcggcactcgtattactagaaaaaaattccatctgctgatgcaaaacccttgaaaattcatcattcattgcataagctggtgcataattggcaactctactgtagttcttcataaacctcatttggatatcttccaagtacgagaaaggaattctccttccgaaggtgtcgttggccatacagacgtaggtgatgccatccgatcggagtatgtggaagatgtagcgatcctgagagaagcagagcctggagtcggactccgccggaagcttctcgaggatgcggcgggagacggcgccggtgttgccggtgacggcgctgaactccgccaggacgaccgtgcctctggccaccaaagcgtagaagatcgccatcggcagaagattagggagaacgttctctgcctctagctagatcttcgacttcgcagcattggaaaaccacaacgaggttgttgttatcaaatcaaaagatggcggaattgcccagccgcacgcgtgggcgaacgcgtggacggacgcgtgggcggtagaaaggg

SEQ ID NO: 5172 - DNA, 1229 bp, Glycine max
  misc_feature (10)..(10): n is a, c, g, or t
ggtgtaacancattattatagggtaaatggggatatggcccccccttgaggttttttcttatgctaaaaacaatttaaacttagatttatcaaagataataaaaatccacatttacagaaggatgccccataatcatagaatagtatcttatcagactgcagcgtgaacttctataatacagaaccaaaaacaacataaacaagaaaatgtaacagtttctgaattctttatcaaatttatccactcagctcataaatttgaatctgaaatactaaagtttcgtccaatgtacatattgacaggaacgatcttgatagttgcagagctcagaaaataaataaactggccggagtgacaatttaggatctgcaggacggtagagagatgcctccacaacaagcagcgattattaaataaagaacaataacaatgaagcatgtcaataaggccaggagtttaaagtttttcatccaaagagctcttcgaaggcgctttgactgttttctaaagtgaaatgcactgtcttgcattgttgctgtcttatcaacaagaagctcaatccggtcacctctctccaatattttctcaatattgtccaccatgatagtgcgtatctcgccaacttctcctctcacacgattgagggtatcggcgcttgcattactagaaaaaaattccatctgctgatgcaaaacccttgaaaattcatcattcattgcatatgctggtgcataattggcaactctactgtagttcttcataaacctcatttggatatcttccaagtacgagaaagggattctccttccgaaggtgtcgttggccatacagacgtaggtgatgccatcggatcggagtatgtggaagatgtagcgatcctgagagaagcagagcctggagtcggactccgccggaagcttctcaagaatgcggcgggagacggcgccggtgttgccggtgacggcgctgaactccgccagcaccaccgtgcctctggccaccaaagcgtagaagatcgccatcggctaagaactttccagaggatcagggagaagagaacgttctctgcctctagctagatcttcgactgcgctcgcagcattggaaaaccacaacgagattgttgttatcaaaacaaaacgtggagaacttgacaatggaaattcgtcttgaaattatttgattataaattcccctacggatcccggcctgccggctcgagcggccg

SEQ ID NO: 5173 - DNA, 1678 bp, Glycine max
cgagtcagctacgtaggcccccccccccaaaacaaaaagctataataattaataaccggtcatagaatggaaccaccttgtttttcccgacctaggtagcgcttttttgaagtcggagaagaaacgttgatgctgttgcgtaaccctgcgttgacagcgtcgctgctatcagccaccacaaagaagctctacaaccaccgttattctacacctgctgcattcatggcgtcttcaggtgtcgcgtgcagtttgctggttttgtgtggcaaatcactggcagagaatgaaactgctaaagctataaagaccaataacacactgaagctccctgaggatgaaaaactctcactcgttttgcattcggagatggataaatcagttatgcaagggtttttccaagttcattcctatatggattctctttccaccaatcaatttggcaggcttctcgtttggtctccagacttaacttcaacacacgatgtcgtttcgcacaacttttgtgagctccccattggcacagtttgcattgctgatgttcagaccaagggacgaggtcggtcgaagaatgtctgggagtctccattaggttgcctcatgttttcttttactatgcaaatggaggatggacgagtcgttcctttggttcagtatgtggtttcccttgctatgacagaggcaatcaaggatatctgtgacaaaaatgggttacccagcatagatgttaaaatcaagtggccaaatgatctttacttaaatggctctaaagttggaggcattctttgtacctcaacatataaatcaaagaagttcaatgtaagtgcaggaataggcttgaatgtcaataataagaagccaacgacatccttaaatacaattctaaaagggttctattcaggagcttaccaatttcaaagagaagaagttctagcagccttttttaacaaatttgagatattttatgatttatttctgaatcaaggatttcaaaccctagaggagctatatatcaagacatggttgcacagtggacagagagttgttgtacaggaaaagaatgaggacaaagtgatcgaacatgtggtaactattcagggtttgacatcctcgggatatttgttggctgtcggtgatgaccatcaaatgtgtgagctccaccctgatggtaatagctttgactttttcaaaggactggtcaggaggaaactcgagtgaacaaagattccttgacacatttcacaagaggcaacactcttgcacactttgtatatattacgaaggttttggcttcagagctaagaattttccaataaatataaggttttggcttcagagctaagaacttaccaataaatgtcatatttgtataatatattttgtcattagaatttcagggcttttgtattccatttgtgaatttccgtcaaacttgtaatgccctttccttgtccggtcaaacaagatcttctatacatcatagcacgtaaaaaaacatcatgcagttgcaaccaaaataattacggatttttttttctcttgataggacctagttcatgattgctttagtcaatcatttgtaaggagtattgtggtccttcttagccagctatgaaatgatttgaaaagaaaaataacagaaacaacaaacgtttctatgatcaaaaaaaaaaaaaaaaaa

SEQ ID NO: 5174 - DNA, 2156 bp, Glycine max
tcagctacgtaggcccccccccccgaggaaaatactaaatcccaattcccatttcccacaacaacctctctctgtctctctctcttttcggcgcaggtccccttgttgtgtgtgacgctctcgcttgcatcagaacctactatataaacacagcgcgcgctcgaaaccttcttcaactcaaaaaaaaaaaaaaccaaaatcactcaataagaagaaggaacgaacactcgctctgcaaaagtgtgtgaacgaaccctaattaataaaaatggagaagaaggagaacggaccgagcgagaaggcttccaatggcggaatagatggacccacaaaccctatggtcacgcctctgctcaatgatctctaccaattcaccatggcttacgcttactggaaagctggcaagcagcaagaacgtgctgtgttcgatttgtattttcggaagaatccgtttggtggggaatatactgtcttcgctggcttggaagagtgcataaggttcatagctaatttcaagctcactgaggaggagatcgattttgttaggcaatgtttatcttcctcttgtgaggatggattccttgactacctaagaggactcgactgctctgatgttgaggtgtatgctattcctgagggaacagttgtttttcccaaggttcccctgatgagagttgaaggcccagttgctgttgttcaattgctggaaacaccttttgtgaatctaattaattatgcatctttagtttctactaatgctgcaaggcatcgtaatgttgctggaaaatccaaaactctacttgagtttggattacgaagggctcaggggcctgatggtggagtaggagcatccaagtactgctatattggtggatttgatgcaacaagcaatgttgcagcaggaaagttattcgggataccccttcgtggtactcattcccatgcctttgttagttcatacatgagccttgatgagattacagacaggtcacttaacagaaaagatggttcaagtacgtgtgatgattttgtcagtctcgttcaaacatggttgaacaaaattcagttatcaaatggtgtttttggtgagaccaatcaaagtgagttggctgcattcacatcatatgctttggcatttcctgatggttttcttgccctcgtagatacatatgatgttatgagaagtggaatccctaatttctgtgcagttgcattagctctcagtgatttaggatacaaagcagttggcattagattggactctggtgaccttgcatacttgtcttgtgaggtcaggaagttcttttactctattgagaatgaatttggagtgcctggatttgggaagttgcaaatcactgctagtaatgatcttaatgaggaaacattagatgctttaaacaaacagggacatgaggttgatgcctttggaattggtacatatctagttacatgttatgctcaagctgctttaggtgttgtcttcaagctggttgaaataaataatcagcctcgtatcaaactttctgaagatgtatcaaaggtctctattccatgtaaaaagtgctgctatagattgtatgggaaagaaggttatcccctggtggacataatgactggagaaaatgagccctctccaaaggtgggagaaagaatcctgtgccgtcatcccttccaagaatccaagagagcatatgtggtgccacagcgtgttgaggagcttctgaggtgttactggtctgggagtacagatattaagaaagatactttaccagctctaagagatattagagagcgatgcatcaatcaacttgagcaaatgcgacctgaccacatgaggagacttaacccaactccatataaggttagtgttagtgcaaaattatacgacttcattcatttcctgtggctcaatgaggcaccagttggggagctacagtaaggcaaatgtgctttcggagttcagaacccaatgggttgggaaaaaaaaagttcagttcagcggaaatttttccatacagtatttttttatcagcatttctccatacagtatagatgcattcaatgtgttttgattgtttttcaaaataaatgattctgtatattggtgttggtggaacctaaaaaaaaaaaaaaaaaataccctttatcacatt

SEQ ID NO: 5175 - DNA, 2110 bp, Glycine max
acgagggaaaaggatggccacggcaaaaggacactcgtgaagaaaactgcaaagcagtgaaacctgagaatcttctgaattgagaagaagccatggcagtgagaataaactgctccattcaaaacaccctctgtctccttaaccctcccttgttttctcttcgttacagagcttctcccctgaagctgaaacctcaactgcattttcgtcaaaacccctctcgaggagctttgttttgcacctgcgccaccaccgatatcactccacataataccgaaccctttgtcctcactactcctctctattacgtcaatgcccctcctcacatgggtagtgcttacaccaccatcgccgccgatgccattgctcgcttccagcggctattggggaagaaagttatatttattactggcacggatgaacacggggagaaaattgcaactgctgccatggctcagggttccacccctcctgaccattgcaatctcatatctcgatcttacatgacgctttggaaagatttagatatttcttacgacaagttcattagaacaactgatagcaagcatgaagcaattgtgaaggaattttattcaagagtgcttgccaatggtgacatctaccgagctgattatgatggactttattgtgtaaactgtgaggaatataaggatgagaaggaacttctccacgcgtccggttgtccagttcacctaaagccttgtgtttcaaggaaagaggacaattacttttttgcactgtcaaaatatcagaaggcattggaggatactctttatagaaatccgaattttgtgcagccatctttccgtttaaatgaggttcaaagttggatcaaaagtggcttgagggacttttccatttcccgagcatcagttgagtggggcattcctgttcctgatgacaagacccagactatatatgtatggtttgatgctttactaggctatatatcagcactatctgatgatcaggaacaacctgatttacttaaaactgtttcttcaggttggccagcttcactgcacttgattggtaaggatattctacgcttccatgctgtttactggccagctatgctaatgtctgctggactaagccttcctaaaatggtatttggccatggattcttgacaaaggatggaatgaagatgggcaagtcactagggaatatacttgaaccaaacgatttggttaataaatttgggacagatgcagttagatacttcttcctcagagaggtggaatttggcaatgatggagactattcagaggaacgcttcatcaatattgtgaatgcacatcttgccaatacaattggaaatcttcttaatcggacactaggacttctgaaaaagaactgccaatcaattctggtggtggattccactacagctgctgaaggaaatgaattcaaggacaatgtagagaagctggttgataaagctcacattcactatgaaaatctctctctgtcatcagcttgtgaggctgctctggagattggtaatgttgggaatttgtatatggatcaacgtgcaccatggtctctctttaagcaagggggtactgctgctgaagcagctgctaaggaccttgtaattatattagagacagtgaggattattgcaattgcactatttcctgttacaccaagcttgagttggagaatatatgcccaacttggctattccagggaccaatttgatgcagcaacctggagagacaccgagtggggtgggcttaagggtggccaagtcatggctcaacctaaaccagtctttgccaggattgaaaaccaaactgaagtggaagacaaaggagtcgcagttggaaagactaagaaaagcaaagcgaagccgaaacagcctcaagaagtcgtcggagcctagatacccatttttgacattttccccttttctgaattgttaatgttttcaccaagttcagcttcatgtaaaactaattcttttgttaatttatgtacacgaatattttgatacatacatgcgcaagaaggtatttatgagcacgaggcatatgtgtatatgaattttgcccccaaaaaattgtatttcttatttggaaataa

SEQ ID NO: 5176 - DNA, 2537 bp, Glycine max
  misc_feature (2441)..(2457): n is a, c, g, or t
  misc_feature (2460)..(2461): n is a, c, g, or t
cccacgcgtccgcggacgcccgggccagcttcgtcccttcatctcctcactttctcatttgtggaattacttttgtctcttcctctctgatcttccccaggctcctgtcatcccttttgctttctcaatccatttcgcgaaaaaaaaaaagttcacttttttcctttggctcccttttgtggttcctgaaacgcgttaaggattctgtttgtgttgggtcaatggggtcctgtttttctaaaattacggcctcaatttttgcagtctgggggtgattgatttggggtgaaggaatgtagctggaggaggtggttttgtgttcttaataagaatttcatcctcattcttcaaaaggggtgttgtaaatttcttaaatttgattccttttttgtttaccctttgtcctggatgcgccaaattggtgcttaatttgatgaattgggtgtgaattctcattggattttgaggggtgtttgaagaaagttaggatttttttgactcaggtgaatctgtgggtgtggggtgtttttttttccctctgtttgggattctgcacaatcacttcgaattgggcacaaatctgagcataaaagaagatcattgcagctggtgattgtaggttatttcattatggagcatgtgattggtggcaagtttaaattgggaaggaaaattggtagtgggtcttttggggagctctatttagctgtcaatgtacaaactggagaggaggtggctgttaagctggaacctgtgaagaccaggcatccacagcttcactatgagtcaaaactgtatatgcttcttcaaggaggaacggggattccccacctcaagtggtttggagttgagggagactacaatgtcatggttatcgaccttcttggaccaagtctggaagatttattcaattattgtaatcggaagttcacattgaagacagtgttaatgcttgcggatcaattgattaacagagttgaatatatgcattcaagaggtttccttcaccgtgacataaagccggacaattttctaatgggtctaggacgaaaggcaaatcaagtgtatgccattgactatggccttgcaaaaaaatatagggatcttcagactcataggcacataccatacagggaaaacaagaaccttacaggcacagcacgctacgcaagtgtcaacactcatcttggaattgaacaaagcagaagggatgatctggaatctcttggttatgtgctcatgtatttcttaaaaggaagtcttccctggcaaggactgaaagctggcaccaaaaaacaaaaatatgataaaatcagtgagacaaaggtgtcaactcccatagaggtgctctgcaaatcatatccgtctgagtttgtatcatacttccgctattgccgatcactgcagtttgaggacaagccagattattcgtatttaaagagacttttccgagacctatttattcgagaagggtaccagtttgattacatttttgactggactatgttaaagtatccacagatcagtggcagctccagagggaggcatggcactggcaaggcagctatgcatgcaggtccacatgtacaaaaagcagaaaagatctcagttgggaaagagattcgagagaaattctctggtgcagttgaagcgttctcccggaggaaccctgcaaatgctagtcctcgtggtgatcacaccaaacacaggagttttgaggatgtaccagtgcaaaaggatttgcactatgcgcaacacaattccactcgatatggcagcagttcaagaagagccatgatctcatcaaacaagccaatatcctcaggtgaccatactggcaggcaaaccataactgggagccgtccatctggtgctcacagaattcaacctgtgtatgacaccaaacaagcaacttatacacgcggtggctctataagaggccaccgtgatgatcctctgcggaacttcgagctcctcaatatcaggaagtaatcaagtaaagggtgtgtctttttgttgttatattctgtattatgacacacctgagatgcaagatcaccttttattcaagaatagtctcaagcattatggaaagaaacgaaagagttgaggtcataatggcatgatctcctgatatcatcagttttggaccaaggtggacttttttctgcccccagaattgtttcagaaggttcctcagtcactgtaacgtaaagacgtgccaaagagaattcaactgaaattcttttaatattttaattactgtactagatgagacctaagttgtagtaagttccatgatacacaccatgtccttgtttgttaacaatgaggtccaacgctgcctgtatgttacatattaacgctgcccttaagaatggaatttatttacaagctaaaaaaaaaaaaaaaaaaaaaaaaaaaaaaaaaaaaaaaaatannnnnnnnnnnnnnnnnaannccaattcttagctggagcgcgatgggaagattatggtacatatcagtatccagccattgcctgaagctttatatat

SEQ ID NO: 5177 - DNA, 1865 bp, Glycine max
  misc_feature (1853)..(1855): n is a, c, g, or t
  misc_feature (1857)..(1857): n is a, c, g, or t
tcagctacgtaggccccccccccccgatagcacttaccatttagaaatttagaaattttcttattttaaaataaaaaaatttgctagggtccggtctttgcgtttggcacaggctgcgcagtgtttgaacgttgaaggagagcgtagaggcagtggttttctttttttgatttctctttgtagaatcgaatcgagttaatttttgatcgtgtgagtgtccgatcttgaaatccacaacaacaatggtgagaggattgctcaacaagctcgtctctcgctccctctcggtcgccggaaaatggcagcacaatcaactccgccgcctcaacatccacgagtaccagggtgctgaattgatgagcaaacacggagtcaacgttccgagaggcgtggctgtttcctctgttgaagaggccagaaaggtcatcaaggaccttttccctaatgaaaatgagttggtggttaagagtcaaattttagccggcggacgaggtttgggaactttcaaaagcggccttaagggaggagtgcacattgttaagactgaccaggttgaagacatagctgggaagatgcttggacagatactagttaccaaacagactggtcctcagggaaaaatagttagcaaggtttacttgtgtgaaaagctgtcacttgtaaatgagatgtactttgctataacactggatcgtacgagtgctggtccaattataattgcttgtagtaagggaggaaccagcattgaagaccttgcagagaaatttccggacatgattataaaggtacctgttgatgtttttgaaggtattactgatgaaggtgctgcaaaggttgttgatggtttggctctcaaagtggctgatagaaataagtcgattgaacaagtgaagaatttgtataaactttttgttgattgtgactgcactcttttggaaatcaatcccatagcggagacagctgataaccaattggtggctgctgatgctaagttgaattttgatgataatgctgcatatcgccagaaagagatattttctctccgtgatacaacacaagaggaccctcgagaggtgactgctgcaaaggcagatttaaattatattgggttagatggagaaattggctgcatggtgaatggagcagggttagcaatggccacaatggatataattaaattgcatgggggtactcctgccaattttctggatgtaggtggcaatgcctctgaaaaccaggttgttgaggcatttaaaatattgactgctgatgacaaagtgaaggcaattttggttaacatttttggtggtataatgaagtgtgatgttatagcaagtggaatagtgaatgctgcaaaagaggttgcactgaaagtaccagttgtagttcgtctggaaggcaccaatgttgatcaaggaaaaagaatattgaaggaaagtggtatggcattaataacggctgaagatttagatgatgcagctcagaaagcagtgaaagctgcttacaaatgaaggtttacttctgctcaaatttaaaattcggtttagttacattatttttggtgttcaaacatattcacgaggaagggattgatgcgagaagaagtcttattgaagctgcagtgcgtttcaaataagtatgtgatttccaagttgtagtacatttgagttgattcacatggttgctatttggcttctctctcacaattcaatatactggtcccttcctttctgatttttcctctttaatctttttgcaaataacatggaaatacttgtttttctgttagacacggtggttcattaagtggccaaaacctgttttctaattgaggctatttcaaatttgccttnnnanaaaaaaaa

SEQ ID NO: 5178 - DNA, 1861 bp, Glycine max
tctctctctctctctctctctctctcgttttcacaattggagaattgcagtgagtgagatgagttcagcggatcatgactccgaccctcccatccgactccacttgcctcctctctcaccgagcctcttcgattccgaaccaccggagctctctcacggatcctccgcccgaccctcctccgacccctccagtcccaccagcagcggttacgccgctgaaaggggcggcagcagcaccgccacaagcgtctcccaggtcgatgccgccccccaccccccccccccccagatcaccatccacgattcccaaccttcctctcactcctcctggcttcccggaaaacgacacggcgatgaggatgatgcttccatttcatggaggaaaaggaagaagcatttttttgttctgagtcattctggcaaaccaatatattctaggtatggagacgaacacaagcttgctggtttttcagcaactttgcaagcaatcatttcctttgtggagaatgggggtgaccatgtcaaattggtgagggctggaaagcatcaggtggtttttcttgtaaaaggaccaatttacttggtctgcatcagctgcacagaagagccttatgagtcactaagggggcagttggagcttattcatggtcagatgattgttatactaacaaagtcagtaaacagatgttttgagaagaatccgaagtttgatatgacacccttgcttggtggaacagacattgtcttctcttcactaatccactcttttagttggaatccagctacatttcttcatgcctacacttgtctacctcttgcatatgcaaccaggcaagctgctggtgctatcttgcaagacgttgctgattctggtgttctgtttgctattctgatgtgcagacacaaggtaatcagtctagttggtgctcagaaagcctctcttcatccagatgatatgctgctcctggccaactttgttatgtcatcagaatcctttaggacttcagaagcattttctcccgtgtgcttgccaagatacaatggtttggcatttttgtatgcttatatccacttttttgatgatgacacatacttgatgttgctgaccactagttctgatgcattttaccatcttaaggattgcaggattcgtattgaaacggtacttttgaagtcaaatgtccttagtgaagttcagagatccttgctagatggtgggatgcatgttgaggatgtaccgcccttacctagttctggatcatctcctcatttgagccagcataggcttccatcagattctcctgaaagggaacctaattgtcacattggtggtgttgctgggttgtggcatttcatatatcgcagcatttatctggatcaatatatatcttcagagttctcatcaccgattaacactcctaagcagcagaaaagactgtatagagcttaccagaaactttttgcatccatgcatgataaaggaattgggccacacaaaacccagtttagaagggatgaaaactacgttctgctctgttgggtaacacaggattttgagctttatgctgcatttgatccccttgcagacaaggccttggcaataaagacgtgcaatcgggtgtgtcagtgggtaaaagatgtggaaaatgaaatatttttgctgggagctagccccttttcatggtgattttcaatcaattactgtaaacatgcgagagtgtttatttaataaaatttctatagaatttaaaaaaaaaaaaaaaaaaaaaaaatttcctgttttttttcctcgttatgttctattaagaaagtatctgatggaaaatctttgtattagtgtttacagcagaactgcagtttg

SEQ ID NO: 5179 - DNA, 2625 bp, Glycine max
tctcgcccccgcgcggcaggatcaataacaatattattctcctcattccttcatttttaaacctagctccatctccctccactcaccataacatggcatcagaagcaaatgctgccaacaccaacttctgtgtaaatgttagcaacaatggctacattagtgctaatgaccccttgaactggggtgcggcggcggaggctatggctgggagccacctcgacgaggtcaagcgcatgctagaggagtaccggaggcccgtcgtcaagctcggtggagagaccctgaccatctcgcaggtcgcggcgatcgcggcccacgaccagggggtgaaggtggagctggcggagtcctccagggccggtgttaaggccagcagtgactgggtgatggagagcatgaacaagggcactgacagctacggcgtcaccaccgggttcggtgctacctcccaccggagaaccaaacagggcggtgccttgcagaaggagctaattaggtttttgaatgctggaatatttggcaatggtacagagtccaattgcaccctaccccacacagcaaccagagcagctatgctagtgagaatcaacacactcctccaaggctactcaggaatcaggtttgaaattttggaggcaatcacaaagcttctgaacaacaacattaccccatgtttgccacttaggggaacaatcacagcatctggtgatcttgttcctttgtcctacattgctggtttgctaactggtagaccaaactccaaggctgttggaccctctggtgagattctgaatgccaaagaagcctttgaattggccaacatcggtgctgagttctttgagttgcaacctaaggaaggccttgcccttgtgaatggcactgctgttggttctggcttggcctcaattgttctatttgaagccaacatcattgctgtcttgtctgaagttatttcagcaatttttgctgaagttatgcaaggaaagcctgaattcactgaccatttgactcataaactaaagcaccaccctggtcagattgaagctgctgctattatggaacacattttggaaggaagctcttacgtgaaagctgctaagaagttgcatgagattgatcctttacaaaagcctaaacaggaccgttatgctcttaggacttcaccacaatggcttggtcctctaattgaagtgattagattctctaccaagtcaattgagagggagattaactcagtcaatgacaaccctttgattgatgtgtcaaggaacaaggcacttcatggtggtaacttccaaggaactcctattggagtctccatggataatacacgtttggctcttgcttcaattggtaaactcatgtttgctcaattctctgagcttgtcaatgattattacaacaatggtttgccttcaaatctcactgccagcagaaaccccagcttggattatggattcaagggagctgaaattgccatggcatcttattgttctgaacttcaatatttggcgaatccggtgacaagccacgtgcaaagcgcggagcaacacaaccaagatgtgaactctctggggctgatttcatcaaggaagactcatgaggctattgagatcctcaagctcatgtcctccactttcctggtcgccctttgccaagccattgacttgaggcatttggaggagaatttgaagaacacggtcaagaacgttgtgagtcaagttgctaagaggactctcaccacaggtgtcaatggagagcttcacccttcaaggttttgtgagaaggacttgctcaaggttgttgatagggagtacacatttgcatacattgatgacccctgcagtggaacataccctttgatgcaaaagctaaggcaagtgcttgtggactatgcattggccaatggagagaacgagaagaacacaaacacatcaatcttccaaaagattgcaacatttgaggaagagttgaagacccttttgcctaaggaagtggaaggtgcaagagttgcatatgagaatgaccaatgtgcaattccaaacaagatcaaggaatgcaggtcttaccccttgtacaagtttgtgagagaggagttggggacagcattgctaactggtgaaagggttatctcaccgggtgaagagtgtgacaaagtgttcactgctttgtgccaagggaagatcattgatccacttttggaatgccttggggagtggaatggggcacctcttccaatatgttagtttttcttattttctgttttcttgaagagtggtttcttttctgtacacgtgtttgtgttgatattaagcatttggtttgtctatataaggctgtggcaaatcaatccacatacaacaacttcccagttttccttgatgtatgccatgcaaggaacttgtaattcataatgtaatagaattccatttgtttgccgtagctttgcgtgcaaatatcaatacatggccttccatgtgaaggatgttttctcttgaataatacttatttgtttctttatgctaaaaagacccggggagtagtccggtctcgtccgcgtcgcgcaattttcctactggaaattgtcaaatacagaattagattcaaatttttgtaattcgtgac

SEQ ID NO: 5180 - DNA, 1369 bp, Glycine max
cccttctccatctcttcattccttaatttaaaacctccactcattccataaatctctgtttactctcctcgattttaccgcaacatgacacaagaaggaaatggcaacaccaacttctgtatgagtgttaacaacaacggctacattagcgctaatgacccgttgaactggggcgcggcggcggaggcgatggccgggagccacctcgacgaggtcaagcgcatggtggaggagtaccggaggccggtcgtgaagctcggcggcgagaccctgacgatctcgcaggtggcggcgatcgcggcgcacgaccagggggtgaaggtggagctggcggagtcctccagggccggggttaaggccagcagcgactgggtgatggagagcatggacaagggcactgacagctacggcgtcaccactgggttcggtgctacctcccaccggagaaccaaacaaggcggtgccttgcagaaggagctaattaggtttttgaatgctggaatatttggcaatggtacagagtccaattgcaccctaccccacacagcaaccagagcagctatgctagtgagaatcaacacactcctccaaggctactcaggaattaggtttgaaattttggaggcaatcacaaagcttctgaacaacaacattaccccatgtttgccacttaggggaacaatcacagcatctggtgaccttgttcctttgtcctacattgctggtttgctaactggtagaccaaactccaaggctgttggaccctctggtgaaattctgaatgccaaagaagcctttgaattggccaacattagtgctgagttctttgagttgcaacctaaggaaggccttgcccttgtgaatggcactgctgttggttctggcttggcttcaattgttctttttgaagccaacatcattgctgtcttgtctgaggttatttcagcaatttttgctgaagtgatgcaagggaagccagagttcactgaccatttgactcataaactaaagcaccaccctggacagattgaagctgctgctatcatggaacacattttggaaggaagctcttacatcaaagctgctaagaagttgcatgagattgatcctttgcaaaagcctaaacaagaccgctatgcacttaggacttcaccacaatggcttggtcctcaaattgaagtgattagattctctaccaagtcaattgagagggagataaactcagtcaatgacaaccctttgattgatgtctcaaggaacaaggcccttcatggtggtaacttccaaggaacacctattggagtgcccatggataacacccgtttggctcttgcatcaattggcaagctcatgtttgctcaattctctg

SEQ ID NO: 5181 - DNA, 1255 bp, Glycine max
  misc_feature (1015)..(1019): n is a, c, g, or t
  misc_feature (1047)..(1051): n is a, c, g, or t
ggctcgagagattatatgtaattaatatattaccaattatcaatatttttttatcaaaattttatttcaggttcacactactccttttgcctccacctccctttcccaggtagtaaaaaaggatataaaaagatcccagagagaaaagaagaactaaatagctcaaacctcaggaaaaagaaaaaggggttcctaattactgtgcagagcttgtagccatggcattcatagagaaagctgtgtttttcttgatgatgatgatgacagctttccaagtttcacatgcagctgtgcacaaggttggggactctgctggttggaccatcattggtaatatagattacaagaagtgggctgctactaagaacttccaagttggtgacactatcatttttgaatataatgcgaagttccacaacgtgatgcgagtgacgcatgctatgtacaagtcatgcaatgcatcatcccctttgacgaccatgagcacaggcaatgacaccataaagataaccaactatggtcaccacttcttcttgtgtggcatccctggtcactgccaagcaggacagaaggttgatattaacgtggtgaaggtatctgctgcagctgcaccgtcaccaacatcagcaatggcctctccagttccacctgccaatgtacctgcaccttctcctaacaatgcagccccattcattgttgtaaagggagctggtattgctttaatgacactgcttgcacttgctctttctagctatgcttgatagggaattttctattttgtacttgttagttcttaagagtttggcgtttatgcggccatttggatttttttttttttatggtgggacatgtcaacatatttctataaagtttcataatcaggatccttcgcctagatgataggcatccttgtaaacgtttttcaatgccaagatttttttcctttttcacaaaaaaaaaaaattggatgagtttagagactaacttgaataaaccgaaatccgaattttatagnnnnnatcgctataaatgtttggataaactttnnnnncaccatctagtctgactagctgaaacatgttcaaactttacccataattttgagttcaaatcttaaatatacaattgtattaaatatttgaacagaaaattttatcttttaatgatccttagagactagtattgattccaaaatagctaaattttacaagcagtccaaacaaatctaatattgagagaatttattgattacttt

SEQ ID NO: 5182 - DNA, 692 bp, Glycine max
tcagctacgtaggccccccacccttccaaccccacttccctttcttatcttcttatgacactttgagagttcaagttttctttttccccaaacccaaagattttaggttacagaaaatggcattggaactcatggggttcccaaaactagacgaacaaaaggccattcaagaggccgcatcagaaggcctcaaaggcatggagcacttgatccgaactctctcccaccaaccctttcacttaaacaccgaactcaccgatgttactgtttccaagtttaagaaactcatttcgctcctaaaccgaaccggccatgcccgattcagacgggccccggttcagtactcatctccacccgcacctgttcacaacgctaacacttccacctcatcaattcaactccctcctccgccgcaaaaccctaatattcccgcgccggcgcagtttccttctcctgcgccggtggccgttcaccacgcgccggtgacgctcgatttcacgaagccgcacaacgcgcttctgagctccaacgcgaaatctgttgagctcgagttctcgaaggagaccttcagcgtttcatcgaactcgtccttcatgtcctccgcgatcaccggcgatggcagcgtctccaacgggaagatcttccccgcgcccccggcccccgccgcccgtcgccccccagccccccccggg

SEQ ID NO: 5183 - DNA, 1372 bp, Glycine max
acggctgcccagttaagaagagtcttgggttgaaggaagaagggtaaactaggagtaggagggaagaagggttgaaggaagaaaaaaagaaaaacacagaaatggagggtgggaacaacagcagcagtaacaacaaccctgatgagttggcggtggggtgcttgctttcgatcaggacaacgttgggcgacgaattcgaaggccaggtcgtcaccttcgatcgcccctccaacattctcgtactccaggagccttccaaacctagccctcgtcgaaatcttaggttgctcaaagccaattacatcaaagacttcacctttctcggccatgcccaagaccctcttgatcccaacacctgcttccttgacctcaccgctctccaacaaagggaagatgttgctgttagacaagcggaggctgatgctgagaggattggggttggtgttaccagcgaggcacagagcatctttgatgctttgtccaaaacgcttccagtccgctgggacaagacagtcatagttgtgatgaatgaggtgcgtgtcagcagtccttatcactctgaatctgttgttggaggtactcctgctgcaaatgaccgggtgaagaaagtgcttgactttgagaggaagaggttgcaacttcgcagttctggtggtcagtaaagtttcgtattcacatccttttatggtcaggaaaagcacttccaaggaggaaacatgatgggtattaacaaaatcctatacaagagggttttccaaggcatattcctgacttcagatatcttttgattatctgttgtcttgagctctcaagttatgtcttgcttatggagttcatttgaggcacttcctccggattcttcaaaagagtgaatgctgaagcatgtgatttatgatgtgtttcacttggaagccgaataggtgactgggtttatataatttgttggtttgctattgggaagtttaaccaattacaatgagctagcatgaagtcaaactgacccccatttgttccttatataataaagcaaatgctttggatatgtcaagctagcattccttcctgaagctttctagttttgtttatttgttatttctaaaaatttgtggtgtaattgatttgttttattaggctgtcccctctttgataaggtttaagtattgttgttttttgaattatagtcctcttttggatagatctctggtaaaatttgattgcattttggggagaaaggggaaagcatggaagagacaagacttgaggagtactttcttggagggggagggatacaaatagtatgctcaagatagtcctgtaatagagaccaatcaaataacaatacttccgagttcttgacttcttttactgcact

SEQ ID NO: 5184 - DNA, 2851 bp, Glycine max
tcagctacgtaggccccccccccactcagtcactcttgtgttcgttcagttcagttcctgcttttctctgagtgaagaaaaaaaaaaaacgaacgttacgagagagagagccatggaagcaatactcgtagattgcgcgcagaagagtcttcgccatttcatgcactccaatgccatcttcatctcgcagcgtctctgtgctcagtttccctccgagacaaacttgcaattgttagctggctgttatttgcagagcaatcaagcttattgtgcataccatatcttaaagggaacccaaatggctcaatctcggtacttgtttgcgatatcttgctttcatatggatcttcttagcgaagctgaagctgcattacgtcctgccgatgagcctggtgcagaggttccaaacggtgcagctggtcattatctattagggctcatttacagatgcactgacagaaggaaaaatgccatacaacatttcaagcaggcactgtcaatggatcctcttatgtgggctgcatatgaggagttgtgtatattaggtgctgctgaagaagcaactgtagtttttggtgaagcagcagctttttgcttacaaaagcaatacctgaattgttcaacctctccaaactcacatatgtcacctgaacatagtaatgaagttgccgcaagaccttgtatgtctgaagaagcgagtccaaggcaactcaaacaaatgcaaagtctcaaggatattgctacatatcatcatggagcatctattttaggaggagctgctggtcaacctattaatagcagttcatctaacatgtcatattataacaccccatctccaatggttgcacagttgtcaagtgttgctccaccgccgttgtgtaggaatgtgctgccaaatggccaaaatcttactacacttagtactgacagttctcctaagtcaacagtaaactctcctattcaagcccctcgaagaaagtttgtgggtgaaggaaagttacgaaagatttcgggtagattgttttctgattctggtcctcggcgtagttcacgactttctagtgactcaagtgtaaacacaaatgctaattcaactgttgtatctggaaatggaaccaataactcttacaagggaggttcaaagctaaaccatatggcatttcgtaccatggcaattcgtaaagggcagtcatgggccaatgaaaacattgatgaaggaatttgtaatgatgttccagatgattcttctttaaatcgtacatctataaattcttgttcatctcctgtcattgaagccaaatcttatgagcaagaagcagcaacttttcacattggtgggcaagtaacaagtggttctaaggtcatcactggcacttcagaaatattaacccttctaagagttcttggtgaaggctatagacttgcctgtttatataggtgccaggatgctctggatacctatctgaaacttccacagaagcattacaacactggctgggttctttctcaggttgggaaagcatactttgagctagttgattatttagaagctgattgtgcctttagtcgtgctcgtcagattacaccttatagtttggaaggaatggatatacactcgacagtcctttatcatttaaaggaagatatgaagctaagttacctggcacaggaactgatttcaactgatcgcttagctcctcaatcttggtgtgccatgggtaattgctacagtctacagaaagatcatgaaactgcactgaagaattttcaacgagctgttcaactgaatcccagatttgcatatgcacacaccctttgtggacatgagtatgttgcactagaagattttgaaaatgggattaagtgctaccatagtgcactcagggttgattcaaggcactacaacgcatggtatggacttggaatgctatatcttcgccaagagaagtatgagttctctgaacatcatttccatatggcctaccaaatcaacccacgatcttctgttatattgtcataccttggaactgctttgcatgctttaaagagaagcggggaagcattggccataatggagaaggctatattggaagataagaaaaatccacttcccatgtatcaaaaagccagcatactcgtaagcttagaaagaattgacgaggctttggatgtccttgaggagctgaaagaggcgcaacctcgtgaaagtagtgtctatgctttgatgggcaatatctatagaaggcgtcacatgcatgagagagcaatgtttcattatggtgttgctttggatttgaaaccatctataacagatgctgctatgattaaggctgctgttgagaaattgattatacctgatgagttccaagacgaagatgactcttagctctacctttgaagtgcaagatttgaattataaggatttgatttccggctagttgtgtatacaagcagcacaaatgctcgagtgagtattcattcaatgttcaaacaatcatcagtccatctaattttcgaaactttagaactgcacacagttttgtaggaaagtcgaatagggttagagatgatgtaacagaggtaccgagaagctcctatacttgtacaaatagttgcattagggataaataggtgtaccataagtttatctattcatttgtctataaatcaatgctttagtctatcaaaaaaaaaaaaaaaaaatggtagcgtcaaatgtttcatctcaaattcattttataacgtggagtattagcaacacttatatgtaagttaaaagttattgaaaactacaaaattgttggaaggttttttaaatgagtataacctacacaatttttttatattcaat

SEQ ID NO: 5185 - DNA, 875 bp, Glycine max
  misc_feature (11)..(11): n is a, c, g, or t
tcgagtcagcnacgtaggtcccccccccaaagcttagtactaccgccctcaatagtttgtgttctcattctcgttgcctttgcctccatggaattggacattggagtcactcactcagatctgactcttgcagagtcttggtttgcatctgacacatctactgggtaccttgaagatgctattgcaggttggggtatttggtgcaagcaacacaacataccatcctattctcaagatcaaaagaaaagccaatatttggttgatcaggaggacttattgccaacattttcttcaacttcccaaatccttcatgaccataaaaacttcagcactgccactagggacctatcatcatcacaaaatgatacacatgcagctgcaatcaagcatgattcttctcagaggagctatgcatctacagagtccgatgaaaggggtcattggaagagaatagcttatccatttgagttggtgaagcctggaggagttgaaggggaaacaaccctcaaagatataaatcaccagatgctgatgagtccatcaaagccaattccacaccctgtgggagattctctcactcattcatgcatttcaaatcgtgcttttggaatttcaggtaaagcagtggcagctcttactaggattcacactcagggtagaggctccatcaccattataaggaccaagggttgaagtgaagtgaagtgaaagctcactattgtataatagtatctctctttggattttgtgttatactcctcctagtgatggcttgatatagtttataccatagtatgaaaaaaaaaatgtactcaaaaacaaaaaaaaagggtgtttaccgaggcatgatgctaatttgaaattttgaaggaaaa

SEQ ID NO: 5186 - DNA, 1924 bp, Glycine max
ccactcatcacaaccactcttaatttctctctgtctcgtttacacatctctccaacctttcactttcgtttctcagttttattcgaatccctctctcaatctcctttccaaatggccagcgttgaggttgcacagcaaacaccaacaacagttccagaaaatgaaacaaccgaggtaagcaagacccaggaaacaaccccagtcactgaggctcctgcaacagaacaaccagcagctgaggttcctgcaacagaacaaccagccgctgaggctcctgccccagaatcaaccaccgaagcaccaaaggaagaaaccaccgaggcaccaacagaaacagtagaaaaaacaactacagaagtagccccagaggagcctaaagaagttccagttgagaccgaggaggtggtggcaaaggagacagaggaagagaagccagcagaagagaaatcagaggagaaaactgaagaagtgaaagaagaagcagaggagcctaaagaaactactgaaacagaatcagcagcagcagcaccaccagcaaccacagaggaagagaacaaaccagctgagtcagttgaaaccccagtagaggttcctgttgagaagactgaagcttagacctatggacagtgtgagtgagaaaaacaagtttaaaaatggtcctagttgtggggatcaggtctaccattttgcatgccatgttgaaaagcctcttttttttttttctttttatttctttagtttactttattaatattattatatgatgcttaagtctttggttgtattatggagggtacacctacgtgtaagcacaacacttggctccacatcagcgtgcttgccacgtggtgacatgagaaattctgggagttgtgtattgaagtgagcaagctgctggtgctggagtttaggggtgatggtttattggcagggttacatgagtttgtgatggtgtgttactgtgtttctttaggtttgaataaatgatatttactttataatttatattgttgtttgtgcaaaagaataattcgtttttaaaaaaaaaatcttccatcgagactagttctctcgttaatgccatgggaagcactgctattaacgacggtgatatcctcgctgttccaatacccgcttgtgcttcgaattttccgaaatccgcctctgattttggcatgcttgtccctaatggaagctacgccattaccgcagggcactgtgtgcagtgtagctgtggacccaaaaaccttgatttgtactgtatgccggcttctttggctgtttcttgctccagcatgcaatgtagaggcagcaaccttatgcttgggaatgttaccgttcagcagactagtggtggttgcaatgttactgcttgcaattatgatggcattgttaatggcagcattgtaacaacgttgtccccttctcttcagcctcaatgtccagggctgcaggaattccctcctcttgttgccccacctacaaccgttgcaagggacacggtgtttgcaccagcaccagcaccactgttcgatggagatggtccagcatcacccaaatcatcgctggtgccttcaacggggcttccaggaggattctctcctgcaaatggccctattagcggcatatcttctggtgcttcggctgcatgctccttggtgaaaccatttcccgctttgacgtatgcactagtgttattgcttgtcaagttgatgatacccgtggcattgtaatcttctcaattttgtggtgggtttagttggcctgctacttgtgtttgtgacaggtgctctgtctattgtagctgctaacattcattttgtacccttgaactgatttgtgaatctggaaaactatgggatttcaggtttcctctcacgcttagccatttattttttggtgctttgctgaattatcgtgtttt

SEQ ID NO: 5187 - DNA, 1185 bp, Glycine max
acaaactatttctctctttggaattgcttctactattcatgactctgcacctctatatataccgctccctcacccggcatcagaccacccccagcacaaccactcttaatttctctctgccttgctcatttacacacctctccaacctttcactttcagctttatttgaatccctctctctcctttccaaatggccagcgttgaggttgcacatcaaacaccaacaacagttccagaaaatgaaacaaccgaggtaatcaagacccaggaaacaaccccggaaccagtaccagccactgaggctcctgcaacagaacaagcagcagctgaggttcctgctcaagaagaacaacaagcaactgaggttcctgccccagaatcaaccaccgaagcaccaaaggaagaaaccaccgaagcaccaacaacagaaacagtagaaacaacaactacagaagaagccaagccagaggagcctaaagaagttgcagttgagaccgaggaggtggtgacaaaggagacagaggaagagaagccagcagcagaagagaaatcagaggagaaaactgaagaagtgaaagaagaagcagaagagcctaaagaaactactgaaacagaaacagaatcagcaccagcagcaaccacagaggaagagaacaaaccagctgagacagtggaagccccagtagaggttcctgttgagaaaactgaagcttagacttatggacagtgtgagtgagaaaaacaagtttaaaaatggtcctagttgtggggatcattaggtctaccattttgcatgtcatgttgaaaagcttttttttttatttatttctttagtttactttattattaatatattattattatatgatggttaagtctttggttgtattatggagggtatacctacgtgtgagcacaacacttggctccacatcagcgtgcttaccacgtggtgacatgagaaattctaggagttgtgtattgaagtgagcaagctgctgctggtgctggagtttagggatgagggtttattttattggcagggttacatgagtttgtgatgatgtgttattgtgtttctttaggtttgaataaatgatatttactttataacttgcttaaaaaaaaaaaaaaaaagtactcactctctctctctcaattatcaacttgttgagagttgctgct

SEQ ID NO: 5188 - DNA, 1443 bp, Glycine max
ggtaccggctacgaattcccggctcgacccacgcgtcagtgaagacgacagaaggggacttcatggtataaaaataaatgtagacagattctgcctggctgtgatgcacttaacactaagaaaaagatggcactcagaagggcaacccctaacaccgttcatatgtataggaatttttcttaccaccacctaaagtagtagaagcctttgaaaatttgacacagtgcaacaaaatcccttcaccttatctctttttcttcatgcacagtcatcacctttgtcttttccatggctaaaatctggattgaggtgtgcttgatatctgctcgtggtgtgaggggttctccctcactttggaagcgtcaatggtatgctgtagggtgggttgatcctaagagcaagtactgcaccaaagttgacgcttctgggaacgccaaccctgtctggaggaccaagtttgcccttcaggttgataactctgagccagatcttgcactccacgtggaggtttacagcagagatcctgtgttcttaactgagaagcttcatggctcagctaccgttgttctcagagagtttctgactaaggaggtccacaacaactctgaggaagtggggagctaccagttgagaaagaacaagtctaataaaccaagtggcttcgttgatgtttcaatccgtgtttctgaggacaaggaggagcttaatttccacccacaaggtgatgggggaggaataatactagattatggcaatagtactactcacttgaccacaggggctggatttgggcaaccctatccacagaaaagggctcatggttcattccatgggcctcaaaagcaggcccaaacaaatttcccctactcacacccagtgccatttcctgcagactatgctactgacccttatatgggtggaccaagctatgcacctgctggaccaagttatcaaccacccagaacaataacacctccaccaccaccaccaccaccaccctcaaatgttaattacgctcccaattttttcccaagtagtggtggaatggcacctagttatttcaacatgccatcatcatcatcatcatcatctggggcaggtcctaggccaaggggtcctccaggatttgcaattggggcaggtgctggagcattggctgctggggctgttatgtttggtgataacttcatgtcaggatttgatgttccttctggttttggaggtgatccaactcttaccattgcaactgatcctcttttctgaactagaattaagcacttttgtaattattattatgttgggctgcacatatatatggtcattgtgccatataaaagagttctagctacatgctttgggattaacactaacctgttagagaaaatgcatgaagagttttctttttctgcctgaaaaaaaaaaaaaaaaaaaaaaaaaacaaag

SEQ ID NO: 5189 - DNA, 2512 bp, Glycine max
  misc_feature (2506)..(2512): n is a, c, g, or t
gataatttacttgtagaataatagtaatagaaataataaatgtcagctgcgtgggccccccccccccggcgtaagcagaggaagcggttgaagaaagaaatggtctgagatggagatttgacttctcctcctggttgttgatttccattgcgcactctaatcgcaattgatttgattttacaaagagagagaagaaacaattggaatttgcaaggatgaagagctctctgaaaaaattgcgaggtctggcacttcacaatcacaagcatgtctcctccaagtccattcggcctctgggccagcttgacgagctcgcccgggcaacccaggatatgcaagacatgagggactgctatgacaccttgctttccgccgccgcagcaaccgccagcagtgcttatgaattctccgagtccttgcgggacatgggctcttgtcttcttcagaagactgctttaaatgatcacggagatgaaactggaaaacttctcctcatgcttggcaaaatccagttcaaactccacaaactcattgatcattatcgttctcatatattccagacaattaccattccctcagagtctctcttgaatgaacttcgaattgtcgaggagatgaagcggcaatgtgacgagaaaagagacttgtatgactatatggtaacaagatatagagagggaggcaggtctaaaggtggcaaaggggagactttttcattgcagcagttgcaaactgctcatgatgaatatgacgaagaggctacattgtttgttttccgattgaaatctctgaagcaaggacaatcgcgtagtcttctaacacaggcagcacgccaccatgctgctcagttatgtttcttcaagaaagcagtcaagtcccttgagacagtagaaccacatgttaaatcagtaactgaacagcaacacattgattaccacttcagtggtcttgaagaggaggatggggatgaaggtgattatggagatgatgttggtggtggttatgatgagaatgatgatggggagctgagttttgactatggacaaatcgaacaagaccaagatgtttctacatcacgaaactcaatggagttggatcaggtggaacttacacttcctagagattctacagctgaagctgctaaggaaaacttagacaaccttgtaaggaatttgttttccttcaaggttagggcagggagccaatctgccccactttttgctgataataaaccagatgcaagtgaaatcagctacctaggccccccccctttatcacggaagttcagttcatatgtgctacccacaccagttgatgctaagagttcaacctcttcagggtcaaataatccaaagccttccaaaatgcaggcaaatttaaatgaacctacaaagaacttgtggcattcatccccattggaacaaaagaaacaagaaaaagatataggagatgagttttctggttcaattgtcagaagtgcacagtcagtactcaaggaaagtaatagcaatactgcctccatgagattgccgcctcctttaatagatagtcttttatcctcaaaccgtgattacatttctgcttactctaaaaagattaaaagacatgccttttctggcccattgacaagtaatcctgggcctaccaagcctgtctccgtagaaagtgttcaactgttctctggacctcttttgccggctccaatccctcagcctccgtcatcatctccaaaagcatctcctagtgcttctcctactcttatgacttcacccaaaataagtgagcttcatgaacttcctaggcctccaaccagtttcccctccaattcaaggcttttaggtttagtgggtcattctggtccattggtgtctagaggtcaaaaggtgactgcaaataatttggttgcatcaagtgcagcatctccactgccaatgccacctcaggccatggctcgtagtttctccataccttctagtggcgcaagagtggcagcattacatatgccaagaacactagaatcctctcatagatcatctatatctgagaatattgcttctcctcctctgatgccaatatcattatctagtagtcggccatcattagatggctgatgctgttttcttggatgtttagaccagaggtatggtcaatggatacttgtgcagactaattctactgacgtctgaaggtgccctgtttacggcctggcagattaagcttagggccaagaaagcttaggtcaagttttgcttacttgcaaatatgtaaatattcggtatacctagttttcttttatctgtcgccatcattgttgattcaaccttatgggcttttgtcttatttggaaaataaatgcccatcggctttattgttgagatatgtatgcatttaagcaattgacagtaaacaatcgatcgtgcctccgctttccgagcgatccaattatctgattaagttgtgtacttttcagtaaaaaaaaaaaaaaaaaaaaaaaaaaaaaaagagnnnnnnn

SEQ ID NO: 5190 - DNA, 1312 bp, Glycine max
tccggaattcccgcgtcgacccacgcgtccgcaaggacgcgtgggcttttatgtgcagaagccagtttctttgctggaagacaacatcttgcagctttctaatgacatttttgaagagataggggttccctctaccaaagtggtcatcttgtccctagatcccttaccacggtcaaacacgacaaaagtggtgtttgcagttgatcctgatggtaaatattcagaaatgtctgcagctgccattagtttgataagagcatcatttaaatacctggttatacgccaatcatatctccagctcactacatccttgtttggtgttccctctgtttttgaggtgctgaaatttaaaggagggatcactatcattccacaacagagtgtgttccctctgcaaacggtgcaaacattattcaactttactttgaatttctccatttatgaaatacaatcaaattttgatgagctgacaagtcagctaaagtctggactacatttggcaccttatgagaacttgtatgtcatcttatcaaattctgaaggttctacagttgctgctcctactgttgttcaatcatctgtcctacttgcagttgggattccaccatcaaaggagaggctaaagcaactggcacaaaccataatgggacatcattcatggaaccttgggttgaataacactcaatttggtaggggtaagcaggttcgactttcatctatctggcaacactcccttcatggcaatggtggtaatggctcaccttcccctgcttctcagcctcatccccatcctcaccaccatcaccaccaccatcaccaccaccaccatcatcatcaccaccatagtcaccaccaccatgcccacgtatttcctgaaacttcacctgcacctgcacctacacctacaactggggaaggttctacttcacacaattttggtgcccctgctgcccctgcaagaagtttgcctgctccatggagaagttcttatgctcaacctcctaattgtcgatttgagcatagaaagagatctccccggaatagtcaaaaacatgctcatctaacacctgcagtttcccctactaatgctccacactatcctgttgcctcaccatgggttggacctccagcacatggctttcattcttcggttcctgctttgagtcctttaccaaatgtagcatttgcacatgctgagccccctcctaagaatgagccatctgctgaacgtcctaactcacattttcaagggccatcaccatcttcatgtgagtatttttaatgataattatttggatgagctaacacatta

SEQ ID NO: 5191 - DNA, 1861 bp, Glycine max
caggggtccccccatagcaggctttctttctacttattattagcagaaagatggctcctactcttgcccttcagtttctttctcttttccttttgttcattatgaatggctatgtcattggagctagagatatgaaggtagaactgcgagatcagaagcaagtggaatggtacaaagccacatcagtgtccaatgacgagtctaatggcaaagggtacataaccacttcagaatccgctgaacctaattacatagcttcatatactgctgctaaacacaaccaaaaccatgaaaaactccatcaaccttacatagctgggtacacaagtgatgctgccaacaaagccaatcaatacatagcagggtataggaccaaaactcatgattccaatacaccttacatagctgggtacacaacaaccagtgcttcccacaaagccaatcaacctaattaccttgcagggtataggaccaaaaccgatgattccaatacaccctacatagctgggtatacaacaactaatgcccatgtggcaaataatcaacctaattacattgcagggtataggactagcaccacccaagaatccaatacaccttcttacattgcagggtataggactagcaccacccaggaatccaatacaccttcttacattgcagggtataggactagcaccacccaagaatccaatacaccttacattgcagggtataggactagcaccacccaagaatccaatacaccttacattgcagggtataggactagcaccacccaagaatccaatacaccttacattgcagggtatgggcctcacaattcccatgatcctaatgcaccttacatagcttgggtacacaacaactagtgccaagaaagctccaaaagggtcatctcatgatgataccactggaccttacataacccaatatggtggacccggtcccaaaaatgacccaaaagaatcttccaacttggaccatacagaggctttcaagacaggatttttcgccttggatgatctatatgttgggaatgtgatgaccctccaatttccaattcaagatgtttctcaattcttaccaagaaaagaggctgagtccattcctttctcaatctcacaactccccagtgttcttcaactcttctcaatctctgaagattctcctgaggccaatgccatgagagacacacttgaacaatgtgaagcagaacccatcacaggggagaccaagatttgtgccacctctttagagtccatgcttgaattcattggcacaatcattggttcagagaccaagcataatattctcacaaccacacttcccacagcctcaggtgtccctctacaaaagttcaccattttggaagtgtctgaagatatcaacgctgctaaatgggtagcttgtcatcccctaccatatccctatgccatttactattgccacttcatagcaacagggagcaaggtgttcaaggtctcactaggtagcgagaatggagatgacaaaattgaagctcttggcatttgccatttggacacatctgattggagcccaaatcatattatatttaggcagcttggaatcaagcctgggaaggatgcagtgtgccacttcttccctataaaacatcttatgtgggttcccaagcctttacaagccaccatgtgaatggaatgagttccctgggtttctgtaataaaggtcaatctcaacaatgatgaccatgtaccctttgtggacttcctctttgtttgtatgtcttgtgccttgttttatgttaaaaaatgtgtttggcagaaaagacttcatgtatgcttgattttcaggtaagaaaatatttctattggcagat

SEQ ID NO: 5192 - DNA, 2943 bp, Glycine max
gtctcaatgcaattattttttagaagcagacaaccacccaccgcttcgttactctatttcacaccctttttctgctgcgagaagacgacagaagggggttaaagccagcatcatataatttcatttcccattctactcactcacacacacacacactctctttccatgggtccgtttcgtaaacccttccttgcatttctctcggttgttctatttctgggtctctatgaggcagcagcagaacagactcagactcacaagagtacttacattgtacacgtggcgaaatcggagatgcccgagagcttcgagcaccacgctgtgtggtatgagtcgtcactgaagaccgtgtctgactcggcggagatgatttacacctacgacaacgccatccacggctacgcgacgagattaaccgctgaggaagcgcgtttgctccagcgccaaacggggattctggctgttttgccggagacgaggtacgagcttttcacgacgcgaacgcctttgtttctcggacttgacaagagcgccgacttgttccccgagtcgagttcgggaagtgacgtcatcgtcggagtcctcgacaccggcgtctggccggagagcaagagcttcgacgacaccggactcggacccgttccgagcacgtggaaaggcgcgtgcgagacgggaacgaatttcaccgcgtcgaactgcaacagaaagttgatcggagcaagattctttgctaaaggtgtagaagccatgcttggtccaattaacgaaaccgaggagtccagatccgcgcgcgacgacgacggccacggcacccacacgtccagcaccgccgctggatcagttgtttccggcgcgagcctcctcggttacgcctccggaacagcgcgtgggatggccacgcgcgctagagttgctgcatacaaggtatgctggaaaggagggtgtttcagctctgacattcttgccgcaattgaaagggcaatattggacaacgtgaatgttctttctttatctctcggtggtggcatttctgattattacagagacagtgtcgctattggagctttttcagcgatggagaaagggattttggtttcatgctccgctgggaactcgggtccgggtccctacagtctctccaatgtggctccatggatcactaccgtaggcgctggtacactggatcgtgacttccccgcatacgtggcgctcggaaatggactcaacttctccggcgtttcgctttaccgcggtaacgctttgccggattcttctttgcctttggtttatgcagggaatgtgagtaatggtgctatgaatgggaacttgtgtatcacgggaacgttgtctcctgagaaagttgctgggaagatcgtgttgtgtgaccgtgggttgaccgctagggttcagaaaggctcggtggtgaaatccgccggagcgttggggatggtgctgtccaacaccgccgctaacggcgaggagctagtggcggatgctcatttattaccggccaccgcagttgggcagaaagccggtgacgctattaagaagtatttggtttccgatgcgaaaccgacggtgaagattttttttgagggaaccaaggtggggattcagccatcgccggtggttgctgcgtttagctcaagaggtcccaactcgatcacgccacagatcctgaagccagatctcatcgcgccaggtgtcaacatcctagcggggtggtctaaagccgtggggcccaccgggttgcccgttgataacaggcgcgtggatttcaacatcatctctggcacctccatgtcgtgccctcacgtgagcggcttagccgcgctgatcaaatcggctcaccctgattggagcccagccgcggtgagatcggctctgatgacaacggcttacacagtttacaaaactggtgagaagttgcaagacagcgcaacgggaaaaccatccacgccgttcgatcacggttcgggacacgtggacccagtcgctgccctcaatccaggactggtctacgatctaacggtggatgattacttaggttttctctgcgcgttaaactactcagctgcggaaatcagcactttagccaagagaaaattccagtgcgacgcgggcaagcagtacagtgtgaccgacctcaactacccttcgtttgcggtgttgtttgaatcatcagggagcgtggttaagcacacgaggactctcactaacgtggggcccgcgggaacttacaaagcttccgtgacgtcagacactgcgtccgttaaaatctcggtagaaccgcaagtgttgagtttcaaggagaacgagaagaaaacgttcaccgtcacgttttcgtcatcgggttcgccacagcatacagaaaacgcttttggaagggtagaatggtccgatgggaagcacctggttggatccccaatttcggttaattggggttgaaacttgaaaaaggttgatgcaaattgcaaggttcatcactcactcgaagaggggtgtgtcttgattggctagtgattatagtatttaatatgttactattattactactattaataaatttaacttttgttgcaaacaaaaatgttgggtttatttatttatccagctggaaattgatgatagctggggccttatgcttggttggtgttggtctgtttgttccctgggagaaatgttgcaaaggggaaagaaattttaaatggttgggctcatgtgtttcttcttcccagtgtacagcgttctaatcattgatgaatattatttttcttagaccgaccatcttgacattaaagttctgttcaactattttgattggattacctactttaaagtgaattcaaactttccattttaatttaatgtttgcttgcttcgcagctagtagttgtaaccgttcttgtacgcaatagatctatatacattaatagtattttc

SEQ ID NO: 5193 - DNA, 755 bp, Glycine max
tcccggacaattgtacaaacgctcaccattgtggcttgtctaggtcttcaatcgaactcgccaggaacggaactttctcagattgacacacaccatgaaggaaagtggtttcgagaataatgatacaaagcaagctgctgctgatgtgttgtttctatattcaaaatttgcaatggcatgcattggatgtaaggctcgtccatgtgatttgaggtttcatttgatgaaggagatttcaggtatgccctcttctctaaatagggagtcaccacagaatgcagcatctcctgatgcaatgggtgagtcatccagcacaggaacagcaagacttgatagaacagacagttttcgtgcactctagttgagagtggactgtgaccatgtttttggttggggctgtggcatagtaggtgtttgtgtcttggtaaaagcacttttttcctgcatattatcatattatgatgctatgcaggcagaattatgtttccaattaccatctatgcaatggctcacagattggtatttgttataccagtcagtcagtcatttcattttaaatttgttgtagtgtggttcaaatttggttcgtttcagtaagtaaatgttgctcttaatccttctacctggctcgagtataattacctctcataaaggatgtatgtagtattgtagtcttgtaccaaaaaaaaatcagtaaataaatgcatgtgttcaatgtttttttttttgctcaaaaaaaaaaaaaaaaaaaaaaa

SEQ ID NO: 5194 - DNA, 852 bp, Glycine max
cggctcgagcggctcgagcggctcgagctcgagccgtggtagttctggattattacggttttctgaagtggtcagtcttttccatgagtttggccacgtggttcaacaaatttgcaaccgtgcatcatttaccagaatttctggattatgtgttgatcctgactttgtggagatacctgctcaactgttagaaaactggtgttatgaaagctattctctcaagttgatttcaggattttatcaggatattacaaacccgttaaaggatgacatatgcaaatcaattaaaagatggaggacttctttttctgcacttaaattgaagcaagatattctctgctgtctttttgaccaaatcatacattctgcggataacatagacattcaggaattattcaagcatcttcatcccatggagatgttaggcttgccaatattagaaggaaccaatccagcgtcatattttccttccactgtcattggttatgaggcagcttgctacagtcgtatatggagtgaggtttttgctgctgatatattcacctcaaagttctgcaacgatgtttcaaaccagcaagcgggcatgcaattcaggaacaaggtattggcctcggcaggagtgaaagaccccattgatgtgttatcagactttctaggaagagaaccatcaatccaagcttacattgagaacaaagtcaagtatgttttgtaaggctttttggccggacgtgtacattgacaaatttttatttggccagaatcagtctattggcactttattgctttttttggagcattaaatgaaaattaatgggtcagtgtaaaaaaaaaaaaaaattatttttattatgc

SEQ ID NO: 5195 - DNA, 1044 bp, Glycine max
  misc_feature (1036)..(1036): n is a, c, g, or t
gaaaatcaggaaatactttcccattcatgctagatattctgagctaatattctaatgttggtatcaggactctggattcccctgcttcaaaggtggtccacggacaatacagaaccttagaaagcgcttccatctcaatttaacagaagaggtttcaatactaatattagttactctcttaactgtaattttttttgcctgtttgctacatttttttctttcttggcagcaatgtgtatctttggtgctttccctcattagcagtagcctggatgcatggcggacacggcagtatgattattaccagagggttttgaacgggatattgtgaaatagtttgtcgatggtgatcgtttgcttgttcccttttgactaagcttgcacggtgattgttcatcaattagtatttgcattttcaagtcattggaggatggttggttcactgtgttatggctttggagtactttgtgagacgtaagaattaaaaggtggcagtgtgcagcgtctattctcctgtagtagtgagagattctgactcgcaaaagtacttcaacagtctgaggctaaattttgagccgagtccttttgattttcccatccctgtttcttgtgaatgaagctctgctacctggagaaattgcatcagcctcctaaatgctgagtttgtacagtgattttagcgggagtacggaccagattcatattggatgtggatgagtgctgtataaactgtttgattcatctaagtcttgggattgcgatgcactgctgagcatatactgacatgttaccttcttggatatctgttatcatggtcagacctccagtattggcgaactgctctgttactttttctgatatcagctgatctatggcatctgtcttcccaaagtttattcttcaatgcttaagctggaaaattgttatcaaaattctttgaagatgtttgattgtatcatgtgtaattgatcctgtttactttcacggtgaaatttgttcaccttcctatctatcatataaagttttggtggcaaanaaaaaaaa

SEQ ID NO: 5196 - DNA, 760 bp, Glycine max
attatttttttctaatgtgaacttatcccttcatgaacctcagcacgttgtttcaattattctattcgcacactccctgaggagtgaagagaatctctctcctttctataaaccgataaatttagggcgcgctttttcccggcctcccctcgccaccgcatctccatccatctccgccacgtcgcctcctctctctctcgcttttcgtagttatacttcttctctcgttcctagaaatgagcttctcaacatgcgcagagctgtcgcgttgtttcgccgcagcatcggcgaaacctaattccggtcagtcaaacggcacttccacaacaagcctcagttttctcactccaatcggtcgttacggcgccgtttcatcagtatcgaggtcgaataagaccaacagaatagtcgcggaagctactcaaggtcttacttacagggacgccggcgtggacatcgacgccggctccgaactcgtgcgcaggatagcgaagatggcgccagggattggaggcttcggtggtttattccctctcggtgactcgtacctcgttgctggtaccgatggcgtgggaacgaaggtgatgcttgccttcgaaactggaatccacgatactattgggattgacctggttgcgatgagtgtgaatgacattgttacttcgggggcgaagcctttgtttttccttgattactttgccactgggcaccttgacgtggacgttgctggaaaggttataaaaggcattgttgatggttg

SEQ ID NO: 5197 - DNA, 1742 bp, Glycine max
atttcaaaatcttacctatcaaactcctttgtcacctgattattttattctaatgcgaacgaacttatcctttcatttaaccaaaacggcgttgtttcaattattctattcgcacaccccctgaaagagaatctctcctttctataaacccataatttagggcgcgctttttcccggcctcccttcgccaccgtatctccatccatctccgccaccgtcgccacctctctctctctctcacagttcgtatttatacatcttctctggtcttagcaatgagcttctcaacatgcgccgagatatcgcgttgtttcgccgcagcaacggcagcagcttcagcgaaacctaattccgggaagtcaaacggcaccgccacaacaagcctcagttttctcactccaatcggtcgttacggcgccgtttcatcagtgtcgaggtcgaataagaccaacagaatagtcgtggaagctactcaaggtcttacttacagggacgccggcgtggacatcgacgccggctccgaactcgtgcgcaggatagcgaagatggcgccagggattggaggcttcggcggtttatttcctctcggtgactcgtacctcgttgctggtaccgatggcgtgggaacgaaggtgatgcttgccttcgaaactggaatccacgatactattgggattgacctggttgcgatgagtgtgaatgacattgttacttcgggggcgaagcctttgtttttccttgattactttgccactggccaccttgatgtgaacgttgctgaaaaggttataaaaggcattgttgatggttgcaagcaatctgattgtgttctgttaggaggagagactgcagagatgcctggtctctataaagaaggtgagtacgatcttagtggctgtgcagttggcattgtgaagaaagattctgtaatcaatgggtcagacattgttgctggtgatattattattggtcttccatctagtggagttcactctaatggtttctcacttgtaagaagagtgcttgctcaaagtggtctttcactgaaagatcaacttcctggtagtgatgttacaattgcagaggctttgatggccccaactgttatctatgttaaacaggtacttgacttaattagcaagggaggggtgaaaggaattgcccacatcaccggtggtggtttcacagataacataccccgagtttttccggaagacctcggagctgtgatatatgatgggtcatgggaagtgcctgcagtgtttaagtggcttcaggaggctgggaagattgaagactctgagatgagacggacttttaatatgggcatagggatgatcctggtagttggtccagaggcagctaatagaatactcgagaacagaggtgaaacagagaaattctaccgcattggtgaaattataagcggcaagggagtgacctttagctaaatttaactgagtttaatcatgttgtacccctttaatactttcatggaaaatttttctatgggaatatgcgatttgaatggtcagtttatttggagcctacataaatgttacgaaatttgcaacaattttgaggatgcgcatgagtcattgctagtgaaaattgtttacgttattttgatcttgcttttagtgaatatcatggaggtttaatcatccttttatgtaccatttataggggcatgaaatttgatgtaaaccaaaagttgggttttgtttaaaaaaaaaaaaaaa

SEQ ID NO: 5198 - DNA, 1799 bp, Glycine max
ccacgcgtccggggacacgttatgtgcaggcaattccatgtggccacatggataagagaaagaggaagaggaagaagaagatgatgaacaacaacaagcaacacagcaacaccaactgaaacatcttcatcatctacgaacgaccataaattttctctctttccctttccctctctctgtctgtgtttttttaaaaaaaattctgtgagaggcatagaggaagatgaaggaaagcagtgatgggtttgtgagagcggatcagattgatctgaagagcatagatgaacagttggagaggcacctcagcaaggtgttgaccatagaaaagaaaaagcgctctgaaggggaagaagatgctgatcatgttcatcttcatgttcacaccaccagtgccactgcttctcccaaattctcacatgcttcttctgctgctagggttaacttcaagaagaaaaagcaggattgggagattgatccttctaaactcatcatcaaaactgttatagctcgtggtacttttggcactgtccatcgtggtgtctatgatacccaagatgttgctgtgaaattgttggactggggggaagaaggtcaaaggacagaagcagaaattgcctccctgagggcagcgtttacccaggaagttgctgtttggcataaacttgatcaccccaatgtcacaaagtttataggggcaacaatggggtcttcagaattgcagatacaaactgataatggtctaattggcatgccaagcaatgtctgttgggttgttgttgagtatcttgctggaggcaatttgaaacaatatctaattaagaacaggaggaggaagttagcttttaaagttgtcatccagctggcacttgatcttgcaagagggctgagttatcttcactcccagaagattgtccatagagatgtaaagacagagaacatgctattggataagacacgcacagttaaaattgctgattttggggttgcacgtgttgaggcatcaaatcctaatgatatgactggggagactggtactcttggttatatggctccagaggttttaaatggcaacccctataacaggaaatgtgatgtgtacagttttggcatctgcttatgggaaatatattgttgtgacatgccatatcctgacctaagtttctcagaaattacttcagctgtcgttcgccagaatttaagaccagaagtaccaagatgttgcccgagttccctagcaaatgtaatgaagaagtgctgggatgccagtcccgataagcggccggagatggatgaggtagtttccatgctggaggccattgacacatccaaaggtggaggtatgatccctcatgatcagcaacagggttgtttttgcttccgcaagcatagagggccttgaaaatttggttataatgatttttcagtatttgaagaatcaatttgtatcatagtcagaaagcaggatttggatactagatgagacaaatacacaatagggggtacaggtaggaggagctggtgacatgtcaatatgttggtgggtgtgtaaaactgtacctctgattttcttttaccttcttttttcccccacattggtttgggttctgtgggtatgagtattactttcagcttggtggcaatgttgccagattggactagtaacatgcaggatcttcattatactattgcatactcgctcgcaatcataattgatgtgattaagttggatccgtttgctttgtaaacaataatatacaagcgttttattgaatgggaaataaaacctctttggtcccttt

SEQ ID NO: 5199 - DNA, 1133 bp, Glycine max
tcgagtcagctacgtaggccccccccaaattttaacgaacaagttcaaaaatgagtctgtgaattggtatgcaccaaccaattcgtggttttatgaagtgagtgaattttgtaacttaggatcaaatatttgatagcatgaaaaaataccatgcatatcaacaaatggccataggtgtttagtccaatttcacacaatttctttgttgaacaggaacaaatatgaatacaagtttattaaggagatagttgaatcggtgtcaaacaagtttaatcatgatcatttacatgtttcggatgtcctggttgggctagagtcaccagtgctagaagtaaagtcgcttctggatgttggacgtgatgatgtcgtccacatggtagggatccatggactcgccggagtgggtaaaacaacacttgctatcgcggtctataattctattgctggccattttgaagcttcttgctttcttgaaaatgtgaaaagaacttccaacacgataaatgggttagaaaaactccaaagcttccttctttctaaaaccgctggagaaattaagttaacaaattggagagaaggaattcccattataaagcgtaagctcaagcaaaaaaaggttcttcttattctagatgatgttgatgaagataaacagttacaagcacttattggcagccctgattggtttggtcttggcagtagaatcatcataaccactcgagacgaacatttgttagctctacacaatgttaaaataacatataaggtgagagagttgaatgagaaacatgctcttcaattacttactcagaaggcttttgagttggaaaaaggaattgatccaagttatcatgatattttgaatcgagcggtaacttatgcttcaggtcttccatttgttttagaagtaataggttccaacttatttggaaaaagtatagaagaatggaaatctgctctagatggatatgaaagaattcctcataaaaaaatctatgcatacttaaagtaagttatgatgctttgaatgaagatgagaaaagtatttttctagcttgatattgcacccttgcgatttggagcagcccaatacaagcggatctccaattaatgtattactagtcacaatagca

SEQ ID NO: 5200 - DNA, 2252 bp, Glycine max
  misc_feature (2012)..(2012): n is a, c, g, or t
  misc_feature (2019)..(2019): n is a, c, g, or t
  misc_feature (2024)..(2024): n is a, c, g, or t
  misc_feature (2042)..(2042): n is a, c, g, or t
  misc_feature (2082)..(2082): n is a, c, g, or t
  misc_feature (2096)..(2096): n is a, c, g, or t
  misc_feature (2106)..(2106): n is a, c, g, or t
  misc_feature (2125)..(2125): n is a, c, g, or t
  misc_feature (2144)..(2144): n is a, c, g, or t
  misc_feature (2146)..(2146): n is a, c, g, or t
  misc_feature (2180)..(2180): n is a, c, g, or t
  misc_feature (2187)..(2187): n is a, c, g, or t
  misc_feature (2234)..(2234): n is a, c, g, or t
aaagaacctgacccaggatgaggatcgcgtgagcactcctcttcagatccgcacaagcattgcatatcaaatccagcttcctgggccccccccccgtctctgcatttcccttccttcttcttctctctctctctctaaaaccctaattctatacatggaagggaaatctcaaatctaatgactaattaattaatccatcgatcaagcatggagtccgaactcaaagacctcaattcgaagccgccgaacggcaacggcaacagcgttcgcgatgaccgtcctctgctgaagccggagcctccggtctccgccgacagcatcgccgatatggagaagaagttcgccgcttacgtccgccgcgacgtgtacggcaccatgggacgcggcgagttgcctcccaaggagaagctcttgctcggtttcgcgttggtcactcttctccccattcgagtcgttctcgccgtcaccatattgctcttttattacttaatttgtagggtttgcactctcttctctgcgcccactggcgaagaggaacaggaagattacgctcacatgagtgggtggaggagaaccattattgtttcgtgtggacgcgccctctccagactcatgcttttcattttcggcttttattggatccccgaatcgaactctgcctctcaggaagacaagagtcggcagcccgaagagttgaggagacctggcgtaataatttctaatcatgtgtcgtacttggatattttgtatcacatgtcttcctcattccctagttttgttgctaagagatcagtggctaaacttccgctagtcggtctcatcagcaagtgccttggttgtgtctatgttcagcgggaatcaaggtcatcagacttcaagggtgtttcagctgttgtcactgacagaattcgagaagctcatcagaatgagtctgctccattaatgatgttatttccagaaggtacaaccacaaatggagagttcctccttccattcaagactggtggttttttggcaaaggcaccggtacttcctgtgatattacgatatcattaccagagatttagccctgcctgggattccatatctggagtgcgccatgtgatatttctcctgtgtcagtttgtgaattatatggaggtgatccgattacctgtttaccatccttcacagcaggagatggatgatcccaaactatacgctaataatgttagaaggttgatggctactgagggtaatttgatactttctgatattgggctagctgaaaaacgaatatatcacgctgctctcaatggtaataatagcctgcctagtgttttgcatcagaaagacgaatgataatttcatggccccccgtctcaaatgaaatgtagttcccgtcgagttttagtttcaaacttagtatctgcttatgaatggacagcttgtgtgtgaggggtatttatagctaaatagtacacattcacctaaacatctgaatggtacttgtgtaattttcttgtaaataatgtgaccaataatgttttaattgctggtgaactcaattgagccacacaattcaagatctataagttttactgttcttcgttcacgttttgattgtgataaatgacccgactcatttgagagaggccatgttaccttagatctgaaccttctctttcgttttcctgcaggtttgttttcccaatgctaattcatcggattcgtggtctgtatattcattgtatggttccattatttatcaggaaagaaaaagtaaattaatatagaaaattctgtgcagaacaagtattcatacttgaaaatgtatttatctgataattgtctctagagcattaacggatttctgagcagggttcaatgtatctatatttttggtcatcttgtagggtcaataggatccacttcaatatagggtgttacaaaatatgatttccgattcttgttattattcgaaaaaaaaaaaaaaaaaagaaaccagtcaggcggcattttgttgtgggttntgacttntgatnagatgaggaacaaagccnctaacgaacagtaagactccttaaaaggagaatatcaacnccgacatccagagngcaattttgnaacagctatgaatttaatntggacaaagctgcaatttngnactagagcaattttaatgcagtcaatgttgattnttaaaantgaagtaacttgaaaatgttattggagcaaataaaaatggtattttnaaaaaaaaaaaaaaaaaa

SEQ ID NO: 5201 - DNA, 1642 bp, Glycine max
tttttttttttttaacaaaaataatattagtcccacttaaggaatatttagtactaaaagaaaccaacattgtatggaaaaacaaaacaagcacgagaaagaacctgacccaggatgaggatcgcgtgagcactcctcttcagatccgcacaagcattgcatatcaaatcaagcatcctgttccttatctctgtctctgcatttcccttccttcttcttctctctctctctaaaaccctaattctatacatggaagggaaatctcaaatctaatgactaattaattaatccatcgatcaagcatggagtccgaactcaaagacctcaattcgaagccgccgaacggcaacggcaacagcgttcgcgatgaccgtcctctgctgaagccggagcctccggtctccgccgacagcatcgccgatatggagaagaagttcgccgcttacgtccgccgcgacgtgtacggcaccatgggacgcggcgagttgccgaccaaggagaagctcttgctcggtttcgcgttggtcactcttctccccattcgagtcgttctcgccgtcaccatattgctcttttattacttaatttgtagggtttgcactctcttctctgcgcccactggcgaagaggaacaggaagattacgctcacatgagtgggtggaggagaaccattattgtttcgtgtggacgcgccctctccagactcatgcttttcattttcggcttttattggatccccgaatcgaactctgcctctcaggaagacaagagtcggcagcccgaagagttgaggagacctggcgtaataatttctaatcatgtgtcgtacttggatattttgtatcacatgtcttcctcattccctagttttgttgctaagagatcagtggctaaacttccgctagtcggtctcatcagcaagtgccttggttgtgtctatgttcagcgggaatcaaggtcatcagacttcaagggtgtttcagctgttgtcactgacagaattcgagaagctcatcagaatgagtctgctccattaatgatgttatttccagaaggtacaaccacaaatggagagttcctccttccattcaagactggtggttttttggcaaaggcaccggtacttcctgtgatattacgatatcattaccagagatttagccctgcctgggattccatatctggagtgcgccatgtgatatttctcctgtgtcagtttgtgaattatatggaggtgatccgattacctgtttaccatccttcacagcaggagatggatgatcccaaactatacgctaataatgttagaaggttgatggctactgagggtaatttgatactttctgatattgggctagctgaaaaacgaatatatcacgctgctctcaatggtttgttttcccaatgctaattcatcggattcgtggtctgtatattcattgtatggttccattatttatcaggaaagaaaaagtaaattaatatagaaaattctgtgcagaacaagtattcatacttgaaaatgtatttatctgataattgtctctagagcattaacggatttctgagcagggttcaatgtatctatatttttggtcatcttgtagggtcaataggatccacttcaatatagggggttac

SEQ ID NO: 5202 - DNA, 1520 bp, Glycine max
actcagctacgtaggccccccccccgagatccagaacgatcacgcccattggagtaaatcgcgtttcgattctcacgacggaagaaagcacggcgcagcctcaaaaaaccaaatggaagcacaaagctctcagcatacacaagttattgagatcagtggtgattttcctgatggtggaaggaagatttgtggggaagcaccgtgtgggtttgcagatgctggatccatctctaaggattctgaagaaagatcaacttctatgcgaaagcttttcatggcagtggtcctttgtgttattttcatgactgttgaagtggttggtggcatcaaagctaacagtcttgctatattgactgatgcagctcatttgctttcagatgttgcatcctttgccatctccttattttcattatgggctgctggatgggaagctacacctcgccagtcatatggatttttccgaatagagattcttggtgctttggtttctattcaaatgatatggttgcttgctgggattctggtatatgaagccattgatagaatcattgctggtcctaaaaatgtggatggttttttaatgtttttagtttctgcatttggtcttgtggttaatatcatcatggcattgttattgggtcatgatcatggccacagacatgctggtcacagtcacggacacggacatgatggtcatggccacagtcatggatttacaatgtctacccattgtgatgcaaagcataccaaagatcagcaccatcacacacaccatcatgatgaaaaccatccaaaagatgctcaccatcatactgaggaagatcacttgcaccatcatgctcacaaagaggttactgaactgcttcttggtgagtcaaaaggtggaactaagaagaagaagcaatggaacataaatgtgcagggggcttatctccatgttcttggggactctatccaaagtattggggtaatgattgggggagcagtcatatggtataaccctcgttggcaaattgttgatttaatctgcactctaatcttttcagtaattgttatggggacaaccatcaacatgctgcgaaacattttggaagtcctgatggagagcacacctcgtgagatagatgctactaagcttgaaagggggctgttggatatggaagatgtagtggccgttcatgaactgcatatatgggccattacagtgggaaaggttttgcttgcatgtcatgttaagatcagacgtgaagcagatgcagacttggtgctggacaaggttatagactatatcaaaagggtttataacatcagccatgtcaccatacagatagagcgttagaatttttcttcttcaattgactattttctggtagtaaagattagaggggaaggatttagttggacttgaggaattgttctggaactcaaatttgtcgatgttcttatattcttctatctagaagtttaagagtgcagatatgagcattgaatatttacatgccaaatttttattatctgtg

SEQ ID NO: 5203 - DNA, 863 bp, Glycine max
aattcggcaccagccaagagagagagattgaaaaaaatccatttgactttagaggttggtgactttgtgcgttgaagttatagagagagaggagtttggagagaagagtgaagaaggcaaatcgcgaagactagatctgatctgagagaatggctcctcggtctagcagcaaggacgcccaagaccttttccgcgctctttggtctgcttatgctgcaacccccactaatctcaagatcattgatctctatgtcatctatgccgtattcaccgctttcatccaggttgtttacatggctttggttggatcatttccatttaactccttcctatcaggagtactttcttgtgtaggaactgctgttcttgctgtttgtctcaggatccaagtgaataaagagaataaggaattcaaggatcttgcacctgagcgcgcttttgcggattttgttctctgtaatttggtgcttcatttggtgatcatgaacttccttggttaaattgggtttgtgtggcggttgttgtttctgattgaacccttggataataaaaattaaatagtagtatacctagacttttgtaatagtatttatagacagtagccggcattctactaattgctttagctttatgttgattacccccaccccccatttttggttccctgttttgaacgaagagattttgccatcttttgaagtttaaagtacttttgaatggcgaaataaagaaggtattgttattattcacatggatatctagatctgagcactagtccaaaacactcagaaattggcaaattgtagtcttctttgaaaataaaatgatgattaatggtcgcagaacaaaaaaaaaaaaactcg

SEQ ID NO: 5204 - DNA, 1142 bp, Glycine max
atcgattcccctctctcgatggaggcaaagtcactgctccagggttcatctcttaaaccttcttatccgctccctaagctttcaaaaaccacgatgatgacagctaattgcgttagattcagtttcaactacaacaacccatgtctcttattcgcaaatgggtacccttcttcttcttcacttccactttctcttcagaataagcccagaaaatcagcatcagtgattgtgagtgcccgaaagaaagataagaaagaagatacccatagctctgttcccaaacccgatgaggtcacgggtttcttccccgaagccgtgctccttaaaaagagaacagttgaggaagaaggtaagcttctcccggagtttgaagacgctgaggaaagacaactctttgaagcgctgatgcttgagctagatagtgatatggatgttgaaatattgcgccactacgaggttatgtacttaattcatgagaagcatgaagaagaggttgcagctgtcaatgagaaaattcaagactttttgagggagaagaaagggcaggtttggagactgaatgattggggtatgagaaggctagcttacaaaataaaaaaagctaacaatgcccactacatgctgataaacttcgagttggatgccaaatatatcaacgatttcaagactctgttggaccaagatgaaagagttattcggcatcttgtgataaagagggatgaggcaatcactgaagattgccctcctcctccggagtttcatacactgcgtgcaaatgcagatgataatgatgatgaagaatttgatgaaaattatgatgatgactgggatggtgaagatgaggaggatggcaatgacggcgatgatggcgaaaatggtattatttttgtagatgacgacgatgacgatatagattctagaaatgagacaccagcaaatgttagacaaccagatataagaaaattgagggctgagaatgtaggtaggtaagtgggtgttatcttttatccttgattcctttgtttccataggaatgcagagcagttctaaactttattatggctctaaatataggaagatccaagtaactctaatttcttgtttgcttatatagtcgtattattaaattataaaaaaaaaaa

SEQ ID NO: 5205 - DNA, 957 bp, Glycine max
  misc_feature (948)..(948): n is a, c, g, or t
cttgatcctaagctaaacggaaccctctagaacccaaagtttttctctttcaattcttcctcagtcaattcaactccctttcaatttcaaccctatctctgctctcttcttcttcttcttcttcattttttgggtctctctgtttacaagcttttcagttatggcatcgaaacgcatcgtcaaggagctcaaggatttgcagaaggaccctcctacttcctgcagcgcaggtcccgtggcggaggacatgtttcactggcaggcaacaatcatgggacctcctgatagcccatataccggtggtgtattcctagtttcaattcattttcctcctgattatccattcaaaccaccaaaggttgcatttaggactaaggtattccacccaaacatcaacagtaatggaagtatatgccttgacattctaaaagaacaatggagcccagcactaaccatttctaaggtccttttgtccatttgctcactgttgacggatcccaaccctgatgacccgcttgtgcctgaaattgcccacatgtacaagactgacagggctaagtatgaagccactgctcgtagctggacacagaagtatgccatgggatgatcatgctcctcctttagctgcacaatcatgatttttatgaagaaacaaaatttacttttaatgaatgttttatctttttttgtcagtgtaaatcaaccatggtaagggaattgattgtcactttgtgaatatttctttgcaagacatcggtcatggtctcatggaagaaattgtattataatgtcacaatttttctgcttgttgactagctattctaaatgatggtaatcaaattatagttaggaacaaatactatcggcttattgacgtggaatttgatctttttgggcttgggacaaaaaaaaatctcgagtgggattataaaatcatcaaatagactncttatttta

SEQ ID NO: 5206 - DNA, 2776 bp, Glycine max
aacctcttcatctcccacgcttcactttctccctccccctccctctccctctccctctccccaccccgagacctcaccctcccctccttctccctttcgccaccacaacgcccaacgtccacataaggaacaaccagctatcattttacattgaactagaaattcatttagaagatcaaagacaaaattttccgattaaaacgtacttaaattgaagaggggttgttggcattgtgcaccaaaaaggaaaaaaaatgtggaggttaaagatagcagatggagggaatgatccctatatatttagcacaaataattttgtggggaggcaaacatgggagtttgattctgaggcaggtaccgctgaggaacgagctcaaattgaagcagctcgtcaaaacttttatgaaaatcgcttcatggtcaaggcttgtggtgatcgactttggcggtttcagattttgagggaaaataatttcaaacaaacaataagtggcgtgaggctgctacgtgggcccccccccccatgcgagaaaattaggagcaccatgaagagggccactcattacctatcgtcactacagactagtgatggtcatggcctgctcatctggaggttccctcttttttactccaccgttggtcatttgtttatatattacaggacatattgattctatattttcagaagagtatcgtaaagagattcttcgttacatatattaccaccagaacaaagatggaggttggggactacacatagaaggtcacagtatcatgttttgcactacactcaattatatatgcatgcgaattcttggagaaggacctaatggaggtcataacaatgcttgtgctaaagcaagaaagtggattcatgatcatggtggtgtaacacatataccttcatgggggaaattttggctttcggtacttggtatagttgattggtgtggaagcaacccaatgccgcctgaattttggatccttccttcttttctccctatgcatccgggtaaaatgtggtgttattgtcggttggtatacatgcccatgtcttatttgtatgggaagaaatttacgggtccaatcacaccgttagttgcaaatttgagagaagaactttttattcaaccttatgatgaaaatagttggaagaaagcacgtcataaatgtgcaaatgaagatctttactatccccatcattggatacaagatctattatgggatagtttgtatgtattcaccgagcctcttctaaattgttggcctttcaacaagttggttagagaaaaggcacttcaagtaacaatgaaacatattcattatgaagacgaaaatagtcggtatattgccatcgggtgtgtggaaaaggttctatgtatgcttgcttgttgggtagaagatccaaatggagatgctttcaagaagcatcttgcaaggatcccagattatttatgggtttctgaagatggaatgaccatgcagggtattggtactcaatcatgggatgctggtttcattgttcaagctttacttgctactaaccttatagatgattttggacctacaattgcaaaagctcacgatttcatcaagaaatctcaggtaagagaaaatccttcgggagattttaagagtatgtatcgtcacatttgtaaaggctcatggacccttgccgatagagatcatgcatggcaagtttctgataccactgcagaatgtttgaagtgttgtctacttttatcagtgctgccacaagatattgtgggagaaaaaatggaacttgaaaagttacatgattcaatcaatttgatactgtcacttcagagtaaaaatggaggtatgactgcgtgggagcccgcaggagcttataaatggttggaactactcaatcctacggaattttttgctgacatagtagttgagcacgaatatcttgaatgcactgcatcagcaattcaggttttagtgttgttcaaaaagctttacccagagcatagaaaggaagagatagagaacttcattgctaaagcagtaacattcattgaagatacacaattagagaatggttcttggtatgggaattgggcagtttgtttcacttacagctcttggtttgcacttggaggtctagttgctgctggcaagacttacacaaattgtgttactattcgtaaagctgtgaaatttctactcaaaatacaaaataaggacggtgggtggggagagagttatctttcttgcccaaggaagatgtacgtacctcttgaaggaagtcgatcaaatgttgtacaaacatcatgggctctaatggctctaattcatgctgagcaggctgagagagatccaactccccttcatcatgcagcaaagttactcattaattctcagttagaagatggcgattggccccaacaagaaactcttggagtatacttgagaaattgcttggttcattactcattctatagaaatatttttccaatgtgggctttggctgaataccgcacaaatgttttattgccttcctttactatttaagttgaaaaattgtgagctcaaaaagataatgtcataccaataaaagtctagaaaaagaaaagttggtaatgaagtttaataggcttattcatattcccatacttttgtaattttgaaacaaatatttcgtatacattgtcagggactccaaaatttatcatacataacgaggggctctttttgcacccgaaaaaaaaaaaaaaaaaaaaaaaaaaaaaaaaaaaaaaaaaaaaaa

SEQ ID NO: 5207 - DNA, 1076 bp, Glycine max
tcagctacgtaggccccccccccctctgcttcgttgcccccccccaggcaaggagattcatatatcatcaatgggacaaaatggtggacaagtggtgctatggatccaagatgtagaattctgatagtcatggggaaaactgacttcaatgcagtgaagcataaacagcaatctatgatcttagtggatgtccagactcctggcgttcacataaagagaccattgacagtgtttggctttgatgatgcaccgcatgggcatgcagaagtaacatttgaaaatgtttgtgtgcccgcaaaaaacatcatacttggcgaaggacgtggatttgagattgcccaaggtaggcttggtcctggaaggctccaccattgtatgagactgataggtgttgccgagcgaggcatgcatatgatgattcaaagagctgttggcagaagaacatttgggaagttgattgctcaacatggttcatttatttcagatatggccaagtgccggatagagctagagagcaccagattgttagtgttggaagcagctgaccaacttgacaggcatggcaacaaaaaagctcgagggatattagcaatggcgaaggtagccgcaccaaacatggcactgaaggtgcttgacatggcaatacaagtgcatggagcagctggtgtatcatctgacacagtcctggcacatctctgggcagctgcaaggacactgagaatcgcggatggtccagatgaagttcacttggggaccatagccaagttagaactacagaaagccaaactttgagaacctgaacatttttctccacaggactaaatggaagtcaccaaataaaaactaagcgaaacgggaaattaaacttaaaccaagaaaatgttccaaggagaaaacctctgaaaatagccgtgtttcaaaatgctgtttgaagcattatgtaacatgaggttgttcaaaataagctttctctgtgtattccaggtttgaaaattgtaactttcaattccttgtttaatagtaaatatcactttcaaaggggtctaaaaaaaaaaaaaaaaaaaaaaaaaaaaaaa

SEQ ID NO: 5208 - DNA, 906 bp, Glycine max
tcagctacgtaggcccccccccccatctactctctttagctgcccttgttcctccaaaattctatgtggtgttgcagatggtgatgattactgcttggatcactgaccttttcacttgtatgggtggttgttttggatgctgtatgaaacccacaccaattattgctgtggatgaacctgcaaagggactaagaattcaggggcagacagtaagaaaaccacacatatcagatggtttctggagttcaagcacttgtgatctggataacagcaacattcaatctcagagaagtatctcgtctgtcagtacattaaatcaaattctctatcatagcggtggaacttctaccccaggcgccaatcctgaatttgtaaacccaggtcttcttctttggaatgagagcaggcttcagtgggttggaagtggcaaatctaggaagcatagccaacaaaaaagagaacccagactaaattggaatgcaacttatgaaagtttgcttgggactagacaacctttctccaagccaatacctttaactgaaatggtcgaattcctggtggatgtttgggagcgtgaagggatgtatggttgaaacttgagaggttaaaatgctgagtgcctttaagtttgtttatactttcgatggtgtatttgactcctgaaaggctttcatgtatagttgtgcagagaagattaaaagatcaaacacaagtttgttctccctttgtaatttcaaacactaaaggcaatccttttgtttttgccctcctgtaaatgactgtataccattttcaaactataatctgaattgcttaatgcagaagctgttacttttcaaggttgtaagaaaaaaaaaaaaaaaaaaaaaaaaaaaaaaaaaaaaaaaaaaaaaaaaaaaaaaaaaa

SEQ ID NO: 5209 - DNA, 745 bp, Glycine max
ggctccagaactaattcaataacatagaagaatatggaagatggaagcgtcaaccttcctcctgggtttttcttctctcctactgatgaagaacttgttcttcactttctctattgcaaggcttctctcattccatgccatcctaacatcatccccgatctccatccgtctcagcttgctccttgggaattaaatggtaaggcgttgttaagtggaaatcagtactatttctttaccaaagtgaatgaaaacagagccagagaaaatgggtattggaaggacacaggtgtcacggaacctatattgtcaacctttgataagaaagtgggaatgaagaagtacttggtgttccacataggtgaagctccacaaggtactgaaaccagttgggtaatgcaagaatattatatatgttcctctgggtttgacactgcctcatatcgaagtgctaggagaagaagaaaacatgatcaaagttggagcaagtgggttttgtgcaaagtctatgagaagatcaggtctcaacaaggtgtaaactgctatagcgatgatgatgacagtggatcagagctttcttggctagacgaagtttatctgtcgttggatgatgatctggaagaaattggcatgcctatttagattgaatgtatactaccccatgctaatatatatatatatatatatatatatatatatggacttggacttggtttactatgtctcaattaaatacgtgcattgtttg

SEQ ID NO: 5210 - DNA, 772 bp, Glycine max
ggctcgaggtacattattatcgaaattagtggtttaagttcattcaccccaaaaagaaaatatttcttgctaacaatatttttataaggtttactggttagcaacccagtgtgtgattcctcagttcaacaactctcagcaacatgcacaatcctcccccgccaggcggtccaggccctcaccaccaccccggcccaccggctccgccactacatgctcatccatctcctccgcctcctgggcctccacaccaccaccacggcccacccggcccaccgcatgcttatccaactcctccgcctcctgggcctccacaccaccatcccggcccacccgaaccaggctttcatcaacaccatggcccacccgggccaccgtatgctcatccaactcctccgcctcctgggccaccgggacctccccctccagggcctccacaccaccaacaccaccgttgctgatgtaatgcatatggagcttatgaataacgatcctacatatatatgatgtaatgttgaatgctttttaatttctgaacactttatatagcaagggcaaaatttggttgtgtcactaaataaaagctttgtagttcgtagttccactactatagtactacctatatttaccgtgtatcaccgtctggtgccccttgtgctttttctggtgtgtatcttattagaataagaaataaagggaggtcatttctatgtatgttgcactgattaaatctattataaagacattttaatggtcaaaaattatttttttt

SEQ ID NO: 5211 - DNA, 975 bp, Glycine max
ccacgcgtccgaaatacaatcactaatcacagccctttctctctctctctaattaattttcataagtaaaggtggaagaagagaagggaactcaaaaaccaaaaccaaaaacaaaacaaggggtacaaaaaaatagaggagcatgaccctccatgctgtttaaactctaatagactcgatcttgtttggtagtgctatttctattgctataaacccaaaccaaagaagattccacccttcatttatttcttcgtacgtgtctctgccgctgaaaatttctttctctgctttgctcgctctataactttcgactttattttcgatcaacatcatcaaactcctcgcatttgggggtttttttttccctcagctattcaccagaaaaaaagcttccatttttgctcagatcttcctcttgctcctcccgttcctgttcctgggtttttattactttaatttgacaagcatatctgtttcttatactgaggatacttgccaattgataaacagtgaagaatagctcctccatatagttttatgaacatacagttgcagaagttccaacataaatggtgatcatcactcgcagttctgctggtagaaaaccaagtgaaattatgaagtttttcttgacaacttttattggtatagttttcggattctttataggagtatcaattccaacattgtcaataacaaagttgaatctcccatctggcctgcttccctccattgatctttcttacattgaagacagatatgcaggtcgccaggcttggtcttttatgaataatggtaacaaaagaagttcatcgcaagttcaattatcaagtgatacatcaaagatttgggttccctcaaatccaagaggtgcagaaagattacctcctggcattgttgaagccgagtcagacttttatttgcgtagattgtggggcaagcccagtgaggatctaacgtcccagccaaattacc

SEQ ID NO: 5212 - DNA, 1828 bp, Glycine max
cacccttcatttatttcttcctattcaccagaaaaaaagcttccatttttgctcagatcttcctcttgctcctcccgttcctgttcctgtgaagaatagctcctccatatagttttatgaacatacagttgcagaagttccaacataaatggtgatcatcactcgcagttctgctggtagaaaaccaagtgaaattatgaagtttttcttgacaacttttattggtatagttttcggattctttataggagtatcaattccaacattgtcaataacaaagttgaatctcccatctggcctgcttccctccattgatctttcttacattgaagacagatatgcaggtcgccaggcttggtcttttatgaataatggtaacaaaagaagttcatcgcaagttcaattatcaagtgatacatcaaagatttgggttccctcaaatccaagaggtgcagaaagattacctcctggcattgttgaagccgagtcagacttttatttgcgtagattgtggggcaagcccagtgaggatctaacgtccaggccaaattaccttgtaaccttcactgttggctatgatcagaaaaataatattgatgcagctgtgaaaaagttctcagggaacttcactatcctgctatttcattatgatggccgaactactgaatgggatgagtttgaatggtcaaagcaggctattcatgtcagtgttcacaaacagaccaaatggtggtatgccaagcggtttctgcatcctgacattgtggcaccatatgactatatattcatatgggatgaagacctgggtgttgagcattttaatgcggaagagtacataaaactggtgaggaagcatgggttggagatttcacagcctggcttagagcctaataaagggttgacatggcaaatgacaaaaagaagaggtgatcaggaagttcacaaagtgacagaggaaaaaccaggatggtgttctgaccctcatttgcctccttgtgcagcgtttgttgagattatggctccagtgttctcaagagatgcatggcgctgtgtgtggcatatgattcagaatgacttggtccacgggtggggtcttgattttgctcttagaagatgtgttgagcctgcccatgagaagattggagttgttgattctcagtggattgttcaccaaggtcttccctcactagggaatcagggtgaatctcaaacagggaaatcacggtggcagggggtgagggagcggtgtagaaaggagtggaccatgttccagagtcggttggcaaatgccgaaaacgcgtattacaagtccatgggaactgatacatctaattccacagctcattagggtgactaaggccaaagttgacttgtacacagatatcattactacccttacgcgtagaattttcccttgaagaaaaatatatattcctatgtaacgttacgtacatgcaatgcaatcacaatagagtcctagctggggaccaaacatcatttcaatgtagaattttgcagtactgaacagtgagtaaatcaagtgaagagaattattattgctgcttatgaaagtgcttataggaaatggaaatgctagtgtatcctaaaattggaggctgacaacgaagttcattagggtatgtatgtttggaatggagaaaacgaaatgtcataattatcatacccttgggaggaggagaaaggactattactataatagtgttacaatttcttattgttttgttctactagtcagatactggaataaaactttaaaagttgattttatcataaactgtttaaataagtaggattgtctttagtgaac

SEQ ID NO: 5213 - DNA, 1260 bp, Glycine max
  misc_feature (491)..(492): n is a, c, g, or t
agccacgcgtccgtacggctgcgagaagacgacagaagggggaaccatggccaccgtttctttcaacgaaaactagcttctgtatttattcttctgtttgtgaaatatgtttttgtcttcgttactttttatatttactcgtctgatgttttcgatttgattatttttgttttgacggaggaacaggatgtgagttgtggttttctctgtgatgatgaaaacgatgacgagtctgatatgatatccattccttacaatactgacgacaaatcgaggcatttgtctgagaggattccactctttctcccgtcctttatatttgggttgtttaattttttgcgcgtggtttgttgtttcgattgtttgtattttttgtgtttttttgaaattaggcatggtgatgattgtttattgtcatctgatgattcatttgatgaatacataacctcctactcattccgaatgcctattgttttttcgttatagtgtgnngtcttttttttattttttgtgtttttttaatatttggagagggcggcgctcgacgcggccggggccgtgatgagagtgacaattttttgtgatgagattctctatgattgtatttcaagcacttttgagctactactgtctttctctcttatattgcattcctggatagtttaattcaaggcatcgtcgacggtctccgattcctggacccttttagtctgaagctctactgatttatgaattatagtttgattggatggtgtaaacatctcgtaaataccactattttggataaaaaatagttgaagaatatctcttatttgatggaatagagagaaatctaatgtatttatatgagataagtaaagatgttaaaatagacatgattgaaaatatgtgagaatagtataatgttggcttcgaaattttcaatttttctctaccaagccattcaatttcttccaaacacaattcctgccactcccaagtcttctggagaactcggttttatgaattttcctactttctttgtcttaagtttctggctgatctgggctgtatatatcttcccaactgaaataattggaagaaagtattatcaaatttgcattggttttttcgccgctgtggtaatgacgatattttattgtagttaacggatgttggattcttaatttgttttctaattttgttttggttatggttagataagtaacaaaacttgtttatgttctctccgaaaaaaaaaaaaaaaaaaaaaaaaaaaaa

SEQ ID NO: 5214 - DNA, 813 bp, Glycine max
  misc_feature (7)..(7): n is a, c, g, or t
tcgagtnacggcccgaggaccaccgcacctaagcttcccaacactcccatccatcacacctcaaacccatttccttgatatcttagttatctaattacctcaattaatcccttaattgcaagcatcatggctgaggagaagcaccaccaccacttccaccaccacaagggcgatgatgtgcctggcgaggttgattataagaaggaggagaagcaccacaagcatcttgagcaccttggggaacttggtgctgcggctgccggtgcttatgccttgcatgagaagcatgaggccaagaaagacccagagcatgctcacaggcacaaggtagaagaggagattgcggcagcagctactgttggtgctggtggttttgtcttgcatgaacaccatgagaaaaaggaagttaagaaagaagatgaggaagctcatggaaagaagcaccaccatctgtttggctgaacatgataaatattcatatataattaatattcaagctcctaagtatcaccatgcctgtgtatctctatcatatcttccatttctagtgtgcctttgaataaattctgtgcgagcttgaagagtgtttaattaattatgcctatggtgttacttcatatatatatttgcgtatatataatgtatgctatgttggctatattgataataagattgtaaagtaatttgagattgtattattatcctgataattttatgcaaggcgtatgtgttaagagtactcccggtcaattaattaagttatcagtttcatcattgatatatgagacatataaacaaaaagaaatacacatt

SEQ ID NO: 5215 - DNA, 2856 bp, Glycine max
ccacgcgtccgctttaaagaagcaagcaaggaagcctgctagcttggtttgtttctgctgtgagctgcgatccttaaacctttctctctctcactcactcaatcaaatggacattgatttcaaagaataccaattgcgctgcgagcttcgcggacacgaagacgacgttcgcggaatatgcgtgtgcggcagcgagggcatagcgacgtcgtcgagggaccgaaccgtcaggttgtggtctctggcccgcacccgcgggttcgtgagttccaagattctgttgggccacaccagcttcgtgggacccttggcatggattcctccgaattcggagttcccgcatggtggggtcgtgtctggcggcatggacacactcgtgtgtgtctgggacttgaagaccggtgagaaggttcacactctcaagggccatcagctgcaggtcactggcattgcctttgttgatggggatgttgtgtcctcttctgttgattgtaccttaaaacggtggaggaatgggcaatctgtagagtggtgggaggctcataaggcaccagttcaagcagttataaagctgccttcaggggagcttgttactggttcaagtgactctactttaaagctttggagaggaaaaacttgcttgcatacctttcaaggacattcagatacagttcgatgcttgtctgttatgtctggtcttggaatcctatctgcatcccatgatggttctctcagattatgggcagtaagtggtgaagtgctaatggagatggttggtcatactgctattgtttattcaggtgattcacatgcatcaggacttattgtcagtggtagcgaagaccattttgccaaagtttggaaagatggagtttgtgttcagagcatagaacatcctggttgtgtttgggatgcaaaatttatggaacccgcgcgatccggtgacagcatgctcagatggagtagtacgcatttggaccgtagatcaggataatgttgctgaccagttagagcttgatttatacacttcgcaactttctcaatacaaagctagtagaaagagggttggaggattgaaactggaagagttaccagacttggaggcactgaagatcccaggaactactgatggccagacaaaagtagtcagagagggggataatggggtggcatatgggtggaacatgaaagaacaaaagtgggataaaattggtgaagttgttgatggaccagaggaatcaaatcgccaattttttgatggtattcagtatgattatgtgtttgatgtggatattggagatggtatgcctacccgtaagttgccatacaatcgatcagataatccatatgatgttgctgatacctcgcgtactcgaggagaatcttcctctttcttttcgtgagcaaattgtacagtttattcttcaaaatactggacaaaacaatactacttttgatgcttcatttcgcgatcccttcactggctcccatgcttatgtaccaggacaaccttcacgcatgtctgatatttctgcgaaacctactttcaagcatattcctaagaaagggatgcttgttttcgatgcagctcagtttgacgggatccttaaaaagatttctgagttcaattgtgctttacagtctgaccaggaaaagcagaacttgtctttgactgagctcaatgtttccagactgggtgccattgttaaaattctgaaagatacttcacattatcattctagtaaatttgcagactctgatatagccttgttactgaatctgcttcggtcgtggccaatcgcaatgatttttcctgtcattgatattgtaaggatgctagttcttcatcctgatggggctgttttacttcacaagcattttgaagcagaaaatgacatactaatggaagtgattaagaaagtcactgtaaatccaacaatccctgcaaatctgttgaccagcattcgtgttgtaactaatctcttcaggaatttgtgctactacaactggttgcaaaaacatcgtagtgagattcttgatgctttctcaagttgtagttcatctccaaacaagaatttgcagttgtcatactctaccttgttactaaattatgcggtgctattaattgaaacaaaggatcaagaaggtcaatctcaagttctatcagcagctcttgagattgccgaggatgaaaatgttgaagtcgaccccaaatttcgtgctttagttgctgttggatcactgatgcttgaaggtcttgtcagaaaaacagcactggattttgatgttgtgaacattgcaaaagcagccaagggttctaaggaagccaagattgctgaagtcggatctgacattgagctgttaacaaagcagagctgaataccttttggttgcttaatctctcctgttcctccaaataaactcaaggattatttttgtactaaagatgtcagcaaccaagatcattgtttagagtgtaaaattgacatctttctgctgatggttgtgcgtttgttttcaatttcaaaacaaagagctgttgcattttagaggattcattgagagtgacacatcaaaagtaacctcacaattacagatttccaccgttcctccgtactttgagacaatagttggaacttggaaacccatgacatgttatcagatagattgtgtaaaccaattgagcaaattacagcaacgatgtagtcttcctctctcatttgttttaatatcaagttattcaaatcatttcatttaaaaaaaaaaaaaaaaaaagaatcaagtttgtgtgctacaataatctaaggtctgcgtgttatggtaatgtgatatatagcaaaaaaaaaaaaaaaaaag

SEQ ID NO: 5216 - DNA, 1090 bp, Glycine max
  misc_feature (1073)..(1073): n is a, c, g, or t
tttttttttgggcaccaaaacaaatatattttctattatatagagcaattttatttataatacaccaacacaatcaattcgtagtatctttgctccactaggcgaaatgcaaaattgaatttctctagtatcacaacaaagagcccactataccctgaaaattgtaatttctctacactcctacttcagggtcttctttgttggtgtcattctcattgtttccttgaaatttgatatatttataccacctagccatcagtacatatattacaagatcagctgcggtgagtgctgctaagaggaagtaaaacatatccaaatgccctttgttcaagtttcctgggatccatcctggcatctcatctgtggcagaaatcttcatcacaattgcaacaagcaagctactaacgtagtttccaagtgatattgaagtcatgcaaagtgcactaccaaaactctttaatccatcaggtgtttgtgcattgaagaactctaattgacccacatacatgaaaacttctgatgcccccacaaacacatattgtggcacttgccaaaatatggaaagtgaactagaccctttacattcattgcagtcttctattgcattctttagcctaaagtgctccaccaatcctgctgaaaccatggccataattgctaggactagaccaattcccatcctttgaagttcagtgagtccttttgatttcattgttctggccacaagagggtcgagaactcgcctataaatgaagatgacaattgctacacttagaatgtcaaaggtggacatgcttgctggaggaatgtggaaagatgatattctagtgtccatggcatcgccttgctccacaaaaagtgatgccatttgagcaaaaacgacagagtataatatggtgcatagccaaattgggagtagtcttaggatgcatttcacttcttctacttgtgtcacagtggatagataccatggactgcatttactctcttccatttgtttgaaattctttgatgtgataaatgctgctttgtctaagaatctacaagatcaatgcaaattccaggggtanctacgtagctgactcga

SEQ ID NO: 5217 - DNA, 1637 bp, Glycine max
ctagaacatcctcatcgaaaagaggaagtgagtccagagacagggatcagttatggctccgtgttcagtttttttcaattttcttcttctgcttcttctttctttcaccaaagaagctttaggtgtttcagagcaagaagctgacagagtgcatggactacccggacagcctccggtgaagttcaaacaatattctggttatatcactgtcaatgaaacccatggaagagcactcttctattggttctttgaggccactcataaaccagaagaaaagcctcttctcttatggctcaatggaggccctggttgttcctcaattggttatggagaagcagaggagctaggacccttctttcctcaggacagcagccaaccaaagctaaagttaaatccttattcttggaataacgctgccaatcttttgtttttggaatcccctgttggggtggggttctcctacaccaacaccagcagtgatataagtgagcttggtgacaccattaccgctaaagattcacacacctttatcatcaagtggtttagaagatttccacaattcagatcacacgaattctacatttccggtgaaagctatgcagggcactatgttccgcaactttcagagctcattttcgataataatcgcaatcctgtcgagaaagactacattaacttcaaaggattcctgattggaaatgcattactggacgacgaaacagatcaaaagggtatgatagattatgcatgggatcatgctgtgatatctgatggagtataccataacattacaaccatatgcgatttcagccttccaattctaaatcaaacaaatgagtgcaatgtggaactcaataagtacttcgctgtgtataagattattgatatgtatagcttgtacactcccagatgtttcagcaacaccagcagcaccagaaaggaagcccttcaaagtttttcaaaaattgatgggtggcacagaaaatcagctggatatgatccttgtgcatccgattatactgaagcgtacctaaataggccagaagtccaaaaggcattacatgccaatgtcaccaaaattccatatccatggactcattgcagcgataatatcacattttggaatgactcaccacagtccatgcttcctgtcatcaagaagcttattgctggtggtattcgcatttgggtttacagtggagataccgatggaagaattcccgtgacttcaacaagatacactcttagaaagttggggcttgggatcgtcgaagattggactccctggtataccagcaagcaggtgggaggatggaccattgcttacgatggacttacttttgttaccataagaggtgctggtcatcaagttcctactttcacacccaagcaagctctgcagttggttcgacacttcctagcaaataagaaattaccatctcaaccaatttaatcacttttcttttaatttatcattttgaagtttgtttctgattaagaatggatatttcttgtttctgggtttcaaaaagcccacttgtgttctatttttaattttcaattatttcataagactcttccgaagaaaaaaaaacatcatatccatatataaaatttaatgtctacctattagcagt

SEQ ID NO: 5218 - DNA, 1203 bp, Glycine max
attccagactgggtgccattgttaaaattctgatcagctacgtaggcccccccccccccaaatttgcagactctgatatagccttgttactgaatctgcttcgatcatggcctatggcaatgatatttcctgtcattgatattgtaaggatgctagttcttcatcctgatggggctattttacttcagaagcattttgaagcagaaaatgacatactaatggaagtgattaagaaagtcactgtaaatccaacaattcctgcaaatttgttgaccagcattcgtgctgtaactaatctcttcaggaatttgtgctactacaactggttgcaaaaacatcgaagtgagattcttgatgctttctcaagttgtagttcatctccaaacaagaatttgcagttgtcatactctaccttgttactaaactatgctgtgctattgattgaaacaaaggatcaagaaggtcaatctcaagttctatcggcagctcttgagattggtgaggatgaaaatgttgaagtcgaccccaaatttcgtgctttagttgctgttggatcactgatgcttgaaggtcttgtcagaaaaacagcactggattttgatgttgtgaacattgcaaaagcagccaagggttctaaggaaggcaagattgctgaaatcggatctgacattgagctgttaacaaagcggggctgaataccttttgggtgattaatctatcccgttcctccaaaaaaaaaatgaaggtaaagaggaatgatcacgttcatgttagtgacccttaatcagacacatgcacgcagggttcctttctatactgtttttggctgtctttgggggtaagggtcgaaggctcgaagcatcttgtgcagggttctttggaaatggaaattatgcagtgtacagcattttcagatctttttccaaattatgtcgcatatatattgaattttcagttttatgaataattttcattctctatgtgtctgccctcctgtcttttacaacatccatcatagaagtactagaacatggaagtaggtaggaaaatgtgaaggtaccgtgcttcctttactttgagacaattatagttggaaacccatgagatgttaaaagattagattgtttaagccaattgagcaaattacagcaactgtagtagtcttcctctctcatttttttttaatatttaagttttattcaa

SEQ ID NO: 5219 - DNA, 1555 bp, Glycine max
ttagtcagctacgtaggcccccccccccccgaactaaggccactccttttagcaagttaacaacacttttgtcttcgttccattatctagttctcaattctcttcaccctttgcctctgaaagaaatgggtagtcttgaagcggaaagaacaacagtaggattggcagcaagagacccttcagggattctctccccatacacctacaatctaagaaacacaggccctgatgatgtttacattaaagttcactactgtggaatttgccattctgatctccaccagattaaaaatgatcttggcatgtccaactatcccatggtcccaggacatgaagtggttggtgaggtactggaggtgggatcaaacgttagcaggttcagagtgggagagttggtgggagttggactcctcgtaggttgctgcaaaaactgccagccatgccaacaagacattgagaattactgcagcaagaagatctggtcttacaatgatgtttatgtcgatggaaaacccacacagggtggctttgctgaaaccatgatcgttgagcaaaagtttgtggtgaagattccagagggtttggcgccagagcaagtggcaccattactgtgtgcgggtgtgacagtgtacagtccactggtacactttgggctgaaagagagtgggctaagaggtggaatattggggcttggaggagtgggacacatgggggtgaagatagcaaaggcactgggtcatcatgtgactgtgataagctcttctgacaagaagaaacaagaggcacttgaacaccttggagctgatcaatatctcgttagctctgatgccactgccatgcaggaagctgctgattcacttgactacatcattgacactgtgcctgttggtcaccctcttgagccttatctctccttgctcaaacttgatggcaagttgatcttgatgggggtcatcaacacccctcttcaatttgttagccccatggtcatgctagggaggaagtcaataacgggaagcttcattgggagcatgaaggagacagaggagatgttggagttctggaaagagaagggtctgagttcgatgattgaaatggtaaacatggattacattaacaaagcctttgaaaggttggagaagaatgacgtgagatacaggtttgttgtggatgtcaaaggcagcaaacttgtcgatcagtaaaagaaagaaagtatactactagcacgacacacgcaacatccatccttccatcatgaagagtctggaaaagttattaattaattgagaactaaagctgtatttgttgttcactctaaaaaagaagctgtgttttgtttattaaaaagagtgctctgttttctctgttttggttacacgacgttcattaaaatatagtatttgatatcaaattctcgtggaaagcaaaagacaccatagttttgttgtgtaaattgctgtatcgttccgccattgaaagaaagaaaaaaaaaagtggatattaatgggcaccgcacaatggctggcataccttcgtctgtccctgcgcttcttct

SEQ ID NO: 5220 - DNA, 1494 bp, Glycine max
tcgagtcagctacgtagggccccccccccccaaattctcaattcaattctgttcatcctttgcttcccaaagaaagagaaaataaaaagcaatgggtagccttgaagcggaaagaacaacagtaggattggcagcaagagacccttcagggattctctccccatacacctacaatctaagaaacacaggccctgatgatgtttacataaaagttcactactgtggaatttgccattctgatctccaccagattaaaaatgatcttggcatgtccaactatcccatggtcccaggacatgaagtggttggtgaggtactggaggtggggtcagacgttagcaggttcagagtgggagagttggtgggagttggactcctcgtaggttgctgcaaaaactgccagccatgccaacaagacattgagaattactgcagcaagaagatctggtcttacaatgatgtttatgtcgatggaaaacccacgcagggtggctttgctgaaaccatggtcgttgagcaaaagtttgtggtgaaaattccagagggtttggcgccagagcaagtggcaccattactgtgtgcgggtgtgacagtgtacagtccactggtacactttgggctgaaagagagtgggctgagaggtggaatattggggcttggaggagtgggacacatgggggtgaagatagcaaaggcactgggtcaccatgtgactgtgataagctcttctgacaagaagaaacaggaggcacttgagcaccttggagctgatcaatatcttgttagctctgatgtcactgccatgcaggaagctgctgattcacttgactacatcattgacactgtgcctgttggtcaccctcttgagccttatctctctttgctcaaacttgatggcaagttgatcttgatgggtgtcatcaacacccctcttcaatttgttagccccatggtcatgctagggaggaggtcaatcacgggaagctttattgggagcatgaaggagacagaggagatgttggagttctggaaagagaagggtctgagttcgatgattgaagtggtaaacatggattacattaacaaagcctttgaaaggttggagaagaacgatgtgagatacaggtttgtagtggatgtcaaaggcagcaaacttgttgattagtaaaagaaagtataccagcacgacacccgcaacatccatccatcatcatcaagagtctggaaaagtttttcattgaactaaagctgtgtttgtttattaaaaagagtgctctgttttctctgttttggttacacgccgttcattaaaatatttgatatcaaattctcgtggaaagcaaaagataccaaacttcctgtttgaccatagctttgctgtgtaaaaaaaatgttgtattgttccgccattaaaagaaagaaaaaagaagttggatattaaaaaaaaaagaaagacttaccaacgaaaaaaaaaaaaaaaaaaaaaaaaaaaaa

SEQ ID NO: 5221 - DNA, 1935 bp, Glycine max
atcacagtgaccaaaaccaccactgtttcgattcaagatctcaatcacatcactccaagatcctctctctttctctcttccaaaccctaggctccaccactccgtgatccatgcttcttccccacttcgatgctgagtttcttcttgggagtgccttagcgtagagaggcagagcgaaaccaagaaaatgctcagtttcgtcttcatcattgcgtccttattcctctccctctgccacggccacgtctacaccttcacgatgcaccaccgccactcggagcctgtcaggaagtggtcccactccaccgcctccggaatccccgccccgccggagaagggcaccgtcgagtactacgccgaactcgccgaccgcgaccgcctcctccgcggccgcaagctctcccaaatcgacgacggcctcgccttctccgacggaaactccaccttccgcatcagctccctcggatttttgcattatacgacagttcaaatagggacaccgggagtgaagttcatggtggcgcttgatacgggaagtgacctgttctgggtaccctgtgattgcacaagatgtgctgctactgatagctcggcttttgcttcagccttcgcttcagatttcgaccttaatgtatacaatcccaatggatcttcaacaagcaagaaagttacttgtaacaacagtctgtgcatgcaccgcagtcaatgcctagggacgttgagtaactgcccctacatggtctcttatgtctctgctgaaacatctacatcgggaatactagtagaagatgttctgcacttaacacaagaagataatcaccatgaccttgttgaggcaaatgtcatatttggatgtggacaaattcagagtggatcattcttagatgttgctgctcccaacggtttgtttgggctaggtatggagaaaatatcagttcctagcatgttatcaagggaaggatttactgcagattcattctccatgtgttttggacgtgatggcattggaaggataagttttggggacaagggaagttttgatcaagatgagactccatttaatctgaacccatcacaccctacctataatatcacagtcactcaagtccgtgtaggaacaactctaattgatgtggaattcacagcactttttgattctgggacctcttttacatatttggttgatccaacctatacgaggcttactgagagttttcattcccaagtacaagacaggcggcatagatcagattcaagaatcccttttgaatattgttatgatatgagtcctgatgcaaatactagcctcattcctagtgtgagtttaactatgggaggtggaagccattttgctgtttatgatccaataattattatctcaactcagagcgaacttgtatattgtctagcagtcgtcaaaactgctgagctaaacataattggacaaaacttcatgactggttaccgtgttgtatttgaccgagaaaagctcgtgttgggatggaagaaatttgattgttacgacattgaggatcataacgatgccattccaacaagaccacactcacatgcagatgtgcctcctgctgtcgctgcagggcttggtaattaccctgccactgatccaaccagaaaatccaaatacaactctcagaggtcaattgcatcaccatcttcacattatagccatacttcacttccaactttcctcggatttcttgtattgtgttttgtttatattctataatcattcatttgtacgggccagtggtagtttatggtaaactttagctcattcttgatctacatgttgatataaggatatgttgatatagtgttgaagaatagatgtatgaattttactctcataaatcatgataatataacactgtaaatgccatttgcattgcatgtttccccttccccacaacccac

SEQ ID NO: 5222 - DNA, 1620 bp, Glycine max
agcttctttccggctcgcgctcactcccccactcatctcctgcaacaacaaacaaacaaacaccaccaacaacaaccactcctcttctttttcaccctcgaatccacgcttcctttacaccgcgtttggatctccgttaaacaaaaccattaaaatgtagcgagagaaaaacaaaaccgcaaaagaaaatcagttaatttattaattttatttttttatggctttccacgaccatctccagcacgaaatagcgttccagcgtttcacggaggagcaagagttgaccgagaacagagacatgcagcagaggctcccacctccgacatggctcaacaacgttaacgcgcgtcaacagaatttcctcgacaccgagaagagcgtggatcggaacaaccgaagcgagagcaattgcgaatccgaggatttgagggaatacaaagcggacattctaggtcaccctctctacgatcaactgttgtcggcgcacgtctcgtgcctcagaatcgccacgccggtggaccagcttcctaggatcgatgcgcagcttcagcagtcgcagcgcgtggttgaaaagtactctgcacttgcacacaacggggtcgtcgatgagaaggagcttgatcagttcatgacccattatgttctgttgctctgtgcctttaaagaacaactgcagcagcatgtccgtgttcatgccatggaggcagtgatggcttgttgggatctggagcaatctctgcaaagcttgacaggtgtatctcctggtgaaggaacgggtgcaacaatgtcagacgatgaagatgaccaggcagagagcaatgccaacttatacgaaggaagccttgatggcggcgaaactcttggatttggtcctcttgtccccactgaaagtgaaagatctttgatggaaagagtcaggcatgagttgaagcatgaactaaaacagggttacaaggagaagattgtggacataagagaagaaattctaagaaagagacgagcggggaagcttccaggggacaccacatcccttttgaaagcttggtggcaatcacattctaaatggccttaccccactgaggaagacaaggctagattggtgcaggaaacagggttgcaattaaagcagataaataattggttcataaatcaaaggaaaaggaactggcatacaaataacccctcatcctctagcaactccaaaagcaagcgcaagagtagtgcaggagaagccagtaaccagagcttcatgtgaacggtcgcatattttgaacaaaaattattggtattgttctcccttttaatgcatgctcgtgggattcatagatcttacggtccagcgtgaacgtgatggattctggatgaaaaagggaaattcatgatatataaaaccactgtattggttgaattacagaaaattatccctggtattgttgtatatgaggctgctgcatgccgcttgatatctgatattgatgcagtcgcattctattcgatttaatgggtagcatgctgatattattctgcttatttaaaaatattatggatccaattagtataactcagtggataatgcatctaacttgttggaattgggcctgaaaaaaaaaaaaaaaaaaa

SEQ ID NO: 5223 - DNA, 1729 bp, Glycine max
caaaagaaaaaagtaattttccaaatctcttcccttcttccttcacttcactatctcctcttctcctttccttggtttcatccttttattactgtcgtagtggaaatctatcaccctgtggatcaattaattgacgcgagtttatgaaatccaattaaatgttctgagaacaaacgaagaacataagataacagacagaaagcgcttataaatggctttccacgagcatctaccgcacgaaatcacgttccagccgttcgcggaggagcagcagcagcagcagttaggtcagagccgggacatgcagcggctcctgccactctcgggcggggcgccgacgtggttgaacaacagcaacgccgccacgctccgccagcagaatttcctccacctgcagccggaatccgccgcgacggcggcgcagcaaaacgacgacgttcgtgctatggatcggaaccggaccgagagcaactctgaagcggacgatttggcggaatacaaagcagatattttaggtcaccctctctacgaccagctcctatcggcgcacgtctcgtgcttgagaatcgccacgcccgttgaccagcttccaaggatcgacgcgcagcttcagcagtcgcagcgcgtcgtcgacaagtactccggcctcggaaatggaaacggcgtcgtcgatgacaaagagctcgatcaattcatgacgcattatgttatactgctctgtgctttcaaagaacaattgcaacaacatgtccgtgttcatgctatggaagctgttatggcttgttgggagctggaacaatctctacaaagcttgactggtgtatctcccggtgaaggaacgggtgcaacaatgtccgacgatgaagaagatcaggcagagagtaatgccaacttgttcgaaggaagcatggatggagctgatagtctcagctttggtcctcttgttcccacagaaactgaaagatctttgatggagcgtgtgaggcaggagctgaagcatgagttaaaacagggttacaaggacaagattgtggacataagagaagaaattttacgaaagagaagagcgggaaagctaccaggcgacaccacttcccttttaaaagcttggtggcagtcacattctaaatggccatatccaacagaagaggacaaggcaaggttggtgcaggaaacagggctgcaattaaagcagataaataactggttcataaatcaaagaaaaaggaattggcatactaatccgtcgtcttctagtggctccaaaagcaaacgcaagagtagtggtgcaggtgaaacaagtaaccagagcttcatgtgaatgaacacctgatttgaactgaaaaaaaaaatagatatatctctattcttcattttatgcaacaatggtgagattcatatatgaccggagcttagagggaaaaacatgaacggaaatggtggaatatggatgatgaaggagtaatttgtgataccaacatttacttggggggattaattaattacttggttcaattacagaaaaacctagtattgttgtatatgaggctgctgagttgatacctgatactgttgcaggcactatctatttggttcaatgggtatctatgtattactattacagttcaaaggtttttgataaaaaaaaaaacaacatagaatccttgaatgcggtgcaaattaacgatcagttttatttgttacacacataagtgtcctacatctgata

SEQ ID NO: 5224 - DNA, 922 bp, Glycine max
gcacattctaacaagccctcttggtgtcttggttcttgatctttaaatattacctattggttattaattttttggctcgtcccgctcgcgcctcattaggcaatcaacaacacactttgtaattggcatcaaatggcaactgaagccgatgctcctgtcattcctcttctcactccctacaaaatgggtaacttcaatctgtcccatagagttgttttggccccgttgaccagaatgagatcttacaataacgttcctcagcctcatgctgtattgtattactctcagagaacttctccaggaggtcttttgataagtgaagccactggtgtctctgacactgctcaagggttggtgcacacacccggcatatggagaaaagagcaagttgaagcatggaaacccattgtgaatgcagttcatgccaaaggtggtgtattcttttgtcagatttggcatgttggaagggtctcaagtccagtttttcagccaaatgggcaagcaccaatatcttctactgacaagccactcaaacaaaatggcattgaggaagcacaagtcacaccaccaaggaggctaaggacagatgagattcctcatattggcaatgacttcagaagttgctgcaaggaatgctataaaagcaggttttgatggggttgagatccacggtgctcatggctacttacttgagcaattcattaaagacaaagtgaatgatcgaagtgatggatatggtggatcccttgagaaccgatgccgattcgctctggaagtggttgacgctgttgtgaaagagataggggcagaaaaagttggagttagactattccatttgacagagcaatgagagtgtggagattcagaaccctaatgattggcgccattcttcgctaatgccctcgcaaggataacattcctc

SEQ ID NO: 5225 - DNA, 2379 bp, Glycine max
  misc_feature (2342)..(2347): n is a, c, g, or t
  misc_feature (2352)..(2352): n is a, c, g, or t
gttatgtactagtaaatagtaattttattgtaaactatccagtacctgagagagagtagcatctgagtcttgtgtttagcgtaggggattgaaaatgagtatgtacggtagggatccgtggggagggccgttggagatccacgccacagactccgccaccgacgacgagcgcagccggaatctccaggagctggaccgaggcgctttagacgagacacaacagagctggctcttgggcgccggagaacagaaaaagaagaagaaaaggtacgtagatcttggctgcatcatcgtcagccgcaagctcttcatctggacactcggcactctcgccgtctgcgccttcctcgccggcttcatcaccctcatcgtcaaaaccgtcccccgccaccaccacaagccaccccctcccgacaactacaccatcgccctccacaaggccctcctcttcttcaacgcccagaaatccggaaagctccctcgccacaacaatgtttcctggagaggcaactccgggttgcaggacggcaagggtgacggcgtgccgcccgtcattaaggatctggtgggcggttactacgacgccggcgacgccataaaattcaacttccccatgtccttctccatgaccatgctgagctggagcgtgatcgagtacagcggcaagtaccaggctgcgggtgagttgggtcacgtgaaggacatcataaagtgggggaccgattaccttctcaagaacttcaacagcaccgccgacaccatcacccagctgggcatgcaggttggatcaggggacacctcccaaggtagcaccactcccaacgaccactactgctggatgcgtcccgaggacatcgactacgaccgccccacccagacctgcaccacatgctccgatctggccgccgagatggccgcggcgttggcggcggcatcgattgtgttcaaggacaacagggcctattcgcagaagctggttcacggggcgaccacgctctttaagttctctagggattcgagaggtaggtacagtccaaatgggagggaggcttctgtattctacaattccaccagctattgggatgagttcgtttggggaggggcatggatgtactttgccactggtaattcctcttacctcaagctcgctaccactcctcgcctcgccaaacacgctggcgccttctggggaggccccgactatggcgtcctcagctgggataacaagcttactggtgctcaggttcttctcagtcgtttgaggttgttcctcagtcctggttatccctatgaagaaattttaagcacatttcacaatcagaccggcatagtcatgtgctcctacctcccaatgttcaccagctttaatagaacaaggggtggcttgattcaattgaaccatggcaggcctcagcctctccaatatgttgtcaatgcagcctttttggctgctctttacagtgattatctcgatgctgctgatacacctggatggtattgtggacccaatttcttctcgactgatgtccttcgagactttgcaaagacccagattgattacatccttgggaagaaccctcggaaaatgagctatattgtaggttttggtaatcattatccaaaacatgttcaccatagaggtgcgtctataccgaagaacaaggttaagtacaactgtaaaggaggatggaaatggagggactcatccaagccaaacccacatacaattgttggtgctatggttgctggtcctgacaagcacgatcatttccatgatgtccgaaccaactacaactacactgagccaactctagcaggaaatgcaggtttagtagctgcacttgtggcattgtccggtgataaaaccaccggtatagacaaaaacacccttttctctgctgttcccccaatgtttcccacaccaccaccacctccagcaccatggaaaccatgaggtgttgtattgtgtcattcattgtcctcctttccatcaagtgccaaaagtgacttcatgattttgaagatggaggtagtagatcgaagaagtcaaggacggccgcacgtgaaaaaatggaagtagtgaaaactaggcctagtgattctagtttgtctaggaacaatctttggtttaagattagcattaaaatttcataatggtacttgagactgtcttttgtctacttgtttttttgttgttgtgatatacatagtatgtatgtatcaaatcttgaattctttaaacgtgcaaaacgaacagcatgtaatgtaggtgtcacgttttgatttataatgtcttatagttaccttgctcaaaaaaaaaaaaaaaaaaaaaaaaaaaaaannnnnnccccngttttttttttttttttttttaaaaaa

SEQ ID NO: 5226 - DNA, 668 bp, Glycine max
ggcattttctcaaacagaagcacacatgaacaactattatgagggatgtacagcaacagtgcttctggtgtggactgatggtggtgaaaatttctttgcacaatgtgctaacgttggagattccacctgtattatgagtgtgaatgggaaacaaatcaagatgtcagaagatcacaagtttacgaattattctgaaagactcagaatcgaagagacaggtgaaccattaaaagatggggaaacacgtctatatggtataaatctggcaagaatgcttggggacaaattcctgaaacagcaggattcccggttcagttcagaaccttatattagtcaagttgtgcatattgatcaagcaagcaaggcttttgctattctagctagtgatgggttatggaatgtcatcagcgtgaagaaggcaattcagctcgtgttgcagatgagggagagatgctattcagagaggcagaatacagcagaaaagattgctagtttgttgttgaatgaggctaaaacactcagaacaaaggataatacttctgtaattttcttagactttgataccttcaacagattctcttgtaaagttgaatcctagtatgaattaggaatagcgttacagaagtattaatatatttttgttccctcgcaacccaaaaaaaaaaaaa

SEQ ID NO: 5227 - DNA, 1966 bp, Glycine max
ttcctgtctcacccgcccccggttttcgacatcgcatctcacacaatcatcaaatctctctttatatataaccctcacaatgccccacgcgtccgcacacggattcaggcaccttttcaaccgttcactccttcttctgcgtcaccgtcaccatcataatcaccatccctttccttattcttcttctgtttcatccctctccccattttctcgctctcgtttcttgtcctctactcctttctccatggcttctgattcccctttccctgtcaccgctcaaaacatcaaccccaaggttctgaaatgtgagtatgctgttagaggagaggttgtcacacttgcccagaatttgcaaaaggatttacaggccaatccaggttctcacccatttgatgagatactttactgcaacattggaaatcctcagtctctgggccagcagccaataacttttttccgagaggttcttgcattatgtgaccatccagctatattggacaaaagtgaaacacagggtttgttcagtactgatgcaatacagcgagcatggcagattgtggatcagattcctgggagagcaactggtgcctatagccatagtcagggtgtcaagggcttgcgtgatacaatagctgctggaattgaagagcgtgatggttttcctgccaatcctgatgacattttcatgactgatggtgcaagccctgctgtccataatatgatgcaattactcattagatcagaaaatgatggtattctgtgtcccattccacagtaccctctgtactcagcctcaattgccctccatggtggctgcctggtaccttattatctagatgaagcaactggctgggggttggaaatacctgaactcaagaagcaattggaggctgccaagtctaagggcatcaatgttagggctttagttgttataaatcctggcaatccaacggggcaggttcttggtgaggcaaatcagcgagatatagtagagttttgcaagcaagaaggtttggttcttttagctgatgaggtatatcaagaaaatgtttatgttcctgagaagaaatttcactctttcaagaaggtgtctcggtccatgggatatggtgagaatgatatcaccttagtatcttttcaatcagtctccaaaggctatcacggggagtgtgggaaacgaggaggttatatggaggtgactgggttttctgcagaagtgagggaacaaatatataaagtggcatctgtcaacctttgctctaatatctctggtcaaattcttgcaagcttggtcatgagtccacccaaggttggagatgagtcctatgactcattcatggctgagaaggagaatattttggcgtcccttgccaggcgtgcaaagacactagaagatgcattcaacaaattagagggtgtaacatgcaacaaagcagaaggggcaatgtacctgttcccccaaattcgcctgtccgaaaaggctatcaaagctgcagaggctgcaaatgcaacacctgataacttctattgcaaacgcttgcttaatgccacaggagtcgttgttgttcctggttctggttttggacaggttcctggcacatggcattttaggtgcaccatattgcctccagaagaaaagattccggccatcgtcacccgcttgactgagttccatgaaaaattcatggatgagttccgtgactaagtcctacttgaattttatccgtcaatttaagggtacccaattgatatttgatgaggatggattttgtagttagagaaaatagtctcttttgttttcaggaataaatttgtcaactccttatagttgcattttgaatatgcaagacttgaaaggatatttgattttctccattcttatacttgtattaggtcctatataaatctctttttaatcgaataaacttcgtattagaatacccaaaaaaaaaaaaaaagggtagcc

SEQ ID NO: 5228 - DNA, 1878 bp, Glycine max
ggagggaagtggaagctagtagtccgtttcagcgtgtgtgatactttcctttcatcttcttcttctctctgcgataaaagcaaaacctaaaatttggtttaggcataggaatctgttgtagagttgatctacctggaatggagggagcatcgtggaatagtagtgtttgtgtggcaccgtttctgagcaagacctacgacatggttgatgatccttccaccgacttagtggtgtcgtggggcgaaaacaacaactcctttgttgtttggaacgttccccaattcgccacagacatcttgcccaatcattttaagcacaacaacttctccagcttcgtcagacagttgaatacttatggttttagaaaggttgacccagatcgatgggaatttgcaaatgaaggatttttaagaggtgaaaaacaacttttaaaaagtatcagtaggcggaaatctgctcatgtaaatggtagtcaacaagcatctcaagtgcataaatcagctgctggagcatgtgttgaagtggggaaatttgggcttgaggaagaggtggaaagactgaaaagggataagaatgttcttatgcaggaacttgttaggttgagacagaaacagcaagggactgataaccaattgcaaaatgttgggcaacgtgtgcagtcaatggagcagcgtcagcagcaaatgatgtcattcctggctaaggccatgcagagcccaggcttcttagctcaatttgttcagcagcagaatgaaagtagtaaacatatccctgggagcaataaaaagaggaggctccagcgacaagaagaagatagtttagccaccaaggatctccatagttctcttgatggacacattgtcaagtaccagagttccataaatgaggctgcaaaagcattatttcgccagatattgcaaataaacaattctacaacacaatcatcaattaagaaccctgatgttttccttattgatgatattccttctgccattgcatcagatagcagtagttcatccactcaggtttctaatgtgatggttccacctatatctgagctgacgtctatggaagtaggatcacagtttcctctcagttgtatgcccagtaacatatctgaggtgcagtcttcacctgctgttttgggtttctgtagaagtcaggggatggagacagaaagcagtttattgaatcatgagctgaatgttatgggggctgatactaggaacatgggggagatagatatgatgtcaactgttttagatgaggcagacgaagctgatcatttttcacctgacacagatggaatttctaaactcccagaaatcagtgatgaattctgggaactgtttttaaggccaagcccacttacagaagacacagaggaaactaaatgtagctctctaggatgtggtttgactgaagatcagggtttgccttcagaaatgggaaataagcaggaaaattttgatacaatacaacatgttgactgtcttactcaacagatgggacttcatgcattggagtactgattgtgtgtatatatgttactcacaactgaaggttgaggtcccctttgctactgagcagacaaagccatcttacttatacaacaaagaaacctgacagatccaacaacttgatcggtgcttttatccgcttgtaatgtcgtcgtgtgttctgtttgtcattgggggcttaaaaacatacaagttcacgaaacttcatatatctccatgtattttgaattttaataactatgcccccgtttccaatgcgatgatatttttgtggggatgttccgtatacaaaaaaaaaacaaaaaaacaaacttggatcataactcttgaattgctgttgaaaaactaaagtttactg

SEQ ID NO: 5229 - DNA, 1429 bp, Glycine max
tcagctacgtaggcccccccccccccccaagagtgaagagtgaagagtgaagagtgaagtaacaaaacaaaaagagcggagggaaagtcgtgggaacgaagaagccaacaaagacaaatcaaggtgaaaaggaaaaagcccttatgcttttttgagtttgtttctcaccagcttgagttgtttagaagctcatcttaagcattgtggcagacctgagtgagcattttttgagtggaaaatatgagctacagtggctcctcaatgagttctggtagtggatcttctagaaggacatttgagtttggaaggacccatgtggtcagacctaaagggaaacaccaggcaactatagtttggctacatggccttggtgataatggctcaagctggtcccaactcttggaaactcttcctcttccaaatattaaatggatttgcccaactgctcctacacggcctgtagccttatttggtggatttccttgcactgcttggtttgatgctggggagatttcagaagaagctcctagtgatttggaggggttagatgcttctgcagcacacgttgccaatcttttgtcaacagagcctccaaatatcaaacttggtattgggggcttcagtatgtgtgctgcaactgcactatactcagctacatgccatgttttggggcactatggtaatggaaacatttaccctatcaacttaagtgctattgtttctttaagtggctggcttccttgttcaaggaccttgaaaaaccaaattgaacgatcacgtgatggcataaggcgtgcagcatcgttgcccttatttctctgccatggaagaggtgatgatgtggttgcatatgaacatggggagaggtctgcagtgaccttaagttcatcaggattccagaatcttatatttaggagctacaatgggttgggtcactatacagtccctgaagagactgatgaagtttgcaggtggctaactgcaaatttgggactggaggggtttcggttgaactagagaaataaagctcaacaaggtcagattataaaaccttagttttaggcaatgaaagaggggctatagaatacatagtggtgtggtgtagtggggtatattggtaaatggcatagccgctttgttctctctcttatattctcatggtactaaataaatgtttttgaatccaagggtcactcactatctttattgctttgggatttgggaatgctttggtggaaggacatggatagtttccttcacatccagcaaattttgtttatttcattcgggcatggatatgtagtatgttgctttctgtattcatattctgtctaaataaagtcaaattttagtaagtcatatttataaatattgcctatgatttcattatagatatatgaacagaaaaaacctatggttgttggtgggt

SEQ ID NO: 5230 - DNA, 1297 bp, Glycine max
tcgagccgcctcgtaggccccccccccccataattgatttggattgtagtgaagatggaatcggaagagttgctccactaaaaataccttgattaaatatttatatagtgaatagcagcaaagtggcaggagcttgcgtctgcaaattctatgttgtttgatttgcgtgagtgaattgggaagatgctgtgtctgggtcgattcggcggggtctcttacggttggagttggaatcggaggagggacaacaccattaacaggcccagatggcgtttgatggcccaggaatcaccctctctcgactcagacaaaaccgccactgctggattctgcatcattgaaggccccgaaactgtacaggattttgccaagatggagcttcaagaaattcaggacaacattcgaagtcggaggaacaaaatcttcttacacatggaagaggttcgcaggcttaggatacaacaaagaattaaaaacgctgaacttggaattttaagcgaagagcaagagaatgaacttcctaacttcccatcattcattccattcttgcctccattgacttctgcaaacctcaagcaatattatgcaacctgtttttctcttattgccgggataattctttttggtggcctccttgcacctagcttggagcttaagcttggactagggggcacatcttatgcagattttattgaaagtgtgcatctgcctatgcagctgagtcaggttgatcccatagtggcatcattctctggaggagcagttggagtaatctcggcattaatggtggttgagataaacaatgtaaaacagcaggagcagaaaagatgcaaatactgtcttggcactggatatcttgcatgtgctcgctgttcaagcacaggagcacttgttctgattgaaccagtatccacagtcaaaggtggagataagcctctttcaccaccaaaaactgagagatgttcaaattgctctggatctggcaaggttatgtgtccaacatgtctctgcactggaatggccatggcaagcgaacatgatccacgaattgatccttttgattagaggttcaataattatagttatcccgagcagttataagaaaaactagtattttttttgttgaagtggtatttgtttccgagcaggttcaataatttgaaagtggtatttgtttccgtggcggagaaatggattttctgtaaatatgtataaacacttacaagaaaaagaaaattgttaagaataatatagacagtttccttttgtttgaggattaaaaaaaaaaaaaaaaaaa

SEQ ID NO: 5231 - DNA, 994 bp, Glycine max
ggagagagagagaactagtctcgagtttttttttttttttttttttttttttttgcagcaaatatgtcacagagatttgaagctagaaaatacccttttagatggaagccctgcaccccgcctgaaaatttgtgactttggttattccaagtcatcattacttcattcacgaccaaaatcaactgttggaactccagcttatatagcaccagaggttctttccaggagggagtatgatggcaagttggctgatgtatggtcatgtggagtgactctttatgtcatgctggttggagcttatccctttgaggatcaggatgaccctaggaattttaggaaaacaattcagcgtataatggctgttcaatacaaaatccctgattatgttcacatatcccaagactgcagacacctcctttcttgtatatttgtagcaaatccattaaggagaatatctcttaaggaaattaagaaccacccatggtttttaaagaatcttccaagagagctaacagaatcagctcaagctgtctattaccagagaggcaatccaagcttttctgttcaaagtgtggaggagatcatgaaaattgtgggagaggcaagggaccctcctccagtatctaggcttgtcaaaggttttggctgggagggcaaagaagatgaaggggaagaagacgtggaggaagaggaggatgaagaagacgagtatgacaagagggtcaaagaggttcatgcaagtggagaatttcaaatcagttaagcagtataataattcttgtgtacttggttaaagtattatttttttttatgctagaagtcatctatttatgtgtactataatttataataactactataaaccatcgaggcagtttaacttatggcactttccatgtaatgtattagtattacctgtatccccatggaagccgtgtatgagaacagtagttatctgattacttcaaaattactcatgcctgttgtaacccgc

SEQ ID NO: 5232 - DNA, 2328 bp, Glycine max
tagaaaaaataatagttaatagttaatagttaatagttaatagaaaaggatgagaggaatgcatataatatgattatgattatgcagtgctggattgagtcaaaggcaaagaaagagtgaagcagtaaatctatgatctagctatctacatgggtggtggaggaacactcgtgcaagggattcgacgcttgtttaaacgacgcgcttcttctcctgcttctgacgatcacaaccacaacaatgtcaatgccaataatagccgcgttttagtgagagatttgcgcgcgcaattggcttcaattcccaacactcttgaccccgtttccgatttcgatttctctaccttgaagcccatcaaagttcccacaccaatccccttcagaccctcttccatggatcatcacaaaaagggtgcacaagagacagagttttttaccgagtacggggaggcaagtcaatatcagatccaagaggttgttggaaaaggaagttatggtgtcgtgggttctgccattgatactcacacaggtgaaaaggttgcaatcaagaaaatcaatgatgtttttgagcatgtatctgatgccacgcggatccttagagaaattaagctcttgcggttgcttaggcatcctgatatcgtggaaattaagcatattatgcttcctccttcacggagagagttcagggatatctatgttgtgtttgagttgatggaatctgacctccatcaagtaatcaaggcaaatgacgatcttactcctgagcaccatcagtttttcttgtaccaacttcttaggggcctgaaatatatacatacagcaaatgtgtttcatcgtgatttgaagccaaaaaacattcttgctaacgctgattgcaaactaaaaatatgtgattttgggcttgctcgagtttcatttaatgatgctccatcagctatattctggactgactatgttgcaactcggtggtaccgtgcacctgaattatgtggttcttttttctcaaaatacacccctgcaattgatatttggagcattgggtgcatatttgcagaaatgctcactgggaagccattgtttcctgggaaaaatgttgtgcaccaattggatctcatgactgatttgcttgggactcctcctcctgagtccattgcaaggattcgaaatgaaaaggctaaaaggtatcttaatagcatgaggaaaaaacaaccaattccattctcccaaaaatttccaaatgcagatccattggctcttcgtttgctggagcgcctacttgcatttgatccaaaagatcgtccatcagctgaagaggcattatctgatccttacttcactggcttggcgaacatggaccgcgaaccatccactcaacccatttcaaaacttgagtttgaatttgagagaaggaaattgaccaaagatgatgtaagagagttgatttatcgagagattttggagtatcatccccaaatgctccaggaatatcttcgtggtggagatcaaactagcttcatgtatccaagtggggtcgatcggttcaagcgacagtttgcacatcttgaggagcattatggcaaaggtgaacgaagcactccaccattgcagagacagcatgcctccttacctagagagcgagtttgtgctcccaaggatgaaagtaaacaaaacaacgattctgaaaagccaagtggatcaaatcttcagcagagtcctccaggttctgatgagacaggtgctcaaaatggaacctccaaaccaaactacagtgcacgtagcttgttgaagagtgccagcattagtgcttccaagtgtgtagttttgaaacaaaataaagatccagagcaagagccaattacggaggtaaatgatgaggcagtggatggagtgacaggtgagattgctgccctccatgcttgattataactttggtggtttgaagcactacatgcaaatcctcctcgttgttagtgctaggactcatttagtcatgaactgccatcttgtattactgttgtaattatttattttgtgtacggaaatgcaatgtatactagtcacattttattatgaaactaaaaaggagacaatgttagcaaaacatgctcttcccctgtcgttggaggcctcagatacaacgcattcgactccgctaagaaactgcaggttgtgcagttgtgggtttattaaattttattttattttaaaatattaattgttatgcaataaattgaatgattgggattcatgcagttctctgagtaactctagaggatcgaaatccgttgattctcaagaaagattaagttgttgagagctgagactttat

SEQ ID NO: 5233 - DNA, 1466 bp, Glycine max
gataaaattaaaaagtcatgataacaaaaaattggaagagagagattaagcaggtggcgcccaaagagttaggtgtaccaacctcatagcactaataacaccgccctcagctacgtaggccccccccccgctaattggaaaattcgtataggaacacaaaaaatggcagatattcctcgggtgaagcttggaagccaaggcctggaggtttccaagttaggatttggttgtatgggcctaagtggagtgtacaacgatcctgttcccgaagaggttggcatctctttgatcaaacacgcattcaccaaaggggtcactttctttgattctgcagatttttatggagcacgtgccaatgaagttttggtcggaaaggctctcagggactttcctcgagatcaatttcagattgccacaaagtttgggattgtcaaaatggaaaatggtaatgtgatagtgaacggttcccctgaatatgttcggtcctgttgcgagggtagcctccaacgccttggtgtcagctacattgatctctattatcagcaccgtgttgacacaactgtacccattgaagacaccatgggagagcttaaaaggctggtccaagagggaaaaataaggtacataggattgtcggaagctagccctgacacaattaggagggcacatgctgttcatcccattactgctgtgcaactggagtggtccctttggactcgtgaaattgagcaagatattgttccactttgcagggaacttggaattggaatagtaccatacagcccccttggccgtggattttttggtggcaaggctgtcgtagaaagtatacctgcaaacagttttctggcatttcaaccaaggttacgaggggagaactttgacaagaacaaaatcttatattctaggatagaaaaattggcagagaagtatggatgtacatcttcgcaacttgctcttgcatggattcttcatcaaggagacgatgtggtacccatccctggaacaactaagataaaaaatcttgatagtaatatcggttcatgtgaagtgaaactcagcaaagatgatttaaaggagattacagatgctgtaccaatatctgaggtggcaggggatcggaccactgatgcatttgttagatgttcatggaagtttgctaatactccaccaaaagcataactatatataccagttatgcacttatgcaccttagatctcagatctttcttttcatctagtttcgtatctccttgcgtgctccaaaatttaatccgctctcaataaaactaattgccattggtcctatacggacaactcacaaaacttatgttgtatgcttaattatgcacatcttattaaataatgagagagtgagactcatctgaagccaagatatccatctttgtgtcaaaaaaaaaaaaaaaaaaatgttttactgattattttttagagacaaaaaaaaa

SEQ ID NO: 5234 - DNA, 1531 bp, Glycine max
tcagctacgtaggccccccccccaacacattacatatctttttttgttcagaaagccgcttccatgagcgcgagcaacaaatggagagcaatgtcgcaccaccagcatcagcctctgtgcacgcgcacgcaccagatcggcgccctcctcctcgtggcgaccaccttcttcttcacgagaatgctttccacctccacgctctccaccagcgtcgtccacgtgtcgcaaccccggttccagtgggggcagtcccagctatccctcaagatctacgtctaccaagaagacgaaatcgacggtttgaaggagctcttgcgcggaagggacgctaagatcacagacgaagcttgcctcaaaggccagtggggcagtcaggtgaaaatacacaagttacttctgcaatcgaaacaacggacatggaagaaggaggaagcggatttgtttttcgtcccatcttatgtgaaatgtgcgcgaatgatgggtggccttaacgacaaagaaattaacagcacctatgtcaaagtcataagtcaaatgccgtattttcgattatctggaggccgcaaccatatatttgttttccccagtggagctggtgctcatttgttcaagtcatgggcaacgtatataaaccgttccattattcttacgccagagggggatcggactgacaagagagatacaagtgcctttaatacatggaaagatataatcattccaggtaatattgatgatggtatgactaaaactggggataccacggtccagcctttgcctctgtcaaagcggaagtacttagctaattatttagggcgtgcacaaggaaaagcaggtcgtcttaagcttatagagctttcaaagcagtttcctgagaagttggaatgtccagatttgaaattcagtggacctgacaagttgggaaggaaagaatattttgaacacctacgcaattccaagttttgcctcgctccacgtggggagtcatcttggacccttcgcttctacgagtccttttttgtggaatgtgttccagttatattatcagatcaaatagaattgccattccagaatgtcatcgactatagccagatatcaataaaatggccatccagtcaaataggccccgaactattgcagtacctggaatctataccagatgaagaaatagaaaaaataatagcccgtggtcgacaagttaggtgctggtgggtgtatgcttcagattcagaatcttgttcagctatgcgtggaattatgtgggaacttcaaaggaaagtgaggcaatttcaccactcagctgaaacattttggttgcacaatggatctattgtaaacagaaacttggttgaatttcccaaatgggaactccctgtgcctttgccttgataagctagaagatagttaatttcttgtataaattaatttttcttataccttgatattccagtattatttctttacaagcacatttcaggtgctcttgattttcatcctcatctactattataaacaaaaaaaaaaaaaaaaatcg

SEQ ID NO: 5235 - DNA, 1281 bp, Glycine max
aattgaaacatacaagtacgacacttccatcttcatcgtaaacaaacctcaaagttgcattccaccatgtctaaacaacccattgatccctttcgccacatcaacatagttctcaaccctaacggaaccctaaatcgcttgcgccatattcccagcaccgcaccctcttccgaccccactctcccagttctcaccaaagacatcaccatcaaccaacaaaacaacacatggctccgcttattcctcccccgaatagcactatccccaaaccctaagaagctacctctcatcgttttcttccacggcagcggcttcatcgtaaccagcgccgcctccactatgttccacgacttctgcgccgccatgtccgccgccgtccccgccgtggtggcctctgtcgaataccgcctcgcgccggagcaccgtctcccggcggcgtatgacgacgcggcggaagccttggagtttatccgagacagcagcgaggaagaagaatggttgaccaaacacgccgacatgtctaattgctatctcatggggagcagtgcgggggccacaatcgcctacttcgcgggtctacgcgcgaccgacacggcgagcgatctctcgccgttgaagatcagagggctgatattgcggcaggtgtttttcggtgggacccagaggagcaaatccgaggttaggctggagaacgacgaggttcttccgctgtgtgtgacggatttgttgtgggagctggcgctgccggttggcgttgaccgtgatcacgagtattgcaatccgagggctgagaagtgggttgggaaaatggggaagatgagggagctagggtggagggtgttggtgagtgggaatggaggggaccctgtgattgatcgtgagaaggacttggtgttgttgttggaggagaagggtgtggttgtggtgagtgattttgatgaagaagggtgccatggggtggagtttggtgatgaatccaaagcaaaccaactcattcaggtagtcaaacgttttgtttcatgaatccaaggatagtacaagctcatgatttttctcttttctttttgagatcatcctagtatgaaccttatgttagttcttgtcttgtgcttacctttcctcttcatatatggttgatagagttattatcttagggaaatgctactagtacttttctttccaggcatctaagaaattgcagaaattgtctgaaaagtgagtcatgtaatggaaaagtgatcaaactaataaattaaatttataggaaaaaaaaaaaaaaaa

SEQ ID NO: 5236 - DNA, 1775 bp, Glycine max
  misc_feature (1766)..(1766): n is a, c, g, or t
cgacattgagttgggaaactcttgttacccaatggttcttgttcaagtccccatgtacaacgaaagagaggtttatcagttgtctattggagcagcatgtgggctttcttggccttcagataggatcatcatacaagtccttgatgactccactgacccaacaatcaaggagttggtgcagcttgaatgccaaagatgggcaagcaaaggggtgaacataaagtatgaggttagggacaataggaatgggtacaaagcaggggctctcaaagaaggcatcccgcgtccggcatacgtgaaacaatgtgattgtgttgctatctttgacgctgattttcaaccagagcctgatttcctgtggcggaccgttccatttctcgtgcacaatcccgaattagccctcattcaagcacgggggaaatttgtgaatgccgatgaatgtttgatgacccgaatgcaagagatgtcactagattaccattttactgtggaacaagaagtggggtcttccacttacgccttctttggtttcatcggctccgcgggccccccccccccttcggcgctgaatgaggctggtggatggaaggataggaccacagtggaagatatggacttggccgtgcgagccagtctcaaaggatggaaattcttatacttgtcagacttgaaggttaaaaatgagttgccaagtactttcaaggcctaccgctaccaacagcaccgttggtcttgtggtccagccaatctttttaggaaaatggtcatggagatcataaataacaagaaagtgtcattgtggaagaagatacatgtgatttacagcttcttctttgttcggaaggtcgtagcacacataaacacgtttgtgttttattgcattgtattacctgcaacagttttggtgcctgaggttgtggtcccaaagtggggagctgtctatatcccttccatcatcactattcttaatgcagttggaactccaaggtcactccatttgatggtcttctggattctctttgagaatgtcatgtctctgcatcgaacaaaggcaacgattattggtttacttgaggcaagtcgagtgaacgaatgggttgtcactgaaaaacttggtgatgctctcaagactaaagcaggaggtaaagcacctaaaaagcctcgattcaggattggagacaggattcacttgttggaacttggtgtcgcattctacctcttcttttgtggctgctatgatattatgtttgggaaaaaccacttcttcatcttcctctttatccaatctttggccttcctcatcatggcatttggatatgttggcaccattgttcccaactcctaagaaggattcggcacttcattcggctatttcagcttctgtgccttcatgtcaacgtgtattgtagtgttttcaacatagttctggaaaatcacagcttgttactataaaaaagaaagggtggtcattcttcaaggtgttgcataatcagagtcagtgactccaaagagttacttttcttgtgaatataccgcaaagatatataagcaaattactgaaattcttctcatgaaaggtaagtatacagaacaagatcgcagcaatcatgtggcatcgatcctccggggagcaaacattggatggattgtttataagattttgtagttttttttttttaacttttgcttttctttacattgtatttgtttgaagaaataaacagcttcaagaaatgggataaaatacacagtttcattttgcattnaaaaaaaaa

SEQ ID NO: 5237 - DNA, 1675 bp, Glycine max
cgagaagacgacagaacggagaccacagactagtttttcttccacctcttggtcataggccaaaatggtgtcaccacatctaattctatacataactcttcccatgcttttgttgttcttctaccaatatcgcagagcgttcaagaactcaacccttccacctggtcctagaggccttcccataatagggaatcttcatcagctaaatagttcttctctttatctgcaactatggcaactctcaaagaaatacggtcctctattttctcttcaattaggtttaagaccagccatagttgtttcctcccataaattggccagagaggcattgaaagacaacgaccttgagtttagtggacgacctaaattacttggccagcagaaactgtcctacaatgggttagagatgatattttccccatatggtgagttttggagacaaattagaaaaatttgtgttgtccatgtccttagctcaagacgtgtctcaagattttcctcaataagaaactttgaggtcaagcaaatgattaaaagaatatccttgcacgcctcatcttcaaaagttacaaatttgaatgaagtgctaatgtctcttactagcactattatatgtagaattgcctttgggagaagctatgaagatgaagaaaccgaaaggagtaagttccatggtatgctaaatgagtgtcaagccatgtggggaaccttgtttatctcagattatattcctttcttgggttggattgataaactgaggggactgcatgcacgtcttgaacggaatttcaaggagttggatgagttctaccaagaagttattgatgaacacatgaatcctaatagaaagaccacaaagaatgaggatataacagatgtgttgcttcaactgaagaagcagcgtttgtattccatagatctcacaaatgatcacatcaaagcggtgctcatggacatgcttgtggcagcaacggatacaacttcaaccacaacagtgtgggctatggttgctctactaaagaatccaagagtaatgaagaaagttcaagaagaaattaggactttgggaggtaaaaaagattttctagatgaagatgatattcagaaatttccctatttcaaggctgtgataaaagagacactgagactgtatctaccagcaccgttgctggtgcaaagagaaacaaatgaagcatgtattatagatggttatgaaattccagcaaaaacaatagtctatgtgaatgcttgggctatccatagagaccctaaggtttggaaagacccagatgagtttttacccgagaggttcttagataatactatagattttcgaggtcaagattttgagttaattccatttggtgctggtcgtagaatatgccctggcatgcctatggcaattgcttcattggatcttattcttgctaatcttcttaattcttttaattgggaattgccagcaggaatgacaaaagaagacattgatactgaaatgttgccaggacttagtcagcataagaagaaccctctttatgttttggccaagtgtagaatctaaaattatgattaatgaaaaatgtactgattctgtttgtaccctgcccataagaatataagataggtaaataagggtaggtcgatgttatctcttagtgcactctacttttaccct

SEQ ID NO: 5238 - DNA, 1187 bp, Glycine max
gcaaatgctcttcgaccagcagcaaagagaaattcaggagctaaggcatagtcttcactccacaaaagatggtatgcagttcatgcaaatgaaatttcacgaagacttctccaatcttggcacgcacattcatggcttagctaatgctgcttctggatatcatagagttcttgaagaaaatcgcaaactatacaatcaagtccaggatcttaagggaagtattagggtgtactgtcgagtaagacccttctttcctggacaatcaaaccatttgagtgcagtggaaaatatagaagatggaaccatcacagttaatattccttcaaagaatgggaagggacgaaggtccttcaactttaacaaaatttttggaccatctgctacccaagccgaggtcttcctagatatgcagccactcgttaggtctgttcttgatggttttaatgtttgcatatttgcatatggccaaacaggatcaggaaaaacttacactatgactggacccaaagagatcacagagaaaagccaaggtgtaaattacagggctctaagtgatttgtttcttatagcagatcaaaggagggacactgtccactatgacgtttctgttcaaatgattgagatttacaatgagcaagtcagggatctgctggtcactgatggaacaaacaaaagattagaaattcgaagtagttcacaaaaaggactcagcgtgccagatgcaagccttgtccctgtatcatctactattgatgttattgaactaatgaaccttgggcaaaggaaccgtgcagttggagcaacagcccttaatgaccgcagtagccgatctcatagttgcttgactgttcatgttcaaggaagagatttgacatctggagctatccttcgtggttgcatgcatttggttgacttggcaggaagtgagagggtggataaatctgatgccacaggagatagactaaaacaagcccagcatattaacaaatctctttcagctttgggagatgtcattgcttcccttgctcagaaaaactcacacgtaccttacagaaatagtaaactcacacaactactccaagatttacttggaggacaggccaagacactaatgtttgttcacataagtccagagagtgatgctattggagaaacaattaggaccttaaaatttgctgaaagagttg

SEQ ID NO: 5239 - DNA, 728 bp, Glycine max
ggcataaattagtgtgctatgtcagtgttggcaaatttatgttttggtatataataagtatccttttcattttaagaggtgataagggagactccatgaaggtgtcatatttataccagctagaaagattgaatgggggagctgttgtgggagagattagcagaaggttctctacaaatgagaacacattgacagttggatgtttatatgtggttgattctcagacagctttgaaggcaaagctgaacaatcacggcaaccttggggccttattgcagcatgagctaacacgtaagtcattcttgacaatctcgagtgcttttgaaacaaaggatttggacaagagtcccaagtttggtttcacactattgctcaagccttaatgggttcataagttgagttagtatattaagttatattgtcacaccttccttcagttaagttcaacgtaaggaagaaagttgagaaaattgatataagattgttgatgtattttttttcttattatcttcaaatgattgattggacagcttgagattagaaaggcattttcactaggaatgaatctaaattttttatggcatctgattcagaactagttgttcgaaaaaaattaagctattatttatcctgatcttctgattattgtctgaagtttttgaattttgtgttgagcatattgacttttccgtatgttgcataattcatgcacacttaactgtatatat

SEQ ID NO: 5240 - DNA, 1278 bp, Glycine max
  misc_feature (18)..(18): n is a, c, g, or t
ctcgagcctataaacttncttggtaactttgaaacatgatgataagttacaggatggatcagaatgtgctattcagtgtgcccttctttacacaactgtgtatggccaaaggagaatacgtgtcataaccttgtctctgcccgtcactagtatgctcagtaatctgttccgtgcagctgacttggatactcaattttgctgtttcttgaagcaagctgctagtgagattccgtcaaagccactcccacttgttcgggaacaagtgacaaacctttgcatcaatgcactattttcataccggtaactcggtgtcagctccgcctcatctggacaacttattcttccggaggcactaaagcttttgcccctgtacacacttgcattaactaagagtacagggttgcgaacagaaggaaagatagatgaacggtcattttggataaactatgtatcctctatctctgctccattagcaataccacttgtgtatcctaggatgatggctatccatgatcttgactcaaaggaagatgatgactctgttattcctccctttcttcctctttctagtgaacacatcagtgatgatggaatatatcttcttgagaatggtcatgattgtttgatatatgttggagactctgtgaatccagacatcgtgcagaaactgtttggtgttgctacagttgacaaagtccctaccctgtttgtattgcagcagtacgacaatccactatcaaagaagttaaatgaagtggtaaatgagatacggcggcaaagatgttcctacttccggttcaagctctgcaggaaaggagatccatcaggaatgctattcttctcgtatatgatagaagacaagagcgcaggtggcttctcctatgtagagtttcttatccatgttcataggcaaattcaaaataaaatgtcatcataacgagtatatggcagcttcatttttgcaagcttttagacctaaatgatagagcaagccccaagtataggtgagattctgcatatttatgtgcattcaattgccttgagtttgacagaggaataccagaagacacaagttttgttgatgtacatgtataagttaattaatgttggtgatagttggatttttctgaggaagtttttacttttttttgggttttatagttacctgacaaatcaaattttattggcaattgtgttttcatgcgggatattaacaatgtgtctcatttatattttaataaatagagagaggacaaagataagtactccctccattcc

SEQ ID NO: 5241 - DNA, 1440 bp, Glycine max
  misc_feature (1433)..(1434): n is a, c, g, or t
tacggctgcgagaagacgacagaagggggtgtgttgtgtgtgagaaagaacctctctctctcatttgtttcggtttggtcgtgcccactgtcctgtttgtttcggtttctgttttcctttgaaagcagaagaatcaaatcaaatcaatccttcaccgttcgttcattcgttcaattcaattgaattcctttccttcggtttttcttttttttttcccctcaaaaataaaaaatcggaactttgctttaaacgtggaaccccaccctgagatttcgcccccagaatcttgatccctttatccagaagggtccttgttggtttttttcccattggggttcttgttgttgtggttcattgctcgtggaaaagaaatggcgacgagtatagggataatggatagcgcttactttgtcggcagaaacgagattctcagttggatcaacaatcgccttcaacttagcctctctcgcattgaggaggctgcatccggtgctgtacaatgccagatgatggacatgacatatccaggggttgttccaatgcacaaggtgaattttgatgcaaagactgagtatgatatgatccagaactacaaagttctacaggatgtgttcaacaagctgaaaattgaaaagcatattgaagttggcaggcttgttaaaggtcgacctttggacaacctggaattcctacaatggctgaaacgctactgtgattctgtaaatggtggcattatgaatgagaactacaatcctgtagagcgtaggattaagggtggaaaggaccggaatgttaagagtctaaagagctcaaaatcactgcaaacaaatactatgaatcattctggttcaggcgactcactcaggtccaagcaattgaggtcaagtggaggagctgacggggttaattcttcagcagagatacaagctttgtccaagcaggtttctgatcttaaactctcagtggatcacttggaaaaagaaagagacttttactttgcaaaactaagggatatagaaattctctgccaggcttcagaactagagaacgatcctatgtctctagcaatcaagaagattctgtatgctgctgatgcaaaaggatcagcattagatgaagctcaggagtaccttaatgatgtcatcaatggcggtgaagatgaagctgaagcagaagcagaagctgaagtagaaactgaagcctgattatgattactcttacaaatagatcctggctggtccttgttaaacaagcttagtttcatctgtgatgactgagactggtaatctgccatggccatgaattacctaatgacatagatgtagttgtatggatccttttgttttcttcttgtgagcctggatggataatcagatattctggttgatgtttccaataaataaagttttatctcattgtcctttatatcaaannaaaaga

SEQ ID NO: 5242 - DNA, 2069 bp, Glycine max
  misc_feature (2059)..(2067): n is a, c, g, or t
cgaagaaaaaaatagaggctgggatggttagttcagaaatggataattctgaattgcatcttactgatatgggtacagcagatatagaactggaaatcaagccacagaaaaagacattcactttgatcacaccaacagtgtcagctacgtaggcccccccccttatacatcttctttcagcagtccgcacggcaatgattagtccacatgcggaggacagtttagaaatggggaaacccatagaagagctgaacaaagcaccggaaggcactgcaaatggtgatctttctaacagtaagacagatgccaattgtgagtctgctgaccatccgaacatgccttctcttactgttccagagattgttaatcgtgtgagatcaaaccctggtgatccttgcattcttgagacacaagagccactgcaggatttggtcagaggtgttctgaagatattttcttccaaaacagcacccttaggagcaaagggttggaaggtactcgcagtttatgaaaaatctaccagaagttggtcatggactggcccagttattcataattcacctgactatgataccactgaggaggtgacatctcctgaagcttggggtcttccacataagatgcttgtcaagttggttgattcctttgccaattggttgaaatgtggtcaggaaactcttcaacaaataggaagtcttcctgctccgcctttggcattgatgcaagtcaaccttgatgagaaggaaaggtttagggatctgagggctcagaagagtcttaacaccataagccctagctcagaggaagtgaggacttattttaggaaggaggaggttctcaggtactcaattcctgacagagccttttcatatactgcagctgatggtaaaaaatctattgtggcacccttgagaagatgtggtggtaagccaacatcaaaagcccgagaccattttatgttgaaacgtgatcgaccaccacatgttacaattctttgtcttgtaagagatgctgcagctagattacctggaagtattggcactagagcagatgtttgtactttaattcgagattctcaatatattgttgaagatgtttctgatgcacaaattaaccaagtagttagtggagccttggatagattgcattatgaacgtgatccttgtgtacaatttgatggggaaaggaaactgtgggtttacttgcatagagaaagagaagaagaagattttgaggatgatggcacttcatccacaaagaaatggaagaggcagaaaaaggatgctgcagatcaatctgatcaaggaacagtaactgttgcttgtcctggaactggggagcaaagcggatatgatttgtgctcagatctcaatgtggatccaccaccatgcattgatgatgataagggaatggaacctttgtctactgatacaaggccaaatgcagaggcacatgttgatgtcaatcgagcttctgaagaaggcaatgtttgtgatggtaattcaatggcttgggaggctcttgatttaaatcctactcgagagttatgccaagaaaattcaacaaacgaagattttgatgaagaatcctttgggagagaaaggcccgttggactattaagtgcaagcttgttgtgaagaattcttcaggcttttggtccatgggcactcgagttcggtcatgcttgttgtagctgtgccacctttgtatattgatttgatctcgaagaatagaatagaatgtgatcttgttgaagatcataaaatttggttagtttaggtggatgttttaacgactttacatcccataaataataccttttgagttgaaatttctaatgatctgtagcttcttgtgcgatgtggcgttgttgtattgcatcgcaaaattctgtagatatggcttaattaagacaatgatgtcagtaaatccaataaatctgttcacccaaatgaacaggacaaaatattaattacactcacaaggaaaaacagaagacgttattggtcaaaaaaaaaaaaaaaaaaaaaaaaaaaaaaaaaaaaaaaaaaaaaaaaannnnnnnnngg

SEQ ID NO: 5243 - DNA, 1960 bp, Glycine max
tttttaagagagaaagtgtggtatatatgcataataaccaggtacaacagagtaatgtcataacatgaaatccttgctatatatatatatatagtgaaactcgcttatatctaaacatgcacacatgcatccacacaatacaaaaaaaccaaaccacatgataaccaaggaacaacacagtcatgtcataacatgaaatcctaggtatatatatagagtctaactagcttatatctaaacatgcatccacacaatacaaaaaaaccaaatccattggggaattttcatctgcgcttaactgtaataggactccttactatatgctttccatctgtccaacgcaaatccccgaattgatactttctccgcgtagttacactgcttgcctgcacaataacttggaatttcttcttttccccaattttcgtgaaagtcaaggatcttggcacaacgacaatggtatatccagcaggcgagtggacatttgcagtgtatgtggctggtggtccaacatttgtgactgtgcgagtaatggttacgggttttaggccaagatttggtaatgtgattgaagggtagttcaagtctgttacgctgtgagaccctttacaaatgaatgtgccattgaaattgagtgcggagatgagttgttggtcgtatccggaagcacacaaaaagttcaagtaatcagcgaggcttagatcataaacaagtcccggatctatggcaaggtccggttgcacatgtcctgaaccatatgcaaaggcatctgccactttattatcaaacgcatcctttattggcctatttgtgttgtcacgtgtggttgctgtggtcatgattgctgatttaatagctgcaggactccaattaggatgaagtgttttgataagtccagcaataccaacgacatgaggacaagacatagaagttccttgtaatacattgaatttaaaccctcgacgagtgtctactagcaagttcgatgcacttgccaattctgaataggcagcaagtatgttcacaccaggcgcagtcacatcgggcttgagtattgatggttgaatcttattgggtcctctagatgaaaatgaagccataactggagctggctttcttccaaataatgttcttgctggggacattcttattgtatcacccgtttttatagggatgtcgtcctcgtccccaatggcagttatgtaaccaggctgtgcccctgcatgtcctttactgtcggtcacagtagacaaaacatgaggctctgcaagaagggttctcccattttgcttttgattgcccaaaagcattgccacggcgcctttagatagagcttcctgaccctcgccaacggattttatttttccatctctaatacaacgcactattttccgttttactttttcaggatcaagtgttccaggcctacaaagttcagcatctcgaaatgtcgcattagcaagcttagcatcagtcgcaaggatcagagaaaaggctttattgggtggcaaatttacgaaaagactggctcccgtaatttgcctattgttgatggttaaattactgctaaagtctctgtctaatgtgctagcagcaattgtgaagacccaaggagccacattgagaacagttccaggtgtgggtccatcattccctgcagaggcaactaaaattctgtttctagcaattgcatgaaatgccccaatggaaacctcatctgtgaatattccttctggagtcacaacgtagcttccaccagcagaaagactgatgatatcaacgccatcatctatggcttggtcaatagcagctaacacatcagcgccatgggggggggggggggcctacgtagctgaccccactttgtaagctgcaaccctagctcttggtgacccaccctttgcagtgccattgccaacggcaaatacactcgctcctgggacaaaatcggacgcgtggg

SEQ ID NO: 5244 - DNA, 944 bp, Glycine max
atatatcatctcagttgagttctctcattttgggcattggagagattggaacacccccccaaaacaagccccaattatggctctgaatctttgtatctcacctaactgtaaatgggtttcatctcctgcttccttagatagtgcatcttctttgagatcttcacttggttcttgttttggtaacataaacattgctagtgtgagtttaagcactagtagaagtttgagtttgaggaggagtgggagtgttagtgtaagatctagtttggaaactacggggcccacagttacagtgggacaggtcactgaggttaacaaggataccttctggccgatcgttaaggctgccggggataaaaccgttgtccttgacatgtacacacaatggtgtggcccttgcaaagtgatggctccaaagtttcaagaattatctgaaaagtatctggatgttgtctttctaaagcttgattgcaaccaagagaacaggcccttggcaaaagagctgggaattaacgtggttcccacttttaaaattctgaaggacaacaaggttgtaaaagaagttactggagctaaatacgatgatttggttgatgccattgacaaagttcgatctagctaaaaatatatatgactattctctttctatgtaaaaataatatgcttgactccctctgtaagtattttatgcaattgtaagctgatgaatgatgatgattggaagatgaagaaatgtcatcatgtgattgttgcaagaaatagtagtttattccctattccctaagtccagggaagggttcctcaattatttaagtcatcaacttgatcgtggcctggctgatatttttaaaaataaaatagaaatggctgtgataaatgtggatatcgaatcagagatgtcaggtatatctaatccagaggtattttagtaagctaaaaaaaaa

SEQ ID NO: 5245 - DNA, 564 bp, Glycine max
attagggattccctccctcctccgcctcttgtcactcacacagaaaagaccgttgaatttcaaacctcagccatgcccgctctcagaaagcgaaatcgattgtcggagttcgatgccatatccaaccacgacacacctcatgaacagaagaagaatatgtctgagtacgagctgtcgagagagcagagaatccgcgaaaaccgcgagagaatgggaaagctgggaatcttggacctttccctcactctcaagctcaacaacaaaaacaaaagatcctattcctctcacaaaccccaaacccctccttctcttccaaactcctccgtccccgttcgccgctcttccaggttgcagaatgtgactcctgttagttactccgaagttcccccaaagaaagacgagtttaagaaaaatggaagggtggtcattgaacaaggtgccaagccagaggtgtactctgaagaacacgagaagctgttgggaaacaccgacaagccctggacgctccttcaccatggtgttggcaaaaatgggaaaccaatttatgactccgcccagggaaaa

SEQ ID NO: 5246 - DNA, 851 bp, Glycine max
atcagcattcagcatcgcttttttctattcaacgactccgttccgttctctttcttcttcttcgaaaccctaataagcttctgcacttccttctgattccacttttggtaatataagcccctcctcttcttctcagatctgaaactacttgttttaactttttctattcaacgactccgttccgttctctttcttcttcttcgaaaccctaataagcttctgcacttccttctgattccacttttgcttcaactgggaagatactgtagggcctgggccacctaatgatgagatatccaatttctacataagttgccattgatacttttttaatcaaatggattcagtgcctgctgatgtgtctaattcacatactattaatgacccgtcgaagtcacctccggctaaagagactgacagacaagcttctgcttctgtagcctccgggcaagataattctccacatgaggcatcacctaggctatctcccacgggcatatcatcctgggccaaaaacttgaaaatttctcagccattttctggctcccaagacgactcatcaagtggaaatgttgggagattcacgagcagttttgtcacgcagcgcgggggctgtccggttgactattgatcatgagcccaataccgagaggggcatcattgagaacaaaggtggctttgtctcaaacatgccaggagacgttgcaagagtaaatgggcagcttgcagtttctcgagcatttggagacaaaaatctaaaatcacacttacgatctgatcctgatatacgatatgttgatattgacctagatgctgagcttttgatacttgccagtgatggtctttggaag

SEQ ID NO: 5247 - DNA, 1506 bp, Glycine max
  misc_feature (1506)..(1506): n is a, c, g, or t
tcagctacgtaggcccccccccccccgaaactcaccataaggataaatacaaagtttataatctttgttctgagcggttgtatgatgcatcattgtttgaggggaaggtggctagcttcccatttgatgaccacaattgcccaccaattcaactgattatatcattctgtcaaagtgcttactcatggttgaaagaagacattgagaatgttgtggttgtccactgtaaggctggaatggcaaggactgggttgatgatttctagtcttctagtgttcttaaagttcttcccaactgctgaggaatcaatggattactataatcagaaaagatgtgttgatggaaagggacttgttctgcctagtcagattaggtatgtcaaatattttgaacgagtcttgacttactttaatggtgaaaacccacctgcccgcaggtgcatgcttaggggattccggcttcacagatgcccttactggattaggccctctataaccgtctcagatcacagtggtgtgttgttctcaaccaaaaagcatccgagaaccaaggatcttttgccagaagatttttggtttggtgcaccaaagaagggagtgatggtctttgccttgccaggagagcctggtcttacagagttggctggggacttcaaaatccattttcatgaccgccaaggagatttttactgttggttgaacacaactatgacagaaaataggaaagtattgaacaccagtgatctggatggctttgacaagagaaaattgccttctccgggatttatggttgaggttgtgctggtggattataatggcaatgttgtaacttctaaaattgaaactactacaaagaaatcagatgagagttcaagtaacaatcctgccagttccgccccagtggaaaggagcaccacccctgcacagaatgcagacaaagaatcagatagtcatgataaagatgacgtgttttcagatggcgaggcagagcaatctgcttcttcaagaagcaagcaaacaaaagcaccttctgaagcagttgaaacagttacaaatgacaccagaatctccgaatcaaacagagtttcaaatgaaattgcaaatttatcacatgcaacagagcaagtttccttgggaaacaagagctctacgccaattcgtcatgctagtgagccaggaagtaatgttgatggaaaaacagtgtccagtctcgaggtgcccagtgcagaaagtgagtttaaggccatggctgctgatgcttctgtttttacctttggagatgatgaagactacgaaagtgattgaactacaacaagaagggttactttgttatcttaatacttcaaatttgtacataaaattgcttgcaagttcctacacaacaatattttggtcatccatttgtttgtttgttgtaattataaatttggctatttcattggcttaatgcacaagttaaaaataagaatatgaaaatgtattggtctaaaaaaaaaaaaaaaaaaan

SEQ ID NO: 5248 - DNA, 1524 bp, Glycine max
tcgagatactgtagggcctgggccacctaatgatgagatatccaatttctacataagttgccattgatacttcctcgcgcccgtggattcagtgcctgctgatgtgtctaattcacatactattaatgacccgtcgaagtcacctccggctaaagagactgacagacaagcttctgcttctgtagcctccgggcaagataattctccacatgaggcatcacctaggctatctcccacgggcatatcatcctgggccaaaaacttgaaaatttctcagccattttctggctcccaagacgactcatcaagtggaaatgttgggaaatcaacttttgcacgcatcacaagtaatttcggattgaggttgtctccaaagtctcctgtagaagatgacagttccagtgaaacagctggacaatctaatttgtttggaactattacgaaaggcctggtcgactcttctaagaatgcagtgaaagctgtgcaggttaaggcacggcatgttgtttcacagaataaacgcagataccaggaaggaggttttgatttagatatgacatatatcactgaaaacattattgcaatgggattccctgctggcgacatgagctctgggtttttcggctatgttgagggattttacagaaatcacatggaagaagtgattaagttttttgaaactcaccataaggataaatacaaagtttataatctttgttctgagcggttgtatgatgcatcattgtttgaggggaaggtggctagcttcccatttgatgaccacaattgcccaccaattcaactgattatatcattctgtcaaagtgcttactcatggttgaaagaagacattgagaatgttgtggttgtccactgtaaggctggaatggcaaggactgggttgatgatttctagtcttctagtgttcttaaagttcttcccaactgctgaggaatcaatggattactataatcagaaaagatgtgttgatggaaagggacttgttctgcctagtcagattaggtatgtcaaatattttgaacgagtcttgacttactttaatggtgaaaacccaccggcccgcaggtgcatgcttaggggattccggcttctcagatgcccttactggattaggccctctataaccgtctcagatcacagtggtgtgttgttctcaaccaaaaagcatctgagaaccagggagcttttgccagaagatttttggtttagtgcgccaaaaaagggagtgatggtctttgctttgccgggagagcctggccttaccgagttggctggggacttcaaaatccattttcatgatcgccaaggagatttttactgttggttgaacacaactatgacagaaaataggaaagtattgaacaccagtgatctggatggctttgacaagagaaaattgccttctccgggatttatggttgaggttgtgctggtggattataatggccatgatgtaacttctaaaactgaaactactacaaagaaatcagatgagagttcaag

SEQ ID NO: 5249 - DNA, 3016 bp, Glycine max
cgccacctactgaaacaacttagttcatcctcttccttctttctccaccaaaccttaaacctttaactctaaactcgcatataacccaatcaaatttgcctttagattctcatttcccatcaaactatatatatttctctctctctctctctctgtatccttggaatccaaaatattccaactaaacgtttcttcctttcatggcagatcctacccgtctttcattcagttcaatctcatacttgtcggtgtttctctaatgcaattagttgttgatgaatgagaagaggaacccaaagcgtcaaaaatcactgcctttcaacatgcctgtgacagactcaaataatccacagaattttgatgacaacattcttttccccgttgaagagattgtacaatacccattgcctggatatgtgtcaccgacttcaataagttttagtccagatgatagtttaatttcttatttatttagtcctgataactctttaaacagaaaggtttatgcttttgatctgaagacctatacacaagaattgttattcagtccccctgatggtggacttgatgaaagtaatatttctccagaagaaaagttgaggagggagaggttgagggagcgtggtttaggtgtgacacggtatgaatgggtgaagacaagctcaaaaaggaaagcagtcatggtgccattgcctgctggggtttatatccaggacattccccattcaaaagcagagctcaagcttccaagtgtatcaggttcacccattattgatccacatctctctccagatgggtcaatgcttgcctatgtaagagactgtgagttgcatgttctgaatctcttgtctaatgaatcaaagcagttgacccatggggcaaaggaaaatggtttgactcatgggctggcagaatatatagctcatgaggagatggatagaaaaactggatattggtggtcactggacagtaaatatattgctttcactgaagttgactcttctgaaataccactttttagaattatgcaccaagggaagagctcagtcggtttagaggcacaggaagaccacccttatccttttgcaggagcttcaaatgttaaagtgcgccttggggttgtttcagtagctggaagctccattacttggatggatcttctctgcgggggcacggaacagcaaaacaacgaggaggaatatttggcaagagtcaattggatgcatggaaacattctcactgctcagatcttgaacaggcaccacactaaaataaagattgttaagtttgatattagaacaggtcaaaggaaaaatatattggtggaagaaaacagcagttggatcaatatacatgactgtttcacacctcttgataaaggagttaccaaattttcgggtggatttatctgggctagtgagaaaacaggatttagacacctttatcttcatgatgcaaatgggacttgtttaggacccatcactgaaggtgaatggatggttgagcaaattgccggtgtgaatgaggctacaggtctaatatattttactgggaccttagatggtcctctggagtccaatttgtattgttccaaactttttgttgatggaagtcaaccacttcaggtccctgtcagacttacgcacagcaaggggaagcacattgtggtccttgatcatcatatgcgaaattttgttgatattcatgattcccttggttgtcctcctagggtgttactgtgctcgttggaagatggaagtttaatcaagcctttatatgagcagtcatttacaattccaaggttcaaaaagcttcaacttgagccaccggagattgttgaaatacaggctaatgatggcactacattgtatggagccctgtataagcccgatgcttcaaagtttggacctccaccttacaaaactatgatcaatgtttatggtggtccaagtgtacagcttgttatgtaactcttggcttagtacagttgatctgagagcacaatatttgagaaaccaaggcatcttagtttggaagttagacaacagaggaactgcgagacgggggttgaaatttgaaagctatttaaaacaaaaacttggtcaaattgatgctgatgatcagctaaccggagcagagtggcttgtcaaacaagggcttgcaaaagctggtcacattgggttgtacggatggagctacggcgggtatctctctgccatgacactgtcaagatatccagatttcttcaagtgtgcaatagccggtgcccctgttacatcatgggatggatatgacacgttttacacagagaagtacatggggttgccatctgaaaacaagtcaggatatgaaagcggttctgttatgaaccaagtgcaccagttgaaagggcggttgttgcttgtgcacggcatgattgatgagaatgttcactttaggcacactgcaagacttatcaatgcacttgtggcagctggaaaatcatatgagctaatagttttcccagatgaacggcacatgcctcggcgtcatagtgaccgagtttacatggaagggaggatgtgggacttcattcagaggaatctgtaacatgactttttaattcatctttcattgttgtgtttagttgaatgggcaaagtggtttctgaagttcttttacccaaaagaattggttttgtttcttcttgccttaaagctgataagctactttgatggctattttggcccacttcacacaccctaacaagaaactcttctgggtatcaaataactgaataagcctttaaaagtcaaatagtctagatcttgtatgtggaggagttgtccacaacatagccttttttttttatgagcggtttgctttctttctttttcaccatcaagtcaaccttataatttctttctttttcaccatcaagttaaccttataattcctcgtactgcttacaaggaattgttccccccctcctttggcacttctcctttcttgcctttgcttaataataattgaagtt

SEQ ID NO: 5250 - DNA, 2067 bp, Glycine max
  misc_feature (1744)..(1744): n is a, c, g, or t
  misc_feature (1746)..(1746): n is a, c, g, or t
  misc_feature (1821)..(1821): n is a, c, g, or t
  misc_feature (1864)..(1864): n is a, c, g, or t
  misc_feature (1882)..(1882): n is a, c, g, or t
  misc_feature (1894)..(1894): n is a, c, g, or t
  misc_feature (1903)..(1903): n is a, c, g, or t
  misc_feature (1915)..(1915): n is a, c, g, or t
  misc_feature (1924)..(1924): n is a, c, g, or t
  misc_feature (1928)..(1928): n is a, c, g, or t
  misc_feature (1931)..(1931): n is a, c, g, or t
  misc_feature (1958)..(1958): n is a, c, g, or t
  misc_feature (1963)..(1963): n is a, c, g, or t
  misc_feature (1965)..(1965): n is a, c, g, or t
  misc_feature (1972)..(1972): n is a, c, g, or t
  misc_feature (1984)..(1984): n is a, c, g, or t
  misc_feature (1988)..(1988): n is a, c, g, or t
  misc_feature (1996)..(1997): n is a, c, g, or t
  misc_feature (2003)..(2003): n is a, c, g, or t
  misc_feature (2010)..(2010): n is a, c, g, or t
  misc_feature (2016)..(2017): n is a, c, g, or t
  misc_feature (2024)..(2024): n is a, c, g, or t
  misc_feature (2030)..(2030): n is a, c, g, or t
  misc_feature (2038)..(2040): n is a, c, g, or t
  misc_feature (2042)..(2042): n is a, c, g, or t
  misc_feature (2049)..(2053): n is a, c, g, or t
  misc_feature (2055)..(2055): n is a, c, g, or t
  misc_feature (2057)..(2057): n is a, c, g, or t
  misc_feature (2062)..(2065): n is a, c, g, or t
ggctcgagctcgctccctcctgcattcccaacctccgagtccgctctcttcgacctcgcatcgcaccttcaacttaacctattccacttgtaatcgtaaacgctttgctagaagaagagacaaagtgtgtctgtgtgtgtgagagagagagcaatggctggctcgtgggcacgccgttctctgattgttctagccatcatttccttcggatgtctatttgcgatttccattgctaaggaggaagccaccaagttagggacggtcatcggcattgatcttggaacaacctattcatgtgtcggtgtttacaagaatggccatgttgaaatcatagccaacgaccaaggtaaccgtatcaccccatcgtgggttgctttcaccgacagtgagagactcattggggaggctgccaagaatcaggcagctgtcaacccagaaaggaccatctttgatgtcaagagacttatcggaagaaagttcgaagataaggaagttcaaaaagacatgaagcttgttccttataagattgtcaacaaggatggaaaaccttacattcaggtgaaaattaaggatggtgagaccaaggtgttcagccctgaggaaatcagtgccatggttctgatcaagatgaaggaaactgcggaagcattcctcgggaagaaaattaatgatgctgtggtcactgtcccagcttacttcaatgatgctcagaggcaggccaccaaggatgctggtgtcattgctggtctcaatgttgctagaattatcaacgaacccactgccgctgccattgcctatggattggacaagaacaagggtggacgcagaaagaacattctagtctttgatcttggtggtgggacctttgatgtcagtatcttgacaattgataacggtgtttttgaagttcttgctacaatcggagatactcatcttggaggtgaggattttgatcaaagaataatggagtacatcattaaattgatcaagaaaaagcatggaaaggatattagcaaggacaacagagcacttggaaagctgaggagagaggctgagcgtgcaaagagggctctcagcagccagcaccaggtgccgctggaaattgaatcactttttgatggtgttgatttttctgagccactcactcgagctaggtttgaggagttgaacaatgacttgttccggaagaccatgggtccagtgaagaaggctatgaagatctggattacgaagagtcagattgatgagattgttcttgttggtggaagcacaaggattccaaaggtacaacagcttttgaaggactactttgatggaaaggagccaaacaagggggtcaaccctgatgaagcagttgcctatggtgctgcagtgcaaggaagcattttgagtggagagggtggtgaagaaaccaaagatatccttctcctggatgtggctcccctcactctcggaattgaaactgttggtggagtcatgacaaagttgattcccagaaacactgttatcccgaccaagaaatctcaagtgttcaccacctaccaggaccagcagactaccgtctccattcaggttttcgaaggtgagaggagtctcacaaaggattgtcgccttcttgggaaatttgatctgtctggaattccaccagctccaaggggcacccctcaaattgaagtgaccttcgaagttgatgccaacggcattctaaatgtgaaggcagaagacaagggaactggtaaatcananaagatcaccattacaaacgaaaagggacgtcttagccaggaagaaatagatagaatggttcgtgaagcagaagantttgccgaggaagacaagaatgggaaggagaggatctatgctngcaacagtcttgaacctncgtatcaacatnaagaatcangtcagtgacaangacaactcnctgncanttggagtcatatgaaatgggaaaattngactncngtgaatnaacattgaatgntgangcacccanngtgganaaaaaanttttannaactgtngaggtnaacccttnnncnatcatannnnngntntaaannnngg

SEQ ID NO: 5251 - DNA, 1461 bp, Glycine max
ccacgcgtccgtggaaaaccttacatacaggtgaaaatggaggatggtgagaccaaggtgttcagccctgaggaaatcagtgccatgattctgactaagatgaaggaaactgccggcgccgtccgccccccccccattaatgatgctgtggtcactgtcccagcttacttcaatgatgctcagaggcaggccaccaaggatgctggtgtcattgctggtctcaatgttgctagaattattaatgaacctactgctgctgccattgcgtatggattggacaagaaaggtggcgagaagaacattcttgtttttgaccttgggggtggaacttttgatgttagtatcttgacaattgataatggtgtttttgaggttcttgctacaaatggagatactcatcttggaggtgaggactttgatcagagaataatggagtacttcattaaattgatcaagaaaaagcatggaaaggatattagcaaggacagtagagcacttggcaagctgaggagagaggctgagcgtgcaaagagagctctcagcagccagcaccaggtccgtgtggaaattgaatcactttttgatggtgttgatttttctgagccactcacccgagctcggtttgaggagttgaacaatgacttgttccggaagaccatgggtccagtgaagaaggctatggaagatgctggattacagaagagtcagattgatgagattgttcttgttggtggaagcacaaggattccaaaggtacaacaacttttgaaggactactttgatggaaaggagccaaacaagggtgtcaaccctgatgaagcagttgcctatggtgctgcagtgcaaggaagcattttgagtggagagggtggtgaagaaaccaaagatatccttctcttggatgtggctcccctcacccttggaattgaaactgttggtggggtgatgacgaagttgattcccagaaacactgttatccctaccaagaaatcccaggtgtttaccacctaccaggatcagcagagtaccgtctccattcaggtttttgaaggggagaggagtctcacaaaggattgccgtctgcttgggaaatttgaactgtctggaattcctccagctccaaggggtacccctcaaattgaagtgaccttcgaagttgatgccaacggcattctaaatgtgaaggcagaagacaagggcactggtaaatcagaaaagataacaattacaaatgaaaagggacgtcttagccaggaggaaattgagcggatggttcgcgaagcagaagagtttgctgaggaagacaaaaaagtgaaggagaagattgatgctcgtaacagtcttgaaacctatgtctacaacatgaaaaaccaggtcagtgaccaagacaagctcgcttgacaatttgagtctgatgaaaaagagaaaattgagactgcagtgaaagaagcattggaatgg

SEQ ID NO: 5252 - DNA, 2462 bp, Glycine max
  misc_feature (2461)..(2461): n is a, c, g, or t
tcgagtcagccgcgtagcccccccgcccgcccaaaaaccagaaaccaattacaaattacactctttgcctcgcaccttcaacttaaccttttctactcataatcttaacaacttgctagaagaagataaagaaagagaaaaagtgtgtgtgtgtgagagagagcaatggctggctcgtgggcacgccgttctctgattgttctggctatcatttccttcggatgtttatttgcaatttccattgctaaggaggaagccacaaaattggggacggtcatcgggattgatcttggaacgacctattcatgtgttggtgtttacaagaacggccatgttgaaatcatagccaatgatcaaggtaaccgtatcaccccatcgtgggttgctttcaccgacagtgagagactaattggagaggctgccaagaatctggcagctgtcaacccagaaaggaccatctttgatgtcaagagacttattggaagaaagttcgaagataaggaagttcaaagagatatgaagcttgttccttataagatcagcaacgtaggcccacccccccacatacaagtgaaaattaaggatggtgagaccaaggtgttcagccctgaggaaatcagtgccatgattctgactaagatgaaggaaactgcggaagcattccttggaaagaaaattaatgatgccgtggtcactgtcccagcttacttcaatgatgctcagaggcaggccaccaaggatgctggtgtcattgctggtctcaatgttgctagaattatcaatgaacccactgctgctgccattgcctatggattggacaagaaaggtggcgagaagaacattctagtctttgatcttggtggtgggacctttgatgtcagtatcttgacaattgataatggtgtttttgaagttcttgccacaaatggagatactcatcttggaggtgaggactttgatcagagaataatggagtacttcattaaattgatcaagaaaaagcatggaaaggatattagcaaggacaacagagcacttggcaagctgaggagagaggctgagcgtgcaaagagggctctcagcagccagcaccaggtccgcgtggaaattgaatcactttttgatggtgttgatttttctgagccactcacccgagctcgttttgaggagttgaacaatgatttgttccggaagaccatggggccagtgaagaaggctatggaagatgcaggattacagaagagtcagattgatgagattgttcttgttggtggaagcacaaggattccaaaggtacaacagcttttgaaggactactttgatggaaaggagccaaacaagggtgtcaaccctgatgaagcagttgcctatggtgctgcagtgcaaggaagcattttgagtggagagggtggtgaagaaaccaaagacatccttctcctggatgtggctcccctcactctcggaattgaaactgttggtggagtcatgacaaagttgattcccagaaacactgttatcccaaccaagaaatctcaggtgttcaccacctatcaggaccagcagactacagtctccattcaggttttcgaaggcgagaggagtctcacaaaggattgccgccttcttgggaaatttgatctgtctggaattcctccagccccaaggggtacgcctcaaattgaagtgaccttcgaagttgatgccaacggcattctaaatgtgaaggcagaagacaagggcactggtaaatcagaaaagatcaccattacaaacgaaaagggacgtcttagccaggaagaaattgagagaatggttcgcgaagcagaggagtttgcagaggaagacaagaaggtgaaggagaggatcgatgctcgcaacagtcttgaaacctatgtatacaacatgaagaaccagatcagtgacaaggacaagctcgctgacaagttggagtctgatgaaaaggagaaaattgagactgctgtgaaagaagcactggaatggctggatgacaaccagagtatggagaaagaagattatgaagagaagctgaaggaggttgaagccgtttgcaacccaatcattagtgctgtgtatcagagatctggaggagccccaggcggtggtggtgcatcaggcgaagaagacgaggacgattctcacgatgagctctagattagtcggagtctgttaaatttttatgatagctgggaattaagaagtcccctgcgcttgcttttttggtggcgatgataagatactttgtgaaattacttgtactttacttttttgcttagttttacgacgaaacttcttcagctgtatgaatgagccttgtttccacttctattctcttacgctcctgtttttcgcgtgcttcgtgcctgttttgccgaccataagtttttaaatcaagtctttgtaatttaaaacaggaaacctccgtaaaatattattgagccant

SEQ ID NO: 5253 - DNA, 2318 bp, Glycine max
gtcggtgtttacaagaataggttgttccaagatcaatgccgatgaccgtccctaacttggtggcttcctccttagcaatggacggtcatcggcattgatcttggaacaactattcatgtgtcggtgtttacaagaatggccaggttgatatcatagccaacgaccaaggtaaccgtatcaccccatcgtgggttgctttcaccgacagtgagagactcattggggaggctgccaagaatcaggcagctgtcaacccagaaaggaccatctttgatgtcaagagacttatcggaagaaagttcgaagataaggaagttcaaaaagacatgaagcttgttccttataagattgtcaacaaggatggaaaaccttacattcaggtgaaaattaaggatggtgagaccaaggtgttcagccctgaggaaatcagtgccatggttctgatcaagatgaaggaaactgcggaagcattcctcgggaagaaaattaatgatgctgtggtcactgtcccagcttacttcaatgatgctcagaggcaggccaccaaggatgctggtgtcattgctggtctcaatgttgctagaattatcaacgaacccactgccgctgccattgcctatggattggacaagaaaggtggcgagaagaacattctagtctttgatcttggtggtgggacctttgatgtcagtatcttgacaattgataacggtgtttttgaagttcttgctacaaatggagatactcatcttggaggtgaggattttgatcaaagaataatggagtacttcattaaattgatcaagaaaaagcatggaaaggatattagcaaggacaacagagcacttggaaagctgaggagagaggctgagcgtgcaaagagggctctcagcagccagcaccaggtccgcgtggaaattgaatcactttttgatggtgttgatttttctgagccactcactcgagctaggtttgaggagttgaacaatgacttgttccggaagaccatgggtccagtgaagaaggctatggaagatgctggattacagaagagtcagattgatgagattgttcttgttggtggaagcacaaggattccaaaggtacaacagcttttgaaggactactttgatggaaaggagccaaacaagggggtcaaccctgatgaagcagttgcctatggtgctgcagtgcaaggaagcattttgagtggagagggtggtgaagaaaccaaagatatccttctcctggatgtggctcccctcactctcggaattgaaactgttggtggagtcatgacaaagttgattcccagaaacactgttatcccgaccaagaaatctcaagtgttcaccacctaccaggaccagcagactaccgtctccattcaggttttcgaaggtgagaggagtctcacaaaggattgtcgccttcttgggaaatttgatctgtctggaattccaccagctccaaggggcacccctcaaattgaagtgaccttcgaagttgatgccaacggcattctaaatgtgaaggcagaagacaagggaactggtaaatcagaaaagatcaccattacaaacgaaaagggacgtcttagccaggaagaaatagatagaatggttcgtgaagcagaagagtttgccgaggaagacaagaaggtgaaggagaggatcgatgctcgcaacagtcttgaaacctacgtatacaacatgaagaatcaggtcagtgacaaggacaagctcgcggacaagttggagtcagatgaaaaggagaaaattgagactgcagtgaaagaagcattggaatggctggatgacaaccagagtgtggagaaagaagattatgaagagaagctgaaggaggttgaagccgtttgcaacccaatcatcagtgctgtgtatcagagatcaggaggagccccaggtggtgcaggtggcgaaggcgaagacgaggatgattctcacgatgagctctagattagtctaaatttttatcatatatgggaaattaagaattcccctgcgctctgcgcttgcttttttggtgccgatgataagatacttgtgaaattacttttactttgtttttttgcttagttttacgaccaaacttcttcatgagtctggtttcacttctattctcttacgctcttcttttcgcgtgcttctccgttaaaatgtgctctgatgaaattaatccgtctgcccatgccgaccataagtttttaattaagtctgtttgtaatttaaaacaggtaacttccgtaaaatattattcagccattttataaaactcacgaatatcaaatttctatc

SEQ ID NO: 5254 - DNA, 2022 bp, Glycine max
tcgagccgcctccggggccccccccccccaattccatagcgttgaggtgaagaaactacaattctcactgaaagaaagttgctaactcttggcaccagttatcagcttaacatagttgataacaccaaaggcacaacaacattgagggaatgaggcttgtcatatcagctgtatgtgttattgtgctattttcttatgctgctgcgtatgatcctttggatccaaatggaaacataacgatcaaatgggatgttgtgtcatggacaccagatggctatgtagccgtggtaacaatgagcaatttccaaatgtttcggcacatcatgaatcctggatggaccttgggatggacatgggcaaagaaggaagttatatggtccatggtaggagctcaaaccactgaacaaggagactgttctaagttcaaaggcaatgtacctcactgctgcaagaaaactcccacagttgtagacttgctccctggtgtgccttacaaccagcaattctcaaactgttgcaagggtggagtggtggcagcatggggccaagaccctccgccaccggggccccccccccaagtgagtattgggttagctggtacttcaaacaagacagttaaactccccaagaacttcactctcttgggtccaggaccaggctacacttgtggccctgccaaggttgttccttccaccgttttccttacacctgacaagcgccgcaagactcaagcactaatgacatggaatgttacttgcacatactcacaatttctggctagaaagaacccgggttgctgtgtatctttgtcatccttctacaatgagaccattacaccttgccccacttgtgcctgtggctgccagaacaagaggaactgtgtcaagtaaagtctgatattccaaatagttaatagcctcttaatatctaacgactagaatcattctctcacatgttggtatggtatgcaggagtaactctaaacgtatcaacatggtggggattcacactccaaagaaagacaatgaaccattgctacaatgcactcatcatatgtgcccaataagggtacactggcacgtgaagctcaactataaggactattggcgagtcaaggttgccgtgacaaatttcaactacaggatgaattactccctctggactcttgctgttcagcatccaaatcttaacaatgtcacccaagttttcagctttgattacaagcctttacttccctatgagtccataaatgacactggtatgttctatggcatgaaatactttaatgatctcttaatggaagctggaccaactgggaatgttcaatcagaaattcttcttcagaagaaccaggatacattcacattcaagcaggggtgggcatttcctcgcaaggtctactttaatggtgaggaatgcatgctgccaccacctgatagctacccaatcctccctaattctgcccctgtgaacctattaaacttcccagcattcgttttgacaatgcttgtcatgataactgtttggtgaaatagtatgtaggcgagatacaattgttttctgtgaaattttgaagccaagttttcctacacacaccacaacgtacatcaggtatgaagaatcttacggaattgcttgaaaaaaaccaagcccgactcatgaatgtgtgtgttgtgattcacgagtgcttatcagatgctgaatagtgaataactgaaaataattcccagcaatgattttgtctaaatcatgtgtaaatgtttatattgtaatactgtaatggatacccgcatatgcaagggtaagactgcgtacaatatccttccctcataccttcgcatagcgaagagcctctggacaatggggtacgaagttttttactgtaatggatacccgcatttccctcttattcagtttctcttagaccatattgagcataatacatagaacattcttattccatgtaggaaactacaagtaaaaagaccattatcatttcaaatcaaaaaaaaaaaaaaaaaa

SEQ ID NO: 5255 - DNA, 2261 bp, Glycine max
cccggagtcgtgacaagacccgcatgaaaatgagtttgattttttctgtgctttgtttcttcctaggtatgaatctgctacaatttctctgattctgaaataacaataactcatagtaatacccccaaacaacaaaatgggagataacaaacgtaagagaggacgcaaagccaaaacccccgcctccgaaaccctagaccaccccgcccccgtcaccaccaccgctccaaattccacctccaccgccatggacgatgtcttctccgtcggcaacgtcgagctcatcgacaccacggcctctccgcaccaccgccgcctccgcgcccgtcccaaccactccgagaagccccacgctctgcccacggggcgccgccacgcccgccccctcgacaacggaggcggtgacttctcggtccccagcgacgtcgtcggggtttcccctgccgtggcgatggaggcggacccggcggcgtgggtggcaagggcgctgccggcgatggactcggtggtgaaggtgttctgcgtccacacggagcctaatttctcgctgccgtggcagaggaagaggcaatacagctcgagcagcagcgggtttgtgattggcgggagaagggttctcaccaatgcgcattcggtagaacactatacacaggtcaagctcaagaaacgtggctctgataccaagtacttggccactgtgctcgccattggaaccgaatgtgacattgccatgcttacagttgatgatgatgagttctggcaagggatgtcacctgtagagtttggggaattgcccacacttcaagacgcagttacagttgtgggctacccaattggtggagacactatctccgtcaccagtggtgttgtatcgcgcattgagattctatcttatgtccatggttctacagaacttctaggtttacagatagatgctgctataaattctggcaattctggtggacctgcatttaatgacaaaggaaactgtgtggggattgcatttcagtccctcaagcatgaagatgcggagaatataggttatgtcattccaacgccagttatcatgcattttatccaggattatgagaagaatggaggatatactggattccctattcttggggttgagtggcagaaaatggaaaatcctgatctgcgaatggccatgggcatgaaacctgatcagaaaggtgtgcgcattagaagaattgatcctactgctccagaatccaaggttttgaagccatcagatgttatccttagttttgatggggttgacattgccaatgatggaacagttccatttcgccacggagagcgcattggtttcagttatctcatatcacagaaatatactggggataatgcagcaatcaaagtactgcggaattcagacattttcaaatttgacattaaacttgatagtcacagaaggcttattccagcacacagcaagggcaaacctccctcatattatattattgctggatttgtttttacaactgtttctgttccatatcttcgttccgagtatggaaaggattatgaatatgaagctccagtcaagcttttggataaactgctgcattcgatgccacaatcaccggatgaacaacttgttgtggtctctcaggtgctggtggctgatatcaacattggatatgaagatattgttaacacccaggtccttgctttcaatggtcaaccagtgaaaaacctgaagagcctagccactatggtagagagctgcaatgatgaatatctaaaatttgatctagattatgatcagatagtggtgcttcgcatgaagactgcaaaagcagctactcttgatattcttgcaacgcactgtattccatcagcaatgtctgatgatcttaagtcatgatatgaatcacaatgtagtagattctgcatcatgatcttaagtcattatatttttagttagattgtttccctacatggtactgggagttatgtttaatttaagtgctaatgcctcttgggactctgatggttccacattttgaaagagatgatagataggtaagcaggatttacattacaattcattgtcttctgatacattggcctttttcaaattttgagggaactgagcaatgtaaagagtttctattattttcacctatgtgatatataccagagcaggcagtgcaaaacagaactatagattggcaacaaagtttttcagaaaaataaagattctttcaccaaaaaagaaaaaaaaaaaaaaaaaa

SEQ ID NO: 5256 - DNA, 816 bp, Glycine max
attaactattactatatatcaataagccatccatcaacactttaattccttttcttcttcttatcctccttcttcatgttcttaaagaattagaattgatggcagtcaacagttattcttcatcagctcaaatctcacttcagaaatatggttcatttatggaatatacaaacaaagagttgatgtccaaacgatgctgcgtcccacagaaaacggcaccggttggtccagtagtattgagaatcacatcatccatcaagaacaagatctatgaggaccaatctcagggcataatttgctatgaagatgaaagtggagaaataatttgtgaagggtacgatgaagggcctcgttatcaccgaattcctagtccaactcaacacccaagggatgttgaaatcatgaatcttcaacaacaacaaagttggcttcagattgttaaaggagaagaaatcaatcatttagctaaaggtgctcttcatctacaagaggatttaaactacaataaatggctttaactcattccaaaccaatcaggcttttgtcactctcaaaggctttaacagttacatgcagtgctaatatgtatcagaaaggaataatagcacaagaatatgcagtaattggtgaatcaaataggacatgtgctgtcttcagcacatttttcatgcaagttgtacaaattgacagtgcgtggtgatgcttttcttatatacttttcttttcaatctgcccatatagtttcacatcagaaattcagaatcttatattatctgataaatggaaggaagttaattatgaaaaaaaaaaaaaaaa

SEQ ID NO: 5257 - DNA, 1313 bp, Glycine max
actcgagccgctcgagccgctcgagcggtgaggttccggttaaacctgtggttgcagatgaaactagtactgagagcacaaacaatgatgaacttgaaccacacgaagagggttttgggtaaaactcccacagtcaagaggcaatcttgtgggaaatacaaaggtgttcggatgcggaaatggggcaaatgggctgcggagattcgtgaccctttcaagggcgcgcgaatctggttgggtactttcagcactgcagaagaggcttctcaagcctataatgccagaaggcttgaatttgaggccatggccaaggctctatctgatgagaagagcaacaatggcagcaacagcagcagcaacaacaatgttgttgcttctgctgaaactgtggctgccacagaaaataacagttccaactattgtgtttcttctgctgcaggttctgtatcagactccaagtctgcttctatggatgaatcagagagtgtgttgtcactcacatcaccatcttctgtgcttgaattggatacatctgctttcaatttgattgggagtggtaaggtttcaagcaatgaagttgttgagactaaaggattggaggctgaagttgctgagactaaaaatttggcagctgaatttgccgagctggaaatgctggaaatgccggatttgagtatgctgaatgtgccatccccatctgctgtcgctgctactgctgctgctccatctgagtttgaattggatttgttggcatttgttgattccgagtatggatttcatgatgagcatgactttgatgatgatcttgctgccctggaagactttcacatttgcggtttcgatgacaatgagcctagcgagcttcccgattacgattttgacgactttggtgctgatgagtttgctggttggattgaagaacccctcaatataccttgcgtatagattttgcagcttcataggaatgagttctatccaagagactagtactactacaacattacaagttgtgtcattgcttaaaaatgctatagttttttgagatctcaggaaaaaactagttcctgggagagttgttttgtcaggtttgttttaatttatttgtttctttagggatggaagatcaatgagaggttaagagacaatgccttggtttttcttgtgctattagagccgtccaagggtttttcaatttctattatcgtgaaagttgagtgtgtagatgtctatcaaacttgaaatctactatctttatcagaaattctatggtatccttggaaaagtaccccgcagaaaaaaaaaaaaaaaaataa

SEQ ID NO: 5258 - DNA, 1880 bp, Glycine max
ttcctttcgtccgcccaattataaaccctcagcagagtaggccccccccccgaactccaaaacacaaacaaaaactcccgttttctctctctgtttttccatggccatctgatcaaacttttcttgattctctctctcagtttttgctattctgagtgatgggtatgccctgccgctgttcccacacctcccacatcactgaaatcatcatcaccagcttcttccgccacaagtcttaaattacaacaatttccctcaattattcatcaaccaaccaccttaatagccttttccaatggttccttaaagatccaacttggtcggagtaaacatggcggctagtggaagttccttttccaacatcactagcttccttcgcaaccaacaaccctcttcccaacctctcgattcttctctcttcctctctgctccttcaatttttgtttcaggttcgagatccatggtgagttttgaagcagaaggagggaaggggtgtaacggctccttcttccgcgcgtttgacatggacgacaatggggacgagtgcatggatgagtactttcataaacccgagaagaagcgtcgtctctccatgaaccaggttcagtttctggagaagagtttcgaggaggagaacaagcttgaaccggagagaaagaccaagcttgccaaagaccttggtttgcggccacggcaagttgctatttggttccagaaccgtcgagctcgctggaagaccaagacgctggagaaggattacgaggctctgcatgcaagttttgagaatcttaagtccaactatgacagcctcctcaaggagaaagacaacttaaaagctgaggtggcgagcctcaatgagaaggtgcttgcaagagggaaacaagaggggcacatgaagcagcaggctgaaagtgaagaagaaacaaaaagattattgcatttgcaggaacaggaaccaccccagaggcttttactggaatcagtttcggagggagaaggatccaaagtctcttctgttgtcgggggttgtaaacaggaagatatcagttcagccaggagtgatattttggattcagatagtccacattacaccgatggagttaactccgcactgctagagcatggtgattcttcttatgtgtttgagcatgatcaatcggatatgtcacaagatgaagaagataacctcagcaaaagtctctacccttcgtacctctttcccaaacttgaagaagatgtggattactccgacccgcctgaaagttcttgtaattttggattttctgaggaagatcacgccctttggacctgggcatactaagttttcttccatgttcatgtgtgtgtttgtgtcatatgtttttttagtaattagtatttagtatttgcactttttgtccaggcttcaaaaatggctatagctttagctttatcaggaaagaaatgtttgttttctttttgcctcattttgttagtacttgtaatcaaactgttggttccaatgtaattaaataatgtcttctcgttgagaatgtaacaatggatttcatttaatttcactaagaaattcaaataagaaacttgatgaaatggggaaaaaaaaatggaagccaattgcttggtagagtggaaaagattgaggcctatagtatttatactatttaagatgactatgattcattgattcttcttcacttgggttctggacttctgggtccatgttgttttgattggtaagcaaccctgcatgacgaagttgacttgcttgcacctttgcaatactttcctacttgagagcatttaagttttgtgacagaaggggtgtcactttcactatgaattggacaaaaatggccactctccattggatgaggatcacc

SEQ ID NO: 5259 - DNA, 1647 bp, Glycine max
tcgagcggccccgtagccccccccccgaactccaaacacaaacacatacaaacatagtaaccgcttctctctctctctctctctctttttccatgtccatctgataaccctttcctgattctctttcgtggttgttgctattctgagtgatgggtatgccctgccgctgttcccacacctcccacatcactgaaatcatcatcaccagcttcttccgccacaagtcttagatcaacaatttccgtcaattattccaaaaccaccttaagagccttttccaaatggccccttaaagatcgaacttggtcggagtaaacatggcgggtagtggaagtgccttttccaacatcactagctttcttcgcacccaacaaccctcttctcaacctctcgattcttctctcttcctctctgcaccttcctctgctcctttcctcggttcgagatccatgatgagttttgaaggagaaggagggaaggggtgtaacggctccttcttccgcgcgtttgacatggacgacaatggggatgagtgcatggacgagtactttcatcaacccgagaagaagcgacgtctctctgcgagccaggttcagtttctagagaagagcttcgaggaggagaacaagcttgaacccgagagaaagaccaaactagccaaagaccttggtttgcagccacggcaagttgctatttggttccagaaccgtagagctcggtggaagaacaaacagctggagaaggattacgagactctgcatgcaagttttgagagtctcaagtccaactatgactgtctcctcaaggagaaagacaagttaaaagctgaggtggcgagcctcactgagaaggtgcttgcaagagggaaacaagaggggcacatgaagcaggctgaaagtgaaagtgaagaaacaaaaggattattgcatttgcaggaacaggaaccaccccagaggcttttactgcaatcagtttcggagggagaaggatccaaagtctcttctgtcgttgggggttgtaaacaggaagatatcagttcagcaaggagtgacattttggattcagatagtccacattacaccgatggagttcactctgcgctgctagagcatggtgattcttcttatgtgtttgagcctgatcaatcagatatgtcacaagatgaagaagataacctcagcaagagtctctacccttcgtacctctttcccaaacttgaagaagatgtggattactccgacccacctgaaagttcttgtaattttggatttcctgaggaagatcatgtcctttggacctgggcttactactaagtttttttctttcatgtgtgtgtttgtatcatgtgtttagtatttagtatttgcactttttttttcaaggctttaaaaatgagcaataagtcagagcaatggctatagctatagctttagctttattaggaaagaaatggtgggctttttttgcctcattttgttatttgtaatgaaactgttggttccgatgtaattaaataatgtcttcttgttgacaatgtaactacagattttatttcacttcacaaaattcaaatagaaaatttgatgaaatagggcaaaataaaaggtaaccccaatatagtttgccaagggaagcccattgcttagt

SEQ ID NO: 5260 - DNA, 1581 bp, Glycine max
  misc_feature (19)..(19): n is a, c, g, or t
tcgagtcagctacgtaggncccccccccccacaagaaagggcagacattccaccacttgatgttgcccttgatgactttgatcaatttgatgcaaataacactaacagtcaaagtgaagaacatgcaaatgaagaagacattgtaaatgaaaaacataagagacgtgaaaagaagaaagcaaaggaggagagggagaagcaaataagggctgctgaggaaagattactggaggatgatgtccctagaactgctgatgagtttgaaaagctgattagaagctctcctaatagcagtttcacctggataaaatatatggatttcatggtttctatggttgatgttgagaaagcccgctcaattgccgaaagggctttgaggacaataaatatccgagaagagaacgagaagcttaacatctggaaggcctactttaatttggaaaataagtatggaaaccctagagaggaggctgttatgaaagtattccaaagagctctacaatacaatgatcccaaaaaggtttacctagcactcttgggaatgtatgagaggaccgagcagcataatttagccgatgaacttctcaataaaatgacaaagaagttcaagcattcatgcaaagtttggttgaggcgtatacaaagtcttttgaagcaaaacaaggatggaatccaaccggtcattgatcgagcttcattaagccttcctaaacacaagcatattaaatttttctctcagacagcgattcttgaattcaaggttgggtttccagatcgagggcgatccatgtttgaaaaaatcctacgggagtacccaaagagaacagacttatggagtgtttatcttgatcaagaaattcaacataaagacgaagatatcattcatgcactgtttgaaagggctgttagtctgagcctcccacctaaaaagatgaagttcttattcaaaaagtatcttgattatgagatgtcccaaggtgatcaagaacggattgaatctgtgaagaggaaagcaatagaatatgtcgagagtctaaacaattgaacatggcttgatacaaattcacctctgctttagttttgaattctacaacttacagccactctggatatcctaagacaaatagagtgttttttataaggcatgataacaaagtggagtggttctaacactacctagtagtgctgccaagtgctagtgtgctttttgcagcacaagatgaatgcatcaaatgagcacaagagaaagacagacctttgataattagaggcaatataggccccctgtattctgtcttttgccatgtttattccatttaggctgtaactttttggtttgacacaaattgatttttcttgggcgcagaggttaggacaatgttgtaacgttgttagtgttttggttgtaaccaaattttgggaatgtaaacattactttatcgttttatatgcttatgctccaaaatgaaaaattgtagctttattttcccaaaaaaaaaaaaaaaaaaaaaaaaaaaaaaaaataaaaaaaattgggggggccccccatttaggagccccgccacccgggaattttttcgg

SEQ ID NO: 5261 - DNA, 1409 bp, Glycine max
gattcccgtagttatttttgaagacgaaggttgaatgtgaaaaagcaaagaagcgttagcgaactgaacagtgtaaaataaattaagaggaaccctcgatttgtgcttttcaattttctgccccttctcttgcgttgcgttgatttgattaatactatcaactaagcccttttctgtttgcaatctggagctatgagttcgtcttcggcagatgtttttccagcaattcaggaagttatgctggagttccgtgctggcaaaatgtttcttgaggaaaaaagggttgttcccgatacacggaaaggacttgttcgaattgctaggggtgaggagggattagtacattttcagtggcttgatcgcacacaaaatgttgttgaagatgatcagataatatttcccaatgaggctatttttgagaaggttaatcaaacatctggaagggtttacatactgaagtttaatagcgatgacaggaagttcttcttctggatgcaggaatcaaatgctgatggtgattcacaactgtgtagctcagtgaatgattacattaatagaccattagagttgcttggtgaagaggagcctgatggatcccttccacttcaaatttctgaagatatgacagaggatgacatctcgtccagagctgcaaacttaggtatcccaaacttgggtgtggaagcaactagtgatgtaacatcttctggtccggttaaattggaagatctccaaagaatattgagtaacattggacctgcagatagtattgttgatcctgatggaggcttgggactcggagatatattgaagcctgatctaataatgccattgatggacatgttacctttggagcagcgtttagctccctacttacctgagggtaaatggtctccagaagagatattggagttgttgcagagcccacctttccgtcagcaagtagattcgtttacttatgtacttcgaacgggacagatagacttgtctcaatttggaattgatccaagtaaatacaagttcacagttttgtcttttcttgaggctcttgaggattctgtttccaagtcggttgagtctgaagaggctaggcaagatgatcaggatttgagatctcaatcttgtaaccgtcatgacccaatggatgaatctcagtagcgtggttcgttcagcattgttcttttttctatagatacaagaaacatctcatgtttttatttttatttttattttatccgacacattttctgcttgaaaaaggaaatttaaaatgcagtgagaaaaaagtacaaatattatttgagatcttttaaggttatacgttgaattattgatcaataaaggccaagccatttgtttccctttccttcaaaaaaaaaaaaaaaaaaaagaaaaaaaaaaaaaaaaaa

SEQ ID NO: 5262 - DNA, 1133 bp, Glycine max
gtccggacccccgcgtccgcccacgcgtccgctctcctccgcttgctgctgctgccacttttcgctgagttgcgtcgtctctctaacaaaacaaacaaacaaaaaaaatgatttctgcgatttcgtgggtgcccaaaggggtttcgaagtcggaacttgtcgtggctgaacctcctcccgaagaggaaattcaagagataatagccaaccacgcaaccaaaagtggagacagtgacaatgaagacgctaacaacgatgacgttgtggcacaagcattaaccgtagcagacgcagttggcaaggcctccactggaacctgcgacgaaataacccttgcgttgaaggaccttgacatggacctttatgatgacgaagatgaaggaattgaggtgttcagttctggaattggcgatctttattatcccagtaacgacatggatccctatatcaaagataaaaacgatgatgattctgaagaactcgaagacatgatcattaacccaactgattctgtcgttgtttatgcatgtactgaggatgaagtcagttatcttgaggtttgggttatcgaggatgccgattctagtgaaatgaacatgtatcctcaccataatatcattattccagcatttccactctgcacagcttggctcgattgcccccttaaaggaggagaaagagggaacttcatagctgttggttcaatggaaccatccatagaaatttgggaccttgatgttattgatgaggtgcagccatgtgtggttttgggtggatttgaagagagaaagaaaaaggggaaaaagaaaccaatcaaatacaaagatgacagtcacactgactcagtacttggtcttgcttggaacaaggagtacaggaatatactagcaagtgccggtgctgacaagcgagtgaagatttgggatgtggttgccgggaagtgtgatattacaatggagcatcactcggacaaggttcaagcagttgcttggaatcatcatgcaccacaggttcttcttagtggttcatttgatcatactgttgtcttgaaggatggaaggatgccatcacatgctggctatatgtgggcagtcgcatcttgtgtacatagctttgcatgggatctacatact

SEQ ID NO: 5263 - DNA, 2013 bp, Glycine max
cagaacttgaagcattgttcagctacgtaggcccccccccccccccgagaagaaataataaacaccctttggagatatttgcttaggccattggtcatggcaactcgaagactttcattgctcctctctcgctctctatcttccacttcttttcaagctgcttctctacttcactcactagggagaaactctggcaagtggggaaactttaacagattcagcactgcagcagcagttgaggatttaatcactccacaagttccaataacatacactaagcatctgataaatggacaatttgtggatgctgcttcagggaaaacttttccaacatatgacccacgcacaggagaagtgattgctcaagttgctgaaggtgatgcagaagatatcaaccgtgcagtatcggcagctcgcaaggcctttgatgaaggaccttggccaaaattgactgcttatgaaagatgcaagataatactgcgctttgctgatttggttgagaaacacggtgatgaacttgcagctctggagacatggaacaatggaaagccttatgaacagtctgccactgctgaattaccaacgtttgtgcgtttgtttcgttactatgctggttgggcagataaaatccatggtctgacagtgcctgctgatggaaattatcatgtggagacattgcatgaaccaattggtgttgcaggacaaatcataccttggaactttcctctcctcatgtttgcttggaaagttggaccagctcttgcatgtggaaatactgtcatccttaagactgctgaacaaacacctttaacagctctctatgtagcaaaactttttcatgaggctggtcttccaccaggtgttttgaatgtagtttctggctatggtccaactgctggtgcagctctagcaagtcatatggatgttgacaagctagcattcactggatctaccgagactggaaaagttgtgcttggattggctgcgcaaagcaatttgaagcctgtgacattggaacttggagggaaatcacctttcatagtgtgtgaggatgctgatgttgaccaggctgtagaacttgcgcactttgctttgttctttaatcaggggcaatgttgctgtgctgggtctcgtacctttgtacatgagcatatctatgatgagttcttggagaaagcaaaggctcgtgctttgaaacgtgttgttggggatcccttcaaaaagggtgtcgaacaaggacctcagattgatgtggaacaattccagaaggtccttaggtacataaagtccggtattgaaagcaaggccacccttgaatgtgggggtgaccaaattggctcaaagggcttctttgtccagcccactgtcttctcaaatgttcaggatgacatgttgatagcaaaagatgaaatatttggccctgtacaaaccatcttgaagttcaaggacatcgacgaagtaattcgaaggtcaaacgcaacgcactatggtctagctgcaggagttttcactaagaatgtgcacacagccaacactttgatgcgagcactgagggttggaacagtatggatcaattgctttgatgtttttgatgctgcaattccctttggagggtacaaaatgagcggcattggcagggagaagggtatctacagtctcaacaattacctgcaagtgaaagctgtggtttcaccagtgaagaaacctgcatggttgtgatttgtgaattgctcaaactgctatgaccgaaatcctacgtggctatcatctttttccgctgaggcaatggcatgcaataaataatgtgatgttactaagataaaacctgattaggtacctgaacattataccagttgaatttatgtatttttcacttgttaattgctcaaacacaaacttggatactgtaatgacactgttgctgtaggatataaattttgcaccattcacacttgtgtggattactgtcaagtgaaaaagtaattaacataaattaattagcataaaaaaaaa

SEQ ID NO: 5264 - DNA, 866 bp, Glycine max
  misc_feature (842)..(842): n is a, c, g, or t
actaatgagagagcgtttttgttttcttgtctgcttaattgagtctactagtctctctctttctctctcattcttttgatcaaacacagagagcgcagtcgtagaagaaaagaaatcctcacaatgcattcattcggctacagagccaatgcgttgctaacctttgccgtcaccattttggctcttatgtgcgccatggcctctgtatccgacaacttcaacacccccactccctctgcacaagtccaggtgttgaacatcaactggtttcagaaacagcccaatggcaatgacgaggtcagcatgacactgaatatatctgcagatttgcagtcccttttcacatggaacacaaaacaggtttttgtttttctagctgctgagtatgaaactcctaagaattccttgaatcagatatccctgtgggatggtatcattccctctaaagagcatgcgaagttttggattcatacatcaaataaataccgcttcattgaccaggggagcaatttgcagggcaaagagtataacctgactatgcattggcatgttatgccaaagagtggcaaaatgtttgctgataaaatagtcatgccaggttaccgattgcctgaggaatatagatgatgctcgtcatgttaagtttttttgctgtaactttaacctctcctataacggatatagaaggttagttcaaagaactagaaagaggaaggaaatttgtgttttggaaagtgaaatcaatagctcttgatggaatacttgaacatccgaagtttgcttgtggttttgaattgtctcttgcgttagtctgaacttttttaattcttctggagaaagcngtatttatgctaaattgaaccctc

SEQ ID NO: 5265 - DNA, 828 bp, Glycine max
cgtggttccatcgaatgagagagcgtttcctttccttgtctgcttagtttagtagcagtgtcgctctctttctctttcttttgatcaaacacagagagcgcagtccaaccctcaaaatgcattcattcggctacagagccaacgcgttgctaacctttgccgtaaccattctggcgcttatgtgcgctatggcttctgtatccgacaacttcaacacccccactccctctgcacaagtccaggttctgaacatcaactggtttcagaaacaacccaatggcaacgacgaggtcagcatgacgatgaatatttccgcagacttgcagtcccttttcacatggaacacaaaacaggtttttgtttttctagctgctgagtatgaaactcctaagaattccttgaatcagatatccctatgggatggtatcattccctctaaagagcatgcaaagttttggattcatacatcaaataaataccgcttcatcgaccaggggagcaatttgcgtggcaaagaatataacctgactatgcattggcatgttatgccgaagactggcaaaatgtttgctgataaaatagtcatgccaggttatcgattgcctcaggaatatagatgatgcccttcatgttaagctttttgctgtaactttaacctttcctataacgaatatagaaggttggttcaaagaactagaaagaggaagggaatttgtgttttggaaagtgaaatcaatatcgcatgaatgaatacttgaacattcaaaatttaaaaaaaaaaaaaaaaaattcctgcgctggtgccgaaccgagactagttctcttctc

SEQ ID NO: 5266 - DNA, 1042 bp, Glycine max
acggacaattagatcgcctgatagcgtcgtggtctttagcatttctcaccgactgcgaagggagagcgaataaaaaaaggcaaatcaaattcgagagaaggagagaatttagagagggaaaggatgaagatcacggcgttgttggtgcttaaatgcacgggcgagggatccgatccggtgattctggcaaacgcttccgatgtcagccacttcggctacttccagcgttccagcgttaaggaattcatcgttttcgttggtcgtacagtcgccagtcgcactcctcagggccaacgccaatccgtacaacacgaagagtacaaggtgcacacatacaacaggaatggtctttgcgcgttgggatttatggatgatcattacccgattcggagtgcgttttctcttctcaatcaggtaatagatgaatatcaaaaaaactttggcgagtcatggagaaatgctcaggaagacagtactcaaccatggccctatttgaatgaagctctggcaaaattccaggatcctgcagaggcagacaagttgatgaaaatccagagagagttggatgaaaccaaaatcatccttcataaaactattgatagtgtgctagctagaggggagaagctggatagtttagttgagaagagttctgatctgagtgccgcttcgcagatgttctacaaacaggccaagaaaaccaatcagtgttgtaccatattgtaatcaagcttccaagtctttcattatgcagcgtgctcacttgaatcctgttccgacatggagactgttggataggataaaatagcttcatatgtctatatcactccattgtttgcttggttaaaattatgtgatttaccacgatacatgtactgtcttaccgtgttgacaaattcaaattcccatttaccttgttgtgatgttgactgataatttatagtatgcataaattattgttttggtggagtcattacatgttaaattggggcgcccgccggccagagtgccctgtaccctcacggaacctgcaaatgttatttat

SEQ ID NO: 5267 - DNA, 1566 bp, Glycine max
  misc_feature (1547)..(1547): n is a, c, g, or t
  misc_feature (1566)..(1566): n is a, c, g, or t
aacaatacagggtgtgaggtttatattgggttttgcattccacgcgtccgattcaaactgctgcgtgtctctctgacaaccttaaattttgcttctttctctgccagaaacgcatgaaggatcaaaatggttgccctttttctctttattggttggtaaacaaaaacacgtgagagtggagtaatatatggagttggggtgtgggttttacactaaagttaacaactttcgtcgttttggggggctttgagagagtgccatggtcatggagggaagaatctgcgaggaattaacgcccaggtattatgctctttgtgccattggaggaatgctcagtgctggcaccacccatcttgccatcactccctttgatgtcttgaaagtcaacatgcaggtgcacccaattaagtattacagtatttcctcttgctttactaccttactgagggaacaagggccatctgttctttggaaaggttggaccggcaagttctttggatatggtgctcaaggaggatgcagatttggtctctacgagtattttaaagaggtttattccaatcgtgttggtagaccagaacaggagttttgttttctttcttagtagtgcgtctgctgaagtgtttgccaatgtagctctatgtccatttgaagctgttaaagtgagggttcaagcacaaacctgttttgctaagggattgtatgatggctttccaaagttatatgcatcagaaggcacacgaggattctaccgtggactaattccacttttgggtcgaaacattccattttccatggttatgttctcaacatttgagcattccgttgattttttgtatcggaatgtggtcaaaagaaaaaaggaggactgttcaataggtcaacaacttggtgtaacatgtttagctggatatgcagctggatctgttggtagcttcatttctaatccggctgacaatattgtatcttctctttataacagaaaggctgatagtcttgcactggctatcagaaatattgggctagccaatctatttaccaggagccttcctattagaatgttgctagttggtccttctataactttgcaatggtttttttatgacaccatcaaaattttaggtggaatgtcaactagtggtggagttagaactgacatgagaggaaatggggcaggctagattcagaaaaatggaaatctgcagttacatttttcaggctgacttgtgtattgcaagtcattttatactatatacagggttagttttgtggtggcttttgctttctgctaccatttagtccttttgaatttgtcattataggctttcattgatgcctttgaaatttgctttccaaaaagaacgaggagcccatttatattctcacgtgtactagcatattaggtgttgcacataacaaaagaaaatacaaatttacttgcaatgcttgtgctggcaatttaccagttaaggttttatccatgcctcatggcgcgccacactcgattttaaaaaaaaaaaaaaaaaaaaaaaaaaaaaaaaaaaaangaaaaaaaaaaaaaaaaan

SEQ ID NO: 5268 - DNA, 735 bp, Glycine max
ggaattcgtttcgacgatttatttaactcacccttgttgcatgttccttacttcctttgaaacctttggccaccaacacacacacttagatcaactttcctcgtcccttgctttccactccaccaaggtaccaaccaacctaccaaatggcagcaaagccagctgaagaagctcctcaaggagaaaccctcaagtaccagtcgtgggttttgaaagtattgatccactgcgatggctgcaaaaggagagtcaagaaaattcttcagggaattgatggggtttatacaacagaggttgattctctgcagcacaaggttactgtcactggtaacgtggacgctgagactctcatcaagaggctttcaagatcagggagggtagtggagctttggccagaaaaaccacctgagaagaaagataatcagaagtctgggaaatccaataaggggggtggtgatggtaataaagagaaggaagaccaaaagaatagtgaaccagatgctgatggtggtggttcaaatgagggttctaaagacgctcccggtgaagattctgacaaagaaggtcatagtgatgaatgtgaggagggaattggtggtggtggtggtgaaggtggcaaaaagaagaaaaagaaaaagaagaagaagaacaaaggggaaaacggtggttctgcatctgctcctcctaatagggaggaggaggagaagaattagtaaagttgatgcattagtccct

SEQ ID NO: 5269 - DNA, 1472 bp, Glycine max
atatagtggtggagcaagcaaaaggaaacgttaacgtctggtattaactccccagtccccacggctatcaaaattccaatttgaatctcccaacggctatcaatatatttcaattaaaccctttttctccgatcgcaacgtccctttcgttttcacaatccaccgttcccaccgattagggtttataccgccatcgctttctccctttatcgcaaccaccaccgattccgaacccgtacctttgactttcgtcgagcatcaacaatggatcttcctccagaaatcgacggttacatcaaggaatccatcgaccacagcgtgggccttcccgtatcctcgcaaaccctcctctccaagcttcacgcttcccaagaatcccagcgccaactccgcgaccagcacctcttcctcctctcgaaattgaaggagaaagacgatctcatcgaacgcgctagatgtgaggcgaacatgaacgcgcaagcagtgaagaggttcgttgaggagaatcagaagttggcagcggagtgtgagagtctggtggagcagcgtgtgaaattggagcgggaatgcgcgctctatgaccacgacagggaagcgttaatggagtttgggaacgaggccgatgaacgcgcgcaggaggctcaggagcgtgcactcgagttggaacgcgatttgtgcttgttggagcaggaattgatcaaatacaagcagcagaacgaattggttgattcttcttctggaagtacacttgatgaagagaatttgcttgactcccttttggctacagttactactactacagatgagtcttctacatatgcattcttgagtgcaaacagtgaaaatgagcactgtgagaagatgctgacaatgtggaactgcttgaagccatcaacacggagagttctgtgtcttgttgctgaagtcaaatctctagagaatgataaagaaaacctaagggttaaccttcacagagctgaagaggaggtcaaattattgtttgatgaaaatagcgtcttggatgaggagaacaaaagattagcgaagcgatgcaagggaaggaaccacagcagttctggtgggaaacctactggcagtgcatctgtgaagtcaaacaagagaaaatctagtcccaagatatgtagcccaatggcaaggaagattgattttgaagatgtagattcagcaagaacacccttgtcgcctttggaaaatgaactctcccgactgccgcatgtataagaaataaaaggaactaatgtcattagacagggctgataatttcttttaatacaaagttgttatgatggggtttctgattagtagtctatcactagtaagaattgcatgctatgggatcacattcttacttgggaatgaaagccatttttttttttttgttgaactcataacatgtaattttctcaattcatggcttatgcgaggcaactctttgctaaaaaaaaaaaaaa

SEQ ID NO: 5270 - DNA, 1040 bp, Glycine max
aggcttgttactgttgcatcaggagctgcttcagggaaactgttgcaatatgaggtcgggggtccaaaggtttctgtccaaacagcttatggtgtggaagttgaggtggaaaacaatccttatgatccaaatctgatggttttcatggattacagagactacatgaagcaaaatgttcaatgtccagaagcaaattatccaacatttctttatgcaatgcccatgtcccgtacaaaagtgttctttgaggaaacctgtttagcatcaaaagatgctatgccttttgatttactaaagaagaagctcttttcgagattaaatacaatggggatcagaattaagaaaacttatgaagaggaatggtcttatatcccagttggtggatccctaccgaacacagaacaaaagaaccttgcatttggtgcagctgccagcatggtgcatccagctacagggtactccgttgtgagatctttgtcagaagctccaaaatatgcttcagtaattgctactattttgaaagatggtcatgccaaggacatcattactcaagaaagaagaaaggagaatctatctatgcaagcttggaatacactttggcctcaagaacggaaacggcagagagcattctttctttttggattagccctaattctgcagctggacattgagggcattcgaacattctttcgtactttcttctgcttacctgattggatgtggcagggatttcttggctcctccctctcatctacagatcttgtattatttgcattctacatgttcataatagcaccaaataacttaagaatgggtctagtcagacatctactttcggatcctactggtgcaactatgataaagacttacttaacgatatagtacgtttctataacttatttattccccaccctaggtaccctgtattgggacacgggttagattactataggagcctcaatagtagttcgtagattcttgtatagacatacatattttattaaaaccagagatatgttcttatgatttttaaaaaaaaa

SEQ ID NO: 5271 - DNA, 821 bp, Glycine max
tttacggctgcgagaagacgacagaattagagggccattttgcaattaaaaagtcctctctacccagcgagaaccgcttgagagcagcagtgaggtagaaaggaaatggtgagagtaagcaaagaggttctgcaaaaagcagccaaaaccctatccgacatcctcgtatgccctctctctaagcaacctttgaggtattgtcaggaatcaaattccctaatcagtgatgctattggcgttgccttccctataaaaaatgggataccatgcttggttccaagagatgggaaggtactcgaggaggaagatgcttcaaaacctgatcatgatatcaatttatctgcagtgaatgaagagaatcgaggaagaagtgcgtaatatgtagtgtaagatgtttggacttcaatttttatgatcaactgtctgtgtaccttggtggtggtggaatgttgtgtgagtaagaagttaccctgtttacactttggtgaagaaacctttctttttctttcttttccttcaatggaaaaattttccccttccctctcattgttttaatagttgatttgtatctatgagatttctctctctaactacatgatttagggtttattatcactcctgtgaaatttagtagtgatacacccaagagtcgcttgtcgaaagctttcttttcttccttcttagttccaactcttctggaggtaaagaaaaaaaaactataactcttgttcaataagaagtgttgaggatactaacctccattgaagagatataaggatttcctattggatatagagatgtataatattaattgctttccc

SEQ ID NO: 5272 - DNA, 1611 bp, Glycine max
tcagctacgtaggccccccccccccagttgatcctatggtttttggtgtagaaatattgggaagctggtgggaactgcaatatggctatagcagctgcaaggttaggactcaactgcatatcaattggtcatgtgggtaatgaaatctatgggaagtttctgtcagatgtgcttcgtgatgagggcattggtttggttgggatgattactaatgacgatatcgtcaacagctctagtggtagtgcctcttgtgaaactcttttatgttgggttcttgttgatcctttacaaagacatggtttttgcagtcgggctgatttttgcgaggagcctatattgcattggatgagtaaattgtccagtgaagttaaaatggctattaaaaattcaaaggtcttgttctgtaatggatatggatttgatgagctctctcctggtgcactactctcagcaatggaatatgctgttgaagttggcacatcaatcttctttgatcctggaccacgtggaaagagtctctccactgggaccccagatgaacaaagagctcttaaccagttactgagaatgagtgatgttcttcttctaacttctgaggaggctgaggaattaaccggcataaacgatccaatattagcagggcaggagtttctcaaaagagggattcgcacaaaatgggtgattgtaaaaatgggttctaagggttcaattcttataacagcatcgagtgtagcttgtgcacctgcattcaaggtgaatgttattgacactgttggatgtggagacagttttgttgctgctattgtctatggttttatacataatatgccactggttaatacattggcaattgcaaatgcagtgggtgctgcaacagccatgggctgtggtgctggtaggaatgtagcaacactggagaatgtagtacatatattaagatcatcaaacctcagcgaagatgatgaattttggattgaaatacttgaaaagaatgtggttgctcaggaaataacatacctgtcaaatgttatgaacggaaacaaaaaccgtctcaaccttgtctcatttgacaaggttgcctctgagctcttgcctaagcttgaacttccacaaacagtggggaatgcgccaacttgataggttgtggaaaaatagattgaagtgcattcatgcgaaagaacacttctgattcttgggttcttggctttatcctgtaaaagtaaaaatttaagcattaagactgcagagttttatctctcttgggttacataaattgccgtagctaaattgctttgagcaagtacatgaaaggtagctagcttctcatcaagcactttaactgatttttggcatttcagtctcaacaggattcctttgattttgatgtcaaaggtatttttactccctgaaccagtggagcagagctcttatcctctgagatcccaatgtttttgcatcattttttgcatgaatgcttctcaaacagtgtatgtaatagtcttcatcttatcatagttgattgttgacgcagacagggaaagattgtttgtatgacttaaaatatttgattagggattactctacaatagtttgtcaaaaaaaaaacggccg

SEQ ID NO: 5273 - DNA, 1123 bp, Glycine max
  misc_feature (21)..(21): n is a, c, g, or t
  misc_feature (68)..(74): n is a, c, g, or t
  misc_feature (239)..(243): n is a, c, g, or t
atgaaagatcatatatcaaancaaaatgtcctgaacgttgcttgtggtttcttcaactggaagatttnnnnnnnttaatgattcaaatatgaatttcaaaggaataaccaagctcaagtgtttggtttactctaaatatatgctgttatttcttcattgattgttcaaatatgacgtctctcgcaataatatttactgaacttatgtctgacaactgtgtcctttgacaacattaatcnnnnngtgataaactaattcaatttctaaaatgttatcaggtgaatgttattgactctgttggatgtggagacagttttgttgctgctattgtctatggttttatacataatatgccactggttaatacattggcaattgcaaatgcagtgggtgctgcaacagcccatgggctgtggtgctggtaggaatgtagcaacactggagaatgtagtaaatatattaagatcatcaaacctcaacgaagatgatgaattttggattgaaatatttgaaaagaatgtggttgctcaggaaataacatatctgtcaaatgttatgaatggaaacaaaaatcgtctcaaccttgtctcatttgacaaggttgcctctgagctcttgcccaagcttgaacttccacaaacagtggggaatgtgccaacttgatagattgtggaaaaatagattgaagtgcattcatgcgaaagaactcttctgattcctggtttcttcgcttcttcatcctgtaaaagtaaaaatttaagcattaagactgcagagttttatctctctcgggttacataaattgccgtagctaaattttgctttgagcaagtacatgaaaggtagatagcttctcatcaagctctttaactgatttttggcatttcagtttcgacagtattcctttgattttgatggcaaaggtatctttactccctgaaccagtggagcagagctgttaacctctgagatcccaatatttttgcatcattttttgcatgattgcttctcaaacggtgaatagtctccatatttttatagttgattgttgacgcagacagggaaagattgtttgtatgacttaaaatatttgattagagattactctacaatagttttgtct

SEQ ID NO: 5274 - DNA, 1898 bp, Glycine max
tttgctctcaagaaatggacggagtccgtgaataattttgatgaaaacctcagctacgtaggccccccccccgagagaagaatgatcgcgaaactaagccccaaagagaggagataaagcaaaaagcaagtgggactgccacgctaattgatatctctctctgcgttggtgtgttggtgtttaggatttgcatcaacgaagaaagatgggagatgtagcagataaattggcgtatttccaagcgataaccggtttagaagatccagacctctgcaccgaaatcctcgctgcacacaattgggacctcgaactcgctatatctaccttcacctcttcttcaaacccttcctccaccgacactcccctgcaaccccaccctaacgaccatgttccctccgcatccaatccccaaccccaaccccaacaccaacatcctccaccgcctcccggtttggcttggaaactcatcaccctacccgtttccgtcatttccggcagcctagggttagtttccggcgcgatcggcttgggcctttgggccgcgggaggcgtcctctcctactctctcggcctcgtgggcctgggctcgccctcgggctctggctcgggctcctcctcggccccgttggtttccgtgacggcggccgcttccgaggcgatggatttcgtggccgcgttcgagagggactatggctcctttgggcccaatttcgtcggtgagggcttcatggacgcgcttcagcggtccaggaactcgttcaagcttctcttcgtttacttgcattcccccgatcaccccgatacgccgtccttttgccagaggacgctctgctctgagaccattgcggcgtttgtgaacgagaatttcgtgtgctggggtggcagcattcgcgccagcgaagggtttaagatgagtaacagcttgaaggcttctcgcttccccttctgcgccctcgtcatggccgccactaatcagaggatcgcgctccttcaacaggtcgaaggtccaaaatccagtgaggagctgctagtgaccctgcagagagtgcttgaggaaagttcccctgttcttgttgcggctaggcttgatgcagaagaaagaagaaataatatgcgcttaagggaggagcaagatgctgcatacagggctgcacttgaagctgatcaagctagggaacgacagagaagagaagaagaagaacgtcttgcaagggaagctgctgaagctgagagaaagcgcaaggaagaggaggaggctcgggaaagagcagcacaagaagctgccgagaaacaagctgcattagctaacatacgtcaagagaaagctctgtctcttggtgaagaacctgcaaaaggacctaatgttacacaggttttggtacggtttccaaatggtgaacgcaaggaaaggaggttcaacagcatagtgacaattcaatctttatatgactatgttgactcacttggatgtttagaagccgagagttacagtctggtctccaattttcctaggactgtttatggacaagagaagttgacattgtcattgaaggaagctggattgcatcctcaggccagcctgtttgtggagctcagttcatgagagtaaaactttgcttaatattcttatgaatacaacatgaggcctgaaaatagggatttctgcgatgtttcattcttctgtttaaaagaattgacttgctgaacaattataaacgttagataaataggttgtcatggtttatgtagttttggtttctcttattttcaattcaatcagtcaagcagatagcgttacatggagacgagatgatctagaataatatatataatatacatatttggaaaaaaaaaaaaaaaatgaaaaaaaaaaaaaagataataaaaaaaaagggcgg

SEQ ID NO: 5275 - DNA, 1160 bp, Glycine max
accgaaaaggctgcataaaccccacaacaaccccaaacccttcactctttcgattttcgaaggtaaaaagatgaatctgaagaacatgaaggttccgaacgttccaggtggcggggggatctctgcgctgctgaagcttgggattgttggtggaattggtttgtatgcagctgctaacagtctctacaatgttgatggaggtcaccgagccattgttttcaaccgtctagttggtgtcaaagacaaggtctatcctgaaggaactcacttcataattccgtggtttgagaggccggttatctatgatgtccgtgcacgaccccatctagttgagagtacatctgggagtcgtgatctacagatggtgaaaattggacttcgagttcttactcgcccgttgcccaaccaattacctacggtttatcggacccttggagagaattataatgaaagggttttaccttcaatcatacatgaaactttgaaagccgtggttgcccagtacaatgccagccagcttattactcagcgagaggctgttagtcgggaaatccggaagattttgactgaaagggctgctaacttcaatattgcccttgatgatgtgtcaattactagtctgacttttggcaaggagtttactgctgcaattgaagcaaagcaggtagctgcacaagaagctgagagggctaaatttgttgtagaaaaagctgagcaagacaagagaagtgctgtaatcagagcacagggagaagcaaaaagtgcccaactaattggacaggctattgccaacaatccagcttttatcacattgaggaagatagaagctgcacgagagattgcacataccatatcaaacgcggcaaacaaggtttacctgaattcagatgatctgctgttgaatcttcaaaagatgaatttggagccaggcagaaagtgagtggttggtagcctgtttgtttctttttgtttttagcttgtaaacgatcaatttcaggatacatcttcttgatatgttttcgtaaattcggatatagctgtcttgattagactactgaacggtaaccctttgaatcttttgcaaaggattaattgaggtccaaactaatgcttcacattacatgaatgaaataatttcagctagagagtttggaatcctg

SEQ ID NO: 5276 - DNA, 1158 bp, Glycine max
cttaaaaggattccaatgagcctttttacatatatgcaacttcccttgatcaccggaactcagaagagaacttaggggagaaaatgatgatcacagaagatgaaacgactcttacagcaagcaaagaacaacaaagtgaaatgatgaacggagacaaggacaatcatggaagcgaagatgacaactccaaagagtggttgaacctgagcataggtggaactactactttactctcaacagctgtaccaccagccactgccaaagttttttcatgcaacttctgcatgaggaagttctttagctcacaggcactaggaggccatcagaacgctcacaagagggaaaggggtgctgccagaagataccaatctcagaggtcgatggcaataatgggattctccatgaacacactaactatgtgtcgatcacttggtgttcagccacactcacttgtgcacaagccatgcagagatggtatcatggtggcaccgagctttcatgatgcatatgcaaggattgggatggcatggacacctttctggaccgaggatcaagcggatatggtgtggccaggcagctttcgcttggttccaaaacagccacagtcaccacaggagccactcaagcttgatttagacctcagactctgacaagaggtttggtctcagcttggagccttatcctcctttttagccaaaagagcttgttcgttagtgagctgggagagtcaataactcagatgctgctgctactgcatagtaaatggtaggagatttttgtttttcattgtctatatgactacatgtttagcaccagaaaacccaagttataactccctggctatctattttagttccttcaagtttgatataactcctgatatgcagtgctcacttgacaatgttactgacttggggagatttagcttttcgacattaaagtcctgattttcttcctgcatgtactttagaacatcttattcgattgacagaagattaaaaaagttaagagcaaggactacagaaaacaatttgtggatgctaggtacgttcaagatggaatgcttccaacatgtgtaaagcctcaattctaatactagattttaattaaagacaacatacgaatgaaactttccagtatgacaattgatgctttgcc

SEQ ID NO: 5277 - DNA, 1649 bp, Glycine max
  misc_feature (35)..(35): n is a, c, g, or t
ttttttttttttttttttaacgtgaaaaaactaanaatgctgtggcacgcttctagtttagatggtggtgatcttgcatgaccataatgtcacaacatacaaattaaacacattgttgatttgatattaatacaaacaaaattatatggcgaatcacatatttatccatgcatggttttatatgaccatagcattacaattggaaactttccacatatggtgttacagttcttcatgatagtcgtgttacagttcgtcatgatagagtatttcctccaacaattttttcttcttacaaccccaattgcatttggtgttgcacaaggaattaaacagtgcaagcctagtggattgaagttgtataatgcttgaggtagaaggagattttgagagaacaattgcatacccatcatccatgttatcggttccatcaggaaaaaattgccacaaaaggcttccagccccactccctcctttctttgtggagtttaggatggtactgtacacagtgcttataaccgtgtctctatatgatgaattatagccagggtctttggaagatacaccaaactccgcaaaaacaactggcattccaagatacctttcagcatcctctatatgggcttccatccatgattttacaaatgggatatgtgtatcagcaatttgttgtgaaatccaagagtcaggatacatgtgaacagaagcgaagtccacaccaagaaccaggtggtttcggataaaatcagttccaacctgtgtagcatatgtgttgggattgaactgagttctctgaggtgttgatgggccataaaatccttctactccaacctccactaggtgctttggatcaattttcttcacatggaatgccatttcttgtatccaatcctgtaacttgtcacccgtgggatctgaggtgcaacgaggctcattcatcaactcccaagcgaaaattgttggatcttccttataagtgatgtttgtgaatgtgttaactctattgagcacagtcttaacatgggccttgtagtagcttctaagagttggatgtgagaagaagtcatcatcagaggtcaagttaaggccagcagcattgccccatttcacatattgtgctttgcctccatatgcctcccagttgttggccaatgataatataagcctgattttgtatttctttgcttcacttaccacaaaatccaaagccttgaagacttcttcatcataaactgatggggatttctgtagggccctccactggccatcattgaatgcccaagtcctacaaactgtcataccaactgaggatgcttgtttgaacacctcagtgacctttcctctggtggactcatctgcagcaaataccatcagccaatacgtgttgaatccattgacatagaaaggtttgtcattcaccacaaattggtttcctttcttttgcaccatctgccaatcatcatctttcatgcccctcatttcatcattatttgagagagaattttccatttcattttggtcttctttgagtccttcctcatcctttatactgtcaccaagtgcattggaacttaaatttttagtaagcatcaaaagaagaatcaaagaaataatgcacacaccaaagctctccattgagcttggttgcc

SEQ ID NO: 5278 - DNA, 1349 bp, Glycine max
ggttggttaggcttaggggcaatggctggatttgtgttgcttttcaacgtgatgttttctgctgcactcgagatccttggcccatttgataagccacaagcaacaataaccgaagaagaatcacctaatgaaggaaccgtagcagaagttgaattacctcgcatagaaagttcaggaagaggtgattctgttgtggagtccagccatggaaagaaaaaaggaatggttcttccttttgagccacattctatcacctttgatgaagtcatatactctgttgacatgccacaggaaatgaaggaacagggtgtacaagaggacagattggtgcttttgaagggtgttagtggtgcattcaggcctggtgttctcacagctttgatgggtgtaagtggagctggtaagactactttgatggatgttctggctggtaggaaaaccggaggatatattgatggaagcatcaaaatttctgggtaccctaagaagcaagaaacatttgctcgtatctctggctactgtgagcaaaatgatatccactcacctcatgttacagtttacgaatccttgctctactctgcatggcttcgtttaccttcaggtgttgattccaaaaccagaaagatgttcattgaggaagtcatggaactggtggagctgaacccattaaggaactcactggttggattgcccggtgtgagtggtctctcaactgaacaacgaaagagactgactattgcagttgaattagtggctaacccgtccataattttcatggatgagcctacttctgggttagatgcaagagctgctgcaattgttatgagaacagtcaggaatactgtggacactggaagaaccgttgtttgcaccatccatcagcctagcattgacatatttgaagcattcgatgagctattcctaatgaagcgtggaggacaagaaatatatgttgggccattgggtcgccactctactcatttgatcaagtattttgagagcattggaggggtgagcaaaatcaaagacggatataacccggctacttggatgttggaagttacaacttcagcacaagaacttagtttgggtgttgattttactgacttgtacaagaattctgatctatataggagaaacaagcagcttatacaagaactgggtcaacctgctcccggttcaaaggatctttatttccctactcaatactctcagtcattcttggtccaatgccaagcttgcttatggaaaccacggtgggcatatgggcgtaatcaacatacactgctggagggttttttttacttatttcattagccttgatggtcggaccaatggtctggaacctg

SEQ ID NO: 5279 - DNA, 1377 bp, Glycine max
aaaatcggggcgacgcacgcgggcggggtgagcaaaatcaaagacggatataacccggctacttggatgttggaagttacaacttcagcacaagaacttagtttgggtgttgattttactgacttgtacaagaattctgatctatataggagaaacaagcagcttatacaagaactgggtcaacctgctcccggttcaaaggatctttatttccctactcaatactctcagtcattcttggtccaatgccaagcttgcttatggaaacaacgttggtcatattggcgtaatccaccatacactgctgtgaggtttttcttcactactttcatagccctgatgttcggaacaatgttctgggacctcggaagcagacgtacaacaagaggagacctgttgaatgctctaggttcaatgtattctgctgttctcttccttggaatacaaaatgcttcctctgttcagccagtggtagcagttgaaaggactgtcttttatagagaaaaagctgccggaatgtattctgccttaccctatgcatttgcacaggttctggtagagataccatatatcttcgctcaagctgtgacatacggtttaattgtttatgccatgatcggatttgactggactgcagagaaattcttttggtatctatttttcagtttcttctcattgttgtactttactttctacggcatgatggctgtgggagtgacgccaaaccaccatgttgctgccattgtggctgctgcattttatgcaatttggaatctcttctcaggatttatcgtcgtaagacctaaaatgcccgtgtggtggagatggtactattgggcatgtcctgtggcttggaccttgtatggattgattgcatctcagtttggagatataactgaaagaatgccgggtgaagataacaagatggtgaaagaattcatagaagactattttggtttcaaacatgacttcgttggaatttgtgctgttgtggttgctggcatcgccgttgcctttgcattaatctttggtgctgcaatcaagacctttaacttccaaaagagatagatggatagattgaactctttctccaacgtcaaagattctttatattttctccctttttctttttttcttcttgtttttgttttccctttaagcttataatatttgtatctatcatttaatcatttgtgcaaaaccagcccgtttgaaggctgtcctttataaatgtatgatgaatttcaaaagaaagatttttgatacttaccacataagcataatgatgtacatcccataaataaatcaaaaacgtattctattacgagttgataagatttataaaaaaaaaaaaaaaaaaaaaaaaaaaaaaaaaaa

SEQ ID NO: 5280 - DNA, 1632 bp, Glycine max
  misc_feature (860)..(860): n is a, c, g, or t
ctgacgcgtgggtcgcagctacgtaggcccccccccccgtgtacattataatcttaaaaagagtgttcttgtcactccatcagacaattggctccgctgtgatgattctttggtcatgcagtttttggagataaaaaatggatataactatttcagatatgtacactcgctatcctactcccaatctcagagagcatttgaagctgccaaagcaattaatgacataaatggcatagcgagcatattacagcaccgtccttatcatatagattcccttctaacaatggcagaatattttgcggtattgggtgaacaacagatgtctgcagatgctattgccaggtgtctatatgcccttgaatgtgcatggcatcccatgttcaatccactgcagggaaattgccagctgaagttcaaacatgatacaaacaaaccaatattcacagctcttttcactcacatgaaaaatttggacaggcgtggctgtcatagatctgccttagaggtctgcaaattgttgctttcgctagattctgatgatcccatgggggctattttctgcatcgactactttgctttaagggctgaggagtatgcatggctggagaagttttctgaagaatataaaagtgataactccatttggttgtttccaaacttctcttattcccttgccatttggtcgggtttaccttgaagcgtgaggcctgcaaagatgattgtatggatgctgaaaaggcttcttcatcggatcttatgaaacaagcattggatgcttcatccctcagtcataaagaagctagtcgcaaaagtaccattgaaagatcgcacatggacagatattctcaagcatgcttttntctggtcagatcaaacaggaattccatctcaagatcacttgattaatatatatgttgagagaaattatcttatatggaggcttcctgatctgcaaaaactgcttagtggtgctgcaaaactagtgattgaaacacttgaaagtaataaaagtgaacttaaggattgggcttgtgtcagaaaagaagcattttcatctgagaaaaatgagtatggacatttgttggtatccgagttctctgattcactttcatcgattcctcgagaaaatctgcaacaatttatgggtgttccgaggatgatggagggtatgcaggatgagaaccaatttgctaatctgcctggcaatggccatgctcctcgtggtgttgcaaataggaatgcattagctgtcttgtttgagtcaatgctgccgtgggttacttacgaggatggagtggatggtgaacctgatgataaccaacacgatgaccacaggcaagacaatcaatgattctggaggccgctggccttcctgctctgaagggcctatttttggctggagtgttgtactcaatgatgagatgtctttcttgtacagagcaacgcctagggagcttcatgtcttctgctattatgttgatcattttcaaccatatgggcactctagatgcataaaaatgccatatgattttgtggtgtctaattttagggatattgatgtcaagtgttataccatatctttttggctggagtgttatgaattttgcatttgatatacttaaatttttgtca

SEQ ID NO: 5281 - DNA, 786 bp, Glycine max
tgttaaattaccttttatggaggattcctgatctgcaaaaagtgctaagtggtgctgcaaaactagtgattgaaacactagaaagtaatataagtgaagtctaggattgggcttgtgtcagaaaagaagcattttcatctgagaaaaatgagtatggacatttgatggtatctgatttctctgattcactttcatcgattccacgagaaaatctgcaacaatttatgggtgttccaaggatgatggagggtatgcaggatgagaaccaatttgctaatctacctggcaatggccatgctcctcgccgtgttgcaaataggaatgcattagctgtcttgtttgagtcaatgctaccgtgggttacttatgaggatggggtggatggtggacctgatgatgaccaacatgatgaccacaggcaagacaatcaatgattctggatgcaactggccttcctgctctgaagggcctatttttggctggagtgttgtactcaatgatgagatgcctttcttgtacagtgtgacgcctagggagcttgatgtcttctgctattatgttgatcattgtcaaccatatgggcactctagatgcataaaaatgccatataattttgtggtgtctaagtttatggatattgatgtcaaatgttataccgttgccattatgaatttttcatttgatatactttaaatttttgtcaactttgttgtttaataatgtattgtcacacaagagtttagatattataacatctacttaagttcgaattcttttataaaaaaa

SEQ ID NO: 5282 - DNA, 490 bp, Glycine max
ggcagatgtgaatgtgagagacacccatgaatgacagaatgaaatgaactgagtaacaccaacgctgctttcttcattctttcattcattcgaatgtgttcttttgcgattgaatttgagggaacaataatcgattttcgctttctgggcacccctgaattcccctgcatcgctgtgaaagtagttcagttcgaacaacgaaaacgatgtcggctcgattgatgaagaaggttctgaacgagcagcatcaccttccgcaacacgtgagcgaagaagaagaagaagaagagaacgattctgagcccatcactcgttcctccatcaaccccttcgacctcctcaacgacaacgattctgagcccgaagaccagggagatgagttgatgtccaccaatgaaatattgacaagttatgatgacaaagaggagtcagcttcattgaaacctactgctgaggtttccacatcaaatccaaaaaaaaaaaaaaaaaa

SEQ ID NO: 5283 - DNA, 1159 bp, Glycine max
tcgcgctcgatccgctaagcaacacacccaacaaaaaaccacagaggtgctctgttgctaagttcttaactgtgaattctccaatagtattatcaatgttgagagtgaagggagggagcaggccgccgtgggttgggctcggcgccgccgtgtgggtccagatcgcgtcggggaacaccttcaccttccccctctactcccactccttgaagtcagttctcggcttcgaccagcgccatgtcacgctcctcggtgtcgccatcgacatcggcgaaaacctcggcctcctccccggcgtcgcctgcaacaagttgcccccttggctcctcctcgtcgtcggctccctcgccgccttcctcggctacggcctcctcttcctcgccatctccgaaactcttcactccctcccttacataacgctatggtttgctctagttgttgctgctaacagtagtgcgtggttaaccactgccgttctcgtgaccaacatgagaaacttccctgctagcagaggctctgttgctgggattctgaaaggttatggggggcttagtgctgcggtttttaccgagatttacagcattgtgcttcataattcttcttccaagttcctgttgtttattgctgttggtattcctgttgtttgcttcagcatgatgtttctcgttaggccttgtactccggccaccggtgacgaccctgtagagccttaccattttctgtttgtccaaggttccagcgtggtcttgggtgtgtaccttcttgcgactacggtagtgggcaatattattccatttagtggtgctgtttcgtatgttttggtggctgtgatgattctgctactcattgctccacttgctgtccctttgaagatgacattgtttcctaggaatggttctaaatcagactcgccagagcaacaagttgggtcttctgagggcaaagatgagaatgctgaaccactgctggcgtcttcgtcggcaggagcccttgggagttttgatgatcaggatgatttgtctgaggtggccgaacttcttgctttgggtgagggagcagtgaagcagaagaagagaaggccgaaacgtggggaagattttaagttcactgaggctatagtgaaggctgatttttggctgctattttttgtcttctttgt

SEQ ID NO: 5284 - DNA, 1257 bp, Glycine max
  misc_feature (1202)..(1208): n is a, c, g, or t
  misc_feature (1226)..(1226): n is a, c, g, or t
  misc_feature (1228)..(1229): n is a, c, g, or t
tcgagtcagctacgtaggccccccccccacattgccacataacacaacatcgaaaccctctctccctctccctctcttcctctccctctcttccaaccattccgaatgtgaacaagttgttgttgttgaacggtattatatatagtgtgtagtgtggtggtttttttttctcttcttgaaggtgcaaaaatgaatgatggtagacaaatgggggtgcattacgtagacgctgggttcccttatgctgttaatgataacttcgtggattttttccaaggattcactcatgtgcccgtcaattatgcctttgctggctcaattcctgatcaggaaagtgtctactggtcaatgaacatgaatccctataagtttggattgtctggtcctgggagtacatcttactatagttcttatgaggtaaatggtcatttgccgagaatggagatagatagggctgagtgggaatacccttcgacaattaccactgtggaagaaccagctacaacagattctccacctagaagagatggagtcacgagcatgcagaccatccctgaagaatgcagtccaaatcatcatgagtccaacagtagtagccaggtcatatggcaagacaacatctatcctgatgatatgacttatgaggaactactggacctgggagaggcagttgggactcaaagccggggtctttcccaagaacttattgatatgcttccaacctcaaagtacaaatttggtagcttattcaaaagaaacaattctgggaaaaggtgtgtaatttgtcagatgacatacagaagaggtgaccaacaaatgaaattaccatgcagccatgtctatcacggtgaatgcatcaccaagtggcttagcattaacaagaaatgtcctgtttgcaacaccgaggtttttggcgaggaatcaacgcattagcatcaagatggcaaaagggatcctttttgctctattaatttttgcttctcatccaactctccctctctctctctctctctctctttctctctctttctctttaagttttaatttcttacacgtaggtagatgtagtatgaagaactctatggcagctctcacaatatatgttttgtttactagaaacaacctaatggagtcgcatcttctagtggttaatgtgtgattttgtgtattcatgcaatatatattcctcttagctttaaaannnnnnnaaaaaaaaaaaaaaaaanannaaaaaaaaaaaaaaaaaaaaaaaaaaaa

SEQ ID NO: 5285 - DNA, 1717 bp, Glycine max
tcattcttcttacataataggggaaggagaagaaaaaaaatgaaataagaaaaactcaactttgtaattcgtggagggaatacttttccattacgcacgcactttaattacagacgagaaaattataattaatagtaatacagacagcagcatgcgcccaccggttattctcaaaactaccacctctcttttggattcttcttcttcttcaccaccctgtgatcgcagactcaacactctcgctagacacttccttccgcaaatggcttctcacgacagcatctccgcttctccaacctccgcttctgattccgtcttcaatcacctcgttcgtgctcccgaagatcctatcctcggggtaactgtcgcttataacaaagatccaagtccagttaagctcaacttgggagttggtgcttaccgaactgaggaaggaaaacctcttgttttgaatgtagtgaggcgagttgaacagcaactcataaatgacgtgtcacgcaacaaggaatatattccgatcgttgggcttgctgattttaataaattgagtgctaagcttatttttggggctgacagccctgctattcaagacaacagggttaccactgttcaatgcttgtctggaactggttctttaagagttgggggtgaatttttggctaaacactatcaccaacggactatatacttgccaacaccaacttggggcaatcacccgaaggttttcaacttagcaggcttgtctgtcaaaacataccgctactatgctccagcaacacgaggacttgactttcaaggacttctggaagaccttggttctgctccatctggatctattgttttgctacatgcatgcgcacataaccccactggtgtggatccaacccttgagcaatgggagcagattaggcagctaataagatcaaaagctttgttacctttctttgacagtgcttatcagggttttgctagtggaagtctagatgcagatgcccaacctgttcgtttgtttgttgctgatggaggcgaattgctggtagcacaaagctatgcaaagaatctgggtctttatggggaacgtgttggcgccttaagcattgtctgcaagtcagctgatgttgcaagcagggttgagagccagctgaagctagtgattaggcccatgtactcaagtcctcccattcatggtgcatccattgtggctgccattctcaaggaccggaatttgttcaatgactggactattgagttgaaggcaatggctgatcgcatcatcagtatgcgccaagaacttttcgatgctttatgttccagaggcacacctggcgattggagtcacattatcaaacagattggaatgtttactttcactggattgaatgcggaacaagtttccttcatgactaaagagttccatatatacatgacatctgatgggaggattagcatggctggtctgagttccaaaactgtcccacttctggcggatgcgatacatgcagctgtaacccgagttgtctaaaacatgttgacaacagttttcaacatgctccctagtccctataggagaacttccattatttttgtttaataattgtcaacatcaacaatgaaaccttttatttgatgtgagatttttaaaggaaacttttctgcctaccgggctccatccagagatttagcattataacatttttattccgtttcccctctctcc

SEQ ID NO: 5286 - DNA, 1746 bp, Glycine max
  misc_feature (1651)..(1655): n is a, c, g, or t
tcagctacgtaggccccccccccaaaagtttagatctaagaactaacactattactactcagagtcacacgcagagcccagaaaagaagctctttctctctaacaacaatgcctcccactgacggagacttggatcttaggccaccttctcaatcttccttcacagccggcgactacacgttcgccgatgcggacaatttggagcattgcgctaagtatctcaaccaatcgctcgtcacgtttggtttcccggcttcgctcgatctcttcgcaaatgaccccgtttcaattgcgaggacttgcaattgcatttacgtcttgctgcagcagagacagcgcgacgtggagtttagagagtctgctaatgatcaaagacaacgactgttgtctgacatttcgagattggaggccaaagtggagaggcttgaaggtcaactacaagtcaaagacagggagatagcgactattactagaacggaagctaaaaacactgcagctctgaaggcccaaattgagaagctgcaacaggagagggatgaattccagagaatggttattggtaatcagcaagtaaagactcaacaaatgcatgagatgaagaagaaggaaaaagaatacataaagttgcaggagaggctaaaccaagtgttgatggagaagaagaaagagtctaggtcaggcatggagataatgaatttgcttcagaaggaagggaggcaacgtggaacatggaatgggaagaaagctgacaatgatttttataaaaagattgtggatgcttatgagtcaaaaaatcaagaactgatggcagagaatgctgatttaagagcattattgagatcaatgcaggtggatatgcgtgatttcttaaatgctcctaatggactaccaaagcaatctttcactggcaatgaaagagttgaaagtgatccttcacaatctccattggttgggaaaatggatgtatttgaccttccttttcacatggccagagatcaaatagaagaaagtcttcgcaacaaaatggcttctataaaggagcgtatggttcaattgcaagatgctcaaaaagaagcagaagttacttcagaggctactgagagggaacttgagcttgaagctcaacttgtcgaagcaaggagcatcatacaggagcaggcatcaataatgtctaaacatcttgcaaaatctgacaggccaagggaatctatcatcccagcaccggctgaggcagtatgcaattaacaaagctgaggatactcacatttgatgcctggcatgattaattgagttggctctgcagtgtaacaggaacggacagcatgcttttagcctgtgtttctaatcttgcttgttcatcttgcactgccctagtttatgataagaggcccgagtatggtcgaatatcattgtaattattagcatggtgttgtaattagtgttattgtacccttggaactgctagaagaaaaaatagatcatatttatgtcacaagaaccattcaaactacatactaacatttaagattgacagctagaaatattttataatatcactttgggctcttccaaaattaaaaaaacatgtctcatttattcggtgggaaatatacaggtcacacatttatagaagaaatagttgtagttttgnnnnntgaatgctgagggattactcgggacctagtgtcctacaaagccaccaattactacaaaatgtttccatcttaggatctttagtgatgtgaa

SEQ ID NO: 5287 - DNA, 1443 bp, Glycine max
aaccctctttggcgtggctaacaaaacgacgttttgagtaacgcggcagcgtgtgccgggagtgtcgtttaatcgcccgccaagacattttcctttttcttttcatcgctgagtccctaaagtgcagtgaaatggtccttcttcacctcccaaggttccctctctacctcgttaccttatctccctccctcactctccgagcctactccaaaaccaccctcttacggccacccaaatccactctcaccgcctcagaacccgtaagtgttaacccttccccaacagagctatccctcgagaagctcttcgttccgccggagaccaccgtgtccctcgaaagttccagagtcttgaacggttccaacattctgttgagtaactacgccaatgatgctctggtattgcaggccgagtttgtgaaaagcagcgtgaagactgaggattgtccctccgatggacttgctgagttcgctctcgttggccgctccaacgtcggaaaatcctcgctcctcaactccctcgtgcgccgcaagaagctcgccttaacttcgaagaaacctggcaaaacgcaatgtataaaccattttcggattaataatagctggtacctggttgatttgcctggatatgggtatgcatctgcaccgcatgaacttaggatggattgggaaaaattcaccaaagactatttccttaaccgctcaacgttagtttcagtattccttctaatagatgctagcattcctgctaaacaaattgatcttgactatgccagttggttgggtcagaatcagatcccaatgacattaatcttcaccaaatgtgacaagcggaaaaagaaaaagaatggaggcaaaagaccagaagaaaatgttaatgattttcaggatttgattcgaggtttcttccaatcagtgcctccatggatcatgaccagtagtgttaccaatcagggtcgtgatgagatactcctccatatggcccagctacggaactactggctcaagcactagttctgagaaacatgatatcgttagagcagatacgcatttccagatagacttgcttgattaccagctaatatggttatcaatttatctattttcctggtgtgccttctctgtattgcccaagtacctacaaggcctaaagctagtgacatgaaagctggataaagaaaactatttagaacaaagcttgatactgtactgtacaacaccatgcctgcgtgaggttctctactcccagccctgtacgattgttctaatgaagtttgttttggatgttcacaaatggttattatcacctgtaaattagtaatgatattttcattcaaataattggatacttccaaagtactattgtcgttgattttaaagaacttatatgtgagatttttgccactcccccgaagtgacacttcatagaaaaaaaaaaaaaaaa

SEQ ID NO: 5288 - DNA, 1732 bp, Glycine max
cccccgcgtccgccccgtccacccacgcggccggaggaagtgaaattttcgtgagcgacgacaaaacaaaaaccattcaattcaaagatagtaggctgccaggcaccgcacaccgccaccgcactttctccgatcctcacaattttgcctccggcatgtctccggccgccggagtcagcgtccccctcctgggggattccaaaggaacgccgccgccggcttccgtccccggcgcggtgttcaacgtggccaccagcatagtcggcgccggaatcatgtcgattccggcgatcatgaaggttctcggcgtagttcccgctttcgcgatgattctcgtggtggccgtgctggcggaactgtccgtggacttcctgatgcggttcacgcactccggcgaaacgacgacgtacgctggcgtcatgagggaggcgttcggatcgggtggagcattggccgcgcaagtttgcgtcatcatcaccaacgttgggggtttaattctctaccttatcatcatcggagatgtgctatctggaaagcaaaatggaggggaagtgcatttgggcattttgcaacagtggtttggaattcactggtggaattcccgggaatttgctttgcttttcaccttggtctttgttatgcttccattggtattgtacaaacgtgtagagtccttgaagtacagctctgcagtgtcaactcttcttgcagtggcatttgttggcatatgttgtgggttggctatcacagctctggtgcaaggaaaaacacaaactcctagattgtttcctcggctagactaccaaacctcattctttgatctgttcactgcagttcctgttgttgtcacagccttcacatttcactttaatgtgcaccccattgggtttgagcttgccaaggcatcccaaatgacaacagcagttcgattagcattattgctttgtgctgtgatctaccttgcaataggcttatttgggtacatgttatttggggattcaacccagtcagacattctcatcaattttgaccagaatgctggttcagcagttggttccttgctcaatagtttggtccgtgtaagctatgccctccacatcatgctggtgtttcctctcttgaacttctctttgagaaccaacatagatgaagttctcttccctaagaagcctatgctagccacagacaacaaaagatttatgatcctcactctggtgctgcttgtattctcctaccttgcagctatagcaatcccagatatttggtacttctttcagttcctgggatcctcatccgcagtgtgccttgccttcattttccccggctctattgttttaagggatgttaaaggtatatcaacgagaagagacaaaattattgcactgataatgattatactagctgtggttacaagtgtgcttgccatttccaccaacatatataatgcttttagtagcaagtcataaatacaagctggttctctcatttctccccttctattgttttttttatatgtatagaaaattttatttggggagagagggtatggctggggagattctagaggcatttggttgctgtggcgattgtgttacttttgtattttggatcccttgttgtttattgtagaattcatgtcttgtggcagcatttctatgtaaaataccaaatattaaagaaatgaaatcaacttgatggggtgacgtagttcgggccctttcctctcgctaaa

SEQ ID NO: 5289 - DNA, 2156 bp, Glycine max
  misc_feature (18)..(18): n is a, c, g, or t
cggtccggaattcccggngtcgacccacgcgtccggttttttcttctcctgcttttcagcccttccaaagaaagggtaaaagatgaacattcatgatttatccttgtaaggcggtgacaaaaaataatatagaaaagaagataccaactagaagtggaaacaaggaaaagcgggtggtgactgtatagtataaaatatacggctgcccagaagacgacagaaggggagtgacagacacactcgtgaatcgtgatttagcatttaccacaccaaaatcaatctgcggagtcagaaagccatggatccctacaagaatcggccatcaagcgccttcaattctcccttctggactacaaattccggtgctcccatctggaacaataactcatcgctgactgttggatctagaggtccaattctgctggaggattaccatctggtggagaagcttgcaaactttgacagggaacggatccccgaacgtgttgtccacgctcgtggagctagcgcaaagggtttctttgaagtcacgcatgacatttctcacctcacatgtgccgatttccttcgagcccctggagttcagacccccctcatcgtccgtttctccactgttatccacgagcgtggcagccccgaaaccctcagggatcccagaggttttgctgtcaaattctacaccagagagggtaacttcgaccttgtgggaaacaacttccctgtcttcttcgtccgcgatggcctcaagtttcctgacatggttcatgccctcaaacccaaccccaagtcccacatccaggagaattggaggatcctcgatttcttctcccaccatcccgaaagccttcacatgttctccttcttattcgacgacgttggtatccctcaagattacaggcatatggatggcttcggtgtcaacacctacacccttatcaacaaggccggcaaagcactctatgtcaaatttcattggaagaccacctctggcgaaaagtctcttttggacgacgaggccatcagggttggaggatccaaccacagtcatgccacccaggacctttacgattcaattgctgctggaaactatcctgagtggaaactctacatccaaacattggatcccgaaaacgaagacaggcttgactttgacccccttgatgttactaagacctggcccgaggacgttttgcccctccagcctgttggccgcatggtcttgaataagaacattgataacttctttgccgagaatgaacaacttgcattttgccctgccattattgtacctggtgtatactactccgatgataaattgcttcaaactcgcgtattctcctatgctgatacccagagacacagacttggaccaaattatctgcagcttcctgctaatgcccctaagtgtgcccatcacaacaatcaccatgatggtttcatgaatttcatgcacagggatgaagaggtcaattacttcccttcaaggtatgatcctgtccgtcatgcggaaaaggtccccgttcctcctcgtatcctaggtgggaagcgtgaaaagtgcatgattgagaaggagaacaacttcaagcaacctggggagagataccgatcctggccctctgacaggcaagaaaggtttgtccgccgatgggttgatgctttgtctgacccacgtgtcacccatgaaatccgtagcatctggatatcatactggtctcaggctgatcgttctcttggacaaaagatagcatctcacctgaacttgaagccaagtatctaagattggtggtggaaaccctagcttctaagagatgcagatgtaggaacaagtgagaagtttgtggcacagtattaatttgaaaggactggtccttttattacagtattgctatattgtatattgcttatttcatgaactcaacttcttgacttgtccacttaatactatatgtccattgtgataaggatgaggatctggacagttccatgattctctgtttacttgggcttactcttcatttatatttcaaataaattttataatgtcagttatgatagtcatcgctgactgaaggagaattttggcccagtggttagaagtgctgccgtgtgactagaaacagataacaggtttgggtacccgaatctctcttcacttc

SEQ ID NO: 5290 - DNA, 2219 bp, Glycine max
gataaacctatgtttggatgaaatgcgtatgatcattattttgcttgaggtagaggccttaattgacaaaagctagagataagagaactcacggtttaaacttgaaggaattatgaaatgatgatggtttacttgtgtttcctgccattctagcttcttcagccaatggctagtgtaggaccttgtaacatcccagaacccagtacatggaaacttgtggagcatagcaaatgggccagttggaaccagcttggaaacatgtcctccactgaagctatgcgtctttttgtaaaaatattggaggaagaagatcctggttggtattcaagagcatctaactctgttgtagaacctgtcatagatgtgcaaatgaatcaattccaaagttgaaccagtaattgagaatgggaactcttatccagagacaaagactatttccacccaaaatggaagtgaagttggaacacaggataaagatattggtgtggaaggctttggttcagttgaagtatatgatcaatggattgcacctccagtatctggaggaaatccaaaagcccgatatgagcatggagctgcagttgagcaagataaactgtacatatatggtggaaatcacaatggtcgataccttaatgatcttcatgttttggatttgagaagttggacttggtcaaagattgaagctaagactggagttgagtccccaacaacttcaatcccttgcgctggccattctttgattccatggggaaataagcttttgtcaattgcagggcatacaaaagatccttctgaaagtatccaagtgaaagagtttgatcttgaaacagctgcatggtcaactctaaagatttttgggaaagctccggtatcacgcggaggccaatcagtgaaccttgtagggaaaaccttagtaatttttggtgggcaagatgctaaaaggactctcttgaatgatctgcatattcttgacttggaaaccatgacatgggacgaaattgatgctgttggggtgccaccttctccaaggtccgatcatactgctgctgtacatgtggaccgatacttacttatctttggtgggggttcgcatgcaacatgctacaatgatttacatgttcttgatttgcaaactatggaatggtctcgccccacgcagctaggagaaataccatcaccacgtgctggacatgctggtgtgacagtaggggagaactggttcattgttggtggtggtgacaataagagtggggtctctgagacggttgtactgaatatgtctacactggcttggtcagtggtaacttctgttcaaggacgagttcctgttgccagtgagggattgagtttggttgtaagctcctatgatggtgaagatgtacttgtatcttttggagggtacaatggacgttacaacaatgaggtctatgttcttaaaccaagccacaaatcaaccttgcaatccaaaataattgaaaattccataccagacagtgtttcagctatcccaaatgtcacaaatgtggagtctgaatttgaagcaggccatgatgctgatccaccaaaatccaaaggtgatcttgtatcagtcttgaaggctgagaaagaagagttggagtcatcactgagcaaggagaaacagcatgctcttcaactaaagcaagatctggtggaagctgagtctcgtaactctgacctttacaaggagctccaatcagttcgtggtcagcttgcatctgagcaatcgaggtgtttcaaactcgaggtggaggttgctgaattaggtcagaagctccaaacgattgggacattacagaaggagctggagcttctccagcggcagaaggctgcatcagagcaagctgccttaaacgcaaaacagaggcagagttctggtggcgtgtggggttggcttgccggtactcctccccctagccggaatgcagatgatgcgtgaacctcttaactgaataccagtgctacattacttttggtttcattcagccaattttatttccaatatttactgtgtattaattcagttcttttttattgatgtaaataagatttagcttctatttggccaaaggattttccacaccggagaatgaggatcatggtatggtatagtgcgtgttactccatttttgctgatgattaaagtgagatacattattgaatgaattattctttttttttaaaaaaaaaaaaaaaaa

SEQ ID NO: 5291 - DNA, 2107 bp, Glycine max
ctcgagccgattcggctcgagattttatttcacatttttccctttgtatatggtagttgatttctttttccttttttgtgtaggaagaagatcctggttggtattcaagagcatctaactccgttctagaccctgttgttgatgtgcaaatgaatcacaattccaaagttgagccagtaattgagaatgcaaacgcatatccagagataaaaaccatttccactgaaaatggaagtcatgttggaactcaggataaggatgttgtcattgaaggctttggctcagttggagtatatgaccaatgggttgcacctccagtgtctggtcaacgtccaaaagccagatatgagcatggagctgcagtcgtgcaagataaattgtacatatatggtggaaaccacaatggtcgttaccttaatgatctccatgttctagatttgagaagttggacttggtcgaagattgaagctgaggttgttgaatctactaactcatcctcaataacattcccttgtgctggacattccttgattccatgggaaaataagctcctatcaattgctggtcatacaaaagatcctaatgaaagtatacaagtgaaagtgtttgatctgccaaacgctacatggtcaactctgaagacttatgggaaacccccggtctcacgtggcggacaatcagttacctttgtgggtacaagcttagtaatttttggtggagaagatgcaaagagaactctattgaatgatttacatattcttgatttggaaaccatgacatgggatgaaattgatgctgttggggtgcctccttctccaaggtctgatcatgctgcggctgttcatgtggagcgatacttgcttatctttggtgggggttcacatgcaacttgctacaatgatttacatgttctcgatatgcaaactatggaatggtcccggccaacacagctaggtgaaataccgacacctcgtgctggacatgctggtgtgacagtaggggagaactggttcattgttggcgggggtgacaataagagtggggtctcagagactgttgtgttgaatatggctacactgacttggtcagtggtaacttctgttcaagggcgtgttcctgttgctagtgagggctcgagtttggttgtaagctcttgtgatggtgaagacatacttgtatcatttggaggatacaatggacattacaataatgaggtctatgtccttaaaccaagccacaaatcaaccttgcaatcaaaactaatagaaaaccccattccatacagtgtttctggtgcgcataatgccgcaaatgctacccgagatctggattctgaagcaggccacaaagggattatcaaggaacttgtcatggacagtgttgattcaataaaatcaaaaggtgatgttataacagttctaaaggtcgagaaagaagatttggaatcatcgctctacaaagagaagttgcaaactcttcaactaaagcaagagctttcagaaactaaaactcgtaactctgatctttgcaaggaactccaatcaatacgtggtcagcttgcttctgagcagtcaaggtgtttcaaacttgaggtggaggttgctgaattaagtcagaagctccagacaattgggacactacagaaggaacttgagctcctgcagcggcaaaaagctgcatccgagctggctgccctgaatgcaaagcaaaagcagggttcaggtggtgtatggggttggcttgctggtgctcctccccctacccagaaagaagatgatgggtgatcgcgtgattaaactaactggattactatgctgcatttagtttcattagcccatttttacatccaatacacttattttttttattcaattctttttttggtgaagggaataaaatttagctttctgtttaggaaaaaccccccgtaggggtcttgcaattgcagtaatacatatttcacatattctgtaattttatttacttgttcaggacagtgcatgttgttgttcccgccaatttgctgatttgtttcgaatccactattgaatgaaaagataagtattcttctatttggaagaactatatccaaaaaaaagaaaaaaaa

SEQ ID NO: 5292 - DNA, 973 bp, Glycine max
tttacggctgcgagtgacgaccccccccggaacatcaatacatactttagggctgcagtttcgtgctttcccgccgccgctacactgccaccgtcttccccgccgtctccgccagagatggcagaagaggattcaaagcctctgaactacatctccgaggtcattctcaagaagaggaagaacaccgaagcatgggctttaaggaaaaaagaacagttccagcaaaagaaataccaatccatcaagaagccggaggatttcatccacgagtatcgcaacaaggaagtggaccttataagaatgaagcggagggtgaagaggaaagtgcctgaagctaactccaacactctaataatcattcggattcaggggaaaaaggacatgcatccgaggacgaggaaggtgttgtacagcttggggttgaggagaagattcagtgctgtgtttgtgaagccaagtgagggaataatggccaagctgcagagggtggaaccatatgtcacctatggatatcctaatcttaaaagcataaaggagctaatttacaaaaaaggacatgcaaggatggaacagcgaaaagttcccttgactgataataacattattgagcaggaattaggaaagttcggtattgtatgcatagaagacatggttcatcagatttataatgctggtccacactttaaggaagttgttagatttatgtggccctttgagctcaacaagccagctgaaggattgaaaggatcaaaaacctcattcaaagaagatggagacacagggaaccgtgaggatctcatcaacgaactgatcaataaaatgaattagtggcttttgtagtatcaaaattttgatgattactatgttcgttggatgatcctaggtgcaatatctgatttttcaagaaaccaatttattaccgagagaaacattgctacatgttcttgttatagtagagttttagtgtgtattt

SEQ ID NO: 5293 - DNA, 1425 bp, Glycine max
gttgttctgaaatttataaaaaaaaaaaaaaaaacacattttctgtcataaatcatttcaatttaatccaattcaatccttggcaatttttttgtcaatttagctgttgcaactgatactctaacagtgttttattctatgcatctctttaccaaattgcccctgctcaaagttgaaattctatagtcactttttaatttttttttttgttctgggtgtttttcttatctgtgttttgtttcaattgcgcgaggtgggtttttctagggtttggaggctatgccgaaagcgggttgaataagctcaggtgaagaaaatgattctcacaaagcagtaccgatgcatacactcagctagctgtcaatgtactaaagggcatttaagtgaagatgtgatattcttagtatttcataatttgaattggaatcccaagctaattgctactctatcatgtgtgtgcaaatggtttgatgatcttgccaagcgagttctatggaaagagttttgtagaacaagagctccgaaaatgttgtgtgatctgcaatctaatgggagccacattgttgatgggaactggagggccctagggaagcttcttatatactgttcaggatgcacaaaaggtggcttgttcaatagcattcagatccctggtcactttgtttatcagacacgattttctagaacatcaggaaagagctttcttttgccacaatgcagaactgatgttttgtatgtgtctgatccttgtgagcatcttgaccaaggtgaagaaggagatgtaggattcttccgtggcattttcaagtcatttgcaacctcaaaggtcaggaagatgcttattaataaaggtgccaagctccatccaacagaagtctgcccttattgtaaggcaaagttgtggagcatgctgcaagccaaaatgatccctcaaagtgctagttgcaggttgggttcttatgatgattgtattgagtattatgtgtgcctcaacggccacatgcttgggatatgtacactgttaccattgtctgattcagaagaggcatctgaattggagtaatacctaaatgattttcaggttggcagtaaatcttcacaagttggctaaacactgctggtatactccaggctcaattcaactaatcagcacctaaaatatgccattaacttaccctcaagcttgatgctgcaatctcacccaacccaagccacaatttccaaggaaggacggagatgatcaatttttagtatgaatcgttatactgaagtttgttactgtgaactatgtgatatcccatgtagattgatacgcggtgtctctacctgtgacaaatatgcgtgtgtaataattcatacttgttcaatataatcaggattcattctaaaaaaaaaaaaaaaaaaaaaagaaaaaaaaaaaaaaaa

SEQ ID NO: 5294 - DNA, 1095 bp, Glycine max
tcgcgggccaaaacagcagaaaaccctcttattttttcaaaattacccttttcgagcttggagttcccaacaactatcttattccttcactcactcctctctgcgcttggctatggaaaaaacgcacagctccagcgcagaggagcaggatccgacccggcgccacctggatcccccacccgggttaactgctgaagagttcgaggacctcaaaccctccgtgctggagcaccacacctactccgtcacacccacccgccaaagctcctccctcctcgcgcagcgcatccacgcgccaccacacgcggtgtggtccgtcgtgcgctgcttcgacaacccacaggcctacaagcacttcatcaagagctgccacgtcaaggagggcttccagctcgccgtggggtccacccgcgatgtccacgtcatctcagggctaccggctgccaccagcaccgagcgcctcgacctgctcgacgacgacagacacgtcatcggcttcaccatcgtcgggggcgaccacaggctcaggaactaccggtcagtcacctcggtgcacgggttcgagtgcgacggaaagatctggaccgttgttctggaatcgtacgtcgtggacgtgcccgaagggaacaccgaggaggacacgcgtctgtttgctgatactgttgtgaagctgaatctgcagaagctggcgtctgtcagcgaaggaatgtgcggtgacggtgacggtgacggtgacggtaagggtaataaatcatagtttgcgcgacccaaacccgaagaagaaaaagaaaaggttcgaaattgaaaattaaaaaagaaggaaatcattcggaaagcttttttttttatctttttttattggaagtgtttttgtttctatttttgggtgaacatgttattattactattattagttttatttttcactgtttgaaattactagcatgtcctttgtttggtggattggccaggttgaacttgtttcacgtgggaaataaagtggtggctttatttgttatttcaaaggtctatcctgtggatgttgatttctctcgaaaatctgctgtctgatcacgatttgatattttctcgtgc

SEQ ID NO: 5295 - DNA, 986 bp, Glycine max
ccacgcgtccgatacgcagcaatccgaacccgctctctactgcttctacgtcgttttgccgattccggcgtgattttatcaccttaagtgcgttttgagattccaaaatggaggagggaagttccgattgcatcgacaacgagagggatctcatccgcaacatctgcatcctagcgcacgtggaccacgggaagaccaccctcgccgaccacctcatcgccgccgcgggcggcggcgtcgtccacccgaagctcgccggccgcgtccgcttcatggactacctggacgaggagcagcgccgcgccatcacgatgaagagctcctccatcctcctccgctacgccggccgctacgcggtgaacctcatcgactcccccggccacatcgacttctgcagcgaggtctccaccgccgcccgactcagcgacggcgccctcctcctcgtcgacgccgtcgaaggcgtccacatccagacccacgccgtcctccgccagtgctggatcgagcgcctcaccccctgcctcgtcctcaacaaactcgaccgcttaatcaccgagctcaaacttaccccctctgaggcctacacgcgcctcttacgaatcgttcacgaggtcaacggaatagtcagcgcttataaatccgaaaagtatctcaccgacgtggattccctcctcgccggcaccggcaccggcaccaccaccggcgagaccctcgaggactacgacgataacgaggatgtttttcagccgcagaaaggcaatgttatattcgcatgcgctttagatggttggcgatttgggattcgtgagttcgcggagatttatgcttctaagcttggggcgagtgtgaatgccttgctgagggcgttgtggggacagacgtattataaccctaagacgagagatgattgttgggaagaaaggggttggggggaataagaagcctatgtttgttcagtttgtgttggagcccttgtggcaggtgta

SEQ ID NO: 5296 - DNA, 1150 bp, Glycine max
  misc_feature (1148)..(1150): n is a, c, g, or t
attcagttgagagaaacctaagctaaggtaaaaccgttagtgtaacaactatttcattttttcagaactcagaacaaaacaaaacaaacccccttcgtgttcctacttgcatttgtaacataataacatttcccagcgttcttgttctcactttggcaaaaaagaaaagaaagagggaaagacattcgagaatcaattaacacaatccaaatataattaattaattaattaattataagataaataacacagagaaaggaggagatgagtgaggctgcagctacgacgacttcgtcttccatgatgcgcaattaccctctcatttccgccatcgttgctttcgccatcgcacaattcatcaagtttttcaccgcctggtttaaggaaaaaagatgggatcccaagcaacttgttggatctggtggaatgccttcatcccattcggctactgtcactgctcttgccgcggcaatcgggttccatgaaggctttggaggacctctttttgctactgctttggttctagcttgtattgtgatgtatgatgctactggtgtaagattgcaagcaggacgccaagcagagcttttgaatcaaattgtatacgaacttcctgctgaacatcctctggctgaaagcagaccactccgggaacttcttgggcatactcctcctcaggtcgttgctggtggcatacttggacttataactgcaggtattggctatctaataaccatggctagtagttgaaattgaggattcctagttggcatccccagaggaaccttgtatagaaatcaaaaacaccagtctctgttggtggcatacttgttccctaattagagaaagtctgatatgtgctccttccttcagatctcagaccgcattcacttaaccttatcatgtcaactatggcgatgaaaaatagaattgtatttattacactttgatggaaagaaagtagtagtatttatttgactttcaggatcatttattagccagagtacttgcctcttcgcttgtttggttttattaattttggaatggatttatttataggcattacttgaagtcattttcttatcctggttatatcacttatatgcaactctagtgatatcacagatactgcttctatttttcccccnnn

SEQ ID NO: 5297 - DNA, 1121 bp, Glycine max
gtcggttacagagataataatcctgcagcactttcagactttctgcaatctgtgcactgtttaattccatattatcctttatctatctctttatctctcttctgcaaagtgcaaaccctacttactactttcacagctcctacctcctattcctctcccttcccatactctctgctcctaactttttctctcttctcccctttcttccattcctccttgtctctcgcaacgcgaaattcatggacgtggacatactgaaaacttccacgagtgacaacatccgcatggacatgatgatgacgatgatgcaaatggaaaagttccctgaattttgtgaacctttttataacaacaacaacaacactagtactgcgcctcccggccctcggctcgagctcttaataaactccaccaccactctacccgtgttctccaacgttattaacaacccaaacgttataactccaccaccatcttcctctaattttattcaacaacaacccatgacaccccatcttgaacccaacttggagaagaggaattctgtggcggctatgagggagatgattttccgcgtagcagtgatgcaacctattcatatagaccctgaatccatcaagccaccgaagagaaggaacgtgaagatttcaaaagatccgcagagtgtggcggcgaggcacagaagagaaaggataagcgagagtataaggatacttcagagattagttcctggtgggaccaaaatggacacggcttctatgttggatgaagccattcactacgtgaagttcttgaagaagcaagtgcagacgctggaacaagcaggggcaagtagacccttgaatgttgttggcttccctactactgcgtccaacgccaataataataatagttattctggttttgtgaagagttgtcagccttatccaatgctgggttctgcagcttctaaacaattgcttagttgagaagtgtttgtttgatacatgcatgaaaaatgaaaatcaatgaattatatatgtggtttttattttattttttatcttcatagtattgtgatcgatcgtgcatggattataaagacagtgtttgtcagtgtaattgtcattgtttcgagaatt

SEQ ID NO: 5298 - DNA, 1003 bp, Glycine max
  misc_feature (856)..(856): n is a, c, g, or t
  misc_feature (962)..(962): n is a, c, g, or t
caagaatcgtatagaactcaattgcaactagctaatggctatgcatggaacttcttgtttggtgccttctgttctggagctagcaaaacaacccatcatcgaagttccagaacgatatgttcatgccaatcaagatccacatattctttccaacacaatttctttaccacaagttcccatcatagacttgcatcaattgttgtctgaagatccaagtgaactagagaagctggaccatgcgtgcaaagaatggggtttctttcagcttataaaccatggagtggaccctccagtggtggaaaatatgaagataggtgttcaagaattcttcaaccttccaatggaagagaagcagaaattttggcaaacaccagaggatatgcaggggtttggccagttatttgttgtatcagaggaacaaaagctagaatgggcagacatgttctatgctcacacatttccattacattcaaggaatcctcatcttattcctaagattccccaaccattcagagaaaatctagagaactattgcttagagctgagaaaaatgtgcatcacaatcattggccttatgaaaaaagctctcaagatcaaaacaaatgaactctcagagttatttgaagatcctagccaaggaattaggatgaattactaccctccatgtccccaaccagaacgagtcattggaatcaatccgcattctgattcgggtgcccttaccatccttctccaagtcaatgaagtggaagggcttcaaataagaaaagatggaaagtggattcctgttaaaccactctctaatgcttttgtcatcaacgttggagacatgttggagatactgaccaatgggatntaccgaagcattgaacatcggggaatagtcaattcagaaaaagagaggatttccattgccatgtttcaccggcctcaaatgagcagagttataggtccagcacccngcctcgttactcctgaaagacctgcattgttcaaaaagatt

SEQ ID NO: 5299 - DNA, 911 bp, Glycine max
  misc_feature (25)..(25): n is a, c, g, or t
  misc_feature (32)..(32): n is a, c, g, or t
  misc_feature (35)..(35): n is a, c, g, or t
  misc_feature (43)..(43): n is a, c, g, or t
gtgcaggatttgcaggaggccattncttgganctnctatgcgnaaaattaaaaaaaaatgcgaaggctgctcgggaagatttctgggttcttgagcaatcgaactacggtgggagtggacaaaacagggaacaaatacttcaccagaaatgaagaggttgatggtatcatgaaagagaaaagatgggtgatatttaagggagaggaggatcctacctctattccagttgaatggatatgttggctgaatgggcagcgtaaaaaggctccaactccagaggaaatgatggaattgaaagcaagacgtgaatgtgttagacagaatgttgctattctcaagaaagaagaagaaaggatagccaaagaaggaagcaaaggaaaacgcgtcagcactggaaaagtcagtggtccagacttgaaaagttttattcagcaatttccagttgcttcagaaggtaaagaggttgaagaatcacctagtgcaatggatggcttaaggaatcctcaggagagcttagccgagaaagaaaaagatgagtctgagtcttcagagccaacaggatctggtgcatcttttagaccaggaacttggcaacctccaacttgagctttcattacaaccaagggccttgctgagcttgtattagccatgcgctgttttgaaaaatccatgcgtgatatatatttctccctcaagaattttgatataattcatgtgttatcaagtttctagaaatcttaattcattgataaacctttttgcttaaagaatatggccaataagacaacctgctttatgcatttgcaatgagtttgcttgctgtagtgagtaaaggggatgtttggtttggttgttttctattttcattttcactgaaaatagaaaatggtgatggaaatgtgtttggttgg

SEQ ID NO: 5300 - DNA, 2487 bp, Glycine max
cccacgcgtccgcccacgcccccgcccaggcctgcagcatctctcacctttcccttggcgacgccgtgagaaacgaaaagcgaacaaaaaaaaaacagagtggggtgggaggcacacgcacaaacgcagagtcagaatctccaatcttcaatcggagacaaagctagctcgaacgaacgaagtagagtagtgtgctacgaaaaatgtggcggtgcatcgcacgtggtctccgtggacctgcttccaccagatccacctccaatcactcacttggatctcaactttctagattcttctctagtggggcgaactcctcgtacaccgtggtggatcatacttatgatgctgttgtcgtaggagctggtggcgcgggattgagagctgctattggactttcagaacacgggttcaatactgcttgtattaccaagctcttcccaactcgttcacacactgttgcagctcagggtggtataaatgctgctttgggaaatatgactgaagatgactggaggtggcacatgtatgacactgtcaagggaagtgattggctaggagaccaggatgccatccaatatatgtgtagggaagcaccaaaagcagtcattgagctagagaattacggattaccattttcccgaacagaggatggaaaaatatatcaacgtgcattcggcggtcaaagcttaaactatggaaaaggtggtcaagcttaccgatgtgcatgtgctgctgatcgaactggacatgctttattgcacactctctatggccaagctatgagacataatacccagttttttgtggaatattttgcattggatcttgtaatgaatagtgatggcacttgccaaggagtgattgccttgaatatggaggatggaacactacatcgtttcaaagctgcttcaacaattttggccacagggggttatggtagagcatacttctctgcaacctcagcacatacttgcactggagatggcaatgccatggttgcacgtgctgggatccctcttgaggatttggagtttgtacaatttcacccaacaggtatatatggagcaggttgccttatcacagaaggatctcgtggtgaaggtggaattcttaggaatagtgagggtgagcgatttatggaacgatatgcccctactgcaaaggatcttgcatcaagagatgtagtttcaagagcaatgacgatggagattcgggaaggtcgtggtgtaggacccctgaaagatcacatctatctccacttgaatcacttacccccagatgtgctcaaagagagacttcctggcatctctgaaactgctgctatttttgctggtgtggatgttacaaaggaacccattcctgttttgccaactgtacattataacatgggcggtattcccacaaaccattatggagaggtggttaccattaaaggtgacaatccagatgcagtggttcctggattgatggctgccggggaaacggcctgtgcatcagtccatggtgccaataggcttggtgcaaattcacttctggatatcgttgtttttggtagagcttgtgctaatagagttgcagaaatccgtagaccaggagagaagcaaaagcctctagagaaggatgctggtcagagaacaattgcatggctggacaaattgagaaattcaaatggttcattgccaacttcgcaaattcggttgaatatgcaacgagtaatgcaaaccaatgctgctgtgttccgtacacaagaaacattagaagaaggttgtcaattaattgataaaacatgggagagcttccatgatgtccaggtgaaggaccgcagtttaatctggaactctgacttgattgagactattgaattggaaaatcttttgataaatgcatgcatcacaatgtactctgctgaagctaggaaagagagtagaggagctcatgcccgtgaagacttcaaggttagagatgatggaagctggatgaaacacactgtgggattctgggagaacgagaaagtccggttggactacaggccagtgcatttgaatgtattggatgatgaggttgaatcattccctcccaaggctcgggtgtattaatatactagctaatggatggattagacttgtctcaatgttaaatgacaggaaaaaaatgcaataaaaggtcctagatgggtgattttgatttttgatgataattgttgcattcatcatcaatgctgattgatattcctggcatcctcaaataacaacactctgtatttgcagcagagaataatagcaacccagcaacacagtttcattaactgtttgtattttgacaagattttgcctatttatcatatgcacgtttgtagtttttattttctaaatcccccattctttttaaggttgtttatctaaaaaagcactggatggggaaagcgaaaatggcgctcctcactctctcgttccgttcaaccatgatcacaaaactcttacttgtttg

SEQ ID NO: 5301 - DNA, 1014 bp, Glycine max
cacgcgtccggtttagaagacaaatggatgggcatgattcattatttcctcatgtcttgttttttcctttttcagggaattgccacactgctcagcaataatttctgctgcatcttcttcacatcacaatcacagaaacatgcccgtgagagtattggagaacaccgcagcaccttcttctcaggtttcaggtgccaattcgggaaggagttcgtgccaatcttgtagtcttctaggcgttgggcaggccttttctggcacccagaatgtctcaagtgtacaaaaggatgaagcatggagagtaaatgtccgtatacaaggatgtgaccttgagcatgggtatttgtgtggcaccatggaagctcttaatgttcctatggcagacacaccagtagtaacgttctgggaaggggagatagttgatacaaagaactatactttcttcaccggtaaatgggaggcatctccagaggatgatataaggcactggtctaaatttccatctttttctcccttattgggccaagtggaggctgatggtggcaagtctttggacctgagcaactatccttacatattcatgaggtggaaggagcaatacttcgtgaatgttggaacagactgtggattaaccatagccggattttactacatttgtttctcttgcagcaatggctctatcagtggattctattatgatcccaatagcagcccttaccagaagcttgagttgaaatccaccaatgatggaagatcaggtttcagtttttcatcatatgagttacaatagattgtgacatttagtatgtcaagattcatcatctaattgttagtattgtatatgaatgggaacatgtggaaaattcgagtttattgctgtcagaatcaaagcagggagaataagtttgttaaaaaaacaaaaatagtgctatttagtgaccacttatattttatgttgtgactagtgaccacttactagtgacttcagggttgattacatgaaaaaaaaaaaaa

SEQ ID NO: 5302 - DNA, 1212 bp, Glycine max
tcagctacgtaggcccccccccccccaatggtctctatatattgttactgtgccaacgcattgtgaggccacaagtacctaacacccagctaagcttttggaacttagagttaagcagttaccttcctccaactataatatctcaaccaatcaaaatcctttttcccaattctctctctctctctctctgactctctccacaatatgtgttgattttttcctaaataagtgaaagtgtagttacacctttttttagtgttttaccacttttgtgtgccagagttttctgagtttcataggagaaaaaaatgacagaagaacaaaccaaaacggctgagtcagaatcagtgacaccaccacctgctgctgctccttcacaggctcctccagctgctgaggctgaacatgttcctgaggctccaaaggatgtggctgaggagaaatctgtaattccagtgccttcttctgatgacaaacctgatgagtccaaggctcttgtcttagttgagaagactcaagaagttgccgaagtgaaaccaactgagggctctgtcaaccgagatgcagtgcttgcaagagttgcaactgagaagagattgtcactaatcaaagcatgggaagaaagtgaaaaatcaaaagctgaaaacaaggctcacaaaaagctttcatccgtttctgcatgggaaaacagcaagaaagctgctgtggaggctgacctgaaaaagattgaagaagaactggagaagaaaaaggcagaagctgcagaaaagataaaaaacaaaattgctgcaatccacaaggaagctgaagaaagaagagcaataattgaggcaaagaaaggggaagatcttcttaaggcagaggaacaagctgcaaagtatagagcaactggaacagctccaaagaaactccttggttgtttctaatgcttcaaatctcaagcattgtggggaaagaaaaagttattttttattgtgtatctttggttattaaatatcattaatacaagtgtggttttagtttacatgttggagatttagcccatgttcatttattatgtgtgcaaacctgacacattggcgtgtatataccaactactttgtggataaagaaattaaattattcaatctgtgcattaaaaaaaaaaaaaaaaaaatcatcgccccactagttctctaaaaaaaaaaaaaaaaaaaaaaaaaaaaaaaaaaa

SEQ ID NO: 5303 - DNA, 800 bp, Glycine max
cccacgccgtcgctctatccttcaagcaaactctccttctcaaatctctctttctctctctcggggggttccgtttctctctctgctatttatgatcactctctgacgcgccccggtctcccggctcggtgcttccgtctcttccccttcttctctgattggaaggattcgtgtggccggagatggtggtttcggggccgatcacgccggggcaggtgtctttcttgctgggggttattccagtttttgtttcatggatatattcagagtacttagagtacaagaaactctcatctcctcccaaagttcattcagatgctagtcttgaagagttggggaaggatgcaattaaggaagatgatcgggccattttgctggaatcagggcttacaagatcagcatcagcaaaattccatccaccatctgtcaaattgaatttgattcggtttttgaccatggatgattctttcttgttagaaaatcgagcaactttgagagcaatggccgaatttggcctgattctgttttatttctacatatgtgatcgaaccaacatacttggagattccaccaagagttatagtcgggatcttttcatcttcctctaccttcttctgattatagtttcagctttgagttctttgaagaaacataatgactcatcaacattttctggaaaaaacatactttaccttaatcggcatcaaacagaagagtggaaaggatggatgcaggtcctctttttaatgtatcattattttgctgcaacggagatatacaatgcaatacgtgttttcatt

SEQ ID NO: 5304 - DNA, 916 bp, Glycine max
  misc_feature (905)..(907): n is a, c, g, or t
  misc_feature (910)..(910): n is a, c, g, or t
gcctaaccagagggtcgattccttctttttcgagaaaccattctctctctctctcaattcactttctctctctaaaatggcggcagcttctagaagatcaagcggaccagtcctccgaacactctcgccggcgggaaggtttcgcagttcccggccaccgccggcgaccaccgccttcgcgtcctcaacttcaaccttctccgcacggtccaccgctttcttccagaaccgttccggttctcccacacgtgacagtctctacggttcttcttccggttcggttctctccgtccggttcggttcaatttctccgaaccgctccatctccgtcgccggtgccggaaggcagagtcaccatcagaagcgaacctgcatgtgctctccgacgtcgcatcccggctcgttccggtgcagcctccacaaaagcttcggctcgcgctcggcagtgtcggcggcgccggcgtcaaatcggttgaacgcgcggcggtcggcgatgacgaactcgctcgtgagaatccgcggcgtcgaaggcgaattggtgaagcgagccttggcggcgctgatccggccgtcgtcgcaccagcagcgtcgccgcggtgacttccgcccgcggccgagcaggctctctgtcatgttcacagcaaaagattaagaaaatttgtgaataataattctgtgaatcaacagaagcttaatcgcaccgagaaaaaaccgccgtggacggcggcgattcggtggaaacggtttgagattttgaacggattatctttttttgttacttctagatccgatatccgatcgaagattgtggatatgcatcgttctttgtgtgtacaaaattgagaattataatttaaaaatataaataaaatataaaatagaactcaaaaaaaaaaaaaaaaaannnaanaaaaaa

SEQ ID NO: 5305 - DNA, 1390 bp, Glycine max
tcagctacgtaggccccccccccccccccccgatgacgaaactgaaagagctgatagggataatgaaggacaaagcctcgcagggcaaagccgcgatcctctccaagcgcgccactctctctctcctccgcgccaccagccacgactcctacgcccctcccacgtgcgaccacatctccatgctcctctcctccggcgacggctcacgcgccacttcctccgccgccgtccaccttctcacccaccgcctccagaccacccagagctccgccgtggcgctgaagtgcctgatcgtggtgcaccacgtgatcaagcgcggcagcttcatcatgagggaccagcttccgtacagcggcggcggcaggaactaccttaacctctccaaattcagagacaagagcaaccccgtgtgctgggaactctcttcttgggtacgatggtacgctaaacacgtggaacagcttctctgggcttccagaattgtcgggttcttaccgacggaaaaagagagagtttcgggtctcaccaacggggagttattgagagagacggaggctttgttaacggttcttgaagggattgggaacatacccgacgctgcatccatggaagagaataaattagtttctgaaatagcgactttggtggaagaagatggggttgcaacgttgagtgaggtttttgttagagttaacgagttcagagagagattggccatggggtgtctcggttttggagaagtggtggaattggtttacgtgttgaatagattggacaggtgtaaagagatattggtgatggtggtgatcacggagaagcagagattgtgggatttagtgagagaactgaaggtgaaggtagagaagatggaggtgtacagggaagaagggaaaagaacgctgacaacacacagggcaacaaagtcagacaggtttgctctcacgtttgtcaattccgttgatttgggacggtttccctctgcaaggttcttgtgatattttgtaagtatcttaccactgtttttaaaatattgattgaggaagtaaaagaaaaaaaatatttattagtaaattatatgaaagtgtaaatttttttataaataatataatttttttcaataaaaatattttttttaaattcttaatcaatatccttagaatatatatttattagcatttaccattttgtaaataaatattaatcataaattttttggttaaattgtttatttatttgatgcctgtgtatatctttcttttatcttttaataattagttcctgtaagttgaaattgtaaatttttggttctcagaaatgtataaaaagttgggtttgtttactttgttcgtcctattgataatataccagagacaaaaaaaaaaaaaaaaaa

SEQ ID NO: 5306 - DNA, 1849 bp, Glycine max
tcagctacgtaggcccccccccccccagtgatttaaccacattttgtgcagcagtgagataacataaactccataaggatatttcaggccatttttccataactcttgcctgttctttatactttaagttaatatttttatattttcattgaagggttatcaaaactaacttctgacccaagatcagctatcagaaagagttctttggaggtgctttttaacattttgaaggatcatggtcatctattctcccacacgttttggaatagcattttctgttctgttattttccctgtatataactcagtatctggaaacaaagagatgaatctacaagaggcccattgttcaccttctttagtatctgtgcataccgaaggaagcacatgggattctgagacttattcagtagcagcagaatgtttaatagatttatttgccaccttctttgatgtggtgaggtctcagctacctggcgtggtatcagtactgacagggttcattagaagtcctgttcagggtccagctagtactggagttgctggattagtgcgtctcacaggtgaccttggtaacaggctttcagcagaagaatggaaagagatttttctatgtttgaaagaggcagctatgtcaacagtgccaggattcatgaaggtcttgagaaccatgaataatattgaggtgcctcacatttcacagtcttctgctgacttagaaagttcttctgatcatgacttgacaaatgatgaatttgatgatgacaatctgcaaacggccacatatgttgtgtcaagaacgaagaatcatattgctatgcagctactcattgtacaggttgcaactgatctgtacaaaaagcaccagcaatccttatctgcagccagcatcaaagtccttattgaattatattcatctattgctttacatgctcgtgagatgaacagagagtcaatcctactgaagaagttgcagaaagcttgctctgtcctggaaatatctggccctcccatggttcattttgaaaatgagtccttccagaatcacctcaactttctacaaaatatacatctccatgatcattttgtgcatgatgagatagagctagaacaagagttagttgctgtgtgtgaaaccgtattggacatatacctaaattgtgctggttccagttccacttttcacaagtctgataccatgccagcgccacatcgaaaactccctctgagctctgcaaagaaggaagagatagctgctaggacatctttagtcatctcagcattgcaaggattggctggtctgaaaaaggattcattcaggaggtatattccagggttctttcacttactggtagatctcgtgaggagtgaacacacctctggagaagttcaacatgccctgagtaatatgtttcgttcatctgttggccaaattataatggattgagttttagctttggcatactgtttttggacgttgcgaaatatcaatcagcattttccttattagctaaagaacgagccattacatggtcatatcttgatttactcaccattgttgtgtagtgttactcttgattttttgtgattgtctgtgccattaatgtaaatgagaaatttatttcaagcaaaaaaaaaaaaaaaaaagatagatagcgaagaaactaagttaggcagccgctggcagtctacgacttggcctaacttgtcccttttcaccaatggagactgagtcctagtggaaggagatactctctcctaaggaaccgaaacaatagtcttgttccttttcagatgttgtttaaggttgtgacataggaattaagatatataattaatattcttttttt

SEQ ID NO: 5307 - DNA, 1330 bp, Glycine max
tcgagtcagctacgtaggcccccccccatccattgccactgacatatgctctgctctaatcttccttcactccagtgagccttgtattatccatgggaatttgaaacctagtaaggttctccttgatgccaactttgttgccaaactcagtgacttgggcattcctagtttagttcagcgaagtttggattcagctgacacaagcacaatatgtaataacccaaatgaacgtttggcatatgtggatccagagtattttgtcactggcaagcttacaccagaatcggatgtatattcttttggagtcatattgttacaacttctaactggaagaccccttttggggctagttagagatatgaaatgtgcattggaaaaggaaaaccttaaagcagtcttggactcttcagctggtgaatggccgttttttcaaactgaacagctggcatatttagcattgaggtgttgtgaaaagacttggttgaaccggccagaccttgtgtctgaaatctggagtgttcttgaaccattcaaagcaacttgcattgacacgccaccacatttgatttctaagaagcttcgtcggattccttcccattttgtctgccccattgtccaggaagtaatggaagatccatacatagctgcagatggctttacgtacgaagaagaggcaataagaggatggttgaatagtggccacgacacttcccccatgacaaacctcaaactagaccacactgatttggtacctaactatgctctacataatgcaattctggagtggcagcaacagtgattcagtgaaccttcattggccattacacttgcacatattacactggtgtaaatcatacttatcctgtaaaaaaaaaagaaaaatctaaaatgagcaagtaagggtgtgtttacacttgaattttagtaagttaaaattataatgctttttaagatcacaatacatccttacatactcattttagaagcttaactttagaagagtcatgtctaaattctgatagcaagttcggatggagaagggagtaaagagggaaaacaaatttttaattaaacctttcccttgaattagagctttctaaaatgaagaatgatcatgtaaataaaaaatcttatttatttctatgaacattttaatatttaaagttctccaaatttgaaggattaatatgtaaactacttgaatgaaacatattatttgatttcaccactcaggaaatgagattgttttaattgaaattcatttcctttgtaaacgccagaaatgtgtttgtttattttccaagtaataagatataaaaattgcatttat

SEQ ID NO: 5308 - DNA, 2049 bp, Glycine max
  misc_feature (2046)..(2046): n is a, c, g, or t
cttgtttttttttttttttttttttttttttttgacgaaaagataaaactaccttttggatttttttattaaaaaattgcttttaattatcatgtttttaagatattttattttttctagacacaatcaaacgtgctttaaatcgtcatatctacttttctcagacatttttcacctaaggtgccgactccccactttggccaatccttaaatttcttttttctactttctccgctgttagccacaggcaacagcatctccaaaagacaaaaacacgttaaaaaagaagactgttttagaattgccccagccaaactagtactgcgacaatcacactgttacagcaccaacatatactcgctacaagcacaaccacaaacttgtatcgggcattgatcaaacaaattacgctatattaacagctacgggcttccccctacccattgaaaatcctcttgtaccatccggcattcggggtccagggggttgcttggcaacgacttgatcagtgaaaattgtattatttgaagagggtgttcccacacgattattttgatgacaatgtactcggccacgtcccttaccccggccccggctacgaccttttctttgcccactctctttgtcatgaccatgctcttctccctgcacatattcatgcagctgagtatcaggaaaggaagcatcttctaattgtttctcacttgcctgtggctcaggcacataaggagaatcctcttcacagccaacttcaacatcaagtcccttctttccccgtccttgagcaggtttagacatgcgtctaagcatcaggcgaacccggaggccactccgccagtttccctcttcattcagctcagcaacagctctctcagccagctcaacagattcatattcaacaaatgcatgcaacttgttagataaaggcatcccatcaacttttcccaatcttgaagcagaagaagccccactattggaagtttgaggtggacaggtacggatggtcttcacactcccaactgctgagaaaaccttcataagattctgatggcaatgatcctcaggtaggttttcagctacaacaatgcgagattgtatctcttctatatcagactcagtcaggggatactggcgtttgattttctttccatcttcactaaccacaagctttgacgagttccttaaaacagttgcaagttgggaatgactcgctatgagggccttaatcttcttgaaagatgcaacaacagatataggcacaaaaccttctggatctttgttgacgaacctcatcaaatgatcggtagtagctaagtttaaatcactgaaataatactccacctgattcaaaattttctgactggcttcgtcagacatcttgcttttggaagaaagagcatgatctgggtcaacttgagaatgctgcacggcagaatcggagctaacataatactgatgagggtgatgatgagagcggtagtgagccggaacatgatgctgatgagcaagatgatggtggtgattctggaccgggacgacatggccttgaatcggtacatggaactgtgaagttgggggtggtgagtaaacgtgtagtatacctgaagctggaggaggaggtggaggtggtacaacgagcctaggttgctgaaaatcggcccgtggggaggcgcgagtgggcacaaattctggtgcctgtgcgttgagccggctaaaagaaacgttccttgaaagagatggatctggctgcgattgtgcagtagacgaagggggcgagatatcgggggtttctgagagtgactcctgagccattttcaaagcttttctttttcgttttcttcgacgatctagctgccgatgttgtttagctcactattacagtcacactcttttgaaaggataggaagtagcgggttcggagattttccgattctcactgcagactgcagctaagagaaatatcagaggttaatcgatattttttaacccctaaatcggtgtctttgacgacggagaacagttctcgggggtcgaccccgggaattnccg

SEQ ID NO: 5309 - DNA, 1214 bp, Glycine max
tcgagtcagcctcgtcggccattattctgtttgtttttttcaaagcaacgcatagtcacatagtacactctggtctgaactctgaatctttctggtgtcgtgtcccatttgaattgaattgcatcttgaaagatggcggaggaggagaagccaaatggagaagaacaagtgaaggacaacaacaacaacaacttatacgacgccgttcagcgtctgatcttggaaccttccaagatcaaggcctccctcatccctctcttccccgaagcttctagaacctactctcgccaactcctccactggtcccgtcaaggttctcccctccgacgcatcctcttcatctccattgggatagttgcacttgttgctctctcaggacttgttgcttttacgctcttttttctggctgctactgtaaatgccattttcgtctcccttctcatttctttggctgtggctggaggcttcttggttctgttctttgcttttgtgacagctatatatattggagcactatcactggccatctttgctatttccaccgtcactttttgggctgttgtggctattatcattactgctggatgggttggattcctttataccgtgtggctggtaactagcaagagccttggattggcaaagcaatctttgagtgtgactggctctgcaattactacttactcagctgcttggggtacccgtaaccttgcagacaaaaattcaatttaggtgccggtcacataaagaaggttgtgcacaaatcttacacaaacatgttttttggatggcaaaagcttcttctgttgactggtagagtctcatatccttcatcttgctcatggtttggtttcagtggctttcaatagcatgcttgtattatgttaataaaatgccacagtttggtttcatgtgttttagtcggagtagtgttgataaaattcctggttgtatgtattgtgcttcaaatttcaatttttaagttggaaaaccaagtgcttttactttatttacctatgttgccacctggtgttgtacaacttgtagacttgatgaaattggactgctgtgttaaatgatgtaattttggaacgagttgtaaattgtaattgctgcatttgtgtgagcaagaatgtttatgcaatattagagcagctaacagtcaaatatggcaagttgagatatctatatataaaaaaaaaaaaaaaaaaaaa

SEQ ID NO: 5310 - DNA, 2095 bp, Glycine max
cctttattctccggcgccctcgagccgcttcccttctcttcacatctcatctaaatctcaatctctgtctctgtctctgtccgcctcagctttcactccaaaccctaaccaaccgatctctttcgcctatcccggaaaccttccgaatcgtttaattgacgctacgccgtggaatctgggcggaacaaatccacgatggcggcctccaccaccagccaggtctacatccaggtaatcgacgatgtcatgaacaaggtccgcgacgagtttgtcaacaacggtggtcccggcgacgaagttctcaaggagcttcaatctatatgggaatcgaagatgatgcaagctggtgccattgttggtcccatagaaaggtccggggcgcctaagccaacgcccggtggtccaattactccggttcatgatcttaacatgccttatgaggggactgaggagtatgaaactcccacagcggaaatgcttttcccccctacgccattgcaaactcctcttcaaacccctttaccaggaactgtggataactcaatgtataacattcccactggacctagtgactacccgtctgctggaaatgagcctggtgcaaataacgagataaaaggtggaaggcctggtccatacatgcaacctcctccttcaacgtggacgaaccagaaccagaaccaaagggctccacttgacgtcaatgttgcttacgtggaagggcgggatgaggcggaaagaggagcttcaaatcaacctctgacacaggacttcttcatgtcctcggggaagcggaaacgtgatgaaattgcttctcaatataatgctggtggatatatacctcagcaagatggagctggagatgctgcttctcaaatttttgaaattgaagtgtatggagggggcatgtccattgatgcaggtcactctacttctaaaggaaaaatgccagcacaatcagacaggccagcttctcagattcctcaacttgatggaccaattccctacgatgatgatgtggtttctactccaaatatgtacaattatggagtgttcaatgaagactacaacattgcaaatacaccagcttcttctgatgtaccagcaagtacccctgctcctgttgctcaaaatgaggttgatgaagaagatgatgatgatgatgagcccctaaatgaaaatgatgatgatgatgatttggatgatttggatcagggagaggatcaaaatacacaccatcttgttttggcccagtttgacaaggtgacgcgtaccaagagtagatggaagtgcaccctaaaggatggtatcatgcatataaataataaggacattctcttcaataaggcaactggagaatttgaattctgattttgtcggggattggtcttgccatttttgtggcagtgctttggtgaattacaggtgccattgagtattttgtaatctttctttgattataattattaaattaaagctggaggaggaagagaaaagtccgtaatactttcgtcactgttatattgatgtgggcctgttgtacataaaggatgagcaaattttggcctttttacatggataggtactctgaggcatttcctgaagtttgccatttgtcaagttggatatgtatgtctattagctctgcatacttggacagtttaaactgcagtgactgtcgtggttagtttttagccgtcataaagaacaacgataatgtctagtgtgtttttcttggttccaacatgatctctgaactttagcccaaaaagtgaaagaaaacatgacaatttcaggaatatgttttctacatcagcaacgttcgtcatttcttgtgttttttttgggcaaaactaaaacatggtttttaaaggtcagatggaaattgtagtgttatcttggaaaccagtgccgacacttattgtacaggttactgtgttggagaacaatctaaagacttgaacctaatttttgtcttgtgtttttctggattaaaaaaaaaaatataaaaaaatagcttgtttctatttacttttttattttttggtagatgaatggtaggaaccctagaatcaatggatactgcatgttgact

SEQ ID NO: 5311 - DNA, 1719 bp, Glycine max
  misc_feature (99)..(99): n is a, c, g, or t
attccaaaatttgattccaagatcccatattctccacgcgcccgctctttctctctgcttctacaaaacgccatttccttatatatcccttctccctcnccactcttcttctcgttcttcttcttaacgccatcaccacctttggcttcctttaaaaatgtattttttcactgagaaaatgcacagtttgaagatgggcttccctgactacatccaaacattggaagaagaacgccgtaagattcaggtgttctccaaagagctacctctttccttggaactggtcactcaagccattgaagcttgcaagcagcaattgtctggaactgcgagtgagtataatttgaatggccactcggagtgttcggagcagacaacatcaacggaagggcctgttttggaggagtttattccaatcaagaaaatggcatcatcatcccctttttgtgatgaagaggatgaggatgatgagcaacattctcacaagcaaagggtttcaaaggaaaataataacagtgataagaggaaatccgactggcttagatctgttcagttgtggaatccagatcccccagctgaggaggatgtgaataagaaagtgcctggattggaattgaagagaagtggaaatggtggtggtgctttccagccattccacaaggaagaaagaggtgcaaagacaagtgaatcattgagtaaagcaccctcttcaacctcggtagccgccgcgagttctagcgccgcagaacccgcagcagaaaaatctctgaatgagggacatagaaagcagcgcaggtgctggtcacaggacttgcacaagcgcttcttgcatgcccttcagcagcttgggggtgcagatactgccacaccaaagcaaattagagagataatgaatgttgatggcctcacaaatgatgaagtcaaaagccatttgcagaaataccgtttgcacactagaaggccaagtcccatggttcacaacagttccaatccacaagcagcaccttttgtccttgtaggaaacatttttgtccaatcaccagaatatgcagctgtagctacctcaacagcatcaagagaagtggccacagttgcagcacctgctggaatttatgcaccagtggccacacaccctatacctgtttcacacccaccagctgattcaattaagaatccacagtttaagaaggtacagctgtttgagcattcaatttcagatgaaagggctaatcacagtgaaggagctgttcattcaaattcccctacctcatcctcctccacacatacctctacttcccttggctattgagttttaagatattgcacaagttttgtaaccaagttgttgtagaaagtccttagatattttcttatgactttttttttttactaaaaatgttctttactcctgttatctgggatttaaatcatagaggtaaaatacacagaaggtgacagttttgatgtcaaatgaagtcccaccctcttggctggttactatgttatctccttggtacagaaggtgaactgaaatttcgaattttaaaatttggaagcatgctcaatgtttcaattggtccagcttctcaagattgtgacaaattaaagctactgttctgacttagtcatattccttacaccttgggtaaactattaatcacaccactgtgttagttgggaattaaaagtggtccacctaagcacctacactgtcttggt

SEQ ID NO: 5312 - DNA, 1066 bp, Glycine max
gtttggtagaaaagcagcagaggggcagtttggggctccgacgggaaactaggaatttcttctttataaatttcgccctccattggcccccccccctcctttcttttccttttcaatgctcagagaagagagaaaagaaaaagaaaaatcccagtgagagagagaaaagaaaagaacgaaaaaccaagaagcttcgaaacgatcgtgtgagatgaacaagtgcgaactgtgcaaagttccggcgaggatcttctgcgagtcggaccaggcgagcttatgctgggactgcgacgctaaggttcacagcgccaacttcttggtcgcgagacacgcgcgaaccttactctgccgcacgtgccgctctcccacgccgtggaaggcctccggcgcctcactcgccagcgccgtctccgtctgcgaccgctgcgccgcctccgaagaaccggaagagagtgaagccggcaatgacgacgaaccagacacggaggacgacgacaacgacgacgaggacggcgacaatcaggtcgtgccgtggtcctcctccccgccgccgcctccgccgtcgagctcctccggcagcgaatggtcggagtgcaaaaacgacgacgcttctatttccgcctcggaacaggaaacgacaacatgctcgttgaaacgacagcgcgaggacgatgatgatgcttcttccgatcgtgatcccagggtgttgagaagggttgggcgtctcaacggaggttgcgtgtgacggagaatcgtcgttgaaaggaaggagggagtggtctggcacacgacgtcgtttcctgattggggaaagtaagattttcacagccgtacgatcgaccaagatattttttaagctctttcatcattaacttctaatctaaccgcttagaagttacaatggtttttgacatataggtttagtgttgtgtattaactattaatgtggaattttctgttttcctttatcggttttttaagataaacattgcgatgtcatcttgatgtaacctttttttttatatataaaagaatctctatttttttcaaaaaaaaaaaaaaaaaa

SEQ ID NO: 5313 - DNA, 1351 bp, Glycine max
aaattatctgaaagatttcggcgccacgtaccccaaattttggcggtggaggagcagctccttcatttcctcttactctgttttttctgtttctgttggctaagaaacaaagaaagagcccagcgataaagcaaaagcgcatttccgctgttgtatgtgtgtgtttgcgatgccaggtggggcaaccgtctgctccggtcaccggtttctctgcgttgttctgcattcgactcgtccccgactcagctacccgactcggtcgcgacccgttccggttcaacttggatccgtgtttgtgtcgaatggtaatggcgatagtaagcggttcagctccaagttgagcctcattcccagagccgttgattcttccaccgcacaatcttccgtcgtttccgacgatggcttctccgtttctaagctttcatttggtgtgattggtctaggtgttggactctcactcttgtcctacggttttggggcatattttaatattctccctggatctgaatggtcagctataatgttaacttatggcttccctcttgcaattattggaatggcactcaagtatgcagaactcaagccagtcccatgcctaacatattcagatgctcaaagcttgagggaaaaatgtgcaactccaattcttaaacaggtgaagagcgatgttaccagatatcgctatggagatgagcagcatttggatgaggcattgaaacggatatttcagtatggccaaggaggaggaataccaaggagaagtgctcctgttttacaatcgattcgtgaagaagtcacgcaagatggtaaatactgtttggttttagtttttgaggccaaggctctgcagttgtcagattttgaacaaagacaggccaaatttacttcattctttgggccaggaattacagctgaaattggtaagggtgagaaagatttgtatgaggttcgacttatctccaatacagaccccaatgcttctccttcatgaagttatggaccgttttatcctcttccatgttgcatggtttagtcaattacaggacttaggtcctgtaaaatatgtaaaaaaaaaaaatattatgctcaaaagtatcaagtcattgtatcaagtgtacattttgacatacaagaaaagaagaaaaatagcatttggaaaggaattgccaagctaatgaggatcactttatttatgctattttacatttgatatacaggaacttataaaactaaaatttgcttggaaactagttttgaaattatttgaaaaaaaaaaaaaaaaaagtctggctctcagaatgattctagcaaaaaaatcttggcatatcagattataaatggcattacactt

SEQ ID NO: 5314 - DNA, 1703 bp, Glycine max
aaaagtaattgtgtttacaactctacattcatcacaacttcaaggtactatgtacagccgtcatgcgattaaaacaatgcatatcgtaaaggtctcaagtagaatcgtatttacattttctatcacaaaaatgggatttacaagttctgtatatatatcattacaatgtatatcgtagctgtcactgccctaatcaaattcgtcccacgtacatgaaagtcaatctccctctgtatctccttcaagtgctaccaaattgcttcgttctgcatcgttactggtgcattgatgcagctggggagaagcaaagagatttttctgaatgtcatatgaaggaagtgaattcacaaaattagtggtattgccactagaaactgaaccggaccccactgttgtgacatgtgcagaatcaacgtcaatgcctccggcagaatttggtccatttttaccgctacctggaagactaggggcaggagatgtgtttgataacgcaggtgacgttccacttcctcttttcatcttggacttcgacatttcttcacaatgctttacaacaattgagatatttgcacaacgtccatgggatagcacgtaggcccacaagagaagcttccttggtatgctcagatcaagtgcttcaatcccagcagtacttgggttgaatggtgtctgtgttactgattgagatggaatcaaataaaagttgagtccagaggtaagcactacagaagaactctcccggtaaaaattatagcaagctctgagcaaagtgtttgcagtttccaaattctcatcagaagctttcttgataataatattttttactttagataaaatagtgctccattttgtttcaatcttttctaaatgagttggatcttcaaaagctgtactccataattcttttggctgcaaatcaatacagagcaactggctattatccatcccaccatcagtcaaactaaggacctgaatcccatttgagaattcacaagataatggagttatttgtgccaaattatatacaagagatcgacaccaagcaacagaagcatgcttgccaacttttgcacaattactgtctgagaactttggattcttagaacgcttcctaatcttctcatttgttgcttcaagagtttccagttttccatttttctccaacaatacaatatgttcatgaagctcgccccgtatgatagtctctgacatatctgagccttcaatttcgggcaaactgcatatttctggccataagctcccttgctccatgaacaatgcaaacattctctccagcacattgttagaactgctcactgaaccagaaggcaggtagtctgagaatggcacatagttgaaatcagggcctttagataccttccgatagccactggtataagatcttcaatacataatgaaaaccgtttatctgcacgaagagcaacatatgaacgttcgagaatacatctatctccagtctcttccaatagtttgagataaaacagcaaatactttcgaatgcaagtaataaattttcgagaactttcaggtaagttaacctcaagggattttttgttcccagcagtacctggtgtcttgcgccttcctttttttactgtgctatcaatttcccacatatttattgtaaatgatgagcgtgaagatttgaagcagaaagatagatgatcttttgccctctctag

SEQ ID NO: 5315 - DNA, 2251 bp, Glycine max
cgcgtacgcaaactccggctccggctcgagcacagggagtggtggcatctggaattgccttcgctgtacaaatatggtgcattgacagaggtggtcctgtgtttgttgccgtctatcaacctgttcagacttttgttgtcgccatcatggcttccattgctttaggagaagagttttacttgggcgggttagtcccttccacgctaattaattattcttctccttaattttcttcataatgtccatgatttaatgagttaaaacaatatgaaaaaggcttaaaaataagactaggtaatcttaagaagttcttaaataaatattataaataaatttaatgattatgtatataacacttcgtatattatcattaatataacttttaagataattactataaaaatcaataaatttatcatatataataatttgtgatttgtgattgaatggtagtataaaattattttattacatgtattttttttatcatacttaaattgataatttacattaataaaagagatttgttaaaaatgagtgcatttctattctaacacaacatatataatatctacattaattctagatgttaaaaggatgtacttatttttcaaagatgaaattaaaatttctttgactcatgcatatggagcagctggagatccctgaactaagtactcacactaggcaataatttcattcttcacactggattactgtgaccgcgtattttattgtaatatgcctagtcccaaatgacgcccaaaagtatgatgaaggttatttttgtagtcgggagatttagaaaatgacaaaagccagttaacgacaaggaggaggtagatcatagatgcacagtttaatttgttacctttcggtgagacctgataaaaggggcttcagctgaatgattcaaaattccagagggttaaaaaagtttgaagaattatactatgtaggacacattgaacagaagatcgtgtctcgtgtgcttctttatgttgtttactttttgctccctcataaattaccttttttttttccttctaaaataataacattggttccatggttttaaatatggatatatggcagtcacattgcagtttcgttgcttttgtctatatcgagacaaattgtggagaaatgcgacccatatgactctgtaccgaaaggcctcttcgtaatggattgtttaacctgctatagcttaggtcaagaagaagactatttaaccttatttgccaagcatgtttcccgatattggcaggtcaaacattataacatatcaaaatgttccatcatatcccaaaaatgttagtatgtgattctgtcattgctagctagttagatcttcgttaggtcaagctttctcatcgtattagcatattcccttaactccgcatttctcagggataattgggtcggtactgatattatagatattgatcgggttaaggcttggttagtaggatcaagtatatgaggatacacagtcccctaagtacaaaatgcgtagagatagattccaattacgagtgcaaacagtttaaaatcttgatattgcgtgatttcttgatattgcgttctaaatcacggtcgcggaccatttttttaaaaccttgattggttctaatttggttcttgcctttatgatgtcatataggatcattggtgccgtgttgattgtagcgggactgtaccttgtcttgtggggtaagagtgaagagaggaagtttgcaagggagcagcttgcgattgcatccactgagcatagcatcataaggcccgcaagccacgccaaagcatcacttgctcagccactcctttcttcatcaacagagaatgtttgaacaagatcaaaattccaacttcaaaccacacaccattttcttggtgagaagaagtaaaagaaaaaaggggaaaaaagataccagctataccttactagttactactgctactactacattatgtcagcaagtttgtgtgtgttggaaccggttttcatcttttcctttctttttttttttatttaattcaaatgcttttttagtaggtcatttagaatatgagagaattgtgggaatggttgtaatggtggatgccactttaagtggggctagagcctgaaatccccccatatgcttttgtatgtcaattaatttatggtttgatttaagaaatgaatttttgttttttgggtcctgcgaatggaaattatttatgatagaaaagctatatgcaaaaa

SEQ ID NO: 5316 - DNA, 1697 bp, Glycine max
cggtctcgtgggcggacgcgtgggcggacgcgtgggcggacgcgtgggcggacgcgtgggcggacgcgtgaccactttcctccctcctttcttttactagcacctagctaggactcaattctttggttacttaatagtagttcctttttaactatctttcttcaatggctgactcagcctcagcctcagcctcttcttccagaatgtggtgctccatccccgaaaggtttcagctgcatgcggccatgttggccctgcagtttggctatgccggcttccatgttgtctcaagagctgcccttaacatgggcattagcaaacttgttttcccagtctaccgcaacattatcgcttttctcttgctcgttccttttgcctacttcttggaaaagaaggagagacctgccattacattaaacttcctcttacagttctttcttctggctcttgtcgggattacagcgaaccaaggtttctacttgcttggcttggacaacacatcccctacctttgcatcagccatccagaactctgtcccagccattacatttctcatggcagtcatactcaggatcgagcaagtgcggctgaaccgaaaggatgggatatcgaaggtggcgggaacgatattctgtgtggctggggcaacggtgattacactatacaagggtccaacaatatatagcccaactccacctctacacagtgagagaccagcagtagttgactttggaacactctcactgggagatgcaaaggggaaaaactggacccttgggtgcctctacctcatagggcattgcttgtcctggtctgcttggcttgtgctccaagcacctgtactcaagaagtacccagctcgtctctccgtcacttcctatacatgtttctttggactcatccaattccttgtcatcgctctcatcgttgaaagggatgcccaggcttggattttccaatctggtggagaagttttcactattttatatgcgggagtggtggcatctggaatagccttcgctgtacagatatggtgcattgacagaggtggccctgtgttcgttgccgtgtatcagcctgttcaaactcttgttgtcgctattatggcttccattgctttaggcgaagagttctacttgggagggatcataggagcagtgttgatcgttgtgggactgtactttgtcttgtggggtaaaagcgaagagagaaagtttgcaaaggaacatgctgctattacgtccaccccagagcacagtggcatcaggtcctcaagccatgccaaaacatcactcactcagccacttctcccttcatctacggagaatgtctgatcaacaaaaccatgacttcaagctggggcaccattttctgggagagaaaaagggaaaaaggaggaaaaagaagaaaataatacccagttatacattattactactttgtgtcaggaagcttgtgtgtgtacgaaggggctttcatctttttttcttttttttttttggttaattcacatgctttctttctaggacttttagaatgagggttttctatgggaatcattacaatgatggatgtcacgtaaaagcgggctttaaagactgaaatcccatatgcttttatatgttaattaatggtttgatttactaaacgagatttttaatttaagctcaaaaaaaaaatgtctcgaaggtaaaaaa

SEQ ID NO: 5317 - DNA, 1683 bp, Glycine max
cacgcgtccgaaacatttgaagggtagcaacagttgacatagcgcctttttagggtgagagtgggtcacagcctacttgttttctccactctcccttcactatatttatatcctaactcttgcatctcctcctcaccactttcctccctagctcccttcttttactatcttcaatggctgattcaggctcagcctcttcttccagaatgtggtgctccatccccgaacgggttcagctgcatgcggccatgttggccctgcagtttggctatgctggctttcatgtggtctcaagagctgcccttaacatgggcattagcaaacttgttttcccagtctaccgcaacattattgcttttctcctcctccttccttttgcctacttcttggaaaagaaggagagacctgccattactttaaacttcctcttacagttctttcttctggcacttgtcgggattacagcgaaccaaggtttttacttgcttggcttggacaacacatccccaacctttgcatcagcgattcagaactctgtcccagccattacatttctcatggcagtcatactcaggatagagcaagtgaggctgaacagaaaggatgggatagcgaaggtggcgggaacgatattctgtgtggctggggcgacggtgattacactatacaagggtccaacaatatatagcccaagtccacctctacagagtgagagctcagtagtagttgagtttgggacactctcatcactgggagatgcaaaggggaagaactggacccttgggtgcctctacctcatagggcattgcttgtcctggtctgcttggcttgtgctccaagcacctgtactcaagaagtacccagctcgcctctctgtcacttcctatacatgtttctttggactcatccaattccttgtcattgctctcatcgttgaaagagatgctcaggcttggattttccaatctggtggagaagttttcactattttatatgcgggagtggtggcatctggaattgccttcgctgtacagatatggtgcattgacagaggtggccctgtgttcgttgcggtgtatcagcctgttcaaactcttgttgtcgctattatggcttcccttgctttaggcgaagagttctacttgggcgggatcataggagcagtgttgatcgttgtgggactgtactttgtcttgtggggtaaaagcgaagagagaaagtttgcaaaggaacatgctgcaattacgtctactccagagcacagtggtatcaggtcctcaagccatgccaaaacattactcactcagccacttctcccttcatctacggagaatgtctgatcaacaaaaccatatatgacttcaagctggggcaccattttctctgagagaaaaagggaaaaagaagatattaaaagaagaaaatgatacccagttatatacattattaccactttatgtcaggaagcttgtgtgtgtacgaaggggttttcatcttttttattttactttattttggttaattcacatgctttctttctaggacttttagaatgagggttttctatgggaatcattacaatgatggatgccacgtaaaagcgggctttaaagactgaaatcccatatgcttttatatgttgattaatggtttgatttacaaaaggagatttttaatttattt

SEQ ID NO: 5318 - DNA, 1775 bp, Glycine max
attctcttggtcctcatgagctcctaagcgggcgctacatccttgtaactaatcgaatgcaaacatggatgggtcctgctcagaccatcactgataaagtgaaactctttgtgacttatcaagtgtctgcttgggtccggattggctcagcaggatcatcagggcctcagaatgtgaatgttgcccttggtgttgacaatcagtggcgcctgcgaggacacgcccggggggcggatgacgtgtggcatgaaattggagggtcctttagaattgaaaagcagccatcaaaggttatggtttatgtgcaaggtcctgcttctggtgtggacttaatggttgctggacttcaaatttttcctgtggatagacacacaagatttagatatttaaagatccaaactgataagattcgtaaacgtgatgttatcctgaaattctctggactggactctggcagctatgctaacacctcggtgaaagttatacaaacacataatgatttcccaattggaacatgcatcagcagaacgaacattgacaacgaggactttgttaacttcattgtgaagcattttaactgggctgtgtttggaaatgagttgaagtggtattggacggagccacagcaaggcaatttcaattacaaggatgctgatgatatgttaagcttgtgtcagaagcacaagatacaaactcgcggccattgtatcttctgggaagtggacgaaaccgttcagcagtggatcaagtcactgaacaaaaacgatctgatgacggctgtccaaaaccgcctaaacggcctgctgactcgctacaagggcaagttcagtcactatgatgtcaacaacgaaatgctgcacggttcattttaccaagataggctaggcaaggatataagggcaaacatgttcaagactgcaagccaactagacccttctgccacactctttgtgaatgattatcatgttgaagatggatgcgacaccagatcatgtccagataagtacatccatcacattcttgatttgcaagagcaaggtgctccggttgggggaattggaattcaaggccacatagactgtccaatagggcctattgttagttcttccctggacaagttgggtattcttggcctacctatatggttcaccgagcttgacgtgtcttccgtcaatgaatatgttagagcagatgatcttgaagttatgctacgcgaagccatggctcatcctacggtggaaggcataatgctgtggggattttgggagttgtttatgagtagggacaattcacacttggtgaatgcagaaggtgacatcaatgaggctgggaaaaggttcttatctcttaaacaagagtggctttctcatagccgtggccatgttgatgagcaaggtcaatacaacttcagaggctttcatggaacatatgatgtgcaagttgtgaccccatcaaagaaaatttctaagacatttgtgcttgacaaaggtgactcgccactagtggtatccattgatttataaccataatgcttcgccccaagaactaatatcatgtcttttatatatatatatatatttgggttggctgaaaaactacattggtggtgttatgttatcttaaaatagttgggatttgagttgtctgcacaattgcacaaaatctaaacacttaaagattgtctcactttattataaatatacttgtaagaaatgaaaaataaataaaaagtgatacttgtttgcttataaaaaaaaaaaaaaaaaaaaaaaaag

SEQ ID NO: 5319 - DNA, 973 bp, Glycine max
agtggtgcaaggcataaagaggagaattggtggggataggcgaaggaggtggcgactgagtagtgaatagggtttttgattgattgatagcaataattggtgttagcgaagcttgagaattgagatttatgggtcgcaatcgcagtcgcagtcgcagtgtgtcacgctctccttccaattcccgcagaagaaggtactctccatcccctgtttctcatcgccactcgagaacttccaggcgccgctctccttcccacaagcgccgtcgaaggcacagaacctcttcctccccctctctttcacgcagccccactcccaaacccaagaaagatcaaaacaaaagcaagcgtcaacacgaggaagagttgaaactattggaagaagagactgcaagaagactggaagaagcaattcgaaaaaatgttgaggagaaacttaacacagaggaagtcaagttagaaatagaaaagcgcgtagcagagggagtgaagaaattgtttgatgatgttgaagctcaacttgaaaaagaaaaggaagatgctcttactgaagctagaaggaaggaagaacaagcccgtaaagaaagagaagagctggacaagatgcttgaagagaataggaggagagtggaagaatctcagagaagagaagctctagagcagcaaagaaaggaggaggaacgacaaagggaattggagatgattcagagacaaaaagaagaggctgctcggagaaagaagctggaggaggaagaagaacatgcaaatcgaattaattctttgggtaagaacaaatctaggcctaaatcttatggtttctaattactactatatgtgatatcattttgtaccccaaattatttgtaccctttatgtggaacaatgatcttgaatgaaagatttgatactcctatgtttgagcttgcaacctactttattaaaagatctaagaaaatcgaataaaaaaaaaaaaa

SEQ ID NO: 5320 - DNA, 1270 bp, Glycine max
  misc_feature (855)..(877): n is a, c, g, or t
  misc_feature (1052)..(1056): n is a, c, g, or t
  misc_feature (1073)..(1095): n is a, c, g, or t
gcagcttattccaagcatgcctccctaggaactcttcgcaaaccaggtgatgcgttattaaatgggcagaagcagctagtgcaaccttcccccagaatgggttagaggaaatggtctgaatgaggtagttaatttggctgaaatgttacagttacagtcccgagactggtttttgggatttgttgagaggttcttggacagtgatggggacactaccttgtcagataatgaccaaatagcaggtatgctcactcaactaaagagtgttaacgattggttagatgagataggatcgagcaaggatgagggagaatcatgccagatatcaacagagacaattgaccggttgagaaagaagatatatgaatatcttcttacacatgttgaatctgctgctgctgcactcagtggtggatcacaatcgtcacctcagatccaaacaacacaaagtaaagccaaaaggtgaatgagtacatagcttagcttaacgatgcatgagtagataggcagagtgggactaaactcggtcactaaaagttgtccaaggtcctctttaaatttcacttattttttgccccctctttcgtctgtttgtacataaatcctacgtggggtttgaggtatagatggagtctaattatttagtaggggagatagcaaacatgatttatgaggatattttctttcatttttctgaatattgttcagatgaaattatacaaattgaaacaatggaagatataagcagatatgatcttttctaaaaaaaaaaaaaaaaaatgcccttctgttgccaaagtataaaagcttgaagcatacccatttcatatttcacttgtcaactcgcaatatcannnnnnnnnnnnnnnnnnnnnnncacaaccgtgaatggcactttcatgaagggaattaagtaccaatcacacgcagcatcttaactgctaggctgcatcaggacaaatgacaaatgaaaatctctcttctagttctagatttgcccctttggaacttctctcttttaactcggttgatagtataggttgaagatgttnnnnnttataactagaaactannnnnnnnnnnnnnnnnnnnnnnactatatagacattaagtgatatttgttccactaattgtttcgtgatcaagttaatgacttatgacttctgaagtagagctgtttagccccaacattactgcatcagtcgtctaaccagaaaatagtgcaatcttttaccaagtaagggagtgttatggggctgcaggccatgca

SEQ ID NO: 5321 - DNA, 1340 bp, Glycine max
cagccagactcagaagtgaccccaatatacttagccatatctttacttcccaaaacttgctctacaatgagtttccttcgttcttttgcaagaaacaaggatatatcaaaagtaggacgcagaggtatccattgcatgcagaaactatgtgcagaaaaaatatctcctgattcactagagaaggcccaaaatcgtgtgatagatgctgcactcacacttgttcgagaaaatacaaggcttaagaaagaacttgtgcatagtttgggaggtgctgtagcaacttcaactcttcttggagttcctttgggtcataattcatcgtttcttgaagggcctgcatttgcacctcctttcattagggaaggtatttggtgtggtagcgcaaactccacaactgaagaaggaaaggatttaaaggacttgcgaataatggttgatgttggtgatatccctattcaagaaatgcgagattgtgggataggagatgagagactcatgaaagttgttagtgattctgtcaaactagtgatggaagaggatccattacgtcccttaattttgggtggtgatcactcaatctcatatccagttgtcagagccatatctgagaagcttgggggaccagttgatgttcttcattttgatgcacatcctgatctctatgatgaatttgaaggaaattattattcgcacgcttcttcttttgctcgaatcatggagggtggttatgctcgtcgactcttgcaggtcggtataagatcaataaacaaagaagggcgtgaacaagccaaaaagttcggggtagagcagtttgaaatgcgacatttttcgaaagatcgtccatttttggaaaacctgaatctaggagaaggtgctaaaggagtatacatttcaatcgatgtggattgtcttgatccagggtatgctgtaggagtgtcccactatgaatcaggaggtctttctttcagggatgttatgaacatgctgcaaaatctcaaaggtgacattgttggtggagacgtggttgaatacaacccacaacgtgacactcctgatcgtatgactgccatggtagctgctaagtttgtgagagaactcgctgcaaagatgtcaaaatgataactattaattctgcctcgtgtgtgtgacatttagtttacttcaatgcactcaacttttcaatttatagtgttgttgttatgaataaataatacatgcactattaccctgtttacactaacagtgtaaagatgatgtatgtgtataagactaagttttgttgtgttctattagaagtattaatcttgttcaaaaaaaatgtatttgtcatgtgaaggaaa

SEQ ID NO: 5322 - DNA, 1434 bp, Glycine max
atccaatccaaatttacggaagtcccgcctcgagtataattagcaccacttccattctcacactacttactctctttctctctctgacggtttccgctgttctctttcaagttccaagaaatgtcaattataacacgcagaggcatccgttacatgccaagactagatgcagcaaaagtatctgctgctttgctagaaaaaggccaaaatcgtgtcatagatgcttcacttacacttattcgagaaagagcaaagcttaagggagaacttgtgcgtgctttgggaggtgctaaagcaacttcaactcttcttggagttcctttgggacataattcatcgttccttcaagggcctgcatttgcacctcctcgcattagggaggccatttggtgtggtagcaccaactcaacaactgaagaaggcaaggaattacaagatgcacgagtgctaactgatgttggtgatgttcctatccaggaaattcgagattgtggggtagatgatcacagattaatgaatgtaattggtgaatctgtaaagttagtgatggaggaggatccattatgtcccttagttttaggcggtgatcactcaatatcatttccagttatcagagctgtctctgagaagcttggaggaccagttgatgttcttcatcttgatgcgcatcctgataactatgatgcctttgaaggaaacatttattcacatgcttcttcttttgctcgagtcatggagggtgactatgttcgacgtctcttgcaggtcggtattagatcaataacagctgaagggcgtgcacaagccaaaaaatttggtgttgagcaatatgaaatgcgaacattttcaagagatcgccactttttagagaacctgaaactaggggaaggtgttaaaggtgtatatatctcaatagatgtggattgtctcgatcccgcctttgctccaggagtgtctcacatagagccaggaggtctttcttttcgtgatgttctcaacatcctgcacaatcttcaaggtgatgttattgctggagatgtggtcgaattaaacccacaacgtgacaccgttgatggaatgactgccatggtagctgctaagctggtccgagaactggctgcaaagatttctaaatgatgatctcctgcctccccttgatctcttgatctttacttcaacccactcattccctaaaatgcacctgaaaggacaacttttcagtgtggcatccaattttcactacatttaatttgaagcattcatagaagaacatggtctataatcaaatggttttttgtaggactgttggttttctgttcagttgtagttgtacttgtttttgctgtttcgaaattctgcaaggactttgcaataattccaatagtatcttttgcatgtttaagtctgatatataaagataccaagaatgcctcc

SEQ ID NO: 5323 - DNA, 1571 bp, Glycine max
  misc_feature (1551)..(1553): n is a, c, g, or t
acgagaacaatgcttccatgaccctcgcccccgcctcccctcttctgtccctttttctttttctttttttttcttctctcagcattctccatctcttccaaaaatgaagttccaagattatgagcctccctctagcccaaaacacatgatcccaaaagtgaccttactagcaatcttggtcattctaatatttgccatcacccctttgtggtaccctttgttgagctactctacttcacacttgaagatcaataagaataatattccatcatcttcatcacatgatcaagggcaagaagagaacttgccctcaacatatgtggagaagtgtgacattttcagtggggagtgggtgccaaatccaaaggcaccatactacacaaacaagacatgttgggcaattcatgagcaccaaaattgcatcaagtatgggaggcctgactctgagttcatgaagtggaggtggaagccaagtgagtgtgagcttcccatattcaacccttttcaattccttgaaatagttaagggaaaatccatggcttttgttggtgactcagttggaagaaatcagatgcaatccatgatttgcctcctttcaagggtggaatggccaatagatgtatcatacactaccgatgaatattttaagcgatggaagtacccaagttataactttaccatggccaccttttggacaccccatttggtaagatccaaaatggctgattcacatggtccaagcaacactggcctttttaacctttatcttgatgagtttgatgagaaatggacaacccaaattgaagaatttgactatatcattcttgatggagggcattggttctaccgaccaatggtgttctatgagaagcaaaaaattgttggatgtcactattgcctcttagaaaatgtcccagatttaaccatgttctatggctatagaaaggcttttaggactgcattcaaagctatcgatagtttagaaaatttcaagggaatagtattccttagaacatttgcaccatctcattttgagaatggaaaatggaatcaaggtgggaattgtgtcagaactaagccgtttaggagcaatgagacaagattagagagcactaatttggagctatatatgatccaattggaggaattcaagaaagctgaaaaggaaggtagaaagaagggtttgaaattgaagttacttgacaccacacaagcaatgttattgagaccagatggtcatccaagtagatatggacattggccacaagagaacgtaacattatataatgattgtgtgcattggtgcctgccaggacccatagacacatggagtgatttcttgctagaaatgttgaagatggagggcatgagatctgcaataagctaaatttataagtattattaactaatttttcttgtaaactatcattggtaatatttttttgtaattttataaagataaaatttgttatgcgtgccataataaaattatttcttttataaatttataaaaaagaatgaagatatattgaagagttttttttttatccnnnaaaaaaaaaaaaaaaaaa

SEQ ID NO: 5324 - DNA, 1368 bp, Glycine max
  misc_feature (9)..(9): n is a, c, g, or t
  misc_feature (12)..(12): n is a, c, g, or t
  misc_feature (19)..(19): n is a, c, g, or t
  misc_feature (39)..(39): n is a, c, g, or t
  misc_feature (44)..(44): n is a, c, g, or t
  misc_feature (49)..(49): n is a, c, g, or t
  misc_feature (53)..(53): n is a, c, g, or t
  misc_feature (69)..(70): n is a, c, g, or t
  misc_feature (73)..(73): n is a, c, g, or t
  misc_feature (110)..(110): n is a, c, g, or t
agaatccanagntatgganaacttcagaatggtgacgantgaanaacanaggngcagtcccagaaaccnnaanatcctcccattaccagattacaatggccaaaacttgncaacccttttcagcccaaggtcagctacgtaggcccccccccccggttgggatgaagaggcactgttgttggccagcctcttcgttgaagacacgccggatagagatcccaagcacaagaagcgctacgtttggcactccaaaaccccaccaaactcatcaaggaaacgtagagctctgaggagtccacaagcaccaatccctgtagttcttgatcttgatgcagaagaaactcccagaaaagatagtgggagaaagaataaagaaatgaaagtttgtgttgataatgagggaaagaaagcttgtgttgagaatgagggaagcagagtgggaggagatgggaatgaatcaaaagagaagaactcggctgacgcttcttctagttctgttcttccctgcattgataaactaagggatgagctttcctgtgctatttgtttggagatatgctttgagccaagtaccactccttgtggtcacagcttctgtagaaaatgtctaagatctgctgcagacaagtgtggcaaaaagtgcccaaaatgcaggcagctaataaagcaatggccgaccatgcactgtgaacacagttctctggaacacaatccagcttctgtttccacaagaagttgaagcaagaaaagaagccagtgccttgaatagtctccaacaagctcaaaatctgagtccagaatcagcattttttgctaatctaaggaatgacagacgacagccttttaggggggcatcaacaacaacatcatcaacacagcaggatgaggatgctgcattggctagaatgttgcagagacaaattgatgaacaaagaagcccgggaacaactcgaactcggtttgcaagattgagggcaagaagaggaggggtttctactagccaacatgaggatgcagctttggctctaaggatgaggagagaagagttcatgcaaacttatagagggagcagccagtctagcaggctaccctcatcattattagctagagaaaaattgagggctatggtatctagagccatgaacagaagagaagatcttagacaagggtgaatgttgttaacaactaaactttttttttctgaatgtcattttatggttatattcgtgtctcataatttgtgaggtgtgcattgttttgattttcaaggtacaaattgaattattcaaaactgaactggcattctgaattatgatgtttctactaagctattctttaatcttagtttacaaaaaaaaaaaaaaaaaa

SEQ ID NO: 5325 - DNA, 1033 bp, Glycine max
tcgagtcagctacgtaggcccccccacccaaggccactccacaagccagtaataatacttagctttgaatctccctgttgacatacatgggtttgcttctctgattacaaaaatcacttttggggagatggggaggttcgaaaaccatgttgtcaaaggaggcatcaagttgccaattgggttcaggttttgtcccaccgatgaagagcttctccttcactacctcaagaagaaggcgtttgctcaacaattacccgcttcagtcatttcagagtttgacgtgtttcagactgagccatggaaacttccaggtgaattgagggaaaataggtacttttttagcaatagatcaaatggaaacatcaagagacctgctggttctgggtgctggaaatctgtaggcaaagaaaaacaaatcatccattcagagagcaatcaagtaattgggatgaaggaaacactgtttttttgcaaagggtcccatgagacaagaactcagtgggtcatgcacgaattgcgccttgtagcttcctacccatgtcagatgccagtggcagattttgctgtgtatcgcatatttcagaaaaacaagatgaagacaagaagatcacatgggaagaagccctctagtagcagcaaacttcagagacttgttgatgttaaagctagtttctttgacttcactgtggattttaatcatgacgatatagggcctcccacaccttgttccccatgtctaagtgaaggctgtagtgaaatctcctctagcaagttagattaggatttaggagtagaagtgtagaacagtgcatgctttgtttattttcctcaatttatgagatatgatcaagaagcctctaaagcacaagtactcttgtctttactacagtcctgatgttgagttttttttgccctgcagtgtgaaacgaaaaaattatgtcctcgtaattatttgaatattattttctgaatttcttgttgcaaaaatcattaagaatcctttgatcatcaaaaaaaaaaaaaaaaaaaaaca

SEQ ID NO: 5326 - DNA, 983 bp, Glycine max
tcgagtgagctacgtaggccccccccccgagttgtagattgtgatgtggataagtgaaactctccaaaaagcgagtcctcaaccacataacatgtcgttactttgttctttgcattctcactctcacacaacaacaatgatgtccctgctgcagaattccccaacgcttcacaactcctctttccctcagaagcatgtcactcgttcatctagaagagatgctatttccttcattgtcaaagcagtccaagaaccctctgcttctttaacttctcaagatagacaaagaaggcgccaagtgattgccgttggaaccactgccccattagtttttttgttcaaccaacactcgaactcttttgctgcagaaaataagaaaggatttttgccggttttggacaagaaagatggatattcatttctctacccttttggttggcaggaagtagtaattgaaggtcaagataaggtgttcaaagatgtcattgaaccactggagaatgtcagtgtaaatgtgataccaactggcaaacaggatattacagaatttgggtcccctcaagaggttgccgaaactctaataaaaaaggttttggcccctccaaaccagaaaaccaagatagtagaagcaaaagagctagatgttgaaggaaaaaaatactatcaatttgagttcattgctcaggctccgaactatactcgtcatgctctcagcacagtctccattggcaatggtaagttttacaccttgacgacaggagcaaacgaaagaagatgggtgaagatgaaagacaggctgcagacggtcatagaatccttcaaaattttcgacgtttgataatgatcattactattaccaccatattagagatattaaactcttcagcgagaatgttcatttgaattttgagctttatagtatcaagttttacctgtttttttattaaaaaagagaaaaaaaaaaaaaaaaaactcgagggggg

SEQ ID NO: 5327 - DNA, 2943 bp, Glycine max
cccacgcgttttttttttttgggagataaaagagaaagggtcaatccatttttttaaagtcttttgtgcgggtctgagggttgcagtgtgggggtgcaagagttacgactgatatttatttctcaatccattccctgttcaatgcaatttccttgctccttctcctactaaaagcaaaggaaaatggagggccccagtgagataggtctcattggagaaaattttgatgctggtttgatggggaggatgagggacgatgagtatgaaagccgttctggaagtgataactttgaaggcgcatctggtgatgatcaggatggtggtgatgatcagccacagaggaagaagagataccacagacacacccctcaccaaattcaagagcttgaggctttcttcaaggagtgtcctcatcctgatgagaagcaaaggttggatctcagtaagaggctttgctttggagaataagcaagtcaagttctggtttcagaatcgacgaacccaaatgaagacccaactggaacgccatgagaacataatgcttaggcaggagaatgataagctcagagctgagaacagtttgatcaaggaagccatgtcaaatccagtgtgtaacaactgcggtggccctgcaattcctggccaaatttcatttgaggagcaccagattagaattgagaatgccagactaaaggatgaattgaaccgtatatgtgtcctagcaaaacaagttccttggcaagccaatctcatcattgaccagtcccatggccctcacaacctcaaattctggtcttgaacttggtattggaaggaatgggaattggtggttcaagcactcttggcactcccttgccaatggggcttgatttgggagaatggagtgttaggcacccaacctgcaatgcctggggttagatcagcattgggtttgatgggaaatgaagttcagcttgcggcttcgttgcccatcccccccccattggctgccatggaggaattactgaagatgactcaggcagagagccctctttggatcaagagtttggatggtgagaaggaaatctttaaccatgaggagtatgcaaggttgttttctccttgcattggtccaaaacccgctggctatgtaactgaagctacaagagaaactggaatagtaatcatcaacagtttagcccttgtggaaactttgatggacgcgaatcgatgggcagagatgtttccgtctatgattgctagagctatcaacctcgatgttatatctaatggcatgggtggaacaagaaatggtgctctacaagtgatgcatgctgaggttcaattgctttctccactagtccccgttcgtcaagtatgctgctgcgggttctctacgcagcgggcagaaggtgtatgggctgtagttgatgtttccattgagataggtcacgatgctgctaatgcacagccatccattagctgtagaaggcttccttctggctgtattgtgcaggatatgccgaatggttactccaaggttacttggcttgagcattgggagtacgatgagaatgttgtccaccaactttatcgcccgttgctaagttctggtgttggattcggtgctcatagatggattgccaccctccaaaggcagtgtgaatgcttggctatcctaatgtcctcttccatttcaagtgatagtcacacagcattgagccaagctggtaggagaagcatgttgaaattggcacaacgcatgactagcaacttctgttccggggtttgtgcttcgtcagctcgcaagtgggacagccttcacattgggactcttggtgatgacatgaaagtgatgacaaggaaaaacgtggatgaccctggtgagcctcctgggattgtgctcagtgctgcaacttctgtttggatgccagtgtcacggcaaaggctgttcgactttctgcgtgatgaacggctgagaagtgagtgggacatcttgtccaatggtggaccaatgcaggagatggtacatattgccaaaggacaaggacatggaaactgtgtttctcttctccgtgctaatgctgttaacgccaacgatagcagcatgctgattctgcaagagacatggatggacgcgtcatgctcagtggtggtatatgcacctgttgacgtgcaatcactgaacgtggtgatgagtggtggagattctgcatacgttgcactcttgccttcaggctttgcaattcttcccgatggccactgcaacgacaacggctgcaacgggagtctgcagaagggccgcggcagcgacgacggcagtggcggaagccttctcacagtcggtttccaaattctggtgaatagtctcccaacagcaaagctcacagtggagtcagtggacactgtgaataacctcatctcctgcaccattcagaagatcaaagctgcactcagagttgcatgatgccaacaacaacaacaacaacaaccattttgttaatgcagtaataatatgcaaaagttaagttaccttaaaattattattttgtggtcttttttaattttttggtttctaagatgaatattattcggagaggggttatataattcggttgggtgtataggatttataattatatagagtagtggaagaggctgaggcagaaagggtcgcgtaaggaaggtttcgagtcaagaacgaaccgcgatggaggaacttgaattgtgctgtttgcatttgcatgcagcttttctctgctcatagtggttcgggtattgactcgttgacctgcgagttagtctcagtgctcttgtttagataagatgacagaaaaaaaaaaaacaaatgtgcgtgtgttactacttaaattattactagtgcccatccatccgatacagttgcaaattgctgaactaatgtattttggaattatgcatttttcatattttagtagtcttttt

SEQ ID NO: 5328 - DNA, 1682 bp, Glycine max
tttcaatcgattacacctagagagagataagtatttcacattctctgttctacattttgggatttcatctaacaagtttcaatgcaattgttaaagactctcttatatttttctccattaaaattatttatttggtctcgacaacttatgatttttatccttgtattaaggagttttttatgttaatcaaattggttctcttatctattttttcttaatttctatgttgtgttctatttttattgatacttctcaggtgttattacaagtttttgatggagtttgttattggacggaaacgaaatggatatttgtttaattgacgcggaaaaaaatttcatagagatcatagttagtgcctcgcgcagcctctgcgaccccccccccccccccacaaaccattgctagtttagttacgtacatagcttgaaaacacagtgcttgtttagactagtatcttccatggctccgaaagatagaatcctggttttgggacccacaggagccattggaagacacatagtttgggcaagtgtaaaggcagggaatcccacttttatattggttagggacacccctgcctctgttaacaagccaaggcttgtcactgctgctaatcctgaaaccagggaagagctcattcagagcttccaaaattctggagttactctaatccagggagatatgaacgatcatgaaagtctggttaatgcaatcaagcaagttgatgtagtaatctgctcatttggtagactactaatagaagaccaagtcaagatcgttgcagcaataaaagaagctggaaacgtcaagagatttttcccatctgaatttgggctggatgtggaccgtcacgatgcggctgagcctgtaagagaagttttcgaggaaaaagcgaaaattcgaagagtaattgaagctgaaggaattccttacacttacctatgttgtcatgcctttactggttatttcttacgtaacctggcacagattgacatcactgttcctcctagggacaaggtgttcatacaaggagatggaaatgtgaaaggagcgtatattactgaggctgatgtgggaacttttaccatcgaagcagcaaatgaccctagagccttgaacaaagccgtgcacataagactcccaaacaattatttgtccttaaatgatatcatctctttgtgggagaaaaaaattgggaaaactcttgagaaaatttatgtttcagaagaagaagttcttaagcaaattaaggagacttctttcccaaataattatcttctggcactataccactcacagcagataaagggagatgcagtgtatgagattgaccctgccaaagaccttgaggcttctgaggcttatcctcacgtggaatacagcactgtttctgaatatttggatcagtttgtctgatttccgaaatcttaggaaccaaagcacttatatgattttatcactctgcaaaatgcttaataaaacaaatgcagttcttccttctgtttttctttcagaaaaggcctatgcaggcttttttgctgcactaccattgtctgtttcgtagtggttgcttgtgtttgtcctgttctcaagaaagtatccacatttatcatttatgtaatgttctacctgaaaaataataatataatctgttttaatattgttaaaaaaaaaagaga

SEQ ID NO: 5329 - DNA, 1511 bp, Glycine max
cacaactacacatatattcttcgacagtcaactcaatagcctatccaaaaaaaaggttgtttcagaattgagagcaccggtcgctggacggaaacgaaatggatatttgtttaattgacatgagaaagatggaaattaattagggaagaaatgtcatacagatcaaagttagtgccctataaatactaaccaaagcattgctctgcaccacaagccattgctagtttagttccatacatagcaagaaaaacacactcacacacagtgcttgtttagactagtgatcttccatggctgtgaaggatagaatcctggtcttgggacccacaggagccattggaaggcacatagtttgggcaagtttaaaggcagggaatcccacttttatattggttagggacacccctgcctctgttaacaagccaaggcttgtcactgctgctaatcctgaaaccagggaagaactcattcagagcttccaaaattctggagttactctaatccagggagatctgaatgatcatgaaagtctggttaaagcaatcaagcaagttgatgtagtaatctgctcatttggtagactactaatagaagatcaggtcaagatcgttgcagcaataaaagaagctggaaacgttaagagattttttccatctgaatttgggctggatgtggaccgtcacgatgcaactgagccagtcagagaagttttcgaggaaaaagcgaaaatccgaagagtaattgaagctgaaggaattccatacacttacctatgttgccatgcctttactggttacttcttacgtaaccttgcacagattgacatcactgttcctcctagggacaaggttttcattcaaggagatggaaatgtcaaaggagcgtatatcactgaggccgatgtgggagtttttacaatccaagcggcaaatgaccctaatgccttgaacaaagctgtgcacataagactccctaacaattatttgtccttaaatgatatcatctctttgtgggagaaaaaaatagggaagactcttgagaaaatttatgttccagaggaacaagttcttaagcaaattaaggagacttctttcccaaataattacctgctggctttgtaccactcacagcagataaagggagatgcagtgtatgagattgaccctgccaaagaccttgaggcttctgaggcttatcctgacgtgaaatacaccactgtttctgaatatttggatcagtttgtctgatttccgaaatcttaggaaccaaagcacttttatgatgttatcactctgcaaaatgcttaataaaattaatgcagtttttccttttctttcagaaaaggcctttttgcaacactaccattgtggcattgtttgtttcgtggtggttgctggtgtttgtcctgttctgaagaacctatccccattaatgtaatgttatacctgaaaaataataatataatctgtgctactgtttgcacatcatctagacaaaaaaaaaaaaaaaaa

SEQ ID NO: 5330 - DNA, 1401 bp, Glycine max
attggttggtttggactacacagaattcatggagccgccgccggccgcagatcaggaaatagatacttgtttgtttggtgcgttaaacttggaaacaaaagaagtgaaattttgccatatagatcaaagttgatggccctataaatacaaattgaagtattgctatgcatcatcactaagccattgctagtttgattacctatcaaaaccagaaaaacacactgcaattgtttggactagttttaatttcttccaattccatggctgggaaagatagaatcctgattttgggacccactggagccattggaaggcacatagtctgggcaagtgtgaaggcagggaacccaacatttgtgttggtgaggaacacccctggctctaacaacagggtcaatctggtcaaagctgctaatcctgaaaccaaggaagagctcattgagagcttcaaaaattcaggagtaaatctaattcagggagatatgaatgatcatgagagtctggttaatgcaatcaagcaagttgatgtcgtaatctgtgcatttggtagactactaattgaagaccagttgaagatcattgcagcaataaaagaagctggaaacgtcaagagattttttccatctgaatttggattggatgtggatcgtcacgattcagttgacccagttagagaagttttcgaggaaaaagcaagaattcgaagaataattgaagccgaaggaattccatacacttacctatgttgtcatgcctttactggttacttcttacgtaacctggcacagattgacatcactgttcctccgagggacaaggtattcattctaggagatggaaatgtgaaaggagcgtttgtgactgaggctgatgtgggaactttgaccatcgaagcagcgaatgaccctaatgccttgaacaaaaccgtgcacataagactccctaagaattatttgaccataaatgagatcatctctttgtgggagaacaaaattgggaagactcttgaaaaaacttatgtttcagaggaaaaggttcttaaagacattaaggaggcttcttttccaaacaattacctgctggcattgtaccactcacagcagataaagggagatgcagtgtatgagattgacactgccaaagatcttgaggcttctgaagcttatcctaacgtggaatacaccaccgtcgatgaatatttgaatcagtttgtctgatttttgagtaattgatgcaatttttgttgctctgcaaagtgctcaataaaacctatgccttttcttttttgcgaaattggttgcttttgtcctatgtttcggaaaccatccacattaatgtaatcttttttttttttaccttaataatactctaatctgcggtcggaagcactgtttaaatttt

SEQ ID NO: 5331 - DNA, 1253 bp, Glycine max
  misc_feature (1235)..(1235): n is a, c, g, or t
ccccccccccccccactactcggcattttcagagtagaaccttcactctgctctcacccttattcctctctttcctttctttcttctgcaacaaaaatcatgtctgggtccttgggattcttctttgtgggtcttacgttgttgttgttggtcggggtggctaatgctgtggccaacacttccaacaaatttgatcaactcttccaaccaagctgggcttttgaccacttcattcatgaaggggatctcctcaaactcaaactagacaatttttccggcgctggttttacttccaagagcaagtatatgtttgggaaagtcaccatccagcttaagcttgtggaaggtgactctgctggaacagtcactgctttctatatgtcatcggacggtccaaaccacaacgagtttgattttgagtttctaggcaacaccacgggggaaccatactctgtccaaaccaatgtgtatgtaaacggagtgggcaacagggagcaaaggctcaacctttggttcgaccccaccaaggattttcactcatactctatcttctggaatcaacgtcaagttgtatttttggtggatgaaacgccaataagggtgcacacgaacatggagcacaagggaattccatttcctaaggaccaacccatgggtgtgtacagttcattatggaatgctgatgattgggccacgcagggtggtcgtgtgaaaacagattggagccacgcacccttcattgccacatacaagaacttcgagataaatgcgtgtgagtgtcccgtgtcagtggctgcaatggataatgctaagaagtgcaccagcagtgaggggaataagtattggtgggatgagcctaatttggctgaactcaacttgcaccagagccaccagcttatgtgggttagggcaaggcacattttctatgactattgcactgacactgctaggttcccagtcacgcctgctgagtgtgtccatcaccgtcacacctgagcagacttagtgattagtctaaactttattttgttataacttatgggaagttatgaaaataggattggggcataagaaaaaaatggtgggtggtgaacaaagttgtggaacatgtccttcatgtttctgattgtaatatatattgccacaacattaatgtgaattgttggtttttcttcttgtaaaaaaaaaataaaaaattataagttaaaaaaaaacaaaaaaaaaaaaaaattaanaaaaaaaaaaaaaaagat

SEQ ID NO: 5332 - DNA, 1272 bp, Glycine max
acttttcaagcacattttcctttcccctccagtcaagtagccacgtaccccccccccccactactactcagcatttttcagagtagaaccttcactctgctatcccccatattcctgtgtttcctttgaaaaaaaaagaagaagaaaaaacatgtctaggttttttggattcttctttgtgggtcttacgttgatgttggtcggtgtggcaaatgctatggctaactcttccaacaaatttgatcaactcttccaaccaagttgggcttttgaccactttattcatgaaagggatcttctcaaactcaaacttgacaaattttccggggctggttttacttccaagagcaagtatatgtttgggaaagttaccatccagcttaagctcgtggaaggtgactctgctggaacagtcactgctttctatatgtcatcggacggtccaagccacaacgagtttgattttgagtttctaggcaacatcacaggggaaccttactcggtccaaaccaacgtgtatgtgaacggtgtgggcaacagggagcaaaggctcaacctttggttcgaccccaccaaggattttcactcatactctatcttctggaatcaacgtcaagttgtatttttggtggatgagacaccaataagggtgcacacaaacatggagcacaagggaattccatttcctaaggaccaacccatgggtgtgtatagttcaatttggaatgctgatgattgggccacgcagggtggtcgtgtaaaaacagattggagccacgcacccttcattgccacatacaagaactttgagatcaatgcttgtgagtgtcccgtgtcagtggctgcaatggataatgctaagaagtgcactagcagtgagggcaagaagtattggtgggatgagcctaatttggctgaactcaacttgcaccagagccaccagcttatgtgggttagggcaagacacattttctatgactattgcactgacactgctaggttcccggtctcgcctgctgagtgtgtccatcaccgtcacaactgagcaaaaaataatttattaaaattagtctttcatattttgttctaattttaagggaagttatgaagataggattggggaataagaaaagaaaatggtgggtggagaacaaagttgtggaacatgtcctccatgtttctgcttgtaatatattgccacagtataactaatgtgaattattggtttttcttcttgtaaaaaaaaaaaaaaaaaaaattaaaaaaaaaaaa

SEQ ID NO: 5333 - DNA, 580 bp, Glycine max
atcattattattataagtatataaaagggtctatctttgccttggtgtgttttattctatgtaaagaaacatcctgttttcccaaccaacttgaagctccttccaacaccatcatcatcatccatggcatctcaaggtcatggtaacaagctcatcgtttccacatcaccaaagagtgacagtggcagcggcggcggtggcggtgcagtgggatcattgcccaaagggcagtgcttgtgctcaccaacgacacatgaagggtccttccggtgtcgtttgcatcgtgggcctacagcctcaccaacaaattggatgaaacgctccaagtccatgcctgctaataagcctgtggtttctgactccacatgctgatgataacaccaaaaaatgctattgtgagttatgtgttcatgtgtacctttatatgatatatgatatgaatccttgcttggaactcttgaattttggcagtgttaattattatatatatggttggaactttgttgttccacctctcaatttccctctgcttaattacatatacataaattaattatacaaataggtgtggctaatttaa

SEQ ID NO: 5334 - DNA, 1153 bp, Glycine max
gtccgcccacgcgtgcgcccacgcgtccgtacggctgcgagaagacgacagaaggggatctaactttgattttgtatgcacttcaaacagtttgggcgtcatgtggagagagagagcgttattggtgatcctgctactgcttctagtccagcaaatttgtgctaccaagaagcaagatcatggttgccccctttcttcctgcggcaaaatcaccaacataacttacccatttcgattaaagggccaccctaaaagctgcggcgacaataggtatgagctagcttgtgaaaacaatgttactgtgttacatttgtactctggaaaatatcatgtgcaggcaatcaactacaataatttcactatccgagtggttgatccaggagtcgatcaacaaacaaattgctcctcccttcctcgctatttcttgtctcgctccaatttcactgatacttacagtgatatttacaacatggatccataccaagctggtcaatattcaggtcatcggaatttatttatttgttatcggtaaagattagttgttagttttcatttatgatgaaatccacgactttttcattctcaattctttcaatacttaggtcgtagtaattgggacaggcttgctttccagcatatagtgtatatgaattgtagcaatccagtgactcagaatgggaagtatgtggatactgcttcatacgtcaactgggactccaaagacaagtacatatacgctattgctggtgacttaaaagcagaggacttccaagttggttgtcacgtaaagctggttgctctgacatcttggtggggtttggatacaaacaattattcctactctgccatgcacacggggctagtctatggatttgagatttcatggatgcgcctcatatgtgagcagcactgtccaagtaaacacggctgctactactacaactgctttttcgactctgtcagccaggagcttaattattgggacggggattcattagggagtgagtgaaacttaacataaaaagacttttttattcagagtgctctatgttaatatgaattctcttttttttttgttaatatacgtgaccttcttgttttatgaaaattaatggtaaataatattttttatggacctaaaaaaaaattataa

SEQ ID NO: 5335 - DNA, 1219 bp, Glycine max
gagagtactaaagaaaatatggagaggaagaataggattcttgtatttgggggaactggttacattgggaagtatttggtgagggcaagtgtctctttaggccatccaactttggtatacactcgccctcttaatgcacaaactcctccctctaaggcacaagtttgcaaggagtttaactccataggggtcacacttgtccatggtgaacttgagcatgagcagatcttggctgtgattaaacaagtagacattgtgatatgcgctctggcatcccctcaagtgatggagcaactcaaaattatagatgctatcaaagttgctggtaatataaagaggttcattccatcaggatttggcgcggaagaagattcagtaaaacctcttcctccattccaagctgttcttgataagaaaagaaaaattagaagggaaattgaagcagctgggatcccttacacttctatatctgcaaattgttttggtgcatactttgtcaattatttacttcacccatatgaaaatgtgaaggatattactgtctatggcaacggggaagcaaaagctgtgctaaattacgaagaagacattgctatgtatactgttaaagcggcaaatgatccaagaacatgcaaccgcgtcgttatttatcggccacagaagaatatcatatcacagaatgagttgacatcattgtgggagcaaaaatgtggtcagacttttcacaaggctttcatttcggaagaagaaattgtcaagctatcacaatccttaccctctccacacaatattccagtttccatccttcatagtatatttgttaaaggggacctcgtgaggttcgagatagaggaagatgaccttgaagcttcacagctatatcctgattataattacacatccattgaccaacttcttgatatatttcttgttgatcctccaccccctgcatctgctgctttcgaataattaaagccctttcaagtttgttaaaatgaagtttgtgatcttccaaataccgctgactaaagcataattgtatttatctttgaggataagatttgttagtccaatctaggttttgctatgttctctaaataagattggtatagtatactcatgtaccatataaagaacaagcttgcataagaatttgattgtgtatcttgtgattaagaattacaccgataaataatttttattagataatacatatttt

SEQ ID NO: 5336 - DNA, 883 bp, Glycine max
gatagcaaaggctaccaggccaacattgttatatacacacacatagcaagcagaacaaacatatcagaagttagctgcataacccagagaaaagtaaacactgcaataggaagagttttcaaatggcagagggaaaaggtagagtttgtgtcactggaggcactgggttccttggttcatggatcatcaagagactccttgaagatggatatgctgttaacaccactattagatctgacccaggacgaaagagagatgttagcttcctcacaaacctaccaggcgcatccgaaaagctaaaaattttcaacgctgatctcagcgaccctgaaagttttgatccagcagttgagggatgtgttggaattttccacacagccacgccaattgattttgcagtgaacgagcctgaggaagtggtaaccaaaagagccatcgatggagcactaggcataatgaaagcaggcctaaaagcaaagacagtgaagagggttgtttacacttctagtggctccaccgtttccttcagcagccttgaagaaaaagatgtggtggatgagagtgtttggagtgatgtggatatgcttaggagtgtaaagccttttggttggtcctatgcagtttcaaaggtgttgactgagaaggctgtgcttgaatttggagaacataatgggttggaagttgcaactgttattgctccttttattgttggtccttttgtttgtcccaagcttcctgactctattgaaaaagctctgcttatggtgttgggtatgaaggctgcaccttactctactatgtttcttcttccagtttatttttcatgttaaattgagtttgatttataccccctcaaggtcccctatgcacacctagatgcaaa

SEQ ID NO: 5337 - DNA, 1487 bp, Glycine max
  misc_feature (7)..(7): n is a, c, g, or t
  misc_feature (38)..(38): n is a, c, g, or t
gatgttngactgaaagaatagtcaatagcagcactaangtgacctcagatgatagcaaaagccaccaaccaacatgtttgttgttatttatatacacacaaagaaagcaagcagagcaaacgtgttagaagttgaggatagcacaaagaaaagtaaacactgccacagcaagagtgttcaaatgggagagggaaaaggaagaatttgtgtcactggaggcacaggattccttggttcatggataatcaagagcctccttgaacatggatatgctgttaataccactataagatctgacccaggacgcaagagagatgttagcttcctcacaaacctacctggtgcatcagaaaagcttaaaattttcaacgctgatctcagcgacccagagagttttggtccagcagttgagggttgtgttggaatttttcacactgccaccccaattgattttgcggtgaacgagccagaggaagtggtgaccaaaagagccattgatggagcactaggcatattgaaagcaggcctaaaagcaaagactgtgaagagggttgtttacacttctagcgcctccactgtttccttcagcagcctagaagagaaagatgtggtggatgagagtgtttggagtgatgtggatttgctcaggagtgtgaagccttttagttggtcctatgcagtttcaaaggtgttgtcagagaaggcagtgcttgaatttggagaacagaatggattggaagttaccactcttgtgcttccttttgttgttggacgctttgtttgtcccaagcttcctgattctgttgaaagagcactgcttttggtgttaggcaaaaaggaagaaattggtgtcattcgttaccatatggtacatgtggatgatgtggctagagcacatatcttcctgcttgagcatcctaacccaaaagggagatataattgctcaccattcattgtgcctattgaagagattgctgaaattatttcagccaaatacccagaatatcaaataccagcactagaagaggtgaaggaaattaaaggtgccaagttaccacatttaacctcccagaaacttgtggatgctggttttgagttcaagtatagcgttgaggacatatttacggatgcaattgaatgctgcaaggaaaagggttacctttaatcgattttagccacgaagttgaaaaaataaaattgtcgaagatgattgttagttcgtactattttcagatccctggcaatgatgcctcttgacatgtactccatttaatgcatgatgttttcttaataaattgaccagggaaataattcttttggtttgtctgaataaaaaacaatgtaattttcaccttttccccttatctccctaacctcggtgagtatttattaattttgtcttttgttaatggttaatcttctgtgagagagtttaacttattattcacagagtttaacttattatttttttagtaaatctttctttc

SEQ ID NO: 5338 - DNA, 1402 bp, Glycine max
  misc_feature (1382)..(1382): n is a, c, g, or t
ctcagaactcttcaaagattgttctcttgaggaagaactaaaccagcagctacgtaggcccccccccccaaaagatgccggttcggataaccattcagatataacaagagaacttcagcgactgagttttgaggcagagcatttcaagaacatgggagaagctgcaaaatcagaagtcatgaaagaaatgtcagagattgaacagacaaaagctatgataaaaactgctgaaatcaggttgattgctgcccaaaaaatgaaggaagcggctagagcagccgaagctgctgcccttgcagaaatcaaagctttatcatctcatcatgagaattcacctggagattgtgtggaaaagcatgatggagttaccctttcctttgaagagtatactgctctaacctgcaaggtgcgagaggccaaggaacaatcgaagaagagagttgtagatgctatgcatctagttgatgaagcaaatgtatctaaaatggacattttgagaaaggtagaggaagccacagaagaagttaaaaccagcaagaaggcccttgaggaagctcttgaaagggtagaggctgcgaatcaaggaaagctagcagttgaagaggcattaaggaagtggcggtcggagggtcacaaacggcggtcctccatacttaactctaccaagtttaaaaatgcttacccttctcaccatcggaaggattctcggttactcgatgtcaatgggttgaatctggtaaatgatgaggccaagccagttctaaagccggcactgtccataggacaaatattgagcaggaagttgatgatgccggaagagtatgaagccagcgagatgcatagagaaagaagctcagagagacggaaggtgtctcttggccagatgctaggcaaacaaatagcggatccatcctttgacaggcaagctgagaaggaaaatggtcagaagccgttttctgcaaagagaaagaaatttggatttggccgattctcccttctattgacaaaacaacaaaagaagaagaagccaacactgaacttgaggtgaataatggcttgctgttgtgctgactaaacaatgagattatattgcatctttttatctgttctcatctcatcctcttactgtgctcgactaaatttcttgtttgttgtttaatttaccttgcttgtatattaactaaagtttgttcgtcacttgtgacttgtcatgctacttgtaggaggtgatttatgtgaatttgactcttgtaagctgatgttataattctcatatgcatgaggttgttctattctttcaatgtttatacatatattggcacgttggctttaaaaaaaaaaaaaaaaaaaaaaaaaaaaaaaaaaaaaaaaaaaaaaaaaantaaaaaaaaaaaaaaaaaaa

SEQ ID NO: 5339 - DNA, 1065 bp, Glycine max
  misc_feature (1025)..(1025): n is a, c, g, or t
gctcgtgcgacaaactccaaacaccaaccttttcttgtcgttttattaccataataataataattattgttgttgtttttgagccattcccagtgtttctttatggaagaagttcccgacacggcggcgaaccggtccgagccggggctcagggcggagatcgacacatcggcgccgttcgaatcggtgagggaagccgtcacgcgattcggtggagttgggtattggaaacccattctcaacggtcttagtaacaagcattttgcggccactgagccgcatcacacagaagagcttgaccctgaaaaactggaggagcaagctactgtattggagaaagagctgatcctgaaagaaagggaaacacttgatgtcttaaaagagttggaaagtaccaaaaggcttgtagagaatttgaaatcaaagctacagaaagaagaatcggaagcgaatttgaattttcagacaagtgtttgcgaaaatatattgtctgttaaggaggatgagaaagaagataaggaaaacggaatgagtaatgttgttcaggattcaaaggaaggttgtaccccctatacttcatcatccccgggtttaatattaatggaattgaagcaagcgaaattcaatctgaacagaactacaagtgatattgctgatgttcgtgcttctgttgaatcgctcaataagaagttagagaaggaaagactatcacttgagaaaacgcgcaagaggttaactcagaattcttcaaagatatgttctcttgaggaagagctaaaccagacaaaactaaaactgctagtggcaaaggatgccgatttggataacccttcggatattacaagagagctccagcggctgagttctgaggccgaacatttcaagaaaatgggagaagctgctaaatcagaagtcatgaaagcaatatctgagattgaacaaacaaaagctatgataaaaactgctgaaatcaggttggttgctgcccgaaaaatgaaggaagctgccagagcagcagaagctgncgcccttgcagagatcaaaagcttgtctcatcatgagaat

SEQ ID NO: 5340 - DNA, 1432 bp, Glycine max
ggaattcggcacgaggcacacagttccatcttctcccgcaagcttaaccctcaaaattttaaaattttcaaatccccgctccattttttcacttctccctatataaaccctccgctcccaaactcaaaccctaaccttggcccgaaatcaaaactcaaaacttctcttttctttcattctctctcttttattcttatcatcacaatgccttcaattcccgaagagcccctcctggctccgaacccggatcgcttctgcatgttcccaatccaatacccgcaaatctgggaaatgtacaagaaagccgaagcctcgttctggacggcggaggaggtggacctctcccaggacctccgccactgggactccctcaccgacggcgagcgccacttcgtcacccacgtcctcgccttcttcgccgcctccgatggcatcgtcctcgagaacctcgccgggcgcttcacaaaggagatccagctccccgaggcccgggccttctacggcttccagatcgccatcgagaacatccactccgagatgtacagcctcctcctcgaaacctacatcaaggactccgaccagaagaaccacctcttccgtgccatcgacaccatcccctgcgtcgctaagaaagcccagtgggcccttcgctggatcgattcctccgactccttcgccgagcgtctcgttgccttcgcatgtgttgaaggtattttcttctctggaagcttctgcgctatcttctggctcaaaaaacgaggactcatgccggggctcactttctcaaacgaactcatttctcgcgacgaagggctacactgcgatttcgcgtgtctgctctactctctgctgaggcagaagctcaccgaggagcgcgtgagggagattgtgagggacgccgtggatattgagcgggagtttgtgtgcgacgcgctgccctgcgcgttggtggggatgaacggtgatttgatgagtcaatacattgagtttgtggcagatcggttgctgggggcgcttgggtgcgggaaggtgtacaatgttcagaacccgttcgattggatggagctgatttcgctgcagggaaagaccaacttcttcgagaagcgcgtcggggagtatcaaaaggcttctgttatgaacagcttgaacgggaacggtgggacccacgtcttcaagatggatgaggatttctaatttattattatgggattgggattaggtttaggaccggatgctgatgatgataatatttcactgtattattaccgttgttacatactccagttttatgtgctttttttatagtgcttttttttttttttcttttctttcgttagggttatgtgctttttgtttgtctctgatctctccttgagaaatgataaagtatacttttcagcttaaaaaaacaacaaaaaaaaaaaaaacccac

SEQ ID NO: 5341 - DNA, 1402 bp, Glycine max
ctttttcttattggcatgagcctgtctctctatcctgtgtaatctgacgctgtgggtccaattgtccaaatattactgatctaataattgttttttccagagtgacattagttttcaacatgaagcttttttttaaaagtgagaagctttcgcttgttttggtgttccagttccacttagagccatgacagacatctccaagtcccttctctttacctttaccatcatcatcagctttggcttgtgcattctttatgcatctgcagaactccagagatttgcacactcttccaaacatgatggtgctcttagcttcttggtgcttggtgactggggaagaagaggtgcttacaaccaatcactagttgctttccagatgggaaaggttggagagaagcttgatatcgactttgtagtttccactggagacaacttctatgacaatggactgactagtgaccatgacaacgcgtttcaagaatcattcactaaaatttacacagcaaaaagcttgcaaaatcagtggtacagcgtgttaggcaaccacgactataggggtgatgcagaggcccaattgagcccggtccttagagaaattgatagcagatggctttgcttaaggtcctttattgtagattcagagctggttgagattttctttgtagacaccactccttttgttgacgagtacttcactgaaccaccggaacacaagtatgattggcggggcattggcccacaaaaatcttatatttctaacttactcaaggacctagaattggcactgaggggatcaacagcaaaatggaggattgttgttggtcaccatgccattagaagtgttgggcatcatggtgatactcaagaactcataaatcggcttctccctatccttcaggcaaataacgttcacttttacatgaacgggcatgatcattgtcttgagcacattagtgacacggagagccccattcagttcctgactagcggggcagggtcaaaggcttggagaggagacattgaaggaatgaaccgaagaggcgtaaatttcttctatgatggacaaggcttcatgtcagtgaaattgactcagacggatgccaccattgagttctatgatgtttttggcaacgttttgcacagattgacttcttcaaaacagctacattcttccatgtaaagtttagagctagatactagacattgagattaaatagaccaatccaaattggttgatgaaatttcaaactaatccttgatgtcatgcttgagtatgtacgagaaatgaaaatatgaatgaaggattcttcactgtgattcattcaccgcagtgatgaattgctgtttaaaaaaaaaacaaaaaaaaaaagatgcaagagcagtaattgtacttattttcaaa

SEQ ID NO: 5342 - DNA, 3075 bp, Glycine max
tcagctacgtaggccccccccccggttagtccagtgtgagttattttgtgatcatcatcgtctatcgtatcccaactttaccccagaaccacatacacaaacaccacgccactgttactttctcttctctcctccactcactttcacttcatggcgacggtgctagcgccaccgtccctctccgtgcgcgcttcctctagccgccggcataggaagaagcagcagcagaagcgagcatggggagacttcagccacttggctcaggtggttcgcaaggacatggaattcctcaagagaggaatcgataacggcgttgcgtgggccaacgagaccttccgcattcccgaggctgccaagaaaatcgacgacgtcgtttggctccgcaatctcgaagaccctcactctcctcctcttccttctccttcctggccccaaccttggtatccaggactaagtggagtggatttgctcatgtatgatctcgaggctttggaagcttatgcttcttacttctactatttgtctaagctttggtccaggccgctccctcaagcttatgatcctcaggaagtttctcagtatttcagtgttcggccccatgtggtcacccttcgtgttcttgaggtacttttctcctttgccaccgctatgatcagtattcgaacttcaggatttaggaagtttctacgtctaattcctgaagaggatgtggatgatgcgtcatctcagtataattttggaatggtgttaaaggaaacattgcttaatcttggccctacctttataaaagttggtcagtccctttccacaaggccagatatcattggtgttgagatgtccaaggcattgtcagaattgcatgatcaaatccctccttttcccaggactgttgctatgaagattatggaggaagaatttggttgtcctctggaatcattctttagttacatttctgaggaacctatggctgctgcatcatttggtcaggtttactttgcccgtactactgatggtaataatgttgctgttaaagttcagcgtcctaatttgcatcatgtggtggtgcgggatatctacatccttcgtcttgggttggggctgctgcaaaagattgccaagagaaagagtgaccctcgcctgtatgctgatgaactagggaaaggttttgttggtgaattggattacactttagaggctgcaaatgcttcaaagtttctggaagttcactcttcctttactttcatgaatgtgccaaaagtatttccacatttaactcgaaagagagttctgaccatggagtggatggttggtgaaagtccaacagatttgctctctgtgactgctggaaactctgttggaaatgtctctggatattcagaaaggcagaaattagatgcaaaaaggcgtctacttgatctggtcagcaaaggcgttgaatcaacattggtccagcttcttgaaacaggcttattacatgctgatccacatcctggtaacttgcgttacacttcctcaggacaaatagggtttctggattttggtttgctctgtcaaatggaaaaaaggcatcagtttgctatgctggcttcaataattcatatagtaaatggtgactgggcatcccttgtccgtgctctggttgatatggatgttgtgaggccagggacaaatatccgacttgttaccctggaactcgaacaagccttgggagaagtagaatttaaagaaggaattcctgatgtgaagtttagcagggttctgggaaagatttggactgtagcactcaagcatcatttccgcatgccaccatattatacacttgtcttgcgatccctagcttcattggaaggtttggctatagctgccgatacaaatttcaagacttttgaagctgcatatccttatgttgttcggaaacttctcacagagaactcagctgcaacaaggaatatattgcattcggtgcttctaaaccaaaggaaggagttccagtggcaaagactttccctgttcttgagggtaggggcaactaggaaagccttgcgactagtagcatcaaatagtgagacttcccttgatcattcaacaaataaggccactgatacaattgatgttgcatatttggttttgaggcttttaccatccaaagatggtgttgctatcagaagacttctcatgactgctgatggagcttcattaatcaaagcaatggtctcgaaggagggaaagtttttccgccaacaactctgcaagatcatagttgacttactgtaccaatggatgattaaattatttggacaaggaattacagttactcagtattcccgggtggtattggctaatggacctagcaacaaagaatcaggtctatcccctagatcatctttgcctacatatgattacaattccatctttagagaccggcgacttcgagtgatattctctaaggttctaaagtctgcaagtagggataaaatattgatgctgcggttctcctgggcttcccttctaataattattacagcttcaactttggcttgccaccagcttgttgtgtctctatctgaagcttacttgggcaaaatatttgatgctcccaagagatatgcagtcagtgtatgaaattttctcaaaacattcacttttctcagcagaaagagagcattcttatccaacgacaattttccaaaaggaaaaagaaaaagaaaggtttatttctatggatgacagagtgaaagttcgttgtttactgctaacaaaagcatttgtgtttgtagcttaagttgggtgtgttagatttggagcaaatctggtgtcaggcaggtgaaatataggcataggattgcaacgtgttttggttacagtttatgtatggggaaacactgtacgcggtactgatgctgctatcaacatctaaataccctacaagtatgtacagtgtcatgtaaagtgttaaattttcttcaaagaataaaaatgtcttttggttactaatctgtaaacttctttgttccagtcctcagtacatagttactgtactgtcacttgttagttattttatgttatttccaaaaa

SEQ ID NO: 5343 - DNA, 1172 bp, Glycine max
acggctgcgagaagacgacagaagggggattttagattagagattgagagggaggagtacgtggaaggcattttgacctatcgctcgcgcgaaaccaaatctctttgtttctcttaattcctttatagtagcaagtgaagttgaagttgcaggtgtgtgtctcatggcgtctgttattcctcgatgccttcctcccccaattccaattgcacaccgacgaaaggcgcaggtggtgaaatcgtgtcaccaaaacgagagctctgcttcggctcacacagaccactcctcaaatccaaaggaactccgagtaacagtttccaggcgtaattgtctctcatgtttgtgttctactatagttttgattagtgattgcgccatgcctatttttttaccaaaggcatccgctgctgatggaaatggaatcatggaaaaacctgtgtgcagaaattgcttgggaagcggtgctgtgctttgtgatatgtgtggtggcacaggaaaatggaaagctcttaaccggaagcgagctaaagatgtttatgaatttactgagtgtccaaattgttatggtcgaggaaagcttgtctgccctgtttgtttgggaactggtttacctaataataaaggtctcctaaggaggcctgaagcacggaaactgcttgataagatgtataatggacggctacttccaaactcttaaaaaccgtaaattttagcaaagggcttgctaaagctttgctttttggcccaaagattgggatgtttttccccagttaacaaagccagtggctgccttggttatcaacttttagcccagatcatgtggaggactttgcttatatttttggtttggaagcattccagaactttaaccatcgggttggtcatcaaccttatgtttttcaaggttctgtaagaaaaaaaggtcccttatttgatgctacaatcctcataatcatgcagatccaattgacttacaaaatcccatgtataatgtaaaccttgagcaaatacttccagcaaaagtagcttattcaggcttttatttagtttcccagtaaatatgtaaaacctacatgttcatgcgcctcgtgtacccctaaaaggtattgtgtcgttaaccatgtgtaaaaactaatatgtagcgcttttacgaaatttattcccgtagtttt

SEQ ID NO: 5344 - DNA, 879 bp, Glycine max
  misc_feature (32)..(32): n is a, c, g, or t
  misc_feature (46)..(46): n is a, c, g, or t
  misc_feature (831)..(831): n is a, c, g, or t
  misc_feature (864)..(864): n is a, c, g, or t
ttttttttttttttttccattaatattgaagngatattaactaganaaaattaatcacattcacgttcacattcacttccccctctatataaaccccgcccccacccccacgcatccccacgcggggcacgaatatagcccaagccctatacaaccaaaccctaacacacacccatttgattcagtttccatggctagcctcaaggttgcatttttggctgcagtgctctgcatggttgtggtgagtgcacccatggcacatgcagctatcacgtgcgggcaggtgacgagtagcctggccaattgcatcggttacctccagaagggaggaacgccgtcgtcgggatgctgcaacggagtgaagagcctcaatgccgccgccaagaccaccgccgaccgccagacggcgtgcaactgcctcaagtcggccgccagccaaatctccggcttcaacgccaacaacgccgcctcgctccccggcaaatgcggagtctccatcccctacaagatcagcacctccaccaactgcgctaccatcaaggtttgaagagaaagtcatggacgcaggaaaccggaaactactcactagtatatgagtagcattattaatattaagaataagatcgagggtgatgagggctccacttatatgcccctctcctcttgtatgagagatttgcattggatagctttaagttgtgttgcgttgttatttctctgtatgagttacacatagttatatctactttaatattgggttctccctaaaaaaaaaaaaaaaaaaaaaaaaaaaaaaaaaaaaaaaaaaaaaggtcctttttagaggcgggncgggggcccattggatttttccaccccgggggnggggttccaggtaaa

SEQ ID NO: 5345 - DNA, 1803 bp, Glycine max
  misc_feature (259)..(259): n is a, c, g, or t
  misc_feature (276)..(276): n is a, c, g, or t
tctgtggttacaatgagcccatactgccacgaaggggttcttcgttctctcagcttgcttactcagtgatttatccataagtctgtagatttgcaatggttcatggttgtgaatcccaaattcttgaataattgcgagaaaagattgcgtgcatgtgagggatgctatgggcacgaaaggcctttacataaaggggccgtatttttcttgggaatagatgggtgtgcgcgtctggcttcctttggggcccccccccctnttatcccgggaatgttnttcgaaagcaaagacggagtataactacctgctggagatacttctcaatttataccatccagggatgctgacattgctatcctggaagaaccagaacatttgaattggtatcatcatggaaagcgttggacggacaaattcaaccatgttgttggtattgtccacacaaattatttagaatatatcaagagggagaaaaatggggcactccaggcattcctggtgaaacacataaacaactgggttacaagagcatactgccacaaggttcttcgtctctcagctgctactcaggatttaccaaagtctgtaatttgcaatgttcatggtgtgaatcccaaattcttgaaaattggagaaaagattgctgcagagagggagctggggcagaaagcctttacaaaaggggcgtatttcttgggaaagatggtgtgggcaaagggatacaaggagttgatagatttattagcaaagcacaaggctgaccttgatggcttcaagttggatgtatttggaaatggagaggatgctaatgaagtacagagtgcagccagaaggttggatttgaatctcaactttcagcccccccccttttgacacaccgattctcttcacaggtacaaagtctttataaatcccagcattagcgatgtgctatgcacagctacagctgaggcacttgccatgggcaaatttgtagtttgtgctgatcatccatcaaatgagttcttcaggtcatttcccaactgtttgacttacaggacatccgaagactttgtgacaaaagtaaaagaagctttagaaaatgagccttatcctctaacacctgagcaaagatatcaactttcttgggaggctgctactcaaagatttatggaatattcggagcttgacgggaatcctgaacaaggaaaataatggcgaaaagtcaagggtagataaggggaagctcattgctaagtcagcatcaatgcctaatctgacagaactagtagatggaggcttagcatttgctcactattgtctcactgggaatgaatttctgagattatgtacaggagcaatacctgggacacgtgactacgataagcagcactgtaaagaccttcatctcttgcctccacaggtagaaaatcctatctatggctggtgaatggattgactagtttgaatgtttgaaggaaaacttgtcacaccagattatgacaagcagtactgtaaagccatcatctaaatgcctttaggtagaaaaatttatggatagctggtgaatagatttagtggtttgagtttgtagtttgttttacagttgcttgtgttaggtgcctgctaagttttcaatccttaaattttgtagttctttttgtttttgtaagtgatgtagttcaatatttaccaaaacacgtgtagaaagctaatgtctaatgtaaagtaactgaacgttctcccacgtaacttgtgagaataagctgtaatgaatttgcatcggtttaacatgaaataaattgttcggttaaaaaatccttc

SEQ ID NO: 5346 - DNA, 2317 bp, Glycine max
ggattttgaaaagaggagaaggaggaggttgacccgcggccgggggagtggaagggcgagggtgagggtgaatctagggattgggaaccgattcgagtcttgaagactcggctcaaggagtttgagaaacgtggttcttcttttgatgctttcaagaacagtgaattcgtcgagaaagtcaagtctagcttgaaatcaatgtgcaaggaacctctggagtcaaaggaagtgccaccattggacgtacctgaacttctggcctacattgtaaaacagtctggtccatttttggaccatcttggagtgaaaagagacatatgtgacaagatagtagaaagcttgtatagcaaatgcaaaaaccatcaactattgcattccctctctggggaagaatcttctgttctagggaatggaaacataaatgatgaattggatttacgaatagcaagtgtccttcagagcacagggcaccggtatgaaggtggattctggacagaccatgcaaagcatgatccattggacaatgaaagacatgttgcaatagtgacaactgctagtcttccttggatgacgggaacagctgtaaacccactatttcgagctgcatatttatcacaatctgcaaagcagaaagttactctgttggttccatggctttgtaaatcagatcaagaactggtttatcccagcaatctcacttttacttcaccagaagaacaagaagcttatatacgtagctggcttgaggaaaggattggttttaaggcagacttcaaaatttctttttatcccgggaagttttcggaagcaaggcggagtataatacctgctggagatacttctcaatttataccatccagggatgctgacattgctatcctggaagaaccagaacatttgaattggtatcatcatggaaagcgttggacggacaaattcaaccatgttgttggtattgtccacacaaattatttagaatatatcaagagggagaaaaatggggcactccaggcattcctggtgaaacacataaacaactgggttacaagagcatactgccacaaggttcttcgtctctcagctgctactcaggatttaccaaagtctgtaatttgcaatgttcatggtgtgaatcccaaattcttgaaaattggagaaaagattgctgcagagagggagctagggcagaaagcctttacaaaaggggcgtatttcttgggaaagatggtgtgggcaaagggatacaaggagttgatagatttattagcaaagcacaaggctgaccttgatggcttcaagttggatgtatttggaaatggagaggatgctaatgaagtacagagtgcagccagaaggttggatttgaatctcaactttcagaaaggaagagatcatgcagacgattctcttcacaggtacaaagtctttataaatcccagcattagcgatgtgctatgcacagctacagctgaggcacttgccatgggcaaatttgtagtttgtgctgatcatccatcaaatgagttcttcaggtcatttcccaactgtttgacttacaggacatccgaagactttgtagcaaaagtaaaagaagcattggaaaatgagccttatcctctaacacctgagcaaagatatcaactttcttgggaggctgctactcaaagatttatggaatattctgagcttgataggatcctgaacaaggaaaataatggtgaaaaggcaagtgtagataagggaaagctcattgctaagtcagcatcaatgcctaatctgacagaactagtagatggaggcttagcatttgctcactattgtcttactgggaatgaatttctgagattatgtacaggagcaatacctgggacacgtgactatgataagcagcactgtaaagaccttcatctcttgcctccactggtagaaaatcctatctatggctggtgaatgggttgactagtttggatgtttgaaggaaaacttgtcacaccagattatgacaagcagtactgtaaaagccatcatttaaatgcatgtaggtagaaaaatttacggatggctggtgaatagatttagtggttgaatttgtagtttgttttacagttgcttgtgttaggtgcctgctaagttttcaatccttaaattttgtagttctttttgtttttgtaagtgaggtagttcaatattaccaaaacacgtgctaatgtaaagtaacaggacgttctcccaagtaaccttgtgagaataagctgtaatgaatttgcatcggtttaacatgaaataaattgttcagtaatgataaccttcaagagta

SEQ ID NO: 5347 - DNA, 596 bp, Glycine max
tcgagcagctacgtaggcccccccactctttcacactctctgagactcagcagtaataggaactaccaagtaaccatgtcccgtcatcgccgccaaccctcccaagcccttccgtcggacctattcgccgccgacgaactcactaagccctttgacttcacgcaaatcatcaccgaagaaaccggaaccgccgccgctgccgccgccaccgtttcccgctcccaagagatcaaagactcccctctcgccgccacttctccgcccaagaagaaggtgccgccggcaaccaaatcggcttgaaccgccgtatgcatcatgatgagtctgctcctgctgctgcattttatgtctgtcattttctgtttttctttttctttcttttctttttgtttgaaataaaaaatgttaagatgacagcagagaaaagctcaaggcattgtaacatgttcctcttcttcttcttcagtgtttgagaaacttccgttttgttagagcttggaatgtgaggttttgttctgatttgctgaccctgcctgtttctattggaagtttctatcaagaatatttttttcttattcaaaaaaaaaaaaaaaaaa

SEQ ID NO: 5348 - DNA, 1510 bp, Glycine max
cccacgcgtccgaaaactcggaagctgcatggctgcgttcgttccttggtgttggtggaatctctctctctgactatgctgtgtctctttcccaggaccgcgcgaaacacgtaaatccccttcaaacacaacacaaaaacgcagtgtttccaccatctctatctctatctctatatataccctcacaaccaaacaatccccattccctctctaaccctatctaatctgtcttctcttacattcctttctccaccacacattcaattttaaacctctgggcgtggctagcttcaacctttaacattaacatggccattccctacccccatttcatcgccaccgagaaagccgccatggacgccggcctcctccacccctcctccccctccgtcatcctcacccaagacgatttgaagaaaatcgccgcctacaaggccgtcgagtacgtggagtccggcatggtcctcggcctaggcaccggctccaccgccaagcatgccgtcgaccgcatcggcgagctcctccgccagggcaagctcaaggacatcgtcggaatccccacctccacaaaaacccacgaacaagccctctccctcgggatccccctctccgatctcgacgcccaccccgccatcgatctcgccatcgacggcgccgacgaggtcgaccccttcctcaacctcgtcaagggccgtggcggctccctcctccgagaaaaaatggtcgaaggcgcatgcaagaagttcatcgtcatcgttgatgagtccaagctcgtaaactatttggggggtagtgggttggccatgcccgttgaggttattaagttctgttggaggttcaccgcggcgaggttgcagaagctttttgaggaggctgggtgcgttgccaggctcagaacttttggggagaaggagaaggaggagccttatgtgacggataatgggaactttattgtggatttgtatttcgagaggagtattggggatttgaaggctgctagtgatgctattttgcagcttgctggggttgtggagcatggcatgtttcttgatatggctaccactgttattgttgcaggggagctcgggttgacggtcaagaacaagtagttgttgttggtggttaggagaatgaaggtaggttaattggccaaggttgacatggggtttctaagttctatctaacccatttgtatggtgtagtagtaaaaaaggttttaatccaggggtaaagggggattttgattaaatccttttgttattcaatacagttgttggagaaagtttataagttctccggtagttttgttttgttttttttaggggcggggggatttagtttgagcaagcagaaagcaaaatggagagatgagtattaatctcatgcaatgactgttgtgtggcgttgaatcggttgtccgcacaatttgttgttcatttgacagacagtgtttaacatattgaatctatctatctaattcaatttttcataaaaaaaaaaaaaaaaaaaa

SEQ ID NO: 5349 - DNA, 1783 bp, Glycine max
gggggggaaaaaaagtcggaacctgcatgcctttggtggctgcgtttcttccttggcgttgtgttggtggaatctctctctctctctctgactctgtgtctctttcccaggccaggaccgcgcgaaacacgtaaattccccttcaaacacacaaacaaaacgcagtgtttgaagcatctctatatatacccccccttctcagccaaacaatccccattccctcttctctaaccctatcttctctcttgtcttgattccattcaatttaaacctcagggcgtggcaagtttcaacctttttcgagcacccattaacattaacatggccattccctacccccatttcatcgccaccgagaaagccgccatggacgccggcctcctccacccctcctccccctcctccgtcatcctcacccaagacgacctcaagaaaatcgccgcctacaaggccgtcgagtacgtcgagtccggcatggtcctcggcctcggcaccggctccactgccaagcacgccgtcgaccgcatcggcgagctcctccgccaaggaaaactcaaagacatcgtcggaatccccacctccaccaaaacccacgaccaggccctctccctcggcatccccctctccgatctcgactcccaccccaccgtcgatctcgccatcgacggcgccgacgaggtcgatcccttcctcaacctcgtcaagggccgcggcggctccctccttcgagaaaagatggtcgagggcgcctgcaagaagttcatcgtcatcgtcgacgagtccaagctcgttaactatttggggggcagcggcttggccatgcccgttgaggttattcagttctgttggaggttcaccgcggcgaggttgcagaagctttttcaggaggctgggtgcgttgccaagcttaggactttcgcggagaaggatgaaccttatgtcacggataatgggaactttattgtggatttgtatttcgagaggagtattggggatttgaaggctgccagtgatgcaattttgcagcttgctggagttgtggagcatggcatgtttcttgatatggctaccactgttattgttgcaggggagctagggctgacggtgaagaacaagtagttgttcttggtggttaggagaatgaaggtaggttaattggtcaaggttgacatggggcttctaagttctaacccatttgtatggtttagtagcaaaggttttaattcaggggggaaaaaggggtgggggggattttgatgaaatccttttgttattcaatacaaatgttggagaaagtttctaaattctccggtagttttgttttgttttagggacggggggatttagtttgagcaagcagaaagtaaaatggagaaatgagtattgatctaatgcaatggctgttgtgtggtactgaatcggttgtccgcacaatatgttgttgaattgactgtgttttaacatattgaatttatctatctaattcaatttttcgtagccttcccctatgaaaaaaaaaaaaaaaaaaaaaaaaaaaaaaaaaaaaaaaaaaaaaaaaaaaaaaaaaaaaaaaaaaaaaaaaaaaaggaaaaaaaaaaaaaaaaccccctcgggccaaattcgccacaaggttccctcgggtcaatccggggggacccttttccggtttgggaaaaccccgatgagcccccctaaaccccgattggaaaaaccttggacaattgaggaggttgcgtccaatgcccctggcctttctgggaactgtttcattcccccgtctgac

SEQ ID NO: 5350 - DNA, 862 bp, Glycine max
ggctcgggctctctccatctacataacacctcaaattctgtgattcgggtaatggccaccagtggaggcgatgaggggcagaacaaccctgccctcgacccggatttggatgctccggatgacccggatcacgagttcgctgagttcgggtcgggttgcttctggggtgctgagttggcctttcagcgagttgtgggtgtggtgaagactgaggttggttacactcagggtcacactccggatccgaattacaaactggtttgcaccggaaccactaaccacgttgaagtggttcgggtccagttcgacccgaaggtttgcccctacaatgatctactcgctctcttttggtctcggcatgaccccacttccatcaaccgtcagggcaatgatgtgggtgcacagtatagatcaggaatatactactacaacgatacccaagctcgtttaggccaggaatcaaaagatgcaaaacaattggaactgaaggagaagattgtgacagaaatacttccagcaaagaggttttacaaagcagaggaataccatcaacaatatctggagaagggtggaggtcaaggcaacaaacaatccgcagaaaaaggctgcactgatcccatcaggtgctatggctgatgaatgatgatcactttcttgctgcacacttcaccatgtctggcttctatcagccatctgttgtgtactccaatataataatattatcaaaaataaaataagtcatggtgtatcttcagagtgctcatattgcaatctggactttagttgatcaatttgctattcatataaatgctttaaagtaaaagttatcattttgcatgaaaaaaaaaaaaaaaaaaaaaaa

SEQ ID NO: 5351 - DNA, 2650 bp, Glycine max
  misc_feature (18)..(18): n is a, c, g, or t
  misc_feature (949)..(949): n is a, c, g, or t
cggtccggaattcccggngtcgacccacgcgtccgcatttttcagaggattccctgtttggctcaagtacattccaggtatcagcttcagaacagacaatggaccatttaagtttcaaatggaaaagtttaccaagaagattgtggatatgatgaaagcagaaaggttattcgagtctcagggcggtccaataattctgtcccagattgaaaatgaatacgggcctatggagtatgaaattggtgctcctggtagagcctacactcaatgggcagcacatatggctgtaggacttggcactggggttccatggatcatgtgcaagcaagaagatgctcctgatcctatcattaacacttgcaatggcttctattgtgattatttctctccaaataaggcttacaaaccaaagatgtggacagaagcttggactggctggtttactgagtttggaggtgcagttcctcacagacctgctgaggatttggcattttcaattgcaaggtttatacagaaagggggatcatttgtcaattattatatgtatcatgggggaacaaattttggtcgaactgctggtggtccctttattgctacgagctatgattacgatgcgcctcttgatgaatatggattgcccagacagccaaagtggggtcatctgaaggatttacatagagcaataaaactctgtgaacctgctttagtatctggagatcctactgtacaacagcttggaaactacgaagaggctcatgtttttagatcaaagtctggggcttgtgctgcattccttgcgaactataacccacaatcttatgcaacagtggcatttggaaatcagcgttacaacttgcctccttggtctataagcattcttcctaactgcaagcacactgtttataacactgcaagggttggttctcagagcacaacaatgaagatgacntcgtgttcctattcatggaggactatcttggaaagcatttaatgaagagacaaccactactgatgatagttcgttcactgtgactggcctgttggagcagataaatgcaaccagagatttatctgattacttgtggtactccacagatgttgtgatcaattccaatgaaggatttttgaggaatggaaagaatcctgttcttacagttttgtctgctgggcatgctttgcatgtttttatcaacaatcagctgtcaggaactgcatatggaagcttagaggcccccaaactaacctttagtgaaagtgtgaggctcagagctggtgttaacaaaatttctcttctaagtgttgcagttgggcttccgaatgttgggccacattttgaaagatggaatgctggtgttcttggcccaattacattaagtggtctcaatgaggggagaagggacttaacttggcagaagtggtcatacaaggttggtcttaaaggtgaagccttgaatcttcattctcttagtggaagttcctctgttgagtggcttcagggctttttagtttccagaagacagccattgacttggtacaaaactacctttgatgccccagctggagttgcaccattggctttagacatgggcagcatgggcaaaggtcaagtgtggataaatggacaaagtctgggccgctattggcctgcttacaaagcatccggttcttgtggttactgtaactatgctggaacttacaacgagaagaaatgtggaagtaactgtggccaggcttctcaaagatggtatcatgttcctcactcatggctgaagccaactggaaatttattggttgtgtttgaggaattgggtggggatccgaacgggatctttttggttagaagggatatagatagtgtatgtgctgatatctatgagtggcaaccaaatcttgtaagttatgacatgcaagcttctggcaaagtcagaagtcctgtgagaccaaaagcacatttgtcatgtggccctggacaaaaaatctcatcaatcaagtttgctagctttggcactccagtagggtcttgtggaaactaccgcgaaggaagttgtcatgctcacaagtcatatgatgctttccaaaagaattgtgttggccagagctggtgcacagtgacagtgtctcctgaaatttttggaggagatccttgtccaagtgtcatgaagaaactctcagtggaagccatttgcacctgatcattttcaatctccgaaaataagtggaataaagtttccatattgatttattctgcaattgaatacatggtctttgggtcaaagtttacacctgtagaccaccagaggcattaatttggctttaccaaggtgaagttgcaaatgaacacaacacaccatgtggttgaaagcctgctgggatgattgtggatttgtgtgtatatatattggtgttgtgcttgttatactgaggtggaggaggatgaaaagatacctgatgcacattgagacgacatcgattgagtccatgtgcaaattggtttttgtttgtgtggaagtctctagcttcctgtgatgtaatgttataatattaccttgtagtagttgtaaggagaaagcaatttagtgcttttttattataagaaaacaacccaatgtaataacatctggtatattgattcaatcatgttttgctttta

SEQ ID NO: 5352 - DNA, 1587 bp, Glycine max
ttttttttttatcttaataagaattttgcatttttcatatatattgaaaagaagtttgtactttcggatgcagatataattgaactattgaagtaacaatatataaactttattacaaaataagaaaccataaaggctaacatgaacttgtaaagtaaaacgatatccatattacacaagataaaaacctaaataacacactcttagaataagtcttggacataatattcttaactaaataaactgacacacaaaccaaattaactatatcatgctcaaggcttcattcgcccctcattggccatcttgaagaggttggcttgcgcttctgctgccttatttgaggcaagagatgctataaatctgtctctgacttgctgggttgtataagggaacctgttgttcaccaaggagttaagaaaggaagctgtcccttctctgtagagtgctcctagcccatcagttctagtgttggaaagtgcttgtggcaagctgagactggcaccaaatcctggcatactagagacaccaaatgcatggcctaaggttccccaccagcctagcaatccccaaatgattcctgggtgagtgttccagtagttgcatgtaccagtgaagggagttggggaaggaaggtaagggggtgtggaggggatagtgggggtgccggggtcaattggggttgaaggtgggctcacagtgattggtgttggggggctaccacctccataagttggtggtgagttatagtacccacctcctcctgagggagggtgtgatggtgttgatggggttgatggtgttgttggggttgatggtgttgttgggactgagggtgttggagtagaggggtcatgtggtggtgtgccacagttgctgcctgagggtggtgatggggttggattgtaacttccaccatctgtgggtggtgatggggttggatcatagcttccaccacctgggggagttgatggagttggattgtaacttccaccaccacctgagggtggtgaaggagttggatcatggcttccaccaactggaggacttgatggagttggattgtaacttccaccaccacctgagggtggtgatggagttggatcatagcttccaccacttggaggagttgatggggttggattgtaacttccaccaccacctgagggtggtgatggagttggatcatagcttccaccacctgggggagttgatggggttggattgtgacttccaccacctccatgtgatgtagatccatgatgagagggtgttccatgttgagagtggtgtggtgagcttccgtgcccaccactcccagagccatgatctggagagcagtatgaacatagagaatttgataaatctgttcctgcatgtgggtctggagagttgaagttctggtccacaatgatggcagtggtagatattacagggatgacaaggttctgagcaagcactccaagtagcaatgtgaacatagtgaaagaaataggactgtgtcttttcctctccattgtttctgactgcttagaacactgagaaagaagagaaggggggggggggggggcctacgtagctgagttt

SEQ ID NO: 5353 - DNA, 1162 bp, Glycine max
cggctgcgaccacgcgtccggtgggggaaaatcgcgtggtgagaagagttacgttagaatgtgctgggttgggggtgacgctggacataaataagctcaaacaaaatgccacactttgttaacttgaacaaagctcagacccaaacctttcttttgctcttcatccattccacaccaaaaagtaacagtttcagtttcggagggaaacacaacacaaaaagccccctccccccaaagcaaatcacctttttttctttcagttattcaaaaaatgttcgccgaagagaatggactcaagggagaccctagactccaagccatttcccaagccatcagagtcgtccctcacttccccatacatggaataatgtttcaagacataacgacattgttgttggatcacaaggcgtttaaagacactgtcgacatttttgtcgatcgttacagagacacgcacatttccgttgttgccggaattgaggctagggggttcatgtttggtccctcaattgcgttgggcattggtgcaaagtttgttcctttacgcaaaccacggaagctgccaggtgaagtaatttcagaaaaatatgctctagaatatggaactgattgcttggagttgcatgttggtgctgtccagcccggtgaacgggccataatcattgatgacttggtggccacaggtggaacaatgtcagcaggagtaaaacttctagaacgtgttggtgctgaagtggtggaatgtgcctgtgtcattggtgtgcctgatgtcaaggggcagtgcaggcgtattggaaagccactttatgttcttgttgagccgcgtaaagcagataaatgttacccagattgacatactaaaggacgctgggtgtgagaaacacaggccataatgtgatccttaagttttaggctgatggagtcgtgttcatggcaattgtcaaatatcatcctgggaaatgttcatcctgtttcatatctttatcttctttgtacatgttagccatcatgttatgtggccagcagtttagaacaataacaatcattaaagaagggatggattttatggcattttataaaatgtcaatttaaaggtcacatttcctctaggaagccctgtaaaaagcataaaaggaggatctacccctttttgtttttgggg

SEQ ID NO: 5354 - DNA, 1395 bp, Glycine max
caattgggtaccgggccccccctcgagtcgcttcctaagccccccccccaaccggcttcttttcaggaagctgcagataggaggctcatggcgctgatttgcgaggcgaagggagattacgaatcagcgttggagcatcttgtgcttgctagcatggccatgattgcaaatggtcaagataatgaggttgcatcaattgatgttagcattgggaacatttacatgtcgctttgtcgttttgacgaggcgattttctcataccagaaggcgcttacggtgtttaagtctgccaagggtgagaaccacccttctgttgcctctgtttttgtgaggcttgctgatttgtaccacaggactggtaagcttcgcgagtcaaagtcttactgtgagaatgctcttaggatttactcaaagcctgttccggggaccaccgcagaggagattgccggtggcttgacagagatttcagcagtttttgaatctgtcgatgagccggaggaggcgctgaagctgttgaacagggcaatgaagttgttggaggataagccagggcagcagagcacgattgcagggattgaggcacgaatgggagtgatgtattacatgattgggaggtatgaggactcaaggaactcgtttgagagtgctgtggcgaaactcagggctagtggggagagaaagagtgccttctttggagttgttttgaaccagatggggttggcatgtgttcaactgttcaagattgatgaggctgctgagttgtttgaagaagctaggggaattcttgaacaggagtgtggcccatgtcatcaggatactcttggggtgtacagcaaccttgcagctacatatgatgctatgggaagagtgggagatgcgattgaaatcttagaatatgttctcaagctgagggaggaaaagcttgggatagcaaatcctgattttgaagatgagaagcgtcgtctggcagagcttctgaaagaagcaggcaagacacgggacagaaaagcaaaatctctggaaaaccttattgatcctggctcaaagcggacgaagaaggagggggcaaagaggtggcctggtttggggtttagaatttaaccatagttttattcatttaaatatatatattgaatgcacattctgtaacataggatatcttgtatagggttgaatatgtaatttgggagggagctttcctgtttcttgatatttgttcatgcatttgtttctctgtgttaattgctttatcaattgtgttgtgatcttttagctgtaccacaaaattctatacctgtcctacgtttccggaaaatgttgaaagcaaatttttattctgagtgaataaattttgatgagattgtgttttatttttcaaaaaaaaaaaaaaaaaaa

SEQ ID NO: 5355 - DNA, 936 bp, Glycine max
aagatttctgttctgcattagccatggtgattaattaacaatgaagtaataaactaatcaaaagtggaatttaatgatgtagaaataatggaaagcaaaatgagtggatgaaatgaaaccttggtccctgcctttgtgagaagaggagagtgatgatgatatcaggaggaggaggtggtggagggaaatcatcgtggagttcatcaacatcgtcatgggtacccacaacctcagtgtcggcatctggaaagaggattcagagggaaatggttgaactcaacaacgaccctcctcctgattgctctgctggccccaagggcgataacctctatcactggattgccaccattattggaaccccagaaacaccctaccaaggtggcatctttttccttgacatcaaatttccaattgattatcccttcaagcctcccgaggtagtattcaaaacacgcatttaccactgcaatgtagaccctgatggccgtgttagtatgggaatattgaaggatgattggagtccagcactaacaattactaaggtgctactagaagttagatcaattatgacaaatcctgatccttataatgctgttgtccctggcatcgctcatttgtattcgggagacagagcaaaacatgatgatattgctgcagagtggactgtccgatttgccaagtgaatgtgatacaagtgccctttggttggcttacatcttatatataatgttccaacaacatttatgtaaatgagaatgatagttaatagtagttcacagtaacaaggttatctcctccttgcacgttccggagagtgccttagttgatccctcgtagttgtaagtggataatgatcattatgacatgcttttgataattttcttaaaaaaaaaaaaaaaatattaaccaaatttaaccaaatttgcggtaactagc

SEQ ID NO: 5356 - DNA, 1198 bp, Glycine max
  misc_feature (1197)..(1198): n is a, c, g, or t
atttttttcactcacttgctttcaaattctcattttcaagctgtttggtgtaaagatgggacaagtgcttggttgtgttcaagtgaagcagtcaactgtagccgtcaaggaatgtttcgggaagtacgatgatgttcttcaacctggttgccattttgtgccatggtgtcttggctgcggtgtggctggtgtcctttctacgcgtgtcatgcagctaagtcttcgttgtgaaactaagacaaaggacaatgtgtttgttaatgtggttgcctcaatccaatatcgagcattggcagaaaaggcatcagatgcttactacaaactcaccaataccaaagcacagatacaatcctatgtctttgatgttatcagagctactgttccaaagatggaacttgatgctgtttttgagcagaagaacacaattgcaaaagcagtggacgaagaacttgggaaggctatgtcagcatatgggtacgagatagttcagactcttattgtggatattgtgccggatgagcatgtgaagaaagccatgaatgagattaatgctgctgcaagattgagggtggctacaaacgacaaagctgaagcagagaaaataatgcagataaagcgagcagaaggggatgcagaatcaaagtacctagcaggccttggagtttctcgtcagcgccaagccatagttgatgggctaagagacagtgttctagcattttctggtaatgtgcctggaacatcatcaaaggatatcatggacatggttctcatgactcaatattttgacacaatgaaggagattggtgcatcctccaaatccaatgctgttttcattccacatggacctggtgctgtgagtgatgttgcttcacaagtaaggaatggtcttctccaaggaaatgcaacaacagagtcttgaagacatacacatatatcatcataccatgatttcctcctccaggcacttgtagtttagctttgcaactaaatctttatatatgctactattatgaatcatccatggcaagttggcaactaatgccttctatatgtatatggtcttcctaatcaaccatggcaactttcttaattttatccactattatgaatcttcaacttttatgatatctcattaaatataatataattacatacccacgcgtatgcatgatttcaaaaaaaaaaaaaaaaaaaaann

SEQ ID NO: 5357 - DNA, 2220 bp, Glycine max
ggaaatccattgacatcgatggaaagaagtggcccaatgtttctggtttagcttagttagctcccgctgggtccttccttcttctcaccactgcaccaacccatcccctctcgcgtcgagtcacgagtcacgagtcacgagtcactcactacaactacttctttctctttctgttaggtttctctctcgcacacttgtcactgtctcctcctcgctcccaattttgaccgagttgttgactccacgatgccttccaattccgatttggtccgcgccgttgagtcgctcctcggcgtctcgctcgccgattccgtctccgattcgctgctcctcatcgccaccacctccgccgcgctcataatcggcctcctcgtgtttctctggaagaaatcttcggatcggagcaaggagctaaagccggtgatcgtgccgaagggcttgccgaaggacgacgacgacgaggttgatgttgccgacgggaagactaaggtcactattttcttcggtactcaaaccggtaccgctgaaggctttgctaaggcattggcagaggagatcaaggcaagatatgataaagcagctgtcaaagttgttgacctggatgactatgcagcggatgatgatcaatatgaggagaagctcaagaaagagactcttgcatttttcatgctggcaacttatggagatggagagccaactgataatgctgcaagattctacaaatggtttactgaggggaaagatgagaggggcacctggcttcaacatctcacatatggagtttttggcctgggtaacagacaatacgaacactttaataagataggtaaagttgttgatgaagatcttagtgaacaaggtgcaaagcgtcttgttacatttggattaggcgatgatgatcaatccattgaagatgatttttctgcctggaaagaaactttgtggcctgagttggatcagttgctccgagatgaggatgatgcaaatactgtctctaccccatatacagctgctattcttgaatatcgagtagtgattcatgacccgactttcacatcatcctatgataatcacgtaaccgtggcaaatgggaatgctgtgtttgatattcatcatccttgcagggtgaatgttgctgtacaaagggagcttcacaaacccgagtctgaccgttcttgcatacatttggaatttgatatatcagggactggcttaacatatgaaactggagaccatgtgggtgtttatgctgataactgcgacgaaactgttgaagaaactgggaagttgttgggtcagaatttagatctattgttttctcttcacactgataaggaggatggcacttccctaggtggttctctcctgcctcctttccctggcccttgcacactgcgtactgcattagcacgctatgctgatctcttgaaccccccacgaaaggctgctttagttgctttagcttctcatgcatctgaacctagcgaagcagaaagattaaagttcctttcgtctcctcaggggaaggatgagtactccaaatgggtggttggaagccagagaagtctccttgaggtgatggctgagtttccatcagccaaacctccactaggtgttttttttgctgcagtggcccctcgtttacagcctcgttattattctatttcatcctctcctaggtttgctccgcaaagggtacatgttacttgtgccttggtgtatggtccaactcccactggtagaattcacaaaggagtatgttcaacctggatgaagaatgctattcccttagaaaaaagtcccgactgttgctgggctcctatttttattaggccatcgaatttcaagctaccagttgatcattcaattcctattattatggttggacctggtactggtcttgcacctttcaggggatttttacaggaaagatttgccctcaaagaggctggtgttcaacaaggccctgcaatactcttctttggatgtaggaatcgtcgattggattttatttatgaggaggagctaaagaattttgtggaacaaggttctctgtcagaattgatagttgcattctctagagagggggccgaaaaggaatatggtcaacacaagatgatggatcaggctgcacagctgcgggagtatgaacgcatcaggagggtatgcacacatcgagacgggatggccaacggaatcggacggagcagcgacaccgta

SEQ ID NO: 5358 - DNA, 914 bp, Glycine max
  misc_feature (10)..(10): n is a, c, g, or t
  misc_feature (61)..(61): n is a, c, g, or t
tcgagtcagntcacgttaggcccccccctgcactttcaggggatttttacaggaaagattngcgctcaaagaggatggtgttctacttggccctgcaatactcttcttggatgtaggaatcgtcgaatggattttatttatgaggaggagctaaagaattttgtggaacaaggttctctgtcagaattgatagttgcattctctagagagggggccgaaaaggaatatgttcaacacaagatgatggatcaagctgcacagctgtggagtttgatttctcaaggaggttatctttacgtctgtggtgatgccaagggtatggccagagatgttcatcgaactcttcataccattgtccagcagcaggaaaatgtggactcgacaaaggctgaggctatagtgaaaaaacttcagatggatggacgttacctaagggatgtgtggtgatttttctgatcattcttctgcccagattgtggtatccttgctatttgatatgctaaattcaggattggctgaaggatattcttgagattagtcactgcctttccggaaatttaggacaccaacagtggaggttaaacaggtttccttgagaagaaatgcttttctggacatttacccttttttcttttattttctgttatctttatattctcttattatgataggttggatccctctgaagtgggattatttatcgggggactctgtgatagttagtctcagaaatcggtaaacaaataccggttacagtggatggtcatgtattattaagtgtaggaattggtaacgaataattattttattaatgaaacatgtattttttttaaaaaaaatacagtggatgttctacactgtaacttagtctgtgtactgttgaaggactaattgaaaggtgaagaattcccttt

SEQ ID NO: 5359 - DNA, 1454 bp, Glycine max
tcgagtcagctacgtaggccccccccccgactcaaccaattccaaattctcaactttcctaactttagcaaccatctaagaagttcagtcccttaattatctctcaccttgaattagaaaagcattcaaagctttgaacccaatttcactgtttgcacctcaaacatcttagaagtcccaattgagtctcaattccacaaccaaaaatgcaaagttcaatttcacaatctgatatttttatcactgattaccttgtaccccaagaagttccatttcaatttcaatttcaagatatgagcaagaatgacaacaacatgccaatgaaccataccaataataaccttcaaatgcctcaaatcacatctttctccaagcctccaaggtcctcatcaaatctaagcaaccgcaaaccctccttgaaaaacatcacaatcccttccataacctctggtcttgcaacagctatgtcacaaacaacagcaacaacaacaacaatagctacaaccatgtataacaacaaccaagtttcttcttcttctttttcttcagatgaaaccaacaataccaaagacgacaagcactatagaggggttagaagaaggccatgggggaagtatgctgcagaaatccgtgaccctaatagaaaaggttcaagggtgtggcttggaacctttgacacagccatagaagctgctaaggcttatgacaaagctgctttcaagatgagagggagcaaagccatattgaacttccctttggagattggatcagatcagtctaaagaagagtcatcatcatcatcatcatcagtttcaagcagcagcatcgtcatcaaggttggtgtgaagagagaaagagaggaagagagtgaaaggaagaacaactatgagaaaagtgagtttaacaacaatagtaatagtaataagcatgtgaagaaagaagagtgccctttgactccatcatgttggaaaggcttttgggacactgatgttatgggaacaatctttagtgtgcctcctttgtcaccactatctccactaatggttgtttgagattttgtggaacttttgctctttcaatgatgttttgaggtaaccaaactaaggggagagagagagatgatgctggtgattgtcctctctgatttaggttgctaatttgcctaaatcaaaatggtagtactaattaatctactaatagattaatttgcaagtgaatatatatatggatttgtataatgtaaatataggatagtactatgaagcaagatctttttgtttgttgaaaaaaaaaacaaaaaacccatgcttatcttcttcctttaggtaaaaaaatgtactgtacttgaagcaatattgaaatttgtttattcgtttattggagaaaaaaaaaaaaaaaaaaaaaaaaaaaaaaaaaaaaagaagagaaaaaaaaaaaaaaaaaaaaaaaaaaaa

SEQ ID NO: 5360 - DNA, 886 bp, Glycine max
aacattgaaaagtgtcttaggagttggtaagacaacaaaaactgcccacccctaccaacccattaccatcatcgttcaaccaaccaactaacctcatcgcatttcatttgtcaccaaccatcccatttttctcttattcaaatcctctctcatctcttccttttcgctggcaattaactcacgagggctgcacagcaatgggtggggagcgcaacaaggtcttcactttggccgaggtctctcagcacaacaatgccaaagactgttggcttgtcattcatggcaaggtttataatgtaacaaagtttttggaagatcaccctggtggggatgaggtcctgttgtcttccacagggaaagatgcaaccaatgattttgaggatattggtcacagcaccagtgccgtagccatgatggatgagttctatgttggagacattgatacatcaaccatccccagcaaggttaagtacactcctccaaaacaacctcactataaccaggacaagactccggagttcatcataaggatcctccagtttctagttccgttgtttatcttgggtttggcagttggcattcgtttctacaccaaatcaacatgatcatttaactgctagagcacatgaatactggcatttgcaatattgtgttggtgttgaaagaccccccagtttgttttatcttttttgtgctgcaatgacgaggggttgctaggatatgccatatgaattgtgcttgtttcccttttcggtgtaatttggtgttaaatatcagattgcctttctctgtcactgatttgctaaaggagcaattttctgcagtttaaacttataaaattttggtgattctaaatgaactaataagcttggggtcctaatggaaa

SEQ ID NO: 5361 - DNA, 1193 bp, Glycine max
gtaccgcctgcaggtacccggtccggaattcccgggtcgacccacgcgtccgccgcctccccctcccggagccctcagagcgccgcccccgcttcccccttcccctccctcccaccaccaccatcgccaaaccctccgccggcgacaccatcgcctccgccgacctggagaagctcgccgtcctcggccacggcaacggcggcaccgtctacaaggtccgccacaagaccacctccgccacctacgcgctgaaaatcatccactccgacgctgacgccaccacgcgccgccgcgccttctcggaaacatccatcctccgccgcgccaccgactgtccccacgtcgtccgcttccacggctccttcgagaatccctccggcgacgtggcgatcctcatggagtacatggacggcggcaccctcgagaccgccctcgccaccggcggcacgttctcggaagagcgactcgccaaggtggcgcgtgacgttctcgaggggctcgcgtacctccacgcgcgcaacatcgcgcaccgcgacataaagcccgccaacatcctagtaaactccgaaggagaagttaagattgcagacttcggagttagcaaactcatgtgccgcacgcttgaagcgtgcaactcttatgtcggcacgtgcgcgtacatgagtcccgaccggttcgacccggaagcatatggcgggaactataacggttttgctgcggatatttggagtttgggtttaaccctatttgagctctatgtgggtcattttccatttcttcaagcgggtcaaagacccgattgggctacccttatgtgtgccatttgcttcagcgacccaccgagcctccccgagaccgcatcgccggagtttcacgattttgtcgagtgctgcctcaagaaggagtccggggagaggtggacggcggctcagctcttgacccacccgtttgtgtgcaaagacccggaaacctgttaagtgggttgacccgttttttttttacttggatcgggtgtatatgacattagtttatcttggaataacctttttgagtaggtgtatattccccctgatgcaaaccttttcaattttaggagaatcattccctttgtaaattatgttcagcaatgataaaaaggaatttggaattatgaaatatctatggctcttttgttttcagaaaaaagaagagag

SEQ ID NO: 5362 - DNA, 1372 bp, Glycine max
tcagctacgtaggccccccccccccccaaaattccccaaagggtgtgttctgttttcgctcattctagaaacacccataagtcggcattacaagcaccatatttcggaagctggaagctcacacatttttttctgcgtccgagaatcgcatttttctagttcctgcgcatccaaacgagtccttaatatcgaactttcctgaagatggtgttgatagagcatgaagagagcaagcagagaaacgcgaacccctccaacgccgccaacgacgattccgacggcttcgaaaccgccagcgacaccgatctggccggtgaaggcgacgacagtggggccggcatcccggaagaacagaatcgcaccgaacagagtcataccgagaagcagacggagcaagagccggaacacgatgctcctcggagcagcgaatcatccgagaacaatgccctgatcagtgaagaagaatcgagacagaaagcattgaatcaagcaaatgaagcaaaggtagaagggaataagctttttgtagaagggaagtatgaagaggcattattacaatatgaacttgctttacaagcagcaccagacatgccttcatctgtggaaatacggtcaatatgccattcaaaccgtggtgtgtgctttctgaaactgggaaaatatgataacacaattaaagaatgcacaaaagcattagaattgaatcctgtgtacattaaagctttggtaagaagaggagaagctcatgaaaagcttgagcattttgaagaggctattgctgatatgaaaaagatcttagaaattgatctctcaaatgatcaagctaggaaaaccattaggcagctagagccccttgctgcagaaaaacgggaaaagatgaaggaggaaatgattgcaaaactgaaagacatgggcaattctgtcctgggccgctttgggatgagcgtagacaactttaaagcagtcaaagatccaaacactggttcctattctatctcattccaacgctaatttatgtagagcaaagtcataaacagcagcaagcaagaaagaggcagtctaaagtgatacaggttttagactcagttgtgcatgcaagttatttggaatatttgaatgttagttatgtatgagaactagggcatgtaacatttcctttgaaagggcatttaaactgcattaaggcttcagaacacatgtcaattgttttgaacttttgaaaaatactacattcgtccctatttatatgacgttgactaatttatgtatattagtattaaatttgtctataattgtaatattttaaaactatgcccttaacattattgggagcccaaaaaaaaaaaaaaaaaactcggactagttctctcgt

SEQ ID NO: 5363 - DNA, 3061 bp, Glycine max
actcactatagggctcgagcggccgcccgggcaggtctcccacaattcatttaattcaagttctgaattccaaatgcaacgttctcgcgggaaaatttcgaaattgcacacatttgcgagggaaccctcattattcagccggcaaaataaaaaaaagaaatctttcacatatcccaacccctcagcacacaaacactctatttataccctcgcgcctgcgccaaaactgttcgacgaaattctccactgagagacatagaaaaccgagaaaaagaaaaaaagacaatatgtatgtggtgaagagagatgggaggcaagagacggtgcattttgataaaatcaccgcgcgtctcaagaaacttagttacggtttaagcaccgaacactgtgaccctgttctggtgtctcagaaagtgtgcgctggcgtctacaaaggcgtcaccactagccagctcgatgagttggcggcggaaaccgccgcggctatgaccgccaaccaccctgactatgcttctttggctgcgaggattgccgtttcaaatctgcacaagaatacgaagaagtcattttctgaaacgattaaggttatgtattaccattttaatgagagatctgcgatgaaggctcctctgattgctgatgacgtctatgaaattatcatcaagaatgctgctcgattggacagtgagataatctatgatagggactttgactatgattactttggtttcaaaactcttgagaggtcatacctcttgaaggttcaaggaaaggttgtggaaaggcctcagcacatgttgatgagggttgctgttggaattcataaggatgacattgattctgctgtcagaacataccacatgatgtctcagagatggttcactcatgcatctccaacacttttcaatgcaggaacacctaggcctcagttgagtagttgcttccttgtgtgcatgaaagatgatagtatagagggaatatatgacactttgaaggagtgtgcagtcattagcaaatcagctggaggaattggtgttagtgttcacaacattcgtgccacaggaagttacatccgtggcacaaatgggacatcaaatggtattgttccaatgctgcgtgtgttcaacgatactgctcgctatgttgatcaagggggaggcaagaggaaaggtgcatttgctgtgtacctggagccatggcatgctgatatatttgaattcttggatttaaggaaaaaccatggaaaggaagagcatcgagctcgagatttgttttatgctctttgggtgtctgatctctttatggaaagagttcagagcaatgggcaatggtctttgttttgccccaatgaagcgccaggtttggctgattgctggggtgaagaatttgagaaattgtacactcaatatgaaagagaaggaaaagcaaagaaggttgttcaggcacagaatctctggtttgaaattttgaagtcccagatagaaactggaactccttacatgctttttaaggacacttgcaataaaaaaagcaaccaacagaatttgggcacaatcaagtcatcaaacttgtgcactgagataattgagtatacaagtccaacagaaacggctgtgtgcaacttggcatcgattgccctgccgcgatatgtaagagagaagggtgtgcccatggaatctcatccatctaagcttgttggaagcagaggctcaaaaaaccgatattttgactttgacaaactgggagaggttactgcaatagtggcaacaaacctcaataaaataattgatgttaattactacccagttgatactgctagaagatcaaacatgcgacaccgacccattggtattggagttcagggtcttgccgataccttcatactactaggtgtggcatttgattcaccagaggctcagcagttgaacaaggatatatttgagactatatactatcatgcactaaaaacttcatctgaattggctgcaaaagaaggtccctatgaaacatatagtggtagtcctataagcaagggaattcttcagccagacatgtggggtgtgatgccctcaagtcgttgggattgggatgcacttcgggagatgatagcaaagacgggtgtgaggaactcacttcttgttgcccctatgccaactgcatcaactagccagattcttggcaataatgagtgttttgagccatatacttctaatatctacagccgcagagttctaagtggtgaatttgttgtagtgaacaagcatttacttcatgacttgactgaaatgggactttggtctcctacaatcaagaataatattatctatgaggatggttcagttcagaaaatcccagaaatacctgatgatctgaaaatcatatacaagactgtttgggagattaagcaaaagacattggttgatatggctgttgatagaggatgctacatagaccagagtcagagcttgaatattcacatggatcaacccaactttggaaagttaacttctttgcatttctatgcatggtcaaagggtttgaagactgggatgtattatctgcgatcacgtgccgcagcagatgctatcaagtttactgttgatacctctatgctccatgaaaaacctatggcagaggaagaggatgataataccaagatggcacagatggtgtgctctttaacaaaccgagaagagtgtttggcttgtggaagttgaaagcattccaagttgcattttcccggattgattttgggcctaaaaacccttaataagtgcaaacctcaaaaatttgttttaggccttaatgatataaggttcaactcatacatgataatcttaagcattctaaattatctttagagctttgtatagtacttatggtgttaatttcatttgtacctgtttatgtattgtatgttaaatagttgaaagatgtcattgttggtagcatgtcaactgtccagtgagattctttatttcctacatttaaatgttactatttgcttatctattccttctaaaattttagcaaaaaaattgttaaaaaaaaaaaaaaaaaa

SEQ ID NO: 5364 - DNA, 801 bp, Glycine max
  misc_feature (784)..(784): n is a, c, g, or t
gttataattataaaaaaaaaaactacccataaaacccaaaaatagagtgctttacgaaagataccagtttttttgttgttttttttcctcaatctcaaccatggaaaagcagaagacactgatgagtttgattctgttgctgttgttatttacttcggatgtgagtgcttggaccggtgaaatccatggaagagttgtttgtgacgtttgtggggattcttctcttggacctgaagaccatattcttgaaggtgctgaggttgctgttctttgcatcaccaagtctggggaagttctaaattatcaggcattcactgatgctaaggggatatacacggtggccgaaacaatgccggaaagtgatcgctgggatgcgtgtcttgcccgaccaatcagtagtttccacgagcaatgcactcaacttggtgaaggcagcataggggttaaattcagttacaatcatccatcaggacattcacacactgtcaggacctttgtatatcgacccaccagtgttccaacttactgcatttgatatatatattggcttgctctgaatctgaaattgcttatgcttggttgaactagtgcaaaactaatgagtatatgagcatattttatttatactatatgtatgtgtagtggtgttccggtatgtatttctatagagcttagtcaaagtaagcatgagacactttaagtaactgtaaatggcaatattatagagagcaatacaaaatcattgtaaatggcaaaaaaaaaaaaaaaaaaaaaaaaaaaaaangaaaaaaaaaaaaaaaa

SEQ ID NO: 5365 - DNA, 1012 bp, Glycine max
  misc_feature (4)..(5): n is a, c, g, or t
agcnnggaatgggggtcgagcaaaaacagagtgctctgagaaaggtagcgttttttttgtggttgtttttttctcaattctcaaccatggagaagcagaagacagtgatgggcttgattctgttgctgctgttatttgcttcggatgtgagtgcttggactggtgaaatccatggaagagttgtttgtgatgtttgtggggattcttctctcggacctgaagaccatgttctcgaaggtgctgaggttgctgttctttgcatcaccaaatctggggaggttctaaattatcaggcattcactgatgctaaggggatatacacagtggccgagacaatgccggagagtgatcgttgggatgcatgtcttgcccgaccaatcagtagtttccatgagcaatgcactcaacttggtgaaggcagcattggggttaaattcagttacaatcatccatcaggacattcacacactgtcaggacctttgtttatcgacccaccagtgttccaacttactgcatttgatatatactaatgagtatatgaatctgagagtgtctatgcttgattgaactagtgcaaaactaatgagtatatgagcatattttatttatactatatgtatgtgtagtggtgttccggcatgtatttctatagagcttagtcaaagtaagcatgagacgtttaagtaactgtaaatggcaatattatagagagcaatgcaaaatcattgtcattggccttgtcattgagcaatgcaatgagtccatggcttaaatgcatattatattttctagcattacattcataaatacatatatggactgcattaaacaatatcacatatgacacctccaatagcttttattgaaagctgtcatgtgcggactcgggtacgggtacgggtatccgactcggatatggatccaaggtttggacctgtgaaattctaatttcaaggactcgggaacacattttgcaaggctccaaatcttggatatggactcggggacacg

SEQ ID NO: 5366 - DNA, 1350 bp, Glycine max
gaaaatcctgaggataaaaaggaaacttagaaaagtcagctccgttgcccccccccccaacttcacacacacaacactttcctctctctctctctctctctctagggttccgagtttgaagttgaaagtgttgaactatctctagctagcttttcacaaatttggttgcacttgcaactgaggcaggaaagaggggcacgagaggaggaagaggaaagagaagaaaaaccaagaaaagtggagaaagggataggtgttgtacagaaatagaaattaaaattgagtgaaaattaaagagaagaaggagtgatagggagatatgggtaggggaagagtggagttgaagaggatagagaacaagataaacaggcaagttacgtttgcaaagaggagaaatgggcttctcaagaaagcctatgagctatctgttctctgtgatgctgaggttgccctcatcatcttctccaaccgtggcaagctttatgagttctgtagcagctctagcatgctcaaaacacttgaaaggtaccagaaatgcagttatggtgctgtggaagttaccaaacctgccaaagagctcgagagcagctatcgtgaatacttgaagctgaaagcaagatttgaatcacttcaaaggactcaaagaaaccttctaggggaagacctgggcccactgaataccaaagaacttgagcatcttgaacggcaattggattcatctctaaagcaagtgaggtccacaaagacacaattcatgctggaccagttatctgatcttcaaactaaggagcagatgttggtagaagcaaacagatccttgacagtgaagctggaagaaatcaattcaagaaaccactacaggcaatcatgggaagctggtgatcaaagtatgccatacggtggtggtccacagaattctcactctcatcagggcttcttccagccattggaatgcaaccctacattgcagattggtcctgattacaggtacaatgatgtagcttcagatcagataactgccacaactcaacctcaacaagtgagtggctttattccagggtggatgctgtgaaattaggctcagtattcagttggagacataaaagcaaacaccttacaaaagggcaaagccaaaaatgcatcttggtgttggcaaggtgtaaatgtaaccctgcttctattattattttggtataagaaacagatgtgttgtgacttgttcaaacttgtgagaacctttttagccatagacatatggcaatttataacattcggaatcttttgaaggatccttttttattattaaaatatccgagcgaccggtttcaattttaaaaaaaaaaaaaaaaa

SEQ ID NO: 5367 - DNA, 1521 bp, Glycine max
ccccccgagaaaaagaaaaaaagtgaacatctgaggatcagctacgcaagctcccccccccccccgtgttgttgttgttgttgatgatgtttgctttgttctctttctctctcctcaaattttttcctctctctctagggttccaagagtgtcttgaactactccagaaccctctcttgtttttcacaaatttgggtttagtagagtactgacccagaaaagaaggttcaacaggtacctaagagaggggatagaaagaaaaaaatagaaactgtacgtataaaagaagaaagaaacaaagatataaggaaaaagggaaaatattttgaataaggaagatataaggcaatatataaaaatattagtatttgataataattaggtgtagaaatattatggggaggggaagagtggagctcaaaaggatagagaacaagataaacaggcaggtaacgtttgcaaagaggagaaatgggcttctcaagaaagcctatgagctttctgttctctgtgatgctgaggttgccctcatcatcttctctacccgcggcaagctttatgaattctgtagcaccaacagcatgctcaaaacacttgaaaggtaccaaaagtgcagctatggtgcagttgaagtcagcaaacctggcaaagagcttgagcagagcagctaccgtgagtacttgaagctgaaagcaagatttgaatctcttcaaaggacccaaaggaaccttcttggtgaagacttgggcccactaaataccaaagatcttgagcagcttgagcggcaactggattcatctctcaagcaagtgaggtccacaaagactcagttcatgctggaccagttagctgatcttcagaataaggagcatatgctggtagaagcaaacagatctttgaccatgaagctggaagaaatcaattcaagaaaccagtataggcaaacatgggaagctggtgagcaaagtatgtcatatggtacacaaaatgctcactcccaaggctttttccagcctttggagtgcaaccccacattgcagataggttctgactacaggtacaaccctgaagcctcagagcagcagctagctgccacaactcaagctcaacaagtcaatggatttattcctggatggatgctttgacctaagctctcagtattttggatggctacataaataaaattagcaaacacctaagaccaaagtcaaaatgcctcttgctgttggaaatgtgtaaatgctgcttgttctttagttatttatttgttttggcataaaaacagcagtgactgacttaaaactattaaaactttagccatagtcataggatgtggcatgaaggttatagtattttgaatatctttggaggacaagttttatctgactgaatgacctgttaatgtcatttttcttttgcaatcactttctaatctggctgcattaagaattgtttttaaaaaaaaaaaaaaaaaaaaaaaaaaaaaaaaaaaaaaaaaaaaaaaaaaaaaaaaaaaaaaaa

SEQ ID NO: 5368 - DNA, 1686 bp, Glycine max
tcagctccgtaggcccccccccgaattaattaattttaaactgcaagcgttgggagaaaggaaggaagaccttatcatctccgaatttcattttcagaagcctctttgggaatcaaatccgaagcatgatgcattgtgcgagcattgtctcggctccgtcctacgcgttcccttttctctctggctccgcttccactactccaactgcgatctcgctcactaagcgcagttggaagccacctccgagcatggcaaaaggcccagtcagagccaccgtttctatagagaaagagaccccggaggccaatcgtcccgaaacgtttctcagaggagtggacgaggcccagtcttccacttcggttcgggcccgcttcgagaagatgataagggaggcccaggacaccgtgtgcagtgccctcgaggccgctgatggtggggcccagttcaaggaggacgtttggtccaggcccggtggcggcggtggcattagcagggtccttcaagacggtgccgtttgggagaaggctggggttaatgtctctgttgtttacggtgtcatgccacctgacgcatatcgtgctgccaagggtgttcctaccgatcaaaaacctggtcctgtgcctttcttcgctgctggaatcagctccgttttacacccaaagaacccgtttgcccctaccctacatttcaactatcgctattttgaaaccgatgctcctaaagatgctcctggagcacctagacaatggtggtttggtgggggaactgacttgacaccagcttacatttttgaggaggatgttaagcacttccattcaattcaaaaacaagcctgtgacaagtttgaacctactttttacccccgattcaagaaatggtgtgatgattacttttatatcaagcatcgaggtgaaaggagagggcttggaggaatattttttgatgatcttaatgactatgatcaggagatgctcctttcctttgctactgaatgtgcaaattctgttattcctgcttatttacctatcatagagaaaaggaaggatttgcccttcaatgatcatcagaaagcatggcaacaattgcgaaggggacgatatgttgaattcaatttggtatatgataggggtacaacatttggactgaaaactggagggagaatagagagtatacttgtttctctcccactgactgctcggtgggaatacgatcataaaccggaagaaggaagcgaagaatggaaactcttggacgcatgcatcaaccccaaggaatggatctaattcatcagttgaccccccaatttgtcagctttttaatttaataataagggagcttgtttcttttttcggtgtatatcaagtgcttgttatgatgagtcagaatgttagcttgttgtactaggtggattgtaaatcacgtattttgctagagtcatccgcgtaaagcgtgaaaatgcagaaaattacaaatgtctaggctgcgtctgtagtatacctactgccaaccattgttctttctacaagtaactcctcaatcccatgtaagaaaacaaaaggcagcttctttaatgccagtattgcacaacacctcagactagtaaattggtaattctgttgaaggtgatataatacttttgactgaaaaaaaaaaaaggcgcggctatatgtaagatcctataatttg

SEQ ID NO: 5369 - DNA, 1383 bp, Glycine max
tcagctacgtaggaccctagattggttattgttgttgcgtgtgtgtgagtggcgagggaggcactgccacaagcaatggaagagtcttcatccattgaggaatcggtggcaagcgtggtcgaagaagcgaaggaggttcaagacgccgtttccgctcacatctctaaggcttccagcgacgaggaacctctccggcaacgtgtccgtcgcgtcgattcccgaatccattcgctccgttcctctctcgattctcttgtctccaccaaacaaatccctccctccttagccgataagttggatgaagatttgcagagagcgagatgcatcatcgttgacggtgactcctcttcgcttctccctggccatgcacaaggaagctttctgaggatgtttctgggtcctatcaatgttcgtgcctccaggaaggacgttcagctcaaggtcaaagaggaatacaacagttacagggatagaactgccctgctattcctgctttttccggcaacactgcttattctaagatcttgggtttggtctggatgcttgccaacttttcctgttcagatgtaccaggcctggctgctattcctttacaccggtttggcattgcgagagaacatattgagagtcaatggaagtgatattcgtccctggtggatatatcatcattattgtgctatggtgatggccctcgtgagtctcacttgggagattaaaggacaaccagactgtgcaaaaaagcagagaggtgtacaactttttctacaatgggctatgatgcaaggagttgcaatgcttttgcaaaacagatatcaacgccaaagactctatactcgtattgcattgggaaaggctaagaggatggatgttgtgtggggggaaacagctggtgtggatggccaactgtggttattgtgtcccatacttttcacgttgcagggatttgaggcatatgttggactgttgttgctcaggactgcagttgttggggttgtttctgagtggcaggtaatattttgcggtgtcctgttggtcttaatggctgttgggaactttgcaaatacagtacagactctgatggcaaaatcaagatttaaggcaaagatgagaagaagcaagagcaagcagaggctgaattagcaagctgtcactttttttagttttgataggatcaggattttttgcactcatttcagttttgaccacagtgcaagctggtgataattttggcttgttgtagcatcaatcatttacaagtttaagcataaacataaatttggattaaaatgatattacgatactacaatttctggtatccacttttttgggtcagcaagcttgttccaaaaaaaaaaaaaaaaaaaagaaaaaaaaaaaaaaaaa

SEQ ID NO: 5370 - DNA, 1327 bp, Glycine max
attttgcgtgagtcttgattcttgaatatgttttagcatttgccctgccttaattgaggccccccccgccatcggaaaccaacaatgcctcctttgactttgtggctggtgctgccttttctcgtgttgctagcggcggcaacaacgtctccaacacgcgccacgacggtcgcctcgtcgttccacggtcaacgagagtttgactatttcgctttcgcgttgcaatggcccggtacttactgcaaacgcacccgcagttgctgccccaccaacggttgctgcagaggctccaattttccaacagtgttcaccatacatggactctggcctgactataatgatggaacctggccgtcctgttgctctggatctagtttcgatccaaaagagatattgacattgactaatagtttagagcaatattggccatcattgagctgtagcaagccatcattatgccatggtgggaaaggaacattttgggctcatgagtgggagaaacatggcacatgctcttatcctgtgtttcgaaatgaatatgattattttgtggcagttctgaatctctatttcaaatataatgttacgagcgttctaaatgatgctggatatgttccgtctaatactgaaaagtatccccttggaggcatcatctctgccattgagaatgcttttcacgcatctcctcaaatagtttgctcgaaagattctgttgaggaacttcgcctatgcttttataaggacttccagccacgagattgtgctcttggatctgacattaaaatcaacatggttacttctaaaaaatcttgtcccaaatatgttagcttgccggagccggtatcagtgagtaagacaggcacaatggacttcaaagtcggggctatgatgatgtagctctttaaggttatggtactgtacttctatttgtaaatttctgtaccttgcgaatgaacaaagccgcatgaataaatttgctaggatgttgtaccatttatcaatttggagataaatgaatagagtgacgagctggacatctggattgggatctagacctgctaatgtttaggcagaaaaaatgaagtgatggtcgaaagtattatttgggagttgggagctgtctcaagtctggtgccatgtatttggagtctgggttttatcattttctttattattggaagaatgtacaactgtataatggaatatgttgttgtatcatgtggaattatgaatatatgtactttcccttaatatcatcttatatatactttgccccacaaatcccatttctgtaaaaaactcgagactagttctctctctctctctc

SEQ ID NO: 5371 - DNA, 612 bp, Glycine max
ccacagcacaacaacgcataagcatcttctcagagcttcttagttctcacccttcattcttttcttcagcaaatcagagaaaaacacagaaatttaaggaatggcaggtgcaagagccagtggcatgatgaatggtggaagaagcttcccaaggaggttctctgggcgtccaattccaaagcgtggacaagtcaaagttggaatagttgtcgggcttgcaaactctgttgtttccattttctctcgcagcagagccacccgaggatgtgctacacctactcacctcgctcactagcttccaactcattcgggctacaaaaatttttgatctttttgttcttgtaaaaattggggtcttttttattcccttctatgatcttgttcatatgtaaatctctttcttttttcctatcaaagaatccaatcgcctcttgtttaactacctaaaaactgagtacaactttttctttttttactatgagtacaattttagttggatctacaccaatggatgaatttaaatttcaaaaggcaagccactgatatttaatttaaaaatattcccagtaatagattaatgtattgatacttcatttagagcaaaaaaaaaaa

SEQ ID NO: 5372 - DNA, 1534 bp, Glycine max
aattcggctcgagctcgagccgaatcggctcgtcagctacgtagccccccccccccacagagtgaaccaactagccctcctagatttccttgtctctggttgacttactgcaatatttggctattatggcttcttcaccttctttgcacatagcaatggtcccatggtttacaatgggacacatcacaccatttctctacctcgccaacaagcttgcagaaagaggacacagaatctctttcttcatttcaaagcacacacatgcagccttacagcacctaaatcaccaccccaatctcatcacccttattccaatctgtgttcctcacaatgattgtggcctaattccccatgttgctgaatccatcacttcggaagttccttcctccactgcctcactatttgagaaggacattgaagtcctcctccttgagctaaaattaaacattgtgttctttgatcatgcatattgggtaccaagaccatgcttaactcggtgcctaggcattaagtccttagtgtattatgttataagcatttcatcattggcttatgacttatcatgttcataccctttagggatatctaaattaggatgctgcaacatagctgaccatgacctcatacttaatcattcccatgaaccaaaactccttgttggatcaggaataaaacttgagcatggaaaaggcattgcttacattgaaagttgtacaaatactctaactcaatcttatgcaacaggactcaaaggtagtagttgcagagtggttgaaggagcttatgttgattatcataggaggcatgtgttgcttgaagggtgtgttataacaaagggaaccacatgtcatttggatgaaaattgggctaaatggcttggaaattttgaagctggctctgtggtttattgtgcatttggtagtgagtgcacattagaactatgtcagtttcaggaattgttgttggggcttgagctatcaggtatgccatttttggcagcacttaaaccccctaagggttttgagtgtgtggaatcagcttttccactagggtttaaggagagagttgaaggaagaggggttgtctgtggtggatgtgttcctaatcaggagttcattttggagcacccttctgtggggtgcttctttacccgttgtggatcagggtctttgccagaggcagtggtgaacaagtgtcagttggtgctgttgccaaatcatggtgaaatggtgatcaatgcaagggtggtctgctacagcttgaaggttggattggaagtagagaagttgaaggcctttaagatggtttgtgtaccaaagaaagtgtgtgcaaaactgtgaataggaatcatgcaaaaactcagtgaagcccctaaatagatcttattttcacggattagtccttgtgtttttttgttgggagctgaaaccttgctcacaacaaaacagtgatgttaacgtgtgttgcttatctaagaaataaaagggattacatgtgtttttaaaaaaaaaaaaagaaaaaaaaaaaaaaaaaa

SEQ ID NO: 5373 - DNA, 2673 bp, Glycine max
ctttttgtttaaaactcggcgtgggtatttgggttttcggggaaggctcgcacttattctcagtgttatctccagacctaaaattaaaattcacactaaatgcactccaaataaattcgaaacgcaaatgcaccttctcttgttctctctctcccaaactcaatccctgtgagtgctttctttctgtaactaacttgttccctcgttaaccctaatcatcaactcaagcagtgaatgaatctgtggacggacgagaactcctcggtgatggaggccttcatgtcgtcctccgatctctcctcaatctggccctcgccggcgccgccgcaatccacggcggtcttcaatcaggacaccctccagcatcgcctgcaggccttgatcgaaggcgcccgagagacctggacctacgccatcttctggcagtcctcttatgactattctggctccactctcctcggctggggcgacggttactacaaaggcgacgacgacaaagccaaagccaaggccaaggccaaggtcaaggtcacttccgccgccgagcaggaccaccgcaaaaaagttctccgcgaactcaactccctgatctccggctcctcctcctcctccgccgcctccgacgacgtcgacgaggaggtcaccgacaccgagtggttcttcctggtctccatgacgcagtccttcgtcaacggcggaggacttcccggacaggccttcttcaactccgctccggtgtgggtcaccgggggcgaccgtctctctgcctcggcctgcgagagggcgaggcagggacacgtgttcgggctgcaaaccctggtttgcataccgtccgcgaacggcgtcgttgagctggggtccaccgagttaattttccagaacccggatctgatgaacaaggtgaaggttctgttcaatttcagcaacaacaacttcgacatgggttcttcttggcccgccaccagcgccgatcagggcgaaaacgacccttcctcgctctggctcagcgatcccgaagttagggattccattaacactgttgctgctaccccttcggtttcggttcctgcacagactcaggggatttcgatttccaagaccatgcagttggaaagttctattcaaacccctggttccagtactttaaccgaaacccctagttctattcacgcgattccgcagaaccagagcgtcttctccagagaattgaacttttctgagtatggtttcgacccaaagactgggaacaatcagaatcaccattctctgaagccggaatccggcgagattctcagcttcggcgagagcaagagaacctcctacggcggcgtcaatgggaattccaattccaattcccattttttctccggtcagtcgccgtttgttgctgctgcggatgagaacaccaacaaaaataacatcaacaacaatgggaagacaaagtcaccgaattcgcgcggtagcaacgacgacggaatgctttccttcacctccggcgtgattcttccggcctcgaatttgaagtccggtggcggcggcgattccgaccactcggatctggaggcttcggtggtgaaggacccggtggtggagccggagaagcggccgcggaagagagggcgtaagccggcgaacggaagagaggaaccattaaaccatgttgaagcagagagacagaggagggagaagctgaaccagaggttctacgcgcttcgtgctgtggttcccaacgtgtcaaagatggacaaagcgtcactcctgggcgacgccatatcttacatcacggagctgaagtccaagcttcagaccctcgaatcagataaagatggaatgcagaagcagctggaaggtgtgaagaaggagctcgagaaaacaaccgagaacgtttcttctaatcacgcgggtaatagtagtagttgtaacaacaacaacaagttgtcgaatcagaagttaattgacgtgttggagatggacgtgaagatacttgggtgggacgcgatgataaggatccattgcagcaagaagaaccaccccggggcgaggttgttgacggcattgatggagttggacttggacgtgcaccacgccaacgtaaatttggtcaacgatatgaccatgctacaagcaacggtgaagatgggaagtaggttttacacgcaggagcagcttcgtgcggctctggcggctaaggttggggatgcacgatgatgttggctctgcactttgcggcagcgtttgagattatgtgtgtgtttgtgtcgtgttattagctagctagctctttgtaagttgtgctgctctgggatattttaagccttcccggtagctgtttctgtaaaattataagctttttttctttattgggtagcttagtattgaattttgaggtaatcaaattgggaagctccatggagtagtagaactagctagggacacttttcatcaaatctgtgggtggagtggagatagcagcagctatatgtggaaataggggtaattttatctgttttagattgtgtatatattataataatatcataaatgtgaacagcatcatgcaagttctcaatattattattaaaaaaaaaaaaagaaaaaaaaaaaaaaaaaaaaaaaaaaaaaaaaaaaaaaaaaaaaaaaaaaaaaaaaaaaaaaaaaaaaaaaaaaaaaaaa

SEQ ID NO: 5374 - DNA, 1062 bp, Glycine max
acataatgaaaattttacttccaaacccaaccaaatcaaagaaatgcaggatcacgagacagtccctattgcgaaaaatgaagcctctgattcaagcttattcggaagacgaagctacaaattctgggcactagctgacatactgatcttggcattctggtgcatgttcaccggcacattctatctgcgctggtacggcaccctcaacactttctcccacgcgtcccttgacgaccacctcgacgtcctcgaaatcgaggagcgggagaagctggtgaggcacatgtgggacgtgtacacgaataaccgtaggatcaggttgccgcggttctgggaaaaggccttcgaggctgcctacgaggatttgaccagcgacgccgccgatgttagagacgttgccgtcgccgagatcgttaacatgtctctgcgctccttggatctccaattgcctcctagagcacggaaacttagtaagaatctcaaggaagttgagaaaggcaaaggagcaacctccgaacgtgcttagagattagaatgtggagcaaccaaaaggtctgatttacttcaaaaggaaaagggtcatgttaccaaaagttgagaaaggcgaagtcatactcggattttcatgccttcataaattgggaaattatgtattttagtaggttgtgattctttcaaattttgcagtcaatttcataatcatcacaatgtgagtgctagtaaattagagcttgaaagataggggtgggtaaacggattcaggtccatggactgatccacggggcctgtagtccgcgcgggtaacggaccaatttttttaaacggtccatggttatgtcatatttttgggccgtccgctcaacttgtgaactatgcgggtttggctcgtgagttgtccgcatttgaattttattacttcaaatatgaaatcatttgttgttgaagatgtttaagtttcatattttagatttattgcttggattttgttttgttaagacattgtttattttattgatgtaattgactaattgttaagattttattaaaaaaaaaaaaaaaaaa

SEQ ID NO: 5375 - DNA, 1300 bp, Glycine max
aaaacagcaagagccatagaaacccgaaacccttcttcactctgcaactttcacttcacacaacaatgatgatggcaggtgcagccaaaaccctaaccaatctttgcccctctttcccattcccaaccaaaccccaaaaccaactcaccactagccacgctttcccttccactcgcctccgccaccgcgccatttccgcggtggcgaacgcggcgcaacctccactcgccgccgccaccgccaccgagggtcagtaccgagtcgatgtgctctcggagtcgctccccttcatccagaaattccgcggcaaaaccatcgtcgtcaagtacggcggcgccgccatgaagtccccggagctccaggcctccgtgatcaacgaccttgtcctcctctcctgcgtcggcctccgccccgtcctggtccacggcggcggccccgagatcaactcctggctcggccgcctcaacatccccgccgtcttccgcgacggcctccgcgtcaccgacgccgacaccatggagatcgtctccatggtcctcgtcggaaaagtcaacaaaaccctagtttctctaattaacaaggccggcgccaccgccgtcggcctctctggcatggacggccgcctcctcaccgcccgccccgctcccaaggccgccgacctcggctacgtcggcgaggtcgcacgcgtcgatcccgccgtcctccgctccctaatcgacaccagccacatccccgtcgtcacctccgtcgccgccgatgaatccggacagccctacaacatcaacgccgacaccgtcgccggagaattggcagcgtcgctcggcgcggagaagctgattctgctgaccgatgtggcgggaattctggaagatcggaacgaccctgacagcttggtgaagaagattgacataaaaggagtgaagaaaatgatggaagatggaaaagttggtggtggaatgatacctaaggttaattgttgcgttaggtccttggcgcaaggggttattacagcgagtattattgatggtagggttccgcattctttgttgcttgagattttgactgatgaaggtgctggaactatgataactggataagtttatttatttatggtgtttggattttttcttttcaatcaagccttgagttgaggttgcattgcagcacttgttttgttagagattggtgattgtttttaagtgcgtgtaatgtgagagatggttgaattgaattgaatgtttcagaaaaaaaaaaaaaaacatcctaaagacaagaaaattgggataatggattccggaag

SEQ ID NO: 5376 - DNA, 872 bp, Glycine max
accaaccaaagaaaccatatcatatctcaaggtcaaaggtcaaggccccaccgaaaactccttactgcaaacctacaaggaggcaattacagtgtacaatctggaacactaaagcaaaaaaatagaaaaacaataatcccagcaacgtctcttctcatctttttatgtaaaaaccaaaaaaagaagacaacactctaggaaagcaacaacaacttgaaaatagaccagaaagaagcatataaggtctacatgatagagcatgcattaaaatttataaatttacagtgccatgggaaaaagcatatattattttttttttgtctacatgatagagcatgcatttgggttgtcatcactgaacatggtgatgtaagggtcttcatatcttgtgatggttccagtgtgagcaggggcctccactctcctcacataaccaggaggagccttcttgtcataagaaggaactgcatatggatgaaccaccaagttgtaaggcacatagggccaaatctcagccttcttccctgttgatttggccttcttcagcaccttgtttggttcaacatacccagttactgtaactttctgctgttttcggtttatctccacagatttcaccccacttagtgaagagagagcgttttttaccttaagctcacaaccatcacaatccattctcacctttagctccacggtttggaactgcttcttcttcttcttgtggtggtggtggccactgcccattagatcagacaagtactccaatgtacctccaactcccatttcttgtaataataataaaaaataataacgctgctcggctctgtgctgtgaagaactcgtatactacgtttgagatcttttagttactg

SEQ ID NO: 5377 - DNA, 1151 bp, Glycine max
ggctcgagctcgagccgaatcggtttgagcggctcgagcggctcgagcggctcgagggcgttccgaggggactatgaaacgtgcctggtgtacacggaggagatgaaagagcggtgcgtggagcagttcaagcaggggacggtgtgtatggaacagctggcagcggtggaagggttgtgtgaattggtgaggaaggcggttggggcggcggaatcggttcggagatatcacgtgaacttgtctattttcacgtccgttccagacgcgtggggcattgaccaggtgtttcccattatccccattcaccggttggaagaaaagccttcggtgaggggtattctctcggacttgacttgtgacagcgacggtaagattgacaagttcatcaacggagagtccagcttggcgcttcatgaaatggaagggggaagctactatctgggaatgtttttgggtggggcttacgaggaggcgctcggtggagtccacaatttgttcggcggccccagcgtgatcagggtgtcgcagagcgatggccctcacagcttcgcggtgacgcgtgccgtgccggggccatcctgtggagatgttcttcgagtgatgcagcaccagcccgagctcatgttcgagacactcaagcaccgcgcgcaggagtatgtcagccacgacaacgcagcagcggttctggccgctggccttgctcgcacctttgacagaatgccttatctgctgcctctgtcttcctttgtggctgatgatgttgctgctgctgctgctgttcctgctggtgaagatgatgaagagcagtggtcttatatatgtgcttgaaatctgtctcgcagtagtcattccctttgtttctgttgcttgtgtcttcttcttgttgttcgtcgtggtcgttgttgaggtgttcaattttttttttttttttttattattctgttttcgctgtttttagtttagcacaggatgcaggacaaggacagggtcagtcagttattgttctctgcattttgttcccaaatgaaatgtctatgactttcttcgtcaagttctagagtaacaaattttattgttgtcttgcttgttattatactaagaataaaaatgttctcttatgggcaagttctttttaaataaaaagggcggcc

SEQ ID NO: 5378 - DNA, 3150 bp, Glycine max
ggcccagtcgcaccttcgtaggagccttacctctctctctctctctctctctctctccattccgtagtatccctctgttcgacccttttacttagcattccctgtttccggtattcgctccctttttttttctgcattctgtctggttttacttagatctctgtcccgcaccagatctggtgcagggtgagagggttgggttcattaattttgtatcaatcttccttctgagcggtaggcgtggggataccagagtcttttcgggaagcaagagagggttctctccgttttcaatagatctctcactgtcttcttttgagggggaagccggggcctcggcctcggcggctttcaaagcccccaccttcacagccctatcaacaaaaccctaaccctatttttttcttcttcattttctaattcaattttgatcgtcgccgtcactagagatgcctgtcctggcttgttgcgtggatgctgcagcacctcccggctatgcatttgccggtgacatctcttttccggcgccgatcgcctttactggcgtacctccggccacggcagacgacaccaacaacagcaacaaccattggtcgccgtctctctccgccgccctttacaacgtcgacggctggggcggcccctacttcgccgtcaacaccgccgggaacatctccgttcgcccacatggttccgacaccgtgtcgcaccaggagatcgatttgctgaagattgtgaagaaggcctccgatcccaaatctctcggtggtctcagcctccagcttcctctcattgcccgcttccctgacgttctgaagaaccggttggagtccctccagtcggcgttcgattatgcaatccaatctggagggtacgagtctcattaccaaggagtttaccccgtcaaatgcaaccaggaccggttcgtggtggaggatatcgtgaaattcggttcacccttccggttcggtctggaggccgggtctaagccggaactccttctggccatgagctgtctttgcaaaggcaaccccgacgcgcttttgatttgcaacggcttcaaggacgcggagtacatttctcttgccctggttgccaacaaacttgccctcaacaccgtgattgttgtggagcaggaggaggaggttgatttgatcgttgaattgagcaagaagctctgtattaagcccgtgattgggcttcgtgcgaagcttcggaccaagcattccggccatttcggtgggacttcaggagagaaggggaagtttgggctgaccaccgctcagattcttagggttgtgaagaacctggacctcgcgggcatgctggattgcctgcaactgctgcattttcatattggttctcagattccctcaacagcgttgcttgctgatggtgtgggagaggctgcgcagatctactgcgagttggttcggctcggggcgaacatgcgagtcatcgatattggaggtggactgggcatagattacgacggttccaaatcgtgtgactctgatatttccgttgagtacagtctcgaggattatgcagtcgcggttgttcacgcggttcagtgtgtgtgcgaccgaaggtccgtgaaacacccagttatctgcagcgagagtgggagagccatcgtgtctcatcattcggtcttgattttcgaggcggttggcaccagcagcaccaccgggggaggagcttcccctgcattgtccgctcaatatctggcggaggagctgtcggaggactacggatatctctcggagctggcgttccgaggggactatgaaacgtgcctggtgtacacggaggagatgaaagagcggtgcgtggagcagttcaagcaggggacggtgtgtatggaacagctggcagcggtggaagggttgtgcgagttggcgaggaaggcggttggggcgggggaatcggttcggagatatcacgtgaacctgtctgttttcacgtccgttccagacgcgtggggaattgaacaggtgtttcccattatcccaattcaccgtttggacgaaaagccttcggtgaggggtattctctcggacttgacttgtgacagcgacgggaagattgacaagttcatcaacggagagtccagcctgccgcttcatgagatggaaggaggaagaacttactatctgggaatgtttttgggtggggcttacgaggaggcgctcggtggagtccacaacttgttcggcggccccagcgtggtcagggtgtcgcagagcgatggccctcacagctttgcggtcacgcgtgccgtgccggggccatcctgtggagatgttcttcgagtgatgcagcaccagcccgagctcatgttcgagacactcaagcaccgcgcgcaggagtatgtcagccacgacaacgcagcagcgcttctggctgctggccttgctcgcacctttgacagaatgccttatctgctgtctctgtcttcctttgtggctgacgatgttgccgctgctgttcctgctgctcaagatctgggggagcagtggtcttattaatggatgtgcttcaattcaaatagtctcgcactagtcatcattccctttgtttctgttgcttgcttggttgttcttcttcttcttgttgatcgtcgtggtcgttgaggtcttcaattttttttttattattattccgttttcgctgtttttagtttagtcctggatgcaatgcaggataaagacagggtcagtcagttattgttctctgcattttgttcccaaatgaaatgtctatgactttcgtcgtcaagttctagggtaacaaattttattgttgccttgcttgttattattatacttagaataaaaatgttctcgcatggacaagttcttttaaaaaaaaaaaaaaaaattcctttttgctttgtaggtattgttttgtggcttgagtttgaattggcttcatcgtgtgtgctgaggctgtgtggtgaggggaggagatagcgtaacagaagaaaaagctagagattctgattgtggtaccattattgttggtgggggcctttttcttaagatttttggcgttgtatgtcgtaacagaacctcaacggatgtttaaaatgtggttggtaaaatatgatgcttctgggtagtagtcttattcatagacttagtagtt

SEQ ID NO: 5379 - DNA, 1800 bp, Glycine max
ccctcgcgtccgcccacgcgtccgttcaattccaattcaaaggagaacaggtatctgttccttcatcttccccaactctccatcacatacccgatacctgttctccttcttttcccctttatccaccaaagccagggttttctctttcaattttcattttcatgcctctcagattcacgggattatgttttttctgtcgcacaaaccctttttcttcttcggtgtaaactcctattccttgttgcaatcgaaaagggtccctttgtctgttcttgtctactgttgttgatgtctattactgttgctgatgggaattggcttgtgattgtgaacacacccaattcctcgccattgcaacacacccactcgtctttctctaaacgcagatgggataaggagttttctgagctccagagtggatagtatctgaatcagattcataacataacaattcaattgtggttttttgatattttggaatcaatggattcttcacaagggtctaccattgctggtttcgtggacaatgcatccattaagagaaatgagtctagttttgatggcgttcccgtgtatgttaaggaactaattgccggaggctttgctggtgcgctttctaagacctctgttgcacccctcgaacgggttaagatactttggcagacaaggacaccaggatttcattctcttggggtgtatcaatctatgaataagttactaaagcatgaaggttttctaggattatataagggaaatggagctagtgttatccgcattgttccgtatgcagccttgcattttatgacatatgagcgctacaaaagttggatcttgaataattatcctgtgttaggtacaggtccttttattgatcttttagcaggctctgctgcaggaggaacttcagttttatgtacctaccccttggatcttgctcgtaccaaacttgcttaccaggtggctgacacaagaggacttatcaaagatggtatgaaaggagttcaacctgcacataatggcattaaaggcgtgcttacaagtgtctataaggaagggggagttcgtggactttataggggtgcaggaccaacccttactggaattcttccatatgctggtttaaagttctacatgtatgagaaattgaagactcatgttcctgaagaacatcaaaagtccattatgatgcgtctttcttgtggagctctagctggattgtttgggcagactttaacataccctttagatgttgtcaagagacagatgcaggttggcagcctgcaaaatgctgcccatgaggatgtcagatacaaaaatacaattgatggacttaggactattgtttgtaatcaaggatggaagcagctgtttcatggcgtaagcattaactatataaggattgttccttcagctgcaattagtttcaccacatacgacatggtgaagtcttggcttggcataccacctcaacaaaagtctcaatcagtttcggcagcatgattgctcagtgctcacccgtgatggcaataagttacaatgtcaccttctaattggctccaatttttacaggaatgtctcttactgagtattactgcatatgatttccacaggctactattagaggaaaccctttttggttaaattaactaatgctagaagtttgtttgttattatatctggaaagttccttcacagtgcttctttaaacttaaaacgtaacctgtatagatttaacactaaatagtggatgcaatacaaaggtaactttcttactaaaaaaaaaaaaaaaaaccaaccaaa

SEQ ID NO: 5380 - DNA, 1571 bp, Glycine max
ggcagtacctattttgattctgagcaagttttggattttatgtgcttgaagaatctggattctgtccttgctcgcgaggccaaagcacgaaccagattcatggcacttattcagcattatggtcccactgtatacttccatcctgatgagaagtacttgccatcatcagtgcaatggttttttaagaatggagcagttttgcatgcagcaggcaataagaaaggtatagctatagattatcagggctcaaatttacctagtggaggaacaaatgatggtgcattttggattgatttgcctactgatggagatgcaagaaacaatctaaagaagggaaacatagagagtgctgaactctatgttcatgtgaaaccagcattgggaggagcctttactgatattgtgatgtgggttttttgccccttcaatggacctgccacccttaaagtggcattgatgaacattgagatgagcaagataggagaacacgtaggtgattgggagcactttacccttcgtataagcaacttcaccggagagctatggtctgtttacttctctcagcatagtggaggtggatggatacatgcatttgatctggagtttaataaggggaataagccaattgtttattcatcaaaagatggccatgctagcttccctcatcccgggacgtaccttcagggatcatccaaactaggaataggagtacgcaatgatgcagctcaaagcaaatttattgtggattcgagtgtcaaatatcagattgttgcggccgagtatcttggtgaaggagtcattacagaaccatgttggttgcagtatatgagagagtggggtcctaccgttgtatatgattcacggtctgagatagagaagataataaatctgcttccactatttgttagattttctgtggagaacttatttgaactatttccaactgagctttatggtgaggaggggccaactggtccaaaggagaaggataactggctaggagatgaatattgctagttctgcttcctctctcgttttagcgggaaaggaatgcaaactgattaaggtaatatctttatgtcctggtattagtatgtgttatgtatgtcattgtgggagaggtgaaatggagcaagacatcaacatcatcatcatcaatcaattgtaaagggggtgtaccttacatagtagcaacttatgtcattcttggtgacctgaagaactatagttctctgatgtttgagttgcttaaaacaatatacatagctacacaaaaattgtgagtagaatgatagcaatatacattctaatacactctttgttattagctgagaattatttagactcacaaatgatgtggggctcacttcctattggatgagtttctcttattattttgtgattcttaataaattttaatcaattacaaaaagtgcattagaaagaatgtgttcctagcttaaactataaacttgtatgagctagagttctcggttgtatacacatttctgatctctttgtatgataatcttgttgccagtgtttagtgggaaatatgaattttttttgct

SEQ ID NO: 5381 - DNA, 1411 bp, Glycine max
tcgagtcagctacgttcggctcagctacgtaggccctccccaggagaggaaaggcgtctaagaaaggaacattccccactaaaacatcttcctaaacttgattcaagtcacgtcacttgcattgaaagagtgtgtggtcttggtctgaacccaagaggtattcgacctccaaagctacaaatgaattcgataaacttggtcatagatcctccaaagctaccaagatgattctttggtcagtgcagaactagttccctaagaatgaaaggaaaaccctcaaaagttttctattccaaattcaaactcaatcaaaactgttgttttaggtataaagaggttatttacaatctagagaagtgctagcaatacactctttctaacacactgtggggcaaaggcagatctatggtcatgtggtgttattctctttgttttaatggctggctatttgccctttgaagaaaccaatctatcagctttatataaaaagattttcaaggccgagttcatgtctcctccatggttctcttcaagtgcaaagaagctaatcaacaaaatccttgatcccaatcctgccactcggattacatttgctgaggtcattgagaatgactggttcaagaagggatataagccacccgtatttgaacaggctaatattagtcttgatgatgtagattctattttcagtaattctacggattcacaaaatcttgttatagagaggcgcgaagaggggcccatggcacctgtggcacctgtgactatgaacgcctttgagcttatctctaaatctcagggcctcaatcttagtagtctttttgagaagcaaatgggactagttaaaagggaaacacggttcacatccaaatgttcagcagatgaaataatttcaaaaattgagaaagctgcaggacccctgggttttgatgttaagaagaacaactgtaagttaaagattgaaggcgaaaagactggacgcaaaggtcatctatctgtagccactgagatcttagaggttgccccttcactatacatggttgagctgcgtaagtctgaaggagatactctcgaatttcacaaggtgccaatccatcaaaataattgttatcctaattttcatatccgtacgaagtacagttactagtatttgtgctattaagagtgtcattggagcagtaaaaagaaagagtggtcattggaggattctgtcatggacttttttcctcatccatcaattatgaaaatttgcctttatttgaactgtatatcaatagctttaatttttgtgttgtaacaaactttaaagatgcaaaggggaaaactaggctagctaaagatttctagcatttgtttgtatgactagttgcttatgaaagttttcttttatttgaaaaaaaaaaaaaaaaaa

SEQ ID NO: 5382 - DNA, 2184 bp, Glycine max
tcagctacgtaggccccccccccagcatgcatcattttctgcaaaatgagttttactctacaaattaccttcatgttcaatttttttaaaaaaatgatcagctatgcatttaaattaaatacaatgacagttttatagaaagttattgaattaaatgatatttaattttaatagtatgagattgaatctgatttggcatgtctatcgattgatttgtcctttctagttcttcccaatattatattgatacgcaatatgctatacgattactgacagagtcaatgtttctggttgtgtgcacttattagattcaaaccttattggcgtcgtagcagaactcaaaagttaacatccttaatctcttcaaacacggttgttcatagcatatggaaacgaggatgttgcggctttcgattcaacgagtgaggaagttgaactttctgaggcctcagatctctgctttgggaaggtcccatttgtcaactgctgctgaaccatcttccagtaagagcaatccacctagggttccaaatcttattgggggcagttttgttgactcaaaagcatcaactgtcattgatgttataaacccggcaacccaagaagttgtttcacaagttcctttgtcgacgcatgaagagtttaaggcagctgtatctgcagcaaaggaagcatttccatcatggcgtaacactccaattacaacacgccaacgtgttatgttgaagcttcaagagcttatacgcagagatatggataaacttgctttgaatgtgaccactgaacaaggaaagacattgaaagatgcacaaggagatgtatttcgtggtttaggtggtggaacatgcttgtggaatggctactctacaaatgggggagtatgtttccaatgtatcacatggaattgatacttacagcattagagaaccacttggtgtttgcgctggtatttgtcctttcaactttcctgcaatgattcccttgtggatgttccctatggctgttacctgcggtaatacctttgttctaaaaccatcagagaaagacccaggtgcttctgtaatgcttgcagaattggcattggaggctggtttgcctgagggtgtcttaaatatagttcatggaacccatgatattgtgaatgctatttgtgatgatgaaaacatcaaagccatatcttttgttggttcaaatgttgctggaatgcacatatattcaagagcagcagctaaagggaaacgtgttcagtctaacatgggagccaaaaatcatgcgattgtcatgccagatgcaaatgttgatgctactcttaatgctttagttgcttctggttttggtgctgctggacaaaggtgtatggctctcagcacagttgtttttgttggtggctcaaaaccatgggaggataaacttttagagcgtgccaaagctcttaaagtaaatgccggaactgaacctgatacagaccttggtccggtgatcagcaagcaggcaaaggagagaatacacagattagttcaatctggggttgaaagtggtgccagactactgcttgatggaagaaatatagtggtcccaggatatgaatctggcaattttattggtccaaccatcttatcagatatcaatgccaacatggagtgctacaaggaggaaatttttggcccagttcttcttttcatggaggctgatagcttggaagaagccataaacattatcaacagtaacaagtacggaaatggtgcttctatatttactacatctggtgttgctgcaaggaaatttcagactgagatagaggctggacaggttggcatcaatgtccccattccagttcctttgcccttcttctcatttaccggcaacaaggcatcgtttgccggtgatctcaacttctatggcaaggcaggggttaacttctatacacagattaagacaataacacaacaatggaaggattcaactggtggtagcaagattaacttggcaatgccaacctctcaaaaataatgttgatagccagagcgtgtaataaggctgtttctgaagtctttgttctcttgaaaaaaatgtcaaaggtcacctgctatgctttgttttgaaacctttctcttttctttttcctgatcttatctgtctcttgtgtctccacgtggactatccaattctttttgcttaaaaaaa

SEQ ID NO: 5383 - DNA, 1353 bp, Glycine max
ggctcgagtatgtttccaatgtatcacatggaattgatacctgctgcgttgcccccccccccggtgtttgtgctggtatttgtcctttcaactttcctgcaatgattcccttgtggatgtttcctatggctattacctgtggtaatacctttgttctaaaaccatcagagaaagacccaggtgcttctgtaatgcttgcagaattggcattggaggctggtttgcctgagggtgtcttaaatatagttcatggaacccatgatattgtgaatgctatttgtgatgatgacgacatcaaagccatatcctttgttggttcaaatgttgccggaatgcacatatattcaagagcagcagctaaagggaaacgcgttcagtctaacatgggagccaaaaatcatgcgattgtcatggcagatgcaaatgttgatgctactcttaatgctttagttgctgctggttttggtgctgctggacaaaggtgtatggctctcagtacagttgtttttgttggaggctcaaaaccatgggaggataaacttttagagcatgccaaagctcttaaagtaaatgccggaactgaacctgatacagatcttggtccggtgatcagcaagcaggcaaaggagagaatacacagattagttcaatctggggttgaaagtggtgccagactactgcttgatggaagaaatatagtggtcccaggatatgaatctggcaattttattggtccaaccatcttatcagatatcaatgccaacatggaggctgatcccagttcttggaagaagccataaacattatcaacagtaacaagtacggaaatggtgcttctatatttactacatctggtgttgctgcaaggaaatttcagactgagatagaggctggacaggttggcatcaatgtccccattccagttcctttgcccttcttctcatttaccggcaacaaggcatcgtttgccggtgatctcaacttctatggcaaggcaggggttaacttctatacacagattaagacaataacacaacaatggaaggattcaactggtggtagcaagattaacttggcaatgccaacctctcaaaaataatgttgatagccagagcgtgtaataaggctgtttctgaagtctttgttctcttgaaaaaaatgtcaaaggtcacctgctatgctttgttttgaaacctttctcttttctttttcctgatcttatctgtctcttgtgtctccacgtggacaatacaattctttttgcttaattttctaaagtcaaggtttacgtggagcctaatccattaattccatatccatccacatgaaatggttttaatggaggaacttaat

SEQ ID NO: 5384 - DNA, 1011 bp, Glycine max
gaggaagcaggaagccgacgtttgaggaaaatatataaagggcggccgctcggggcgggccggattaaaacccaaaacacaacacggcactgagttattagtaattgtgttgtgttgtgttgagcagagagaaggatcaagaaaggataagaagaaagagggaatagggttagggttagggttagggttaggttgaggatgccgaagaacaagggaaagggaggtaagaacaggaagaggggaaagaacgaggcggacgacgagaagcgagagctggtgttcaaggaggacgggcaggagtacgcgcaggtgctccggatgctggggaacgggcggtgcgaggcgatgtgcatcgacgggacgaagaggctctgccacatccgcgggaagatgcacaagaaggtgtggatcgccgccggagacatcatcctggttggactcagggactaccaggacgacaaggctgacgtcatcctcaagtacatgcccgacgaggccaggctcctcaaggcctacggcgagctccccgacaccactcgcctcaacgagggcatcggcgccggcttggacgaggaggacgacgccaccgccaacgactacatcgagttcgaggatgaggatattgataaaatctaatcaccctcgcaatcgcaattatcattcatatctgtctctgtctgtctctagtagtatttcgctctctgcttgtttgcaactccccgtgttggatttcattttataattgtgcactattattcaataactcagatatttccgattctcgtctcatgccatgccattttgtgtccttatgattgtgctactatgcatcctgtttaattagatattagtctattgttagttccaagtataattgggggaaaattgaagggattcgtcttcttttttctttttttgcattgtgagtaatcatggacaaatttggccgcaaaaaaaaaaaaaaaaaaaaaaaaacccaagcgcgccgctctagaggatccaagcttgcgt

SEQ ID NO: 5385 - DNA, 857 bp, Glycine max
acggtccattgaaacccacccctaattcgtattccccgcccctccccccgccgggccgggcaccccaatcgaccctactttccctacgaaagcaaattcttcaatttaaacacagaaacaaaatcaccaccttcaaagtcttctctctcgagaatcatcgaataaaactagggtttccgatcgtcgtcgaggagaatgccgaagaacaagggaaagggaggaaagaaccggaagcgcgggaagaacgaggcggacgacgagaagcgggagcttgtgttcaaggaggacggccaggagtacgcgcaggtgctccggatgctggggaacggccgctgcgaggcgatgtgcatcgacggcaccaagcgcctctgccacatccgcggcaagatgcacaagaaggtctggatcgccgccggcgacatcatcctcgtcggcctccgcgactaccaggacgacaaggccgacgtcatcctcaagtacatgcccgacgaggccaggctcctcaaggcctacggcgagcttcctgacagcaccaggctcaacgagggcatcggcgctggccttgatgaggaggaggatggggccggaaatgattatatcgagttcgaggatgaggatattgataagatttgaaggaagagaaaaaaaagttagggttttggttttggtttgtgttgctgatgcctctttttttgtttttgtttttgtttgagattatatatgaaattgttatgatttggtgatggattcactttatggtatgtgatggtgttgcctctgtgtactgtggcatatggatatggtgaatgaattttaatgaaataagagccggttatatggtgttatagttactaaaa

SEQ ID NO: 5386 - DNA, 788 bp, Glycine max
cccacgcgtccgacgtcgcaacgcaaagcaaattgttgtccatttttgaaacagagaaacaaaaaaaaaaaaaaaaactcttccaaagtagaggcagagaatctgaaagctagggtttgggatgccgaagaacaagggaaagggaggaaagaaccggaagcgcggtaagaacgaggcggacgacgagaagcgggagctggtattcaaggaggacggacaggaatacgcgcaggttctccgaatgctcggaaacggtcgctgcgaagcgatgtgcatcgacggcaccaagcgcctctgccacatccgcggcaagatgcacaagaaggtctggatcgccgccggcgacatcatcctcgtcggcctccgcgactaccaggacgacaaggctgacgtcatcctcaagtacatgcccgatgaggcccgcctcctcaaggcctacggcgagcttcccgacaccaccaggctcaacgagggcatcggcgccggccttgatgaggaggaggacggttccgggaatgattatattgagttcgaggatgaggatattgataagatttgaaacaaatacaaataattagggttttggttttggttgctgttgaccttgctctttccttttttttgcttttttgtttttgcttgagattctataaaaaattgttatcatgtggtgatgaattaactgtatgttcttttttatgctgttgtctccctgtactgtggcacatggatatggtgaatggatttcaatgaattaagagccggttatatggtgttatagttccggg

SEQ ID NO: 5387 - DNA, 762 bp, Glycine max
accagaaaccgcagaccgcaccaccaccgctccccatctcgatctaaagccgagggtttcgtccagctccgtcgccgcgacccaagccagagccagccccaccccagccagccagccatgccgaagaacaagggtaagggaggcaagaaccgcaagaggggcaagaacgaggccgacgacgacaagcgcgagctggtgttcaaggaggacgggcaggagtacgcgcaggtgacgcggatgctcggcaacgggcgctgcgaggccatctgcgtcgacggcaccaagcgcctctgccacatccggggcaagatgcacaagaaggtctggatcgccgccggggacatcgtcctcgtcggcctccgcgactaccaggacgacaaggccgacgtcatcctcaagtacatgaacgacgaggcccgcctgctcaaggcctacggggagctccccgacacgctccgcctcaacgagggcgtcgacgtcgacggccccgaggagggcgagggcgacagcgactacatccagttcgaggacgaggacatcgacaagatctaagcttttttcccctcctcctccctcgctcgatatactttgtgttctattctgttctaatagcgtccgtgtctgtctgtgtcggtcggtcggtgggctgttgtggattgatggatttggtaacgagaaatcgttgtgatttgaggtgcttaaataattgtcggattatagtgttcgtcgtattattatgctttgcaacaagccatctgatga

SEQ ID NO: 5388 - DNA, 683 bp, Glycine max
gctataatgtgcggcgctcgcgccccccgctcaaaccattttggagggagagaaaaaaaagggggggaaatttcaatggcgtcaagggtttctctgaaggcgaagggtaagagttcaaagggatcgaaggccgcggaagatcgatctgcgagcgagtgcctgaaggagtggacgacatgggcaatgcgaaaagcgaaggtcatcactcactatggtttcatccctttggtcatcatcatcggtatgaactctgaccccaagcccccactttcccagcttctcagccccgtctgatctacctcttcatttcttccaccatcaacgcgacctcgtttttttcttttcttttgccccctttctacatttgtaagtttctttatggatcaattttcacttgcacatctcatgtggcatggtgtgttcaaagtcgattagcttgtctgtgtgtttggatagttttgaaagacgcggtagtaaataatccgttttttttataattacaatgttcgaatatcgttcccgagttttggtttgtttatcttgatggattgtgatttttatgattttgatggatggtaatgggttgatgaatggatgaatgaaatgtgattttgggttgctctgttttttcaaaaaaaaaaaaccgctcccaccgctctacaccccctgttcccccatccttg

SEQ ID NO: 5389 - DNA, 606 bp, Glycine max
aatttacggctgcgagaagacgacagaagaccgttttggagggagagaaagaaaaaaggggaatttcaatggcgtcaagggtttctctgaaggcgaaggggaagagttcaaagggatcgaaggctgcggaagatcgatccgcgagcgagtgcctgaaggagtggacgacatgggcgatgcgaaaagcgaaggtcatcactcactacggtttcatccctttggtcatcgtcatcggtatgaactctgaccccaagcccccactttcccagcttctcagccccgtctgatccacctcttcaattcttccaccatcaacgcgacgtcgttctttttttcctcttattttgccccctttctacatttgtaagtttctttatggatcaattttcacttgcacatctcatgtggcatggtgtgttcaaagtggattagcttgtctgtttttggataattttggaagacgcagtagtaaataatccgttttttttataattattacaatgttcaaaaaaaaaattcctgcgttttgggttgtttatcttgacgaattgtgatttttatgattttgatgaatggatgaaatgtgattttgggttgctctgttaa

SEQ ID NO: 5390 - DNA, 1437 bp, Glycine max
taatctaagatctgtgtgtgtagttggaaaattgaatttttatatggcagctacgatgaatttctacaacgaaacatcacaacaagttcagtcagatccattcagaggagagctcatggaagttctagaaccttttatgaaaacttgtccttcctcaactccctctattctctcctcagattcaccatcaccttcctcttactctcctttactacctccacaccccagtttctccacatacaccccctctgcctacttattccaaaaccaacaacccttaataggctttgagcaacaaccaagttcccttctcgggctcaaccacctaagcacgtctcagatttcccagatccaagcccaagcccaagcccagaactcgctctctcttaatttcttgggccccaagcccgttcctatgaagcacgttggtgggccggcgaagcccacgaagctgtaccggggcgtgaggcagaggcattgggggaagtgggtggcggagataaggctaccgaagaaccgaaccaggctttggctcggaaccttcgacacagccgaggaagccgctttggcttacgacaaagccgcgtacaggctccgaggcgacttggcgaggctgaacttcccgaacctgaaaggctcgtgccccggcgaggagtacaagcctatgcaggctgcggtggacgctaagctcgacgcaatctgcgcgaacttggcggaaatgcagaagcaagggaagaacgagaagggtgccaggtcggggaagaagtcgaagcaaggtccgaacctggaggcgaagcccgaacctgaagcttcgggttccggtgctgctgctctgtctcctgaaagtgagggttctgcggattcttctgctttgtctgatcttacctttgatgtaaccgagccgcaatgggaggatgcttcagcacattttaatttgcaaaagtttccttcttatgagatcgattgggattctctctgaagactctttgtttttttatttttatgtctagtcttgtgggtaattaataatttagttataattaggattgctcttgtggctgctgcaattgagtttttgaagattgcagtgctacttgtaggatttggattatgttagtcttttttctttttcttttttttttttaaatttgcttattggctattcgatggtcaatatgatgtaaatctctctaccttggtcagctggttttttttttcttgcttggccatggagaatgattccgggttaggtctttgtctatgttttagtgttcgtccaagtactattattgatgtaattcaattctatttgtatctcaatttatgaatgtatttgtatttcagcttacatattgtactagtttgtttcacattttggaccatgtggtagttgtgtttggttcttgtatgaacaatcgattttattttctttgtggc

SEQ ID NO: 5391 - DNA, 1155 bp, Glycine max
gcatgctgacagctggcaccctcactcactgagtacccactgtcccatcccacccaagcttgatatctaaccaattaccatcatcagagccatccactgaatggtgacctgcgtagaagtgtgagttgattgagaggcaatcatttattcaacttcgcatttctctcgcatccactgaaccaagattcctattccaaaatgaccgctcctacttcttccagcctgtggctggctccaaaccccagcaaaagatggggcgaactcttcttccttctctacacccccttctggctcaccctttgtctcggcattgttattcccttcaatctttacgagaaattcacagagctggagtatttgctcatcggattggtctcggctgttcctgctttcgtcgttccattgctgctcgttggaaaggttgacagaagcatttcttggaaggatcgttattgggtcaaggccagtctctggataataatcttcagttatgttgggaattatttctggacacattacttttttacagttcttggtgcatcttatacctttccatcatggaaaatgaacaatgtaccacacacaacattcctgctcacccatgtttgcttcctgttttaccatgtttcatcgaacatgacactgcgtcgattgcggcattttattgctgatttgccagaaaaacttaaatgggctactgaagctgcatggattcttgctcttgcttattttatcgcatacctggagacactggctatttccaatttcccttattatcaattcgtggatcgcgactctatgtataaagttggatctttgttttatgccatctactttattgtgagcttcccaatgtttttaaggatagatgagaaacctggcgataaatgccacttgcctagagtggctgctgatgctttgggagctgcaatgctggtcacaataatacttgatttgctggcgcatctttctgggacctattggtccgatagcagacacaaaacagtgccctcaagtaggattaccctggtttacaggacatgccaatctcacctgagacgtatgcaacgaattgtggttttcattaccctccaatgccacctaaacatgcaaattgccatgggcaagaatctcccgaagaacccaaacttggac

SEQ ID NO: 5392 - DNA, 1910 bp, Glycine max
  misc_feature (1908)..(1908): n is a, c, g, or t
cacgccgccgcagcgacgtacccccgcccccgatgtaagtatattgctgccgctatctcttccctctctccgcgctcactcttcatcgtttttaggaatatcacgattttcgtttcgccaattcgtgaaatcgaaagattcccacagaattgtacgaattattgttcatttttttgtctctactgtcgtgctccaacttggtaaactagaagttcatttattgttttcattcttcaatgggggatgctgagaatgcccttccacctacaaagaaaagggctgctggaagggagctcactcgagacactcccattgatgatgaggaagatgcccccgagcttgagactggcactttcaagagagccagtgaagaggttctggcaaccagaaggatggtcacaattcgtcgcaaacagactaattctgctccttctgcaaatccttttgctggaatacgcctggttgctcccactgaatcatgtgataatcctgctgagattactactgaagtacaatcagctggtgagaacgctgtttcacatgattcaaaaagtgatgaaggtatagctaaggattccaagaaagctgaagatgggaaaactaagcagtcagagttcaaatctgatgaggcagaggataaagctactgaaggtaaggatgctgcagaagaaagcaatgcaaacaaagagcatactgaagaaaaggaaagttctgatgacaaatctgaggtagataaagaacaaaaaaaggatgtcactgaaagtggaaatgaggctaagaaggatgctacacacaacgagagtgccagcaagttagataaagaacaaactggggatggcaaggattctgaaaacgatgatgataagaatgagaacactgacaatgtggataagaaggacagcaaagctgaaagtgcagagccaagtgctgaaggtggccatttgaagtcatttcaactgctctcaagtagccaaaatgcctttacaggtcttgctggtactggattttctaattcctcattttcctttggttccatttcaaatgaagggtctggttctatttttggactgaaaagtgataagccttttggtcttggtttatctaacaatggaagttctcttttgggggcatctggggcctctgctgtttctaagaatgagggaagtggtttggcaatgcaggaggttgttgttgaaaccggggaagaaaatgagaaagtggtttttaatgcagactcagtgttgtttgagtttgctgatggaagttggaaggaacgtggaaagggagaactgaaggttaatgtttccagtgaaaccaaaaaagccagacttctaatgaggtctaagggaaattttagattgattttgaatgcacgtctctaccctgatatgaagctcacaaatatggacaagaagggtgttacttttgcctgcatcaatagtgccagcgaagggaaaggtggtctttcaacatttgccttgaagttcaaggacggctccatagtggaggagtttaaagccactgtcatggaacacaaaggtgagacatccacagttctcaagacccctgaaaattctccaaaggcttctgatgattgagagacactccttactcatgtctcacaatgtctgtctcgttagatgttccttcacaaagataatttgctattccgagttcgtttgcccttgtgtggcatagtctattatacttaaattagtgtacttgaatttgagtgaagtctccaactgataatggaacttaattttggatttagactgcacagttttaacgcttgaaccctgaaacgttcaatagggctgttatttctggagcctggaattctctctattttcaaaatgacattgaactttgctattgtgatgttcccgtgacaagatcactttttanct

SEQ ID NO: 5393 - DNA, 868 bp, Glycine max
agtgataagccttttggtcttggtttatctaccaatggaagttctcttttgggggcatctggggcctctgctatttctaagaatgagggaagtggtttagcaatgcaggaggttatagttgaaaccggggaggaaaatgagaaagtggtttttaatgcagactcagtattgtttgagtttgctgatggaagttggaaggaacgtggaaagggagaactgaaggttaatgttgccagtgaaaccaaaaaagccagacttcttatgaggtcaaagggaaattatagattgattttgaatgcacgactttaccctgatatgaagctcacaaatatggacaagaagggtgttacttttgcctgcctcaatagtgccagcgaagggaaaggtggtctttcaacatttgccttgaagttcaaggatggctccatagtggaggaatttaaagccgctgttatggaacacaaaggtgagacatccacagttcttaagacccctgaaaattctccaaaggcttctgatgattgatagacactccttactcatgcctcataaagtctgtcttcacaaagataatttgctattctgagttcgtttgcccttgtgtggcatagtctattatagtcaaattagtgtacttgaatttgagtcaagtctccaactgataatggaacttaattttggatttagactctacacagttttaacgcttgaaccctgaaacgttcaatagtgctgttatttcttgagcctggaattttgtcaaatttcaaaatgacatatattgaactttgctattgtgatgttaccgtgacaagatcactttttaattgaaataaaaactactttattttagcaaaaaaaaaaaaag

SEQ ID NO: 5394 - DNA, 1048 bp, Glycine max
ggaaaaaaacattgtaagcgctgtaacacgcgtccagcaggtttcggaggcttttggggtagccggcgagacacagtggattccttaattctccatggatatggggaagaaagaaggtgaagcccccgtgttgtggttcgaaacctctgactctgtctgttgccaacaccagtttgaacccgatggtcgactctccgtagtgattgttgatgattccaggcccctataccaaaggatggctggatctttcatgaataaatttttcccctcaggatatccgtacagtgtgaatgaaggctatcttagatacacgcagtttcgagctttgcaacatgttaccagtgcagcactatcggtgctatcaactcagtccttgctattcgctgcagggttgcggcccactcctgcgcaagcaactgctgttagttggattttaaaggatggaatgcaacatgtagggaagctaatatgtagcaattggggtgctagaatggattctgaacctaaacgttggagactactagctgatgtgctctatgatattggcattggcttggaagtgctttctccattatgcccgcatctttttcttgaaatggcaggcttaggaaattttgcaaaggggatggctgttgttgcagcaagagcaacaaggttgcctatatattcttcatttgctaaagaaggaaatctcagcgacctatttgctaaaggagaggccttttcaactctctttaatgttgttggaattggagtaggaattcaattagcatctaccatttgtgcatcaatacagggaaagttggttgcgggtcctctcctttcaattatacatttatacagtgtgtctgaagaaatgagagcaactcctatcaatacgttgaatccacgaagaactgcaatggttgtggctgattttcttcaagcacgaattgtatcaagccctgctgatttgagatatcgagaaaatctgctgttcaatggtgcagtcaaagaagacactggatccgttagcagtgggaaagatgtgccacaggtcattatgcct

SEQ ID NO: 5395 - DNA, 1669 bp, Glycine max
gcctcctggggtttatacattgcaggacttgagagcatatgggaaggagaaggggtggtgtccatactatttagcacgacatatggtgcagtttgccaacgtggtggtgtatagctatcagtatttgcttgatccgaaggtggctggaataatatctaaagaaatgcagaaagagtcagttgttgtgtttgatgaagacggctgcgagaagacgacagaaggggaagcacttagtgtgagtgtgaggaggcagactattgaaggtgctagaagaaatcttaataggatgcgtcaggaaattgacaagttcaaggccactgatgcaggtagactccgtgctgaatacaacaggcttgtcgaaggtttggcactaagaggagacctgcctgctactgatgcctggcttgcaaatccggccttgcctgatgatatactaaaggaggctgtacctggaaatattcgccgggctgagcattttattcatgttttgcgtagattagttcaataccttgaagggcgcttggatactgagaatgtggagaaggagagccctgttagctttgttgtttctattcttaaccatgccggaattgaccaataagcactaaagttctgttatgatcgccttcattctttgatgatgacattggaaattacagacaccgatgagttccttcatatccaaactatatgtgattttgccacccttgtaggaacatatgctcgtggtttttctatatattcttcatttgccaaagaaggaaatctcagtgacctatttgctaaaggagaggctttttcaactctctttaatgttattggaattggagttggaattcaattagcatctaccatctgtgcatcaatgcagggaaagttggttgcgggtcctctcctttcaattatacatttatacagtgtgtctgaagaaatgagagcaactcctatcaatacgttgaatccacgaagaactgcaatggttgtggctgattttctcaaggcaggaattgtatcgagccctgctgatttgagatatcgagataatctgctgttcaatgtgcaagtcaaagaagacactggaaacgtaagagtggggaagaatgtgcacaaggtcattaagccttccaggcttcttgaattaaaacaagtgttccccgaggagaaatttctcttaaattttgggaataaatgcattgacatggtattggaacaagatgctagtggtgaagatgcactgagagggtggctagttgctgcatatgctgcacgaactgagagttcctctcatgagctcagtgctactagtgtcctgcatgaggcttatgagaaaatgaatggtgtctttcctgtattcttaagggaattacagaacaaagggtggcacactgatcggtttttggatggaactgggagccgtttttcattctagtgcttgtataaatttaatgttgctttaaataggttttatccattctctgagaattttttatgagctatgggtggagtaaatccaatggttcacattacctgtgcttaattgtgtattttacctattatttttcaaaaactaatggtagacataccttccagaaacccgatgaattcttgtagtgaatgaactaaattcaatttcttttttaaaagtttgatgattaaattcatggatatg

SEQ ID NO: 5396 - DNA, 1216 bp, Glycine max
  misc_feature (48)..(48): n is a, c, g, or t
  misc_feature (57)..(57): n is a, c, g, or t
  misc_feature (77)..(78): n is a, c, g, or t
  misc_feature (94)..(95): n is a, c, g, or t
attccttggaacttccctagcaccatgtttgttgcgaaggttagtccnttccttggnctgctggttgcacaatggtnncctcaagcctgctgannacaaacacctctctcggctacgtaggcccccccccccttgttttatgctcatcttgctaagctggctggaattccggatggagtgcttaatgtggtacctggatttggccaaactgcaggtgttgcaataagcttacacatggacattgataaggtaagctttacgggttcgacagaagtggggcgtgaagtaatgcgtgctgcagctaatagtaatttgaaaccagtttcacttgaactaggaggcaagtcacccgtcatagtttttgatgatgctgatgtagataaagctgctgaacttgctctcctgggcatcctatttaataagggagaaatttgtgttgcgggctcccgtgtgttggttcaagaaggaatctatgatgaatttgagaagaaattggtggagaaagcaaaagcttgggtggttggtgatccttttgatcctaaagttcaacaagggcctcaggttgacaagaagcaatttgaaaagattctttcctatatcgagcatggaaagaaagaaggtgcaacccttttgacagggggcaaaagagtgggcaacaagggttactacattgagcctacaattttctctaatgttaaggaggacatgcttatagtacaagatgaaatatttggccctgtgatggctttgatgaagtttaagactattgaagatgcaattaagattgccaacaatacaaggtatggcctagcatcaggcattgtgacaaagagtttggacacagccaacactgtgtcaaggtccattcgtgcaggcattgtttggatcaactgttattttgcctttggggatgacattccttatggggggtacaagatgagtggatttggaagagattttggaatggaagccctacacaagtatcttcaagttaaatctgttgtaactcccatttacaattctccctggctttgattttttttatttttttttgtgttgtgtggatataaacaatggtgaactatagaagagcttccttaaacgtatacttcatcaaattaataagtgtttaaatacatttttagtcattgtaatttaatatttttttatttttcatctttataaaattattttttattttatttttaggtcttgt

SEQ ID NO: 5397 - DNA, 1735 bp, Glycine max
cccgcgtccgtgaagactgaagttataaccggtgaagttggttgtcctcacgccattcattattgtaccaggctcttcatcaatgaactccaatggttaccctgcttcctccttcaaaatccccaccgtcaagttcaccaagctcttcatcaatggacattttgttgattcactttcaggaggagaatttgagacaatagacccaagaaccggagaggtgattgcaaggattgcagagggaaccaaagaagacattgaccttgccgtcaaagcgtctcgtctggctttcgaccatggtccatggcctcgtatgcctgccgtagaaagagcaagaattatgatgaaatgggctgacctaattgaccaacacgtagaagaaattgcagcactggatgccattgatgctggaaagttgtaccatatgcttaaggctattgaaattcctgcaacagcaaatactatacgttattatgctggtgctgctgataaaattcatggagaggtattaaagccggcacgggagttccatgcattactttacttgaaccagttggtgttgtgggacatatcattccttggaatttccctagcatcatgtttgtctccaaggttagcccttgcttggctgctggttgcacaatggtcctcaagcctgctgaacaaacacctctttcagctttgttttatgctcatctagctaaactggctggaattccagatggagtgctcaatgtagtccccggatttggcgcaactgcaggtgctgcaatatgctcagacatggacattgataaggtcagttttacaggttcaacagaagtagggcgtgaagtaatgcgtgctgcagctaacagtaatttgaaaccagtttcacttgaactaggaggcaagtcaccattcataatttttgatgatgcagatctagataaagcggttgagcttgctctcatggccgtagtatataacaagggagaagtttgtgctgcaggctcccgcgtatttgttcaggaagggatctatgatgaatttgagaagaggttggtggagaaggcaaaagcttgggttgttggggatccctttgatcctaatgttcagcaagggcctcaggttgacaaaaagcaatttgaaaaaattctttcctacatcgagcatggaaaaagagaaggggccacccttttgacagggggcaaaagagtgggtaacaagggttactacattgagccaacaattttctctaatgttaaggaggacatgcttatagcacaagatgaaatattcggtcccgtgatagcactgatgaagtttaagacaattgaggaagcaattaaaagtgctaacaacagcagatatggcctagtagcaggtgttgtgaccaagagcttggacacagcaaacacaatgtcaaggtcaattcgtgcaggggttgtttggatcaactgttattttgccttcgaaaatgacattccttatggaggatgtaagatgagtggatttggaaaagattctggattggaagccctacacaagtacctacatgttaaatccgttgtaacacccatttacaattctccttggctttgaattcctgtgtcttgtgtgtgtgaatgttgtaaactatactatccaagacacgagtttctatcaatatcctttgtctaagcaaataaaattggggacatctttattttgcatgcaaccaaaaaaaaaaaaaaaaaagcttatcgataccgtcgac

SEQ ID NO: 5398 - DNA, 1612 bp, Glycine max
ctcgtgagtcgtatgtgagatgtaccttttctctgtcgactggttgttcttgtctcggagttaagtgtgcgtaactctgtatatataaaagaggtcccattctcactttttcgaaaaacacgtttgcctttgatcttcttgtctctactgcttttatttgcagacacccaattaacgatggctgctctctccaacggccacggctcttccttcttcaagatgcccccaatcaagttcacaaagctcttcatcaatggggaatttgttgattccctttcagggagggagtttgaaacaagagaccctaggacaggggaggtgattacaagaatcgcagagggagcaaaagaagacgttgatgttgctgtcaaagcggcacgtgcggctttcgactatggtccatggccccgtatgcccggcgctgaaagagcaaaaattatgatgaaatgggcagacttagttgatcagaacattgaggaaatagcagcattggatgccattgatgctggaaagttgtaccattggtgcaaggctgttgatattcctgctgcagcaagtactatccgttactatgcaggtgctgcagataaaattcatggagaggtcttaaaagcttctagggagttccatgcatatactttgttagaaccaattggtgttgtgggacacattattccgtggaacttccccagcaccatgtttgttgccaaggttagtccttccttggctgctggttgcacaatggtcctcaagcctgctgaacaaacacctctctcggccttgttttatgctcatcttgctaagctggctggaattccagatggagtgcttaatgtggtacctggatttggccaaactgcaggtgttgcaataagcttacacatggacattgataaggtaagctttacgggttcgacagaagtggggcgtgaagtaatgcgtgctgcagctaatagtaatttgaaaccagtttcacttgaactaggaggcaagtcacccgtcatagtttttgatgatgctgatgtagataaagctgctgaacttgctctcctgggcatcctatttaataagggagaaatttgtgttgcgggctcccgtgtgttggttcaagaaggaatctatgatgaatttgagaagaaattggtggagaaagcaaaagcttgggtggttggtgatccttttgatcctaaagttcaacaagggcctcaggttgacaagttcagcagcaaatcagcatcagcatacaaaaagacacaaacaaatggggtgacattgttttggacaccataatacacacatttttttgaaaagaaaaaggttttagagagaggagaaattatcaactacactagacgccagcaagttgtagaggcaaaattcaaaggtcaacaatttgagaccaatgagaggcttccaaaggaattccattcttttattaattattattattattaattatgtaaaaaaaaaaaaaaaagctagcccactaactggtttatccaatgtccaaaggaataatttattttctttttcaacttacaccaaagagtgacactttaatttgtccacattctatccgaggtggttactcccctgtataggaaccccctgg

SEQ ID NO: 5399 - DNA, 1323 bp, Glycine max
tcataaatgataaatgtataagccgtaataaatgaatgacagagacaattggttgtagctgcttgtcatttgattgtaggagtactactctagatataggaaaagctggcataaaagtcttgcctttgttttgtactctagatgggttgggttgggttgtcattgttggcatagcaacaagttgacactaatctaatcacctcctctgcctctctttgtattctacgatggacacgcgcggccacgatgaggaggagccaccgaaacctgtggttctgatcacaggatgttccacgggagggataggccacgcgcttgcacgcgccttcgctgagaagaagtgcagggtggtggccaccagcaggtcgcggtcgagcatggcggagctggaacacgaccaaaggttctttttggaagagttggatgttcagtccgatgagagcgtgcgtaaggtggttgatgctgttgtcgacaagtacggtcgcatcgacgtgctcgttaacaacgccggtgttcagtgtgtgggcccactcgccgaggctcctctctctgccatccaaaacactttcgacaccaatgtcttcggttccttgagaatggttcaggcggttgttcctcatatggcaactaagaaaaaggggaagattgtcaatattggtagtgttgctgccttggcctctggaccttggtcaggagcttatacagcttctaaagctgctcttcatgctttgacagatacattaagactggaacttggacattttggaattgatgttgtcaatattgtccccggagctatcaaatcaaacattggagattctgccatagccagctacaaccgcatgccagaatggaaattattcaagccttttgaagcagcaatccgagatagagcttatttttcgcagaagtccaaaacaacccctacagatgagtttgctataagcactgtagctgctgtccttaaggagaaaccacctgcatggttcacctatgggcattactctactgtcatggctatcatgtatcatttaccgatctctgttagagattttgttttgaagaaagcaatgaaaggctgagctatagttaggtggtgcatctatctttccacatggacaccttataaagcatttactttacctttagcaacagaagagatattttctatttagttccattttatcatattttagtgaacaaagtttttgaataaaacttgaccaaactgaggacatagtttcttgagaatgtgtctgaaactttcccattctttgaacatagaccagctatactttttttctgcatttgttagtttttcat

SEQ ID NO: 5400 - DNA, 1842 bp, Glycine max
ctggatcattggtatcacttttcttactattggtttccacttcccagtgaccacaaaacaacactctgcacgttgttcccaccaccaccataccttcttcactcactctcgggagcgtcgaaaagaaaaatgttcacattagctacctcttcccaagtactgttaagacttcagccaccgcactcgatggagccaatggcccactcactcaccctaactccgtttcccgccaccgcttcctccttccgccaccgtcacctctacgccgttaaagccctaactcttcgctccgtcactcgccgtttaaaacccgcactcgttagagcctgtgatcggtcacaacagatgggtggtaatggaagcaaagagacgaagggattgagttgggtggaacccattttgacatttgctaggagaaacattctacccttggctctggttagtgcagtgacattaggattaacatatcctagtattggttgtgttgctgataaatacggtgtgtcaaaaattggtccatttggtatttttgttatctcaggattgatgttgcgtagtgaagaaatcggtgcagcagtagaagcatggcctgttggactctttgggcttgtgtctattttatttcttacaccatacttttctagggtaatattgcaaattcagctccaaccccaggaatttattacagggctggctatatttgcctgtatgccaactacattatcaagtggtgttgcacttacccagcttgctgggggaaattctgcacttgctcttgcaatgactgtgatatctaacatgttaggaatattgattattccactatccatcacaaaatttgtagctgctggagttggagtgactctacctaccaagcagttatttaaaagtcttgttctgaccatattaatcccccttattttgggaaaggttctacgtgaatcttttaaaggtgtggctgactttgttgacaaaaaccgcaagcttttcacagtgatcagtgcacttttccttagcctagtaccttggacacaagtgagtaggtcaaggtcattgctgttaatggtgaagcccagtgtttttcttgtagctattggactgggaacgcttcttcatctgtctttattggtatttaatatccttgctgtctggggtctttcagttatctccggtggtaaaaattcaattttttcccgggaacaaaatgccagtgcactcgtactagtagcaagccagaaaacattacctgtaatggtagcagtgatagagccacttcgaggtgcatttggagaatctgggttactggttcttccttgtgttgcagcacatctcaaccagattattcttgacacttttatcgttaacttcttgcgtccccaagacaattccaacaatgtcaaggtggcttaatagatgaaatggtggccatcatagatggttatggcatatcatgaaagctcatcaagctgcatcttaagaaatgttgagatgaaggatatttagaaatttgcttggtttcatttcccattgtacaacttacctaaatataatatgctcttgtacattgttcagcctggcagtttgcctgagcatataggttcagttctttacgtttctttcggggtgtattacctagattttcaatttttatattcctccattgttccagtgttctttctttagattaaatagttctgtgtattcaatggaattgataggcatttcatattcacttattgaggagtgaggattctttaacacgctatcctgacaatgtactgggctagctagcagttttgcttgtagtttatgcagtgaattcttctgtttgtattcaaaaaa

SEQ ID NO: 5401 - DNA, 1072 bp, Glycine max
tcaactttaccaatcccgccatgcacaaattaacccccacccaattttacactccctccctcctcccatacccatcatcttataatacacaaaggttttgaatatcaaaatacatgacaattcacaacaacaaaatgacttcaattgccaccaatagcactgttgtcgccactagaatgctagttgtgatcactttagtccttgcactagtatgttgtgtcacatccgcgcaatcaccggcagcagcaccagccccggagagcaacgggtgcttgatggcactaacaaacatgtcagattgcctgacatatgtggaggatgggagtaagttggcaaagcctgacaaagggtgttgccctgagttggcagggttgattgatagcaaccccatttgcttgtgtgagttgctaggaaaacctgactctattggcatcaagattgatttgaacaaagccctcaagcttccttctgtttgtggagtgaccactccccctgttagcacttgttcagctgtgggagtccccgtgtccttgcctccatcaatgagtgaaggttctttgtcaccaggtattgcaccaggagtctccagtccttcaaatacagatgctagtcctgcttctagtcctggtggtccaggcccttcctctgaggaagctgctgccagcccttctcaaaacaaaaatggagtttctgccattcaagcctctgctttgactaatttcatttttggcctttccactctatttgtctccgtattcttctgattttacacattagttctccgtgtcgttattttagtggatctttttatttcctcattatttgtatgttgtgagccaccttttaaaggttttgttgtaattttatgcactgatgcaattgttactgtcattattagtagtgaaccacacactttaatcagggccttcttgattgcattattaagccgagctattcattttttgattttgtactgtattgtttttttcctcccaagtataatgtcctcatgacattgttggataaactgagttcctttgatatagttgctttcaaaaaaaaaaaaaaaaaa

SEQ ID NO: 5402 - DNA, 2049 bp, Glycine max
acacaaaacaaaactgacaaaagaagtgcagttcccaaatggcaataatctttctttcaagctccgcaattcttcttccaagtcttgctttctttctcacattatttaaccttgcaagttccgaatcattcatcggcgtgaactacggacaagtcgctgacaacctgccgccgccgtcggcgacggcgaagctgctccagtcgacggccatcggaaaggtgcgtttgtacggaaccgacccggccataataaaagctctggcgaacacggggatcggaatcgtgatcggagcggcgaacggggacattccggggctagcctcggaccctaacttcgcgaaaacgtgggtgaacaccaacgtcgtaccgtactaccctgccagcaacatcatcctcataaccgtcggcaacgaagtgataacctcgaacgaccaaaacctcgtgaaccagatgctgccggcgatccagaacgtgcagggcgcgctcgacgccgcctcctcgagccgattcggctcgagggtctccaccgtgcacgccatgtcggttctcagggactctgagccaccctccgccggaaggtttcatcccgaatacgacaccgttttgcaggggctgttgtcgtttaacaatgccacgggctcgccctttaccattaacccttacccttactttgcctacagaagcgaccctggcagagctgataaccttgctttttgccttttccagcctaacgctggcagagttgactccaacaccaacctcaagtacatgaacatgtttgatgctcaggtggacgcggttcgatctgcgttggatgctatggggtttaagaatgttgagattgtggttgcggagacagggtggccctacaaaggagacagcaatgaggctggtccaagtcttgagaatgctaaggcttataacggcaatctgattgcccacctgcgatctatggttggaaccccattgatgccagggaaatcagtggacacatacctctttgctttgtacgatgaggacttgaagcctggacctgcttctgagagagcctttggactctacaaccctgatcaatccatgatctatgatgctggcctctccaaacagcaagaaactagtagccccgtgccgacggttgccccgactccggatgtgtcaaaatctccagtgattccagcgccaacagacccgggtcaacaaacacaaaaatctccagtgattccagcgccaataggcccgggtccaacaccaaataaagcagaactcttaattggacatgaagccaccattttgaagtctttaataatgttcacagttctcatcttaatgttgtaacaccaaataaagcagaactcttaattggacatgaagccaccattttgcagtctttaataatgttcacagttctcatcttaatgttgttctagctagtagtggtatttaatataatatgtttcttaatttcattgaagactactccggatgtgtcaaaatctccctctactccaaagccaacagtttcaagtccaaccaaaacaaataatagtgcaacatggtgtgtgccaaaaggaggagtggcagatgcacagttacaagcaaatttggattatgcttgtgggcaagggattgattgtaccgcaattcaacaaggaggggcttgttttgaacctaacactttggtaaaccatgctgcatatgccatgaatctattgtatcaaacagctggacggaatccattgacttgtgatttctcgcaaacagccatgttgtcaacgaataatccaagttacaagagttgtctttatgctggaggaaatgcctaacccagaaaacaagtagataaaggagggcactttttgttgttttaattattctctcttaattgctaagaaatgttctggttcttggagtgttcatgtatggaggaggatcttcttcctctatttgtagtctcaccttttttagtctttatcagaagcaaattgatgctttgtttatgtgtgatctcggaagcgtggtttaggtatgtgtgttgttcaatcatcgtttg

SEQ ID NO: 5403 - DNA, 1938 bp, Glycine max
tcgagtcagctacgtaggcccccccccgtggtatcagttttgtcccttgctcttgttctctgattggcctagccagtagtagccaatttgttggagctggttgggaatggcgtcgaaaccgaaatcaaatggaaattccaaatgcaacaaaggattcgctgacagctatatgctgttgaatcctgaagacgctcatttcttcgatcttgttcatgtgctgtattcccgtaacttgggaaaccgaaaatttgtggacagcaatgctgagggatcttatgagggaagcttccgccaaagatggcttatattcgtctctgtggtgctccagaagcttctgttgctcatcgctaagccactttcgttctttggctcttgcgttgagttcttcatcaacctccttgtcctcaacggtggcttcatcatgatcgttattaacttcctcacaggtcacctggtcgtccccgatcgtaatgcaccaaattatttgtcttgcatcggaaatttggacgcgagagtaaagttggatgccatcacgcgtgatgactgcaggtactatgtttcattagctatgatggcttcaaaggcatcctatgagaatgcagcttaccttaaatctctaataaaaaaccactggaagatggaattcgtgagattttttgattgctggaatgattttcaagaaaaggccacaacccaagtcttgattgttttggacaagcatgagaaccgcgatacttatgtggtagctttccgaggaacggaaccctttgatgcagatgcatggtgcactgaccttgacatctcatggtacgggattcccggcattggaaaaatgcatggtggcttcatgaaagccttagggctacagaaaaatgtggggtggcctaaggagattcaaagggatgaaaatcttcccccgttggcctactatgttattagggacattctaaggaaaggtttgagtgaaaatcctaatgcaaagtttatcattacgggtcatagtttgggtggagcactcgcaatcttgtaccctacgatcatgttcttgcatgatgagaagttgctgattgagaggttggaagggatctacacgtttgggcaaccaagagttggagatgaagcatatgcacagtatatgagacaaaaattgagggaaaattctatcaggtattgcaggtttgtttattgcaatgacatagttccgaggttgccctatgatgataaggacttgctcttcaagcactttgggatctgccttttctttaacaggcgctatgaactcaggattctcgaagaagagccgaataagaactatttctcgccatggtgtgtgatacccatgatgttcaatgctgttttggaactaataaggagctttaccatagcgtacaaaaatggacctcactatagagaaggatggtttctctttagtttcaggttggttggtctgctgattcctggcttacctgctcacggtccacaagattatattaattccactcttctgggatcaattgaaaaacattttaaagcagattgatgtgtccgtatacatgatcattccataccactacgtacatgtgtatggtcatgcagactaaaatttacataatcaagatttttagttttagaaaaaatggtaataacacttgattatgtatcatgtgaagaatagttatgtatcataatgatcatgaataatataacagtttgtcgtcagtacgagttattgtatagtaattaataagctaggtttaaagttgtttcctttggtgcatggatttatcattaatgagatcaatgtgaagtttgtttatttcacggctggaatcgatcgaccaaaattgctaaccagcatttgcttgtgacattcagttggatattattgtcaatttttttgtcaaaaaattcaaaaaaggaaaccaaggctggccgaga

SEQ ID NO: 5404 - DNA, 930 bp, Glycine max
tacggctgcgagaagacgacagaaggggacaacccaaaaactactggggattcccaaaggcaaaaaaaaaaaaaaatacaagatgaagagcaagttcctttttgttttcctattattgggaattcttaactgtgaggcacaatatttcaatgccaacccatacgactatttacaactagccttaaggtggcctaattcctattgcttgacacatgaaggtggttgcagggaaatagtgccacaatattttactattagctaccttcatcccatgagaagaggaggccctgatctgcaaaattgcccctcaccatttaatatgccaaatagcactatggagataaacaagaatgacctactcaaatactggcctgatctgagaactgataattttattgagagcaagtcattatggagggaccaatggagaaagtttggttcatgctatagtatgatgccagatgactatattgtttatgcactcaacagtagaaagagaaatgacctcaagaaaatcttgacaaatgcaggtattgttgcaagtggaaatccatatccaacacgtaggatactacaagctttcaggaaagctttaggtgtgaatgttgacatagtttgtgagccagatagaagtggaaatgtttatcttgcagaggtccatcaatgtgttgatgctgctggaacaacatctatagactgtgacaataaggcaagaggatgtgatgatgaccccatctttccctacatgggattccaaccagacaaagatcccaagtaataagatcatgcaatcaaaatctcctatagttgtattacccctggaacaaatatatataaaaaataaggggctctaagggtatgttaaggaaataaataataaaatatctgaataaaattcaaaaaaaaggtttgacctcaaaaaaaaaaaaa

SEQ ID NO: 5405 - DNA, 1220 bp, Glycine max
tcagctacgtaggccccccccccactaacaagaaagggagagagaattagagatggaaaagagcagagtgcttattgttgggggaactggctacataggaaaaaggttggtgaaggcaagtttagctcaaggacatgaaacatttgttcttcacaggccagagattggtgttgatattgagaaagttcagcttctattgtcattcaaggagcaaggagctaggcttgtttcaggttcatttaacgaccataagagcctagtgaatgctgtgaaacttgttgatgttgtcatttgtgccatttctggtgttcacatccgcagccaccaaattctactccaacttaaacttgttgatgcaataaaagaagctggaaacatcaagagatttttgccctcggagtttgggactgatccggcaagaatggcgcatgcattggaacctggaagagtaacatttgacgacaaaatggtagtgaggaaagccattcaagaggctcacataccattcacctatatttctgctaattgctttgctggttactttcttggtgggttgtgtcagcctggctttataatcccccctatggattctgtgatcttatttggagatggaaacgtaaaggctatctatgtggatgaagatgatatagctatgtacactatcaaaaccatagatgaccccagaacacggaacaagacagtttacataaggccacctgaaaacatattatcccagagagaggttgtgcaaatttgggagaaactgattggtaaagagttgcacaaatcttcaatttcagcacaacagtttctgagttccatggaaggacaaccatatgagcagcaagtgggaatgggacattattatcatgtttgctttgaaggctgcctcacaaattttgagataggagaagaaggggttgaagcttgtggattgtaccctcaaataaagtacactaccgttcaagacttcatgaaacgctacgtataaaggctgttatttgcttattgtatcacatcccatcaaagattgggttaaacaaaataataaatgcgtatatgtaactgcaaattaaataagaacaaattaataacatactatattttcaactatagcaaatgcaatgcaaaaagctactgtatttgtgttcatataaagatgtcattaattatttttaaaaaaaaaaaaaaaaaaatatgctagtattattgattattgt

SEQ ID NO: 5406 - DNA, 1472 bp, Glycine max
attcccgggtcgacccacgcctccgctaaatttgacagaatcaaataaggcgtgaatcgaaataaaaagtggttttcttcttctctctctagactccaatgtcggctctcttctccattgcctccttcgtcttaccatcctggttataggctgaaaagggaaggggggagagagagtgtttgcggcaatggaggaaccgagcaaactgaagcgtgccatgattgattccttggctggggcaatttctggtggaatatcacggactgttacatcgccccttgatgttattaagattcgattccaggtccagctagagcccacatcttcatgggcattactacgcaaggatttggcttcagctacggctgcagcatcaaaatacactggtatgcttcaggcaaccaaggatattcttagagaagaaggcgtacaggggttttggcggggaaatgtgccggcattgctcatggttatgccatatacagctatacaatttacagttttacacaagttgaagacttttgcctctggttcttccaagacagagaatcacattaatttaagcccttatctatcctacatcagtggggcattagctggatgtgcagctacagtaggttcatatccctttgatcttctccgaactatattagcttctcagggtgaaccaaaggtatatcccaacatgaggtcagcattcatggatatcgtccatactcgtggattccaaggcttgtattctggattgtcgcccactctagtggagattataccttatgcaggcctacaatttggcacatatgatacatttaagcgatggggcatggcttggaatcatagatactccaacacttctgcagaagataacctctctagctttcagcttttcctttgtggattggcagcgggaacatgtgccaagcttgtctgtcatccactagatgttgtcaaaaaaagatttcagattgaagggcttcaaaggcatccaagatatggagctcgagttgagcatcgtgcatacaggaatatgcctgatgccatgcaacggatactgcgattagagggttgggctggtctgtacaaggggataattccgtccactgtcaaagctgcacctgctggtgctgtgacatttgttgcttatgaattgacatcagattggttagagtccactttcaattgattttttcccattttttcttcatgattagtgatcatattcttttttgaaatacaagttgattccctcgtagtataggaagaaagtgtgagggatatgctaattttttgtaatgatagtggtagttgataagattgaacttcctttaagatggaagatttgtccttgatgcttgcgtctgatttggaattctaaatgtaaatttccaaaatggtgcaaaagcctatctaggaacaatgtttcgattctcaacctaaaaaaaaaaaaaaaaaactcgagactagttctctcc

SEQ ID NO: 5407 - DNA, 1021 bp, Glycine max
tgggccattgcctttcagaaccaaacccaaaggatattttttaagagaaagaagggcatacgggggtttttgggcggggcaaatgtccaagcttgcttcatggttatgccatatccagctatacaatttactgttctacccaagttgaagacttttgcctctggttcttccaatacagagaattacattaatttgagcccttatctatcctacatgagtggagcattagctgggtgtgctgctacagtagggtcatatccctttgatcttctccgaaccatattagcttcccagggtgaaccgaaggtttatccaaacatgaggacagcattagttgatattctgcagactcgtggcttccgaggcttgtatgctggactgtcaccaaccctagttgagattataccttatgcaggtctacaatttggcacctatgatacatttaaacgttggaccatggcgtggaatcatcgtcaatattcaaatcctactgcagaaagcctctctagctttcagcttttcctgtgtgggttggctgctggaacatgtgccaagctcgtctgtcatccacttgatgtggtcaaaaaaagatttcagattgaaggtcttcaaagacatccaagatatggagctcgggttgaacatcgtgcctacaaaaatatgttagatgccatgaaaagaatattacagatggagggttgggctggtctatataaggggatactcccatcaactgttaaagctgcaccagctggtgctgtaacatttgttgcgtatgaattgacagtagattggctggaatctattttgacttgattttttactaaggagaagaaggggatttttatgatttttaaaaaaaaaaaaaaaaagtcaacttaatccccccccggataggaagcacgaggtatatgataatttaactacagcaatagtggataagattctagttctcttttaagatggataagaagtcaaaatgaaagctaagatctagcagggtaacatctattttcctttt

SEQ ID NO: 5408 - DNA, 1464 bp, Glycine max
ccacgcgtccgccccgcgtccccccgcgcccccgcccgcccgcccgccctcgcctccgttttaatttggctacttctgagataaactatcaatcagtcacacgaagcagtaatgaagggcttcacttcacaaattgtcttaaattttttgaagaaatggaaggtgaagattccattgaaatctcggattcatcaccctcccacctttcacccagttcattgcaaaatcaagctcttgctggatcagtagataaaatgatgcccggaaagagttataatacacctccagcattgcagaatctgttcaatggatctaaacttaatagcataaactggggagaaggtggtaatgcccattcttcaagaagtgccaattcactagataatcgattgaccagagacataggacttcagtttaatgcagtcgagtttaaaagatctactgaagaattgaaattgcgtgcttccatcgaggaaaggatgaaaaaaactacaagaaagaagcgaaaatcagatggccaggaaccctctgctgggcacgaagaggaggtagaaatgcgctttagattttatgaaagtgcttctgcaagaaaaagaactgtgacagctgaagaaagagagagggtcatcaacgaagcaaaagcatttgaaccatctaatcctttctgtcgagttgtcctgcggccctcatatttatataggggatgcataatgtatctgccatcatgctttgcagagaagcatttgaatggagtttcagggtttattaaacttcagatctctaatggtagacagtggccggttcgctgcctttataaaggaggtagagccaagttaagccaggggtggtttgaattttcattagagaacaatttaggggaaggtgatgtctgtgtgtttgagctgcttagaatgaaagaagtagtgctgcaagttaccatctttcatgttaccgaggatgtgggactgttgagccctcctttgcagcataaccaaaacatgacctcagctaaactgttaagcactcccttgcagcaacacctcacttcaactaaaatggttagaaattagcagcaggttcattctcgatagctcaactgtatcaaaataaccccttgcttctgtgtggaacttagatgctttttctgtccaaaatttcagggtgacttgagtggaacatagttatagtttttataccttttctttcccttttgacttgggttgtaaatagattgttcaatctagctgattaggaaccgagtcaatgcttgtcctattgtgtatcttggttttaatttttttttttttttctgtttgaagataaattatatagcttcttctgcctgacaactcggttcccggtttttgtttattgctggaagtaactagtaagctgtgtctaataattccctttcatgttcatcttttttatgatatggatggatggatacatggatatttggcg

SEQ ID NO: 5409 - DNA, 1203 bp, Glycine max
ttttttttttttttttagataatcaaaagtagcctagtataaatgtctcttaaactcattttagatggaagttaagagcaatgcaaatgcacgggtaacttagttctgaataatcccgctgccagcactgacaggggggggacgaattcaagggtagataagaaaaagaaaaaatgtgtagcctcgagaagcgtggcaacgcctgggtactaaccctcgacggcgacgacggcgacgtccaacaccgcctcaacccaaccctaattgattccctcctctcaacgcttaaccgtctcgcatctcaagccactcccggctccgtcctcgtcaccaccgccaccggcaaattcttctccaacggcttcgacctttcctgggcgcgcgccgccgcttccgcctccgccgccaccgaccgcctccagttcatggtggactccctcaagcccgtcttggcggcgatcatgtcccttcccatgcccaccatcgtcgccatcaacggccacgcctccgccgccgggttcctcctcgcggtcagccacgattacgtcctcatgcgcagcgaccgcggcgtgctctacatgccggaggtagacctcgggctgccgctgccgggctacttcgccgccgtcataaggtccaagatcaggtccccggcggtgatgcgcgacttggtgctgggcggcgcgaagctaacggcggcggaggcggtgaggatgggaatcgtggattcggcgcacgatagcgcggagagcacggtggaggctgcaatgcgcctgggggagcagttggcacggaggaagtgggtgggtgaagtgtacgcagagataaggaaaagtctttacccagacgcgtgtaaggttctagggttgactcagaaagcgatcgtctccaagatctgaatcaatgaatctctattatttcattaatccgtgtttggattggctttttcttactcttggacgcgcatcctcctgcaacaatataaagcggcttctacgtctttctagtagatacttacgcgcatccaaacgccacacaacaaacaattattagttaattatttttgtttgttgtacttttgtatcttttcctggacccgaaagatccgctttcacttatcaataataaataatttttttttttcctaaagtaaaaaaaaaaaaaaaaaaaaaaaaaaaaaaaaaaaaaaaaaaaaaaaaaaaa

SEQ ID NO: 5410 - DNA, 2383 bp, Glycine max
tacggctgcgagaagacgacagaaggggggattaaagaaaattcttgtattgctcgttttctcacagaacttgtctcagctagcttctatcaattatgatctggtgattaagagctccaaggaatcaactcaatgactccaacccatctatttcaagatattgctaaagagggttataagtttctccaagcgattatatatatatatcaccaaagacaaggctctaaataggtggatttccagtgtaaaaaagtattgtgcgcacacatgctgatcagctacgtaggcccccccccccgctgtagattgacgaagaagcagttggccaaccgcgataatctctacatattaatataatctttctcgtcacctgagagaaatagaaaatgtggagtcgcgcaagaacccttttccttcgcgtcctggaacctcctaatcacaacaacgcttcgctttcccaaacatttacccctggattctccttccacacgctctcgcacttccaggaaaaggatggcatttgccccaaaccgcttataacttttgttttaggaggccctggtagtggaaaaggtacacaatgtgcaaaaattgttgaaacctttggatttaagcatctgagtgctggagatcttttgagaagggagatggtttctgatagtgaatatgggtgaagttgtcttatcctaattttgtgtttgttttgttgctacatctttgggattttaacaataaaaataccaaaacagctcaatgattatgaatacaattagagaaggaaaaattgttccatcaggagtgactgtcaaattgattctaagagagatgaaatctagtgacaatcataagtttcttattgatggcttccctagaagccaggagaaccgtatagcttttgaacaaattgtaagtttggcttttaacctcgtttctcttaaatttgggttgaagttatgtcccctcctttgggctcttttttctaatgataaattgatatagtattgagttatttctgcgccagtacctgtttttctatgtatttaatttactatgaatttgcctcatcctctgtattgaatatctttgcaaatgacaatatctatggatgaacaaagtaaattgtcatggcagacaactgtttttgagcaaataaatagtttcatgtaaattctttcttgtattcttcaactaaataaacacactcataattatgcagattggagcagaaccagatatggtacttttttttgattgtcctgaagaagaaatggtgaaacgtgtgctgagccgtaatcagggtcgaattgatgacaacatagatacaatcaagaaccgtcttaaagtatttgagtcattaaatcttcctgtgattgactattatgctaagaaagggaaactttacaggatcaatgcagtgggaacagtagatgaaatatttgagcatgttcggccagtttttgaggcatgtgagcacgaggctagatgaaagctgtttgaattggatgagagcactgtaaagttggctaaagtttggatttagtggggacccaacatagctaccagttgattacagaatctgatccaaattcatggctgatttgctttggaatttggtagttctctaaaactcatccactgaagtatttcaaattgatattacacatgcccaccattcacaggagacggctcttgttgccttttttcctttccttatgccgtcgaaagaatggcctataggtggagctaagctgtctctagcaacataggaactgcctataatgcgcagaatataggataaaaagtatatgttgtgtaacatttttttttaaataaattgaattctatatgttagtccaacctctatctagaggtgttgggggctcctgaccttagcatcgcagatactgtgaactagttggtctctcgcagtaatgggagagttggaaagccttttagaccccatggaaagccttctctaaacaaacttgctagtaagcaccaagcacacaaaaacgaatgttagacagggtatagagaagaacctccataggatgaagttgactgaagattaatatattgaaatttacgcatacatgaataactgaaggattctaaggttaccgctgcaatttcatcgggtttcttggcgtaagaagcgcgacttccgtcagtaacaactaaactttgtctcattgttatgcaggctgcagcctgcaggttgttacataaattaattgcgtgattgagttgtccaaaaatattaattttatcatttttgatagtatcccgaactatgtatgtttagaatgatactttgaataagattatcatttgattatgaaaaaaaaaaaaaaaaaaaaaaaaaaaaaaaaaaaaattaaaa

SEQ ID NO: 5411 - DNA, 1800 bp, Glycine max
  misc_feature (5)..(6): n is a, c, g, or t
tcagnnacgtaggccccccccccccaggaaccaccacacaggctccacaaaacatctcatcattcacccaacaaaatggcgctgcttctgataattcccatctcactggtcaccctctggctcggttacaccctataccagcgattaagattcaagctccctccgggtccacggccctggccggtagtcggtaacctctacgacataaaacccgtccgcttccggtgcttcgcggagtgggcgcagtcttacggccccataatatcggtttggttcggttcgaccctaaacgtcatcgtttcgaactcggagctggcgaaggaggtgctgaaggagcacgatcagctgctggcggaccgccaccggagccggtcggcggcgaagttcagccgcgacgggaaggatctaatttgggccgattatgggccgcactacgtgaaggtgaggaaggtttgcacgctcgagcttttctcgccgaagcgcctcgaggccctgaggcccattagggaggacgaggtcacctccatggttgactccgtttacaatcactgcaccagcactgaaaatttggggaaaggaatattgttgaggaagcacttgggggttgtggcattcaacaacataaccaggttggcatttgggaaaagatttgtgaactcagaaggtgtgatggatgagcaaggagtagaattcaaggccattgtggaaaatgggttaaagctaggagcatctctagccatggcagaacacatcccttggcttcgctggatgttcccactggaagaaggagcttttgccaagcatggagcccgccgcgaccgactcaccagagccatcatggcagagcacactgaagcacgcaagaaatctggtggtgccaagcaacattttgttgatgccctcctcacattgcaagacaaatatgaccttagtgaagacaccatcattggtctcctttgggatatgatcacagcagggatggacacaactgcaatttcagttgagtgggccatggctgagttgataagaaacccaagggtgcaacaaaaggtccaagaggagctagacagggtaattgggcttgaaagggtgatgactgaagcagacttctcaaatctcccttacctacaatgtgtgaccaaagaagcaatgaggcttcacccaccaaccccactaatgctcccacaccgtgccaatgccaatgtcaaagttggaggctatgacattcccaaagggtccaatgtgcatgtgaatgtgtgggcggtggcccgcgacccggccgtgtggaaggatccattggagttccgacccgaaaggttccttgaggaggatgtagacatgaagggccatgactttaggctacttccattcgggtcgggtcgacgagtatgcccgggtgcccaacttggtatcaacttggcagcatccatgttgggccacctcttgcaccatttctgttggaccccacctgaaggaatgaagcctgaggaaattgacatgggagagaatccagggctagtcacatacatgaggactccaatacaagctgtggtttctcctaggctcccctcacatttatacaaacgtgtgcctgctgagatctaatctttcttttctttcccttggactactctttgttgcattaagaaaaatgccttgtggcactacttttatctttgtgtttatgtaactacatatgaaatcacaatttaaggaactaaggaaatactcattgcgagggtaacgaaataaaattgaactaaaaaaaagaaaaaagggcgcccgccgaaatgtgagctc

SEQ ID NO: 5412 - DNA, 1864 bp, Glycine max
cggctcgtgctttcaccaactctctctctctctctctgtcattctctaatagtagtaggcgtcagctcggcctgccgccttctcttccaggaaccaccacaaaacattctcatcattcacccaacaaaatggctctgcttctgatagtacccatttcactggtaaccctctggctcggttacaccctataccagcggctacgcttcaagctccctcctggcccacggccctggccggtagtcggtaacctctacgacataaaacccgtccggttccggtgcttcgctgagtgggcgcagtcttacggccctatcatatcggtctggttcggttcgaccctaaacgtcatcgtttcaaactcggagttggccaaggaggttctgaaggagcacgatcagcagctggcggaccggcaccggagccggtcggcggcgaagttcagccgcgacgggaaggatctcatttgggccgattatgggccgcactacgtgaaggtgaggaaggtttgcacgctcgagcttttcacgccgaagcgcctcgagtccctcaggcccattagggaggacgaggtcaccaccatggttgagtccgtttacaatcactgcaccaccactggaaatttagggaaagcaatattggtgaggaagcacttggggtctgtggcattcaacaacatcaccaggttggcatttggaaaaagatttgtgaactcagaaggtgttatggatgagcaaggagtagaattcaaggccattgtggaaaatgggttaaagctaggagcatctctagccatggcagaacacatcccttggctgcgctggatgttcccactggaagaaggagcttttgccaagcatggagcccgccgcgaccgactcaccagagccatcatgacggagcacactgaagcacgcaagaaatctggtggtgccaagcaacattttgttgatgccctcctcacattgcaagacaagtatgaccttagtgaagacaccatcattggtctcctttgggatatgatcacagcagggatggacacaactgctatttcagttgagtgggccatggctgggttgatatagaaacccaagggtgcaacaaaaggtccaagaagagctagacagggtaattgggcttgaaagggtgatgactgaagctgacttctcaagcctgccttatctacaatgtgtgatcaaggaagcaatgaggcttcacccaccaaccccactaatgctcccacaccgtgccaatgccaatgtcaaagttggaggctatgatattccaaaagggtccaatgtgcatgtgaatgtgtgggccgtggcccgtgacccggcagtgtggaaggatccgttggagttccgacccgagaggttccttgaggaggatgtggacatgaagggccatgactttaggctacttccattcggggcgggtcgccgggtatgcccgggtgcccaacttggtatcaacttggtaacatccatgttgggccacctcttgcaccatttttgttggaccccacctgaaggaatgaagcctgaggaaattgacatgggagagaatccagggttagtcacatacatgaggactccaatacaagctttggcttctcctaggctcccctcacatttgtacaaacgtgtgcctgctgagatctaatctttctttttcttttccttggattactctttgttgcattaagaaaattgccttgtgtctatgtaactacatttgaaatggcaattcaaggaactaaggaaaaacccatagcgagtttggcttctcctcttcagattttggattgaaattcctgtttaagattaattaaataagttacatgagaagggagtttaccgaaagtcaa

SEQ ID NO: 5413 - DNA, 1989 bp, Glycine max
gagaacagtaaagccgttgcgaaaattaatcaatcatagagttaggttattgcgtttggctttggcacgaagaaagtataacggagagaggcttgagtttgtttggtttttcttgcttcctttggtgtcattgctatatcagctacgtaggccccccccccccccgacacacaacattgatttctgagattcagatgatggcgagtgagtcgcaaaactgggtgttcatggtcactgcacagacaccaaccaacattgccgttatcaagtattgggggaaaagagacgaaaccctcatcttaccggttaacgacagtatcagtgtcactctcgatcccagccacctctgcaccaccaccactgctgccgtcagtcccgctttccaccaagatcgcatgtggctcaatggaaaggagatttctctttctgggggcaggttccagagctgtttaagggagatccgtgctcgtgcttgtgatgttgaggatgaaacaaagggtataaagatcacaaaggaggattggggcaaattgcatgtacacattgcttcgtacaacaacttccctactgcagcaggactggcttcatcagctgccggttttgcatgccttgcttatgcccttgggaagctaatgaatgtcaaagaagatgaaagccaactatctgctatcgcaaggcaaggatcaggtagtgcttgccgcagcttatttgggggatttgtcaagtggataatgggaaaagaggataatggcagtgatagtcttgcagttcaacttactgatgaaaagcactgggatgatcttgttattgttattgccgtggttagttcacggcagaaggaaacaagtagcaccactggaatgcgtgagagtgttgaaacaagtttgcttttacaacacagggcaaaggaaattgtgccaaagcggatattgcaaatggaagaagccattaaaaatcgtgattttgcatctttttcgcaattgacctgtgctgatagcaaccagtttcatgcagtctgcctggacacatgcccccctatattttacatgaacgatacatcacacagaataatcagcatcgttgaaaagtggaaccgttcagaagaagctccccaggtagcttatacatttgatgcggggccaaatgctgttctaattgcacgcaacaggaaagctgctacctctttgattcagaggctgctttactacttccctccaaattcagatgacctcagcagttacattattggggacaagtcaattgcaaaagatgctgggatcaatggaatacaggatgtagaagctttgccgccacctccagaaattaaagataatattccatcacaaaaatacaagggggatgtcagttacttcatatgtaccagacctggaaggggacctgttttgctttctgatagcattcaagcacttctgaacgatgaaactgggcttcccaagtaagttcatgggaaacattctggtggttgatctattcttcgttgggcttcactagcaggctttttgagcccaaaatattttgactagaggaccctttcaaggaagcacatgctactcgtggcatgatgattcgttactcctagttcgcagtatgtgtttgtttaggtatctgtaatttttgtttcagatctagttgggctattttgttggagaaaaataagtctcgctcctttttttgaattgagcaaaataccttcaattcatttgagcttgcgagttaaacttgtcagtttttatctgaacaattctccctactttgctatattttgatcaagtgttccattttattccatcgtacttggcttaaaaagatgctcattcaaaaaaaaaaaaaaaaaaaaaaaaaaaaaaaaaaaaaaaaaaaaaaaaaaaaaaaaaaaaaaaaaaaaaaaaaaaaaaaaaaaaaaaaaaaaaaaaaaaaaaaaaagaaaaaaaaaaaaaaaaaaaaaaaaaaaaaggggggcccctttaa

SEQ ID NO: 5414 - DNA, 777 bp, Glycine max
  misc_feature (6)..(10): n is a, c, g, or t
  misc_feature (14)..(14): n is a, c, g, or t
  misc_feature (16)..(17): n is a, c, g, or t
  misc_feature (29)..(30): n is a, c, g, or t
  misc_feature (35)..(36): n is a, c, g, or t
  misc_feature (764)..(764): n is a, c, g, or t
atcccnnnnnatantnnacatgaatgatnnatccnnccgggtaatccgcccttacggccgggggaaccgttcagaagaagctccccaggtagcttatacatttgatgcagggccaaatgctgttctaattgcacgtaataggaaagctgctacctctttgattcagaggttgctttactacttccctccaaattcagatgacctcagcagttacattattggggacaagtcaattgcaaaagatgcggggatcaatggaatacaggacgtagaagctttgccacctcctccagaaatcaaagataatattccaccccaaaaatacaagggggatgtcagttatttcatatgtaccagacctggaaggggacctgttttgctttctgatagcagtcaagcacttctgaacggtgaaactgggcttcccaagtaagttcatgggaaacattctcgtggttgatctattcttcgttgggcttcactagcaggctttttgagcccaaaatattttgattggaggaccctttcaaggaagcccgtgtgctacccatggcatgatgattcgttccttcctagttcgcagtatgtgttcgtttaagtatctgtaatttttgtttcagacctagttaggctattttgttggagaaaaataagtctcgcttcttttttgaacaattcatttgagcttgcaagttaaacttgtcagttttttatgtgaacaattgtccctactttgctatattttgattaagtgttccattttnttcttattgtact

SEQ ID NO: 5415 - DNA, 1562 bp, Glycine max
  misc_feature (23)..(23): n is a, c, g, or t
gaatcattcagctttttaaatanaataaatttccttttctccctcacaatcacaatgctcttctacccttcctgcctccctgcccccccccccccatttgttacgtcacggagcccaaatgtctgttacggagctcaaagagcgtcactccgctgccaccgacaccgtcaacaatctcagacaccgtttaaagcagaagcgcctttcgttgctcgacacagatgtttctgggtatgcaaggtctcagggtagaacgcctgtgacctttggacctacggatctggtttgctgtagaaccttgcagggtcacacgggaaaggtgtattcattggattggacttctgaaaaaagtcagattgttagtgcatctcaagatgggcgattaatagtgtggaatgctctaactaggcagaaaattcatgccataaagctgccttgtgcatgggtcatgacatgtgctttttcaccaactggtcagtctgttgcatgcggtggtcttgacagtgtttgttctattttcaatcttaattcacccactgacaaggatgggaatctacctgtttcccggatgcttagtggacataagggttatgtttcctcttgtcagtatgttccagatgaagatactcatttaattactggttctggtgatcagacatgtgttttatgggatattactacaggccttaaaacctctatctttggaggagagtttcagtctggacatactgcagatgtacttagtatctccattaatggatccaactcgagaatgtttgtatctggttcttgtgatgcaactgctcgattgtgggatactcgcgtggcaagtcgagcagtgcggacatttcatgggcatgagggagatgttaatgcagtcaaattctttcctgatggaaatagatttggaactggctcagatgatggaacctgcagattatttgacattaggactggacaccaacttcaagtttattatcagcagcacagtgacaatgacatcactcctgtgacttccattgcattctctgcttcaggaagacttctttttgctggatacacaaatggagattgctatgtttgggacactttattggcaaaggtggtcttgaacataggatctctccaagactctcatgaggacaggatcagctgcttaggtttgtcagctgatggaagtgccttgtgtacaggaagttgggacacaaacttaaagatatgggcatttggagggcataggaggacaacttaagccattgcgggaaggtcaaattggagacgaattgcgtgctaatttatataacccttcattttagccttgcaactcatgtccgtttgtccatgtgtgtgatcttagtactttttccattgtactacccactccgccaactgtaccattcccttataactatgataattataatacttaaaggtgtgattagctatggagcttcctgaaagtggcccgaactatataaaatgaaaatttgcattcctctttaaaaaaaaaaaaaaaaaagaattcctcacccagaaatcaaaaaaaaaaaaaaaaaaaaaaa

SEQ ID NO: 5416 - DNA, 1492 bp, Glycine max
acgcaagcgagagcttcggatcgaggtttatcataaaactaaaaatagtacaatccatcaatctgtttgagttgaattgaaacttttggagagagaaaagaaaacaaaaacaaaacatcaatctgcattttggcattgggctcttcttgtttagtttgtttgttccaatccaacgttggtttggttgtgtgtgtgtgtttgtgttgggaagaataggaatagcattgggaatcaatcagcgaccccatgagacctcagagaacgtcgatccacgccgtcacgacatgggtgaggcgacagcccccaaaggtgaaggcttttctcgccgtcgtttccggcatggcggctctcgtgctccttcgcttcatcgtccacgatcatgacaacctcttcgtcgctgccgaggccgtccactccctcggaatttccgtcctcatctataagctcatgaaggagaagacatgtgctgggttatcactcaaatcccaggaattaacagctatctttttagctgtaaggctgtactgcagttttgtcatggaatacgatatccacaccttacttgatttcgctactttcgtaacaacagtgtgggttatatatatgattcgttttaagctcaaggctagctacatggaggagaaggataactttgcaatatactatgtggtggcaccatgtgctatgttagccttactcattcatccatcaacttctcatcatttattaaacaggatttcctgggcattctgtgtatatctagaagctgtctcagtcctgccccaactgcgggtcatgcagaacaccaagattgttgagccattcacagctcactacgtatttgcactgggtgttgcaagattcttgagctgtgctcattgggttcttcaggtgttagatagccgtgggcatttgttggtggccttggggtatggtttatggccatcaatggttcttatctcggaaattgtccagaccttcatcttagcagatttctgttactattatgtcaaaagtgtcttcgggggacagcttgttctacgtcttccctctggagtggtgtgattgaagatctgctttggtgtgtactgtcacatttgattttaacttaatcaggcattatggttggttacccttgttcgagtacattgtgttgacacacttgtttggttccttggtggaatgtaaagttggggatgaaagaaactaaagatatttatgtttaggttactgttatatatggttggaagtgctttacacgtaaagtctctatttgcttggactcttggaatttagttattgttataactattccatgtgctcaagttctacagtaagtcttagattgaaccctgcctacgtaaaaatatgtggactgtgcgcggttttgatctattgcatgcagttgaatactgcgagttttatgtatgttgcattgcagaaaacaaatctgaattattgagtccagagatgttatccttaaaaaaaaaaa

SEQ ID NO: 5417 - DNA, 1265 bp, Glycine max
ccagcgtccgcgacaacctcggctcagtgtctctctgcactgcaaaacccctataacccttcccttcctcgcacttcattcttttatttcatttatttatactcttcatgaaaaattaagggaattttcagagagagagagagggagagagtagttatggaaggagaagaaggaggaattgcaacaaagaagagagggaaagagggtgaaactgagacgacgcgctacaaaggaatcagaatgagaaagtggggcaagtgggtcgctgagattcgagaacccaacaagcgttcaaggatttggctcggttcttactccacgcccgtcgcggcggcgcgtgcttacgacaccgccgttttccacctccggggcccctctgcgcgcctcaacttccccgagcttgttgccgcggagggccccgccgccgacatgtccgcagcctccatcaggaagaaggccaccgaggtcggcgccagagtcgacgctctccaccgccagcacccccacgcgctgcctgctggagaattcgccgaccgggttgaccttaataagatgcccgaacccgagaattcggattgtgactactgggacagggattaggagtgttgtttagttgttaatttggagtttttcaaaaacaaatataaaattataaccttgttttaattaattttttttttattggggaaaaggggttagagggcacagcaatggcctatgatgccagggagttgggttgaaaaagagggagtgagccatgttaaccactcaagtaattataatattataatagctactattcttctgaagagtaaaaaaagatggatgttaggtgtttttatgagttgtatatgtgaagagaagggaccattggggagggaagacgctgttgtggtcactactctgtttcgatgataacgatgggtgatgcatggggtcggttaatcggttctgcgtctcagatttttgtctagttggagtcaaatctcaaacgacattgtatccaacaaattggaaaatagaaaaccagaaaatatgaaagaaaagcaaccgaaaatgtaagaaagaaagagatgtgtcttcaatgtgaaaccaaaattgtagctcctcaaacctcgatcgttgttccacaattaactattacaaacatctcccccaaaggttgtgttttatatttgttttgtgatccgctgtagatattatttcttattttatttaaaagatgtaggttaaagtataagtaatttaataacagtttggttctg

SEQ ID NO: 5418 - DNA, 1510 bp, Glycine max
tacggctgcgtcgagtccacctacgtgggcccccccccccaatttattttgtaacgccaaacgtccatccaaaattgcgttcctaaatcgccgctaccgaacacagccgtagacttttaattcattccgctgcgtttctttctctgcacttcaaagttcaaaccctagcgaagcatccactgtcgccgtcgcacactcgcacgccgctcacaggtttatgggctacgctgatgtcctgaatttgttgttggccgtggtggtttggtgcactgcttacgttactgttgtagttctcgcttcctttcgagccgtttgcactttctgaaaccttgcaatttcattgataacatgggttatgcacagcttgtcataggtcctgctggtagtggcaagtccacgtattgctcaagtttgtatgaacactgtgttgctgcacggcgatcgatacatgttgtgaatcttgaccctgctgctgaaaattttgactatcctgttgcgatggatataagggaactcatttccctagatgatgttatggaggaacttggattgggtcctaatggtggtcttgtctactgcatggaacaccttgaagataacctagatgattggctcactgaggaactggacaattatttagatgatgattacttggttttcgactgccctggtcagatagaactatattcacatgtcccagtgcttaagaattttgtggaacatttgaaacggaaaaattttagtgtttgtgctgtttacttacttgattcacagttcatgacagacgtgaccaagtttataagtggatgcatggcatgtctttctgcgatggttcaacttgaactacctcatgttaatatcctctcaaagatggaccttgtgactaaaaagaaggatcttgaagattttttggatccagagcccacctttttattgtctgaattgaatcaacggatgggtcctcagtatgcaaagctgaataaggctttgattgaattggtaaataactatagcatggtgagttttataccattagacttaaggaaggaaaaaagtatacaatatgtactggcccaaattgacaactgcattcaatatggagaagatgcagatgtgaaggttaaggattttgaccctgaggatgatgagtagccaatccccttctgcaacactgcttggtataattgaaagttctgcttaacttcgacattatggtgtaccaagctgaagttgttaatatgtagtatctcattagattgttttaatgtgaattgaggaagttgaacatttatacagtttatcctctaaatgggatgaaaaattggctagcttgatcattctcttgccataactgcttcctttatgggaattttatgactttggtcgcaagagtaaaaatctgatggcaaagtagacaatgcaagaatgagaaggatgaatttgtatgatgaaaatattgactgagcctgtttgaccaccaggctagttgagtttttgtgagcatgacact

SEQ ID NO: 5419 - DNA, 2537 bp, Glycine max
  misc_feature (2508)..(2511): n is a, c, g, or t
  misc_feature (2518)..(2521): n is a, c, g, or t
  misc_feature (2533)..(2536): n is a, c, g, or t
ccacgcgtccgccctttggctcacacaacataaactcctaccaaggttctctcgttcactcctctctctctcatcgtacgtgcatccatctctcaacaccaaattactacttgcttctcttattactctccccaatattgcctcttgtactttttatgctgattgcccttgaacccttcaagtttcgacacacattgttcactctcacaatatttgcatgcaacagatctcaattattcaccaatcaaaaccacttgcacattttttagttgaacacaataatttcatctatcactcccgttttagcccccacttgaatactacacagctagggtttactttcctcatttaagctgcaatggatccaattgaatttgcgtggtgatggtaatagcagcctctagctcctccggtgagggaaggtgcaagcaataaaggtttaattttttgttttgggagttgggcccagcactcacatggacgcagcaacggctttaatgatcctatcagcaatagcggcctatttaatatggttcaccttggtcactcgctccctcaaaggtccacgtgtctggcccctattgggcagcctccctggcctcatccaacacgccaaccgcatgcacgactggatcgctgacaacctccgcgcgtgcggcggcacgtaccagacctgcatctgcgccctccccttcctcgcccgaaaacagtgcctggtgactgtcacgtgcgaccccaaaaacctcgagcacatcctcaagcttcgcttcgacaactacccaaaaggccccacgtggcagtccgccttccacgatttgctcggcgaaggcatcttcaactccgacggcgacacgtggctgttccaacgtaaaaccgccgcactggaattcaccacgcgcactctgcgccaagccatggcgcgttgggtgaaccgagccataaagcacaggttctgccccatcctagccacggctcagaaagaaaacaaatcagtggatcttcaagacctcttgcttcggctcacttttgacaacatatgcggcttggctttcggccaagacccgcaaaccctagccgtggggctcccagataacgctttcgctctctccttcgatcgagccaccgaggccactctacaacgctttattttacccgagatcttgtggaagctgaagcgatggctcaggctcggaatggaagtgagcctgagccggagcctcaaacacatcgaccagtacctctcccacatcatcaagaaccgcaagctggagctgctgaatggtaatgggtcccaccaccacgacgacctcttgtcccgcttcatgaggaagaaagaatcctactcggaggagttcctccaacacgtggcactcaacttcatcctcgctgggcgcgacacgtcatcggtcgcgctcagctggttcttctggctctgcgtcaagaacccgcgcgtggaggaaaacatcctaaacgaactctgtactgttcttctgtccacgcgtggagataacatctccacgtggctgaacgagcctcttgtgttcgatgaggtagaccgtttggtctacctcaaggcagcattgtctgagacactgcggctttatccctccgtgccggaggactccaaacatgttgtgaaggatgatgttttgcctaatggaaccttcgttccggcaggttccgcggtgacctattcaatttactctgttgggaggatgaagttcatttggggagaggactgcctcgagttcaagcctgagcggtggctctctcctgaaggggacaaaattcaggtgcaagactcttacaagtttgtttcgttcaatgcgggacctaggctttgtttggggaaggacttggcttacttgcagatgaagtcaatcgccgccgcggtgctcctgcgccaccgcctcgctgtcgcgccgggccaccgcgtcgagcagaagatgtcactcacactgttcatgaagtacggtctcaaggtgaatgtgtacccaagggatctcaaacccgtgctggaaaaattaaccaccatcaagagtgttactgttggtcaaaagtgattttgatttggttaattaaaacagatagatacatcatcggtttaaataaagaaataattataagaattttatatattacttaatatagaatgatggtgtatcatttcacttgtgttagtttaatttacgctggctgtatagatgaaatttccctttactcacaagtttctcatttgatgatgaatactatatatgttttgcatgtaaacattttgatgattaaaaagtaatgctgctgcagttctgaaaaaaatatttgtgctgtaatttatcatggtgggtgccttcacgaacgggaactatttggtgacactgatgtagatgtagttttgttattttaggactctggcatacttgcacagttaaagccctagcttgtggtctctgtcactataatgtaatacaggtcactgagatcacattcgtaactgccacatttccagannnnggatatnnnnatttccagcaannnna

SEQ ID NO: 5420 - DNA, 2100 bp, Glycine max
tatttttccgctctgggcttcactactataaaacacttttttttctcgtttccctttcgctcacacaacacaactcctaccaacaaggtgctctgctcgttcactcctctctcataccctctggctcctcctccggtgaaagagggtgagaagaggagttagcaagcaatttttgtttcttttgggagttgggacccctcactcacatggacgcatcaacggctttaatgatcctatccgcaatagcggcctatttaatatggttcaccttcgtcactcgctccctaaaaggtccacgtgtctggcccctattcggcagcctccctggcctcatccaacacgccaaccgcatgcacgactggatcgccgacaacctccgcgcgtgcggcggcacgtaccaaacctgcatctgcgcccttcccttcctcgcccgtaaacagtgcctcgtcaccgtcacgtgcgaccccaaaaacctcgagcacatcctcaagctccgcttcgacaactaccccaaaggccccacgtggcagtccgcgttccacgatttgctcggcgaaggcatcttcaactccgacggcgacacgtggctgttccaacgtaaaaccgccgcactggaattcaccacgcgcactctgcgccaagccatggcgcgttgggtgaaccgagccataaagcacaggttctgccccatcctagccacggctcagaaagaaaacaaatcagtggatcttcaagacctcttgcttcggctcacttttgacaacatatgcggcttggctttcggccaagacccgcaaaccctagccgtggggctcccagataacgctttcgctctctccttcgatcgagccaccgaggccactctacaacgctttattttacccgagatcttgtggaagctgaagcgatggctcaggctcggaatggaagtgagcctgagccggagcctgaaacacatcgacaattacctctcccacatcatcaagaaccgcaagctggagcttctgaatggcactgggtcccaccacgacgacctcttatcccgcttcatgaggaagaaagaatcctactctgaagagtttctccaacacgtggcactcaacttcatcctggcagggcgcgacacgtcatcggtcgctctaagttggttcttctggctctgcattaagaacccgcatgtggaggaaaagatcctccacgagctctgcagtgtcctcaagtttacacgtggagatgatatctccacgtggctcgaggagcctctggtgttcgaggaggtagaccgcctggtctatctcaaggcagctttgtctgagacgctgcggctgtacccctccgtcccggaggattccaagcatgtcgtgaaggatgatgttttgcctaatgggactttcgttccggcgggttcggcagtgacctattcaatttactcggttgggaggatgaagttcatttggggagaggactgcctcgagttcaagcctgagcggtggctctctccggaaggggacaaaattcaggtgcaagactcctacaagtttgtttcgttcaatgcgggacctaggctttgtttggggaaggacttggcttacttgcagatgaagtcaatcgccgctgcggtgctcctgcgccaccgcctcgccgtcgcgccgggtcaccgtgtcgagcaaaagatgtcactcacactgttcatgaagtacggtctcagggtgaatgtgtacccaagggatctcaaaccggtgctggaaaagttaaccaccaccgagggtgctattactgttggtcaaaagtgattttgatttggttaattaaacagatagatacatcatcggtttaaataaagaaataatattaattataagaaatttatatattacttaatatagaatattgacgatgatgtatcatttcatctgtgttagtttaatttacgttgtctgtatagatgaaatttccctttactcacaagtttctcatctgatgatgaatactatttatgtttttgtaaacattttgatgattaaaaagtaatgctgctgcagttcgggaagctaaaaaaaaaaaggaaaaaaaaaaaaaaaaaaaaaaaaaaaaaaaaaa

SEQ ID NO: 5421 - DNA, 1067 bp, Glycine max
cacaaacctgcttgctgttcttgttcatcctccggatcatcccgggagaattcctcccgaggggggacaaggcggtgatcatgagataggaaaggatgtgactacacagtatgttgaaggttgggattggatggctcctataagggataggaatactggaatatgggatgaggtttctatttctgttactgggccagtaaaaataattgatccacacttggtttcaacattttctgatgattataagaaggcatatctacatacaacaactgagttggaaaacaggagctccttgactgctgagtgttctttgagtgtccaagtgacaacagaacttgaggatagcatttgcttagtagagcatcttcaaactcaagatctctcaattcctgcaaactcagcggtgcaatatacatttcctgagcttttcttctccaagcccaatttatggtggccaaatggaatgggaaaacaatctttgtacaatgttgttattgtcattgatgttaaaggatttggtgaatctgattcatggagccatcactttggattccgcaaaattgagagccatattgatgatgctaccggtggaaggttatttaaagtcaatggagaaccaatttttattcgaggaggtaactggatattgtcagatggactactgcggctctcaaagaagcggtataatacagatatcaaattccatgcagatatgaattttaacatgattcgatgctggggtggtgggctggctgaaagaccagagttttatcattactgtgattgttatggccttctggtatggcaagagttttggattactggggatgttgatggacgtggtgtcccagtgtccaatccaaatggtccactggaccatgaccttttcttgttttctgcaagagacacagttaagcttctaagaaatcatcctagtcttgccctatgggttggggggaaatgaacaagttccacccgatgatataaatgctgctcttaaaaatgatctgaggcttcattcctttattttgaaagggggggtgtgaatagcaggcctgcaggagact

SEQ ID NO: 5422 - DNA, 1792 bp, Glycine max
tcccacgcgtccgacggctgcgagaagacgacagaagggggcacactacggtactatagtatagtgtttacttacttaattactcagcactctcaaaaaaataaaaacttcttttataaattggaaaagggactcttcactcttctctttctctctctgcaatgtaggtcgtcggagaatggcaaagtgtcatcagaacaacgtcggatccatcgctcttgaccaccgccactccgccaaaaatgccaccgccgccggccacttccgcgtgctccgccgcttgatcttcgacgccgtcagctgcggcggcacctctcgctaccggtatcgccagcgcggtggcgatgtcagcgacggcggtgacttcagctcagcggcgtgccacacagagaaggaggagaggtcggagaagctatcggatcttctgaacgccgcggagaataaaatggcggcggcggaggaggagaagaagaaggaagaggcactggcggaactgaagcaagtggtgaaggagctgcgcgaagaagactttaggaagcagcgaatcgccgctgcgagagtgaggtcactagcgaaggaagattcggaagcgagagtgaatctcgcaatgctcggagcaattcctcctctcgtcgggatgctcgattcagaagacgctcattctcaaatcgcatcgctctacgcattgctcaatctcggaatcggcaacgatgcaaataaagcggctatagtgaaaattggtgcggtgcacaagatgctgaagctaatcgaatcgagcggtttagattcgtcggtgtctgaagcgattgttgcaaatttcctcggattaagcgctttggattcgaacaaaccgataattggatcctccggtgcaataccgttcctagttagaaccctaacgaatttaaacgatagtaaaagcacgtctcaatcccaatcgcaagtgaagcaagatgctatgcgagctttgtacaatctctcgatctgtcagagcaacgtttcagtagttttggaaacagatttggtttggtttctagtgtccacaataggagacatggaagtgagcgagagaagtctcgcgattctgagcaatttagtgtcgactccggagggtagaaaagcgattagcagcgttcgcgacgcgattccgattcttgtggacgcgttgagttggacggactcgccggagtgccaagagaaggcgtcgtacgttttgatgataatggcgcacaaagcgtacggtgacaggcgggtgatgatagaggcagggatagtgtcgtcgctgcttgagttaacgctggtgggaaccacgctggctcaaaagagagcctccagaatattggagtgtttgaggatagacaaagggaaacaggtttctggaagttacggtggaaactttaacttgggtgtctctgctcctatttgtggatcttcttcttcttcgtcgaaagggtgcttggtggaggaagatgggatcatgagtgaggaaaagaaagcggtgaagcagttagtgcagcagagtttgcagagcaatatgatcaagattgtcaagagggctaacttgcgtcacgattttgttacatctacccattttgcttcactcacttccaagagtctcccattttgaagaataataatgaaatgaaaccatttctcattgtagtttcgttgagtttttttttatcttctgtagctacttagcaatgataataataataataataataacgatatggcagattatatattattatataatactagtttttctagtttaaaaaaaaaaaaaaaa

SEQ ID NO: 5423 - DNA, 1599 bp, Glycine max
gaatcgaagaaaaaaaaaagtacaccatcgccacgtagtctcctgctaaagacagatctcagattctgtacgctaacatagagagttagagtgagaaagagagagatggcaacgacgacgtcgtcttcaagcgaggaagcaccgaacactaagaagaacaagaaggagcgtttaggttggatagaatggttaagaggttggttctatttggtctacgaaatgctctttcagcgcatcatggcgagccacttgcacaaccctatgcctctccctcctgtaaacgacctcacttgcattgtcaccggctccaccagcggcattggcctcgaaattgctaggcaattggctcagtcaggggcccatgttgttatggctgtgaggaacactaaggcagctcaggagttgatccagaagtggcaggttgattctgaaggattgagtattcctctcaatgttgaggtgatgcaagttgatcttctctcattggattctgtcacgaggtttgctgaagcatggaatgcacgctcagcacccttacatgttctcatcaataatgctgggattttttccattggagagccacaaaagttttccaaagatggttatgaacagcacttgcaagtgaatcatcttgctcctgccttgctttcaatacttcttttgccatcccttattaggggttctcctagtcgcattgttaatgtgaattccataatgcatcatgttggctttgtagacactgaagatatgaatctcacatctggaaaaaggaaattttctagtatggtaggatactcaagcagcaagttagcagagattatgtttagtagtactattaataaacgactccctgctgaatctggcatcagtgtattgtgtgtatcacctggaattgttcagaccaatgtggcaagagatcttccaaaacttgttcaagctgcatatcatttgatcccttacttcatctttagtgctcaagaaggtgcaagaagcgctctctttgctgccactgatcctcaagttccagagtattgtgaaatgttgaaagcagacgagtggcctgtttgtgcctttatttctcaagattgtcgtccagcaaatccatcggaagaagcgcacaacgttcaaacatcgtatgaagtgtgggagaagacattagagatgattggccttccctcagatgctgtggaaaggcttttagatggggaagaagttaaatgccgttatggacaagaacagtaatctaatatacaatatctcccttaatctgtaagggcacttccattatttatagctagtaatgagcattttcattctgaatatgtgggagaagaacccttttatatttttttaaacatgatatgtatatccattttgatcatatttatgtactcaaatgccacctgctcctcctaatgggagaatttagccagctttgaccttaaatgtcaccatagaagtaagaattaaattagtaagcactatttgttatagttgttttgacttctgatacatgtcataggtgacccacctaaataagtgaattccaacaatagtgttgctttcaattttggaatgtcaaaaaaaaaaaaaaaaaac

SEQ ID NO: 5424 - DNA, 1798 bp, Glycine max
cggctcgaggacctcgggctcagccgagacagaaaaaggggttagggtttgttcttgtgatcgaagctaagcgaagcaaaatgggtggatcagtgagggacgtgaagtcgaagggcgaggtcgacgaggtggtggcgagtggctctccggttatcctccacttctgggcgtcgtggtgcgaagcttccaagcacatggaccaactcttctctcacctttccactgatttccccaacgcccgcttcttaagggtcgaggccgaagagcaacccgagatttctgaggcttactccgtctccgctgttcctttctttgccttctgcaaggatgggaagacctttgatacattggagggagctgatccgtcaagcttagccaataaggttgctaaagtagcaggctcaattaaccctggagaatctgcatctcctgccagtcttgggatggctgcaggggcttctgttcttgaaacggtgaaagaattagcaaaagacaatgattcttcaaaggagaaaaatcaagttcaaccagggcttagtggtcctctgaaaaagagaattcagcagcttgttgactctaatcctgtcatgcttttcatgaaaggaactcctgaagagccaaaatgtggatttagcaggaaagttgttgttgtgttgaacgaagagagagtcaagtttggaagttttgatgtcctatcagactcagaggttcgtgaaggcttgaagaagttttccaattggcccacatttcctcagctttactgtaaaggagaacttcttggtgggtgtgacatagcaattgctatgcatgagagtggggaactgaaggaagtttttaaagatcatggaattgatactactaatgaagcaaaagagaaagaatcaggaaacggcaaaggtggcatctcaaaatctactgatttgagtacaaccttatcctctcgtctggaaagcctggtaaattcaagtgcagttatgctgtttatgaaaggaaagccagatgaacctaagtgtggtttcagtaggaaggtagttgaaattctccagcaagaaaatgttccctttgagagttttgacattcttactgatgaagaagttcgtcaagggcttaaggtttattcaaactggtccagttatcctcaactgtatatcaagggtgagcttattggtggatcagatattgtgttggagatgcaaaaaagcggagaacttaggaagaatttacacgagaaagggattcttcctgcagagaccattcaagatcgactgaagaatttgattgcctcgtcccctgtgatgctgttcatgaagggtaccccagatgcaccaagatgtggttttagttccagagttgctgatgcccttcgacaagagggcttgaattttgggtcctttgatatattgactgatgaggaagtgagacagggattgaaggtatactcaaattggccaacctatcctcaactctactacaaaagtgagctgattggtggtcatgatattgtgatggagctgcgaaataatggggagctgaagtcgactttatctgagtaggattattattattccttcaaataacatgtgttatgtcctagaagccattttgggaggttgtgtttgatgtcattaatgaactacatggttattttatatgctaccgtcagtgattttgaaaatgttagtgtggagcctcaactaatggtacactgaacatgcatgaattccaatcagattagaaattgttatatattacataattatttggtggaaacctctcattggtactgcccaaccaattt

SEQ ID NO: 5425 - DNA, 1630 bp, Glycine max
cccacgcgtccgtaccgcgtcagctacgtaggccccccccccccgtgtcgagcgctaaaaccgaagaagaaacagaattgaattgaattgcgtttgcgccattgaaaatcggaagtaatggaattgcattgctccgtgaaaaaattggaaaacgagaaagcgtttgagtttctcggaggcgttcctcttctgcagaggcttccgagctcgtctctgaggaagatagctcaacttgtggatgtcaaacactgtgagccaggagagtatgttgttcgcgagggtgaacctggagatggcgtgtacttcatattggatggagaggctgaggttcttggatctgctagggccaatgatgaaaatcgaccagagttccaattgaaacaatatgactactttggttatggtttgtcaaacacagttcaccaggcagatgttgttgctttgtctaagctcacatgcttagtgcttccccatgtgcactcaacactgctgcagccaaagtctatctggagagcagaaaattctctccagacatgctcacctgtggagaatatattgcatttggagccccttgagtaataccctggaattcagccttaaattaaagcatttttttattctctttggaaggtagatatcttccaaggagttacccttccagatgctccaagatttggaaaggtgtttggggggcagatgattggacaggcactggctgcagcttcaaaatctgttgactgtcttaaggttgttcatagtttgcatgcctattttattcttgcgggggatttaaacatgccaattacatatcaaattcaccgtctccgtgatggaaagagcttcgcttcaaggaaagtggatggaattcaaaagggaaatgtcatattcactctgatggcttcatttcaaaaagaagaatcagggatggtccaccaagaagtagctataccatctgtccctgctccagataagcttctgccgatggaagagctacgggagagacgtcttactgaccctcgtttaccaataacctatcggaacaaagtagctacatctcaattcatcccatggcccatagagatacgattatgtgaatatgaaactgcaacaaatatgacaaaatctcctcccagtttgagatactggtttagagccaagggaaaactttcagatgatcaagccttgcataggtgtgtggtggcatatgcttcagatctaatatttcttcaagtaagtttgaatccccaccgtgagaagggtttcaggacacgttctgttagtctggaccactctatgtggtttcaccgatccgtaaaagctgatgaatgggtgctatttgcgatctttactcctagtgcccatagtgcacgtgtctttgtcaccggccaaatgttcaatcagaagggagagcttcttgtatcattggttcaagaaggactagctaggaaaattaatcccggaaattcagccattaaatctatgttatgaactgctgaaaaatgcacagattagcatgtatccattttatagttttatttttaaaaaattccatgtatccatcaccataacatcttagtatctaaattatatatgtaaatttttgtattgctccaaaaaaaaaaaaaaaaaa

SEQ ID NO: 5426 - DNA, 1722 bp, Glycine max
acatcagttgaagcagtatccaaatcaacattcttaaccggagtttctattggtctagcatcctcgggtctacgctttgaccctgcactgctacacacgagatagaatccgtttctttcgctcttcaagaatcagctacgtaggcccccccctcacagtgcttgaaaccgttcaatcagtgtaatggcgaaggaagatgtgtttgagttcctcgggaacgttcctctgctacagaggcttcctggctcgtctgtgcggaagatatctgagcttgtgattctcaaacactatgagccaggagagtatgttgttcgtgagggagaacgtggggacggtctttacttcatctgggagggagaggctgaggttgttggctctgtcaatgcggatgatgataatcatccagagtttcaattgaaaagatatgactattttggttttggtttgtcaaatgaagttcaccatgctgatgtcatagctttgacaaagctatcatgcttggtgctgccccatgagcactcagcattgctgcagccaaagtctatctggagtgcagaaaaatctcatgatacatgctcacttgtggagcatatattgcatttggaacctatagaggtagacatcttccgaggaatcactcctccagatgctccaacatttgggaaggtatttggtggacaaatagttggacaggcactggctgcggcatcaaaatctgttgattgtcttaaagttgttcatagcttgcatgtctattttcttcttgtgggggattttaacatacccattatatatcaagttaagcgtctccgtgatgggaagagttttgctactaggaaagtggatgcaattcaaaagggaaatgtcatattcactttgctggcttcatttcacaaggaagaagtagggtttcaccaccaggaagtgtctatcccatcagtccctgctccagatacgcttttatcgttggaagagcttcgggaacaacgtcttactgaccctcgtctcccaagaacttaccggaacaaggttgctacaattgaattcattccctggcccatagagatacggttctgtgaacctaaaatttcaacaaatcagaccaaatctcctcctagtttgagatattggtttagagcaaggggaaaactttcagatgatgaagccttgcataggtgtgtggtagcatatacttcagatctaatctttcttcaagtgagtttaaaccccaaccgtaggaagggcaggaaggcacgtgctgtgagtctggaccactccatgtggtttcacagacctttacgagctgatgactggatactatttgtgatctttagtcctactgccaataatgcacgtggctatgtcactggccaaatgttcaatcagaagggagagctacttgtatcagtggttcaagaaggtgtaatgagggaagttatttctgcaaagtcagccatcaaatctaatttgtgaaaatctgaatatgcatagaactagtggttttctttttagttctgtcttgttttatagtgcatggtgaggacatctcttttgttttccttctatggtgaaccatataattggtggtgcccagtttatcaccatcatatagtgtatatttatttttaatcaacggttcaaaattgtgattgacaagtaattgatgtgttggatttatttacattaactagttttaaaatttgcaaaaaaaaaaaaaaaaaa

SEQ ID NO: 5427 - DNA, 2020 bp, Glycine max
tttttttttttttttttttaggattcattcaattcattcattcattaaagtattacaaaattgatgtatttatacaaagatagaaaataactaactagagtaaccaacactaacttactcaaataacttctagtaactataacttgagtaaccaactaatttatacaaataacttctaataactaactaaattaattttatgtctaatagataatacttgcagtatttgattgagcatatgtggcttcatgttcatatatattgtgttgcctagctaggtaaattaaatcttcattaatacttaatttaaagttggtatagctctgatgctaatcttggcttagccactgccacaagtggttctgcaagaaggatatcatcgttggactcagcaaggttgattgatgaaacattaggtggtgcagtccaagtgaagccatggagcaatctagcaaatagcatcactgtcattgtggtgccaagcatcactccgggacagccacgccttcctgtgctaaatgatatgaacttcaaatttggttctgtcaaatccacatcagacccatcactcttgaggtggcgttcaggtttgaacttgtaggtttcattccacacttttgggttcctcccaagctcttgtctgcttagcattacatggctacccttagggatgaagtaatttcccaccattgtgtcactcatagagacatggggaggaataaaaggtgcaatgggatgaaggcgaagagcttctcttgcacaagccttcacatagttgagtttaggtatatctgattcttggaccagtctctcttttcctaccacactatccaattcttcaacggctcggtggagtaactccggttggtttatcatttcagcaagtgcccattcaaaagcatttgatggattgtcaattgttgcaagcatcaattctataatttgtgcattgatctcctccaacgtcaataatgggttattgttggaatctttcaaggagaccagaacatcaagccagtcctcttcatcaacctttaatccatcattccacagcttaattctctcttgaacaatgggatcatgatacttcttgatgatctttaaagcttctttcacattcttttcatggccatccaagtcaagtcccctcaagcatggcatataatcagaaacagaaaaggcataaacgtacttgagcaaatcgaagatggaatcaacatgttccacttcctcaaaacctggccctccatcctctctacccttcccaaagtaccttgtattgaaaataattttcctggttaggttaccacaataatgccttgcaacacttctgatattcacaaggccaccaacgccatcgttcacatttttgcacttgttgtagacgtgaaacataaggttgtctgcttcttcagtcctttggccatgcagccataggtgtttgtgcggggaaagcaaatcattggttaaaattttcttcattttcttccattgggctccaaagggcccaaaaatggtggttgaatatccattactaatgagatcagtggacacactttgtgaccttgatgcaaaagttgcatcttgttttctcaagaactccctcgcaatggtggggcatgtcacagggataacataggcgtttcctaagcggatacacgcaatttcggtgttcatttctttcatgagattgtgtatccacttatgggcaggtttgtttgcaagcatttcgggaaggtttccaactataggccatggtttcgggcctgggggtagttttggtttttgcttgttggaatagttctcaatgaagttgtttcttagggctttgatcataatgataaagcaagtgatcatagcaagcaaagaaggccaaaagccttgaagatttggcaacaaaagaaaaggggagtgagccatggcttggaacagggtttttcaggtaaaaaggaaaagcaagatgaattactactttggctacggtttagagaataagtggggggggggcctacgtagctga

SEQ ID NO: 5428 - DNA, 1878 bp, Glycine max
tcgagtcagctacgtaggccccccccccccggcaagtgaagaggatgagaaaaagatggaactggaacatgtgaccagcttgtcaagaagagatcatgaaagaccaaatcccttttttcgagtgagagcagttagcttgggtggttggttggttactgaaggttggatcaaaccttctctcttcgatggcattccaaacaaagacttattggatggaactagtcttcggttcaagtctgtgtcaacagggaaatatctatgtgccaagtctggagggggaaatgtcctacttgcgaacggcacaggtgcttcaacggcttgggaaacaattacattgtggaggataaacgaagatactttcagactcagggtgttcaacaaacagtttgtggggttagatgggattaacgttgttgctgtttccgatactcccatccattctgacacgtttcgaatagtaaaagaaagtgacagttcaagtcgtgttcgaatcaaagcacccaatgggcactttatgcaggcaaagacagaggagctggtgattgctgatgtttccaatgctaacggatggggagatgatgacccaaccatctttgagatgacaatcgttgcaaccttacaaggggaattccaattgacaaatggctatgggccaaataaagctccggaaattatgaaggaacattggaacacttttattgttgaagatgatttcaagttcatgaagagtcatggattagatgctgctagaattcccgttggctggtggatagcaagtgatccatatccacccccaccttatgtcgggggttccttgcacgcattagacaatgccttcaagtgggcacagaaacatggattgaaaatcattatcgatcttcatgctgcacccggctcacaaaatggctttgacagcagctctacaagagatggttctctagagtggggaaaaacatatgaaaacatcaagcaaacagtttacgttatagacttcctaactgccaggtatgcaaaaaaacccgagcctttacgcagttgagctcttaaacgagcctttgtttcctaacgtgactctagagagcttgaccaagtactacaatgatgcttacaatgcagtgcgcaggcactcttccacagcttatgtggtgttatcaaataggttggatctctcaagtcaactagaaatcccaaacaccaaggaactcttccctcttgccacaggccttaggcgatgtgtgattgatgtccactactacaatctctattatgatatatttgaagacatgaatgcgcaagagaacattgatttcatctacaaagtccgttcatcacagttggataatattacaaccgtagatggtcctctcactttcgtgggtgaatggactgctgagtggaaggttgaaggggctaccaaaaaggattatcaaagatttgtcaaggctgaattagatgtttttgggcgagcaacatttgggtggtgttattggacactcaagaacgtcaataatcattggagtttggaatggatgatcaagaatggctacatttaagttttaaaaaaattcctcttgccgtgtgcaccctctattcctatcatattatgcccttttaatatttctcaatatcaattatgatattgatatcataattaatgtctacgtatagatctttaacgttcttcacttccggaaaggcagaaatatcaaagttgtagaccctttcattagtgaaaacggttcaaaataatgaaagtctcttctctgtttttaacataaaaaaaaaaaaaaaaaaaaaaaaaaaaaaaaaaaaaaaaaaaaaaaaaaaaaaaaaaaaaaaaaaaaaaaaaaaaaaaaaaaaaaaaaaaggggcggcccc

SEQ ID NO: 5429 - DNA, 703 bp, Glycine max
aatgcttgtaacaagtgatagtaactgttaatggacgccaagttcggaagcctcttcgaatccatcggaaacttcttcaccggcggtgaacagatcccgtggtgtgaccgtgacgtcatcgctggctgtgagagagaagttgcagaggctgctaatggtgactctgaggagcggaagaatgagagtataatgaggctgtcatgggctcttgttcattcaaggcaaaaggaagatattcagcgcgggatagccatgcttgaaacttccttgggcaatgataaaagtcctttgcatcaaagagagaagctttatcttctggctgttggttactatagaagtaatgactatggaaggagccggcagcttgtggagcaatgtttggagattgcacctgattggaggcaggcactatcccttaagaaaatagttgaagatcgaattgctaaagatggtgtaataggaattggcatcactgcaacagctgtgggacttatagttggtggcattgctacggcactggccaggaggaattgagaatcttaaatggttatttcctcaaaaataatctcaaccgaacatgagcttagcctcttttttattttactttcttctggaaacatgttaaagtcagtggcaaatagagtttcaactttcttttttttgtttgttgaaggagcaattttactcaaaaaaaaaaaaaaaa

SEQ ID NO: 5430 - DNA, 2413 bp, Glycine max
gtgaattatttaatgcgcgaaaatgggcagtgaggagaatagtgtgtgatccacttctttcatcgcttcggatcttcaatctcatctccgatctcaaaatgcccgctgtttatggagctcgcttgaccaccttcgaagactccgagaaggagagtgaatacggttacgttcgcaaggtttcaggacccgtcgtcgttgcggatggcatggctggtgctgctatgtatgaactcgtgcgtgttggtcatgataatctcattggtgaaattattcgtctcgaaggggattctgctaccatccaagtttatgaggaaactgctggtttgatggttaatgatccggtcttacggacgcacaagcctttgtccgtggagttgggtcctggaatattggggaatatttttgatggaattcagaggcctttgaaaactattgctaaaagatctggtgatgtctatattcctcgtggtgtctctgttccagcactcgacaaagatacactttgggaatttcaacctaagaaaattggtgaaggtgaccttttaactggtggagatttatatgctactgtttttgagaacagtctaatgcaacaccatattgcacttcctcctgataacatgggaaagattacctacattgcaccacctggccaatattccttacaggatactgtattggaacttgagtttcaaggtgtcaaaaagaaattcactatgcttcagacttggcctgtacgtacacccaggcctgttgcatcaaaacttgcagctgatactcctcttcttactggtcagcgtgttcttgatgcccttttcccctcagttcttggcgggacttgtgccattcctggtgcttttggttgtggtaaaacagtcattagtcaggctctttctaagtattccaattctgatgctgttgtatatgtcggctgtggggaacgtggaaacgaaatggcagaggttctaatggactttccccaacttacaatgacattacctgatggtcgtgaagaatctgtcatgaagcgcacaacactagtggctaacacttcaaacatgccagtggctgctcgtgaagcttcaatttatacaggaatcacattagctgagtattttagagatatgggttataatgtcagtatgatggcagattctacatctagatgggcagaagcattgcgtgaaatctctggacggctggcagaaatgcctgcagatagtggatatcctgcataccttgctgcacgtttagcctctttctatgaacgtgctgggaaggtaaaatgtctaggaggccctgaacgtacaggtagcgtaactattgttggtgctgtttcgccacctggaggagatttctcagatcctgtgacatctgcaaccctgagcatagttcaggttttctggggtttggacaaaaagcttgctcagaggaagcactttccttctgtaaactggcttatttcttattcaaaatactcaacggcacttgaaaccttttatgagcaatttgatccagattttatcaacattaggacaaaggctcgtgaagttctgcaaagggaagatgacctgaatgaaattgttcagcttgtgggcaaggatgctttagctgaaggagataagatcaccttagaaactgcaaagcttttgagagaggattatcttgctcaaaatgcctttacaccatatgacaaattctgccccttctacaagtctgtttggatgatgcgcaacattatccatttctacaatttggcaaatcaggcagtagagaggggagctggttcagatggtcagaagatatcttacacccttatcaagcatcgtatgggagatctgttctaccgattagtgtctcagaaatttgaggatccagcagaaggggaagctgctttggttgctaaatttcagaagttacacgaggacctgactaatggtttccgcaaccttgaggacgaaacccgatgattgaagatttggtatggtagtttgctcaaataatgtgttatttccaattgtaagaggcagtctagcatcgcagggttacaccgtcccgagtgttcttatatttgactgtttgattcattcatatcacatttatttcctttcttggtgctggtttggcttttgatctagtctcatgtgtagctataatcatgtgtttcagtcatcctcagtttgtttattgaaaataagaaacgaaacttgctctttcaatatgtatttaggagaataaagttattttagaacatgaagtgcctgcggcaatcggattccggattcatataggtggaatttttggtggaagtggattatcttgaatcctgtatttcatagatggacttcttgtagcaaagagtatttaattatttattcaaaatatgttatacatgttaaaaaaaaaaaaaata

SEQ ID NO: 5431 - DNA, 2502 bp, Glycine max
ccacgcgtgcgccgtgggaggaaggaaagagcatacgtgttgcgttagtgtttagtgttatatctccgcagtggatcaaatcaaacaaacacttccatccatcaccctttctctctgcttagggttttgatcgcatcggatcttcactctcttctccgatctcaaaatgcccgccgtttatggagctcgcttgaccaccttcgaagactccgagaaggagagtgaatacggttacgttcgcaaggtatcaggaccagtcgtcgttgcagatggcatggctggggctgctatgtatgaactcgtgcgtgttggtcatgataatctcattggtgaaattattcgtctcgaagggaattctgctaccatccaagtttatgaggaaactgctggcttgatggttaatgatccggtgttacggactcacaagcctttatccgtggagttgggacctggaatactggggaatattttcgatggaattcagaggcctttgaaaactattgctaaacgatctggtgatgtctatattcctcgtggtgtctctgttccagcactcgacaaagatacactttgggaatttcaacctaagaaaattggtgaaggcgaccttttaactggtggagatttatatgctactgtttttgagaacagtctaatgcaacaccatattgcacttcctcctgataacatgggaaagattacctacattgcaccacctggccaatattccataaaggatactgtattggaacttgagtttcaaggtgtcaaaaagaaattcaccatgcttcagacttggcccgtacgtacaccaaggcctgttgcatcaaaacttgcagctgatactcctcttcttactggtcagcgtgttcttgatgcccttttcccctcagttcttggcgggacttgtgccatacctggagcttttggttgtggtaaaactgtcattagtcaggctctttctaagtattccaattctgatgccgttgtttatgtcggctgtggggaacgtggaaatgaaatggcagaggttctaatggactttccccaacttacaatgacattacctgatggtcgtgaagaatctgtcatgaagcgtacaacactagtggctaacacttcaaacatgccagtggctgctcgtgaagcttcaatttatacaggaatcacattagctgagtatttcagagatatgggttataatgtcagtatgatggcagattctacatctagatgggcagaagcattgcgtgaaatctctggacgactggcagaaatgcctgcagatagtggatatcctgcataccttgctgcacgtttagcctcgttctatgaacgtgctgggaaggtaaaatgtcttggaggccctgaacgtacaggtagcgtaactattgttggtgctgtttcgccacctggaggagatttctcagatcctgtgacatctgcaaccctgagcatagttcaggttttctggggtttggacgaaaaggcttgctcagaggaagcactttccttctgtaaactggcttatttcttattcaaaatactcaacggcacttgaaaccttttatgagcaatttgatccagattttatcaacattaggacaaaggctcgtgaagttctgcaaagggaagatgacctgaatgaaattgttcagcttgtgggcaaggatgctttagctgaaggagataagatcaccttagaaacttgcaaagcttttgagaaaggattatcttgctcaaaatgcctttacaccatatgacaaattctgccccttctacaagtctgtttggatgatgcgcaacattatccatttctacaatttggcaaatcaggcagtagagaggggagctggttcagatggtcagaagatatcttacacccttatcaagcatcgtatgggagatctgttctaccgattagtgtctcagaaatttgaggatccagcagaaggggaagctgctttggttgcgaaatttcagaagttacatgaggacctgactaatggtttccgcaaccttgaggacgaaacccgatgattgatgattgaagatttggtagtttgctcaaatattgtgttatttccaattgtaagacgcagtctagcatcgcagggttgcaacgtcccgagtgttctcatatttgactgttcgattcattcatatcacatttatttcctttcttggtgctggtttggcttttgatctagtctcatgtgtagctataatcatgtgtttcagtcatcctcagtttgtttattgagaataagaaacgagacttgctctttcaatatgtatttaggagaataaaattatcttaggacatgaagtgcctacagcaagcggattctggattcatataggtggaatttttggtggaagtggattatcttgaatcctgtatttcatagatggacttcttgtagcaatgagtatttaattatttattcgaaatatgttgcatgtctagttttatcaaaaaaaaaaaaaaaaaaaacccaa

SEQ ID NO: 5432 - DNA, 1353 bp, Glycine max
tcagctacgtaggccccccccccatttatattatgaccttttggctgtgcagggtggtgaggatgatgatattgttcaatccaagtatgattcagatgaagatcagggtgatcaagaagcaaatccattaatggtgccacttaatgatggggcagagctcacccaagaggaggtcatgaataagtggtttagtcaggatgtctttgctgaagctgcagaggaaggagactttgagaaggatgagagtaaagatgaaatggatatagatgagcctaaggagaagatatccattgccaaaaaggtcaaagaaaataaaacagcagctccagcagtggtagctcaccctcagcctcaaccatccaaagcagcggatgactttgaaatagttcctgcacctgatactgattcaagtgatgattcatcctctgatgaatgggaagaagatactgaagcaaaagctgagatattggcttatgctaagaagatgatgaggaaaaagcaacgggagcacatgctggatgatgcatacaacaagtacatgtttgatgatgaaggactgcccaagtggtttctagatgaggagaggagacatcgccaaccaataaagcctattaccaaagaggaaattgctgcgatgaaagcacagtttaaagaaattgatgctcgacctgcgaagaaggtggcagaggccaaagcacggaagaagcgtgttgcaatgaggaagcttgagaaggtacggaagaaggccaatgccatatcagatcagacagagatatctgatagttcgaagaggaagcaaattgaacaactatataaaagggctgttcccaagaggcctaaaaaggagtatgtagttgcaaagaaaggtgtccaggtaagggctggcaagggaaaagtccttgttgatcgcagaatgaagaaggatgctaggaaacatggaatgggtaaggctggaaaaggaggttctaagacgaagggcaaggctccaaagggcaaaggatcttcaaaggcctctgctaagaaagggaaacagagaactaaatgaaaataggttgatacgtgaagatcgtcgaagttcaaaatcatgggctttttcttattttctgtgcccgaattttgtttgttcattttttttccggctttttattgtgcaattgatattagaaattattgaattgatctgttttgttcttcagaggcaaatcttagtttaaatgaattttgtcttaatcagcagctaataaagttaatttagaaattgattatggacaacggtatctttcagtgctcgattagagttctgtagaattaattttataaaattgataattaaatcaaaaaaaaaaaaaaaaa

SEQ ID NO: 5433 - DNA, 1227 bp, Glycine max
gagactcttcattttcccccgcgtccggtgcgcgagagagagagatggatactggtatgctatgaagatgggatctcagactcagcgtcatcaccactctctttgattctcttcaatcttgagtctccagtattactttgagtaccacttcaacaaactggtgctgctttgaaaaagtctgatgggttcaagattcccatctcatcagctcagcaatggcctgtatgtatcaggccggcctgaacagccaaaagaaaagactcccacaatgagctcagttgccatgccctatactggtggtgacatcaagaggtcgggagaattaggcaaaatgtttgatatcccaatggatggctctaaatctagaaaatccggtcccataagtaatgctccttcaaggacaggatcatttgcaggtgctgcttcacactctggacctatcatgcaaaatgctgcagctcgttctgcttatatcacatctggtaatgtatctactggaggcatgtctgcttcagcctcaatgaaaaagaccaactctggtccattgaataagcatggggaaccagtcaagaagtcatctggccctcaatctggtggagttacacgccaaaactctggtccaattcctccagttcttcctacgactggtcttattacatctggcccattaaattcatctggagctccaaggaaagtgtctggtcaattagattctacaggatcaatgaaatcacatagttcctttgtagcccacaatcctgctgttaccactcttagccttgatgatgaatattccttcaggaggaacttcccgaagccaatattgtggtctgtgattctgatttttgtaatgggattcattgctggcggttttattcttggagctgtccacaatgccattctcctcattgttgttgtaattctttttggtgcggttgctgcattattcacttggaatagttgttttggaaggaaagccattggtggtttcatttcccgttatccagatgcagagcttagaactgccaagaatgggcaatttgtgaaggtttctggggtgggtacctgcggtaacgttccactagagtcctcctttcagaaggttcctagatgtgtatatacatccacaagcttgtatgaatatcgaggatgggattcaaaagcagcaaacccaaaacatcgccgttttacatggggacttagagcagctgagagacatgtggtgga

SEQ ID NO: 5434 - DNA, 2350 bp, Glycine max
tcagctacgtaggcccccccccccaaaccattcttgttgtagtacttgtgttacttctccttggttgcaccatgtcttgctatttgtatcatcttgtgtaccttcttaagctttgagcaattcccttttacttttatttcactccatgatcatcactcacacatcaaacactactactagctccttgtatgagtgtcattccttctagctaaatctctctcttttggggtatggaattcaacaagttcagaatcagaagctatgaggggcaatctgatagggctcaagtggaagatcttgagagaagatgcgaggtagggccatcagaaagcgtgtttctcttcacagacactatgggtgaccccatttgtaggatccggaacagtcccatgtacatgatgctggtggcagagttggacaatgaattggttggtgtcattcaagggtctataaaagtggtcacagttcatggtcaccctccaaaggatttggcaaaggtggggtacgtccttggcctaagggtatcacctcagcacaggagaaaagggattggctcaagccttgtgagaacactagaagaatggttcacttcaaaagatgtggactatgcatacatggcaacagagaaagacaaccatgcctcagtgagtctcttcatggacaagtttggctacaccaagttcaggactccagctattcttgtcaaccctgtgaaccatcattgctttcaaatatcacccaacattgagatagcaaggttgaagattgaccaagctgagtacctctatagaagattcatggggtccacagagttcttccctaatgacatagggaatatacttaggaacaagctaagtttggggacatgggtggcatatttcaaaggagatattgcttggggtgattttgggtcagatggacaagtaccaaatagttgggctatgcttagtgtatggaatagtggggagatattcaagttaaggctagggaaagcacctttttcttgcttggtatgcactaagagttggtggttgattcataagatcttcccatgtttgaaattgccaaccatacctgatttcttcaacccatttgggttctatttcatgtatggggtgcaccatgaagggccattttcagggaagctagtgagggccttgtgccaatttgtgcacaacatgggtgctgagtccaaggatgagagtaattgcaggatcattgtgactgaagttggaggaagagatgagctcaaccaccatatcccacattggaaattgctctcatgcccggaggacttgtggtgcataaaggcgttgaaaaatgaagggacaaataacaagttccatgaattaacaaccaaaaccccaccaacaagagctctttttgtagacccaagagaggtttaaagcatgcatgatctcccaaaaaaaaaaaagaaaaaaaaagtaatgaaaggggacaagaaaaaagcttggaaaatatcttcaccttaattttttttttcctttccttagctttgtctcagagaaccaaagcccacctcatgtattgtgtgataagtccatccatctctcctggtgggggtttttctctagttcctttcacatcggtgacacaaaatctcaaaagatatccataatttaggtgccacactttggtgttcttctttgcaattccccatcctgtgcctcatgactctgactactcaatcaccatggtggtccaaactttgtcccttcccctctagtaaattttttagctggaccctcctccctcgctttgtcgcatcgcatcgggatatggtctctttaacatgtatgtatgttaatgttaatgtcatcactaaaaaaaaaaacagaggcttcgagccattttatatatagtgtgagatcatgaaagtaacccttagttattattctctattctatgatctattcaagccaagagttagacaacttctgttccaagataaagggggaaaagatagagaaaaaaaaatgcaagtgagtctcaaggggttttggtttcttcttcattttgtgatcgagcattgtattgtctctaaccccatgaggaatgttgatgatggtgtaaagtttccttggctcgtgtgggaataaaaaaaaaactcaaaagagactttgcttcttcaaaaaaaaaaaattcactttttaccattatggcaaatgttagttaagtagctagctagggaccttgctctcggttagaaccatataaagagcgagttggactaataaagttagtggatttgtatttagaaagactctgcaactcttccttctacttctattcagcacgaccatagaatagcaatgatgaagcttctaat

SEQ ID NO: 5435 - DNA, 1128 bp, Glycine max
gcgctgacaattaacagaagaccaagaccatattaggtttgaagccaatattttgtgaatatatatattaggctgctactaacaagctttggctcacgggtaagctggctagctatgggggaattcaagcactttgtaattgttaagttcaaggaaggtgtggccgttgacgagctcacaaaagggatggaaaagttggtcacggagattggtgctgtcaagtcctttgaatggggacaagacattgaaagcctagatgtgttgagacaaggtttcactcatgcattcttgatgacattcaacaagaaagaagactttgttgcatttcagagccacccaaatcatgtcgagttctcgacaaagttttcggcagctattgagaatattgtgctactggatttcccatctactcttgtgaaggccccagcatgatcctaaagatattcaagcaataaagattccctctttaaatttgtttagtgtatgtttgtgcctgtgtccggtatctttagttttgttatgagttgttactaccactcgtgataattcatggtcataacattttgaaattttgtaacgctcatcagttttgaaagccattttgaatggttgttaatggatgataatggccaataaagaattgtaacagccaataatgagtggtaatggctgataaatgcattcttgatggtagaatgcctatataagcacatgaatttggtccctgagctcatcccttcgaattcagtcttatacaccatctagagagtggaagagagagagcttggaagaaccaaaacaagaaactcttcatagcaatggctggaggtatgatttgatctgtaatttccgcattttattaataacctgtgtttctttgtagtttgtaatatcacaggttaaaagagatttgttctaacatttggtatcagagcaagaattgcctctgccttgtccattttcgtttttcggtattttccgatttgattttgtttatggtatgaagggccttgtttcttaaaaaaaaaaataaaaaaaatatacttcgagacatatccataacgttggatttcctttcgtgaaaaatggtgtccggatcagtgataaacgaacgggtctgcgtatggg

SEQ ID NO: 5436 - DNA, 1484 bp, Glycine max
gcacttcacttgttctgcattgaccatagcttctctctttctttcctaattaatccttccatgcaaacaaacgctctctctcatactcatagtgacacacacagcttagtttcgttgtattatatacagtctattcactcaaattcagtgtcacaagttctcaagattgttgtccggcactatctgcagcaccattcaattcttcactctatattggatacacacacttctagtatataccaagtgattgatgatgttgtcagcaaaatctgaatcggatatcacaagcttagctccatcttcaccttcaaggtcaccaaagcgccctgtgtactatgtgcaaagtccttcaagggattctcatgatggggacaagtcatcttcaatgcaggcaactccaatatcaaacagtcctatggagtctccctcacatccttcgtttgggcgtcactcgaggaactcttctgcgagccgcttttcggggattttccggtcatcttctggaaggaaagggagtaggaagaggaatgataaggggtggcctgagtgtgatgtaattctggaagaagggtcttatcatgagtttcaggacaagggtttcacaaggcgcttccaggctttgattgctgtccttacctttgtggttgtcttcaccgtgttttgcttgatcatttggggtgctagcaggccttacaaggcagaaattgctgttaagagtttgacggtgcataatttctatgttggagagggttcagacttcacgggtgtcctcacaaaaatgctgacagttaatggcactttacgcatgagcatctacaaccctgctacattttttggcatccatgtgcactccacacccatcaatctagttttctcagaaatcactgttgctactggcgagctgaagaaacactatcagccaagaaaaagtcaccgcattgtatcagtgaacctagagggtactaaggttcccttatatggggctggatccaccataactgtatcccaaactggtgttgaagttccactcacattgaactttgaaatccgttcgcgtggaaatgtagtgggtaaactggtcaagacaaggcatcgtaaggaaatcacttgccccttggtcctcaactcttctcgatcaaagcctatcaaattcaaaaagaattcatgcacctatgattgatcagtgatcaatgtccattttcatagcttatctgttttgagagtgtagcttaaaattgtataatctgtgttttgtgccaagcttcagatcataaggtccatttggtttgcaatagaagcaaaatatgcactcgaaaaaatacttcttacatacaactagtccccctgaatccccactctgtactttactcttatgagccttgtgcaaataaatgcatgtatgtaaatttgtatatgcatatgcataaaatgaagaaacaattcgcgagttcattactgaggaaattaaaaaaaaaaaaaaaaaa

SEQ ID NO: 5437 - DNA, 1811 bp, Glycine max
gcaatttaactagtgacttttcaatctctgatactccacaaatttcttccctcaggtctctctctctcctctcacaccgcgtcaccgcccccccactgtcgccgccgccgccgccaccccccctcacagttccattctcttctcgttttcccttcgtctcactctcacacgaaaaccagttctcgtcgcggcggcgctctcgtcagtcgctgccgtcgccgcctccgttgacgtcggaggttccttcaacaccaaattaaaagtgaaaggagatagtgctttgtgtgccttgaagttcaattacccttcaacctctggacttaattttcctttcttcttcccttcattccaatctgttacccatagtgttttctagaaccacaaaatgcttcaacaccaaattgttcagtcccctgctatgctaggccttgcaaatcctaactccccatcaattccgaaccctacccctccaaagctccctccaacacagacccatcacccccaagaccgcaactcttcaaccccttcttcagctctcttgtctctcctcccacctcacctcagagcccaagcacttcttgcccaaatggcttccttagcctccaagctctttgaagtttcccccaatcggtccctttgggtcactgcctttcgtggatcccttccaactttcctctcttcccattcgtctaccccacttgacacttctccttctgatggcaaagaaatcatctccctttttactgttctccaaacccaaatctttgaagctattgctgaactccaagagattctggaccttcaagatgccaagcaaaagattgactgcgaaattcactcccaagattcaacactacttgcatttgccaacaaactcaaagaagccgagagttgcctcgacatccttgttgatgattactccgattaccaccgctccaagcgatcaaaatctggagatgatgattcaatgacttcatcaaccatctcgtctcagctgaagctgtcggatatgttatcatatgcccaccggataagttacaccacctttgcaccaccagaattcggagctggccaagctcctctccgtggcgcactgccacctgcaccacaagaagagcaaatgagagcttcacagttgtataattttgctgaccttgatgttggattgcctaaagaagttgaaaccaaggagaaaattgttgaagctattgttgagcctccaccacaggtggataccaatgcagttccgaatttgtctgcatttcaaggaatgttacctccgatgccacctggctggaagccgggaatgcctgtgcaactgccaattgatttgccactgcccccgcctgggtggaaaccaggggatcctgtgccattgcctcccatggactcgcttcaaataccgagatttgcagagcaacaaatgcaacctcacattcctcagcccaaacaaccagaagttattcaagtgcaaccagttaatttggaccttggaggaagtgatactagtgattatagtagtgatgatgccagctctgatgatgaagattgacaagtttgcaaaactgatcaatctcaaattaaatactctacaggagggctattgagagagaaaaggactaagaagtatgagcagtaggggctggaattgaagcatccctagacatctagctacatcaatcaatttgagaaaataatccattgcccattggtaacccaccaagattttgtttcttacttcatttacttttttgtccaaactcagcctgtagaagctaaatttttaacaaggttgagtctgatatttttct

SEQ ID NO: 5438 - DNA, 1416 bp, Glycine max
tcagctacgtaggccccccccccagtactcaccgctgtttactctgtttattatttatggtcactcgttacaaaaaatgcactatcttgctttcaatccaagttcactttggtggcagttgaacgagtttgcaaccccacacacaaaaaccaaacccttaaaaatgtcatccccctcgccggtggccacggtggtctccgccgccgcgctgtacgaccgcgccaaagccgtgaaagaattcgacgaaaccaaggtcggagtcaaaggtttgatcgattcgggaatcagaaccatcccccctttcttcgtccacccgcccgaaaccctagcggacctcaagcgcggaaccaaacccgggtccgcgccggagatccccacggtggacctcgccgccgaggagagctcccgcgccgccgtggtggagcaggtccggcgggcggcgagcaccgtgggattcttccaggtggtcaaccacggcgtcccggaggagctgctattgcgaacgctggcggcggtgaaggcgttccacgagcagcccgcggaggagagggcgcgggtgtaccgtagggagatggggaagggtgtgtcgtatatttccaacgtggatctcttccaatcaaaagccgccagctggcgcgacaccatccagattaggatggggccaaccgcagtggattcgagcgagattccagaagtgtgtaggaaagaggtaatggagtgggacaaggaggtggcgcgtgtggctcgtgtgttatacggtttactgagtgaagggctgggattgggtacggagaggctcacggagatgggtttggtggaagggagggttatggtggggcactattacccgttttgtcctcaacctgatctaacggtggggcttaactcgcatgcggatccaggggctcttacggtgttgctgcaggaccatattggggggttgcaggttgagactgaacagggttggatccatgtcaagcctcagcctaacgccttggttattaacattggagatttccttcagataatttctaatgaaacatacaagagtgctcatcatcgggtgttagccaattattctaacgagccacgagtctctattgccgttttcctcaacccaagtgatagggagaaacattttggaccattaccagagctaacatcaacagagaaaccagctctttataggaacttcacgttccatgaatttatgacaaggttcttcacgaaagagttggacggtaaatcattgacaaatttcttcaggcagtgatgtacacatatatattagcatctatttctggtgatgtatcaatgttggatatgcgatgatgaattttatgcttaataagtttgtgaataaaaggtgctatatgtttgacaaaaaaaaaaaaaaaaaaaaaaaaaaactcgagc

SEQ ID NO: 5439 - DNA, 1026 bp, Glycine max
cccacgcgtccgtacggctgcgtgaagacggcagaaggggatccacatttgtctctcatctttcaatttcaatcaacggttatacccttttctatttgagcatcatcatgtccaccgcagcgcagcccaaggccaagaaaacggcgtcgtccaagaagcccctctcccatcctaccttcgccgtgatgatagcggaggcgatagcgagtctgaaggagagaaccggttcgagccaatacgcgataaccaaattcatcgaaggcaagcacaaggagttgcctccaacctacaagaagcttgttctcgttcatctcaagaagtctgttgctgctggcaagctcgttaaggtcaaaaactctttcaagctcgcaccgactaagtctgctcctgttaaagccgctgctgctcccaagaagcccaccaaagctgcggctaagcccgccgccaagcccgcttccaagcccaaagctgctgcacctaagaagaaggctgttgccaagcccaaggccaaagctgcggccaccaagcccaaggccaagcccgctaaggccgcgccgaagaaggtcgccgctaagcctgcgaagaagactcccgtaaaggccgtgaagaagcccaagagcgtcgtgaagaaacctaaaagcgtgaaatctccagcgaaaaaggccaaggctaagaagtgagggattggagtgggttttagtttggcgttatagtgtttatgtatttcgggttgaatcgtagtataggtggatatatttttagaagagtattgatgtaaattcctttgctagaaattttaacaagtgttcttcttttgcattgaaaaaaaaaaaaaaaaaaaaaaaaaaaaaaaaaaaaaaaaaaaaaaaaaaaaaaaaaaaaaaaaaaaaaaaaaaaaaaaaaaaaaaaaaaacccccaaaaaaaaaaaaaaaaaaaaaaaaaaaaggggccctttttaagggcccaaatttttttccccgggttttgcaacttaaaactttttttttggggcccccaaattaaat

SEQ ID NO: 5440 - DNA, 922 bp, Glycine max
ccccacatttgtctctcatctttcaatttcaatcaacggttatacccttttctatttgagcatcatcatgtccaccgcagcgcagcccaaggccaagaaaacggcgtcgtccaagaagcccctctcccatcctaccttcgccgtggtacttcctaattactctctttcgattcaatttcgaaatcaattgtgtttaattagtttcattgttttgtagatgatagcggaggcgatagcgagtctgaaggagagaaccggttcgagccaatacgcgataaccaaattcatcgaaggcaagcacaaggagttgcctccaacctacaagaagcttgttctcgttcatctcaagaagtctgttgctgctggcaagctcgttaaggtcaaaaactctttcaagctcgcaccgactaagtctgctcctgttaaagccgctgctgctcccaagaagcccaccaaagctgcggctaagcccgccgccaagcccgcttccaagcccaaagctgctgcacctaagaagaaggctgttgccaagcccaaggccaaagctgcggccaccaagcccaaggccaagcccgctaaggccgcgccgaagaaggtcgccgctaagcctgcgaagaagactcccgtaaaggccgtgaagaagcccaagagcgtcgtgaagaaacctaaaagcgtgaaatctccagcgaaaaaggccaaggctaagaagtgagggattggagtgggttttagtttggcgttatagtgtttatgtatttcgggttgaatcgtagtataggtggatatatttttagaagagtattgatgtaaattcctttgctagaaattttaacaagtgttcttcttttgcattgaaaaaaaaaaaaaaaaaatacagtttcgttttcttcatctccgaattggatatagccttctttatgat

SEQ ID NO: 5441 - DNA, 1207 bp, Glycine max
ggaattttcggctacgtaggcccccccccccccccggagggaaattcggataaaaaaagaagaaagcgaaacaaacttaaaacgggtagacagaaattgttgtgcatcactcgcgtcgacgtctgtgtatgaatgtgtttgtgttgtgaaagagaaaatggaagctgtgatgggactgatgcggaggattccgccgaaacacacagaaacagctctgtctgcgcttctgagccttatgcctcaccactcctccgatctcctctctcaagtcgatcagcccctccaggttctgtgcgatgtcgaatgcggcaaggagttcattttgtgtgaatacaacagagacgccgactcttacagatcaccttggtcaaataaatatcatccaccattagaagatgggtccctcccttcttcagagttgcggaagcttgaaatcgaagcaaatgacatatttgcaatatatcgtgaccagtattatgaaggtggcatttcatcagtttacatgtgggaagatgataatgaaggtttcgtagcctgctttttaataaagaaagatggctcaaagacagggcagggtcgacggggatatttagaggaaggtgcatgggatgctatacatgttatagaggtgggaccagaggaagaagaaaacaccaattatcggttaaccagtacagttatgctgactctgactacaaataatgagtcatcaggaactttcagtttatctggatcaattagacgtcagatgagtatgaagctatcagttgctgatggtcatctttgtaacatgggaaggatgattgaagaaatggagagtaagctgaggaactcactagatcaggtatactttggcaaaacaagagaaatggtttgcacactgagaccaccatctgaagtggcacagatgagaatgcctgatagcgcctgagagctgacgtgtcgttacttggcgtataagagagaaatttactttgttttcttcatatgtttttgcgtgttggctggtaacttgtgtcacagtatttgaaggtaggtagtttcacaatggttggtggttcgggtgaccattgttttacagaggtagttgtgtttgttgtttgagtgtcaattgttgttttctgtagtggataagcatcatgtttgttgttgatacttgactgatgattcaacaaaacagtgaaattccaaaactgctgcctatggg

SEQ ID NO: 5442 - DNA, 1195 bp, Glycine max
acgcgcacgcgcagaaattgttgtccctgactggcgtgggcgtctgtgtatgaatgtgtttgtgagaaaatggaagctgcgatgggactgatgcggaggattcctccgaaacacacagaaacagctctgtcagcgcttctgagccttatgcctgacaactcctccgatctcctctctcaagtcgatcagcccctccaggttctgtgcgatgtggaatgcggcaaggagttcattttgtgcgaatacaatagagatgccgactcttacagatcaccttggtccaataaataccatccaccattagaagatgggtccctcccttcttcagagttgcggaagcttgaaattgaagcaaatgacatatttgcaatatatcgtgaccagtattatgaaggtggcatttcatcagtttacatgtgggaagatgataatgaaggtttcgtagcctgctttttaataaagaaagatggctcaaagacagggcagggccgacggggatatttagaggaaggtgcatgggatgctatacatgttatagaggtgggcccagaggaagaagaaaaccccaattatcgtttaaccagtacagttatgctgactctgactacaaataatgagtcatccggaactttcagtttatctggttcaattaggcgtcagatgagtatgaagctatcagttgctgatgggcatctttgtaacatgggaaggatgattgaagaaatggagagtaagctgaggaactcactagatcaggtatactttgggaaaacaagagaaatggtttgcacactgagaccaccatctgaagtggcacagttgagaatgcctgatagcgcctgagagctgatgtgccgttacttggtgtagcagagagaaatttactttgttttagcgtattggctggtaacttgtgtcacagtatttgaaggtaggtagtttcacaacggttggtgtttctggtgggtggccatggttctacagaggtagttctttttgttatttgagtgtcaattgttgttttctgtagtggataagcatcatgtttgttgttgatacttgactgatgattcaacaaaacagtgaaattctaaaactggtgcctaggagaatgcttgacatgatacccttgtgtggaaatgaatcaaatgatatctcgtgccattacaacttacaaggtggattattatttccc

SEQ ID NO: 5443 - DNA, 1997 bp, Glycine max
  misc_feature (1966)..(1966): n is a, c, g, or t
  misc_feature (1968)..(1969): n is a, c, g, or t
ccggaattcccgggtcgacccacgcgtccgcaaagctggtgcttctttttctctgcagcagcctcttcgatcccgctggtgctcacttcgatcccgttggcgctctcttcgattcagatgcagatgcaacaaacgcagcagcaggccacggcgacaccattctcgacctgcactcctcctccttcctccggtggctccgcgtccgaggcaccgccaaagcaggtggctcaagcaatggacaagctcggacaggccgaacgaatcatcgccgacatccgaatcggcgccgaccgcctcctcgaagcgctcttcgtcgcggcggcgcagcctcaccaaggcaacaagcctctccaagtcttcctcaaagaagacgcatgcatgcgtcagtatcttcaagaccttcgatcgcttggtaaggagctagaagagtctggagttctcagcgaatcagttcgatcgaggaaagatttttggggcttgcatatgccactggtttgtccagatggcgctgtggttgcgtatgcgtggaaacgacaacttgcaggacaagcaggtgcttcggccgttgacaggaccaggttagctctcaaagctttcactgatcagaaaaggcgttttttcccacatcttgatgatggacttgaaactagtgaatcagcatcgaagaaatgttgtgggtctgaagaaattgcagtggatcccaaggaaggaattagttttctaaggacgctgccggatgttctgaagtccttggagaaggatgtaccaaatctgaaaatattaacttttgaacgattggactggttaaaaagagcttccacacttacctcgtcaacaaatgagaattctttggaacataactatcatggttcgaataagctaaggctaggatcagtgggaaccgtccctgcagagaaggttgcagtgatagaattgttattcccgtgtgtcttcagggctgttatatccttacatcctgctggttccatggatccagatgctgtagctttctttgctccagatgagagcggaagttatgtgcatgcaagggggttttcagttcatcatgtgtttagacatattacggagtatgcagcgacagctctgcagtattttcttgggaaccaatctgaaacgtgtctgtattttcttctgcactggatttgcagctaccagacactgttttcaaaaccttgcagcaaatgttcccggctacttgcaatggataaacaatcaactttattgttacctccagtccatcgtccttattggcagttttccttttctaaaattttgttaaacatatcctcaaaggaccagaattctgatactactcaggcttatcatattgactgcctctctgaggaaacataattgcatctaccagtgactcaggtataacccaagtgcccgattcaatgtggaactaccaggagcaagagtttccatttcattgatgtatgtatgttccccttttcctgtcatgtataggttggaaggtaaggggttggtgaagcgatttggttatctttggtctatatttttcatctcttagattggaattggatcttcaggaaattgacgagtgccttgcttgttttgtaagcctcatgaaagtggcagccatctgttctaaagatttctcagatattcattgagattggttttttggataccaagaagttctcacgtataattgccactagaccaaaaagtacaagataggaacattatgacctgcgtatgctaaatgaaagtgccagctgactgtaatttttgaaatttatcagcatgtgaatacattataatgaccgtctgcaatatttcttattttaaaatgatgctgactacaatgtagtacacaactaccttctccgtataatggttattatataatcactacaaaattacagtgtattgcacaaaaaaaaaaaaaaaaaaaaaaaaaaaaaaaaaaaaaaaaaangnnaaaaaaaaaaaaaaaaaaaaaaaaaaaa

SEQ ID NO: 5444 - DNA, 621 bp, Glycine max
cccacgcgttcgcctctcgagccgaatcggctcgaggccacgggcaaatgcagatgcagatgcaacaaacgcagcagcagctgcaggccacggcggcaccattctcgacctccactcctcctcctcctcctccttcctccggcggctccgcgtccgaggcaccgccgaagcaggtggctcaagcaatggacaagctcggacaagccgaacgaatcatcgccgacatccgaatcggcgccgaccgcctcctcgaagcgctcttcgtcgcggcggcgcagcctcaccaaggcaacaagcctctccaagtcttcctcaaagaagacgcatgcatgcgtcagtatcttcaagaccttcggtcgcttggtaaggagctagaagagtctggagttctcagcgaatcagttcgatcgaggaaagacttttggggcttgcatatgccactggtttgtccagatggcgccgtggttgcgtatgcgtggaaacgacaacttgcaggacaagcgggtgcttctgccggtgaccggaccaggttagctctcaaagctttcactgatcagaaaaggcgttttttcccacatcttgatgatggacttgaaactagtgaatcagcatcgaagaaat

SEQ ID NO: 5445 - DNA, 1762 bp, Glycine max
caaatatatcagaggacaggtctttggaattgaagaggcttacctcatctgtagctcatttgtctcttgtagacagtactgtaacacaagcttcaacttcagacagggtgaaatcatttcagactgatgaagatccttccttggtggagcttctatttcagtatggtcgttatttgcttatttcttcttcacgtcctggaactcaggtggcaaacctacagggaatttggaacaaagatcttgagccagtttgggagtacgtttacattctattttatttcaaatggatatgcttttaaacaaggcttgctatctgttattagatgtcaagattaatcagtggagctccccacttgaacatcaatcttgaaatgaactattggcctgctcttccttgcaatcttagcgagtgtcaagaacccttgtttgattacatttctcttctgtctgtgaacggcagtaaaactgcacatgtgaattaccaagcaaatggttgggtggcacatagtaaatcagatatatgggcgagaacatcagcaggtcaaggtgatgttgtgtgggccttgtggccaatgggtggagcatggctttgtactcatctatgggagcactatgcttacacaatggatgaggatttcctcagatataaagcatatcccttaatggaaggatgcgtgtcatttctgttgagctggctgatcgaagacagtgaaggatatcttgaaactaatccatcaacttcccctgaacattattttatcgctcccaatggcgagcctgcttgtgtaagccagtcatccacaatggatgtagcaatcataaacgaagtcttctccacatttctttctgctgctgaggttatagggagaacaaaggataacattgttggagaagttcgtaaagctcaaccacggttacgtccaatcaacatagcccaggatggttccattatggaatgggtgaaagatttcaaggatccagaggtgcatcaccggcacctttcacatctatttggtctatttccagggcatacgattacttttaaggaaactccagccctgatcgaagctgccgaaaaaagcctttataaacgaggagaggaaggtcctggatggtcaaccacatggaaaactgcttgttgggcacggctacaaaacagttctaatgcatataagatgatcaagcacttgatcaacttggtggatccagatcatgagagaccatttcaaggtggactttacagcaacctttttgctgcacacccaccatttcagatcgatgccaacttcgggtttgcagcggcagttgcagaaatgcttgttcagagtacattgagcgatcttttcttacttcctgcccttccttgggagaaatggccaaatggctccctgaaaggcttaaaggctcgtggaggaacaacagttaacatatactggagagaaggggatcttcaggaggttggtatatggtccgaagaccaaacgagaacaactctaagaaaaagaatacactatagaggaaccatggtcactgcagacttagtgtctggcctttttttacaagttcaacggacagttgaagtgcttgaacacatgctctctttcagaaatgccttgttcttgaatttcagtttttttttccttcttctataatacaactttggtcttcctatttagtttaatgtgtaattttggttttttattttaaaatatacacatttagtcctttaacttcaaaaaaaaaaaaaaaaaagtccaaaaaa

SEQ ID NO: 5446 - DNA, 1857 bp, Glycine max
cttaaaatcatgtgattatagaacattggctattggtgatggtgggaatgatgtaaggatgatacaacaagctgatattggtgtgggcatcagcggcagggaaggattgcaggcagcaagagcagctgattatagtattggaaagtttagattcctgaagagattaattctggtccatggccgctactcttacaaccgtacagcatttctttctcaatattcattctataagtccctactgatatgcttcatccaaatccttttttcatttatttcaggtgtctctggaactagcctcttcaattctgttagcttgatggcttataatgttttctatactagtgttcctgttctagtcagtgtgcttgacaaagatcttagtgagaaaactgtgatgcagcatcctcaaattttattttattgccaagcaggaaggcttctaaatcctagtacatttgctggatggtttgggcgatctctcttccatgccagagttgtatttgtgatacgtaggccccccccccccatacatgcctacgcttttgataaaagtgaaatggaggaggtttcaatggttgcactttccgggtgtatatggttgcaggcttttgtagtaacaatggagaccaattcctttactatattgcaacatatggctatatggggtaatttggctgccttttatgtcatcaactggatcttcagtgcgcttccttcatcggggatgtatacaattatgtttcggttgtgtcgacaaccgtcatattggatagcaatttttctcatggttgcggcggggatgggtccaattctagccatcaagtacttccgatatacatatagaccgagcaaaatcaatgcacttcaacaagctgaacgtctgggtgggcctattttgtctcttggcaccattgagcctcagctgagatctgtagagaaagatgtttctaccctgtcaataacacaacccaaaaccagaaatcctgtgtatgaacctctgttatcagattctccaaatgccaccagaagatcttttggagcaggaacaccatttgattttttccagtcacaatcaagattatcactgtctagctacactcgaaattgcaaggacaactgagattaaggagcaattggaagagctccagatgcagcatcttagttgtatatccttttttttttatcaaaactaacagtacaatgttagttccgtgtatactaatgttatataaagtgccataagataactggttatataaagccaaaagaaaatgaattttcacgattttatagattatttgattaacttgatattatttttgttttccaacttctggttggagacatttgattttttccccctttgcaacaccttcaccttataatgttctccagttagggttatattgcatttattgaagaataatacatcttatggccattcaagaagaaactgggcaggtgaaagaaagccaaattctttgtcagttttcttccatggaagcatctggaaaacgataattcgtgcagagatgtcaacatactaatttgcagatggcagaagcatacaaatttggtgaccattttaaagctgaacaaggggagaacttaatacgtaaggtatatgtcccccaccaaccgtggtcagatctctgctgcaaattgcatggcaaggtagcgatgataataaggagtaagtaattctgaaattgttctctgaaattacaattatgagttgttttagatttttagtccttgaaattatggattaaattgacaatgattgttaaatttaattaattaaattttttaatgttaaattaaattgaaaggtgttaattttggggaaaaaaaaaa

SEQ ID NO: 5447 - DNA, 871 bp, Glycine max
ttcctacgaaagataggttgttttgagctatgtagattaggcagaaggcaaagcaaatgacctttctaactaatctttagtcaatcctctaataatctccgtttcaacaccaaactcagtcttaaacagcaagcgaaagctgaatcaagccttccaagttccaccaccaccgtcccaaccctcttcttcttcttcttcttcttcttcttaatcgaaacaacctcatccatactaaggaaacaaacgacagagactgcaaccatgtacgttgatcacgcgttttcgatttcggacgaggatgtcatgatgggaacctcgtacaccgtcaacaacaaaccccccatcaaggagatcgccctcgccgtttccctcctcgtttgcggcgtcctcggcatcgtcatcggttccctcatggcctacaaccatgtcggcggcgacactgctcacgggatcttctttgcaattctgggatttatcttgttcataccgggtttctactacacgcggattgcgtattatgcttacaaaggatacaaagggttctctttctctaacataccacccgtgtagctctactagctagccatgtctcatactttaggttcacatagcttcctcttgtacagatcttccatggttgtactctatgttctttctttctggtgttgtgttttttgttttgtctgactaatgatgagtgtttagattgtaatttgtgattgctatatatcatatactggcactttctatggttgcaaaaaaaatttttatttgttttatgttgtggcaatggccccgctgatatccatttttttttttttgccctccattgatgaatgggaatagactgaaatttctgtatgcatataag

SEQ ID NO: 5448 - DNA, 1703 bp, Glycine max
aattgtataaggggcagctctggctacacagttcattcataagctatttcaggaaagtataacaaaggtttcctgaacacattaactttgaattgacagaacatgagaataataaatctgtattctcatcccaaggagcatggtagatttctgtaactattttttcttcttatagatgtgaaagaagctagaacacaagacagtagtcaaggggaacaatgaatgcactagcagccaccaacaggaactttaagttggcctctaggcttctgggattggattcaaagcttgagaaaagtttactgattccattcagggaaatcaaggttgaatgtaccatacctaaagatgatggcaccttgcaatcttatgtagggttcagggttcaacatgataatgccagaggccccatgaaaggaggaatcagataccatcctgaggttgaccctgatgaagtgaatgctttagcacaactaatgacatggaaaacagctgtagcaaatataccatatggtggtgccaaaggagggatagggtgtgacccagcagaattaagtatatctgaattagaaagacttactagagtttttacacaaaaaattcatgatttgattggaactcacacagatgtgccagcacctgatatgggaacaggaccacagaccatggcatggatactagatgagtattccaaattccacggttactctcctgcagtagtgactggaaaacctatagatcttggtggatctctcggtagagacgcggctacaggacgaggagtcctctttgcaacagaggctttgcttaatgagtatgggaagagtgtatctggacaacggtttgtcatacagggttttggaaatgtagggtcatgggctgcccaattaattagtaataaaggtggaaaagttgttgctgtgagtgacataactggagccataaagaacagcaatggtcttgacatcccaagcctacttgagcattccaaagtgcacaggggagtaaaaggattcaatggtagtgatccaatagaccctaactcaatattggttgaagattgtgatgttctagtcccagcagctcttgggggtgtcatcaatagggaaaatgcaaatgaaatcaaggccaaatttattgtggaagcagctaatcacccaactgacccagaagctgatgagattttgaagaagaaaggggttgtgatcctcccagacatatttgcaaattcaggaggcgttacagttagctactttgagtgggttcagaacatccaaggtttcatgtgggatgaggagaaagtgaacaatgagctaaagacctacatgaccaaaggtttcatagatgtgaaggaaatgtgcaaaacccatgaatgtgatcttcgtatgggagccttcaccctggcagttaaccgtgtcgcacgtgctactgtccttaggggctgggaagcttgacatccattgcttctgctttcaataaattaattaaagagctcccactctcagcaacacttcacaaagtttttgttgctttcaactaatgtgttgggtgaatcgtattttcacgccaaattttctttcaataaattagtatagtatataaatctttttgtaactacatgtgtggttctatgccacttcttgtgacagccacgctttttaatataatgtcactttgctttgaaaaaaaaaatctgatttatc

SEQ ID NO: 5449 - DNA, 1595 bp, Glycine max
ctatgttgtatttttgacatagactctagctggctgtgtgtatatcttaatataaatattagctctaatggagaatctcttttcatcttccatacaatttctatagtcccaattatagtaacagtgcaagatctattttccgcatcttggatatctggctaaaagattgaatattgtgttaatctttctagtagtcaaggggaacaatgaatgcactagcagccaccaacaggaactttaagttggcctctaggcttctgggattggattcaaagcttgagaaaagtttgctgattccattcagggaaatcaaggttgaatgtaccatacctaaagatgatggcacgttgcaatcttatgttgggttcagggttcaacatgataatgccagaggccccatgaaaggaggaatcagataccatcctgaggttgaccctgatgaagtgaatgctttagcacaactaatgacatggaaaacagctgtagcaaatataccatatggtggtgccaaaggagggatagggtgtgacccagcagaattaagtatatctgagttagaaagacttactagagtttttacacaaaaaattcatgatttgattggaactcacacagatgtgccagcacctgatatgggaacaggaccacaggatcttggtggatctctcggtagagacgcggctacaggacgaggagtcctctttgcaacagaggctttgcttaatgagtatgggaagagtgtatctggacaacggtttgtcatacagggttttggaaatgtagggtcatgggctgcccaattaattagtaataaaggtggaaaagttgttgctgtgagtgacataactggagccataaagaacagcaatggtcttgacatcccaagcctacttgagcattccaaagtgcacaggggagtaaaaggattcaatggtagtgatccaatagaccctaactcaatattggttgaagattgtgatgttctagtcccagcagctcttgggggtgtcatcaatagggaaaatgcaaatgaaatcaaggccaaatttattgtggaagcagctaatcacccaactgacccagaagctgatgagattttgaagaagaaaggggttgtgatcctcccagacatatttgcaaattcaggaggcgttacagttagctactttgagtgggttcagaacatccaaggtttcatgtgggatgaggagaaagtgaacaatgagctaaagacctacatgaccaaaggtttcatagatgtgaaggaaatgtgcaaaacccatgaatgtgatcttcgtatgggagccttcaccctggcagttaaccgtgtcgcacgtgctactgtccttaggggctgggaagcttgacatccattgcttctgctttcaataaattaattaaagagctcccactctcagcaacacttcacaaagtttttgttgctttcaactaatgtgttgggtgaatcgtattttcacgccaaattttctttcaataaattagtatagtatataaatctttttgtaactacatgtgtggttctatgccacttcttgtgacagccacgctttttaatataatgtcactttgctttg

SEQ ID NO: 5450 - DNA, 866 bp, Glycine max
tcgagtcagctacgtaggccccccccccccaggcttctttaactattgatgggatattttatgtgattgatcctggatttgctaagcaaaatgtttataacccgaagcaaggacttgattctttggtgataactccaatttcacaagcatcagccaaacaaagagctggacgtgcagggcgtactggacctgggaagtgttatcgcctctacactgagagtgcttataggaatgagatgtctcctactacaattcctgagattcaaaggataaatctggggatgactacgcttaatatgaaagctatggggataaatgatctgctgtcttttgattttatggatccaccatcaccccaagccttgatatctgccatggagcagctttacagtcttggagcattggatgaagagggccttttaactaaattagggaggaaaatggcagaatttcctttggatccaccgttgtctaagatgttgcttgccagcgtggaccttggatgcagtgatgagattttgaccataattgccatgatccagaccggcaatattttttacaggccaagggaaaagcaagcccaagccgatcagaagagggcaaagtttttccagccagagggtgaccatcttaccctacttgctgtttatgaggcttggaaagccaagaatttttccgggccctggtgttttgaaaacttcgttcaatcccgatcattgagaagagcacaggatgtcaggaaacaacttctcaccattatggataagtacaaattggatgttgtaagtgcgggaaaaaacttcaccaaagtcaggaaggctatcactgcaggggtctttttccatgcttctagaaaggacccccag

SEQ ID NO: 5451 - DNA, 630 bp, Glycine max
cagattcattgcaagtggcccgagcaggagcattgaggaccaaggtggacagcgatggcgcgaatgtcatggttgcattatacgaaaacggtttggtcaccgattgtccaagaggggagaacaaagggcgtgtcctatccaacgactatgttgttagaaagctcgaaaagctctgcactgtcaaagacatctctgccaagaaaacagtatcaggaatggttaactttcccttatgggaaggattcaaaagcagcaaatgtggtttggctgtctttgttcagagcaaatctcaccagatttttggttcacagagttttcagctgccggatgatatatgattctgattctttagtttcatttgatctgcttgctgttatcatattccggttacattgtgttttgttaggctatatgtacagattgtgatatgatttaggataataaatgttgttttctttcttttcttacatattttttcctatgtactttgtccttccttactattgaccctatgtttaggagatggagagagaagtctaaatttgtggcgtgaaaaattttattgattggatttggaaatttgcacttatattgaatctgtggtctgtaatctaattgttgttactttta

SEQ ID NO: 5452 - DNA, 2369 bp, Glycine max
tctttctgtctctctccattgcaccttcccttcttccccttcttcttcttttctgtcatttgtgagattccttcacttgttttatctattccattggattgtacagattcctagctaaaacacccagatgtcaatctctgtaattctatttgatttgtgggtgtttctgtgaaaaaaagaattttttttaaggactgtcaaacccaaaactttttttttgggtcttttggtttctgcttcttttatttttgcaaactggcttctgggtttgctgcagaataaagccttcaatacccactaatacacaaggcttcaaaaacaaactgtttatattttcagcaaagttccaatcttttttccttctttttgtcaataaattattttatttttgcccccttttttctgcaattttggttttcttcttcttccctttactagaggaaaagattgagtcatgggcaagcaagggccttgctatcactgtggagttacaagcacaccactttggcgtaatgggccacctgagaagccagtactatgcaatgcatgtggatctcgatggaggacaaagggaacacttgcaaattatacccctttgcacgcccgggcagaaaatattgattatgaggatcaaaaggtttccagggtaaagagcatatcattaaataagaacacagaagtgaaattggtcaaacgaaagcaaaactatggtaatgctgcatctggagggtttgttcctgattatagtcaaggataccgaaaagttgtggatgaagatacaagcaatagatcaagctcagggtcagctgtctctaactcagagagctgtgctcaatttggtggccctgatgctagtgatttgacaggtcctgctcagtcagtggtctgggatgccatggtgccttcaaaaaagaggacatgtgcaggtcgtccgaagccctcatctgttgagaagctcacgagagacctgtgcactattcttcatgaacagcagtcttatttttctgcatcttctgaagaggatcttcttttcgaaagtgacacaccaatggtttctgttgagataggacatggaagcattctcatcaggcatcctagctctatagctcgtgatgaagagtctgaggctagctctcgctcagctacgtaggcccccccccccctgaatgaagcatattcattttctagtaccattcctatgtacagtgatcgcagtggcatgaacttctcatctcatggagttgaaaagatcaaaaactcagcaggccaaatcatgaaacaagagaaacttgaaagggacaagtctcagcttgaaaaactacaagttcctggaaatcatgattcaccactgtgctcaatagatttaaatgatgtagtcaactatgaggagtttatgagaaacttgacaaatgaagagcagcagcaattactgaagtatctcccagtggttgatactgctaaatttcctgatagccttagaaacatgttcaatagcttccaattcaaggagaacttaatctattttcagcaacttctcggggaaggagtctttaacatctctttgttgggggcaaaacctgaagaatggaagacattagaaaggcttgcattatctaatctgtcaaagtcgaaatgggtagaacactataattttcttaagaaatgtgaaaacaaatctggaaaatctattggtttgggttctactgctatggaatcaagtaatgttacaactggcaaaagaatgcgtgagcatgacagccgaaatcaaaatattccagaattgaagacaacgatgaggagccccaaaagggtgatcataaagcctcctagctgtgaggtcaaagaagttgtagaagaaggctctagcttcagtccaaaaagcttatttgctttaccccatggtgttggtggcttgcacatgctggattctttcaactttgttggtgagagttctgaggatctgcttttagaggtgccttctaacagttcttttccacaggctgagctcctgcacccatctttaagctatggtgctcgtcaggtcagcaccactagtagctcagtacactcacctgttactcatccttaactaatctttactaggttacttggatgggtatggacacaatattttgtcataatagggtccacatgttttgcatctgaaacaccaaagttcatgtacaagagatatgatgatgattgtgtttttgtttccttgcaaccttgagcttggattgccaaaggatggaagttgaatgggcttttttttttttttcttgtatagattggtaatagattgtaacatatagcatgaaattcggagtgatcatctccggagtttttgtatgcaattgtagtttatgttt

SEQ ID NO: 5453 - DNA, 1537 bp, Glycine max
  misc_feature (8)..(8): n is a, c, g, or t
  misc_feature (18)..(18): n is a, c, g, or t
  misc_feature (23)..(24): n is a, c, g, or t
ctgcaggntaccccggtnccggnntattcccggagccgtcccgcgcggccctgcatctgtaacagtgaaggaaaggaaaagaatgcaatgactcaactctagatactagatagtgagtgagtgaagctaaagctacaaaaaacaaccaaacaaaacactcaattctcttctcttctcttctgggtttttgctttttcctcattctctcattctcaaacaccacaaaaaaatgggccttgtttcccaggatgccctcaaccaactccaagctctcatggatcaagtgctacttgaggaggagccactgcagagaacgtttcagaatgttcatcaaggatgtgtcaccgaaaccttaacacggtttctaaaagcaagggagtggaatgctaccaaggcccataaaatgatagtcgattgtttgaagtggagagtgcaaaatgagattgacaacatattatctaaaccaataatccctactgatttatacagaggcattcgcgattcacaacttataggattgtcagggtactccagagagggtctgccagtctttgcaattggtgttgggcttagcacgtttgacaaagcatctgtccattattatgtgcagtctcacattcaaattaatgaatatcgtgatcgtgtaatcttgccttcggcatcaaagaagcatgagcggcctattaccacatgtgtaaagattttggatatgacgggtctgaagttgtcggccctgaatcagataaagttgttaacaataatatcatccattgatgatctgaactaccctgagaaaacaaatacttattacattgtaaatgccccatacatattttcagcttgttggaaggttgtgaagccacttttacaagagaggacaagaagaaaagtgcaagtcttgcaaggttgtgggcgagatgagctgttgaagatcatggattacgcgtctctgccgcatttctgtagaagagaaggctctggatcatcaagacattcagggaatggaaatgaaaattgttattccttggatcatcctttccatcagcagctctacaactacatcaaggagaaatccagaatccatgaagctgttgaacccatcaagcagggatcattccatgtagattttcccgaacctcctgcagagaaagcagagattgtcaagacattagagtctgagctacacaagtttaagatcagcaatgtgaatggtgattgaagattgatactgttgccaatggtgtcttggccatgttggtcttttacctctcctactaaccatttgaaccaaactaatgttgtaacaatggttcttcctccacactattacaatttacgaggattccgcagtactagttagggagtagtcaaaataaagcggatcctagctttgcattatgccataatgcaaagtgagaaatgtcaactatgatgataattaccatcatgtttcttctaagcttgatatttgcacatatatatttttttctatcttcatattgccttctcaattcaaatagaaaacagtttgcgttcg

SEQ ID NO: 5454 - DNA, 1210 bp, Glycine max
  misc_feature (882)..(882): n is a, c, g, or t
  misc_feature (898)..(898): n is a, c, g, or t
  misc_feature (921)..(921): n is a, c, g, or t
  misc_feature (923)..(923): n is a, c, g, or t
  misc_feature (928)..(928): n is a, c, g, or t
  misc_feature (940)..(940): n is a, c, g, or t
  misc_feature (948)..(948): n is a, c, g, or t
  misc_feature (962)..(962): n is a, c, g, or t
  misc_feature (971)..(973): n is a, c, g, or t
  misc_feature (995)..(995): n is a, c, g, or t
  misc_feature (1001)..(1001): n is a, c, g, or t
  misc_feature (1018)..(1018): n is a, c, g, or t
  misc_feature (1023)..(1023): n is a, c, g, or t
  misc_feature (1027)..(1027): n is a, c, g, or t
  misc_feature (1030)..(1031): n is a, c, g, or t
  misc_feature (1040)..(1040): n is a, c, g, or t
  misc_feature (1043)..(1043): n is a, c, g, or t
  misc_feature (1066)..(1066): n is a, c, g, or t
  misc_feature (1068)..(1070): n is a, c, g, or t
  misc_feature (1082)..(1083): n is a, c, g, or t
  misc_feature (1091)..(1091): n is a, c, g, or t
  misc_feature (1094)..(1094): n is a, c, g, or t
  misc_feature (1108)..(1108): n is a, c, g, or t
  misc_feature (1118)..(1118): n is a, c, g, or t
  misc_feature (1127)..(1127): n is a, c, g, or t
  misc_feature (1129)..(1129): n is a, c, g, or t
  misc_feature (1137)..(1137): n is a, c, g, or t
  misc_feature (1142)..(1142): n is a, c, g, or t
  misc_feature (1144)..(1145): n is a, c, g, or t
  misc_feature (1162)..(1162): n is a, c, g, or t
  misc_feature (1168)..(1168): n is a, c, g, or t
  misc_feature (1171)..(1172): n is a, c, g, or t
  misc_feature (1184)..(1184): n is a, c, g, or t
  misc_feature (1188)..(1189): n is a, c, g, or t
  misc_feature (1193)..(1193): n is a, c, g, or t
  misc_feature (1200)..(1200): n is a, c, g, or t
  misc_feature (1204)..(1204): n is a, c, g, or t
  misc_feature (1206)..(1206): n is a, c, g, or t
tacggctgcgagaagacctcggtcgcgggccttgccgcccgcttcaatggaatttggcaaaaagtagccatcgccccaacgatcccatttcccttgacttctctacgtgaagatccttgtgtcgcatagagctagttaaaatgtccgagggaaatgcagggaaaggaaagagaatcgccatcattggcgtctcaaccttattgttggtggctatggttgtggcggtcacaattggggtcaatctcaatgagaatggttccaacaatgatatagaggacaacaagaaaaatcatgttgcttcttccataaaagccgtccaaaccctttgtcatcccacaaattatgagaaagaatgcgaggaaagccttatagctggggctggaaataccacagatccaaaagaactcatcaaaattttcttcaacatcaccattacaaaaattggtgataaactcaaagaaactaatattttgcatgagattgaggaggaacccagagccaagatggcacttgacacttgcaagcaactcatggatctttctattggggaattaacaaggtcacttgatggaataagtgagtttaacctcataaatgttgacaaaatcctcatgaatttaaaagtttggcttagtggcgcggttacataccaagatacttgcttggatgggtttgagaacaccactagtgatgctggcaaaaagatgaaggatttgttgacgataggcatgcatatgagcagcaacgcccttgccattgtaacagatttagctgacactgttaatgattggaatatcacaaaatcatttgggcgtcgcctccttcaagattctgagcttccgtcatgggttgatcaacatagactccttaatgaaaatgcangtccattaaaacgcangcctaatgttactgtagccatananggttntggagatttcanaaacatcnttgatgcattgaancagtgcctnnnaaaacccgatgccttttggatntactcnaggaaggcgtcacccanatttntganttnnaaaaaatgnccntgtgggttattgggagggggaanannncctattttggannaaacttgntanttgaaaaccttttnaactgccccngtttttaangnaaccttcnggctncnntggggtggaatttgggncccttnttnncggggttggatncgcnncttnctttttntgcntngggg

SEQ ID NO: 5455 - DNA, 2086 bp, Glycine max
tacggctgcgagaggacgacagaagggggcagaaacacattcttcgaaggaatttgtcaaagagtagccatcgccccaacgatcccgtttcccttcacttctctacgcaaagccccttgttttgcatagagctacttaaaatgtcggagggaaatgcggagagaggaaagagaattgccattattggtgtctcaaccttattgttggtggcgatggttgtggctgtcacagttggtgtcaatgttagtgagaatggttccaacaatgaggacacaaaaattgcttcttctgtaaaagccgtccaaaccctttgccatcccacaaattataagaaagaatgtgaggaaagcctcatagccagggctggaaataccactgatccaaaagaacttatcaaaattgtcttcaacatcaccattacaaaaattggcgataaactcaaaaaaactaatcttttgcatgaggttgaggaggatcccagagccaagatggcacttgacacatgcaagcaactcatggatctttctattgaggagttaacaaggtcacttgatggaataggtgagtttgacctgaaaaatatcgacaaaatcctcatgaatttaaaagtttggcttagtggtgcagttacataccaagatacttgcttggatgggtttgagaacaccactagtgacgctggtaaaaagatgaaggatttgttgacggcaggcatgcatatgagcagcaatgcccttgccattgtaacgaatttggctgacactgttgatgattggaatgtcacagaattatctaggcgtcgcctccttcaagattctaagcttcccgtgtgggttgatcaacatagactccttaatgaaaatgaaagtctattaagacacaagcctaatgttactgtagccattgatggtagtggggatttcgaaagcatcaatgaggcattgaagcaagtgcctaaggaaaaccgaaagccatttgtgatctacatcaaggaaggcgtttaccaagagtatgttgaggttacaaagaaaatgacccatgtggtgtttattggtgaaggtggaaaaaagacacgaataactggtaacaaaaacttcatagatggaacaaacacttacagaactgccactgttgctattcaaggagattactttgtggccatcaatatggggtttgagaattctgctggaccacaaaagcatcaagcagtagcattaagagtccaagcagataagtccattttctacaattgctcaatggatgggtatcaggacactctttatgtacacaccatgcgtcaattctatagagattgcacgatttcaggtaccattgactttgtgtttggtaatgcacttgctattttccaaaattgcactttcgtggtccgaaagcccatggagaaccaacaatgcattgtgactgcacaaggtagaaaagagatacaacaaccatctggaatagtaatccaagggggatccattgtgtctgaccctgagttctactctgtgagatttgagaacaaggcttacctagctcgtccatggaagaattactctaggaccatcatcatggacacatacattgatgatttgattgacgctgatgggtatttgccatggcaaggactagagggtccttctggtatggatacttgcttctatgccgagtaccacaacattggccccggttcagacaaatccaagcgtgtgaaatgggctgggatttggaacctcaattcaaaagctgcacgttggttctcaccatctaagttttttcatggaactgattggattgaggttactggaattccttgctttcctggcgtgccgaaacaccataggcacaaaaagacaatacttaattggcaataaaagtaatgagttgcaaaatcaagcaatataaattaattaaaaagtaatgattgtgcttctttattctttaattattttcatttcattaattaactttagagttaactacatttttttatctcaagcaattaaattttgtccatagtgaagcttctctcttgtgtactttgattccttgaaggttgagaaaatgaagattttgcttccttgac

SEQ ID NO: 5456 - DNA, 1490 bp, Glycine max
agaaggggacagaaacatattcttcaatggaatttggcaaaaagtagccatcgccccaacgatcccatttcccttgacttctctacgtgaagatccttgtgtcacatagagctagttaaaatgtccgagggacagtaggccccccccccgagaatcgccatcattggcgtctcaaccttattgttggtggctatggttgtggcggtcacaattggggtcaatctcaatgagaatggttccaacaatgatatagaggacaacaagaaaaatcatgttgcttcttccataaaagccgtccaaaccctttgtcatcccacaaattatgagaaagaatgcgaggaaagccttatagctggggctggaaataccacagatccaaaagaactcatcaaaattttcttcaacatcaccattacaaaaattggtgataaactcaaagaaactaatattttgcatgagattgaggaggaacccagagccaagatggcacttgacacttgcaagcaactcatggatctttctattggggaattaacaaggtcacttgatggaataaatgagtttaacctcataaatgttgacaaaatcctcatgaatttaaaagtttggcttagtggtgcggttacataccaagatacttgcttggatgggtttgagaacaccactagtgatgctggcaaaaagatgaaggatttgttgacgataggcatgcatatgagcagcaatgcccttgccattgtaacagatttggctgacactgttaatgattggaatatcacaaaatcatttgggcgtcgcctccttcaagattctgagcttccgtcatgggttgatcaacatagactccttaatgaaaatgcaagtccattcaaacgcaagcctaatgttactgtagccatagatggtagtggagatttcaaaagcatcaatgaggcattgaagcaagtgcctgagaaaaaccgaaagccatttgtgatctacatcaaggaaggcgtttaccaagagtatgttgaagttacaaaaaaaatgacccatgtggtgtttattggtgaaggggggaaaaagacacgaatatctggtaacaaaaacttcatagatggaacgaacacttatagaactgccactgtcgctattcaaggagatcactttgtggccatcaatatggggtttgagaattctgctggacctcataagcatcaagcggtggcattgagagtccaagcagacaagtccatcttttacaattgctcaatggatgggtatcaagacacactttatgcacacaccatgcgtcaattctatagagattgcaccatttcaggtaccatcgactttgtgttcggtaatgcactagctgtttttcaaaattgcactttcgtggtccgaaagccactggagaaccatcattgcattgtgactgcacaaggtagagaagacagacagcaaccaccgggaatagtaatcaagggggatccattgtgtctgaccct

SEQ ID NO: 5457 - DNA, 2032 bp, Glycine max
gacaattctgcaagcaataaatctagtggttctgtggcttcctcaaagaaaaacaacgaatgcagcgagagattaagtgaggctcaaagcacttgtacatcaccaattttcgaagctggcagcgcgtgcgtgggtgaggcgcaggatgtgccccagtatgtacattgccaagttatgcaaactcttgtgcagagcacttgtacatcccctatttttgaagccaagagtacatatgtggaaaatatgcaggatgtgcccccgctgaaaagttctaaactgaacaaaattgatatggtgaagcatgaaaagtttgcccaatttgaaagggaatcagctgagcataatgatgaaacagaagataaatcagttacaattgtatcagatgctgcaaggtgcgacaaaacttctgaattaacagagttaaggccagaacaagactgtggtgttgctgaacctgaaactgaaaacgaggatgaaatcttaaaatctgagttagacggagacaattctcatgttagtatgatgcaaggatgcagtgctgagcgggtgaaaccttctaaaggagctattgacttgattgccacagttggaaatcttccaaagcaccttgatgaaaactgtagtctcaatggtggtaatacaaccaagtttgattgtgaaacgcaattggaactttccttaagaagtgattttcctggcagctcaggtaatcaagcaagtgaagcaactgaggaatctcaaagattgaaccattcaaatacttctgccttttcttggtatagtaatagtaaattgttgcagcctcatttttcaacaccatcgattacatttcctgaagtaaacaacctcagttgggattctcatgaatcccataaattatctggaattacttctggaaattgtcagtatggtggctcaaatcagaacctggagaatatgatcggtacagtcatttgtcagtatggacaagttacaccaaaattatcaaacagtcaatgtggactcttacctgtttctggggttatctccaaccttaagtctgagggacatggtaatgttttcacttctttgttctatgcacaatctggtattcaccctatgtcgagtccaaaacctgtctgccagaatgagagttctccctttcccacaagtacctccacccagtcctatcctgaaagccacaactcagatcaactacatgactgctccaatgatgctacttgtcttaatcaaaatgtaaaggataatactgattcagatcacgcaaggcatgattctcctgttgctgatcagagtgctggtaatagtttatgccatgatgctgcaaatcatgtcaatagtagtgcatatggaagcatggacagtggaaatgatggaaatgctacttcagctatagtatccaagaacgccccagatggtttcagtgatagtggttgtcataattatgatggatttagagtgacagatcctcatcgctccagtcaaagagaagcagtgctagtgaagtttcgactgaagcggaaagagagatgcttcgagaaaaaggttcgatatcaaagccggaaaagactggcagagcagcggcctcgggtgaaggggcagtttgtacgtcaacatgatcatcctgtcgctgaggctggtggtgattcatgaactttgttctttttaggtttcgtgtagtattaaattacagctgactgtaacactgattgtgtcaacaaggattagctgtagggtggtgtctgtgtatgtgttgttggaatctgtttatccattaggcaaaagaagagtaggccagtagggagatttatatttggactgccacttacaaatttaggattgcaattatttagtgggtttggtttggattttacctgtgtatatgttttcttggttgaatactaatatgggtctgtaaaaaatcccctctagaacctctggttttgcaattgagtgatctttctttgcattcggcagggcggccgccgtccagtccgggaataatcggaattgattcgatatgacagtttcg

SEQ ID NO: 5458 - DNA, 1188 bp, Glycine max
atcgtacggctgcgagaagacgacagaagggggccacgtcatgacgagagtagcgatgatctagtgaggagattttggtgggaagatattttcgacgattttcgcggttgtgggcgaaagctggctgccagcgatagtgaatcagaatcgtaagctcgacaaagaagcaagcaaggttattattctttgtggttgcggaacgaagcatgctgttgctgttcgagaatggatgagttgaacggcgccatgacgacggagaatagcaatgcggaggtggttcgatgggagaggtttctgccgcggatggtgctcagagtgctgcttgtagaagctgatcattccacgcgccaaatcatcgccgcgcttcttcgcaaatgcagttacacagttattgcggttccggatggattaaaggcatgggaaacgttgaagaagaaggcacctgagctagatctcatattaacagaagtggagctaccagcaatatctggatttgcacttctttctttgatcatggagcatgacatttgtaaaaacattccagtcataatgatgtcttctcatgattcggttagcatggcattgaaatgcatgttaaaaggggcagttgattttcttataaaacccattcggaagaatgagcttaggaacttgtggcaacatgtatggagaaggcacgctattagcactcctactcaaaatacaaccttttcaccgaaaaaacttaaaactgcctcagaagacaattctgcaagcaataaatctagtggttctgtggcttcctcaaagaaaaacaacgaatgcagcgagagattaagtgaggctcaaagcacttgtacatcaccaattttcgaagctgagagtacatacgtggaaaatatgcaggatgtgccccagtatgtacattgccaagttatgcaaactcttgtgcagagcacttgtacatcccctatttttgaagccaagagtacatatgtggaaaatatgcaggatgtgcccccgctgaaaagttctaaactgaacaaaattgatatggtgaagcatgaaaagtttgcccaatttgaaagggaatcagctgagcataatgatgaaacagaagataaatcagttacaattgtatcagatgctgcaaggtgcgacaaaacttctgaattaacagagttaaggccagaacaagactgtggtgtt

SEQ ID NO: 5459 - DNA, 1667 bp, Glycine max
  misc_feature (1658)..(1658): n is a, c, g, or t
gaaattcaaatgaagaaagccaaactaattggcatgcttgatgaggtggagcaaaggtacaggcagtaccaccagcagatggagatagtgggttcatcatcccccccccctgcggggatgggttcagcaaggacttacactgcccttgcattgcaaacaatctcgaagcagtttcggtgcttgaaagatgcaattgcagggcaggttcgcactgcgaataagagcttaggagaagaagattgctttggaggtaaaatggaaggttcgaggctcaaatatgttgaccatcatcttcggcaacagcgagctctccaacaattgggaatgatccagcacaatgcttggagaccccagagaggattgcctgaaagatccgtttctgttcttcgtgcttggctcttcgaacacttcctccacccttatcctaaggattcggacaagcacatgcttgcaaaacaaacagggttaacaaggagccaggtttcaaattggtttataaatgctcgagttcggctttggaagccaatggtggaggaaatgtacacggaggagatgaaggatcatgaacagaatggatctgaggataaatcaagcaagagcaatgaagattcttcttcgaaaatgtcagccccacaagacaaaggtccttccaatgaaaccgaagctaagagttttaattccaaacaagaagtttccaagagccagaacactgctatggtttcagtttctagaccttcaacatcaccacttggtgtgaatgtgagaaaccaatcaggattcagcttcatggggtcatcagagctagatgggatcacacaaggaagtcccaagaaaccaaggaaccatgagatgatgcattccccaaatagtgtcccttcattgaacatggatgtgaagcccaatgatgaaaacaatgagcagctctcaatgagatttggggttgaaaggcaaggcagaaatgagtcctctttcatgggaaatcaaacaaactttaatggtgggtttggacagtatccaattggggatattggaaggtttgacacagagcagtttacaccaaggctttcaggtaatggtgtttccctcactcttggtcttgactcattaccaggaactcatcaaacatttctcccaaaccaaaacattcaactgggaagaagcttggacattggtgaaccaaacgagtttggtgccataagcacttcctctcctcactcaacagctgcttatgagagtatcagcatgcaaaacccaaagaggtttgctgcacaattgttgccagactttgtgacctaaataagacattgaaaggtgagcaatgtggtagcacactgctactactcgctgtttccaagtccctcacaatttcttcttagacctctgctattatgtcggggagtggcgaacaattgtagtgtaaagaaagaaggaattttactttagtataggtttataccatgcatagaaccatttgagttcttagatagcttaggatttgaaagtatatggttgaggttgtatattatttttgtaagttctgaagctgggatagatggattgttgtcataaattttattttggtaaaagataccaatatatctttgattgaaaacaaaaaaaaaaaaaaaaagaaaaaaaaaaaaaaaaaaaaaaaaaanaaaaaaaaa

SEQ ID NO: 5460 - DNA, 2021 bp, Glycine max
tcagctacgtaggcccccccccccaaaaaggaaaaaataaatatataatagtcaatcaatcaagcgtgacacaaaagtgatattcatgaaccaccgtccagtgagacggtgccacgtgactaaagaagtagcagttatacaatttaataaatgcactatgtggaacacaacaaaaccatataaacataagacaacttcttcttatattgatcattgttgttgttgcagctgttgcttttgttcttcgccatgccaatgttgtcttcaagaggcttcatcgcttatgtcctatctgctttctcttgtgctgttctgtctgcgctttttatcaccaaccacatccatgatgatgataacaaggcagttactttgttagcctctcgtgtgtctgaaactcttaaagtttggcccgacttggagccaagttggagacttttgttggcaacggttattgggtttcttggttcagcatgtggaaccgttggtggggttggagggggaggcattttcgttcccatgctcaatctgattcttggctttgatactaagtctgctgctgctctttctaaatgtatgataatgggggcatcaacatcatcggtttggtataatgtgagagtgccacatccaacaaaagaggtgcccatattagactatgatctggctcttctgtttcagcctatgctcatgcttggaatcactgtcggtgttgctctcagtgttgtcttcccctactggcttatcactgttctcatcatcattctcttcatagggacttcttcaaggtctttcttcaaaggaatcgagatgtggagggaagagaccattttcaagagagaaaagaccatgcagcgagcgactttggttgattctcagggtgaagataagacagttagaatcgacacaaaatatgaaccgttgattcctaaagaaaagaaatcaactatggtggaaaaggattctggtactgatagtggtgtgggttggtttcctactagttcaagtcatcaagaatgatgtagaggcatgcagtgcatggtattgggtgctttttggcttgcagcttccaattgcacttttggtgtttggctatgaagcagtgaagttgtacaaggagcataaaaggaggatgaacacagggaactcagaatgcatctgtgaggcttctatagaatggactgctattaaccttgcattttgtgcattgtgtggcattgtagggggaattgttggaggcctacttggttctggaggtgggtttgttttaggacctcttcttctagagattggtgtcattcctcaggttgctagtgctacagcaacatttgtgatgatgttttcatcatctttgtcagtggttgaattctaccttctcaagaggttccccattccttatgcattatacctcacctcagtgtctgttttggctgggttctggggacagttctttgtaagaagattgattacatgtcttgggagggcatcaatcattgtattcatcctctcaggtgtcatttttgctagcgccctcaccatgggtgtcgttggcattgagaacagcattcaaatgataaacaaccatgagttcatgggattcttaggcttctgttccagtcagtgatatattttattctagagtgcactgcattgggcatagtaaacaaaaagaaaaatccaaagttggtgtgaaaaaaagcttgtaaaattaagtgtgtaggacaatgacactaacaaatgttggtcaatgcctagttgaccagcagggaagatcagtgtcaaattataaggctatcttcttgccttactatcagtgagaataaatttgtaaatgagtgttgctgtgttagctcctcgctaacacaacatatcttatagtggtttaataaaattgtggatgagtgttagctcctcgctaacacatcttagagtggtttcagatgtattgaatttgtgtcagagaaaaagaataatggaaatgatatcagttgtttcataaaaaaaaaaaaaaaaaaaaaaaaaaa

SEQ ID NO: 5461 - DNA, 845 bp, Glycine max
gattggtgtcattcctcaggttgctagtgctacagcaaacatttgtgatgatgttttcatcatctctgtcagtggttgaattctaccttctcaagaggttccccattccttatgcattatacctcacctcagtgtctgttttggctggcttctggggacaattctttgtaagaagattgattgcatgccttgggagggcatcaatcattgtattcatcctctcaggtgtcatttttgctagcgccctcaccatgggtgtggttggcattgagaacagcattcaaatgataaacaaccatgagttcatgggattcttaggcttctgttccagtcagtgatatattttattctagagtgcattgcattgggcatagaaaacaaaaaaggataatacaaagttggtgtgaagaagacttgtaaaattaagtgtgtaggacaatggcactaccaaatgttggtcaatgcctagttgaccaacaaggaagatcagtgccaaattataaggttttcttgccttcctatcagtgagaataaatttgtgaatgtgtgttagctcctcgctaacacatatcttatagtggtttaatttatatggatgagtgttagctcctcactaacacatcttgtagtggtttaataaatctgtggatgagtgttagctcctcgctaacacatcttatagtggtttcagatgtattgaatttgtgtcagaaaaaaaagaataatggaaatgatatcagattgttttataaaaaagaaaaccaaacaacataaacatgcccctccccccaaaaagttcagatattctcatataaaatgagtggagctcaagaagcttagatctg

SEQ ID NO: 5462 - DNA, 938 bp, Glycine max
ggggccccccccttttttttttttttttttttttttttttttttttttttttttttttttttttttttttttttttttttttttttttttttttttttttttttttttttttttgcccttttttttttttttttttttttttttctccaagtgctgcttttttttttagctaactttatggtaaagtctagcattggacataaaaaactttagtgtaatacatccatggcaaaaaccataaaacaatgcaacaatctctgatcacttcccctcaaaataactggctgaaatgttatttcttcgttgtgcttgccgtatacctcgtgagaacatagcagtctggcggtgtaatgttcgtataatagttctggattgtttctgtaatttcaaacccaaatttcttgtagaagtttatggcatcttcattgtttgtctgcacatgcaagtaaacctcagaaatgttttgcttggagcaaagatcaagaacatgattcaataactttgttccaataccaagtccacggtaaggtgccaaaacacctaacgtcatgatgtaaacccgaacttgccccccaccttccttcttctccagccggcatgcaattgctccaacacaaatatcactatagtaagctagtttggtaaattcaccggaagcgagtgcatcgacatagtatttgtcattgtaacgaacggggaaaagagcgagattgagctttttgagctgcataaggttcttgtccctcaccccatcaagtgagatggagactccacgcccagctcccattctagaaagcagagagagatgcctcagcctcacctcggaaacgtttgaatctgcgagtgaagagtgcgtggcggtggacgagagcgaaaaacctagacccggggttcttttgacattttacaatttcatttttccttttccgacctttttt

SEQ ID NO: 5463 - DNA, 3455 bp, Glycine max
tcggaattcggctcgagctcgagccgaatcggctcgagaggaatcattgaatcgcaacctcacgacaagaaaaaaccgacaaagattgcggagtatcctccgccagctagttcttccatataatataaccactttattacaaataaataataacattaattctctttggattagacttagatcaaatcaaagtgttcttcttgcttggtcacagactcatagtcacttccatggagaacactggtttgtgtgtactatgctttatactactcctgttggggtgtgtcatttcctcagaatgtaagtatataagatacaacacaacatcgaccattgttcctgggaaactcaacgttcacttggtccctcacactcacgatgatgttggatggttgaagaccattgaccagtactatgttggttccaacaactcaattcagggggcgtgcgttcaaaacgtgctcgattccctggtaaccgcattgctggcagataagaatcgcaagttcatatatgttgaacaggcatttttccagcgatggtggagggagcaaagtgatgatatccagaatatagtcaaggagctggtcaactctggtcaattggagttcataaatggtggtttttgtatgcatgatgaggctgctactcattacattgacatgattgatcagacaactcttggacatcaatttattaaagaagaatttggagtgactccgagaatagggtggcagattgacccatttggacattctgcagtccaggcctacttgttgggggcagaggttggatttgactctctattctttgcacggattgattaccaagacagagccaagagaaaagatgaaaaaactcttgaagttgtgtggcggggctccaagagctttggttcatcatcacagatattttctggtgcattccctgagaattatgaacctcccagtagtttctactatgaagtaaatgatgattctcccattgttcaggatgatgtcagtttatttgattacaatgtccctgaaagagtacggctcgagaaaacatgctgccaatgaggcctggccaatattacgcgcacaaatcatataatgtggacaatggggacagatttcaagtaccaatatgcacaaacctggtttcggcaattggacaagtttattcactatgttaatcaagatggccgtgttcatgccttatactcgactccatcaatatatactgatgcaaaacatgctgccaatgaggcctggccaataaagaccgatgacttctttccgtatgcagatcgtgtaaatgcctactggactgggtattttacaagcaggccagcaatcaaaggttatgtcagattgatgagtggctactacttggcagcgaggcagttggaatattttaaagggaagagtgccttaggtcccaacactgactctttggctgaagctttggttattgctcaacaccatgacgcagtatctggtacagaaaagcagcatgttgctaatgattatgctaaacgactttcaataggttacacagaggctgagaaagttgttgcagtatcacttgcttgcttgacagagggagcaaccaaaacaggttgtaagaacccacagactaaatttcaacagtgtccacttctgaacataagttactgtcctgcatcagaagttgattcctcaaatgggaaaaacttggtagttgttgtttacaatcctctaggatggaaaagagaggatatcataaggattccttggaaaaaacatccaatcccagctcgtgccaatacttgacgattttcgtggtttaagaaactaccacactgtcgcatacttgggagtgtctccaactgcaaaacccaaatactggcttgcttttgcagcaacagttccccccattggttttagcacttactatgtatcctatgccaaaaaagaagctactatttcagatagagatacagcttaccaaccagggaataagagtgatacaattacagtgggcctaaaaaacttgaacctagtttattctgtgaaggaagggaaacttattcaatatatcaacagcagaagcaaggtcaatgaatctctagagcaggcatataaattttacgctgggtatggaaatgatggaacagaaactgctcaggcttctggagcatatattttccgccctgatggttcaccctctcccatcaaatccaacgggaagtctcctctcacagtttttcggggaccaattgtgcatgaagtgcatcagaagatcagtccatggatataccagactactagactgtacaaggggaaagaacatgctgaagttgagttcattgttggacctatacccattgatgatcgagttggcaaagaaattgcaactgagatcaaaacaaatctagcaagcaacaaaaccttctatactgattccaatggacgtgatttcattgaacgtgttcgagactatagaaaagactggcacttggaagtaaatcaacctgtagctggaaattattaccctatcaaccttgggatttacctgaaagataaaagcaaagagttttctatattggtagatagagctgtggggggctccagcatcatagatgggcaattggagctaatggttcataggaggttacttcaggatgattccagaggtgttgcagaggcactgaatgaaacagtttgcatccatgataagtgcaccgggttaactgtgctagggaagtactatttcagaattgatcctgtaggagagggtgccagatggcgccgatcatttgctcaggagatatactcacccttgcttttagccttcacagagggtgaaggtcactggggagattctcatgtcacaaccttctcagcaatagattcctcatacaacttaccagataatgttgccataataaccctccaggatctgggtgatggaagagttctcctacggttggcacacttatacgagattgatgaggacaagtatctttcagtgaaggcaactgtagaacttaaaaaggtgtttcccaacaagcagataaacaaaataactgaagtgagcttatcagcaaaccaagaaagagcagaaatggagaggaagagattggtttggcaagttaaagggtcacctccagaacccaaggtgtggaggggaggaccagtagatccagaaaatctaattgtagaacttgctccaatggaaataaggacttttatcatcagttttaggcattaaaagtccactaggagcactactgaaaaataactaaaataagaaattgcatcagattagatatttccaacatcatgtaagccagcaacaagaaatatgttcagagttcgtttggctaaaggtgtatggactcaatcaagttcattgccaataaaagtgcattgcttctccccttttctattgacatctaaccaaaatttatgactactttttttttcttg

SEQ ID NO: 5464 - DNA, 1424 bp, Glycine max
gaatccttatccaattgaagaggaaccaggagacatcacaagaaaaaatgatgctttctttctttctttttaaaaaagaaaaatgtttagacttcacaactttcttgattctttcaaacaacaatggttctaatatacttgcacaagtataaatagcatgaattattgttctcgaatctgttagtggttcgctgtaggcttattttttatcatccctcattcagagcttcatacattttaatatttgaccatggcttaattgaacagactactagactgtacaaggggaaagaacatgctgaagttgaattcattgttggacctatacccattgatgatggagatggcaaagaaatcgcaactgaaatcaaaacaaatctagcaagcaacaaaaccttctatactgattccaatggacgtgatttcattgaacgtgttcgagactatagaaaagactggcacttggaaggtaatcaacctgtagctggaaattattaccctatcaaccttgggatttacctgaaagataaaagcaaagagttttctatattggtagatagagctgtggggggctccagcatcatagatgggcaattggagctaatggttcataggaggttacttcaggatgattcccgaggtgttgcagaggcactgaatgaaacagtttgcatccatgataagtgcaccgggttaactgtgctagggaagtactatttcagaattgatcctgtaggagagggtgccagatggcgtcgatcatttggtcaggagatatactcacccttgcttttagccttcacagagagtgaaggtcactggggagattctcatgtcacaaccttctcaggaatagattcctcatacaacttaccagataacgttgccatagtaactctccaggatctgggtgatggaaaagttctccttcggctggcacacttatacgagattgacgaggacaagtatctttcggttaaggcaactgtagaacttaaaaaggtgtttcccaacaagcagataaacaaaataactgaagtgagcttatcagcaaaccaagaaagagatgaaatggagaggaagagattggtttggcaagttaaagggtcacctccagaacctaaggtgtggaggggaggaccggtagatccagaaaatctaattgtagaacttgctccaatggaaataaggacttttattatcagttttaggcattaaaagtccaccaggagcactactgaaaaataacgaaataagaaattgtatcagactagatatttccaagaaatatgtccagggtttgtttggctaaaggtgtatggagtcaagttcattgccaataaaagtgcattgcttctcccctttactcttgacatctaaccaaaatttatgacactactttttttcttgacttaaaaaaaaaa

SEQ ID NO: 5465 - DNA, 1344 bp, Glycine max
tccggtcagctacgtaggccccccccctggatacatccccttataacaaacctagctattcattaattattagctcataatggaagtggaaagaatacaaaccttgtctttgaaccagctcaaggagcttccaccccagttcatccgtccagccaatgaaaggccagagaacaccaaagccatagaaggtgtcattgtgcctctcatctcactgtctcagtcacatcatcttttggtgaaggaaatagctgaagctgcttctgagtggggatttttcgtcataaccgaccatggtatgtcacaaacattgatccaacgtttgcaagaggttggtaaggagttctttgccctccctcaagaagagaaagaggcttatgcaaatgactcttccgaaggtaagtttgagggatatggcacaaaaatgaccaaaaaccttgaagaaaaggtggagtgggttgattatttttttcatctaatggctcctccttctaaggtcaactatgacatgtggccgaaacacccttcttcctacagggaagtgacacaagaatacaacaaggagatgttaagggtaacaaacaaggttttggagcttctgtccgaaggcttgggcttagagaggaaggttttaaagtccaggttgggagatgaagaaatagagttagaaatgaagataaatatgtatccaccatgtccacagccacatctagctttgggagttgaacctcacactgacatgagtgcccttaccatactcgtcccaaacgaagttccaggcctccaagtttggaaggagaatagttgggttgcggtcaattacttgcaaaatgcactcatggtacatgttggtgatcaacttgaggtgttgagtaacggaaagtacaagagtgttctgcatagaagcttggtgaataaggaacgaaatcgcatgtcatgggcagtgtttgttgcgcctccacatcaggcagtgatagggcctcttccttctctcatcaatgatcagaacccacccaagttttcaacaaaaacctatgctgagtatcgttatcgcaaattcaataagctttcccaataagggaccaaaacatcatcacttgtgttgtcacggtgaaataaatttgtaagccatgatggaggataacaaagtaggagctaactctccattttggttaacaagtgtagctaatttctattatgcttttgaagtaaacagggctttgtccccttggcatttggtacatgccatattccttaagaatacaataaggctatattcctgttctacttcattaagagtcactgagtgagattcgtatgcacttttttgaaaaaaaaaaaaaaaaa

SEQ ID NO: 5466 - DNA, 2111 bp, Glycine max
  misc_feature (133)..(139): n is a, c, g, or t
  misc_feature (252)..(273): n is a, c, g, or t
  misc_feature (313)..(313): n is a, c, g, or t
gtgcaagcaaacttgaaattttgcaatcacactcgaaaaggcctcagccgataaccaatcaaaacaaccaggtgcacattcaactaacaaattgaagaagttaacttcaacaagcaatgcagctagtccctcnnnnnnntaacaaagtgatgaggagcaatcaaaacccattggcagcatagaaatttgtttctataataaagttcacatgcttttgtaagttgctgcaaatgataaacctaccaattggtnnnnnnnnnnnnnnnnnnnnnncatgaaacagatatttattgtattaaccaatcagtttaangcagttaaattagacattctattaaactaataggcagttggttaacttgtaatataagatataatctgctgctgttagctaacagtgtaaagcatatgccacaccaactcaccaagttaaagaaaacaaagttcactaatctctctattttctcagtcttaatatgccatctatatctattctccaagtctataaaacccatagaaaagtacaaatgtaaccagaagaagaaaaaaagaggcaaagaacaagagcaaaacatacatcaacattaaggatcatgcatcagcaccatcagaggctttagcagcaaaaggatcatgagttggaccaacatcctggccaatgtggcgctgcacgaggcgctgcagatcagccataaccttgtgctcccttttagccttctcttcatagttaaacatagccaaagcacgcttatcctcagcactataaacctggttttctttcctaatacgaatggcattcatcctctgatgtctactaccactcatcacataaccaaggctctcaaacttctgaatctcctccgcagaaagacccacttctcctcttcgcggaatacgcttcccttgttgaacatactgtgcaatggcatcaccttcaccgggcctaagcgctccaccatagctgatatgtccctcggctctaggcaacggcattggcccaaccgcgggttcgttatccaatgcgggtttcttctgagactcaaacaattccttcaactttatagcctccgcgttaatctccgtcatcttcacctcatcaaccattgctttactcttggcatcaccagaaccattctcctcctcctccgaaccagaacccgcgctctcagtttcagagcttccctttgttcttttgctgctccttctgatacgcttcgatcgagacctagaagaagaggaacgtttcttcttctttcttccactgctttcagagtcatcgctctcgctctcttcactctcatctgaatcgctatatcttctcttcttcctgctcctgttacttctttttcttctattcttcctactctttctccgtctacgttcctcttcttctgactcagaatctgattctgattcactctcgctatatgatttcctcgaagaaccagcagaacccttccttctcttcttcctcgaacgcgaatcgtctgattcactactggcagatttctcagattcagaatcagattctgattccggttttgcttttgtttttgctttaacctccgtatcgatcttcccggcgccgtcgtttcgatcagaaatttcgtcaggtttgctataatcttccagatcttcattctcgcgcctcggaggactaggcgtgacgttccagatgcagtgcttcagcgattttctcatcttctgcctcttgagccttcggtattcctcgaagttcaaacccttcaactcctcgtcggactcggaatcggagcgctgccaatcgccacggtcgcggtccagatacgcgccgtttcggcggccaaatttctttggcagagcgttgtcgttgtgagttccgttggtgtgcctagggtttctgtgctcgggcgataccgaacggcggcggcggcgctccgggtggcggtcatatgagtcgtagctagggctgcggcggcggcgatagtcgtcggagacatcggggtcaggggtgcggcggtcgttatgtcggtagcgttcgtgaggaatttcgatggtggaggatggtcttcccatcgcggatagagtgaatagaacaaaagggacgtttcgcggggggcctacgtagctga

SEQ ID NO: 5467 - DNA, 2306 bp, Glycine max
ttttttttttttttttttcttttttttttaattctgcgcccccaagacttttaataaatcacggatgctggaaattactttctactgtatgcttagtaaattaattctatcatttagaaggatgaaagaaatgttattagcacaacagtaaagatggacaataaatggcaatcacggccaatttaaatttctcgttgcatcctcactcaagttccaagctccttccgccatctcatcatataactggttccatccccaacttgaataccccaagaaaaaccagtaatccccaaccggttgatttgctgacttcagctcctcaattttacgaattgttgttacttgatcaaggaagtaaattccagggatgatttcaggtaaattatttccggaaactgttctagttaaggataaaagaggcattccagttttcattactggaccccccagggacagaggagcctctttcaaattttccaagccttcttccaatttaggcagaaaactccattgtatatgtttgttgagaataagaccttgaaatccagttacttgattggctgcaacaatgagaatctttgatccatcaaatggatgaacccccaaaagcttttctgtggcaattaacactgaaccaataaccacgtgaggtgatgcttcatgcagttcatttgatgcaggtgaattcatcaggttaggtctgaccacctggtctagcattctgtctggacctggggctccatgatatttgttacgtgaatgaagtgattccgggtggatattagtttgcaaagtatcatgtaagttctgattcttgactgctccttcagatacccacaaaactgccactttgtctcttataagttgatggaagttacttccgtgctcagccacaaacttcataacgtcaattacagccatatctccttcataaagaagaggctgcttcctttctgctggaaataatatcagagcaggataaacttccctctgatctacagacttcagtatcaaatcacagtcattcaatgtacagtccaacaagtagatttccggaagcttcatcatgacatgattcaaattttctttcacattctgagatcccctgtttaacatatccacatagcccttgatggcccgatatacttcacgaacaaccatttccattctttggcaaaatgagcaccagctattgctaaacaagaccaggacatctttattccatgaattagaagtattttctttgttagaaaggttaaaaccaataacaagttcagagaaagtatgagccatgattcgaggtatagaatccacctcatgaaaatccaaattaacaaatggaggatgggtggcctccctttgaccttgaagaacatgttctgactgctggtatggaagtaaggttccattaagaaactcagaaagaaaatcacacagtgaagaaaagttgaaacttttctcatcagggtaaacatagtgttgctgccaaaaaggatcaacgataaccaaagatggaattccacgaccacccgtgagtctttcaagtaattgataattaccatcagaatagaaaaaaaacccattaaaaccaagaaaatgagcctgctcaccctcatccttgtttccacctgaagaatcatctgtttctggtagcataaatttagcggtagaaagttcatgatctgcaatcgattcttcagtttccacagattttatctcttcatgtgtgacaatagaaggtctctttacttcatctttccgagaagatagctcagtagatttgggattttcctcaagctctccagcagatctatatgtatctccatccagcatcacaatatctgtatggcctttttgagaagtttctgttggaaattgatttgactgaacttctgaatgtgattgttgtgtattggctaacctgacatcaatatcatcagataaaagttggaagcctaaatcctttgctagggagcttagttttccatccttcttttgctggagaagataagccaatatatcattcaaagaactcccttgaagatccgaaggaatattgtccaaactaacttgcttaccctcattcataatcatgatggaagaaatcttctcctttagtttaatcttctgagctggcctagacaactttaacctaggatgttcagatgtactcttgaagccatgataatctcgaatagaaaatttgtcatgactgttattattcttgttaccagtctgattcacacgatgatagtgttgtgcgggggggcgccctgcgttgcggactggaggggtgaaatgagcat

SEQ ID NO: 5468 - DNA, 1373 bp, Glycine max
cttttttagcaacgcgaatcgtgagtccagagtcccacagaagaaaaacaaaaccctcactgagcgctgctgctttgagagagagatggctccgaaccttgaatgtcgtatgtacgaagcgaagtacccggaggtggacatggcggtgatgatacaggtgaagaacatagcggacatgggggcgtacgtgtcgctgctggagtacaacaacatcgagggcatgatcttgttctcggagctctctcgccgtcgtattcggagtgtgagcagcctcatcaaggttggccgcatcgagccggtgatggtgctccgtgtcgacaaggaaaagggttacatcgatctcagcaagcgcagggtctccgaagaggacatccaggcctgcgaggagaggtacaacaagagcaagctcgtccactccatcatgcgccacgtcgctgaaaccctcaacatcgatttggaggaactttatattcacattggatggcctttgtatcgcaaatatggtcatgcttttgaggctttcaaaataattgtgactgatcctgatactgttttaagtactctcactcgtgaagttaaggaagttggccctgacgggcaagaggtgactaaggtggtgccagctgtatcagaagaagtgaaggattctcttgtgaagaatattagaagacgaatgaccccccaacccttgaaaattagggcagatattgaaatgaaatgttttcaatttgatggagttcttcacattaaggaggcaatgcataaggctgaagctgcaggaaatgatgactgccccgtcaaaattaaacttgttgctcccccactttatgttcttaccacccagacactggacaaggagcaaggaatattggttctcaacaatgccatagcttcttgcactgaagcaatagaacaacacaagggtaaacttgtggttaaggaggcagctagagcagtgagtgaacgtgatgataaattgcttgccgagcacatggctaagctacgccaagataatgaagaggtcagtggtgatgaagacagtgaggaggaagaagatacaggaatgggcgaggttgatgtggataatggtgccgggataacagagtgacaaaaaacttgtgggtatagtagtaaggcatagatagcagagtccggctttactaattctgtcttttgttttttttttttcttaattcttttcaaactgtctttaaatgcggttgtacaatacaagcttgaattactttatgttgagatgtcttgtaacttacgaagcgattttgaagtttcttgatgagggtgttcaacccgaactaaggagatttacagttacttcaaatttaccatcgcctttctcttaaaaaaaaaaaaaa

SEQ ID NO: 5469 - DNA, 1467 bp, Glycine max
cggattcgcatcgtgattctaacgttaacttctatttccattttctttgctgcgatgcgaatatgcttcctccaatccgtccttctacaaatgctatctgctgacagatactgagtaccgatctattttctctcctttttcacaatttctcaagttaccattagaaggaagccatggaatctgagagagaaagttttgacctctcaggacctttgcatctaacttatgtcttatgggacaatgcatatcatcgaatgtcagttgctgctagtttggtccaaggagtttacattctagaaagggacaggcaagaaaaacgtgaagggcaaaatgctcttgcaccaccttggtggacattctttcactttaagctgctccgtcccctagtagatgatgttgattcctccatctttggtgcaatatatgagttcaggcctccatcatctcaatataatgacactttatatagaagtccacattatgtaattgcctttagaggaactctaaccaaatcacattcagtttctcgtgatattgagctggatatccactttatcaagcaagggcttcatcaaacttcccgctctgaaatagctattcaagctgttcgaaacacagtagcaactgtaggtgattcaaatgtttggttggctggacactctctaggatcagcgatggcaatgctcactgggaaaaccatggccaagaatggcatgtttatcgaatcttttcttttcaacccaccatttgtatctgctccaattgaaagaattaaggatgagagggtgaaacatgggattcgatttgcgggcagcgttataacagctggactcaccattgctatgcaagccaagcagccgaaggatttatctgctgatccatttgctgctttggctgcctgggtcccaggtttgtttgtgaatccatctgaccatatctgctcagagtatattggttactttgaacatagaagaaaaatggatgagattggagcaggtgtcattgaaaggttagcaactcaaaattcacttggtggcctactgatgagtgcatttgggaaggaatctgaaccccttcacctcattccttcagcttctctgacagttaatgttactccttcgcgtgatttcaaagaagcacatgggattcaccagtggtggaaaccagacttgcagctagaacacaagctctacaattacaaatagttcctctagttatttatttattgtgatacattggggggtgttggttctggttttcttgtacagacggatgaaatttattaggaaagatgaaggtaaattatgaatgattgaattgtcattttgtataaattgttagataagtggctgttgtgacttcttctacagctttggcgtattttggattgaagaaaccttctctgctttaaagcatttaacttttgtttactagaataaaaaaaatgatactatgttgttattattg

SEQ ID NO: 5470 - DNA, 1339 bp, Glycine max
tgcacgttgtaggctctttgtacgttttacacgtcagctcttcaaaacgacgcctccatcagatctctgcagccccaaagggtgccgttttgttgcgttgcactcgcggaagcggagaaaaccaaagaatcaagcttcgtcaaagtgtctgtcacacacagtctttaagatctggaagcgcttctcacttgcccacaataagaattcctctcaaatttcaatttttcatttgaaaataataaaaccctaaaagaggggttgcaagcaaaatgagaagctcgaagatgtggatggttttcatgtgtctgacggtgagcttcttcgctcgcattgaatcgctatccgtgacggtgaacgacgtcgagtgcgtctacgagtacgtactttacgagggcgacaccgtttcggggaactttgttgtcgtcgaccatgacattttctggagctctgatcaccccggcattgatttcacggtgacaactgctgcagggaatactgtccacagtatcaagggaacctctggtgacaagttcagttttaaagccccatcacatggaatgtataaattttgttttcataacccttactcaacacctgagactgtttctttctacattcatgttggtcacatcccctctgagcatgatcttgccaaagatgagcatttggacccaattaatgttaagatcgctgagctcagagaggcactagaatctgttacagctgaacagaagtacttgaaagcccgtgatgcaaggcatcgtcatactaatgagagcacacggaagcgtgttgtattctacactgtgggagagtaccttctcttggctgctgttagtgcactgcaagtcatatacattaggcgccttttcagcaagtcagtggcctacaatcgtgtttgagtcgccttcatgattaacgttaatggcttccttcattagcaacagggttaggtttacatatgcgttctctattcattcaacagtacgattacgatcccttggtgaacactttttttttttcttttcaacagagactccacttgtatgttgatacccaacaagatatttaaattccttagcttgaatttcaatggattcacagaaatcaaaccgtgtgggaatcaataccaagtttgtaaaatggtagtctgagttcctaaaatggttgaaaaactgaaagtaaaattagacttttttggtaaaaaaaaaaaaaaaaaacttattttttacctgttcttttaggacttggctctttatgttgttcacttctactggcaaaaggtgaaacatctccacaaattaaaaatttgatgttatatatgattgtaatttgtaat

SEQ ID NO: 5471 - DNA, 4099 bp, Glycine max
aaaataatataatttctaaatattaaaaaagaataattttgtactagaagtctaaaaacttaaaaatctagcctttttatacaacaattgaattaaaaatcctagccactcactgattgatggaatacagctgttaaggtttgtgttgtcggcaagactcaatagttgttggttgactgaccttgaaacaaaaagatctttactttgatttgatgaccacttcattgcactgagtgattggcataagctgcacttgaaaacacagatttccattcatcgattccactgctccctttcctaccatacaatggcattagaatgcgttggtggtgctgttctttcttctttcctcggggctctatttcagaagctggcttctcctcaagttctggatttctttcgtggaacaaagatcgaccagaacctgcggagggacttagaaaacaagctcctctccatccaagctgtgcttgatgatgctgaacaaaaacagtttggaaatatgccagtgagagactggcttattgagctcaaagttgccatgcttgacgttgaagatgtcttggatgaaatacaacactccagactccaagttcaacctcaatctgaatctcaaacctgtacttgcaaggtacccaatttcttcaaatcttcccctgttagctcctttaacaaggaaattaattccagcatgaaaaatgtccttgatgacctagatggtcttgcaagccggatggatagtttaggtttgaaaaaggctagtgatcttgtagcgggatcaggatcaggtggtaataagctacaatcaacatctttggtggtagaaagtgatatttgtggcagagatggtgataaagaaatgatcattaactggctcacttcttacacttataagaagctgtcaatactttctatcgtgggcatgggcgggttgggaaagaccacgcttgcccaacttgtatacaatgacccaagaatagtgagtatgtttgatgtcaaaggttggatctgtgtttcagaggaatttgatgttttcaacgtatcaagagcaattcttgacacgattactgattcggctgatgatggtagagagctagaaatagttcagagaagactaaaagaaagtttggcagataaaaaatttctcctcgttttggatgacgttcggaacgaaagcgggcctaaatgggaagctgtgcaggatgctcttgtttgtggagctcagggaagtaggatccttgtcacaacacgcagtgaggaagttgcttctaccatggggtcagacaaacacaagctggagcaattaccagaaggttattgctggcaattgttcgcaaaacatgcattcagagatgataatcttccacgagatccagtatgcccagatattggtatggagattgttgaaaaatgtagaggacttcctctggccttgaagtcaatgggaagtctattacacaacaaaccagcctgggaatgggaaagcgtgttgaaaagcgaaatatgggaattaaagaacagtgatattgttcctgctttagcattgagctatcaccaccttcctccccatctcaagacatgctttgcttactgtgctttattccccaaggattatgtgtttgacagggagtgtttaattcagttgtggatggctgaaaatttcctacactgccatcaatgcagtacgagtccagaggaagttggccaacagtacttcaatgatctactatcaaggtctttctttcaacaagcaagccaatatgaagaaggatttgtcatgcatgaccttctaaatgatttggcaaaatatgtttgtggggacatctatttcaggttgggagttgatcaagcaaaatgtacacagaaaacaacccgtcatttttcagtttcaatgattaccaaaccatattttgatgagtttggaacttcatgtgatactaaaaaattgcgtacatttatgccaacaagctggacaatgaatgaaaatcactcgagttggagttgcaagatgtcgatacatgaattgttctccaagttaaagttcttacgcgtcttatctctgtctcactgtttagacattaaagagctgcctgactctgtttgcaattttaaacatcttcgttcgttagacctttccgagactggcattaaaaaactacctgaatccacatgttctctctacaacttgcaaatactgaagctgaatcattgtagatctttgaaggagctgccctcgaatttgcatgaactcaccaatttgcatcgccttgaatttgtaaatactgaaattataaagatgccaccgcatctgggaaagttgaagaatcttcaagtatctatgagttcttttaatgttggcaaacgtagtgagttcaccattcagaaattcggagagctcaatcttgttcttcacgaaagattatcatttagggagctgcagaatattgagaatccctcagatgcattagctgcagatttgaaaaataagacacgccttgtggaactaaagtttgaatggaattcgcaccggaatcctgatgattctgccaaagaaagggatgtaattgtaattgagaatctacaaccttccaaacacctggagaagttgtcaatcagcaactatggtggtaaacaattccctaattggttatccgataattctttatcaaatgtggagtccttagtgttggacaactgtcaatcttgccaacgattgccttcccttggacttttgccatttctcgaaaacctggagatttcaagtcttgatgggatagtgagcattggtgctgattttcatgggaatagcacttcttcatttccatcgttggaaagattgaagttctcctctatgaaagcatgggaaaaatgggaatgtgaagctgtgacaggtgcttttccatgtcttaaatatctttctataagcaaatgtcccaagctgaaaggtgacctcccagagcaacttcttcctttaaagaagctaaaaattagtgagtgcaaacaacttgaggcttcagctcccagggctctagaactaaaactagaactagaacaacaagactttggaaagctgcaacttgactgggctactttgaaaacgctcagcatgcgcgcatacagcaactacaaggaagcattgttgctggtaaagtctgatactttggaagaactgaaaatttattgttgccggaaagatggaatggattgcgattgtgaaatgagagatgatggctgtgactctcaaaagacttttccgctagatttcttcccagcactcaggacccttgagctcaatggtttgcgtaatctacagatgattacacaggatcagacccataatcatcttgaatttctgacaatcagaaggtgccctcaattagaatcattgcctggaagcacatctctcaaggagctagcgatatgtgattgtccaagagttgagtcgttccctgaaggaggcttgccatcaaatctaaaagagatgcatctctataaatgttcgtccggactcatggcctcactgaaaggggctttgggacacaatccctctctgaaaaccttgcggataataaagcaggatgcggaatcttttcctgatgaaggtttgctgccactctctcttgcttgtctagtcatccgtgattttccaaatctaaaaaaactggactacaaggggctctgtcacctctcctctctcaagaaattgattcttgactactgccccaacctccaacagctaccagaggagggtcttcccaaatccatttcatttctttcaattgaaggctgccccaacctccaacagctaccagaggagggtcttcccaaatccatttcatttctttcaattaaaggctgccccaagctcaagcagcgttgccagaacccaggaggcgaagactggccaaagattgctcacattccaaccctgtttattccgtaagatagtgatagtgatgctgatttttaagaattgtcatgaaactttttcttttttagttgatctgaattatcatgaaccttctacaccatttgtgcttcaaggaaattattaaataattgttttcttaaaaaaaaaaaaaaaaaaaaaaaaaaaaaa

SEQ ID NO: 5472 - DNA, 1319 bp, Glycine max
  misc_feature (6)..(6): n is a, c, g, or t
tcgagnagctacgtaggccccccccccccacaataatagttatgttcatgcttgaaaagtagtgtaccagacaggctcccaccacctcccccttgtactgaaatctccattctccaaaactgcttcaactcttctcattttctttctctctctctctgcctcgcactggagtaccctctccaatttccttcaaatcccatcaaataagtttctcttataccctctgaatattcttcatcatcatcatcattaatcatggctcttttgatgtattttgtgctttttcttgccctcgctggccattcaagtgctctttactgtgtatgcaaagatggtgtgggtgatcaagctcttcagaaagcaatagactatgcatgtggtgctggagctgactgtacccctattctccaaaatggagcctgttttcaacccaacactgtgaaggatcactgcaactatgctgttaatagctatttccagagaaagggtcaagctcagggaagctgtgatttttctggtgctgccacccctagtcaaactccacctactgcagcatctacatgtgtttacccctcaagtcctagcaatgctggaacaggcaccacagcaaccccaacaaccactacaccaacaacaggcacaccacccaccaccttaactccaaccactcccactagtacaaccccaggcattggcaccggcacaggaacaaccacgggcacgggcacgggcacgggcacaaccacaggtaaccctaatgtgtttggaatgagcccaacatcttcaactggaacaggaggaggcttcaatgactcaaacaaaggagtggttcatttgcaagacacgagcatgttgctagtgtcccttgttctcacccttttgctagtgctgttgagggtctaataacaagtggtacagttcttggaagtaaaaaaaaaaaaaaacacacttttggggcggtttgtttttatatgtggatgagattttgccacactgtagaaggggtgttcttgtaatttcatcgcttggaatcatccagaagcaaacccccactttagcctctttgtttttgttctgttcctactcctaagaaaaaagaatgaaaaaaggttagggaatttggttccttttgagtggtgaatatttgataatatatagctactaatggggtgaaacttgatgggtttccattgtatattatctatctatcactatgagaagcactattttttttaattatttaactgagccttgctccttatattatatgctaatatgtgatatttacttcttgaatttttaatctataatatgatccc

SEQ ID NO: 5473 - DNA, 2672 bp, Glycine max
  misc_feature (307)..(311): n is a, c, g, or t
  misc_feature (400)..(400): n is a, c, g, or t
  misc_feature (574)..(578): n is a, c, g, or t
aaaatttctctatttctccttatgtttgctattatgctgcttaatagcgtcagtgataaaatacatggacaattgcatgtaatgtcttctggttcaattactttcaggacagtagagacttgacatcaaatagtcctagtgaaagttcagttagtgcttcacgagacctcagttctccagacgtttatgttagtctggcaaatacttctccacattcctttcactctgagaatactttaaattttgaaaggtcacatgcaccatcaaacccatcaaatatgcaagtgaaaggatctagttcagatgnnnnncgtgttagtgtctcaagtgcacccagcacatccagtcatggatctgcacctgatgattatgatgctcttggggatgtatacatatgggnggaggttatctgtgagaatgttgtgaaagttggtgctgagaaaagtgctagttattttagcccaaggacagatattctcctccccaggccattggagtccaatgtggttttagatgtgcttcaaatagcatgtggtgttaaacatgctgctctagtcacaaggcaaggtgaacnnnnnacatggggtgaagaatctggaggacgccttggccatggtgttgggaagaatgtggttcaacctcgtctagttgaagcaatggcttctacaactgttgattttgttgcctgtggggagttccatacctgtgctgttacaatggctggggaactatatacatggggtgatggtactcataatgctgggcttcttggtcatggcactgatgttagtcattggataccaaagagaattgcaggtccactagaggggcttcaagttgctttagtcacttgtggtccatggcacacagccttgataacttcaactgggcagctcttcacatttggtgatggaacatttggtgtcttaggccatggagatagggaaaatgtttcgtatcctagagaagtagaatctttatctgggttgaggacaatagctgttgcttgtggagtgtggcatactgcagctgttgtagaggttatcgcaacacactccagtacaagcatatcatcaggtaaattgtttacttggggtgatggagacaaaaatcgccttggacatggggacaaggaggcacgccttaaaccaacttgtgtggctgcacttattgattccaattttcataaaattgcttgtgggcacagtttgacagcaggcctgacaaaatctggacgtgttttcactatgggaagtactgtttatggtcagcttgggaatcctcaatctgacggaaaggttccatgcttggtcggagacaagattgccagggaatcgattgaagaaattgcttgtggagcatatcatgtagctgtattaacatccaaaaatgaagtttatacttgggggaaaggtgcaaatgggagactgggtcatggagatattgaagatcgtaaaacaccggctttggttgaagcattaaaggatagacatgtgaaatatattgcatgtggttcaaattactctgctgccatatgccttcataagtgggtatctggtgctgagcagtctcaggatagacatgtgaactaaaactatgttttggttttgcctatctcttatgctattaaaattattctagaatccacctacagtttttttattcaaaaataagtgttggaactctaagatatgatatcaagtttacttatgtaatttgtttggtgacctattgtgaaaaatttctctattatttactctcttggatttttcaaaaaaatttgatatcagagtcaatgatttgacttagtgactagcttagacgagtaagatggcgttgatggattcatggatatagagttctttgcatcaaaagtctttctgacgggtgaattcatgcatgaatgtcaggtagcagagttgcaggtgttgcaatagtacaagatactagaacatattgtggcaatggctagacaagccgggggcagtaacgattaagctctaagggtcaccatgaaatattcttggattgaaaatgacttccgcttgagggaaaggctaacatgtgggagaaacacaaaatgagagaaagactattgaaagactattgcagtaacgattaacctcatgaaaatgactattgaagctctaagagttctttgcttttggaattttctcttggaccagataccattcaaagaatttcagataatgtaaatgcacggggttcttttttattttttattttgtggcatttatctcaatatttggttgatatattggaaacttgatagcgattagctgatgtatcagtcaacggaccctagtatggaaaaagtgaagacagaatttttccacaaactaatgtatcagcgtgagtttcctttgatttaaatatttttgtggacgtgttttaattttcctttttgatgtgattggcgggcgagcttaattttctaacccatattttaagggttggcagacttggaaaagtattgcttggatttaactgaactggctgtttataagtgttttgtttttagaatcctatcacatatatgtagtctgttgatgaagtagatagtgatgggagcttatgttttgggcagacccttctgtcgtcttcttcgcagccgtcggacgcgtgggcggacgcgtgggcggacgcgtggg

SEQ ID NO: 5474 - DNA, 880 bp, Glycine max
ttgtacggctgcgagaagacgacagaagggggactagagaagaagagtgatatggcttgtaattctatctcccaagcagcttcaatgggcacacaaatatgcacccaaatagcttccatattctcaaagcccacccatccatacccggccccactagaccttttagtcaccgaactcacctccgttgcctctcaaaaaggcaacgtttttctatacggcgtgggccgcgagggcctcatgctcaaggccctctgcatgcgcctcttccacctgggcctctcggcccactttgtcttcgacatgaccacaccccccatagccgccggcgacctcctcatcgcctctgccggccccggcggattctccaccgtcgatgccctctgcgcggtggcgcgctccaacggcggaagggtgctgctcctcactgcccagcccgagacagggtcttgcgtgaaacacgccaacgctgtggcttacgtggcagcgcagaccatggccgatgatgcggacgcagaaagggacgcgaaatctcgaccgttgcttccgatgggaagtgtgtacgaaggggcgctgtttgttctgtttgagatggttgtttacaagttgggtgaggccttgggtgagagccctgaagccgttcgatcgcgccacactaatctcgaatgaaattatatcagccgttcgatcttgctatgcgttatgtaacgagtgaaagtggtcgttatatcttcttccacgaaaattattctatttacacaaattttgtatgaaaaattgtacggggatttaactgtttgaatttttgtaaaattcctttgaaatatcagcgatccagtatggtaaaatatttttcaaggagaaaaaaaaaaaaaaaaaaaaa

SEQ ID NO: 5475 - DNA, 1187 bp, Glycine max
ggctcgagctcgagccgaatcggctcgttttacattttccatcacctacgcgggccccccccccatctctaaaagagttctttatagtacttgggatggttgcaggatatggaattggtagcttgttcgttgaaactgtagctgggtggcggtatatgtatggagttagtagtcctatggcaataatcatgggacttggaatgtggtggctcccagcttctcctagatggttacttttacgtgctatacagggaaaaggggatgttcagaattcaaaagacatagcaattcgtagtttgtgtcagcttcgaggtcaagctttttatgattccattccttggcaagtagatgagattctggcagaactttcttatctaggtgaagaaaaagaagctacctttggagaactgttccaaggaaaatgcttgaaagccctctggattggtgcaggattggtcttgtttcagcagatcacagggcaacctagtgtgctctactatgctggatcaatctttcagagtgcaggattctccggagcatctgatgcaacccgagtctctattctccttgggtttttcaagttgattatgactggagttgctgttgtcgttgttgataaacttggaaggaggcctttactacttgggggagtttcagggatagtgatctctttattctttctcggttcatattacattttcttggataattcaccagttgttgctgtaattggtctgctgttgtacgttggcagttatcagatttcctttggtccaattggttggttaatgatagcagagattttccccttgcgcctaagaggtcgaggactaagtatagctgtactcgtcaattttggtgcaaatgccctggtgacatttgctttttccccactgaaggcattattgggagctggaattttgttttacacattttgtgtaatagccgtggcatctcttgtattcatatactttgttataccagaaaccaaggggcttacactagaggagatcgaggccaaatgcctctagtcagtcaccttgttttacctctataaatatctgtttttagtactctgttgcaacttgtcttgaatattgtaatgacacatatattatattaataaaaatatgcaatgatgaaaaaaggtttatttattaaaaaaaaaaaaaaaaaaaaaccaaaaa

SEQ ID NO: 5476 - DNA, 1376 bp, Glycine max
  misc_feature (15)..(15): n is a, c, g, or t
aaataataaaaatgntttctgagttctctcggtctgcagaatctcacatgtgccatcgttgccttagctagtctagtagtcccttatttaaacacatagcttctgtactttggaaatgacaataattgcaaaaacaaattctagtcatatcatatatccttcaacctctcatcattaggcattcagcaagcaagaaaaaaaaatgggcaaaatcatgcttgttttgggtagcctcattggattatgctgtttcacaatcactacctatgccttctcaccttctggatggaccaatgcccatgccactttttatgggggtagtgatgcttcaggaactatggggggagcttgtgggtatgggaatctgtatgcaactgggtatggaactagaactgcagctttaagcactgccttatttaatgatggagcttcctgtggtcagtgctacaaaattatatgtgattacaaatcagactctagatggtgcatcaaaggaagatctgtaaccgtaactgccacaaacttttgccctcccaatttcgcccttcctaacaacaatggaggctggtgcaacccaccactcaagcattttgatatggcccaacccgcttgggaaaagattggtatttacagaggagggatcgtccccgtgctatttcaaagggttccatgcaaaaagcatggaggggttaggttcagtgtgaatgggagggactactttgagctagtattgatcagcaatgtggggggtgctggatccatccaatcagtgttcattaaaggctcaaaaactggatggatggcaatgtcaagaaattggggttctaattggcaatccaatgcgtatttgaatggtcaatctttgtccttcagggtcaccaccactgatggagagaccagagttttccaagatattgttccagcaagttggacattcggccaaactttctctagcccagttcagttctaagctgattacagataaaccaaccaacggctgaggcgtgcttttttattttattactggagctgcccgccacccttcttctggttttgattattcccatcaactccaagccctctatcaaggcataaattgttatcaataataacaatcaatcaccatcatatcatcataagcttgtatatcaaataaacatctttcaagtttaaattaatttatactataaattgttgtaatatcattatagttgaagttcaagctgtgccgcgggagttgggaaagtattaattccctaaattttgtgatgtaatgttgtcactgttgtgaattaattatgtttttttcttagaaaatatatttttaagagaaagaggaaatgtattatagggagaaatttctaaaaaaaaaaaaa

SEQ ID NO: 5477 - DNA, 1886 bp, Glycine max
tcagctacgtaggcccccccccggacggacttcccaaaccaaacgttaaacaatacttgttttattttattttaatttactcttcttttccattagttctttcttccactgataatccaaagttccctcccttactttaaatcaacaaacatctcaagagagtgtgtgtgagagatggcaagcattgctggtacatgtcctttaggagcattgctcagaaacatctcagaaaacaatgggaagatatctgtcgttcattatgaggggcttagattgcagcagagactacaaatgcattcgccaagtcactacatttcagcttcttcatcagctccaagatgcagaacaatcaaggtcatggcttcaccaactgttgcagcaccaaagagagaaaaggatccaaaaaagcgagtagtaataacaggaatgggtcttgtgtctgtctttggtagtgacattgatggcttttacaacaagcttcttgagggagaaagtgggataagcctaatagataggtttgatgcctcaaacttcccggtccgttttggaggtcagatacgtgatttctcttcagaaggctacattgatggcaagaatgaccggcgccttgacgattgctggaggtattgcattgttgcaggcaagagggcccttgatgatgccaaccttggacagcaagtcctggacactatggacaaaacaagaataggagttctggtgggatcaggaatgggaggtataacggctttctctactggtgtggaagctcttgtacagaaggggtataagaaaattactccatttttcattccctactccatcaccaacatgggttctgccttgttggccatagacacaggcctaatgggtcccaattattccatttccactgcttgtgcaacggcgaattactgcttttgttcggctgctaatcacattagaaaaggtgaagcagatatcatggtggttggtggaactgaggctgcaatcatgcctagtggtcttggaggcttcattgcttgcagggctttgtctcacaggaatgaaggccccaagaaggcttcaagaccatgggacaaagatcgtgatggttttgtgatgggtgaaggctctggtgtgctggtaatggagagcttggagagtgcaacaaaaaggggagccagaataatagcagaatatttggggggtgccataacatgtgatgctcatcacatgactgatccaagagctgatgggcttggagtttcatcttgcataagcaagagtttagaagatgctggagtttcccctgaagaggtaaactatgtgaatgctcatgccacgtcaacactggctggtgacttggctgaggttaatgcaattaaaaaggtttttaaggacacgtcagaattgaaaatgaatgcaactaagtcaatgattggtcatggtcttggggctgctggtggtttggaagccatagcaactatcaaagccataacaactggctggttgcatccaaccattaaccaagataacttggaggctagtgttaccattgacactgtccctaacgttaagaagaagcacgaagtgaatgttggtatatccaactcatttggattcggtggacacaattcagtagttgtctttgccccattcaggccataagtaggattcaaactcaacctgagtatttcttttactttgtctttttttttctttacacattttgagaaccagtgatttttggacacaaattcataggactatatgagttatggatggaaaatagttgtttcgtatgtattgaaatcatatacccagatcgtgtggtctaatgtaatgagccctgaagactgaagtcaataaaatataattttcagtaaaagaaaaaaaaaaaaaaaaaa

SEQ ID NO: 5478 - DNA, 1514 bp, Glycine max
ggctcgaaaaagaaaactagtaatatggcttcaagaactatatgttttaccattcaagtgactcttgtagtagcttttctaacaacaaaggttgttttatctgatgacactgtgccaattcccgcgaacaaagcacaattaggtgaatggtataatactaatgtggggcctttagatcaaagaaagagcaccgtggacccagcattggtgactgctgaagaaggcgctaaggttgtaaaggtgatgcaagatggcagtggggaattcaagaccatcactgatgccattaaaagtatacctagtgggaacactaagcgtgtaattatttacattggagctggaaattataatgagaaaatcaaaattgagaagacaaagccttttgtcaccttgtatggggtaccagagaaaatgccaaacttgacttttgggggcactgcacaacaatatggcactgttgatagtgctacattgattgttgaatcagattattttgtggcagctaacatcatgatctcgaacactgcaccgagacctgatccaaaaacgccaggaggtcaagcagtggcattgcgtatttcgggtgacaaagcagcattttataattgcaagatgtatggattccaggacacaatttgcgatgataggaatagacattttttcaaagactgcttaattcaaggcaccatggattatatttttggaagtgggaagtcactatatgtgagtactgagttaagaacgcttggcgacaatgggattactgttatagtggcacaagcaaggaaaagcgagacagaggacaatgcctactcatttgtacattgtgacgttactggaactgggactggcactttcttggggagagcatggatgtctcatcctagagtggtctttgcatacagcaacatgagtgacattgtaaataaattagggtggagtaacaacaatcaccctgaacatgacaaaactgttcgttttggagagtatcagaactcgggacctggtgcagaccccaaagggcgtgctactataactaagcaactaagtgaaacggaggttaaaccttacataacacttgcgatgattgaaggctccaaatggctacttcctcctccaactcccaaggtttaattaattaccacatttttgtctggcttgaggaataatgcaccccatgttttagtggatggtgaattagaaaatggtattccaattcaatactagattgctcgagttgttgagttttggtgtcttgtaatttatttgctttagtcttggcattttaaaattaagtgagatccttgtaaattttgattaagtgagttttggtgttcatgtgcactatgataacacctttgttaaaaataattggaaatttattattgttctagcttcaagcttttaaaaggacataatgtagtcaatatatgtccctataaattcatgaaaatgggaaatgtattttaatttatttaattttatatgaaatagatgatttgtattgtggatat

SEQ ID NO: 5479 - DNA, 1317 bp, Glycine max
  misc_feature (15)..(15): n is a, c, g, or t
  misc_feature (29)..(29): n is a, c, g, or t
tcgagtcagctacgntaggcccccccccngactttcttgcagggatgctacaacagtgggcctgataaaagtgcgtcaccctcgtccgcccccccccccccctgtatggcatggcacacgaagtgaactaccattcctaaactcattgaaaatgaaaatgtcaattcttcttggagttgctcaaatgaaccttggaattgtgatgagctatttcaatgccatattctttagaaacagcgtaaatgtgtggttccagttcattccccagatgatatttcttaacagtctatttggctatctatcccttcttattattgtcaagtgggccactggttctcaagctgatttgtaccatattttgatctacatgttcctgagcccaacagatgatttgggtgagaaccaactctttgctggtcagaaaaatctgcagcttgtgcttttgcttctggctgttatctctgtgccctggatgctattgccaaaaccttttattttgaagaagcaacatgaagctaggcacggggttgaatcctatgcaccacttcaaagtacagatgagagcttgcaagtggagtcaaaccatgattcacatggtcatgaggaatttgagttcagcgaagtctttgtacatcaactcatacataccatagaatttgtacttggagcagtctctaatacagcttcttacctccgtctatgggcccttagtcttgctcattcagagttatcaagtgtattctatgagaaggttctgatgatggcatgggggtacaataatgttattatcctgatagtgggtctcattgtcttcatttttgctaccgtcggagtgttacttgtcatggaaactctcagtgcctttttgcatgcgttacgtcttcactgggtggagtttcaaaacaagttttatgagggtgatggatacaagttccaccctttctcgttctcctggctggatgatgaggaatgatatgctctaaactcgcattaataagaacgaagagttatatagctttggacctgtattgattctttcatttgatgtaactagtcagtaattggtatctgtggggcattgtatgtggtggaatccttggagcattttcatcaaacgtgccgttttgtttatttatccattgagggaataaatattcccaattaggggagtaactttgtatgggcaaggcaggcgtgtctatgtgtaataattataacttccaagataaacttaatattcatatctttatttgttttaatttaaagaaaaaaaaaaaaaaaaaaaaaaaaaaaaaaaaaaaaaaaaaaaaaaaaaaa

SEQ ID NO: 5480 - DNA, 1335 bp, Glycine max
attcaccctcaaaccaatacaatcaaccaaccccttcactctctctctctctctcttgcaatggctgccattgttttcatccacattgcatcattggtctctctttttgttgcaacaagtgcaagaatccctggagtttacaccggtggcccctggcagagtgctcatgccaccttctacggtggcagtgatgcttctggaacaatgggtggtgcttgtgggtacggaaacctgtacagccagggctacggagttaacaccgcggcgctgagcactgctctgttcaacaacggtttaagctgcggcgcgtgcttcgagataaagtgcgaccaggatccacggtggtgcaaccccgggaacccttcgatcctaatcactgcgaccaacttctgccctccgaacttcgcccttccgaacgacaatggcggatggtgcaaccctccccgcccgcacttcgacctcgccatgcccatgttcctcaagatcgcccagtatcgcgccggaatcgtccccgtcgcataccgccgggtgccatgcaggaaggcaggggggatcagattcacaatcaacggtttccgttacttcaacctggtgctgatcaccaacgtcgcaggtgcaggggatatcgtgcgcgtgagcgtgaaaggaagcaaaaccgcgtggatgagcatgagccgcaactgggggcaaaattggcaatccaacgcggttctggtgggccaggccctttcctttagggttaccggcagtgaccgacgcacctcaacctcctggaacgtggcaccacctaattggcagttcggacaaaccttcaccggaaagaatttccgtgtctaaatccaagaagaagaagaagaagaaaagagagaagaaaataacaatactcttaaattaatggctcctggtatttttgagtttgtttgcttcagtttccctgcttctaacttccctctattttcctgggaaagctttggagtgggtggtagggggttaaaagaaaattaagagaaaggtagttttaggaaaagtaaaagtgaaagtaaggttaataattaatataaatgtaagtcgggggggtgtttgcattaaatgttaaagtgttttatgtatgggtgatgctggaatattaattacccagcattagcaacccgtttttcttttctttgtttattcaaagtgtgagggggctgaggaggttgcaaggaggaacatgtagcccgcagctctggctttaatattgacataaatgtactatcatatcaacaaatataaataaaagaatagcatttcagttgctataaatgctgatttaaaaaaaaaaaaaaaaaaaaaaaa

SEQ ID NO: 5481 - DNA, 1622 bp, Glycine max
ttttttaactttaacctatcaaagccgtttttattgagctttttccaatatgatcttgtgaacttgatatctgcagttaaaaaagaaataccaaaaaggaatgaaaataaaagaaatgataggcaaaattgctaatatacaacagcgaccaaaatcttgttagccaaacaaaaccatataacctaagcttctttcctatgtgatgcatgagccgaacaatgccgtagcacaaatacaatctcctagaaaaaattgtacagcttttctgctggcacttcattcaggagtctttgctagctcttcaataaaaatacgatgtcgttcgacatgcttagcttttattataactcacttgcgccgggaactggaagagatcatatgctggtgagccttgatatccctttgtattctgtctgcatacaagggtaggcgaatgatctgattgatctcattcaataagacctcttctgtgatgttatcctttatgcttcgcattacctttctataggtattgatatcatttggagcggctttgtctattctgatccgcatacaaacccaatgatgctccgcggaatcccagtagcattcaatgatcttccctgaataggaagaaatgtccgatgcatctgaaaatcatttggagccaaaaattgcaagcaaattatggtttgatttttccagatattcggttaaatcaattcgagagttatgttataactaactaaagacagaatcaattgcaaatggagtcttgtatatatatatatatatttcactactaatcacaattcaagtatggccaaaatcgggtagttcatgcaattacctgtcatctggaccaattaataataacaatagtaataatgccattaattacattatagtggtataaaataataatgatggtctacacgttgtacaacctttaaaaataacattctcctccattaacttcttccttccacgttcaaatagaaaaagcaagggacgatctccagctcccacctgtcaacaaagatggtttcagcataattggattgtcatgttagagaggaatttaacaccacactaagcccatttttgaacttgagaagtacttgtacaacctcacagaggaaatcaacagagttcatctcagggtatttccacttcagaagaccttcatgtgtgcgagggacatatggatcatcccaaccctgatagaatccaacattattgacaacaaacgagtacatcaaccaaacagcatatatgaatatttgtaaatgggatgttctcagccagtaagtattctctataaaccaaaaaattacatccttatttagatttctcaatagtcaatattgactcaatacaatgaaaaacaagaactgagaaatttggactgttccctagtagagcatcaattcagtacatcatcctcaaagaactggtgtttcctacaagccaagtgttcattgatccaactatcctctacatccaagctcaacttgggaggttcgatcctctagagatactaattattacctggaatacaagaccatctgatgaatgcgatagttgtggaatgaatttatgaaggagcttggggggggggggcctacgtagctgactcgagg

SEQ ID NO: 5482 - DNA, 1115 bp, Glycine max
accggatcccctatcaaagccgtttttattgacctttttcaatatgatcttgtgaactctgtctgctgttaaaaaagaaatactactaaaaaggaataaaaataaaggaaataataggcaaaattgctaatatacaacagcgaccaaaatcttgttagccaaacaaaatcaacctatgcttctttcctatgtgatgcatgaggctaacagtgccgtagcacagatacagtctcctagagaaaaaaaaaatgtacagcttttttgttggcacttcattcaggagtctttgcttgctcttcaataataataataaaaaaatacgacgttgttcgacatgcttagcttttagtataactcacttgcgccgcaaagagatcatatgctggtgagccttgatatccctctgtattctgtctgcatacaagggtaggcgaatgatctgattgatctcattcaataatacatcttctgtgatgttatcctttatgcttcgcattacctttctataggtattgatatcatttggagcggctttgtctattctgatccgcatacaaacccaatgatgctccgcggaatcccagtagcattcaatgatcttccctgaataggaagaaatgtccgatgcatctttaaaaataacattctcctccattaacttcttccttccacgttcaaatagaaaaagcaagggacgatctccagctcccacctgtcagaggaaatcaacagagttcatctcagggtatttccacttcagaagaccttcatgtgtgcgagggacatatggatcatcccaaccctggaatacaagaccatctgatgaatgcgatagttgtggaatgaatttatgaaggagctttgacacagtagatagcaaccaaaaacccttcctcctcacactaaatggttccaagtcatatctataataaggatttatactctttgagaggccctcgcgttccatgttacgaggttcaattacttctttctccagcaatttccacctttcatagaagggcagctctgtcaaagaaacttgatcctcggcccgcattccataaatgaggtatcttctctcttgcttatgtgtatgcggatctgtgtcctggtgc

SEQ ID NO: 5483 - DNA, 1789 bp, Glycine max
ccctcgcgtccgtacggctgcgagaagacgacagaaggggatcccattcccatttttccttccctccaaaatggaagagaaactaaagtacccctgtctctcttccttgttaaccctcttcctctgcatctccgccacttccactaacccacacaactcccaaacccaaacccttctcctccataccctccctgacccacccacactctcatggcccgaatccgccaccgtagaacccgacccggaacccaccacatccctctcccttcaccacatagacgcactctccttcaacaaaaccccttcccaactcttccacctgagactcgaacgcgatgccgcaagggtcaaaaccctcacccacttagccgcagccacaaacaaaacccgacccgccaaccccgggtcgggtttcagcagctccgtggtatcgggtctctcccaaggcagcggcgagtactttacgcgcctgggcgtgggaactcctccgaagtacctctacatggtcctcgacaccggaagcgacgtcgtttggctccaatgcaagccctgcaccaaatgctactcccaaaccgaccaaatcttcgacccatcaaaatccaaatccttcgccggaatcccctgctactcccctctctgccgccgcctcgactcccccggctgcagcctaaaaaacaacctttgccagtaccaggtttcttacggtgacggctccttcacattcggagatttctcaacggaaactctcacgttccgacgcgctgcagtcccgcgcgtggccatcggctgcggccacgacaacgagggactcttcgtgggcgccgcaggtttattgggcctcggtcgcggcggcttgtcttttcctacccagaccggaacccggttcaataacaaattctcttattgcctaaccgaccgaaccgcttccgctaaaccgtcttccattgtgttcggtgactccgctgtttctcgaaccgcccggttcactcctttagttaaaaaccctaagcttgatacattttattatgttgagcttcttgggatcagcgttggcggcgcgccggttcggggaatttcggcttcgttctttcggctcgactctaccgggaacggtggggtgattattgactcggggacttccgtcacgcgcctcacgcgccctgcttacgtgtcattaagagacgcttttcgggtcggggcttcgcatttgaagcgcgcgcctgagttctcgctttttgacacgtgctatgatctttcggggttgtcggaggttaaggttccgaccgtggttctgcattttcggggcgctgacgtgtcgttgccggcggcgaattatctcgttccggtggataatagcgggagcttttgctttgcgttcgccggaacgatgagtgggttgtctattatcgggaacattcagcagcaagggtttcgggtcgtgtttgacttggcgggttctcgggtcgggtttgccccaagaggatgcgcgtgattgaaaaaatgtttaacacatcttttttcctttccccttattttaattattcctttttttttttttaatttatgtatcttactcttgatgtttttatcgtattatctagtgaaatgctacttacaagttactagtggtacaataagaaatagttagctcgttaaaatgctacaaatttctatgtactgatgttatttttatatatgtactctaaaattgctatttaaaatggagggattaatgagaaaacattgttgtttgagtaaatatcaatccatgaattataaattaagcttt

SEQ ID NO: 5484 - DNA, 878 bp, Glycine max
ataaatacacgttagcccactctaaaaaaaaacatactcaaccctacttgtgttcttgattatactctgcgaaataatttttgcgtttcattgtcttataattagcatggcctttgccgcagttaaagtgttcatgatattggggcttttagccaccgcgtgtgtagcacaagcccctggacctgcacccacgcaaccaccatcaacaaccccatcaccgtccacgtcagcacccgccccatcaccaaccgcaaacacccctcctcctgcggctgcacctgcacccgcaacacccacacccacacccgctccttcatctccaactccaacaacagctccatcccaggccccaggcccaaccacctcctcccctcccgcgccaggcccatcaggcccagcaccaggcccatcaggcccggctccagaccaaccagcctccgagcctccctccgcagcgttctccataagcaagacatgcattgccgccactgctcttgttggaaccttcctcgccgtggctttggcttaattaattaaacctcttccgatgagaaatttttttatgattcgtccactttgaaggaaaaaaaaatgattatttgattttggtcgtggacggaccagatcgatctatttgatttcttctttggtctctgttgagttactctgtttaattatcttcttaattgtgttggtttcgttggtgtttgttcattgctacataattttgtgattctttgtttcccggcttcatttgttttatctagatgaccatggtttcaatgtacgtttaatcatatgtagaatgtaaaaacggttcattctttcgctctcaaaaaaaactaaaaaatagaggaatgtaaaaaaaaaaagaaaat

SEQ ID NO: 5485 - DNA, 1513 bp, Glycine max
tcagctacgtaggcccccccccgcttgtgttgaaaaagtgccggaacatatgcgctaactattctattgtcttgtccttttccactcttcacttcttaactaacctcacagatggaaccggaagaaaccgccgccgccgccgacggaagcttcgacgaggggctgctcgggctagacgacggcggcggcggcggcagggacagagtaaagggtccgtggtcgccggaggaggacgccattctaagccgtctggtgggcaagttcggcgcgagaaattggagcctcattgcgcgcggaatcagcggaagatccggcaagtcatgccggctccggtggtgcaaccagcttgaccccgccgtcaagcgcaaacccttcaccgatgaggaggaccggatgatagttgctgctcatgcaatccatgggaacaaatgggcagccattgccaggcttctaccaggaagaacagataatgccattaagaaccactggaattccaccctgaggcgtcgtggagttggtcatgatacgattaaattagaatctgtcagcttcatggaagatgttagcttggagaaagcaaaagcatcatcggaagacactctatcatgtggggatgtttctttgaaatcctcagaagggagagatgtcagttctatggagatcatggatgataaatctgatgacaaagcacaaactgagggccaaatacaccatgaagtcaaggacctacctaccctttttcggccagtagcacgcgtgagtgcttttaatgtataccactcatttgatggtacacagccttcaacatcaattaaaagacctgttccgatgcaaggagctgttttacaatcatcaaaaccagacatggaattttgtagaatgcttgaaggaatttgtggtgatcagtcagtgcctcaccagtgtggccatggttgctgtgctgctccagatggtagaaagtccgaaagctctttgttgggacccgaatttgttgaattttcggaacccccatctttcccaaattttgagttggctgcaatagctacagacattagtaaccttgcttggcttaaaagtggattggagagtagtagtgccaaaatgatgggcaacacctctggaagggtagtatctaatggatctcaagtacatattggccattaaaatgccaaatagatcatcattcctattctgagtgaggactggataatgggtatgataaaagctatagtgatggcaacctattttccttgcaaatctaattaggaaatcaaagttatgtgtgaatcactgctataatgtaaatggattcactaggtaaaaggaggttcttggactgttgaccgattaggacttgatttgggaacctgttattgctaacaaatgttcgttgtagaatagggggaaattacttgcatttcaatcggtttgagttgctgctgttcactttctaagagtgagtagctcgtctaaattaaaagcaccttagagaaataaaaaaaaaaaaaaaaaa

SEQ ID NO: 5486 - DNA, 2402 bp, Glycine max
cctaagttggaagctgataatgtaccatctacctccgggacagctaaaaattgtgtgtttaaactaggtgacagggtaaaatatagttcatcttctgggggcttgtatcagcttcagactatttcttcaagaggggtccagctaatggaagtcgggggaaggttgtcttactttttgatgataatcccttgtcaaagattggcgtaagatttgataaacccatacctgatggagttgatcttggaggtttgtgtgagggtggtcaaggatttttctgcaatgtcaccgatcttcgattggaaaacagtggcattgaagaacttgacagattacttattaatacattgtttgaggttgtggttagtgagagcagaaatgcacctttcattttgttcatgaaagatgcagagaagtctatagtaggaaatggagatccattttcatttaaaagtaggcttgaaaatcttccggacaatgtggtcgtaataggttcacacactcacactgacagtcgaaaggagaagtcacatcctgggggtttgctttttacaaagttcggaagtaatcagactgctcttcttgatttggctttcccggatagttttggaagattgcatgacaggggaaaggaggccccaaagccaaacaaaaccttgaactaagcttttcccaaataaagtgactattcacatgccacaggatgaggcacttctagcatcttggaagcagcaactcgatcgagatccgtccacgacgtccgaaaattaaaggaaatttgcacaacttacgcacagttttgagccgatgtggggtggaatgtgaaggactagagaccttgtgcattaaggatcagacacttagtattgaaaatgcagagaagatagttggttgggctttaagccgccatctcatgcagaatgctgaaactgaccctgatgcaaagctcgtgttgtcttgtgagagcatccagtatggggttgggatcttacatgctacccagaatgagtcgaaaagcctgaagaagtctcttaaggatgttgtaacagaaaacgagtttgaaaagaggcttttggctgatgttattccacctaatgacattggtgttacttttgatgatattggagctcttgaaaatgtcaaggatactttgaaggaattggttatgcttcctttacagaggcccgagctattttgcaaagggcaattaaccaagccgtgcaagggtatcctattatttggtccccctggaacaggtaagacaatgcttgcaaaggcagttgctaccgaagctggtgcaaatttcatcaacatttccatgtcaagtatcacatctaagtggtttggtgagggtgaaaagtatgtcaaagctgttttttccctggctagtaaaattgctcctagcgtgatatttgttgacgaagttgatagcatgttgggcaggagggaaaatcctggggagcatgaggccatgcgaaagatgaaaaatgaattcatggtgaactgggatggcttacgcacaaaggatactgagcgagttcttgtgcttgcagccactaataggccttttgacctagatgaggctgtcattcggaggctgcctcggagattaatggtaaatttgcccgatgctccaaatagagcaaaaatattaaaagttatactggcaaaagaggacttgtcttctgatattaatatggatgcaattgcaagtatgactgatggatattccggaagcgatctaaagaatttgtgtgtaactgctgcacaccgtccaattaaagagatattagaaaaggagaaaaaggaacaggctgctgctgtatcagaaggtagacctgctccagcattaagtggaagtggagatatccgatctttaaacatggaagatttcaaatatgctcatcaacaggtatgtgcaagtgtttcatctgaatccataaatatgaccgagcttcaacaatggaacgaactatacggtgaaggtggttcaagagtaaaaaaagcactaagctattttatgtgagaaaaccctctgtacaaatatttcccccattgctgcccctatgtccagaagcctgcgtattgtagctttgtgccggcctcataacgcttgcagggcttgaggccgagctgtttcgtctataaaaatgaaatataggttttttaagtacctttttttcctttcttttttaaaacccaaacctgtgggatgtgggttttgaaaggagtggagccttacagaattttggccaggctctgctgcatgtattttgttcctcatcccctggccgccgatgtgtgttgaaagtgtcgcactagaaaaaagaagagtcataatgaccatgtgaagcatttatttgccctctcaatggaatctgctaaaacaattaagcatttagatc

SEQ ID NO: 5487 - DNA, 666 bp, Glycine max
  misc_feature (16)..(16): n is a, c, g, or t
  misc_feature (71)..(71): n is a, c, g, or t
tcgagtcagtacgtangcccccccccctgtatcactcacgagtctgctgttagagcaatggctgtcgagtnccgtcacagcgtccacctcttctccctcccaagagggtttataaaaacaatggataccttatggtttcgtgcaatggaggactcaaccaaatgagagctgcgatatgtgacatggtggctattgccagatatttaaatgtcacgcttatagttcctgaactggataaaacatccttttgggctgatcccagtgacttccaagacatatttgatgtggatcattttatcgcgtccttgagagatgaagtgcggatactgaaagagttgcctcccagactcaagctgaaagtggagcgcggctttctttacaccatgccgcctattagttggtctgatatatcttactataaggaccagattctacccttgatacaaaagtacaaagttgttcacttaaatagaactgatgctcggttggccaataatggtcaaccgatagagattcagaagctgcgttgccgggtcaattttagtggtctgagatttacttcccagatagaggagttgggcagaaaggtgatcaggcttctaaggcaaaaaggtcaatttcttgtgctccaccttaagtatgagatggacatgttggcattttctg

SEQ ID NO: 5488 - DNA, 2300 bp, Glycine max
tgctccaaccccaacaagtaagagtaaaggcaaagaacaaaacaaaacatggacgaatggcgcgccaccatcaaaatggatcacagaacccaacgaacttagaaaacctaaccgagtcctccatcagtcatattcccatcgaccgttcagaatgattgatggtagcgatcatgcaacagcagcagcagcatcaacagcaacagcagaacccctctgcactggtgccacctcagctcaagaatccccaatcctccaccacaaccaccaccgccgccaccactccccttaggtcaccctccgcccagtcgccgctctccgtcgtccaacccatccggcaacccccacccccctctcatccggtggtgccggttacgacggtggagcccggtctgacggcggtgccgacgtgtccgctggtcagagtccggctctcggacattgccccctatgacggggcaccagggggaccctatctgagagcaatggaggcactgtgtgggtctctgttgcggcacaatgctgctttgatcgaattggggaacgaagacactgctctgatgcgatgcggcttggaaggtgcgaggttgttcttcagaagtagggcccaccttggttctggcaagggcagccgtggggtttacatgtacagagcaggaagggctttggaggattgggattcttctcccccttgcatggctgatattttcaggtgcatgggaaaggcatctcgatccgccttgtgtgccattgcgaggcatttgcgtcttagaagcgatgtttttaaccatttgcttgatgatgctccattgcctgctaatgaggtgtcttcgtcggttcttgttgtgacctactcacatgcttctttgcaaaatggaaggggtgccattggaggcagtaagcctaccatgaatggtgaagttgagaagggattgttgacgttgatatcttctgacactcctggtcttcaggtatgtgatcccagtggtcgatggtatctggcagacagtgggtttgggcctggagatcttttacttataacaggcaaggcacttagccatgctactgctggcctatgtcctgctgcatcatatagagcttctcctgattattttctgagtcctaatggtggaggaaggtcttctcttgcatataggctcatgccacagggcaatgctatattagattgttccccaattgcagcagctggccatgttattccccaaagctatgttcgaatatctgtaagccaatttatggatgaccttgctgccgaagaactgataggcagcagatgtgataatgctgatgctgctgctcaacacaatgtgaataaggagccatcattaagaagtgttctatcagatcctttatctggcacattccttgaagatgccatgcttgtctcatgtggacattcttttggtggtctcatgctgaggagagtcattgaaacgtcaaaatgtactctctgcaatgtggaaattgaaactggttctttgatccctaatcatgctcttagagctgcagcagctgctgtcaagcatgaggatgatcggaggttatttcgtaatgccgctctccgaaagcggcggaaagaaatgggtgaccaaatggattcaatgagaagagtgaatggggaaaatggagattttactgctgccgatggacttcagcggggagtacaatatccatttttggtaaatgagaaagttgttattaagggcaacaggagaacaccagaaaaatttgttgggaaagaagctgtgattacatctcagtgtctcaatggctggtatttgctcaagattattgaaactggagagaatgtccgcctgcagtaccgttctcttaggaagctcttaaactcaccagcggaccagtgcccctcccagccaattcaaaatagcagctcttaaaatagatttattgtaggttttccttctttcttttttcctccaccagaaaaaggaaacttttgtagtcttgatcctttgaagcaaagaattgactcatctagtcttgatctatgattgtaaagaattacattgactggtccggctccttatagcatgtgatagaggtttataatgtatcaacgaggttatttgtgtagatgccaatgctaggtcggcttataattattgtaaagaagaaagcaggcaaagataaattagatagcatgtaaattgtagcttgcacttactgaaatggatcatatgtttaattttatttattttgcaaccattcagtttttgtaaaaaaaaaaaaaaaaaaaaaaaaaaataaaaaaaaaaaaaaaa

SEQ ID NO: 5489 - DNA, 1873 bp, Glycine max
cccacgcgtccgtacggctgcgagaagacgacagaaggggatactagtttggagctacgttaaggtgttccgcgcgcggggtcagagcagtcccattcctatctctgtcagctgtttttgctgccgtcttttctcaaacttctctctctcaatagcagcaaggatcaagtgaaaactgattattttccattgagtttgatttagttcttagcttctgcttcgatgccttcaatcatgtcacctcagtggcaagacaaggctgctggtttcttttcttcctctggggtcaagcttaaagaagcgaaggagtcagcaggaacattcgttggtgaggtcacaaaggatacaaagagtaatgtggctgaagtggcaggacgagttggatcgatggtgaagagtcggtgggcacttcttcaacagccatccacaagacatgctgtgcaggatcgtttcatatcagctgctgctacaactggtacactcctgaggagaggcttctcagggacaaaggataaggtggttgtgggaaagtccaaggttgaagaggtggcaaaaataacagcacaaaaaagtaagactatcttgacagatattgaaagatggcaaaaaggagttgcaagcactgatgtatttggagttcctattgaggttactgtgcaaaggcaagattgctgcaaacctattcctcagatattaatcaattgtgcagattatcttatagtttcaggattgaactcgccacatctttttaaatctgaaggggataaaaaggttattcaccagttggtttccctatacaaccaagattctactgcttcagtaccagaaggaacaactcctgttgatgtagcagctcttgtaaaatattatcttgctagccttcctgagccactaaccacattagagctttataatgagattagaagtgctcgatccagtatatattccatgagaaacatactcaagaggctttccagtgtaaactacatgactctggagtttataacagcacttctactccgtgttagccagaagtcacttctcaataagatggatgctcggtgccttgctatggaaatggcacctgttattatgtggcaaaaggaacggacacctgaattttatcatcaatattggaatcagatgtcgaaaagtccttccaaaaagagtgtggatccaccacctggttcatatactgcctgggacatgcttgctgatgatggtgaagccatagatgcatcatctcctattcctttggatgatggcacgccagtagactttggtgcaattgaggttgttcagttgctcatagaacatcataatgcaattttcacagatgcaaatgagacagtctggaaatgaattgctttattccttgtcctgtatttattggttgacttggatatattggacttggaataatttttttaccaatccagtcatgaagatcattattagcagctatatttgaagttatccacaatcatcacgctgcagaaagatgttggatattattggtccagttttagtgataatccctatctgattttggatgtcttgtgcttatagggaagcgaccaatttacttcataaagggggtaaaaacagtgacagtattgtacagctattagccgattatgtattgcttacagaaatacttgtcactaatgtgctgtgttattgtggtctttcgcttggattgataatgcgatctttgtttatagtttacgtagagtcatgtattcatattcatataagggtcacttggtacacctactagtagaatttgtcatttatatctaaaaaaaaaaaaaaaagggcggcagacgacatagtgagcaagtaaacccgggaattaattaagaaccggtcc

SEQ ID NO: 5490 - DNA, 4087 bp, Glycine max
ggagcgatctgaggtgaggacattaaaagagcaatgctagcacagggattcgaggacgcagagaaatggctcgccgaggggatcgccggcattcagcacaacgcattcttcatgcatcgcgcactggacgataacaatctcagagacgctctcaaatactccgcgcagatgctatccgagcttcgaacttccaggctctcacctcacaaatactaccaacttgttcgcgtgggtatatgagagccttcgatgagcgccggaggctggagattttctgcaaagacgaaagcagacacggcgtttccatagttgatctctacgagcttgttcagcacgctggaaatatattgcctagactgtatctcctttgcacggtaggatccgtttacctcagatgcaaggatgctccggtaaaggatgttcttaaagatctagtggagatgtgtcgcgctgttcaacatcccattcgtggtctatttttgaggagttacctttctcaagtcagtaaagataagttgcctgatattggctatgaatatgaagagggggaatctaatagtgtgatggacgcagttgaatttgttctacagaatttcacagaaatgaataagctgtgggttcggttgcagttgcagcatcagggacctgctcggataagggagatgagggaaaaagaaaggaacgagcttcgtgatcttgtggggaaaaatctacatgttctgagtcagatagagggcgtggaccttgagatgtacaaagacaccgtccttcctagtgtcttagagcaggttgtcaattgtaaagatgagcttgcccaattttatcttatggagtgcataatccaggtttttccagatgagtaccatttgcagacacttgagactttgttaggtgcttgccctcaattgcaggtgggtaaattagattggaaatagatgacctcttttgtgcttgggattttaaaaattatactagtggtgactggtcaaccttgtagaggcctaatatacttgagtttaactttgttgttattatattgattccttcttaagggttttgttttacaagtatgtgaagctctatgacttatgaattgctgatcatacatttggttgctcatgaatttaggctatttggaatggtgaccactgacctattcaattagattttgaaacaccttggatttggtgcataaaaaaattgcacatgatatgcttaatcacgtgtggacaattggacatacttagagtgtatttaaattaagagattctaggagtcaatgtaatttttaagactaataaaataaaatatcttgattggatactgaaccggtgaattttaaaatctgtaagcattttgattgagtgtaataaaacagagattttggaattctgcctattgaagtggattttcaaaaattcgtcaagaactgactgcactgtcttctttctttcatactcctttaagcttcattgtacatcgtttattttgtacttatctcaactatcatagtttatggcttcaagctattattaattcacatggtcaacgaatcatcagacatttgctatgcccaccaatcatttgacaacattcctagtccagatatggaagctgtaaaattatttacttataatcattgtctttgtcatttttgataattatttggttgactttgttattaaccaatcattgttttgttatggatgttgatgtaaattgtttgatgagatgcttgagagacatgagcgtcatggacaacaatattggatgggtatacaaggaatgataattttggtgcagcttctatctaatcttcttcatggagggaatttcaatttcacttcttgttacccagatacatcatttttcaaatgaagaaaattaaattgacaaaatttgattttctgtattttaatttctgaaaatttaaaattctccatccaaacgcaacccagttttattttttgtttcttaattgtatctagctggtggtaggtttccttgcagatgaccaagaaatttactggatggcagtggttcacccatgtgactttcttttagaatatatgtggggattctattataagtgaagagtgaagcaacagaaaaacttctcatagatcaattctgttctatttttctctgattttcttaaagctgaaagccatttttatctcccctatgactgacttgatttatttgcagcccacagtagacatcaagacagtgttatctcagttaatggacaggtattgcccgaatttctgcaagtggaagcatttaccaaattaagcacagcaattggcagggtgatagaagcacaagttgacatgcctattgtgggagcaatagctttgcatgtttctcttcttacatttactctccgtgttcatccagatcgacttgattatgtggaccaagtactgggatcatgtgtcaagaagctttatggaaaaccaaagcttgatgacaatagagcaacaaagcaagttgttgcacttttaagtgctccacttgataaatacaatgatattgtgactgccctgacactttccaattatcctcgtgtaatgtatcatcttgatcatgaaacaaataaagttatggccatggttattatccaaagcattatgaagaataacacttgcatctctactgccgataaggttgaagttttatttgaactaatcaaagggcttataatggacttggatggaacaactgtggatgaggttgatgaagaagatttcaatgaggagcaaaattctgtcgctcgcctcatacacatgcttcataatgatgaaccagaggaaatgtttaagataatatgtaccgtaaagaagcatattatgagtggaggaccaaggcgcttaccttttacagttccttccctgatattttctgcactaaggttgatcaggcggttgcaagggcaggatggagatatagtgggagaagaagttcctacaacaccaaaaaaaatatttcagcttttaaatgaggtaattgaagctctttcttctgtgtcatctcctgaactggccctgagactgtatctgcaatgtgctgaggctgctaatgactgtgaccttgagcctgttgcttatgaatttttcactcaggcatttgtattatatgaagaagaaattgcggactccaaagcccaggtaactgcaatacatttaattattgggtctcttcagagaatgaacatctttggcgttgagaacagggatacattaacacacaaggccacagggtattcagcaaagcttttgaagaaacctgatcagtgccgagcagtttatgcatgctctcatctcttttgggttgatgatcaagatggtattaaagatggagaaagggtattgctttgccttaagcgtgctttgaggattgcaaatgctgctcaacaaatggccaatgcagcaaggggtagcagtggtccagtgacgctctttgttgaaatactgaacaagtacatttactattttgagaaaggaaacccgcagatcactagttctactatccaagggcttatagaattgatcatgaccgagatgcagagtgactctgcatcagctcttccagcttcagatgccttttttaccggcacattgaggtacatccaattccaaaaacagaagggcggtatgctgggtgaaaaatatgatcccatcaaggtctcaatccctgcctaacatatccaagacacccaaatgtgaacttgtatgaaaagccaagcatgttgttgtgagtgttcatcttcatcttaaaaaacaaaaaaggtttatcagtgttcactactcgtgcattataaaatgtttgcagtggcatcaagtttattttgaagtgaataattttaaatcttcctacaaattcttctacttgctaaatgaagaagtaattgaaagtattttatacggcaagatattaaatgtactcacatcttcatttaatacttctgttgggaagattagtaggaggataaagtatataacatcactcttaatgtacaattagcatgtgcagtttaattaaaactgcatgaattgaatgttcattactcttgcatttacatggt

SEQ ID NO: 5491 - DNA, 714 bp, Glycine max
agctcggaatgtcggctcgagccgcagaggaggagcgatctgaggtgaggaaattaaaagagcaatgctagcacagggattcgaggacgaagagaaatggctcgccgaggggatcgccggcattcagcacaacgcattcttcatgcatcgcgcactggacgataacaatctcagagacgctctcaaatactccgcgcagatgctatccgagcttcgaacttccaggctctcacctcacaaatactaccaactttatatgagagccttcgatgagctcaggaggttggagattttcttcaaagacgaaagcagacacggggtttccatagttgatctctacgagcttgttcagcacgctggaaatatattgcctagactgtatctcctttgcacggtaggatctgtttatctcagatgcaaggatgctccagtaaaggatgttcttaaagatctagtggagatgtgtcgtgctgttcaacatcccattcgtgtctatttttgaggagttacctttctcaagtcagtaaagataagttgcttgatattggctatgaatatgaagaggggtaaggttattattatttggttggtgatgaattaatgtttttgaatgtcttgtgcatcttatcattttaatttggagtaatgttgttacattctcctacaattgttctttaatttaatagtaggtggtaattagaaagtaactaaaaa

SEQ ID NO: 5492 - DNA, 2087 bp, Glycine max
gagtcagctacgtaggccccccccccatcttcccatagcatccattcacccatttttctctctcagatttcatttttcttcttcttcttctctctcttctttgtgcttattgtattttatggacaaaggatggggactcacccttgatacctcttcctctcaatctcttccattattcccttccaacgataataagatgtttcctctcctcggattccccgtcaacctcagccgcgcctccaaggaagacgatgaaaaccgcaaagttgtcggtgaagttgacttcttctctgacagaaacaaacctacacctccaccctctcacgaccacaacgttaaacccaacatcgtcaagaaggaaatcgatgaaacacctcttcacattaatactggtttacaactccttactgctaacaccgggagtgaccaatctaccgtggatgacggggtttcatctgatgcagaaaataagcgagccaaaaccactgagcttgcacagttgcaggtggagcttcaacgcatgaactctgagaacaagaagctgaaagagatgctcagccatgtgaccggtaactacaccgccttgcagatgcatcttgtcacattaatgcaacagaaccagcagcgaacagaaagcacggaaaatgaggttgttcagggaaaggtagaggataaaaacgttggtgttggtggagggaaggtaccaagacagttccttgatataggtcccagtggcacagcagaagtagatgatcaagtttcggattcttcttctgatgaaagaacacgatcgagcacacctcagaaccataacattgaagctggagctagagatggtgcgagaaataacaatggtaaaagccagttgggtagggaagagagtccagactcagaatcacaaggttggagtcccaataagcttcagaaaatgaacccttccaaccctatggatcaatccactgcagaagccacaatgagaaaagctcgtgtatcagttcgtgcccgatcagaagctcccatgatcagtgatggatgccaatggagaaaatatggacaaaaaatggccaaggggaatccatgccctcgagcatactacagatgcactatggcagttggttgcccagttcgcaaacaagttcaacgttgtgctgatgatagaaccattttggttacaacatatgaaggcacgcataaccatccactgccacctgctgctatggccatggcatcaaccactacagctgctgctagcatgttgctttctggatcaatgtccagtgcagatggaataatgaacccaaatttgctagctagagcaattcttccttgctctacaagcatggcaacactctcagcttcagcaccattccccactgtgactttggacctcacacacaaccctaacccattgcaatttcaaaggcctggtgccccattccaagtacccttccttcaagcacagcctcagaactttgggtcaggagccgccccaattgcacaagcacaagcactttataatcaatcaaaattctctggtcttcagttgtctcaggatgtaggatcttctcaattagcaccacaagctcctagaccacccttacaaccaagccaacagccctcacttgctgacacagtcagcgccgccgcctccgccatcaccgccgatccaaacttcaccgccgtgctcgccgccgccatctcctccatcataggcagtgctcataattcaaacaacaacaacagcaacaacaacacaagccggactaccattagcagcttttcaggaaactgaacattttctttttgggttcaattttttggttaatattgttattattccttaaactttttatttttgtacatgggtactataagggaaaatgaaaccataaatgttcatattctttttagtccatgtcttgggagggatatatatgatatattagatcagaaaaaaatgttttttgtatcaatttctctttgaataattaatattgttgtatatttgattaaaaagttctctagggagtaaatagacaaatggtaattaagaaagaatcgtcttttatcctcgtgactagttctct

SEQ ID NO: 5493 - DNA, 2045 bp, Glycine max
aaccccgcctcgagcttatcccttatggacaaaggatgggtttcctctcaatctcttcttcctcccacacccgacaatactatgtttcctctcctcggattccccgtcaaactcagccgccccaccatggaactccaccatgataaccgcaaacttgtcgctgaagtcgacttcttctctcatactccgccacccaacatcgtcaagaaggaacttgatcaaacacctcttcacattaatactggtttacaactccttactgctaacaccaggagtgaccaatctaccgtggatgacgggctttcatcggatgcagaagataagcgagccaaaaccaccgagcttgcacagttgcaagtggagcttcaacgcatgaacgctgagaacaagaagctgaaagagatgctcagccatgtcaccggtaactacaccgccttgcagatgcatcttgtgacactaatgcaacagaaccagcagcgaacagaaagcacggaaaatggggttgctcagggaaaggttgaggataaaaaccatggtgttggtggaggaaaggtaccaaggcaattccttgatataggtcccagtggcacagcagaagtagatgatcaagtatctgattcttcttctgatgaaagaacacgatcgagcacgcctcaggacaataacactgaagctggaacaagagatggagcgagaaataacaatggtaataaaagcgagttgggtagggaagagagtccagactcagaatcacaaggttggggtcccaataagcttcagaaagtgaacccttccaatcctatggatcaatccactgcagaagccacaatgagaaaagctcgtgtctcagttcgtgcccgatcagaagctcccatgattagtgatgggtgccaatggagaaaatatggacaaaaaatggctaaggggaatccatgccctcgagcatactacagatgcactatggcagttggttgcccagttcgcaaacaagttcaacgttgtgctgatgatagaacaattttggtgacaacatatgaaggcacacataaccatccactgccaccagctgcagtggttgatgccatggccatagcagcaggtggcagtggatggttatggcatcaaccactgcagctgctgctaccatgttgctgtctggatcaatgtccagtgcagatggagtaatgaaccccaatttgctagccagagcaattcttccttgctctacaagcatggcaacactttcagcttcagcaccattccccactgtgactttggacctcacacacaacccaaacccattgcaatttcaaaggcctggtgccccattccaagtacccttcctccaagcacagcctcagaattttgggtccggagccaccccaattgcacaagcactttataatcaatcaaaattctctggtcttcagttgtctcaggatgtaggatcttctcaattagcaccacaagctcccagaccacccttgcagccaagccaacatccctcactggctgacacggtcagcgccgccgcctctgccatcacttccgatccaaacttcaccgccgtgctcgctgccgccatctcctccatcattgggggagctcacaattcaaacaacaacaacaataacaacagcaacaacaacacgagcaggactactattagcagcttttcaggaaactgaacattttctttttggttccattaactttgtatttttgtacttgggtactataagggaaaatgaaaccataaatgttcatattctttttagtccatgtattgggagggatatatcatatattagatcagaaaaaaaatgtttcatttttttgtatcatcaatttctctttgaataatgttgtatatttgattcaaaaattctcttgggagtaaatagacaagggcaaatgaagaaagaatcgtcttttattttttcttcctttgtctcgtgtttatctttaatttttaaaaaaaaaaaaaaaaaaaaaaaaaaaaaaaaaaaaaaaaaaaaaaaaaaaaaaaaaaaaaaaaaaaaaaa

SEQ ID NO: 5494 - DNA, 1996 bp, Glycine max
cggtccggaattcccgcgtcgacccacgcgtccgcgttgaatgaatgttgaatataagtaataacgctgaggctgtaggtgtgggtaataaaaaaagagagaagccgcatcaacatcatccaatatatggacgttaaaagagcgtcgtaatccatttccatttctcatctatcttcacttcctcgtcctcatcctcatccacctattctcaacccagacgcaatgcccatgtacactccatcactctccgcaccctcctccaatcacattcaaccaagtgtcacactccccttatatatcacaaccaccaagctcaatctcaagcagcagcatcacaccacaccaatgccaatacccatgtgcaacgaaattcaagcccaagcccaagcccaagcccaagcccaacctgggtttaagctcgtcggtttcaaaaacttcgtccgaaccaatcctaagtcggaccgctttcaagtcaaccgcttccaccacatcgagttctggtgcaccgatgccaccaacgcctctcgccgattctcttggggacttggaatgcctattgtggcaaaatctgatctctccaccggaaaccaaatccacgcctcctacctcctccgctccggcgacctctccttcctcttctccgctccttactctccctctctctccgccggctcctccgctgcctcctccgcctccattcccagtttcgacgccgccacctgccttgccttcgctgccaaacacggcttcggcgtccgcgccatcgccttggaagtcgccgacgcggaagccgctttcagcgccagcgtcgcgaaaggagccgagccggcgtcgccgccggttctcgtcgacgatcgcaccggcttcgcggaggtgcgcctctacggcgacgtggtgctccgctacgtcagctacaaggacgccgcgccgcaggcgccacacgcagatccgtcgcggtggttcctgccgggattcgaggccgcggcgtcgtcgtcttcgtttccggagctggactacgggatccggcggctggaccacgccgtcgggaacgttccggagctggcgccggcggtgaggtacctgaaaggcttcagcggattccacgagttcgcggagttcaccgcggaggacgtgggaacgagcgagagcgggttgaactcggtggttctggcgaacaactcggagacggtgttgctgccgctgaacgagccggtttacggaacgaagaggaagagccagattgagacgtatttggaacacaacgaaggtgctggtgtgcagcaccttgcgcttgttactcacgacatcttcaccacactgagagagatgagaaagcgaagtttccttggtggatttgagttcatgccttctcctcctcccacctattacgccaacctccacaaccgtgccgctgatgtgttgaccgttgaccagattaagcagtgtgaggagcttgggattcttgttgacagagatgatcagggcactctgcttcagattttcaccaagcctgttggggacaggccaacgatattcatagagataattcagaggatcgggtgcatggtggaggatgaggaagggaaggtgtaccagaagggtgcatgtgggggttttgggaaaggcaatttttctgagcttttcaaatccattgaagaatatgagaagactttggaagctaaaagaaccgcgtaagcacattggaagaacacaaatactcctttgttgaaatgattaatgaggaatcaatgtggcatagggtgtttatactctataatacatagaattacaatgatagtgtcctcccttgtatgaaaatgaaatcacagaaacttttatggatagtatttttctattaaatactttgagagattacttgaaaaaagttctctctctctctctctcaaaaaaaaaaaaaaaaaaaaaaaaaaaaaaaaaaaaaaaaaataaaaaaaaaaaaaaaaaaaaaaaaaaataaaaaaaaaaaaaggggggg

SEQ ID NO: 5495 - DNA, 1183 bp, Glycine max
acggctgcgagaagacggccgcaggtcacacttctcagaatttatgttgtgaagtttgtttattctgagaaggaagagagaatagaacgccatggatgagatattgaacaaggtggggtcttactggttctccaagaaggccagcaaggaatttaactctgtcggcgatgatatcaactcactgtcaaccagtattgaagggggaaccaaatggttggtcaacaagttaaaaggaaagatgcaaaaggcattaacagagttgctaaaggagtatgatctacccataggaatctttcctcgcgatgcgacaaactacgaatttaacgaagagacaggaaagcttgttgtttacattcctcaagtgtgtgaggttggctacagggattcgtcagttctgcgtttctccaccagcgtgagtggctatttggagaaagggaagctagcagaaatagaaggaatcaagaccaaagtgctgatatgggtaaaagtgactgccatttcatccgagggaccaaagctccatttcacggccggcatgaagaaaacaaggaaaagggaagcatatgaggttactagagatggtgtaacggtagataagttctaatatattaacaaggagctccttttgttaagtagttttacaatttagtaaaataaattgtcccttcttgtggaccattttattctattagatttgaatgtagtgaaacctgagacttggtggaactcctcctgagtccttgttgatgatgtagtttcagtttttttctgcttgggtttattaagttctattcctaatgtcacatggcttgtattaaatactgaaacttatgggcaagtgatattgtcatagtattattttagctcattaattgactctaggatattgattcctcccctattattagaggctgccattaattgtgtagcgaatggttacaatgccaatggcacaattgaaacatagacactgtcggtgtgacattaacatcatactattatacggaataaatggtcgcctttaggaattgtcaaagtttgtgtcttaaattttaagttaatccttttctttttaaaaaaaaaaaaaaaaaaaacaaaaaaaaaaaaaaaacaaaaaaaaaaataaccaaaaacaaaaaaagaaaataaaaaattatattaaacaaaaaaaaacggggggggc

SEQ ID NO: 5496 - DNA, 1233 bp, Glycine max
gaaaaaagtaaaaaaccagtcagggcaccggggaaaacacacaattcacaaaggcattcgacggagaatggaaaagaagcggaagaggaagcagcaggtgaagcgcgacggagagccaaagcccaaatcggttcgtgcgggttcaacccgaaccgacaatgtgaaagatccatttccatctcatgctcgacccaccccacaggaatgcgaagccgtgcgtgacactctcttagccctacacggcattcccccggaactcgccaagtaccgcaaactcccaccgtccgatgacccggtccaactgcagccacccgaaccggttctcgacggtcttgtccgaaccgtcctctcgcagaacaccaccgaggccaattcccaaaaggctttcgcttccctcaaatcctcctttcccagttgggaactagttctctgtgccgagtccaaggacgtggagaatgccattcggtgcggaggtctagctccgactaaggcttcctgcattaagaacgtgttgcgttgtttgcgcgagagaagaggtgaattgtgtttggagtatttgcgggacttgtcagttgatgaagttaaggctgagctttctcttttcaaaggaattggtcccaaaacggtggcttgtgtgttgatgttcaatcttcagcaagatgattttcctgtggacactcacatatttgagattgcaaaaaccatgggttgggtaccagctgttgcaaacagaaataagtcatatcttcatctaaaccaaagggtaccaaatgaacttaagtttgacctgaattgtcttctgtatacgcacgggaagctttgccaccaatgctccggtaaaaagggtaacaagcaaggaaagaaatgtgacgataactcctgtcctttattgaattatgataaagactcagttgaactttgagctggggaagcaaattatttttcaattatttgtttctctaactaaatgaagtcaataggggcactctaatcttgtaagttgtaagtgtatagaatactactagtatagagttaggctgttaggcaggagaaccaattttgagattagatgaaagaaaggtcaacaattgtgagctagtgcatcaagcacttgtagggtttgggttgcctaaaaattgcccatctttaattaattctgtaaagggattcttgctggaaaatggaacacttatgtttatttctcttctaatggacattaaatgtgtaggactt

SEQ ID NO: 5497 - DNA, 1185 bp, Glycine max
gtttcctacaactataaagacatgatagcttagttcaaattcacaattcacaacattagtcaagtgtttctgtttctgttttaatggagataaccaaacttggcaagagatttcaaggtaaggtagctattgtgacagcttccacccttggaattggctttagcatagcagagaggcttggcttggagggtgcatctgttgtcatctcttctcgcaaacagcaaaatgttgatgaggctgctggtaaactgagagctaaaggaatcgaagtattggcggttgtttgccacgtttcaaatgcccaacaaaggaaaaatttgatagacaaaactttacagaagtatggaaagatagatgttgttgtgtccaatgctgccgtacatccttctgtagatcccattttgcaaacacaagaatcgatccttgacaagttgtgggagataaatgtcaaatccactatacttcttctcaaggatgcagctcctcacttgaagaagggttcttctgttgttctcattgcctcacttgttgcttataatccaccacctactatggctatgtatggagtgaccaaaacagcagttcttggacttaccaaagctatggctagtgaaatgggccctaatactcgggtgaattgtgttgttcctgggattgtgccaactcattttgttgcactttatacctcaaatgatgctacaagagaggaacttgaaagaaaggcattgcttggaaggcttggtacaactgaagacatggctgctgcgacagcgtttttggcgtctgatgatgcttcttacataacaggagaaaatctagtggtttctgggggaatgccttctaggttgtagcttccagtttcttcttctggtggttgaatggtgggcctaccccccaaaacgttttgtttcctgactcatctgatgccattcaatatagagtggtgcttcatgtacctggtactattggtaaataaaataaaaatgaaggaaaataaaatacgaagaagatgcacaatcttgaattaaataacaaaataacagtagcaaaataaatttaattgacaacacataaataatgcattataacatacaataagcacaagaaaaaaaaatagggaaagaaaaatatagtttgagttgaagcgcgtaaacgctatccttagagagaaaacgcccccacttt

SEQ ID NO: 5498 - DNA, 1960 bp, Glycine max
catttcctcaccttcgcgctataaatcatatcactcgcccagctacgtaggccccccccccccgaagaaaaacacacacacaaacaccctttgagttcattaacctcttcagaaaaaacaacaacaacaacaaaaaaaaacatcatcatcaaaaaaacttccgagagtttaatggcaacacgcgtgatccctccaagaatcctcaagaagctccgttacaacacaacaaccaagccactcaacgctgcccacccctcaatctctccagtcatcgccccaccgtcactcttcgagaggtcgccgtcccctgtcgcggatgctgtttcaacaacatccacgactatggagacggcgaatctcaacctcgacgacgcggagcggcttttcgcgtcagtatcgacggaaaagctgctccggtcgtccgcggttttgcatgcgacggcggtggggcccatggtagacctgggaatgtggttgatgaagtctccggtgttccagaccgggctgccgaaggatctcatcatggccgccacgaaggagacgttcttctcgcacttctgcgccggcgaggacgccgccgccgccggacggagcatcagcgcgctcaaggaggccggcttacgtggcatgctggtgtacggtgtggaagacgcgcatgaaaacgatgggtgtgatagaaacctcaaagggttccttcacactgtggatgttagcaaatcgcttccaccatcctctgtgagttttgtcattgtgaaaatcactgcaatatgccccatgacattgcttgaaagaatgagtgatcttctaagatggcaacagaaagatccttcatttgttttgccatggaagcaagattcgcttccaatttttgcagaatctagccctttgtatcacacgcagaaaagaccagagcctctaaccccagaagaagagagtgatcttcaacttgccaaccagagactccttgaactttgccaaagatgtgaggaagccaatatgcctttgttggttgatgcagaacacaccacagttcaaccggctatcgattacttcacatactcttcttccataaggcacaataaggatgacaaccccattgtgtttggaaccattcagacttatttgaaagatgccaaggagaggttgttgctcacaacaaaggcagcagaaaaaatgggagttccattggggttcaaattggttagaggtgcctacatgtccacagagagtaaattggctgagtcatttgggtatgcatccccaattcacaataccattcaagaaacacacaattgcttcaatggctgctcatcatttcttcttgagaagattgctaatggacccggttcaatttcagttgttcttgcaactcacaatattgaatcagggaaattggctgcagcaaaagcatatgaattgggggttggaaaggtaaaccacaagctagaatttgcacaactgtatggaatgtcagaggcactttcctttggtttgagcaatgcagggtttcaagttagcaagtatatgccatttgggccggtagatatggttatgccttaccttctgagaagggctgaagaaaatagagggcttttggctgcatcaggttttgataggcaattgatgagaaaggagttgggaagaagattaaaagctgcaatgttctaaatttgtcagaaatcaggattcattgactttttgtacaaattagagagttttgtaatgtgaagaaattgtgcattcaatcaaatgaaattctgctttgttatgtaggttttgttggaaatgcaacggatcttttgtgttgagcaataaacttatgcttaaattgggaaagtgtaaaaccaggttagaaaaatgagtaagaaaaacaagaatagtttttaagtcatgggttgtccaagtttctcaatgtagctttaagtcaagttaattaattagttccgttcatttaattttt

SEQ ID NO: 5499 - DNA, 1132 bp, Glycine max
gtggacaaaaaagccttggagaaagatcgccgctgcgctgttgctgttgctgttttgctacattctgaatggagctttctgcaccttcttcaccctctcttctaagatgtccttcatccctgcttctgaattctagggttagggttttccatacaatacccaaccccacacgcccacctttccaagcttcaatcttttcactcaaccaacgcaatctcactccaatggatcttcccagaaacgtctcctccgctgccttggtgggagacaacgcttcggccacgaccactttgccaattgactcagatgctagaatcggagaggttaaaagggtcaccaaggagaccaatgtatcagtcaaaataaacttggatggttctggggtggctgatagtagtactggaattcccttcctcgatcatatgcttgatcaacttgcttcacatgggctgttagatgtacatgtaaaggctacaggtgacatacatattgatgatcatcacacaaatgaagacgttgcccttgctattggaacagctttgctgcatgcccttggtgataggaagggtattaaccggtttggtaacttctctgctcctcttgatgaagcattgatacatgtttcactggatttgtctggccgaccacatctaagttataatttggacatacccactcagagggttgggacatatgatactcagttggtggagcatttcttccaatccctggtgaacacgtctggtatgacacttcacattcagcagcttgctgggaaaaattctcatcatattattgaggcaaccttcaaagcttttgctcgggctcttcgacaagcaacagagtatgatccacgtcgccgtggaactataccaagttcgaaaggggttctgtcccgtagctaatatttttctggcggtggaccttcatggctccacaatcacagtccttagatgctgtgtgatggataaatgcttgtgcgggggcagtatttgtgatagaacactgacctctgtaaacaatattgttgtacgtatacttatttctagaaataaaaataaattttctagtgcaaaaaaaaaaaaaaaatttaaatataataagtggaattacatttttggtttttttgtcg

SEQ ID NO: 5500 - DNA, 1250 bp, Glycine max
gtttcaggaaaggcaagaagagtaaagagtggtcaatcggaagcattttccgtttccatttccattttgtttgggcatcaaccggcataggcaatataaaaccccatttcgtgtgctaccgctactgacgcaactcacaagtgaagaagaacgagagattgagaagagaaagcgttccaaaatgttcacgctatctcgcgtgttccctctcacttccccttccaggcataggctcttggaagtgctgtcctctaggaaagttgaagtcggagaccgtctgcgccaagaggggcgcgattttacctattcagctgccatttctactgctacaaataactatgctgccaaaggacacgcttccgatcgaatatttgctccttatactgtttacaagggcaaagctgcattctcgttgattccttgtcttccaactttcactaagttggattctgggactgttgtagttgatcgacgcggttcaatcatgatgtctttcatgcattctattggagagcgcaaatatgactgggataaaagacagaaatttgctctctcggcaactgaagttggttctttgataaccatggacgctcaagattcctgtgatttctttcatgacccctcaatgttatcaagtaatgctggtcaagtaaggaagagcttatcaattaagcctcatgcaaatggctactttgtgtctttgactgttgtcaacaacctgttaaacaccaaagactacttcagtgttcccgtcacaactgctgagtttgctgtaatgaagacagcttgcacttttgcattgccacacattatgggttgggaccagataactaatcagcaatccagaggcatagatggccttcaagcaaagggtgactctaaagtttcagagttggaatgggaaagatgaattgctaggaatatccgaatatgaaatggatccttttttgttttgcaattctaatttgtatattgccaatttgaagacgaggatttgctaggggaagatgtaaattgcaatctttaagaaagggatacgtgatgttgtataacttgttaaactagtatgctcttctgcctggctttgaaaatactatagtattaactgtttgaaaaatcatcaatctgatggcaacacggaagtatatcagtcctttaacagcgagttgatgattatgcatcatcagtattctttgtgtcattgtgaataaataatcttgatctttttattttaaggataaatatgtagt

SEQ ID NO: 5501 - DNA, 1016 bp, Glycine max
cccgcgtccgtacggccgcctgcggacgccccccccggacacaagtgaagagaaagagccttccaaaatgttcaagctatctcgcatgctccctctcacttccacttccaggcataggctgttggaagtgctgtcctctaggaaagttgaagtcggagaccgtcttagccattcagctggcatttctactgctacaaataactatgctgccaaaggatatgcttccgatcgaatatttgctccttatactgtttacaagggcaaagctgcattctcgttgatcccttgtcttccaactttcactaagttgaattctgggactgttgtagttgatcgacgtggttcaatcatgatgactttcatgcattctattggagagcgcaaatatgactgggagaaaagacaaagatttgctctctcagcaactgaagttggttctttgataacaatgggcgctcaagattcctgtgatttctttcatgacccttcaatgttatcaagtaatgctggtcaagtaaggaagagcttatcaattaagcctcatgcaaatggctactttgtgtctttgactgttgtcaacaacctgttaaacaccaatgactacttcagtgttcctgtcacaactgctgagtttgctgtaatgaagacagcttgcagttttgcactgccacacattatgggttgggaccagataactaatcaacaatccagaggcatagatgatcttcaagtaaagggtgactctaaagtttcagacttggaatgggaaaaatgaattgctaggaatatccgaatatgaaatggatccttttttgtttcgcaattccatttggtatattgccaatttgaagacaaggatttgctgggggaagatgtaaattacaatctttaagaaagggatctgaagttgtataacttgttaaaccagttagttgtttgaaaaattatcaaatgacaaatgttttatttagatagataaaattaattaaaaaaaaaaaggccgccgctctagagga

SEQ ID NO: 5502 - DNA, 1078 bp, Glycine max
cggccgctcaagccggcgggcgggagaattattcggcccctgtttgaacacctttggcagcaaccttgttgtcttgtctctttgcaactgcatccgttgtttacaatgaaggctactctgaagggaaagtacgacgtcgacaaaaacggcgctgcctttgccaacatcgccgtcaacgccggcgacgtcaagttccgagcctccgtaacggaagccactttcattaacggccccagcctcaccggcttggccctcgccgtcgagaaacccggttccttcatcgtcgactacaacgttcccaaaaaggactttcggtttcagtttatgaacacggttagggttggggagaggccgttgaacttgacctacgcgcacagcaggggcgacaacaggactgtcttggatggaacctttgtgtatgattctgcgaacaaggtttctgccaattacgcgctcgactcagggaactgcaagcttaagtacacctatgtgcacaaggggttgaccacgtttgagcccgcctatgacgtggccaagaacacgtgggacttcgccgtctcgcggagggtctacggcggcgacgacacgttgagggcctcctaccagacatccagcagggttctgggagttgagtggtcgcggaatcccaaacacactgctggcttcaagattgtagcatctgttaacttggccgaggaatttaaagctcccaaacttgttgctgagaccacatggaattttgagatgtagattggttccaatatattgttcaattgcttgataggtttactgtcaagttttgaaggctttttggtcaccattgggcatatttttgcctttgaatattatattcttggaagtgttttgatcatgttatgagcaactctggcattaattgtccaccaacaacttcccgtttgattttaaactatttcatattcacattacaaaaacctgtaattgcttgcctataaaatgtgctcaattattctcacaaaaaaaattctatatagcttttctgttcgatctttttccatgcactcgagaatggtttgaattttgaaggatatcttgttct

SEQ ID NO: 5503 - DNA, 954 bp, Glycine max
gctcgagttggtgtcaatcttggaaagaacaagacaagtgaagatgctgcgtcagattatgttcaaggagttcatacattgtcccaatatgctgattacttggtgattaatgtttcatcacccaatacccctggtttgcgcatgcttcaaggaagaaagcaattgaaggatcttgtgaagaaggttcaagctgctcgtgatgaaatgcaatggggtgaggagggcccacctccattgctggtaaaaattgctccagatttgtcaaaagaagaccttgaagatattgctgcagttgccttgactcttcacttggatggactgattatatcaaacacaaccatttcaagaccagatcctgccagtaaaaatccattggcttcagaaactggtggcttgagtgggaagcctctcttcaatctctccaccaacatcttgaaggagatgtatatcttgactaggggccggattcctttgattggctgtgggggcattagcagtggggaagatgcatataagaaaatacgagctggagcaactctagttcagctctataccgcattcgcttatgggggacctgcacttattcctcagataaaggctgaattagcttcatgcctggaaagagatggtttcaaatccattgttgatgcagttggtgcagattgtagatgactttggtccaaatcagaatcccgtgctgtaagaaccataatcttattttaggagtagtaatgttccggttttggcaatactgaaattgcaaaatcatttttttaagcttgctttaatttataccagattttatcttaattgtttattttatttgggtttcgccacgtgttctgaattgtaaaagcaagccaaggactgctgaggcaactcaagcagtgtttattttgagcaattgttttgaacaataaaccgccgcatcatagagaaatacatgtgttggtt

SEQ ID NO: 5504 - DNA, 1265 bp, Glycine max
agtagtacctcagctacgtaggccccccaccctggagtgcaataattctgattctaccgtcatcaactagaagaagaagcttcaatttctgcaaaatggatccgtctgcggcattgctgtttaaccacctcaaaggtgcagacccgttcttcctgctagcgggtcctaatgtgattgaatcagaggagcacattctgcggatggctaagaacatcaagactattgcatctgaagttggaataccgttggttttcaagtcaagctttgacaaagctaaccgaacatcatcaaaatcatttcgtggcccggggatggttgagggattgaagatactcgagaaggttaaaatagcttatgacattcctatagtgacagatgtgcatgagtctatccagtgtgaagcagttggcagagtagcagatatcattcagattccagcattcttgtgtcgccaaacagatcttctagttgcagcagccaaaactgggaaaattatcaacattaagaagggccagttctgcgctccttctgtgatgacaaattcagctgaaaaggtccggttagctggaaatcctaatgtgatggtttgtgagagaggaacaatgtttggatacaatgatttgattgttgatccacgtaacttggagtggatgagagaagccaattgtcccattgtagctgatataactcactcactacaacagcctgctggaaagaagttggatggaggaggtgtggcaagtggaggtcttcgagaactgataccttgcattgcaaggacagcagttgccgttggagtggatgggatcttcatggaggtgcatgatgatccactgaaagcacctgttgatggcccaacacagtggccgttgcgccactttaaggagctacttgaagagcttgtagccattgctaggataagcaaagggaagcaacggttcaacattgatctcacaccatttcgtgaataaagaaagggtgatggttttcagatattctgaatataattccgtgaccattggtttttaaagattgttcaagggtgatgaatgcaaaactgtctcctatcgcaagttccttataaggagagtttatattaaaaaatgttatttgatgatccatgcttgttactctgaagtggtaacactataccaactaatgtttgtcacatatcccttaatcatgtcagttactgaagttgaggcaattaattgaatatcaaaatataggtagattatttattaaagaaaaaaaaaaaaaaaaaa

SEQ ID NO: 5505 - DNA, 727 bp, Glycine max
acgttgtttctcttttcagatctctcattctcactctgttttacatacaatgtcgttctgaatcactgcatcttttcttatttccactctctgcagcttcattttctgcaaaatggatccctctgcggcattgctatttaaccacctcaagggtgcagacccgttcttcctgctagcgggtcctaatgtgattgaatcggaggagcacattctgcggatggctaagaacatcaagactgttgcatctgaagttggaataccgttggttttcaagtcaagctttgacaaagctaaccgaacatcatcaaaatcatttcgtggcccggggatggttgagggattgaagatactcgagaaggttaaaatagcttatgacattcctatagtgacagatgtgcatgagtctatccagtgtgaagcagttggcagagtagcagatatcattcagattccagcattcttgtgtcgccaaacagatcttctagttgcagcagccaaaactgggaaaattatcaacattaagaagggcccgctctgcgctccttctgtgatgacaaattcacctgaaaaggtccggttagctggaaatcctaatgtgatggtttgtgagagaggaacaatgtttggatacaatgatttgattgttgatccacgtaacttggagtggatgagagaagccaattgtcccattgtagctgatataactcactcactacaacagcctgct

SEQ ID NO: 5506 - DNA, 1892 bp, Glycine max
acggctgcgagaagacgacagaaggggataacatttctcgcgtccgttttatgcttatttttttccccctttctcttatgagtggggaaaagtgtcggtttggctacgagtagaatccaagtgtaccatatatctgcttagggaagagtacgaaattgttccaaaaccaaatgttgcagagcctgccaagtggggtgtacaagatgagcctcttttggtttctagttttctctgcacatcttgcactagcatcctctcttgttgaatttcaagataatgataatccaaggcaaaagcaagagggcatgcagctaaatttgtaccatgttaaaggtcttgactcctctcaaacttccacatcaccattttcattctctgacatgatcacaaaagatgaggaacgtgtcaggtttcttcattccagattaacaaacaaggagagtgccagcaattctgccaccactgacaaattggggggaccaagcctagtgagcacaccattgaaatcaggtttgtcaattggttcaggcaactactatgtgaaaataggagttggtacccctgccaagtatttcagcatgattgtagacacaggtagctccctctcatggctccagtgccaaccttgtgtcatatactgccacgtccaagttgaccctatattcaccccttcagtatccaagacctacaaggccttgtcctgctcatcctctcagtgttcctctctcaagagctccacactgaatgctccaggttgctcaaatgcaactggtgcttgtgtctacaaagcaagctatggtgacacttccttctcaattggctatttgagtcaagatgtgctaaccttaaccccttcagcggcaccatcatcaggttttgtatatggctgtggtcaagacaatcaaggcttgtttggaaggtcagcaggtatcataggtctagccaacgacaaactctccatgcttggtcaattgtccaacaaatatggcaatgccttctcctattgtctcccctcatctttttcagcacaaccaaactcttctgtatcaggtttcttgtccattggagcctcatcattgtcatcatcaccatacaagttcactcccttggtcaagaatccaaagattccaagcttgtactttcttggtttgacaactatcactgtggcaggaaagccactaggagtttctgcctcaagctacaatgttcctaccataattgactctggcacagtaatcacaaggcttcctgtggctatttacaatgcattgaaaaaatcttttgtgatgatcatgtccaaaaagtatgcacaggcaccaggattctccatattggatacttgcttcaaggggagtgttaaggaaatgtcaacagtgcctgagattcgaatcatatttcgtgggggtgctggcctagaacttaaggttcataactcccttgtggaaattgagaagggtactacttgtttggccattgctgctagctccaaccccatttccattattgggaattatcaacagcagacattcacagtggcttatgatgttgccaattccaagattggatttgcacctggcggctgccagtgatcacaaagctagccagccaaggattcaatttgttaaatattacttgcttgcaaaaatatatttgctttaataaagattgatgaacaactgatgtggcatgtgatgtatcttagtgagcaaataagacaaatgacaattaaatgctcacatgaaagttgcaattgtattagatttattggaaaattttactttggaagtaaatagtataaatcgcatagcggcatgtatagctgcatattatggaacgctttattaggtaaacattggtccattcccattgttttgcaaaaaaaaaaaaaaaaa

SEQ ID NO: 5507 - DNA, 1336 bp, Glycine max
aaactttcccaatagccgcctctgataattcattgctaatttgctatcaatccaactttacatattatcatccatttgatttcatcgataggaaactgggaaactgggttttctctcttttttgcagataagcatcaataggacactagataatggattggtactatgggaacggcgttaatgattatctggttcccagagatcaggatttattggacaggcatccttcaccggactattggtcaaactggggaataagtgcaactgaagggattctgtacctgaaggtctgccttgggttgacgttgaaaacctagacaaatccattaacatttctcctgaaaaccaatggagcagtacacctggtatattgcagaaagagatgccagcttcaaagtctgtttctagcaactcagaatcaaaggattgcctggatatagaggcaccactggccaaggtcttggactcatttgagcagtgcaacagagatgatggcatgtgtgagcagtcatcatcacttgaggaattcatactgaaggatcttgagatggtaattggacagttcaccgagaggacccgtatttgcttccgagatgctctgtaccgtcttgctagaaacactgaagaacaacatgtaatgctggaccagaatgaagatcttaacatacagaaggcaataccacatacagatcacaatgaaacaatgaggtctcaggacaagaaaccaatggaatcagcaaccaacaatattgacagaataattgcaaatctcatgttcaagagcatggagttcaacatacatcactctccaattacatcatcgacaaactccattcaacaagttattgaaagtaataatggtctacatggaaacagctcaaaagccatgaatatggaagaaaagttttgctattcccatccccaaaaattactagtagatgccgaaattccaaggtttggactaagtaatcaaccaagggacacaggttcaaacatcacatgtgaaggtcccataaagacatctttcatgatagggtttgattaggttgtctggttgtgagttttctagtaggcattagctaaaccacaatcaggaaaaaaaaatcaatttcttgtaattattcaatctcgatgttaaggtttctttgaagcatctaatttatttgtgttctgttattttattcaaaggtttgatgtatacattcagctcaattttgcttggaatgtaagtgactgaattgctataatttgtcgggtcaagattcttaagattttataggctcaattcagggtacttttgtactttagaattcaataaacaataccgtgaattcaa

SEQ ID NO: 5508 - DNA, 1848 bp, Glycine max
cttttcttctgggcggacgcgtgggcggacgcctactttcttttctttgccaacactccttcgattaggggtttcgatcccaaattacaaattggtcgccatgaacgcaacctcatactctgctcttccttctacgttccgcagtctccatcatcggaatttctcagcgttttgttctgatatccaaaatcctggctatgttgattgccattcaaattgtaataagtctacatctcaagcgtctttgtttttgtgttccgactccaacagtagaagaaatggtgtttttggtagaccactttgtgtgaacccctctggcaggagaaacctagttggtccagctttttattctctggagactagtgcttatgacgtggctgctttagaatctccttcccgtgttgcagaagaaaaagttggtgtgctgcttctcaatctaggaggaccagagacattgagtgacgtgcaaccttttctgtttaatctttttgcagatcctgatatcattcgtcttccaaggttgtttcggtttctccagcgaccattggcaaaattgatttctgtacttcgggctcctaaatccaaggaagggtatgctgctattggtggtggctctcctttacgaaaaattacagatgaccaggcacttgcaattaaaatggctttggaagcaaagggcatctcttcaaatgtctacgttgggatgcgatactggtacccatttactgaagaagcaattcagcaaattaagagggacagaataacaaggcttgtggtactacccctttatccccagttttctatatccacaactggatcaagcatccgtgttcttgagcatatattcagggaagatgcctacttgtctaagctccctgtttccattataaactcttggtatcaacgagaaggttatattaagtcaatggctaacttaattcagaaagagctccagagtttttctgaaccaaaagaggtaatgatatttttcagtgcccatggtgtacctgtcagttacgttgaggaagctggggatccataccgagaccaaatggaggagtgcatcttcttgatcatgcaagagttgaaagctagaggaattagtaatgagcacactcttgcttatcagagtcgagtgggtcctgtacagtggctgaaaccatatactgatgaagttctcgttgagcttggccaaaaaggtgtgaagagtcttttagctgttccagtgagttttgtgagtgagcatattgaaacccttgaagaaattgacatggagtacaaggaattggctcttgaatctggcatcaagaattgggcacgtgtacctgcccttggtgttaccccttccttcattacagatttagcagatgcagtaatagaagctctcccatcagcaacagcaatatatgcaccgaccagcacctctgaagatgttgatcatgacccagttagatattttatcaagatgttctttggttcaatcttggcattcatcttgttcttgtcacccaaaatgatcacggcattcaggaatcatgtcatttagaagaattagaaactgtttgctgaattcaatctgcaagcatatagatgaagcctattgatagcaacaaagtatacttggatttttttgtctttgttttactcatttcaacctctactgtatacatcaaagagctatgaagaagcaattttccgcagagaacttgaacctcggcttaaagaggattcaaagaataattgttgaccagggatctattcaagagccaagaggcattgtctcgatctccgatttaaacccgaacaagttattgatttttgtttattatttacttacacttttcctac

SEQ ID NO: 5509 - DNA, 1651 bp, Glycine max
ccacgcgtccggtgagtcaccgttccgtgttcccgccgagtcggtataaacgagtgagcgagtcacaactcaccgcgctgcatggaccctctagaagctttggtcgcccaaatccaagcgctttcccgcgccccccccgcccccgctcgcctccacagtgttctgaagcaagccgatgactcgctccgatccgagtcaagtcgcctcgctccgattctcacccagctcgacccctccattcattccctcgggtttctctacatcctagaagcttcaatgaccgatccggtaaccaaaacgcaggctgagaccgtcgttccgatcgttactaggtttattggcgcttgcagcccggagcagattcgcttagcgcctgataaatttttatctgtctgtaagaggttaaaggatcaagtgatgctgctggaagctccgatacggggtgtggctcctttgttcactgctcttcggaaacttcaggtctccacagaacacttgactccactacactcagagtttcttctgctgtgcttgttggcaaagtgctacaaaactggtctatccattttggatgatgatgtttttgaagtagaccaaccacgagacctttttctctactgttattatggaggtatgatatgcattggacagaagcactttcagaaggcattggacctcctgcataatgttgtaactgctcccatgtctaccataaatgctatagctgttgaagcttacaaaaagtatatattggtttctctcattcgtcatggacagttctcaaccagtcttcctaagtattcttcttcgactgctcaaaggaacctgaagaacttttgtcagccttacgtcgaattggctaatagttatggcactggacaaattgaagaactagaggcatatgccagggcaaatgcagagaagtttgaatctgacaacaaccttggactggttaatcaggttgtatcatccatgtataagcggaatattcagagattgacccagacatacttgaccctttctctccatgatatagccagcacagtgcagttaaatagccccaaagaagctgaaatgcatgtgctacaaatgattcaggatggcgaaatatatgcaactatcaaccagaaggatggaatggtgagattcttggaggatcctgaacagtataaaacctgtgaaatgattgaacatattgattcatcaatccaaagaataatggcactctcaaggaaacttactgcgacagacgaacaaatttcatgcgatcagttgtatttgtctaaggctggaagagagagacaaagatatgactttgatgactttgacgttccacaaaagttcaacatttaaggggctaggaatgatggaagtagatctggttatggtccatcacccgtttcctttatcttttgttattcctggttctgagagtgggggagtgttttatttcagtcccaaatggaagagtgcttgttctgaggatgttgaattgtctcaacttattaactatataaaatctataactgattctttgcacatttaattatgtatgctctattgaccaagcatagtgcagtaatgttgaggtctcaaggaaaaaaaaaaaaaaaaaaaaaaaaaaaaaaaaaagaaaaaaaaaaaaaaaaaa

SEQ ID NO: 5510 - DNA, 1252 bp, Glycine max
  misc_feature (936)..(936): n is a, c, g, or t
  misc_feature (1006)..(1006): n is a, c, g, or t
  misc_feature (1078)..(1078): n is a, c, g, or t
  misc_feature (1083)..(1083): n is a, c, g, or t
  misc_feature (1107)..(1107): n is a, c, g, or t
  misc_feature (1127)..(1127): n is a, c, g, or t
  misc_feature (1137)..(1137): n is a, c, g, or t
  misc_feature (1145)..(1145): n is a, c, g, or t
  misc_feature (1153)..(1154): n is a, c, g, or t
  misc_feature (1158)..(1158): n is a, c, g, or t
  misc_feature (1162)..(1162): n is a, c, g, or t
  misc_feature (1167)..(1167): n is a, c, g, or t
  misc_feature (1171)..(1171): n is a, c, g, or t
  misc_feature (1173)..(1173): n is a, c, g, or t
  misc_feature (1186)..(1187): n is a, c, g, or t
  misc_feature (1189)..(1189): n is a, c, g, or t
  misc_feature (1191)..(1191): n is a, c, g, or t
  misc_feature (1199)..(1201): n is a, c, g, or t
  misc_feature (1205)..(1205): n is a, c, g, or t
  misc_feature (1210)..(1210): n is a, c, g, or t
  misc_feature (1213)..(1213): n is a, c, g, or t
  misc_feature (1215)..(1215): n is a, c, g, or t
  misc_feature (1224)..(1224): n is a, c, g, or t
  misc_feature (1226)..(1227): n is a, c, g, or t
  misc_feature (1233)..(1233): n is a, c, g, or t
  misc_feature (1235)..(1238): n is a, c, g, or t
  misc_feature (1240)..(1240): n is a, c, g, or t
  misc_feature (1246)..(1246): n is a, c, g, or t
  misc_feature (1248)..(1248): n is a, c, g, or t
  misc_feature (1252)..(1252): n is a, c, g, or t
ccctcgcgtcagctgcgacactccctccgagggagggagagaaaaacgaagagtgagtcaccgttccgtgttcccgccgagtcggtataaacgagtgagcgagtcacaactcaccgcgctgcatggaccctctagaagctttggtcgcccaaatccaagggctttcgagcactcccggcgacctcactcgcctccacagtgttctgaagcaagccgatgactcgctccgatccgagtcaactcgcctcgctccgattctcacccagctcgacccctccattcattccctcgggtttctctacatcctagaagcttcaatgaccgatccggtaaccaaaacgcaggctgagaccgtcgttccgatcgttactaggtttattggcgcttgcagcccggagcagattcgcttagcgcctgataaatttttatctgtctgtaagaggttaaaggatcaagtgatgctgctggaagctccgatacggggtgtggctcctttgttcactgctcttcggaaacttcaggtctccacagaacacttgactccactacactcagagtttcttctgctgtgcttgttggcaaagtgctacaaaactggtctatccattttggatgatgatgtttttgaagtagaccaaccacgagacctttttctctactgttattatggaggtatgatatgcattggacagaagcgctttcagaaggcattggacctcctgcataatgttgtaactgctcccatgtctaccataaatgctatagctgttgaagcttacaaaaagtatatattggtttctctcattcgtcatggacagttctcaaccagtcttcctaagtattcttcttcgactgctcaaaggaacctgaagaacttttgtcagccttacgtcgaattggctaatagttatggcactggacaaattgaagaactanaggcatatgccagggcaaatgcagagaagtttgaatctgacaacaaccttggactggttaatcaggttgnatcatccatgtataaagcggaatattccagattgacccagacatacttgaccctttctcttccatgatatanccagncagtgcagtaaattagccccacanaagctgaaatgcatgtgctncaaatgattnaagatggngaaatatnntgcnaacnatcanccgnanggtggaatggggnnantnttggaggnnncctnaccgntgnanaccctgggnanngattgncnnnntngtcatngncccn

SEQ ID NO: 5511 - DNA, 715 bp, Glycine max
  misc_feature (706)..(707): n is a, c, g, or t
atatcaaagtgcagtgactgtgactcgccacagactacgcaaaggcaaagggtttctttccaatcattcaaaggccatggacatgtcaaatccttctgtatttgtaaatgctcagttgattcccaactttatagggaagaaagtaagagcagtggttcaggtgagccaatgtgatggtggggttaccacagcaaaatccactgatgactgtcaattaaccataaaagggttgccacaagtccctcttatgaattatattgaggtcattggcattgctgaaagtaacagttctattgatgccgaaatatggactgactttggcagcacctttgacaccttctcttacaatcagttgtgccaactagccaatggtgaatttaagggtctgtttctctagggacatcaaggaatgtcgggtcagcaattggatggggtttgtttgaagttgctgctttttatacttgcacctgtttacatgtaaatgtaggaactatgcttttgagtatggtatccgcagaggagcagggcacatgtgctctgtaggaactgtttcattatctcttatgttaggttgagtttggcttatgtctgcatctgattccatcgtcttcaattatactcccttaaatgaaatgaagtagtagtttcatacgaaaaaaaaaaaattacacctaactaaaataccttggatgtttccccccttccnngttgtatg

SEQ ID NO: 5512 - DNA, 1481 bp, Glycine max
  misc_feature (1)..(7): n is a, c, g, or t
  misc_feature (9)..(9): n is a, c, g, or t
  misc_feature (11)..(12): n is a, c, g, or t
  misc_feature (17)..(18): n is a, c, g, or t
  misc_feature (20)..(22): n is a, c, g, or t
  misc_feature (26)..(27): n is a, c, g, or t
  misc_feature (32)..(33): n is a, c, g, or t
  misc_feature (39)..(39): n is a, c, g, or t
  misc_feature (44)..(44): n is a, c, g, or t
  misc_feature (50)..(50): n is a, c, g, or t
  misc_feature (60)..(60): n is a, c, g, or t
  misc_feature (63)..(65): n is a, c, g, or t
nnnnnnngngnnggggnngnnntttnnccaannaggggncgggntgaggnttttcccaanaannntacctagatcgtcccagcccctaagattttttcttacgcacgcagtggcatctatctaagacaggcaccatgtcacttcttaaccagctctttaacagaggcgttttcggcactcgatgcaaaacatgcctgaacctggcaatttcacgcattaagctgctgcaaaacaagagagatatgcaactgaaacaaatgtgcaaggagattagccaattcttgcaggctggccaagaggcaattgctagaatcagggtggagcatatcatacgggaacaaaatacatgggctgcatatgaaattttggagttgttctgtgaatttgttcttgcacgtgtacctataattgagaatcagagggagtgccccacggaattgcgagaagccattgcaagtataatttttgctgctcctagatgttcagatgtaccagacttattgcacatcaagaacttgtttaccactaaatatgggaaagaatttgtctctgcagtatctgaacttcgtcctgattcgggcgtgaaccgcacgatcattgaaaagctttcagttagtgctccatctggagaggtaaaactcaaggtcttgagggagattgcagaagaatacaatatagcatgggattcttctaaaactgaggctgaatttaggaaaaaccatgaagatctcctgggtggagcaaaacaagttagtgctggagctacgctttctcatactcccaacagaaatggttctaataatccatcacctcgtattacggaaccttctatcaagtctgtgcatgctaagcaagaatataaaccccttgaagctcccagcccttctaacaataattctttgttgaatactaatgaaatcgaacattcgcacgaaaataatgatgttcctgctggagatgctaaaagtgagataagatttcaatcctctgatgtactggagaaggcgcgggctgccattgcttctgcagatcgtgcatctgcagctgctcgtgctgctgctgcactagttcagagtaattttggatcattgaaactgggaggtaaataaaccttcacatcgatgaaatgctgccctcccaggatcttaatgctggaaaaaaatgtcaagaactaaatgccaaaagagaaaattatgttctttgttacggaggtctcagcttcacacagtgattctatgtaataagaattgtgtcgtattgcattgtacattcgataatcaatacatgtatatcattgtaacggaacggaatactgaacagtgtgaacttttctaaatcttcgtgtttcttgcgactgcggatcgtagtgtatcatggattgatagatgttatttctaagtaatttaaacatcagttttacccaggaaaaaaaaaaaaaaaaaaaaaaaaaaaaaaaaaaaaagaaaaaaaaaaaaaaaaaa

SEQ ID NO: 5513 - DNA, 2069 bp, Glycine max
gtttgattatgagatggtggatgcttcgaattcagattcaggttcttctctgaactttcccctgcttcttataaatagaaaccaaagactaccacatgtgcattttcatacaggaaaaataaactatatctcattgtcatgtgcatttatatatcttcaatcaaatattgatatacaattacgaattgtctccattctcttcagatcatacggtttcgttgataataaaaaaataacttagtatggttcttgatatcttggagattatgcatataatttgagcacatgatggagaagtgataccatgaatttgattgcaaagatgtcatgtttattctttttagcttatatttttatttaattgatataacagtgaagcaacttgtgtttccaggtttgtttacattttcaacgaggtgcatggttttcctttagaatttttttaaaaaaagttatacttttagttttggggattttcagaatagtacgtagagtggtggtggcagtaagtagtaaccttcatgatggctggaatgataaagcgtgaatgtttaatttcagctacgtaggccccccccccttttaataattaaaataaaataagaaaaatgttttcttttaggtttaaaattataaagaatgaacatactatgtaaaaattttcaaatctgagtaatattttgacattttcagacaactaatttatgttgattaatgttacttccaattgagtaacagtggattaggtaaatggtttctacatgtttaggggtgtggttagcttacttctataaaataaattgtttccaattttttcatggctgatgttgcatatggatgacattttatacttatactctttctattattattgataaatttcctttattttcactttaacctaagacataattgttctatagctgttttttatgatgagtaggggcaccataatccttcctttcccagtgcttgaatcttttctttccttaaattgattttgggcgcttatttgtcttgattgtattttctgtacttccagtaaagcctgtttgtaaactcaaccaagtcttgcttttcagaatcaaattgttaatggactcttgaaatgctaatgttatatagaaaggataatttttatagaaatgtaaaagtgtgaaatgataatataactttccaagcttttcagatgaatttcttggaaactatagctctaactcaagacattacatgatgaagttcaatatatattgacaggaacaagtagaacaggttcagatggtttatgttaatattgttccttgctaaccaacctccacttgtagtgatattcttggtcgcacagttcataaatttcaccaatatggaacatagaaaatagccaagggccatagagcaccaaaggaagcatgttgatgttgatggtttcttggtaagagtgataacttgcaaccatacgggcaagacaggttccatgataagatctttgactgcacatggttctagaattgttgttttatgttcagatcatttaggagacaatgcgagtccaaatttcaacttgagaccaacatgtgcttatttcatcactgaggtagcaaaatgagcatccggaagggctcacatagtacaggcttccatagctgatggtgttttgtcaggtaatactgaccccaagaaaaatattgagttgctacaagatgctattgcttctattactctcttaggaagcataatcacgtccatccctttatcgaggcaagcatgttcatagcttagctcatgcaacttctggatatcacaaagttcttgaagaaaatagcaaactatacaatcaagttcatgatcttaagggtaaatttctgattggttggttgctataagcttagtatgagttatatctttcacacctttctaaagattttgttccttttattgtgcctccctgaaatggttaggcctcgtggagatatgatataggtataggttggataaaatttaattcgactcgacacatttttatacttaataaaaaaattcatttacttcaaaaaaaaaaaaaaaaaaaa

SEQ ID NO: 5514 - DNA, 925 bp, Glycine max
  misc_feature (1)..(1): n is a, c, g, or t
  misc_feature (17)..(17): n is a, c, g, or t
  misc_feature (682)..(682): n is a, c, g, or t
  misc_feature (684)..(684): n is a, c, g, or t
  misc_feature (689)..(689): n is a, c, g, or t
  misc_feature (692)..(696): n is a, c, g, or t
  misc_feature (699)..(700): n is a, c, g, or t
  misc_feature (702)..(702): n is a, c, g, or t
  misc_feature (704)..(704): n is a, c, g, or t
  misc_feature (708)..(708): n is a, c, g, or t
  misc_feature (713)..(713): n is a, c, g, or t
  misc_feature (715)..(716): n is a, c, g, or t
  misc_feature (718)..(719): n is a, c, g, or t
  misc_feature (726)..(727): n is a, c, g, or t
  misc_feature (729)..(730): n is a, c, g, or t
  misc_feature (732)..(732): n is a, c, g, or t
  misc_feature (736)..(737): n is a, c, g, or t
  misc_feature (739)..(740): n is a, c, g, or t
  misc_feature (742)..(743): n is a, c, g, or t
  misc_feature (745)..(746): n is a, c, g, or t
  misc_feature (748)..(748): n is a, c, g, or t
  misc_feature (752)..(752): n is a, c, g, or t
  misc_feature (766)..(766): n is a, c, g, or t
  misc_feature (771)..(771): n is a, c, g, or t
  misc_feature (773)..(773): n is a, c, g, or t
  misc_feature (783)..(783): n is a, c, g, or t
  misc_feature (797)..(797): n is a, c, g, or t
  misc_feature (807)..(807): n is a, c, g, or t
  misc_feature (824)..(824): n is a, c, g, or t
  misc_feature (827)..(827): n is a, c, g, or t
  misc_feature (833)..(834): n is a, c, g, or t
  misc_feature (836)..(836): n is a, c, g, or t
  misc_feature (840)..(840): n is a, c, g, or t
  misc_feature (845)..(846): n is a, c, g, or t
  misc_feature (855)..(856): n is a, c, g, or t
  misc_feature (863)..(863): n is a, c, g, or t
  misc_feature (869)..(869): n is a, c, g, or t
  misc_feature (874)..(874): n is a, c, g, or t
  misc_feature (879)..(879): n is a, c, g, or t
  misc_feature (895)..(895): n is a, c, g, or t
  misc_feature (897)..(897): n is a, c, g, or t
  misc_feature (911)..(911): n is a, c, g, or t
  misc_feature (915)..(917): n is a, c, g, or t
  misc_feature (920)..(921): n is a, c, g, or t
ncgattgggtaccgggncccctacggctgcgaagacgacagaggcagtttttcatttggagagacagagtagtgagtagtgagagggcgaagcgatgaatgccccagatcgttacgagcgtttcgtcgtccctgaaggcaccaaaaaggtttcttatgagagggacacgaagatcatcaatgcggcgtccttcaccatcgagagagaggagcacactatcggcaacatcctccgcatgcagctgcacagagaccccaatgtcttgtttgccggatacaagcttcctcatcctcttcaatacaaaattattgtcaggatacacaccactagtcagtcttcgccaatgcaggcatataaccagtctgttaatgatctggacagggaacttgatcatttgaagagtgcctttgaggcagagatgttgaagttttctagggactattgatatacggccaagatggacggtgttgcgttacaagccctggcagatattgagatagcaaatcccttctgctaaatggaatttaaataggatgcttttgagtgttttgggaaatttgttaaatatgggtgtgttggaggaattttaataattgtgaacaattacgaagttagcaaaaatgcattaatattagcaactattagtaaaaaaaaaaaaaaaaaaataaaatttttatttttntntttanatnnnnnttnntntntttntttantnntnngaaaaannannanatanngnntnncnngncccngggggggacccctnttttntnagggggcccncccggggggggacncccacttttntccccttttgggggggntantttcanncngggngaaannggggaatanntggtctncggggnaaaangtttnccttcaaattcccccnanttcgacccggaacntaannngannctgg

SEQ ID NO: 5515 - DNA, 1482 bp, Glycine max
tcgagtcagctacgtaggcccccccccccccaacggtaaataagagcgacaaaacgagactagcacggaaagaaggtgcatcagcccttgacaatggcaatggtggcggaatcaccggaatctgacagtgacaacaactcctcaaaaaccaacaatcctcaaaccctcaatgaaacggcgccgtttcttgactacgctcttgcgcaggcccagctttaccacaaggccttcaacgacgccgtcgattcgacaatcgatactgcaaaatcccgtttctcccaaatccgctcaacttcttccgcccactttcaccagaccttggtaaaatctctctctctctctctctctctctctttgttttccgataaaattttcaagaatcatatataaattttctccaagaagaaaaaatgaacggaccatatataaattggattcgccatgagctaattcgatggcatcgctcattcctgttggttttgatttcgccatgttcggttacttcttcaaaaaatttcgtcatctcatctgcatggttttggtttctgtcgaatgtaggattctttggatgatctcaaatctcagtacactgcttatgagggtcttttgtttggaaagatcaaaggtttgcgttttgttgttttgttttcaatttatgaagtttctaatgtttaggtttttgtgtttaatctttcattgcagagggtgtagttgttgcagcttcgcatccggtgattacatgtggggctactgcttccctggggcttctggtacttaagaggcctcgtcgggtcttgtactacaacactttgcgcctttttgttagtgaagagtccatgatttctagagcccatgctgaagtgaaagaattgcggcaatcaattgagcttttaaaggctgaaggtgaaaagttggagaagagtgcattacatgcagaagagcaattcttacatggaaggacaaaactcagacatgcaggaaagcagatccgtaacgtgattcaatcagcatataaaattgaaatacgagcagggggtttaaaagatatccttggagaactccctaaaagagaaacatctctcttccgatctcaggtttccaaacttgcttctgaggcaaagaaagaaaaaaataccatgtcgaaggagatctctaaaattagcaactatggcatctcggtttgagaaactttgcttcatcattctctaatcaggactaaagacaatcccctgttattgtcattattttaaattccttcggttcatcatgtccccagagttggaaaatgtgaatgaaaaacgcattgaggctacataacttgataacaatgattatttttttgttgtctttcttttcacaaaatataaagctcaataatagctacaattacattttactagaaaaaaatttctgtatggacttagttaacatatctatcaagaatgagcattttggaattgttacaaaaaaaaaaaaaaaaaa

SEQ ID NO: 5516 - DNA, 2078 bp, Glycine max
aagtcaacttaaaaacaaaataattataagatccaaaccatgtgtataagttaacacccatcgacaagaatcttcagcaaatgaacaaagtgttaaaaattttgctagtatatacacttttaacaatactaatgaatcgagttattgatttttcaaccttaaaaagctattttcagttgacttaaagggaaggggggttaattttggtaatttcctcatttaatcctgcatactcgttaaataattagatgtactataatgtcaggctcacatgacagccaagatgactagtttccttccacataatttgtagccgatcagctacgtaggcccccccccccccgattagtgtttgtacgagctagactcacgtacgcaactatcacaaaccttcataaaccgccaaaatctttgttttcatgcgcaggaaaacagcataacgtgtggtctcgggggaaccaaaaactgtgaaattctgaagccactaggccttttaaaaaccaaactaaggaagacggtttagacagagagtacttcaagctaagaaaatggaaagtggggttgtggctgtgaacaacaacatcaacaactatgaatccaaggcaacttccaccatcaccattaagggcattctcagccttctaatggaaagcattgatgatgagaattgtgatggtggtggaagcaagaagagagttatttctcttggtatgggtgacccaactctcaccacattgttccacacaccaaaggttgttgaagaggctgtcgctgatgctcttcaatctcgcaagtttcatggctatgctcccactgctggacttctccaggctagaattgcaattgctgaatatctatctcgtgaccttccttatcaattatcacgagatgatgtcttcatcacttgtggatgcacacaagccattgatgtttcggtggcgatgcttgctcgccctggtgcaaacatcttgcttccaaggccaggcttcccaatctatgaactttgtgctgcatttagaggggttgaagtgaggcattatgatctgcttccagagaaaggttgggaggttgatctagatgctgttgaagctcttgctgatcagaacacagtggcgttggcgatcataaaccctgggaatccttgtgggaatgtgtacagttaccaccatttggagaagattgctgaaactgcaaaacgggttggaacaattgtgatctctgatgaagtttatggtcaccttgcatttgggagcaagccttttgtaccgatgggagtttttggctctactgttcctgttctcactcttggctcactttctaagagatggatagttcctgggtggaggcttggttggtttgtgacaaatgatccatctggcacttttagagaaccaaaggtagtcgagcgtatcaaaaagtattttgatcttctaggaggtccagcaaccttcttgcaggctgctgtacctcagataattgcaaataccgaagaaattttcttcgagaaaaccattgataatttgaggcatacagcagatatatgttgtaaagagatagaggatattccctgcattttttgcccttacaaaccagaaggatccatggctatgatggtgaaattaaacctttcacttctggaagatattagtgatgatattgacttctgtttcaaacttgcaaaggaggaatctgtgatcattcttccaggaactgcagtaggcctaaaagattggcttcgtattactttcgctgctgatccatctgctcttggagagggtatgagaaggataaaatctttctatcaaaggcatgcaagaaaattgtaaagctatagtgaattcacttataagtaaaattactaaataaatggccctttactactagtatactacacaagaattgaagattttatttcaatatagcatacagtctctttaggaatggaccaattaactggacattgcaacataattaagaggcaatcctctttatattgaagcattatctttattcaaatactaaaaaaaaaaaaaaaaatctttttaatctataaaaaagtatatagatggatcatcaat

SEQ ID NO: 5517 - DNA, 1735 bp, Glycine max
tcgagtcagctacgtaggcccccccccccaccacacccaccccagaaatagagagtaagcctgagatcatggaaaaagttggtgtggctgtaaatagcaaaaatcaagaatccaaagcaacttccaccattaccattaagggtttcatgagccttctaatgaaaagtgtagatgagaatggtgatggtagcaagagagttatttctctgggtatgggtgacccaactctcaccacttattttcccatctcaaatgtagctgaaaaagctgttgctgaagcacttcagtcacacaggtttcgtggctatgctcccactgcaggtcttccacaggccaggattgcaattgctgaatacctgtctcgtgaccttccttaccaattatcaagtgatgatgtttacatcacttgtggatgcacacaagccattgatgtttcagtggcgatgcttgctcgccccggtgcaaacatcattcttccaagaccaggtttcccactctatgaacttagcgcttcatttagaggagttgaagtgaggcattatgatctgcttccagagaaaggttgggaggttgatctagatgctgttgaagctcttgctgatcagaacactgttgctttggtgattataaatcctgggaatccttgtgggaatgtgtacagttaccatcatttggagaagattgctgaaactgcaaaacgggttggaacaattgtgattgctgatgaagtttatggccatcttgcatttgcgggcaagccttttgtgccaatgggagtttttggctctattgttcctgttctgactcttggctcattttctaagagatggatagttcctggatggaggcttggttggtttgtgacaaatgatccatctggcacttttagaaatccaaaggtagatgagcgctttaaaaagtactttgatcttttgggaggtccagccaccttcatccaggcagctgtacctcagataattgagcatactgaaaaggttttcttcaagaaaaccattgataatttgaggcatgttgcagatatatgttgtaaagagttgaaggatattccatacattatttgcccttataaaccagaagggtccatggctatgatggtgaaactaaacctttcacttctggaggatattagcgatgatattgatttctgtttcaagcttgctaaggaggaatctgttatcattcttccaggaactgcggtagggctgaataattggcttcgtattattttcgctacagatccagttgctcttgtagagggtttgaagagggtaaaatctttttgtgaaagacatgcaagaaagtggtcaatgactacagaataaaatccacaaattaaggcggctactattttgtattgaatacctagcttctcaaatatccaatttttacaaaattggatcgttttacgaataattgggttctcaaatatccatttttttgtgccagctctagtttatcactagcttttaaggaaggattctccaagtatctaggtgtttatcaattggtatttgtgtttattgttgtatctaaaaaattatatattttaaataattttgtgacgctatatattaatcaggtaaaaaaaaaaaaaaaaaaaaaaaaaaaaaaaaaaagaaaaaaaaaaaaacaaaggaaaaatcacaagaaaaaattaaaaaccgaaaaaaaataaaggggcgggccccaaaaaggggccctctcaacccgggaa

SEQ ID NO: 5518 - DNA, 694 bp, Glycine max
gaagacgaccgaaggggaccacaagcaagagcacttgttcaccaattacgagttctgaagaaattgagtatatatctatccatttgttttgaaaatggcttccaagagtattgcatgcattgttcttctctccctcaacctccttttctttaccatggttagccccaacaccattgccccttcccctgcgatacaaccaccaccaccgccacgtgagtgtcccgagttgggtctttgcctcgatattttgggtttgggtcaagggtctccatcaaaagattgctgccccatcctccgtggacttattgaggttggtgccattgtatgcatttgcgacaaactcaggtccgctacattaggaatcaacatagatgttaatcttgccctggtgctaatgttaaaattttgtggacacaacgagaccaacctcatttgcaattaagagcagaatacccatgatggtttgtatttatagttaaggacgttaccattgcataatgctaatggatatatactacaaataaacgtccatagataataataaataaataatactatacacttataattgtgctgttgttgttctcgcacgtggatggggacttatcttcctccacgatatatatctttgtttatcgtcttgttagtgaaaattgttaaataaaagtcctttgttgccaaaaaaaaaaaaaaa

SEQ ID NO: 5519 - DNA, 1061 bp, Glycine max
  misc_feature (11)..(11): n is a, c, g, or t
  misc_feature (20)..(20): n is a, c, g, or t
tcgagtcagcnacgtaggtncccccccccaaatcacagcccaaagattcaaagaataaagttggtttggtaaggtattctggttgtttattcggggtcagcaaaccgagtgcagtgcagtgcaaccatcggacaataatggcagaggcagattcgtcctcctcctcttcagatggagaaccctcgccatcgctggcgtcgattgcggagaatcttcagcgttccgccattcaatctgctcgaactgtgcaacatagcactataaatcatttccgtgcctttcagaattttttaccagaagcagtaccacagtatagaacatatgaggatgctttcgtcaataaagttaaagatggattgatgattgcaaaggagaatccagctttaagtgctggtttagctgtttctggtgcccttctggccatgcgagctccaagaaggtttctgtttcgtcatacattgggtcgattccaaagtgaggaggtacggtatgctagaactgagaagaatgtaaaggacttgggcctttcggtggatttactgaagaaggagagtgtaaaattgcttcaaaggacagctcttgctgagaaggaaatgaaatatgggcataccgaactagtgagcgctggaacccaatttcaacagctggcaaaatcagcttacaaggttgaaacccgagctgctgatttgcttgacaagctgcggtatatacctagtcgtgaagctctggtacttcgagctgaggttgcttctatggcttcaaatttgaagcgtcagagatcttcactgaacaaacggataatgaagatcaacgagttaggggttcctgtgtgattgaattaatggacaagttgtggaccttctcttgatgcacacccatcaccccagttttcctgaataaattctcctgttaaagtagatagctctaagtataatgcagacccatgccccggggcatctttttttttttcaaatgttcagtctctttcatgcaatctacattttttatatatgtaactttcacgcaatatactattttttaaaacaaaaaaaaaaaaaaaa

SEQ ID NO: 5520 - DNA, 708 bp, Glycine max
ttgagttgggaaactctacctatcccatggtcttggtccaagtcccaatgtacaacgaaagagaggtttatcagctatcaatcggtgctgcttggcctttcttggccttcagacagaatcatcatacaagttcttgatgattctactaacccaacaatcaaggagctggtgcaaatggaatgtagtagatgggcgagcaaaggggtgaacataaagtacgaggtgagggacaacagagacgggtacaaagcaggggctctgaaagaaggcatgaaacgcagctacgtgaagcaatgtgactatgttgccatctttgacgccgattttcaaccggagcctgatttcctctggcgaactgtcccattccttgtcaacaaccctgaacttgctctcgttcaggcacgctggaagtttgtgaatgccaatgaatgtttgatgaccaggatgcaagagatgtcactggattaccatttcactgtggaacaagaagtggggtcttgcacttatgccttctttggcttcaacggaactgctggtgtatggagaatttcggcgctgtatgagtctggagggtggaatcataggaccacagtggaagatatggacctggctgtccgagccagtctcagaggatggaaattcttgtacctacccaatttgaaggttaaaaacgaattgccaagtactttgaacgcctaccgcttccac

SEQ ID NO: 5521 - DNA, 900 bp, Glycine max
  misc_feature (766)..(766): n is a, c, g, or t
tcagctacgtaggcccccccccccccatacaggtgttgttttgtttcggtctttctttctcacacaatctgggaaccacacacacaaaccattcccttctctcactacggcaatgaccacccaagcttccaccttcgccgtcgccgttccctccgtcgcaacccctttccgccgccaccggaatcccttcgttgttcgagcccaagcggaaccttcagataaatccgttgaaattatgaggaagttctcagagcaatacgcccgtaagtcaggaacatacttttgtgttgacaagggggtcacttctgttgttatcaaggggttggctgaccataaagatacgttgggtgcaccactgtgcccttgccggcattacgatgataaagctgctgaggttgcacaaggattttggaattgcccttgtgttcccatgagagagaggaaggagtgccactgcatgctatttctcacacctgataacgattttgctggcaatgaacagactatcaccttggatgaaattaaagaatcaacagccaacatgtagcacagattattgtgtattgagttacttgtccgttgttacaggctgtatgttttgaaagacaagtgaaaagaaaagtgtaacgataagtaggtaatatatttgtatttaccgaaaatgagatgtattttttctaactgcattcctactttactctattacaaatctcattcacctcttcattcaaaaaaaaatttctcaaagaagcggaaaaaaaaaaanaaaagaattcctggagccggggagaacccctaattctagaagcggccgccccggggagagaatcccacttttggttcccttaaaggaggataaaattcgagcttgggaaaaacagcgccataacggtttcctgg

SEQ ID NO: 5522 - DNA, 738 bp, Glycine max
ccaacaactgcaactattactcattgtctaaaaaaccttctctcaccaaaacttacaacaacaacaaaaaaagaagaaaattttagaacaatggaggcatcaaagatgaagtttttcttggttttggtggtttccgtgttggcgatggcagcaactggggtttcagctgctgaggcacctgccccaggtccttcatccgatgccaccaccctctttgtgcccactgcttttgcttctctctttgttcttgcatttggctttctcttctaattttccaacaaccctttggttatttgttacatatataatgtgcagaggtggtggttgtgttttgtgtttcgttcttcacttttttttccaactcaacttgagaagtggttggttggtcactactctcttgtgagtagaagggttttttttttttttgaggatgcattgaattggagatttggagtgaggaaagatgacaagtagataacactatataggatcattttgttgggtttttcttcttcttcgttttctatattattatcatcatcattcttattcttatgtaacaaattcattattaattattcctcattgtacttttttatgggttgtgacaatgtaatcttattgtgatttgtttggttccaaaagtttgacttgcttctcgggctaggcctcttttttattagtagtactttttttgtgagtaatagtcaagggtgcacagtttagcgttgttctttc

SEQ ID NO: 5523 - DNA, 1418 bp, Glycine max
  misc_feature (1394)..(1399): n is a, c, g, or t
  misc_feature (1401)..(1401): n is a, c, g, or t
  misc_feature (1403)..(1404): n is a, c, g, or t
tatcgagcgaatccggcggcggcgagaagacgacagacgggggaagaaggaagcatcataaccggccaaagcttctctctcttccatttatcccccataaataaaactaggtgaaaaaaatatactctgtgcttctcatgatgatagtgtagctgaagctgcttctgctgcagcattggtgatttggacacaaaaaaagtttcaaacttttcagttctctgagcttctggtttatcaattttgaaggagttcaatactttaccctattagttggttccctgaaatttgtattggtattgctgtatcagaaattcttctgaacaatctctttaatcaaccatgtcattattggctaaactacgctgtgtcaccatagatgttactggtaccctaatggcttacaaaggggagctcggtgactattattgcatggcagccaaagctgcaggcaaaccttgcccagactacaaacgtatgcacgagggttttaagcttgcatataaggaaatggcaaagaattatccatgttttggacatgcagccaaaatgccaaacattgtgtggtggaaaacctgtgtgcgagattcttttgtcagggctggatatgaatacgatgaagagacatttgagaaaatcttcagacgtatatatgcgtcctttggttcatctgctccatatactgtatttccagactcccaaccatttcttagatggcttcgtggagagggtctcaaagttggtattgtgagcaatgccgagtatcgatatcaagatgtgattcttccagctttgggtttaaacgagggatctgagtgggactttggtgtgttttccggccttgaaggcgtcgagaaaccaaacccgaaaatttatgagattgcacttgagagggccggaaatattgcacctgaagaagctttgcacatcggggacagcatgcgcaaagactatgagccagctaagagcatagggatgcatgcactattgttggataggtttaagaccccagatgctgtggaatggaggaaatctggtgcagttgttcttcctgatttattggcagcaaaagaatggctctcttcagataagtcaaattgctagagattagagaatggctctatctttgctcaagtagtatttatgtatcatcttcacccctcaaatgatattactgaggcttgtgacattctaccattacatatgtggctgaatatttctctctagagccatacttgagaatctgatggctaagagttagatgtagctcaaacttaatttggcaatacaaatatattcgaaagcaaaaaaaaaaaaaaaaaatttccatagggttctgtgattttgcccggttacaagcatatcaaatttggatacttttataaaaaaaaaaaaannnnnnanannaaaaaaaaaaaaaa

SEQ ID NO: 5524 - DNA, 785 bp, Glycine max
  misc_feature (645)..(646): n is a, c, g, or t
  misc_feature (649)..(649): n is a, c, g, or t
  misc_feature (659)..(659): n is a, c, g, or t
  misc_feature (661)..(661): n is a, c, g, or t
  misc_feature (665)..(665): n is a, c, g, or t
  misc_feature (676)..(676): n is a, c, g, or t
  misc_feature (694)..(695): n is a, c, g, or t
  misc_feature (702)..(702): n is a, c, g, or t
  misc_feature (711)..(713): n is a, c, g, or t
  misc_feature (716)..(716): n is a, c, g, or t
  misc_feature (718)..(720): n is a, c, g, or t
  misc_feature (729)..(729): n is a, c, g, or t
  misc_feature (731)..(731): n is a, c, g, or t
  misc_feature (741)..(741): n is a, c, g, or t
  misc_feature (747)..(747): n is a, c, g, or t
  misc_feature (752)..(754): n is a, c, g, or t
  misc_feature (756)..(756): n is a, c, g, or t
  misc_feature (761)..(779): n is a, c, g, or t
  misc_feature (783)..(784): n is a, c, g, or t
gcacgaggcctcgtgccgggaaacaaaccctcgttcacggttcaacttcagcagccgcgcctctaacttgtagcagcgatacctcttctcttatcactaaaaaatgaccaagagaaccaagaaggccggtattgttggaaaatacggcacccgatatggtgctagtttaaggaagcaaatcaagaagatggaagttagtcagcacagtaaattcttttgtgagttctgtggaaagtacgctgttaagaggaaggccgtgggtatttggggctgcaaagattgtggaaaagtgaaggctggaggtgcttacacattgaatactgcgagtgctgtcactgtccggagcaccattcggaggctgagagagcagactgagagttgaaagcagtttacacttttcatttgtttccaaagcttattttaaaattatcatacaattttggcaggtctatgttaggaatattagtaatgtgctactttaaagttctggaatgatatttagttttatattcttgagtcattttgatggtgaaataattagtagtttttgttatcctctttgatttgctaaacctgcattttgtctgcatctatgagaaatatctggtctgactttttcttaaaaaaaaaaaaaaagattctgcnnccngggaccctantntaanggccccccggnggactcacttgtccttannggtaatnactggcgannnggntnnntccgggaangncctcatcccntcaccnactannnancgggnnnnnnnnnnnnnnnnnnncccnnc

SEQ ID NO: 5525 - DNA, 729 bp, Glycine max
  misc_feature (637)..(637): n is a, c, g, or t
  misc_feature (647)..(647): n is a, c, g, or t
  misc_feature (651)..(651): n is a, c, g, or t
  misc_feature (659)..(659): n is a, c, g, or t
  misc_feature (663)..(663): n is a, c, g, or t
  misc_feature (688)..(688): n is a, c, g, or t
  misc_feature (699)..(699): n is a, c, g, or t
  misc_feature (706)..(707): n is a, c, g, or t
  misc_feature (720)..(720): n is a, c, g, or t
  misc_feature (726)..(726): n is a, c, g, or t
gggacgagtcttacggcagcgagaacgcagcaaaccctcgtattcggcagccgcgatatcatcttcttatagccactcgaaaatgaccaagagaaccaagaaggccggtattgttggaaaatacggcacccgatatggtgctagtttaaggaaacaaatcaagaagatggaagttagtcagcacagtaaattcttctgcgagttctgtggaaagtatgctgttaagaggaaggctgtgggtatttggggctgcaaagattgtggaaaagtgaaggctggaggtgcttacacattgaacactgccagtgctgtcactgtccggagcaccattcggaggctgagagagcagactgagagttgaaagcagtttacacttttcatttgttttcaaatcataaattttgctgctgtttattttgaaattagcatacttgctttggatagttgatggaattttggcaggtctttgttaagaatattagtaatgtaactttgaatgatatttagttttgtattcttgagtcatttgatggtgagtgagttggtaatttttccttcctattggcaaggttggtttgctagtattttataatttacaaaaaaaaaaaaaagaatttaagtcaactacgtcgccccnccccgaatcnaccnacttcccnccanttaggtctcttaaacaagccctcanccctttccccntctttannggcgatttttccntttccncat

SEQ ID NO: 5526 - DNA, 2438 bp, Glycine max
cggaaagagagagagaagctagagagagaaagagaccaaactaattagtgtagaagaaacagagacgctgtgtgggtgtgggtgtgggtgtgggagagagagggagagagaaagcagagaaaatccgaagcagttttctcacactttttgatcggaacctctcattccgcgttcagattgcgccccccatttggtccttacaatggagcggtacgggcgggccagcgaagggtcgcagtctgatccgtcgccggaatggaccgtggccgccgacgccgacgccggcctcgaagagtcgtcgtggcaactcggattacccggtgctgaatcttaccctatgcgtcccgatgaggcggattgtatctactatttgagaacgggattttgcggttacggcacacgctgtcgtttcaaccatcctcgtgaccgtgccgcggttattggagctgcgccgaggactggaggagagtttccagagcgcgtgggacagcctgtgtgccagtactatatgaggacgggatcatgcaaatttggtgcgtcctgcaagtaccaccatcctaggcaggtgccaggcactgctacccctgtgccactaaattattatggatacccattgcgagtgggtcagaaagagtgttcctattacgtgaaaactggacagtgcaagtttggtgcaacttgtaaattccatcatccacagcctgcaggcgtccaagttctagcaccatcaccagttcctccagtttcacctctgcctgtacctgtaccttcaccaatgtatccaactgtacatcccccatctggtccttcacaacaacaatatggtgtacttgttgcaaggccacctatgctacctggctcagtagtccagggtccctatgggcctatggtagtgtcccctaccatggtccctttttcaggctggagtccttatcaggctcctgccacaaaccctctacttccatccagcactacatctaatgttggttctacacagctttatgggataacccagctaccttcatcagcagctacttatactggaccttatcaaccttctggttcttcaattggtccttcaggtgctagtcagaaggagcatccatttccagaaaggcctgatcaaccagaatgtcatcattacatgaaaacaggggactgtaaatttggcccgtcgtgtagatatcatcatccaccagacaagagtgcaccaaaagcaactgtaacccttagtcccgtgggtcttcctttgcgtccgggggcaccaccttgcactcattatacccagcgtggagtttgcaagtttggttctgcatgcaaatttgatcatcctatgggatcactcagttatagtccatctgcctcttccctagctgatatgccagtggcaccctatcctgtgggttcctcaattggtactcttgccctgtcatctttgtcatcagagttgcggcctgaacttggtgcaggatccaacaaggagtctgttgcatcgagaatgtcttcaatgagcacatcgactggatcggttggcttgaccttgtcaagcgttggtcccatttctcactcaagcacccaaccatctgctcagagttccagttctccggaaactaccagtgctaccacaagtagcactgtatctcacacctcaagctaagcaatgtgaatgaattcctcattattactcctttttatgtcaatttttcaaccggccatcattactcgaggttctcaaataggttttatttttcaattatcccagctccacattcaggtctatagcacacattgcaccaattgtctgtgttcatataatctttttgtggccatccctttgatcttgaataaaccatggccaaccttgagaattttagcaacccatacacgcaccttgcttttgaataacttcaaaagaatctgcaactccattatgcacatgtccattcacatctccaattttcgtagtttgttgtgcttatctatgcttcaatctttttttatatgagaaaatttctgcccggagtttcattgacagtgtaatctctcttcacctgaaccctttttttgcaagtgggaataatctctagttctgcctggaaggtcctgtttgccactgttcccaacttatctaaggtttgaagtgaagagaagtaatcaggagactacaatgaggcttcacattgctatcttttgtgattttagatacacggtgatgttgtgacaagtaaaatgcttgacttggtactttattacacaatacatatatgaagaaacacatttaaattaacacatttgaatgtctaataatctatttttctgtcattttacatggtcaagctttcgtgtgatatcaggaggtttttttggagttttttttttttttgtttaaatatgtttgaaatccttgatatatacctaaattttgttgagtctttgat

SEQ ID NO: 5527 - DNA, 3009 bp, Glycine max
tcagctacgtaggcccccccccctgagaaattctccatgatggcagcatcccatagcattgccactgattatggaaaacttgattgcataactgctgtgttcatgagctttttatccagaaatcagccgttaactttttggaaagcattttttcctgtatttaacagtgtgtttgatttacatggggcaactttgatggcaagggaaaatgatcgttttctaaagcaagtcactttccatctccttcggcttgcagttttccaaaatgaaaacatcaggcaaagggcagttgtcgggcttcaaatacttgtgaggagttcatttcattactttatgcagacagcaagattgagagtcatgttgattatcacattatcagagctaatgtctgatgtgcaagtgactcagatgagatctgatggaagcttagaagaaagtggtgaagcacggagacttaggaagtctgtagatgaaatgaaggatgaaactaaaaatgcttacttgttgaaggagtgtggtttacctgagaatgctcttgtgactgtaccagaaaaaatgacagaaaatagatggtcctggtctgaggtgaaatatctctctgacagccttcttttggcccttgatggcagcttggagcatgcactattggcccccatgatgactatggatagatatgctgctgctgaaagcttctataaactggccatggcatttgccccagtccctgatcttcacataatgtggttgcttcatctatgtgatgcacatcaggaaatgcagtcatgggcagaagctgctcagtgtgctgttgctgttgctggtgttgtaatgcaggcccttgttgccagaaacgatggtgtttggagcaaagaccacgtttctgctttacggaagatttgtcctatggttagcaatgagattacgtctgaagcatctgctgcggaggttgagggatatggtgcttcaaaactgactgttgactcggctgtgaaatacttgcagcttgctaataagctcttctcgcaagctgagctttttcatttctgtgcaagcattctggaacttgtaatcccagtttacaaaagcaggagggcttatggacagttggctaaatgtcacacattacttactaatatctatgaatcaattcttgaacaggaatctagtccaattcctttcacaaatgcaacgtactacagggttggattttatggtgttagatttgggaaacttgataaaaaggagtatgtatatcgtgagcctcgtgatgtacgtctaggtgacataatggaaaaacttagtcacacatacgagtctagaatggatggtaatcacactttgcatattattccagattctagacaagtgaaggcagaggagttgcagcctggtgtctgttaccttcagattactgccgttgatccagtaatggaagatgaggatttaggaagtaggagagaaagaattttctctctctctactggaagcgtccgagcccgcgtatttgaccgattcttgtttgacaccccatttaccaaaaatggcaagactcaaggtggattggaagatcaatggaagagacgcactgttcttcggactgagggttcttttcctgcattagtaaataggttattggtaatcaaatccgagtcccttgagttctctcctgtagaaaatgcaatcggaatgattgaaacacgaaccgctgccttaagaaatgagcttgaagagcctcgaagttcagagggggatcaacttccaagactccagagtctacaaagaatcctacaaggcagtgttgcagtacaagtatgttttactgttggttcttattacattatgcattttttaattgtggttacaagttgtgttctgaaaactagaccaggtctgcccgtctgactggaaaactggtgaatcggttcagtgtcctttcaataaagtactgaaccggtcttgacaaaaactggtcaaataatcagagaaccagtcaaaacctggcaaaaccttggttcttcacgagccaatgaaaatttctttatttttttaaaaaaaaaaatgaaagatcaacctaaagtatttgtcattttgttttttggttctagatgtaaacttgttactgttaatgaatatttttgtgtatttttgaaactttatttattttttagttatgatattattattattattacttgtttggccagggttctgaacccataccatatctggttcaatgacctaaccggttttaaaaacattggttgataattctatttttggcctcccagatttgaatattttacttttggtctttcaattctgtcagcacacttctctttgtgcaggtgaatagtggagtcttgagtgtctgccctgccctcggaattcggctcgaggcgaccaggttacgatcacaggaactgcagcaacttatagctgcccttcttgagttcatggctgtttgtaaacgtgccatccgtgtacatttcagattgattggtgaggaagatcaggatttccacacacaacttgtaaatggtttccagtcactgacagcagagttatcacattacattcctgccattctctcagagctatgacaagtgtttgcctcttaatattttgcttcgatttgttcatattgtagtctcctcattccctttcaccctctttctatcgcttgcaaagatgtgtaattgaatttgcatcatggttcgtatacttagaattatgcgaaccaggtgattcaggaaaaacacgaatcgtcctgtttgtgtatcatgatgtttctagtttccccactttcccctttttagtttgtggtgcggggaatgtcatttgtgtaatattttaattgtttaagttgtttagccatacagctattgtgaatgattactatgtagtataccttagaattctgcattttagggcgtttgtgtagtggagtggattaagtgtaactgacagttaaataaatacatgaaaaactattagtaattcttggtaaaa

SEQ ID NO: 5528 - DNA, 1312 bp, Glycine max
gttggctaaatgtcacacattacttactaatatctatgaatcaattcttgaacaggaatctagtccaattcctttcacaaatgcaacgtactacagggttggattttatggtgttagatttgggaaacttgataaaaaggagtatgtatatcgtgagcctcgtgatgtacgtctaggtgacataatggaaaaacttagtcacacatacgagtctagaatggatggtaatcacactttgcatattattccagattctagacaagtgaaggcagaggagttgcagcctggtgtctgttaccttcagattactgccgttgatccagtaatggaagatgaggatttaggaagtaggagagaaagaattttctctctctctactggaagcgtccgagcccgcgtatttgaccgattcttgtttgacaccccatttaccaaaaatggcaagactcaaggtggattggaagatcaatggaagagacgcactgttcttcggactgagggttcttttcctgcattagtaaataggttattggtaatcaaatccgagtcccttgagttctctcctgtagaaaatgcaatcggaatgattgaaacacgaaccgctgccttaagaaatgagcttgaagagcctcgaagttcagagggggatcaacttccaagactccagagtctacaaagaatcctacaaggcagtgttgcagtacaagtgaatagtggagtcttgagtgtctgcactgccttcttgtccggggagcctgcgaccaggttacgatcacaggaactgcagcaacttatagctgcccttcttgagttcatggctgtttgtaaacgtgccatccgtgtacatttcagattgattggtgaggaagatcaggatttccacacacaacttgtaaatggtttccagtcactgacagcagagttatcacattacattcctgccattctctcagagctatgacaagtgtttgcctcttaatattttgcttcgatttgttcatattgtagtctcctcattccctttcaccctctttctatcgcttgcaaagatgtgtaattgaatttgcatcatggttcgtatacttagaattatgcgaaccaggtgattcaggaaaaacacgaatcgtcctgtttgtgtatcatgatgtttctagtttccccactttcccctttttagtttgtggtgcggggaatgtcatttgtgtaatattttaattgtttaagttgtttagccatacagctattgtgaaaaagtaaatgaaatcataaaaagcacggacgtagcttgctctgaatgctgatgggatacaaa

SEQ ID NO: 5529 - DNA, 1391 bp, Glycine max
acggctgcccgcgctcgagtcagctacgtaggccccccccccacttcatctctcagttccaagtctgccttatctgctgttctagtttattggcattgggatcagtaactgcaattcccaatgcaaattttcatcgggcgccaaggagcactagtgtgcttctggttgttgtctgtgttttttgtggtaacaggattcaacaatgaagagcacaggacagtggaggtagttggcctaggagaatgcgcagactgcaggcagaacaatattaagaataaccacgctttctcagggttacgtgtgacggtagattgcaagtcacgacatggacacttcagaacgagaggggcaggtgcgcttgatgaatatggaaacttcaaagtatcacttccacaggacatggttgaagatggtgagctaaaagaagattgctatgcccagttgcatagtgcatctgctgaaccttgcccttcccacggaaactccaaaattgtgaccaggtcagtctctgaagacacacacacccttgcacctgctgctggaaaactcagattctcatcagcattgtgcacttcagccttcttttggcatttcttcaaacaccacccagaattcccttaccctcctaaagatgactactctctccctccccctgtgccagtctataaggaacctcttcctccagtgccagtgtataagaaacccccagcaccatataagaaacctcctattagtactccatctccagttgtgaataaaccatgccccccaaaggaaaaaacaccttctcccactcccatttacaagccacttccacctcccactcccatttacaagccacttcctcctcctactcccatttatgagcctactcctaccgcgccgtcgccaccatattttaaatactttcctcctttccatttcaagaagccgtgtccacctcttcccaagatggaacctccaaagttcttttaccaacacccatggtttggaaactggcctccctctcattcatagactatcattgttctcggagtaacgttttttatatgtgcgttttctagcgtttttgcttcttatgttagcaataaaatccgaataacatccatgtcagtggatacagaatgtgagcagaagagcatggaaatgagagtaaaagagaaaaacaaatgatggagcaatgttgtttgagaaagtttgaagttaattttggtgaccaagttgaatgtgatgagttaataagtgaaggtttctctgttagttttgtacaagtacgtataacttaaaaatgctttatgatccttatggtgaaattgatatctaatttttcagtacggcggccgccccccaggtttcctgttatttacaaaaaaaaaaaaaaggggcccccc

SEQ ID NO: 5530 - DNA, 1671 bp, Glycine max
ggagagtgagaataaaaaagaaagaaaaagaacggttttgataaagcaaaagaacattattgtaacataaattttggactttctttgcatttggcacccaccccacaacgaaataaaacaaaacaagcacacaaccagagacacgcacacgcatatagagagagagagagagagagagaagaagaagaaggaagcagaggaagaagaaggaggagatcttgagagatcaggtcgcaactgatcatggggagagaagttacaggaatgcaagttgtggacaagaagccaaatggcgtaataccagcttcaaatggtagttctaatgataaagtgtgcatttctcctaaaaggacagcagctaaggttcaggcgaaggatcacgaggtaaatgaatgtaccaaagctaactcttttgttgaaaaaagccaagagaagatggatggtttgagtgccaaagcaacaaactgtaatactggcttgcctgaggaggagattgagatatctgaagtgcagaaaatgggtgacagtaaaaagttaagcccgcctgctgcaagaaaagagcatactagtcaccttgttacacatccatctgatttggttactgaaaagcatggatcccacacacagattgttgatgctgaagctgatgcaactggtctgaacttatcaccaaacactaacaacatgctctcacctatctcatcaaagaattcacagccaaactctcctttttcatcaagaaagactttgcaacatgacaagaagaactatgatgatgaagataattggtctgtcgcctcctctgctatgtctatgcgcacagctagatctaaggtaactcatggttcagcccctacatttagatgctccgaacgtgcagagaaacgtagggagttttatctgaagttggaggagaaacaccgagctcttcgagaagagaaaaaccagtatgaggcgaggtttaaggaagaacaagaggcagccatcaagcagttgagaaagaacttggtaattaaagcaaatccagtaccaagtttctactatgaagcgcctccccctaagactgaactaaagaagctgccactgactcggccaaaatcaccaaagctaagtcggagaaggagccttggggatgctctgaacccatctcctgaagtttgtagtcgagggcgtcacagcactggaggtgtaggtcacaccaagggtggttccaatgcctctttccctcacaaaaacaacattcgacgcaacagcaatggcgtttgcaaacctaaagaacgaacaaaagaggataaggaaacaaaaacggctcctcctaagatcaccgaccacgcaaatgcagacattccagttcaatcatgtccgttgagaccgaaatagccttcatcacttcattttcatggggactgacttttgtgacttgcaatggtgtatatgttttgtaacttataatattgctacacggtatctcttcctattatataatgagagttattgatgtaatatgatgatgattatgatgtttcccagactagtcccataaattagctgctttctgcaggagcattagggttcttattatacggatttttctatggtgctaaaattgggtgtgttttgcgtgttcttatcatgtgattatgatatgcacctttgtttttccacaaatgg

SEQ ID NO: 5531 - DNA, 1706 bp, Glycine max
accggaaattcccgggtcgaccaacgcggtccgacggcttggaaaagaccaccaaaaggggggggagggggaatttaaaagaaagaaaaaaagaggttggtggtaaagcaaaagagtgtgattgaaacataaattttggactttctttgcatttggcagccacccccacaacgaaataaaacaaaacaagcacacaaccagagacacacacgcatagagagagagagagagagaagcagaggaagaaggagaagaaggagatcttgagagatcaggtcgcaactcgtcatggggagagaagttacaggaatgcaagttgtggacaagaagccaaatggtgttataccagcttcaaatggtagttctaatgataaagtatgtttttctcctaaaatggaagcagctaaggttcaggcaaaggatcacaaggtaaatgaatgtaccaaaactaactcttttgaggagaaaagccatgagaagatggatggtttgagtgccaaaacaacaaactgtaatactgacttgcctgaggaggagattgagatttctgaagtgcagaaaatgggtgacagtaaaaagttaagctcaccatctgcaagaaaagagcatactagtcaccttgttacacatccatctgatctggttactgaaaagcatggttcccacatacagattgttgatgctgaagctgatgcaactggtctgaacttatcaccaaacactataaacatgctctcacctatctcatcaaagaattcacagccaaactctcctttttcatcaagtaagcctttgcaacatgataagaagaactatgatgatgaagataattggtctatcacctcctctgctatgtctatgcgcacagctagatcaaaggtaactcatggctcagcccctacatttagatgctccgaacgcgcagagaaacgtagggagttttatctgaagttggaggagaaacaccgagctcttcgagaagagaaaaaccagtatgaggcaaggctaaaggaagagcaagaagcagccatcaagcagttgagaaagaacttggtaattaaagcaaatccagtaccaagtttttactatgaagggcctccccctaagaccgaactaaagaagctgccactgacacggccgaaatcaccaaagctaagtcggagaaggagctttggcgatactgtgaactcgtctcctgaagcttgtagtcgagcccgtcacagcactggaggtgtaggtcacgtcaagggtggttccaatgccccttttcctcacaaaaacaacattcgacgcaacagcaatggtgtttgcaaacccaaagaacgaactaaagcggataaggaaacaaaaacggctcctcctaagatcaccaaccacgcaaatgcagacatttcagttcaatcatgaccgaaatagccttcacatcacttgattttcatggggactgacttttgtgacttgcggtgtatatgttttgtaacttataatattgctacacggtatctcttactgttatataatgaaagttattgatgtaatatgtgaggatgtttccccagactagtccctggattttaaatttaaattaaatgctttcagcaggactagtagcattaggggtcttattatacggttttatctattgtgctaaaatgggtgtgttttgcgtgtcctatcaccgtgatgatgcacctttgcttttccac

SEQ ID NO: 5532 - DNA, 1336 bp, Glycine max
atacgtacgtacgcacgtcagtcggctcgaggttcattctcccaggatggaacatcccagttacttaacttgagtggatccaattccgttatgtcttctgcagccatgctacccaagcaaataaccactgaacctcctcagcttccatctgctgctcctcagtgtgtattgcctcaggtggaaaacttgggaacatcacaatcaaatgtgtctgaacttgctgctttgcctccatttgctggaagagaacattctgcataccatgctgctgctgatcctcagagcaatcttttatttgggattaacattgacccctcttctcttatgctgcaaaatggcatgtcaaacctgagaaatataggcaatgtgaacaattcattatcgttgccattttctgcttcaaattgtggtggtgcttcaggcactgatttccccttaagttcaaacatgacaacttcgagttgtgtggatgaatcaggcttcttgcagtcttctgaaaatgtagaccaagcaaatacaccaactggaacctttgttaaggttcacaagtcagggtcctttggcaggtcactggacatttccaagttcagcagctatgatgagctcattagtgagcttgctcgcatgtttggccttgaaggccaactagaggaccctaagactcagagatcaggctggcagcttgtatttgttgaccgggagaatgatgttcttcttcttggtgatgatccttggcaggagtttgtgaacaatgtgtggtacataaaaatactatctccactagaagtgcaacaaatgggcaaaggtcttagtccttctacttctgccccaggtaacaaactttctactcctgccaactcttgtgataattatgtgagtcaacaagagttgagaagttcgagaaatggcatggcatcaatgggatcttttcactactaggacactctcccatgtaaggaaatattagttgagaaattatggtggcagaattttatgttacaagttttcttatgtatggattggcccagcattcttgtacacattaatggttgacatgtagtgattttgcaaggtctaaatagatcaacagcaaatgactgtaaattataataggtggccttttttctgtaatggttagttgcttatagcagttattaattattactgtatctcttatttagttttgcaatcgaaaatttgggaacttcgttgttgccccattttcttatatatacgcacgcaccaattttccatcatatttgtcaaacggtagtgggatactgacaacttttcgtgaagttgagtttcaaaatcgacaaagaaaatgtttctgatg

SEQ ID NO: 5533 - DNA, 1347 bp, Glycine max
tacggctgcgagacgattggagggggagcctaaggtgtatgaaataagacgacaatattttgttccgatgggaccggacaagggacgatgaaatcagtgtagtggaagaagttgtgtttttgttgggacaattggtggctctcaaattgtgaaccgcacatatacccaccctgcttcccacgccacatcgatctcacgttctctctctttcttttttcttgttgaaactgtgagtctatgttatttgtggcggagcatgaactcctccaccaacacctcgaattctcagtcaatggctgcagcagccagtgatgggtctgggaagaaggtaagaaaaccttacaccataaccaagtccagggagagttggactgaggaagagcacgacaagtttctcgaagctcttcaattatttgacagggactggaagaaaattgaagattttgtaggttcaaaaacagttattcagattcgaagccatgctcagaagtacttcttgaaagttcaaaagaatgggacagtggcacatgtgcctcctccccgtccaaagcgcaaagctgctcatccttacccacaaaaggcatcaaaaaatgttttggtgccactaccagcttctgttggttatgcttcatcaagaaatacgcttgcacctgggtttgcctcatgggatgaaacttccctgctgatgaatgccggagctgataaacccatgacctgtcaggatgaactcaacaatgttcatcatggaaatgaagctgatattggatcaaaggggataacacagattaccaacagcagtctcagtggtgttggaaattctactagaacactactgacttctgagataccaaagcaagggaaacaagctccagtgcttcatggtttgccagattttgctgaagtttacggtttcattggaagtgtatttgatccagaaacaaatgaccatgtccagaagctgaaggaaatggatcctataaattttgaaactgttttgttgctaatgagaaacctcactgtcaacttgtctagccctgacttcgaacccatttgatagaatggggagacaccccaatactactgggcaaggcgccaatgacccacccaaaagattactgcacaagcttaaaccacaagtaatttgacaactactcaattagtccctagacgtcaagggatctctctgagaaggccccagagtgttctctttttctaattacatgtgaatgacgtgataggatttccatgtaataaatataggctcttgtattaatttgtgattagccccggattacttgaaaaattaaagtatttattagattagtaagtgtatataaattttaatat

SEQ ID NO: 5534 - DNA, 1520 bp, Glycine max
tctcgagccgaatcggctcgagacggctgccagctgccgacgcccccccccccatgagaagtgcaaaaacagtgtaacaaaaagaaaaagaaaaacaatatgaagttcactataatcacaatatttttctctttatttctacttgactttggttttgcacaacagggggatcttgacatatcaagatttggaggaaaaccaaatacaaatataggccaggctttcttaagtgcctggactcaagcatgtgcatcaccaactgctgtcaaaattgtgattccagctggcacataccaaatgggtgcagttgatgtcaaaggtccttgcaaggctcctattgaggttcaagttgatggaacaattcaagcacctgcaaacccaactgaccttaaggcggctcatcaatggtttgttgttcaatatgttaactctttcaccctgtcgggtaaaggtgtttttgatggtcaaggggcaactgcttggaaacaaaatgattgtacaacaaacaaggactgcaagatgctttgcatgaattttggttttaatttcctcaataattcaattgtccgtgacattacttccaaggatagcaaaaactttcatgtgaatgttttggggtgcaacaatttcacatttgatgggtttaaagttagtgcaccaaaagatagccccaacaccgacggaatccacattggaagatccacagatgtgaagattcttaacacaaacattgctaccggagatgactgtgtctcattgggtgatggtagcaaaaatataactgtccaaaatgtgaattgtggacctggtcatggcattagtgttggaagccttgggaagtacgattctgaagagcccgttgcaggttttcttgttaagaattgcactttgaatgaaacagataacggtgtgagaattaagacttggcctaacacgccaggagcaattacaattactgatatgcattttgaagatcttaccatgaataatgttacaaaccctatcatcatagaccaagagtattgtccttggaaccaatgctccaaacagaatccatcaaaaatcaagataagcaaggtttccttcaagaacattaagggcacttcaggaagtcaagatggggtggttcttgtttgtagtagtggtgtaccatgtgagggtgtagagatggctgatattgatctcacattcaacggagctgcagcaacagctaaatgtgctaatgtcaagcccacaataacaggaaaagctcctacttgtgcagcctagaatgagcaacaacaataatgcccatttttttttaacacttttcttttactatttttcctatgtagagaaacaagccatccccattaaaagaggaggtgtctagtaattgtattctcttgtgaataaatacttcaacgtggctatggtaaaataatgatcatatatgtaatgttgcttcaataccaaaagaagtcttctttattaatctcaaaaaaaaaaaaaaaaaatgttccaaattcatacccaagttt

SEQ ID NO: 5535 - DNA, 2630 bp, Glycine max
cactcgagccgattcggctcgagcaggtcccaaccaggaaaaatggttctgtcggatgccgttaattttgctcggaatttcgcagttatggtcagagttcgtggccctgacccaaaagggttgaagatgagaaatcacgcttttcatcaataccgttctggtgaaacaaccctttcagcttcgggggtacttgtacctgatactctttgtgattctcaagtagctacgcgtcttaatggtgataactgtgaggatagggtattggttgtaacggttgcttcagttgttgagccttttctgtcacctcaacagagagacaatattcctcagggtaggccagacttgattgccggtgttcagattgatgttatgaccgaggaaaccaatgaaaaatccaatcggggaactccttgttggcttttggcacagcttttgtcattagttgatattcctgcttcatcgaattgtctccagtcacttattgaagcgtctttgggcttgccagagcatgaatgggaggttggttggtctttggcatcttacaataatgattctcaaccttccaaagatttttttcaaactcatcctcgggaaagattggctgcgggaggatctggcagtgcaagtcttgtgtacaaatcacttactcgaatggcaattcttagtgtttctttatctttcagggacttgctggatagtaaagtatctgccatgaataaaagaggtgattttcttctggcagttggatctccttttggagtcctgtcacctatgcactcttgtatcagcatctctgtaggatgcattgcaaactgctatcctcctcattcatctgatggatcgttgctgatggctgacatacgctgtcttcctggtgtgagccatttctctgttgcataatccattggtcatttatggaagtggttctggctctattttgacactctatctaccaggaatggaaggcagtccagttttcagtgagcatgcatgtcttattggtgtcctgatcagaccattcagacagaaggcgtatggagcggaaatccagctggtgattccatgggatgccattgtgactgcttctagtggcttgctgcacaagaggcctcagaacacacagaaaggtttatgtaatcaggagggcaacctttatgctgcaggaagtgtacctttttctgacactgacaaattagatgtttgctctaggaataaacacgagcatttatattttggtagctcgtcaccattaccaattgagaaggcaatgacttctgtctgtcttgttactattggtgatggagtatgggcatctggtgttttactaaatagtcaaggtctcatacttacaaatgctcatctgttggaaccatggagattcgggaaagaacatgtaaatggaggaggatatggaactaattcagaaaagatttcttccatgttggagggaactgcatatgttgttaacagagttgagagcaatcaagttagtcaaacttcaccgttgaagatgccaattctttatcctttcgctgcgaatgagcaggggggatataagtcgagtccaacttatgacaaccatagaaacatacgtgtacgtcttgatcatatccgagctcggctccggagtgccccccccccagtgtatgtttgtaaaggaccatgggatgttgccttactgcagcttgaatctgttccagatgatcttttgcctataacaatgaatttttctaggccatccacaggatcacaggcatttgtcattggccatggattatttggcccaaagcacggattcttcccatctgtttgctctggtgtggtagcaaaagtggttgaggcaaagactcctcaatcttatctgtccgttcagccagaacatctccacaaccatgagcacttcccagcaatgcttgaaacaacagctgctattcatcctggtgctagtggtggtgctattatcaattcagatggtcacatgattggcctggttacaagcaatgcaaggcatagtggaggagcaataatacctcaacttaattttagcattccatctgctgctttggcacccatcgtcaacttctcaaaagccatggaggatttatcacttctacggattctagacgaaccgaacgaatacctttcatctgtatgggcattgatgcggccatcatatcctaatccccatcctatgcatgatccacctcagtcggttacagacaataaaagtaaagagaagggttctcggtttgctaagtttattgctgaaagaaaggacattttcaatgctggaaagagtggagtgatttctaaggaagttattgctagtaagttatgatctctgatgaagtgacaaagtttacctaaatgaccatggcaaagctttgccaacatacaacttgtcaatgactacacttccgttgattaaaatctttggactgaaatcttctgccctagattgttagccaaagaaaatcaaggaaataaattttctagaatctctaaacgattatactagtacttaattaaagtttaaaactgattttacataagacagttacttttgttttgtactttggttgagattaagtaattataggagaaactcttgatagagccaaaaaaaaaaa

SEQ ID NO: 5536 - DNA, 1257 bp, Glycine max
ccgagaagctatggcattctctggtagctcagctccatattacatgcatagagtagggatcggagggtctgcctctgggttcgaaccagcccctgggttcagacctttgtcaaacactggcattcaagctgagtcaaatgctaggggtggtcagggtcagggtggtggttctgtagggtctagttccccattttcagtggagccacctcagggtcataccaattttaaccatggcattgggattggggcaccttcaagtgagcctgtgaagaagaaaagagggagaccccgtaaatatggtcctgatggagcagtttctttgagactgtctccaatgtctgcccctgcaaactccactcaggatgcaagtgaaaccaccccttctcagaaaaaggctagagggcgccctcctggctctggaaggaagcaacagctagctgctttaggtgaatggatgaatagttcagcagggttggccttttcacctcatgttatcactattggagttggggaggacattgtggcaaaattattgtcattatcacagcagagaccaagggctctgtgtatcatgtcgggcactgggacagtatcttcagtcactctgcggcagcctgcttctaccaatgccagtgtaacttttgagggacgattccaaatactatgcttgtctggttcttacttggttgccgaagatggtggacccttgaatagaactggtggcattagtgtttcactctctagccctgatggccatgttattggtggtggtgttgctgtgcttattgctggaagccccgtgcaggtgatgttgtgcagttttgtttatggcggctcaaagaccatgtctaaacaagcaaccactctcaaagatgaaagttcagagccacctcctcagcataacgacaagttagcttctccagccagtgctcctgctccacctggtcaaaacttcctccctctttctgcagcaaacctttggcctggatcccgaccagcagagctgaaaagcgcacacatgcatactggcatcgacttaactcatgggtgagatattatttcggaagaaacatttgcaaatttgtaaataactgttgtagtaaatgagcttgagtttgtgagcattgtggctgctttgcactaacatatgttataacaaatgaattattcggggttaagtgatgattcttggcaaaaaaaaaaaaaaaggggcggccagccgacttagtgatcgctcgtcgaccccgaggaatttat

SEQ ID NO: 5537 - DNA, 1872 bp, Glycine max
ccacgcgtccgggaatctatttattttgcagtaacggaagagagtggaactggatccccgtcatcggataaacacaatagctgtagctagagaggagattcgcagaagaagataagggatgtttgggttaatcggaagaaaggccaatttgttggtaggatcgggaacaagaagaaggtggttgagcttcgcagcaacagccacaaccacttctaatggtggtgccatggaggagttgctttcgcaactccaatctaatgtccaaaaggctcttgctggtggaggacccgaggcagtgaagaggaacaagagtaggaacaaatttctgccccgccaaagaatcgatcgcctccttgatcccggttcttccttcctcgagctttcacagcttgcaggacatgacttgtatgaagaacccttgccttctggtggggttgttactgggataggtcctgtgcatgggagactgtgtatgtttgtggcgaatgatcccactgttaagggagggacctattatcccattactgtcaagaagcacctcagggcgcaggagattgctgctcagtgcaaattgccctgcatatatcttgttgacagtggaggagcttttcttcccaagcaagctgaagtgtttccggacagagagaacttcggcagaatattctacaatcaggctgtaatgtctgctcaagggattcctcaaattgcattggtgttgggctcttgcactgctggtggcgcttatattcctgctatggctgatgaaagtgtgatggtcaagggaaatggtaccatttttttagcagggccacctcttgttaaggctgccactggagaagaagtctcagcagaagatttgggaggtgctactgtgcactgcaagacgtcaggtgtttctgattattttgctcaagatgaactccatgctcttgcgcttgggaggaatataattaagaatttgcatatggctgggaaagatgtcttggcaaatggattgcaaaatataaattatgaatataaagagccactgtatgatatcaatgaacttcgttctattgcccccactgatcttaggcaacagtttgatatccgatcagttattgatagaattgttgatggaagtgaatttgatgaattcaagaaattgtatggcactacacttgtgacaggatttgctagaattttcggacagcctgttggaattattggaaacaatgggattttattcaatgaatctgcactgaaaggggcccatttcattgaattatgcactcaacgtaacattcccttggtcttccttcagaacatcactggattcatggttggctcaagatctgaggcaaatggcatagcaaagtctggtgcaaaaatggtgatggctgtttcttgtgcaaaggtacctaaagtcactataatggttggaggaagctttggtgcaggaaactatgcaatgtgcggtcgtgcctatagtcccaatttcttgttcctttggcctaatgctagaatttctgtgatgggtggtgctcaggctgctggtgtgctggcccaaatagagaaaggcaacaagaaaaggcaaggaattcagtggagcaaggaagaagaggataagtttaaagggaaagtagtggaggcttatgagagagaagcaagtccttattactcaacagctaggctttgggatgatggaatcattgatccagcggatacaagaaaagtcattggtctatccatctctgcctccttgaaccgtgacattcaaaacacaaaatatggtgtatttagaatgtaaatttcaaaatttattctgccctaaaatatgtggttatcattcagcaatggtgttctcaagatggtctcaacatcctccacttc

SEQ ID NO: 5538 - DNA, 2196 bp, Glycine max
  misc_feature (1)..(91): n is a, c, g, or t
  misc_feature (93)..(572): n is a, c, g, or t
nnnnnnnnnnnnnnnnnnnnnnnnnnnnnnnnnnnnnnnnnnnnnnnnnnnnnnnnnnnnnnnnnnnnnnnnnnnnnnnnnnnnnnnnnnngnnnnnnnnnnnnnnnnnnnnnnnnnnnnnnnnnnnnnnnnnnnnnnnnnnnnnnnnnnnnnnnnnnnnnnnnnnnnnnnnnnnnnnnnnnnnnnnnnnnnnnnnnnnnnnnnnnnnnnnnnnnnnnnnnnnnnnnnnnnnnnnnnnnnnnnnnnnnnnnnnnnnnnnnnnnnnnnnnnnnnnnnnnnnnnnnnnnnnnnnnnnnnnnnnnnnnnnnnnnnnnnnnnnnnnnnnnnnnnnnnnnnnnnnnnnnnnnnnnnnnnnnnnnnnnnnnnnnnnnnnnnnnnnnnnnnnnnnnnnnnnnnnnnnnnnnnnnnnnnnnnnnnnnnnnnnnnnnnnnnnnnnnnnnnnnnnnnnnnnnnnnnnnnnnnnnnnnnnnnnnnnnnnnnnnnnnnnnnnnnnnnnnnnnnnnnnnnnnnnnnnnnnnnnnnnnnnnnnnnnnnnnnnnnnnnnnnnnnnnnnnnnnnnnnnnnnnnnnnnnccgctggtaaacgggcagcacagcgaacggcaattaatgtgcgttaggccggtatgggtcccggcacgccttcagatcccgttcccacggtattgtgttcccccccatccttaacaacatttcacgcttcctctgtttgctcgcacacgtcgtttttttctttttgttgcttcggagccaactcaacaacaacgccgtgcctaatccttaagaataacgaattacaacaaccaaccatgttgcattgtctcaacacttcctgttcggacatcacagtcttggaaagacaacgggaagcaaccatcaagtgccagaaccaccaaccaccctacttaacggactttaacgccgtcttcccttcttcttcttcttcttcttcttcttcctcttcttcttctcatagtcagggcttgctcatgatgtgctcggattcctcgctcggccaggtcctaactcactccgtcaaacccgatccgggcgtctggcccgaattcggttttctacccgccatttcgagaacttgtagcagagacggagacttggtttcgcccaaggaaaacatggccagtgggaaagaaaatgctaagaagagaaagcctcagaactccaaggttgttgcggagattgataataacaaggacaaggacaagagagtcaaagtaactggcgaggaaggagaatccaaagtaaccgagcaccataccagaaacaagaatgccaaatccaacgcaaataagaacaacagagaaacctctgcggacacttccaaaggctccgaggttcaaaatcagaaaccagactacattcatgtccgagcgcgtcgtggacaagccacggatagtcatagcttagctgaaagagtaaggagggagaagattagcgagagaatgaagtatttgcaagatttaataccgggttgcaacaaagttgcagggaaagctggaatgcttgatgaaattattaactatgttcagtctcttcaacgccaagttgagttcttgtcaatgaaattagcggctgtaaacccaaggcttgacttcaacattgacgaactgtttgccaaagaggtgtttccttcttgtgctcaaagttttccaaacatagggattccctcagatatgagtattagtaacaacccttcgtatcttcagttcaattcagcgcagcaacttgtatcgtgctgtggtggattaataaacagcatgggaataagccctcccaacatgggactccgaacgaacattattagtactagcactgtacctttgcccgaaacttttcttgactcttcctgtttcactcaaattctaccctcctcaaattgggaaggtggtgatttccaaagcctttacaacgttgcttttgatcaagggcgaacagcatcttttccccctcagccatttacaggtctagttgaagctagcaatctaaaaatggagatgtaaaccagataatccattattacaatatgttggattaggtcactcggaatgcctttgtcaagatttttttctattagagtacatcgcatatattggttgtatactgctccgtagaataaataagatcatattaacaaaaaaaaaaaaaaaaaaaaaaaaaaaaactcgagactagttctctc

SEQ ID NO: 5539 - DNA, 1263 bp, Glycine max
tctgggaagtgaagaggatatagaaaagaggacttcaggattctgtgggtcccagttgtggatgagtggaatcttctgcacagggccgagtatgataccctgttcccgggtcggccctcgcgtccggcggaatacttctaccccttggccggaataaggctcataagggaggacttgaattacaagaacaaacccatcatccctgtgctcaaccctcaaggaagagtggtcaactacaatgccatgcacatgattttcgtctggggcatcgatgcattccctttcagaccctctgatgatgatgtcctcacccagaaatggaattggttctgggccgaaatgaagaaagtcaatcccaagctgcaagaccttataaaagcggacagtttcatcttcatctatggaggcagtgacaagaagtggctgcaagatttcgctcaggcagtggaaagaatcaaaaggcatgagatcatcaagagggcagacgcggtgatagagcactatccattcggaagggaagatcacaggatcgttcctcgcttctggattggcatagagagcctgttcgcgaacatgattcagaagacacacaaggaccctaccattgaggagattaagagcttgctctgcctcaaacagcaacaacccgggtgggttcttctcagcaaaggatcgaacgtgaagctgttggggggtggggacccaatgctggccactgcagctgatttcgagatatggaaggaaaaggtgctggagaaagcagggtttgacgtggctttcaaggaatactatgagcagaagcgtcgcaactaccctcaggaatgctcgcacatgcagttggctaactaccctgctgatattcttcacccaattaactgccctgatgctgcttgtggcagatccatggagatagcttctgtcagttacaagtgctgccacggtcaaacagctcatcacaaggctgaagttccagagagtggcgatgtcatgattgagaagaagctctacgcttcttaattgatggatccatccacgagtttgttggtgatttttctggaggagcctctattttcccagtttggaattcaattgtgtgcactactttatcatttttacgtttcggctgttgtgatgaagcctcttctgtgctgcccttgtatgggttgaaaataatggcttcaaacagcgtctgtttgtcttactgcaattgactttgattcaattaaagagaaacctgttgggcttccacaaaaaaaaaaaaaa

SEQ ID NO: 5540 - DNA, 1516 bp, Glycine max
gaagacaggttgaggaggatgttgacattattggtgctcggccccgttcgccccccggaatgatcctcctatttcaaattatcctccattagagattgaaaaagatgttaccaatagaaacagtaaatgcagtagcttgagcagctctagtagtgaatctggctcttcatccagtgattcagactcaggcagttcatctggtagtgagttggatatggctaaaacatcagaacctcttagtgccaccaaggaaaacataggatttggcttgacttcagatcaaaacaaaggggatcctggtaattcagaaactggaaaggattcaacaaatgtgggaggccaagttgaggagagttcccagagtaggcctgttgctactgagccagaaagccatcaagagggggagagtgctgcatctaagaggcaagtctctcccgaaaagctctaccgtgcagctttattaaggagccgttttgctgacaccatacttaaagctcaagagaaagcacttgaaaaggatgaaaagcgagatcctgaaaaacttaggattgagcgagaagatcttgaaaggcggcagaaagaagagaaagctccgttgcaggcggaggcaaaggctgcagaagaggctcagaggaaagctgaagcagaagctgcagctgaagcccaaaaggaaaagggaaactggaaagagaagcagcccgccaggctttgcaaaagatggagaaaactgttgatatcaatgagaacagtcaatttttggaagatctagaaatgcttagtgctgtacatgatgaacacctgccaagtttcaaagaagagacaagcacagatcaacctcaagatggattgggtgggatcaagctacagggaaatcccttggaacagctagggttgtacatgaaggatgaggatgaggaggaggatgaggaggaagaggatgaactgcctccgagtggtgctgtaggaccatcaaatgatgttgaagaaggagagattgattgatttgttccccttgattgttccattattttgaacggatatataaacggtatttctggggaacagttgctggacttagagatgctgcttttttgttgctacggggaacagttgctgaacaaataattacggtttgtatgtctgatgctggttcacacctaagtttgaagatgggatagcaaaaactagtggcaaacgagtgaagattggatttggttttggttctttctgattaattttggttttaacttgggaaatggtttctgaaaatgtggatagaaagctcgcagcccccatttattgaagaagggctttggtatcttggatggaaagtttgtatcaatcaggatatgtccaattttgcttgtaaagagggaactaatttgtaacgagttctaagtctgacctcaagtagttggcttctctgacaatgtaaaatattttagagccagggtaaaatcaattctttctatttaaaaaaaaaaaaaaaaaaaaaaaaaaaaaaaaaattaaaaaa

SEQ ID NO: 5541 - DNA, 4013 bp, Glycine max
cttgaaaggccgtttaggtccaggcatgatgataacggttgatttacttggcggtcagcagttgtagcatcacccacttggaggtctatgagaatacagaagttaaaaaacgagtagccttatcaagcccatatgggaactggatcaaggaaaatttgcggactttgaagctcgggaacttcctttcagcctctgtgttggacaatgaggcagtattaagacaccaacaggcatttgggtactctagtgaagatgtccagatggtgatcgagagtatggctgctcaaggaaaggagcccacgttttgcatgggagatgatattccattggcagcattgtctcagaaacctcacatgctttttgattatttcaagcaacggtttgcacaggttacaaatcctgcaattgatcctcttcgagaaggattggttatgtctcttgaagtgaatattgggaagagaaggaatatattggaaactgggccagagaatgcttcacaggttatgttatctagtccagtattgaatgaaggggagcttgagtcattactaaaagactcatacttgaaaccacaagtattacctacattttttgatataagtaagggcattgaaggttccttggagaaagcattaaataagctttgtgaggctgcagatgaagctgtcagaaatggttcccagctgcttattctatcagaccattcagaagcactggaaccaactcatcctgcaattcccatactccttgctgttggtactgttcatcagcatctaatccagaatggcctgcgaatgtcagcttcaattgtagcagatactgctcagtgctttagcactcaccagtttgcctgtttaataggatatggtgcaagtgctgtgtgtccgtatttggcattggagacatgtcggcaatggcgtttgagtaataaaactgtaaatctgatgaggaatggaaagatgcctactgtatcgattgaacaggcacagaagaactattgcaaggctgtaaaagcaggtcttcttaaaattctttccaaaatgggcatctcattgctatcaagttactgtggtgcacaaatatttgaagtctatggattagggaaggaagttgttgatcttgcattcagaggaagtgtgtcgaaaattggtggattaacttttgatgaggtggcaagagagactttgtctttctgggtgaaggcattctctgaagatacagctaaaaggttggaaaattttggatttatacagttcagaccaggaggggagtatcatgcaaataacccagaaatgtcaaagttgctccacaaagctgttcgtcagaaaagtcaaagtgccttttctgtttatcagcaatatttggctaatcgacctgtgaatgttctccgtgatcttcttgaattcaaaagtgatcgtgctccaatacctgtggggaaggttgaacctgcttcatctattgtgcaacggttttgcacagggggcatgtcacttggagctatttccagagaaactcatgaagcaattgcaattgccatgaacagaataggtggaaaatcaaattcaggggaaggtggggaggatcctgttcgctggaaaccacttacagatgtcgtagatggttactctccaactcttcctcatcttaaaggtcttcaaaatggggatactgcaactagtgccatcaagcaggttgcttctggaaggtttggtgtcaccccaacattcttggcaaatgctgatcagttagaaatcaagattgcacaaggtgcaaaacctggtgaaggtggacaattgcctggaaaaaaagttagcatgtatattgctaggttgagaaattctaaaccaggagttcctcttatatctccacctcctcatcatgacatttattctatcgaggaccttgctcagttgatctttgatcttcatcaggtgaaccctaaggccaaggtgtctgtaaaactggtggctgaagctggaattggcactgttgcatctggggttgcaaagggcaatgctgacattatacagatttcaggacatgatgggggaacaggagcaagccctataagttccatcaagcatgcaggaggtccttgggaacttgggcttacagaatctcaccagacactcattgaaaatggacttagagaaagggttattctcagagttgatggtgggtttagaagtggagtagatgtcatgatggcagcaataatgggtgctgatgaatatgggtttggttcagtggcaatgattgctactggatgtgttatggcccgcatttgccacaccaataattgcccagttggtgttgccagtcagagggaagagttgcgtgcacgctttcctggtgttcctggggaccttgtcaactactttttgtatgtagctgaggaggtaagaggcatattggcacagctggggtatgagaagttggatgatgtgattggccggactgacttgtttcaaccacgagacatatctctagcaaaaactcagcatctagatctgaattatatcctctctaatgttgggttgcctaaatggagcagtaccgaaattaggaatcaggagcctcataccaatggtcctgttctggatgatgttttgctagcagacccagaggttgccgatgccattgaaaatgaaaaggtggttaataagaccataaaaatatacaacattgatcgtgctgtatgtggacgtatagctggtgtcattgcaaagaagtacggtgacactggttttgctggacagttgaatataacatttacaggaagtgctgggcagtcatttgcatgctttctgactcctggaatgaacattcgccttgttggagaggctaatgattatgttgggaagggcattgctggaggtgagttggttatcactccagtcgacaagaccgggtttgaacctgaggatgcagctattgtagggaacacttgcttgtatggtgcaactggtggacaggtcttcgttagagggagagctggtgaaagatttgctgtcagaaactcacttgctgaagcagtggtggaaggcgcaggagatcattgttgtgagtacatgactggtggctgtgtggttgtcttgggaaaagtgggtagaaatgtagctgctggtatgactggagggttggcttacattcttgatgaggacgatactttcatacccaaggtaaacagagaaattgtaaaaatccaacgggtgtcagcccctgttggacagatgcaactgaagagcctgattgaagctcacgttgaaaaaaccggtagtaccaaaggtgcggctattctgaaggactgggataagtatttatcactattttggcagctggttccacctagtgaagaagatacccccgaggcaaatgccaaatatgacacaactacggcagatcaggtcacttatcagtctgcttagggtaacaatctaaggttacattacattgattacgccaggctatggagccattgttgtgtccctgatttgtacaggaattggagaggctatcaattaggtggaaatgctagccaaaatatgggattaaactatcccttgaaaccatggtgctgcatgtattctcaagatcatttttgccagcagtatgaggaaccccgtatacatccatctgaagcattagcattctcttttgtatagccatgtgaaaggaaaaaagctgtatataaaatgcagttgattcgaatttgattgggacttttgtggacggtcaaaataaatagttggggcttgatatgcctgggtcccctttgctctcctgaattaatgaaaaattattgttttttccttgcacgatcgaagtgcgttgtttctctgcacttataaatataggatgtaattttttatgcttatattgttgataaagtactagcgggtttaatacatattatacatgagatgaatttacaataccttaagaaacatctcaagtatttgtaatgaataatatcaatggggaggtaatgattgggtacaaagttagaggct

SEQ ID NO: 5542 - DNA, 2401 bp, Glycine max
gtcgacccagcgttttgggatactgcaactagagaccacaagcaggttgcttctggaaggtttggtgtcaccattttgaagacctttaagatgaggaagagttggagagtaaccatctacgacatctgtaagtggtttccagcgaacaggatcctccccaccttaaaggtcttcaaaatggggatactgcaactagtgccatcaagcatgttgcttctggaaggtttggtgtcaccccaacattcttggcaaatgctgatcaccccccaaatcaagattgcacaaggtgcaaaacctggtgaaggtggacaattgcctggaaaaaaagttagcatgtatattgctaggttgagaaattctaaaccaggagttcctcttatatctccacctcctcatcatgacatttattctatcgaggaccttgctcagttgatctttgatctccatcaggtgaaccctaaggccaaggtgtcagtaaaactggtggctgaagctggaattggcactgttgcatctggggttgcaaagggcaatgctgacattatacagatttcaggacatgatgggggaacaggagcaagccctataagttccatcaagcatgctggaggtccttgggaacttgggcttacagaatctcaccagacactcattgaaaatggacttagagaaagggttattctcagagttgatggtgggtttagaagtggagtagatgtcatgatggcagcaataatgggtgctgatgaatatgggtttggttcagtggcaatgattgctactggatgtgttatggcccgcatttgccacaccaataattgcccagttggtgttgccagtcagagggaagagttgcgtgcacgctttcctggtgttcctggggatcttgtcaactactttgtgtatgtagctgaagaggtaagaggcatattggcacagctggggtatgagaagttggatgatgtgattggccggactgatttgttccaaccaagagacatatctctagcaaaaactcagcatctagatctgagttatatcctctctaatgttgggttacctaaatggagcagcacagaaattaggaatcaggagcctcataccaatggtcctgttctggatgatgttttgctagcagacccagagattgcctatgccattgaaaatgaaaaggtggttaataagaccataaaaatatacaacattgatcgtgctgcatgtggacgtatagctggtgtcattgcaaagaagtacggtgacactggttttgctggacagttgaatataacatttacaggaagtgctgggcagtcatttgcatgctttctgacacctggaatgaacattcgccttgttggagaggctaatgattatgttgggaagggcattgctggaggtgagttggttatcactccagttgacaagaccggttttgaacctgaggatgcagctattgtagggaacacttgcttgtatggtgcaactggtggacaggtcttcgttagagggagagcaggggaaagatttgctgtgagaaactcgcttgctgaagctgtggttgaaggtgcaggagatcattgttgtgagtacatgactggaggctgtgtggttgtcttgggaaaagtgggtagaaatgtagctgctggaatgactggaggattggcttactttcttgatgaggacaatactttcatacccaaggtaaatggagaaattgtaaaaattcaacgggtgtcagcccctgttgggcagatgcaactgaagagcctgattgaagctcatgttgaaaaaaccggtagtacaaaaggtgcggctattctgaaggactgggagaagtatttatcactattttggcagctggttccacctagtgaagaggatacccctgaggcaaatgccaagtacgacacaactacggcagatcaggtcacttatcagtctgcttagggtgacgatgcaaggttacattacattgattacgccaggctatggagccattgttgtatccctgatttgtacaggaattggagaagctatcaataaggtggaaatgctagccaaaatatggggattaaactatcccttgaaaccatggtcgctgcattgattctcaagatcatttttgccagcagtacgatgcaccccgtatacatccatctaaagcattagcattctcttttgtatagccatgtgaaagcaaaactgtatataaaatgcagttgattcgaatctgattgggatttttgtggacggtgaaaataaattagttggggcttgatatgcctagtcatcttttctctcctctgattaatgaaaaaatattgttttctccttgcacgatcggaatgcgttgtttctctgccaaaaaaaaaaaaaaaaaaaaaaaaaaaaaaaaaaaaaa

SEQ ID NO: 5543 - DNA, 1610 bp, Glycine max
ccacgcgtcccttcggctgcgagaagacgacattcactcatacaacatggatccgtgccccttcgtgcggatcctcgtcggaaacctcgccgtcaagtccccggcatcatcaaagccctcttctttctccggcaaagtccacccttcgagttcccccttcttctgcaagatcctactccagggacttgattcgaattccacttctcctagagtgtccagtgtccctctgatatcagactccgacccacaccctcactccttcgccgcctcctttgatttctccaaagcccaaatcttgaaagcctcgaagaagcccctgatgaagatctccgtctacaagggccccaccactccctcctgcgtcttcacctccgccaaactattgggcaaagtttcaatacccctcgatctcaccttggccgagtcacgcccctgcaccttccacaacggttggctctccctttccaagaacaccaacccatcccagttacttcacctaacagtccgagccgagcctgacccgcgctttgtattccggttcgacggcgaaccggagtgcagcccgcaggttttccaaataaaaggcgacgtcaagcaaccggttttcacttgcaagttcagcttcagggacaaggacaaggctcacttcccttcgctcaacgccaaccacgccgccgagcgtaaaggatggtccatcaccgttcacgacttgtccggctctccggtcgccgccgcctccatggccacgccgttcgtcccctcccccggctcgcagcgggtcagccgctccaacccgggggcctggctcattatccgccccgacggagacggcacctggaagccatggggccgccttgaagcctggcgcgagcccaacaactctaacgccgtcggctaccgctttgaagtccttcccggcaccgccgaccccgttaccctagccgcctccaccatcagttcccagcacggtggaaaatttgccatcgatgctacatccggcgttactccggtgaacactccccgcgggagctgggacctcgggtccggttccgggtccggttccaattcggatttcgggttggaaccgaatttcttttataataaggggtttgtgatgtcggcgatggtgagcggagaggggaagtgtagcaagcccgaagtggaggttggggtgcagcacgtgacttgcacggaggatgctgcggctttcgttgctcttgccgcggccttggatttgagtatcgacgcttgcaagttgttctctcagaaactccgaaaggagttgaggcagtagattccattccttcgtttcgtgtcgttttgcgtgcaattaagcggaatctgtaaccaggagaggagagaactcattatattctttttcatttttttttcttcttctgagtttttgagtgaggatgtacagttaggaaattatttggcatttgcttagcttaggcataaagttttgaattcttattttgcttacagatcagatcttcttgtattcttttattcttcttttttttatgaagagtttgtacagtatttttaattcaaaaaaaaaatgttggaattaagtaagatgtgaaatgaagcttgagaattcaaaa

SEQ ID NO: 5544 - DNA, 1043 bp, Glycine max
cctagacatccctatccgaaaattcctcttgccctcccagcttcgctgatttcttcgtttggaggataccctcaaaggtgttctactgtgaaagttagccaattttgaagatgaattgttataatcttcagaagaatgccttctcagcctgtgaagagatgagaggctctcttcccattgctgatcagaatggacctgtcttttgccctaagccacgccgagctggggttttaatgaacttgcctattcgaccagtaaaatggcatttaggtcaacaagctgaggggtctgattcaaaagttggggcagaactacttgacattgttctcaagagggacattgttcttaagagggagagttatggggaagaatttgcaaatcagataccttcatctcctccatatttttgtggttctcctccagttcgggcttctaatcccttaatccaagatgctcgatttggagacgaagagtactctcttatatcaacaatttcatcgccttcaggtttactgtctccatcttcagcatctcgcaaagcaggatgtgctaggatgaagtttggacttaaaccggctgcagttagagtagaaggatttgattgcctcagcagggattgccagaattccggcatccctgctgttgcttaaactccattcatagaagtgtatatagaagaagccaagtgccattacttataaaacgtgacttaactagagagagttttgaatgtttcggagggaagtaagaaattcagttagttgtgtatatagcaaatgcttttttgtatggtgaggtgaatcatctcattgtgagtatccgtggcaagtttagggagctgcagaaaaagcaaaccttctgttcttgaagtttgatgtgtagagagcatgtctttttgtaatataaggaggttgtatcggagtgtcttttaaaccttttaggctatcaccgtaagagtgttctgtataggaattggtgattttggttgtcgtccctgtaaatatatggcttctcgtgccggcttatcgaataccgtcgacctc

SEQ ID NO: 5545 - DNA, 666 bp, Glycine max
cggctcgagattttgttaataatggcgtattgttctctcaaggttttgtttggtgttgtgctctatgcctttgcgttccaacattgctacgctgatgcaaactcaacactgattgtaaatgctgcttccaataatgcaactgcaaggcaaattcctaacacttttcttggagtattcgttgaggagattaatcatgctggcgcagggggactgtgggctgaacttgttatcaatagaggctttgaagctggaggcccaaacaatgccttaaatgtttataattggtctattattggagatgaatcatccatttcggtatcaattagccgtacctcttgctttgagcgcaataaagctgcattgcaaatggaggtgtattgtggtgctcacaaaccttgcccatatggtgttggtatctctaaccctggttattggggcatgaatattgagcaagggaagaggtataaggtggtctatcatgttaaatcagaaagaaagtttgattttcaactgtcattcacgggtgttgatgttataaaagtggcatctagtagaagacatgtttatggagatggaaaatggaaaagggtggagacaatagtggaagcaaaaactactaatcactattcaagtcttcaaatacccacaacaagagaagggagttac

SEQ ID NO: 5546 - DNA, 1085 bp, Glycine max
aaaacacctataatagcaagcaccgctctcgcgccgaaaacccaatttacgatcacaatctcaaacacctcaacttcatttctctgctccaaagtctcaatcttttatccaaaaactcaaatgggcatggccacaatcacaatgggaggaaaccacaattcctccatcactccacgccactacaacacccacaaggtgttccttttctgcaactacattctcttgggtgcagcttctagctgcatcttcctcaccctctctctgcgcctcattccctctctctgcggcttcttcttcatccttcttcaggtctttacgattgcgggcgcggtctccgggtgcgccgccgtggggactaacaggtggtactctgcacacatggtggccactgttctaacggctatctttcagggttctgtttcggtgttggtgtttacgaggaccggcgattttctgggtcaattgaagtcttatgttagggaggaggatggtgctgtgattctcaaattggctggtggactcaccattttgatcttttgcttggagtgggtggttttgacacttgcatttttcttgaagtattatgcttgtgttgaggggaatagtggggctgttgtgcctgtgaggagtgggaaggtgcagcaggatgaggacttgaaggattggccttggccttttcaagtttgattcttgtgatgacaagaagaaacacaagaataacaatgacatgttccttttgaagttgttgcagctgttttgatgataatctttcaaatatgttgattcgttggagaattggatgcttttttctcctgatagagatatatgtgtgtgtgtttgtgttggctatcatcattatgtaattagttgtgtgtgtgtagttattctttagattcatcttatttgttgttggattattattacttcacatatcatctccttcttgttaagcaagaagttcagttactatataatggtatcagttttgagtaactttatatctggcttgattgagaacgagagttcggttactatataatggtatcagttttgagcaactttatatctggcttgatcgagaacga

SEQ ID NO: 5547 - DNA, 960 bp, Glycine max
gtctgttaagtgttgttgacaatgcaataaaccactactatcattgttctcagatcccattgccataaattactttgtccacaatcttgatttcacgctcagcctcgcatcacctaacaattttgaagcatttggggttgcaattgaattcttctgagcaaaccttgttcttatcgtctccacaatagacatggtttatcattctagttttgtgaatgaagatggagtgagtagagcttgtgggtgctctcttcttcctctcaagagccacattaagggacctgctcctgtttcagatcaagacagaactgatattgtggatgaagccataaccttcttccgagccaatgtgttcttcagaaactttgacatcaagagccctgctgataagcttctcatatacctgaccttttacattaatgttgctctcaagaggcttgaaggttgcagaaccttggctgaaggaaccaaggcaatcatcaacttgggtctcgaaaaggttcctgtccctggagagtctggctttccatttccgggccttttcccccttcctcaatcacacaaggaagcagaattattcagaaattatttgaagcagattagggaagaaacaagtgggaggttactgagcgttgcatacagacctaatggcactccaaataaatggtggttggcatttgcaaagagaaaatttatgaatataatcatcccttgaactgttgtggcaaacatgcaattcttaaaccatagattgtgttgtgaaaaatacacttaaacactgttgatctgccaattaaaaatatatagtctgttttgaatctttgtttttgattttgaatatactgaactactctttgctaacacattttcacaattcgtttgttggtcagtggtcacgtactttgtaccccataaataatgaagtcagtaatcatatgacccaaccttgcttgtgctggt

SEQ ID NO: 5548 - DNA, 1367 bp, Glycine max
ttcagctacgtaggcccccccccccccgggaaaagaaaagaaaaagaaaaaagttgctagggttttcactgcacttgaggttcgtagaggagagaaattcaaattcagtgtaaagaaattagatttttgaacgaaagcgacgaactttaagttcatggaccgcttgcgtcctaggaatcgagcggtcttttctggatttacaaatgccgagattgagaaaatggagaaattgttgagggaacctacgggggggtcattgggcaaggaattttaccaaaaactggctcgaagtttcaactattcctctggccgtgctggcaagcctatcataaaatggacagagattgagagttggtttcagactaggctccaagactcaccacaagtccctagcagtgagttgatggttcctaaatgcaaggaaggagaaactatgcaacacccatcagagttggaatttgaagcaagatcatcaaaagatggagcatggtatgatgttgaagcatttctagctcatagatttcttagcacaggggaagctgaagtccatgtcagatttgttggatttggagctgatgaagatgagtggatcaatatcaaaacttcagtacgccaacgctccattcctttggaaagcacagagtgttccaacctgaaaatgggagacccagtcctgtgcttccaggagaggagagatcaagcaatttactatgatgctcacattgtagagatccaaaggagaatgcatgatattagaggttgcagatgtctcatcttaattcgttatgatcatgacaacagtgagagttcgcttgaggagactttgccgcagatcaagatcttaagcacatgtgggatcaattctttttgacattcaaggtgagctttcaaacagtcagcaaaggacctgggtgcagcaggaagcaactagcacttgacattgagtatcgtgctcgttcatgcaaatttcatagctaaaacatgtaaagccttttccccgtccacttaagttttggctgggagtgctgtagaagaagaattatgaaactcgtggccctttttttgtcatcattggtagataagggaagtagatggtaaaagatgagtaagcttcaactatggaattgttaatacactagggggaaaagacctcattttataaaatgtttttcatcaaaaaaaaaaaaaaaaaatatggatacctcccctcatcattcgtatgtttccggaactgaatcgaaggaaaatataaagttttatggttctatggcgggtaaataaattaaagtatgattttagtaaagtttattgttttttttacctggatcataaattaatctcatttactgtgtgactgttaccgtctc

SEQ ID NO: 5549 - DNA, 1005 bp, Glycine max
tcagctacgtaggccccccccccaatattatataacaatcatatggtaattcaactgtcaaatggctatgtcaccatgcacattttaatgcaacgcatgttatagtttttgttggaggtaaagtttcaagcttatagtattgtttattccttttgttcttcctgcttctccttaaataataagtttagcttatgtagctattaaatttcattaaaatttgccataataatttatttaatgaaaagtcactattggtaaagtcagcatgtgattttgcagactcaagacataaatcttgcaatggaggcttctagaaaatgcaagaccacttacatggctgctagtttgaacatggaagattcatggaatagggattgcataacttctattaggaaggttgttgatttcagcttccaagatgtagatgagcttgtacatttggttttgactgcaacaaaagcaattacttgtgctggtcttggtggtgttagagattaacttagtactgtatataatataatgtttttttgggtttctcttctctactgagaaggtgtcctgaaaggaagtggcttaagggtatctacctatgctgacacctggaaacctgcaaagagggcaggtcacccacaatatgttatacccttatgtacatgtgtacaaaatgagattattagcaaattttggaatgtatttttaattgctcaggttcttatttgtgaataggagcacaattctctcacccttaaatttatgggttagattgttagaaagagggaagtgattccttcttgttaattaactgaggatggatatcatgtaattgttcagtgctacattctttgctccactgatttggagccccagaaaaaaagaaaataaaatctggaaatgttaggcaaccaaaataaagagatttgcttactgatatagtcataacaagttttaaagaaatctttttttgttataatattgaagttatgaatgattagaaatccttgcaga

SEQ ID NO: 5550 - DNA, 2060 bp, Glycine max
  misc_feature (116)..(120): n is a, c, g, or t
tgccaaatcatcttttaatatggttcaaaatcaacaggttttaagagatgatactcatttgactgaagcaaagagttttgaatactaatagtttgcttggtgaaggaatagtgatnnnnnttgaggacaatgttgaaaaccctggcgcacagactatatcttcttcagagcaaaataaaattgctgagcatgcatgtgaagctgctgcctctgttgagtctaataatttaaagtcaaaacctgaagcagactgcgtgcatgttgagaaactggctgataaggacccttctgttccagaagattctaaacatttagttgatcaattcagcttcttgcctgagttgattgcttctgtaaaaaaggctgcattagaagatgccgaggaattgaaagctgcagctgatgagcctgccaattctcagaatcacaattcagataccaaagatgaaacaacaaatgaagtagaaccaacgaatgctcatggtgatttagaattggactctgaaaatgaccatgtagatactaataaaattgagtctacaagggctgaggaagaagcatttgctaatggattgcagactattaacaatgatgatttggaggagatccgtgagcttggttctggaacctatggagctgtttatcatgggaaatggaaaggttctgacgttgccattaagagaataaaagccagttgttttgctggaaggccatctgaaagagcaagattgatcacagatttctggaaggaggcgttgatgttgagttcattgcatcatccaaatgttgtctccttttatggcattgttcgtgatggccccgatggttctttagcaacagtcacagagttcatgattaatggatctttgaaacagttcttgcataagaaagatagaacaatagatcgtcgtaagaggctcattatagccatggatgctgcatttgggatggagtatttgcatggaaaaaacattgttcattttgatttgaaatgtgagaatctattggtcaatatgagagatcctcaacggcctatctgcaagattggtgatttgggtttatcaaaggttaaacagcacactctagtgtctggtggagtacgggggactttgccatggatggctcctgagctacttagtgggaaaagcaatatggtgtcagagaagattgatgtctactcattcggtatagtcctgtgagtaattcccacagggaatgaaccctatgctgatatgcattgtgcttcaataataggaggaattgtcaacaactctttacgtcctcaaattccaacatggtgtgatcctgagtggaaatctctaatggaaagttgttgggcttctgatccagtagaaaggccatcattttcagaaatttccaagaagctgaggagtatggctgcttcaatgaatttgaaatagtcaattgatcttgaataagttaattgaccttctcacgttgtatgtagcctagaattggtaaaagggaaataaggtgaagcatggttcttccagttcaaggcaccaacaagcttagctttaaaaagggaaaaaataatttaaaggagtgttcaagcttatccaagcttgtatcgtaatatcatgccttggtttagtctaaaaatgttttttgtaatgttgcctttaatggtattttccttggtgcagttacttgcactatagcatggattctctcccagaagcagcttggtgttctgaagaaagctacatatatcactctggtgatgccaactatagctgtggctttaccatcacaaatgaaccgtgccttctggagagatgtgtacataaaatcaaccaacgacatgcctcctgtgctttcacatgggaaggataatgatgaattgtgcttcccattttgatggaacaaattcaatttatcatcgatattttgtttgcattgctttatcatattgatataccatattcttttttttttttgaaaggagatagaccatattctaaatggcatgatgaatgtgcatacttaaagatgtgtttaagctctcgaagctgtataaataaaggtaatttttccat

SEQ ID NO: 5551 - DNA, 737 bp, Glycine max
cgggtcggcccaagccttccgtacggctgcgagaagacaccggaaggggagaggtggaaatataaactttccctccccaatttctgtccatgttttcatctgcggaaactcctccgttctcaaaaccctaacccgacgccaccattcatccgatccaatgagttcgagaggagccagcgcgctgctatctcgagccagcaggattcgctcgaagcttcaaacggcgctggaagccaccgttttggaggtggacgacgtgtcgtaccagcacgcgggccacgccgccgtgaagggaagttccgacaaagaaacccacttcaacgtgaagatcgtatcgcccaagttcgagggccagagcctcgtcaaacgacaccgtctcgtctacgacctcctcgccgaggagctccagagcggcctccacgccctctctatcgtcgccaaaacgctccacgaaacaaaccctaataagtgacgcgtcgggagtgtcaaagttcgaggcttttccgcctttcattcaattttgctgggaggatgtctcactggatttgaagcttaaaagtatcaactataaagatgattgcaaatcctcagagaacagcaaattgcatttcattgtttggatttttagtggaagtaattgaattatgggacagataacaattataattacaataatataaaatttcgaccttgattttacattcgctgcaaaaaaaaaaaaaaatacaaaaaaaaaa

SEQ ID NO: 5552 - DNA, 688 bp, Glycine max
aagctgaaatgaattttggtccatgttttgatctgcggaaactcctctattctcaaaaccctaagccgacatcaccattcatccgatgagttcgagaggagcgaccgcggtgctatctcgtgccagcaggattcggtcgaagctgcaaacggcgctggaagccaccgttttggaggtggacgacgtgtcgtaccagcacgcgggccacgccgccgtgaagggtagttccgacaaagaaacccacttcaacctcaacatcgtctcccccaagttcgagggccagagccttgtcaaacgacaccgtctcatctacgacctcctcgccgacgagctccagagcggcctccacgccctctccatcgtcgccaaaactccccacgaaacaaacccttctaagtgactccttgggagtgtcaaagttcgaagcttttccgctctgagtgccgaaatctttggtcttcttttgtttggaacgtgtttgctctgtgaatggaaccctaatcatcttatgtggctgtgtggtccgtagaatgtgagatgttttacgattatttgtgatcaaattgattatgtattactttcatcctacttatttaatacgcttgtgtacttttacttattggatgtgcataacaaattcagttatcttatttcaaaactttcctggtgtccaaaaaaaaaaaaaaaa

SEQ ID NO: 5553 - DNA, 1526 bp, Glycine max
acggctgcgagaagacgacagaagggggaagatttccttcttcctattctaggtttttacgcaccacgtatccctgagaaaagagaggaaccacactctctaagccaaagcaaaagcagcagcagcagcaatggttaaagacacaaagcctttagcctatgctgccaataatggataccaacaaaagggttcttcttttgattttgatcctagcgctcctccaccgtttaagattgcagaaatcagagcttcaataccaaaacattgctgggtcaagaatccatggagatccctcagttatgttctcagggatgtgcttgtaattgctgcattggtggctgcagcaattcacttcgacaactggcttctctggctaatctattgccccattcaaggcacaatgttctgggctctctttgttcttggacatgattgtggccatggaagcttttcagatagccctttgctgaatagcctggtgggacacatcttgcattcctcaattcttgtgccataccatggatggagaattagccacagaactcaccatcaaaaccatggacacattgagaaggatgagtcatgggttccattaacagagaagatttacaagaatctagacagcatgacaagactcattagattcactgtgccatttccattgtttgtgtatccaatttatttgttttcaagaagccccggaaaggaaggctctcacttcaatccctacagcaatctgtttccacccagtgagagaaaaggaatagcaatatcaacactgtgttgggctaccatgttttctctgcttatctatctctcattcataactagtccacttctagtgctcaagctctatggaattccatattggatatttgttatgtggctggactttgtcacatacttgcatcaccatggtcaccaccagaaactgccttggtaccgcggcaaggaatggagttatttaagaggtggcctcaccactgtggatcgtgactatggttggatcaataacattcaccatgacattggcacccatgttatccaccatcttttcccccaaattcctcattatcacctcgttgaagcgacacaagcagcaaaaccagttcttggagattactaccgtgagccagaaagatctgcgccattaccatttcatctaataaagtatttaattcagagtatgagacaagaccacttcgtaagtgacactggagatgttgtttattatcagactgattctctgctcctccactcgcaacgagactgagtttcaaactttttgggttattatttattggattctagctactcaaattactttttttttaatgttatgttttttggagtttaacgttttctgaacaacttgcaaattacttgcatagagagacatggaatatttatttgaaattagtaaggtagtaataataaattttgaattgtcagtttcaaaagtataggtcttcctctcggtgcttcacctcctccattctgcaatctcactcctccagatacttgct

SEQ ID NO: 5554 - DNA, 1869 bp, Glycine max
aaaatcggcactcatgagttattattagggtttgcaacctttaaactctgaagctgcaatagcacagcacagaatggggcgcaaagagaagcagaacgcgaaggcaatagatgaggaacacgacgtagtaaattttaacggcgcttcaacgccgtccctcgttttcagcagcgacgacgatgaagccaaccaagatctcagcctcaagatcgtcgaaaaggccatgcgaatgcgcgccgccaaacacgccccaaacgacgacgtttcttctccgttttcgcagaaatccgaactcgcagtgcccctaaacgacgtcgtttcggatttgcccagcgcaatcgctgattccgaagtgacggaaaagaagaaaacggccaagttgaagagggaggcggctggggatcaaagtgttgttatagcggaggagcaagagatggaggagacaagcaatgctacagagaatcacgagtttgtggaaggaagcccggttctgataggccacaatatggttctgcgaaagctgcttcggggtccaaggtattttgatccaccggatagtagttggggagcatgtttcaattgtggtgaggatggtcatgctgctgtgaactgttcagcagcgaagcggaagaaaccatgctatgtttgtggtggtttgggacacaatgcaagacaatgcactaaggcgcaagattgctttatctgcaagaaaggtggtcaccgtgctaaagactgtctggagaagcacacaagtagatcaaaaagtgttgctatttgcttaaagtgtggaaattctgggcatgatatgttttcatgcaggaatgattattcaccagatgatctcaaggaaattcaatgttatgtctgcaagagagttggccatttatgctgtgtcaatactgatgatgcaacaccaggagaaatttcttgttacaaatgtggtcagctgggtcacactggtttggcatgttcaaggttgcgggatgagattacaagtggagccacacccagttcatgcttcaaatgtggtgaagaaggacattttgcccgggagtgcacaagttctatcaagtcagggaagaggaattgggaatcatcacacacaaaagataaaagatcccaaaaagaaaatgattacatgggaaatagatctgcatctaatgatatggttggggctcgcagaaagaaacgttcacctaccgaagaaagaggcttttcaactcccaagaaatcaaagagtagaggtggttggacggcggagtatcctaccgaagaaagaggctttacaactccaaagaaatccaaaagtagaggtggctggacaacagagcatcctactgaagaaagaggctttaccactccaaagaaatccaagaatagaggtggctggacatcagagcatcctttggaacaaaaagactacacaactcccaagaaatccaagagtagaggtggatggatgtcagagcatcctgaagaattctttcctcccatgtcctcaaggagcaatggttataggtctctagggacaccatcttctagaaacaataaaattcattcatttggtggtggaagtcacactccaagttataaatcttccaaggtatggaatgatcatgcaggaacttcaatgtctcaaggatcagccaggtcaaatcatcatagattttcagcatcaaggtttggcaactctagtagtgacggacatggtagaaattacaactggtggtagcgatcatgtatatgctgacattatgttctctatatttccttttgttaacttgtaaaacagcacctgcaagttttctaaattaatatttaatttttcctttcagatatctattcaatgatactgtcgtaattctttca

SEQ ID NO: 5555 - DNA, 1649 bp, Glycine max
tacggctgcgagaagacgacagaagggggagagcagcaacgaacaaacgcagaactgcccaatcttcaagctaacataaacaccatggaagccgtccaagtcatatccaccactacaatcaaggcaccaccgagtcacaataaccatgactcagttcagaaaatcgatttaactccctgggatcttcagttcctcccaattgaaaccattcagaaaggccttctttttcgcaacaaaaaacacacagaaaaccaaatcgagcacctccaacactccctttcatccactctcgccttctttccacccctcgcaggtcgtcttgtcattctccaacaccacgacaacactgtctcgtcccacatcgtatgcaacaacgcaggagcactctttgtccacgccgttgcagacaacaccactgtcgttgatattcttcaacccaaatacgttcctcccattgtttgctccttctttccgctcaacggagttaaaaaccacgaaggcacgtcacagccagtgttggcagtgcaagtgacggagctacttgacggcgtcttcatcgccttcacaatcaaccacgtggttgcagacggcaagtcattttggcatttcgtgaattcctgggctgaaatctcacgcggtatccctaaaatatcaaaaatcccttttttcgaacgtttctttcccgttggcattgaccgcgccatacggtttccgttcacaaaggtggaagaaaaagaagaaggagaacactcacaaaaccttgaaccaaaaactctctctgagagggtcttccatttcaccaagcgaaaaatctcggaactgaaatcaaaagccaacgcagaggccaacacggacaaaatatcttctctgcaggcggttttaactctactttggcgcactgtgagtcgttgcaaacatatggggccacaagaagaggttcattttgttcttctgattggagctagaccaaggcttattccaccactcgcagatgattatttcggaaacgcagcactggttggtcgtgctaccatgaaagcagaagaactattacagaagggtggattcggaaagggtgcttcggagataaacaaggtgatttcttcgcactctcatgagaaggtgaggagctactacgagtattgggtgagaaccccaaggcttttcacgataggtagcctcgctaagaaccccaaggcttttcacgataggtagcctcgctaacagtaactcattggccactagcagttctccaaggttcaacgtttacggcaatgattttgggtggggaaagcccctggcagtaagaagtggcggcgcaaataaaagtagcggaaaaattactctgtttgctggcgctgaaccaggttctatggacattgaagtgtgccttccttatgtgattctcgaggcaattggaaatgactctgagctcatggatgccatttccaactagcatggtttggtttatctatagttgatttcagattcatgatattgtagtattgagtaacgaataattatgtatgtcttaggcaaagttcttgtgatgttgactagtattttaatgaatgtttattttatataactaaaatttataatttataataaaaaaaaaaaaaaaaaaaaaaaaaaaaaaaaaaaaaaaa

SEQ ID NO: 5556 - DNA, 1884 bp, Glycine max
  misc_feature (309)..(309): n is a, c, g, or t
  misc_feature (322)..(326): n is a, c, g, or t
  misc_feature (1878)..(1878): n is a, c, g, or t
  misc_feature (1883)..(1883): n is a, c, g, or t
ctcgagccgattctcattgtactccaaacacctcttcaacacctcttcatccgaaaactcaacaaacaccacctccaacgacaacacacaacacaaaccaaccgactaactaacagcaaaacgcaaacactctcctcaaaacgacaaccgccacaaaacaacacaaccaccgcccctcgccgccttcatcttccctctctctctcaagggtcgatggctgaactcggaaacaacaacaacggcgccaacacgacgtcgtctaggttctccttcttcaaccgctccctcaccacgctccgcaacgaaccnccgccgcagaagnnnnngcagctggaccgtcagctacgtaggcccccccccccccccggcggcggcagcgtcgtcaagcgcctctgcagcttcttcgaatccgcaaaaccttcctctccggaaaaacaacaaaatccaaagctcaaaccctcgaaattaatcgaaaactcaaactccgattccgcgtcgaaatcgctcgattcgccggcgatccgattaccgggaaccgaggatcggatcgtgttgtacttcactagcttgcgtggaattcgaagaacctacgaagattgctacgcggtgcggatgatatttcggggatttagggtttgggttgacgagcgcgacatttcgatggacgcgaattaccgtaaggagttgatgagcgcgttgtttggagagaataacaataacaacaacaagaagggacacgtggcgcttccgcagatttttataagggggcggcacgtggggggtgctgacgtcatcaagcacatgtgggaggtgggggagctggagaaggttctggaagggttgccacggaccaaaggagggtttgtttgtgagagttgtggggatgtgaggtttgcgccgtgtgggaactgcagtgggagtaggaaggtgtttgatgaggatgaagaggtgttgaagaggtgtttggagtgcaatgagaatggcttgattcggtgtcctaattgttgctcttcttgaagtttgcaaaaaataaaaataaaacagaaaaaaaagaaataaaaaagaagaaaaatttgttgatgttttgcatgaaacttagatgcgattccttttggttctggtgttgttgtccagtcagaattggagtttaacgtgtggggtgaaggtttgcaactttgcattgaagatcaacatggattacatagtgaagctccaatttcgtgtgtttttgggtggtggtatctaatcagaattggagtttcacgtgtggggtgaaggtttgcattgaagatcaacatggattattgttgtggagcttcggtcttgtgtggattcggctctggtatctaatcagaattggttccagtatgcaatagaggtttgcattgaagatcaacgcaggttgtcagagtgaaacttcaattttgattggagaatgacattgaaagcatgtgaggaactgtgtgtaggtttttgtgggggttgtttttgcatatataggatgggcccaagtttaggtggggttatgtgatttaaaggtgtttggatggaatgagtttggttaaaggttacccggtgattcaaaacaccccctgaattttttttattggggggtttttccggggtgttttatttgggttaggagcggatggtttcttttttcagctccttgaactgcattttgttcaaaagggtgatttttattttccccccaaaaaaaataccccatgggtttgagtatgataatggccgttgtagttcattcccaaaaccgaggagtgtttcttctcgaaacaatgtaaatatttagtgttattatcaaagcggatttgcaaatattgtccctttaaaaaaaaaaaaaaaaaaaaaaaaaaaaancctcnc

SEQ ID NO: 5557 - DNA, 1329 bp, Glycine max
tcgagtcagctacgtaggccccccccccgtatcacaacacaagttgaaaacacaaaagaaaaaaaatgggttcttctctgtggacctgtctgattttgttatcacttgcttctgcttccttcgccgccaacccaagagcaccaattgatgtgccatttggcagaaactatgtgcctacctgggcctttgatcacatcaaatacctcaatggtggttctgagattcagcttcatcttgataaatacacaggtactggcttccaatcaaaagggtcctacttgtttggtcacttcagcatgtacataaaattggttgctggtgattcagctggcacagtcactgctttctatttatcatccacaaactcagaacatgatgaaatagactttgagttcttgggaaacagaaccgggcaaccttatattttgcaaacaaatgtgttcaccggtggcaagggtgacagagaacaaagaatctacctctggtttgaccctacaagagaatatcacagatactcagtgctatggaacatgtaccagattgttttctatgtggatgactacccaataagggtgttcaagaacagcaatgacttgggagtgaagttcccatttaaccaaccaatgaagatatacaacagtttgtggaatgctgatgactgggccacaaggggtggtttggagaaaacagattggtccaaagcccccttcatagcctcctacaagggcttccacattgatggttgtgaggcctcagtgaatgccaagttctgtgacacacaaggcaagaggtggtgggatcaacctgagtttcgtgatcttgatgctgctcagtggcaaaaactctcctgggttcgccagaaatacaccatctacaactactgtgctgaccgcaaacgctaccctcaagtctctccagagtgtgctagagaccgtgatatttaatttgaataacgtgatattaatgcgaagtatctatcagttttactgagtattatcacctctcagccatagaacctaccaagacatataatttaatataagcttccatctcctatttttattaccactaccataaagttcccatctacttaatttcatgaaggccgcacctaagtgctgatacaaaattcaatttggggttattgcttgtattgttgataatttatgtcatcatctattgctgttgttatggtatgtataccagtttgaggtatgtaacaaaagatatggcaatgtgccttaatttgtatctgtaatactatctcattctcaatcaaaatataccactgttacactagcaaaaaaaaagaaaaaaaaaaaaaaaaaa

SEQ ID NO: 5558 - DNA, 1367 bp, Glycine max
tcagctacgtaggcccccccaaaaaacaaaaagtttgaaaaaacgtcttatatctttctcttcttctccgtggagaatgcatctctgtggcctggtttcttgttaaccaggtcctcaccagcttttaaatacttaaatttcaatcaatcccaattttctcacattccctttttgccctttctatctctctcgtctttctcccacaatgaacgatcttctaacggaatcatttgaaattccacgtggccaaggtcacggaggtggtggtgacattgagttaggagaatatgcaaggaattcaggagacctgggcttggatagtttcttcaagaaggttcaagagcttgataaacaatatgctaagctggataagcttttgaaaaagctccaggatgcccatgaggaatccaaagctgtgaccaaagctccttccatgaaggctataaagcagagaatggagaaagatgttgatgaagttaagaaaactgcacattacttaaagaccaaaattgaagaactggacaaagagaatttggcaaacaggcagaagcctgggtgtggaaaaggatcaggtgttgaccggtcaagaacagcgacaaccatttctttaaaaaagaaactgaaagataaaatggctgaatttcagaccctgagagaggccatccatcaagagtatcgcgaggtggttgagagacgcgtttttacagttacgggcacaagagctgatgaggagacaattgacagattaattgaaactggagatagtgaacaaattttccagaaggctattcaggaacaaggacgaggccagataatggacaccttggctgaaatacaagagcgacatgaagcagttagagatgttgagagaaaacttcttgatttacaacagatatttctggatattgcggtgttagtcgacgctcaaggagacatgcttgacaacatagaaacacaggtttcaagtgcagtggatcacgtgcagcaaggcaacaatgccctccagaaggcaaagaaactacaaaggaactctagaaaatggatgtgcattgcaatcatgatacttctcatcgttgttataatcattgttgttgctgtcatcaaaccatgggttaccaaaaagggtgcatagtatcctatcacttatacctcatgattctttttcctgatccattcttttatttccgcatgttttaagaacattctttccgtgttgtttgcacctgaaagaaacattggaccaacaaatattgaattgagttgtatactattgttacataaaagaaaatgtattgattactatctccaacacttctgaaagaaaacaaattacttttatttgaaaaaaaaaaaaaaaaaaggatcca

SEQ ID NO: 5559 - DNA, 2695 bp, Glycine max
ttttctagagtaaactcacaagtgaatgcaactattattaactttccaaggttaaaaaggcctgcactctgcatgacatttatatatgcggagagcacagcaaaatgccccactgatcacaaaaatatccattaaatttgatgaaaatacagtaaaaataaaaggactaattaatacaagaaaacaaattgataatcatagagcagttctgagttctacaagcaaattttaagcagaaatgctgctcagtcagagaagagacctatatgagagttgatcataaggaggacacgttcccgtgtttctcagtttctccataataattatgaatgaacgacaccaatcttcttagcaaaatcatccccatcttcttcttccatgtaatcttcctcttgattttcaccctcttcaccttgttcatactcatagtatccctcttcaccttgttcatactcatagtccgcatctctctgatcatcaccttcataatactgatcctcacccgattcattgtacactattccctcctcatattcaccatcattgtctcctccagctgcatcagtgacctcaagcttggattcttcattatttagcagaagattcttgtcatcttccttggtctcagacagcactccattttgtgtgtttgcaacagacataggatccgagccatgggtaacttctacattcttattgtcagatgatttgccattcccagagtctgaatcagctccagctcctctcttctccttcagaatttcactaagaggttttggaccttcaaacagaaaatcatcgtcagattgtgggtgatcgtcccttaaacttcttctccttcccagtgattgttgctccctattctcggtgttcctcccatttttaagttcagaaagactttttggcgcagcaaaatcactcctatcacccggtagttctctccccatcaatcgatccttggagtttctcctctcatcatcttgcaatcttcctcttattctgtcatggacccttccctctccaggtgacaaatggtgagtggccggcaaccttccagatgacaatctgttcctaaatcttcccctgtcttccctctctaggtgatcagcaccaccatttgctggaagttttattctacctcggaagcggttaccgaggaagctctcattcagaggtaactcaagtgaatccttccgagagaagggccgacgactttgttcctcaccatggccctcatgggcataatcatgaccgacaacaaacttcaaaccattgcccttcctgcgcttggataaatgatgtcgtagatctgagacctcagcattttcaggactgtcagatctgcgacgagtcctcctgcctaaatgggatgagggcttcctatgctgctcccaagcatatggctcctgcatgtgatcatatgactcataaccttgaggcccacggaatctttctcgatcaatatcagctgctaaactataatcaccagaatgtcctaaatcatattcattcaaagagtctaagttcctttcatcttgacctcttgctttaccgaattcatcttccccatggtagtaatcagaattcctaagttcatcagctacaagaacatcaaacccaggagatgattctctgagaaactcatcactgtccttgccactctggaaattgtgatcatctggcacacgagcttgatgcagacggtttggccgggctacagtagggccattggtcactggtggagaggttgtcttaaatctagaaacctcattatcaaatcccacagctggtggtggcactttcttctcccattcaaacatatttctttgaggagcagtttcaatttttgaggcaggtttggcttcagaaattccacttgactttgcaacatttccttgggaagttttcctttcctgagtatacttttcattgctgacaaaaggcttcttaaaacatggattctcaactccttggctagtcactggaacctgagcagctactttattacccgtgctagaagtaggagtgggtggtccatgcaagaaggcacatctgtcaccttttaagcaaagtcctttttggaagaaaaagcaaggtacagcttgtttactggaattatacggtgcatgtgctgcagatgctgttggaatctgtgatgggggtacagatggtccaccagccgctgttgcctgtgttcctaacaagccatcaagaggcggatgtcgaaatggacatttgggattcaagcaattgccactcaaccaataccgacagtccctaggattaacacgtgcatactcactatggcggtactcacattcatttccctttttgcatgtcaaaggagatgcaaggaagtagacacaatcggtgttcctcttcaaggcctcatcttgcgaagagggtggtgtgggctggacctgaagctgtggctgtggctgttgttgggtaaccatagctgttgttgttgttgaagttgaagctgaagaccccaacccaacccaatgaaaagaagaagaaggaaaagatcaaatcagagaaaaaggagaaggagaagagggtggatccaaatctcaatctcaatctcagaagagaaaaataagtagagagagagccgccacagaaattggggtcagagcttagagagagaaagagagagtgtgtggggggggggggccttacgtagctgactcga

SEQ ID NO: 5560 - DNA, 1222 bp, Glycine max
tagcgattagacgacaaaagggggcacaacatcttcagcctttccctcgttgaaagaaatgggttcttctttgaggactttgtgtctaattttggcttcactagcctcttctgcattctgtgcctttccacggaggccagtggatgttccattcggcagaaactacgttcccacttgggcttttgatcacatcaaatacttcaatggaggttctgagattcaacttcatcttgacaagtacactggtactggcttccaggccaaagggtcatacttgtttggtcacttcagcatgaacataaagatggttcctggcgattcagctggcacagtcactgctttttatttatcttctcaaaatgcggagcacgatgagatagattttgggttcttggggaacagaacaggacaaccttaggctcgagaaacaaatgtgttcaccggaggcaagggtgacagagagcaaagaatctttctctggtttgatccaacaaaagcataccacagatactctgtgctgtggaacatgtatcaaattgtgttcctagtggataacatcccaataagggtgttcaaaaacctaaagggcttgggagtgaagttcccctttgaccaacccatgaaggtgtacaacagcttgtggaatgctgatgactgggccacaaggggtggtttggagaaaacagattggtccaaagcacccttcatagcagaatacaaagggttccacgttgatgggtgtgaagcttcagtgaatgcaaagttctgtgctacacaaggcaagaggtggtgggatcaagcacagtatcatgatcttgatgcttctcaatggagatggctcaggtgggtgcgcaggaaatacaccatctacaactactgcactgacagaagccgctaccctcagcttccacctgaatgtagaagaaaccgtgacatttaaattcacatgtagtactatgtttatggttgctaccataagtttcttattgtattattgattcatcatttaccatatactttattcctaccattatttattatcattgtattgtttgagctgtgtaattgatgagtgaggtttgaatacagagcagagcctctataataaaattatatatgttgtgtaattctactttactcattcttaatcttagccttggcaaaaaaaaaaaaaaaaaaaaaaaaaaaaaaaaaaaaaaaaaaaaaaaaaaaaaaaaaaact

SEQ ID NO: 5561 - DNA, 1731 bp, Glycine max
ttttaataggaaaataccagtctaactgatactcagctacgtaggccccccccccccgagatacgaaaaatgtaagaagaatctgagaagcttgttgctcaaaaattcaaaggggaatgaatgctttttctcacaaccttgatcattccattactgtttccccttaaccccaaatagatagatataaaacccaagaagaatttcgtttcggggatacaatgattgggcgcagagacagagagggacccttgatgaggaacaacagtactaactctcttcgcaaatcacgggtcctaaccgcagttgcaattggtgtccttgttggatgcgtcttcgctttcttgttccccaatggcttcttcgtttctgactctgctgccactaatcatcatctccctctcgcgggatctaagacccaggaaaattcagctggatgtgaatccacggatcgggtcaacatgttgaaatcagagtttgtggcggtatcagagaaaaatgctgagcttaaaaaacaggtgagggaattgactgaaaggcttcggcttgcagagcaagggaaagaccaggctcaaaagcagttccttacattaggaaaacaacctaaagctggaccttttggtactgtaaagggattaagaaccaaccctactgttgttcctgatgaatctgtaaatccaagattggcaaagatattagagaaagttgcagtcaaacgagagcttatagtttgtcttgcaaacaccaatgtgaaggagatgctggaggtctggttcaccaatatcaagagagttggcataaccaattatctagttgctgctttagacgatgagactgcaaagttttgtgaatcaaatcaagtcccagtgtataaaagagatccagatgatggtgttgatatcattggaagaacagggagcaaccatgctgtctctggtcttaaatttcgtattctaagagaatttttgcagttgggatatagcgttcttctatcagatgttgatattgtacatttgcagaatccttttgatcatctacaccgtgattcagacgtggagtccatgagtgatggtcatgataacatgacagcttatggctataatgatgtgtttgatgagcctacaatgggttgggctcgatatgctcatacaatgaggatatgggtttataactctggattcttctatatcagaccaacaatcccttcaattgagcttttggaccgcgtggcaacacgactttcaaaggagaaagcatgggaccaggcggttttcaatgaggaactgttttacccctcatttcctggttatgatgggcttcatgctgccagaagaactatggatatgtatctcttcatgaatagcaaggttctgttcaagacagtgaggaatgatgctaacctaagcaaattgaagccagtaattattcatgtgaattaccaacctgataagcttccccgaatgaaagcaattgttgaatactatgttaatgggaagcaagatgctctcaaacctttccctgatggctcagattggtaaccttgcttctgcagctgagggtatattttcttggttagaacagttttacagtagattggtaaccttgcttcttgttgaatactatgtcaattgtttagaacagttttacagtagattttattagttacaaagcatatgtgcaggtaaaaaaagatatcattttatgagcacattgattcaaaaaaaaaaaaaaaaa

SEQ ID NO: 5562 - DNA, 1022 bp, Glycine max
acccctctagcttcaacatttcaagcatttgatttgcaaattgcaaatccctccaccttttcaaaatcttttgtgatcttttccaatggccaccttcatcttaaggtctaacaaagcagtgcatgcctttggttggctttgtctgctactgatggttcataagggtgcttcctatgattttgttgttggtggccaaaagggttggagtgttccaaatgaccccagtttcaatcccttcaatcaatgggcagaaaaaagccgttttcaaattggagactcccttgtgttcaactaccaatctggccaagactcagtgctctatgtaaagagtgaagactatgccagctgcaacattgattcaccttatgcaaaatactctgatggccacacagtctacaagctaaaccaatcaggccctcacttcttcataagtggcaacaaagacaactgcaacaagaatgagaagttgacagtgattgtgctagctgacaggaacaaaaacaccaaccaaacaaccactgcttctccaccatcaccacaaacatcatcatctccttcagcagcacctactggccaagatcagggtcagtctccaacttcagacacaaaccaaacaccaagccctgtcagtgagccaccccctcccaatgctgctgcttcagcctttgtctcccttgctggctctgttggagcattcatggcctcagtgctagttttatctctctaagtatgcatgcataagtggttgagtattgatttcattttttttttcatacaattttttttctttaattatcttttttctgttctttgtttcctatactgagtttggaactatatattggactgtcttcggttcaaaagtgggatgatgtttgatatttgtttgtgaagattgaataataagctgacaataatttacccttttgtgtgcttctttcttactccatgatgtaaaaatgttgttcataatgaaatgaaataaaactaattttttatttgattcactgaaaaaaaaaaaa

SEQ ID NO: 5563 - DNA, 1826 bp, Glycine max
attgttattcggctccctatagggggacgtgggggccccggccccccccgagtcaagttcgtagggcccccccccccccccccccaaatgactgagtgaaacgacttccctagccggcgttcaatcaggtagaacaggaagcgtctgtgtccgttgattttccctcttcttcttcttcttgcacgaaacactcaccaaattgcgcattcgcagcgatggattattcagactacagctaccaacagcaaccgcaacaacattcctatggctacgacccttctcagatcccaatccaaccctacgatcaatcctatgctgcgtaccaacaatactacgcttacaatccccaatacgcgtattaccccaacgcacaccaaacccagtttcagttccaacccgaaaccgctccgcttcaccctcccggcgtcaatcccgccgctctggaacccaccccgactgggccatctcaatacagaggtaggggtggcaggggtggtagaccatttagaggggctggtcgtggtcgaggccatggtaggggacatggaatggggggtggtagacacataccatctcattcttctggacctgctttttctaatgtgccagctcgagtgcaaccaccagtaccaccacgtaaagtgtgctgtgaaatttgtaaggttgagtgcaatagtccagaaatcttggagcaacataaggttgggaggaaacatcagaagaatatgagggtgcatgaagaatcacaaaggcgcaatgctataaatggacaacaaagtgagaaaattcctacctctcaattgaacttaacagaccaacctaaggaagttcaggagtccgagaaaaatgaatgccccacagaaaatatgggctcgggggttataatcaatagtcacaaggaggaaatgcagctgcagaataatgtaggaaacatttctgaggttccagctgaagtgcccgagggaaaaaccgaggataactctgctgcaagaggccaaggattgaagcggaagaagaaaggaggaaaaggaggtaaatacatgagaactaatgatggttctaagccagtggaacctgcacaaactatgtcttttagatgtgagctgtgtgatgttaaatgtgagtcacaagttgtttaccagagtcatgtggctgggaaaaaacacctatcaaaactaaggcgtgcttcatctggagtaggccagcaccagcagcaagctctgtctggggcactcttagggcttcaagcaatttacccacctgacatcaatgctctgtctaatgcaataaatgttcaagtccaacaaggtgataatgatccgcaggtacttttggctcagctcctaatgaccgtactatctcaagcacaggttccagcaacggcaccagtgacaggtggcgtggtcgctcagataccagtacccacatccatggctggaccaagttatgaaccccagttgttgcagacaaatccttctggggaaacaaaaactgagctgccaggttcaagtgtcggcacccaaattgaaggtggaggttctgaaactaaacaacaggtgtgaagtttcagatagtgctggtggtgctgacatctgcagccaattaaccttcagaatatgaagctcccaccagttggtagggccaaagaagatttaattactctctctctttagtttttttttcacttttttaggcccgaagggttgttcattatatctgttggtattttcttttgtcagagggagatttgaatactgtaggatttgctcatatgaatgttagaatgtgtcagaaacgctttatgttagaaaaaaaaaaaaaaaaaa

SEQ ID NO: 5564 - DNA, 1007 bp, Glycine max
acgagaggagggcggatttgctggagttcctcctacagtcatggtcaaatgccttgataaagcctcgcgtccgattgaagattatcagaatgattcagctaatgttaaaataggatctcttcagatgtttatgaggaatattggaagttgtgaagacatgggccctagtgcttttccagtggaagaggtacacaagatctctgtgctggatatcaggttggtaaatgcagataggcatgcagggaacattttgattgccagggatggtgaagacggtcaaactatcctcattccaattgatcatggctattgcttgcctgagagttttgaagactgcacttttgactggttatactggccacaagctaaggagccttactctcctgacaccattgattacataaaatctctggatgctgaagaagatataaagcttttgaagtttcatggatgggaccttcctcctaaatgtgcccagatccttcgtatatcaaccatgcttcttctgaaaggtgcagagagaggactcactcctttcgccttaggaagcatcatgtgtagagaaacactgaagaaaaaatctgtcattgagcagattgttgaggaagcagaggaagcggcatttcctggagcaagtgaagctgcatttcttgatctggtttcagtggtcatggatagtcatttggatgagctattcccgtgactgaatatacataattcacatacttattactactattttgataatacagtgataaagtggtcgtgcttgtttcgtcttcaaagaggatccatcaaactcgtttagtagactgtggttaaaacttctgtattgaccaatcaagcatttgatgcttgtattgcaaatatcgacttctcttatatatatatctcttataacatggaaatatattgaccaggaatgtttatggagtcctgtgcaatattattcctcttatgttctttggtgaatataaaattgtttgaataaagttgtccttttcata

SEQ ID NO: 5565 - DNA, 1030 bp, Glycine max
  misc_feature (1)..(1): n is a, c, g, or t
naggggttccacaacagattttccccacaccaagccttttaaaccacctcccaagtaaatggcaggaattgcaatacggctcccatagggcgaaattgggaccggggccccccccgagtcagctacgttggcccccccccccctcttactcaagcatgcatgcaacatgcatataaaagacatgaatggtaacactgcaatatgggatgctatagcatcaaaacattactccatattccggatcctcttccagctttctgctgtctctgatcctaacacagcgggcgatctcctgtgtacagcagcaaaaagaaatgaactaacagtgttgaccgatcttctaaagcaaggactaaacgttgactccaaagatcaccatgatacaactgcaatccaaattgccatggcagaaaatcatgtggacatggttcatttgcttgtcatgaatggtgcagatgtctctgatgtgcataaccatgaattttgttcatccaccttagatgaaatgctgcagaagcgtgaaattgggcatctaattaatgtaactgaggtcatgcgcagtggagttgtattaaaggggaaacatcaagaacaggagctcaatggaggaagatctaatggactaaagtttccaagggtaagcatatatagaggtcaccctgtagttagaagagaaaaaggttcggtggaagctgggaagctaataaggttgcctgattcattagaggaactcaaaactattgcaggtgaaaaatttgggtttgatgcaaaagatgcaatggtgacaaatgaagaaggagcagaaatagattccattgatgtgatcagagataatgacaaacttttttttgttgaataatctgagatgcgaaaatgtcaagtgtaaatatataatctcgcacaacagaattacttacaagtttcttttgtgttagtaattttgtcttcttcctgtagccataaagaagtggcttgattggaaacatttttcaaaaaaaaaaaaaaaaaaaaaaacctgttttttacttcc

SEQ ID NO: 5566 - DNA, 1899 bp, Glycine max
tcagctacgtaggccccccccccagaaaaaaaaaaagaaggaaaaaggggctagacggcatgttggactgatttgaccttgaagaaggggtcattcatatgatcccgtgtttgtttgggtctttcttcattcttcaaccaacccattccttcccccacgcgccattctccggccaccgtcgacgacggaacgccgttcaccgcttcatattctcccaaaggcttcggcgaccgcccgtgatggataaagtcttcaacaagctccgcaatttggacgcttacccaaaagtcaatgaagatttttacaaccgcacgctcgccggcggcgttgtcaccgtcgtttccgccgccgtcatgctctttctcttcttttccgagctaagtttatacctctacacagttacggagagtaagcttttggtggatacttcaaggggagataccttgcacatcaattttgatgtcacttttcctgctgttcgatgttcaatactcagcttagatgcaatggatattagtggcgagcagcatcttgacatacgacataatatagtgaagaaaagaattgatgctaatggtaatgtgatagaagagaggaaggatggaattggtgcaccaaagattgagagacccttacagaaacatggtggcagacttggacatgatgaaaagtattgtggttcatgttttggtgcagaagagtcagatgaacactgttgtaattcttgtgaagaagtgcgtgaagcatataggaaaaagggctgggcaatgacaaatatggatttgattgatcagtgtcaaagagagggttatgtgcaaagggtaaaggatgaagaaggtgaaggatgcaatcttcaaggatctcttgaagttaataaagtagcaggaaattttcattttgcaactgggaaaagctttcttcagtctgctatatttctggctgatctgcttgctctacaggataatcattataatattagccatcggatcaacaaattaagttttggtcaccatttccctggattggtaaatcctcttgacggggtaaggtgggtgcaaggacctgctcatggcatgtaccagtatttcataaaggtggtccctacaatatacacagacattagaggccgtgttatccattcaaatcagtattctgtgactgagcatttcaagagttcagagctgggtgttgcagttcctggagttttcttcttttatgacatatctccaatcaaggtcaactttaaagaggaacatattccatttttacatttcctgaccaatatttgtgcaattattggaggtgtatttactgttgcgggaataatagattcatcgatatattatggtcagagaacaatcaagaggaagatggagcttggaaaatttacatgatgtggtcaaattctgcatgagtgctctaatatcctaattgatttgacgtatttggttggctggtgcattgagtatcgtttataatgtggtagcatatgcacataatgccaagggtaagcagagccgtaggttcggttgatgcatgaagtgtattttttggatcatgatttttcctttaatgtgtagcaatttctattaagttgctactttggtgggtttttaatatatggatgaagatgaggaatgcaaagagttgttgggaactttttagatatttttgctgcataatacatgacatggttgattatgcataacatacagttcttgtgttgctgttccccgtgctgtaatctagccaatgttttcattgaacttgaaaaatttgaagctgctaagttaggatttaaatattttgtcacgtttcctatatgcttagttaatgttcacaattcaagggcaacaattttgtttgatatgatgagaaatgtttcagtatttttcgttt

SEQ ID NO: 5567 - DNA, 1255 bp, Glycine max
tcagctacgtaggccccccccccatgttgcaacagagagacagaaaaaggactcacaatcacgaaggagaagaaacccaataagtgattctcatttttatggctcttgccctgaagtcaagttgcttcttgcaattgaagaaacctgaggctggtttcaatgtttgtttttcatctaagaaagctataatctccgtgaaacgacacactcccgtggctgctatcaggaccatggaagcagtgggactctctgcaacattcaccaggttgaaaaaagaaggaaaagtagctttcatcccgtatgtcactgctggtgatcctgacctttcaaccacagcagaagcactgaaagtgcttgattcatgtgggtctgacataattgagctaggtgttccatactctgatcctttggcagatggtcctgttatccaggctgctgctacaagatctttagcaaaggggaccaatttgaatgcgattattgatatgttgaaggaggttgttccgcaactgtcatgtccaattgcactgtttacatattacaatccaatactgaagcgtggtactgataaatttatgtccactataagagacagtggtgtacatgggcttgtagtcccagatgtccctctggaggagacggaaactttaaggacagaagctaagaaacatggaattgaactggtactcctcacaacacccacaactccaacaaaccgaatgagagccattgttgatgtggcagaaggatttgtgtatcttgtgagctcagtgggggtcactggagcccgagcatcagttagtggttctgttcagtctcttttgaaggaaattaaagaggcaactactaaacctgtggcagttggttttggaatatcaaaacctgagcatgtgaaacaggtagtgggatggggagctgatggtgtgattgttggcagtgctatagtgaaggtgcttggtgaggccaaatctcctcaagagggattgaaagaacttgaagttttcacccgctccttaaaagcggcacttccttaaaaaatatgttttaagagctcgaacttcatgtagttgttgtcgtcatcgtagatattggattcaataaaatgcggttcagttgtttttcttctgttcatgatatagtagttttgacatttttatttccttttcaattatgattggatttcttagttactgaaataaatgtcccatatgaatttcatctcctaaaaaaaaaaaaaaaaaaaaaaaaaaaaaaa

SEQ ID NO: 5568 - DNA, 808 bp, Glycine max
ccacgcgtccgcgtgcatgtcccaccacacagcagcaccctctgcaacctcctttatttcacctccgggggcccccccccccccgtctctcacacacacaaaaaaaaagctgttcaaacttcaaaatagaaccctcgctctccctttgttgtatgagagagagagagagagaacgttttgttttgctttacaaaactctctctcatggctctcctaacttccttgcctgaacagttctccagtacccccaaacgccacaaacgtaagccacaacaacaacaacagaaacaaaagcaaaagcaaaaacagaaacagaaaccagcctcttcatgggaccaaatcaagaacctcttaacctgcaaacagatggaagagtcgagagtgcacgacccttcgaaaataactgggtactcgaagctagggtcttcttgcagctccatatgcagcttcagagatgtggttcatgggaacacacgtgttgtgcataggtctgataactcctcaccagagagtagttctctgggtcaggaaactaatgggttactcactaggaaacctgtcactactactactactcgttccgcaaaatcaaacggcggagcaacctgcacgtcatcatcatcatcttccagaggcatgcaattcaggaagctttctgggtgttatgaatgtcacatgatcattgaccctagcaggttaccaattgcgaggagcactgtgtgggcttgctctcactgtgggggaggtcttccctaaaatggaaaggttggagcttcatcaagctggtcgtcatgccgtttcggagcta

SEQ ID NO: 5569 - DNA, 1174 bp, Glycine max
ccacgcgtccgcggaaatctatcactagccttgaagaggcctgaagggatgttacatgaaaagggtactagcacgcacttgaatctaaacgcgatcgggctcctgggtgcatctgacccttatgtgaagctaaagcttactgaggataaattgccatcgaaaaagactactgtgaagcacaagaacttaaatcctgaatggaatgaagaattcaatatggttgttaaagatccagactcccaggttttagagattaatgtttatgactgggagcaggttgggaagcgtgacaagatgggtatgaatgtgatccctttaaaagaagtttcccctgaagagactaaacgtttttctcttgacctcctaaaaaatatggatcctaatgatgtccaaaatgagaagtcacgagggcagattgttgtggaattgacttataaacccttcaaggaggaggatttgggcaaggggtttgaggagacacagacagtaccgaaagctcctgaaggtactccagctggtggaggtttgcttgtagttatagtccatgaagctcaagacgttgaaggaaagtatcacactaatccacatgtacgtcttattttcagaggggaggagaaaaaaactaagcgcattaaaaagaacagagatccaagatgggaagatgagttccaatttatggtggaggagcctcccaccaatgatagattgcatgtggaggttgtcagtacttcatcaagaaacctgctccaccaaaaggaaccattgggttatatcgacatcaatcttggggatgttgttgccaacaaaagaatcaatgagaagtaccatcttatagactccaagaatggtcgcctccagatagagttgcagtggagaaccttggaagcatgatgattaaattctccatagatttgtacttctgtttctttctccccttctttcctttttaaaaatttgttttccatgcagtgtaaggaaaaggtgagaagggtatttcatgtgttcctgggatatatattggttttatttgtcaatcatgtacatgtttgagataaaaaggtttgaaatagcaaaagcatagatatgatttggtttggattatatacatttaccttaattggtatcattgaagaacgacctatatgatgcgtatccagctttcagcttgacccat

SEQ ID NO: 5570 - DNA, 1368 bp, Glycine max
tcagctacgtaggcccccccccccgctttccttgctttgcgtccgctcgcgggcaaagcacggaaaagccacatgttgactttgggctaaagctcataggggctgatcttatgtctattccgggagtctacaggattgttcaggagcttatcaaagatcaggttgcaaacatgtatctatggcccaaaaccttggaagttcaagtgttagatatgtcaaaagccttgaagaggcctgttggtattttacatgtaaaggttctgcaagcaattaagttaaagaagaaagatcttcttggtgcatctgacccttatgtgaagctaaagcttactgaggataaattgccatcgaaaaagactactgtgaagcacaagaacttaaatcctgaatggaatgaagaattcaatatggttgttaaagatccagactcccaggttttagagattaatgtttatgactgggagcaggttgggaagcatgacaagatgggtatgaatgtgatccctttaaaagaagtttcccctgaagagactaaacgtttttctcttgacctcctaaaaaatatggatcctaatgatgtccaaaatgagaagtcacgagggcagattgttgtggaattgacttataaacccttcaaggaggaggatttgggcaaggggtttgaagagacacagacagtaccaaaagctcctgaaggtactccagctggtggaggtttgcttgtagttatagtccatgaagctcaagacgttgaaggaaagtatcacactaatccacatgtacgccttattttcagaggggatgagaaaaaaaccaagcgcattaaaaagaacagagatccaagatgggaagatgagttccagtttatggtggacgagcctcccaccaatgatagattacatgtggaggttgtcagcacttcatcacgaaacctgctccaccaaaaggaatcattgggttatatcgacatcaatcttggggatgttgttgccaacaaaagaatcaatgagaagtaccatcttatagactccaagaatggtcgcctccagatagagttgcagtggagaacctcggaagcatgatgattaaattctccatagatttgtacttctgtttcctttctccccgtctttccttttttaaagattgttttctatgcagtgcaaggaaaatgtgagaaaagggtatttcttgtgctcttgtgaaatatattgattttatttgtcaatcatgtacatgtttgagataaaaaggtctgaaatagcaaaagcatagatatgatttggttttgattatatacatttaccttacttggtatcattatagacgacctaaaaaaaaaaaaaaaaaaaaaaaaaaaaaaaaaat

SEQ ID NO: 5571 - DNA, 1225 bp, Glycine max
aattcggctcgagtcgccgttcaattgcttcgtctttggtcttcgaccgtttcaataacctgcccccacctcagctataaggacaaaatctctaacgattttttttccttactttaaaataattgatctattgcgataaaccgagtagaggaataatggtgtagtagtagtggagagaaatcgcgatctggaacagagtttagctgaaagaaaaagaatcgagttgaaatgggtttctttggtaccattttggggtttttgggatttggggttgggatttcgattggtctcgtggctggctactttctcttcatctacttccaacccaccaatgttgaggatcctgaaatcaagccattggcggagcaagagcaagagactctgcaacgaatgtttcccgagattcctctttggataaaaaatcccgattttgatcggcttgactggctgaacaagtttgtagaatatatgtggccgtatcttgacaaggcaatttgcaagactgcgaagaacattgcaaaacctataattgctgagcagattcctaaatacaaaattgattccgttgagtttgaaacactcacactggggtcactgcctccaacatttcaaggaatgaaagtttatgtgactgatgagaaggagttaattatggagccttctgtaaaatgggctgcaaatcctaatgtcactgtttctgttaaggcatttgggttgaaagcaactgtgcaggttgtggatttacaagttttcctcttgcctcgcattactttgaagcctttggttcctagctttccgtgctttgccaacatatacgtctctctcatggaaaagccacatgttgactttgggctaaagctcataggggctgatcttatgtctattccgggagtctacaggattgttcaggagcttatcaaagatcaggttgcaaacatgtatctatggcccaaaaccttggaagttcaagtgttagatatgtcaaaagccttgaagaggcctgttggaattttacatgtaaaggttctgcaagcaatgaagttaaagaagaaagatcttcttggtgcatctgacccttatgtgaagctaaagcttactgaggataaattgccatcaaaaaagactactgtgaagcacaataacttaaatcctgaatggaatgaagaattcaatatggttgtgaaagatccagactcccaggttttagagattaatgtttatgact

SEQ ID NO: 5572 - DNA, 919 bp, Glycine max
  misc_feature (25)..(25): n is a, c, g, or t
  misc_feature (36)..(36): n is a, c, g, or t
  misc_feature (43)..(44): n is a, c, g, or t
attgtaattggtctccatatagggngaattgggtancgggcanncccctcgcgtgtccgctgcgggcgcccccccctcctcttgatactcaatcctatgtcagcactggtgttaaaggcacttttgggtatcttgatcctgagtatttcaggtcacaacagctgacagaaaaatctgatgtatattcatttggggtggttcttttggaagtgttgtgtgcaagagcagtgattgacccatcacttccaagagaccagataaacttggctgagtggggaatgctttgcaaaaacaaggagatactccaagaaataattgatccttccatcaaggaccaaatagatcaaaactcactcaggaaatttagtgacacggtagagaaatgcttgcaagaagatggttctgataggccaagcatgggtgatgtgttgtgggacttggagtatgcgctgcagcttcagagaggtgcaaatgcaatacaaagagagccttacgaggatagttctagtagtgtttctgcatcacttcaattgcccaatgttaggcgccttccttcactctccacactaagtgaagcagatgactccattgtgatgggtgatgagtccgatagtgctgtggattctgttttctcccagttgaaaattgatgatgccaggtagagtatcgagcacttcaaggcacagtcatctattctgaaatgcattgagaagctgctagctgcttgtatgataccgtgcttagctttttcatccttgtttttgtctcttttttttcctagtttttgttgtctgtctattctggttgaaaaacagttatgaaggcaattgtaaaaccatttatgattaatcatttcctattcttgcaatagattttttataatagttccattacatacaaaaaaaaaaaaaaaaaagaa

SEQ ID NO: 5573 - DNA, 1850 bp, Glycine max
caaaagcaagagcctatagttgacggcgttggttggggttctaagattgttttgtttgagttaaacgcgacaaactcaaatacgtgtgcattacaactcctaacccctcaccatcctcttcttctctctcattcatacccctccttttttatttgtattctcagctttgttagattccgtttctggtttttcccaattccatagtactctgttatcgtcgtcatcccttttataggacagacaaagctgattcacttaggagcctcgagagctatgtctacatcttctcgtgttcttcccactccattggaaaacaagtatatgaaacccccagattcttttcagctttcgccagtcagagatctgactgcaaattcagcctcatccagcacgtaggcccccccccggaagatgttttcttcaccttctaaatgtcccgatgacttccctttttcctctgtttcacagcatgataggcaatatcaagatcccccctttgtttctcagacaattggtgatagcgtgtcttccgaaatacattcaatgacattcatttctcaccctcaagaaaatgaagatctttcctggggaccagatccatgtcaggatattcttggctttcctgaaaatgtttctgtccagcatgatcaggtggaaaacaatggttgttacataaatgatgataatgtcaaaagatctgattttggggagtgggttgatcagttaatgtcaattgatgattctcttcacccgagctggagtcagcttcttgctgatgacaatgtagcagaaccaaaaccaaaggcatctcaggttcctccgcagcagcatataccatctggagaagttgttggtaattcagcatcaactgcatcgcagactaaggctagaatgcgttggactccagaacttcacgaggcctttgtggaagcagttaatcaccttggtggtagtgagaaggctactccaaagggtgtgttgaatcaaatgaaagttgaaggtctaactatctatcatgtaaaaagccacttgcagaagtatagaactgccagatacaaaccagagccatcagaaggaacgtctgagaaaaaggtgactccaatggaagaaatgaaatctctagacttgaaaacgagtaaggggatcactgaagcattacgtttacagatggaactccagaagcgacttcacgaacaacttgagatccaaagaaagttgcagattcaaattgaagaccaagggaaacgtcttcagatgatgtttgagaaacagagagagatgggtgacagcaaggttaacgtctccttggacgagccttctgctgcagcaccatcagacacagtagaaaccacaaatgaggaacgccacaaatttgaaagcattccaaaagccatacccgaagagaaggagtcaagcacaacaaaacaaattgcaggtgaagctgaagaaatgatcaaggaagatgaagttgcaccacccacaaaacgggtgaaaagttcgtaacagcaggatcgttgttttatgccttctagatttgtttaatattcttagactggtttggactccatggaacttgtagaaatattattggatccaaggatgtttcaacttgctcatttatcacagccatttcctatgaaaatatggcatgagtgccacaagtaatggtggctcattgtgatggaaattttgttaccatcctcttagtggtccttgaggtttttttttttttcttttctttttcacatgtaaactagcatttatttatacctgtgtttaatgtattatatagaaaatcagaattgaaaaataaaagtaatattaagactccaaagaaataatacattttc

SEQ ID NO: 5574 - DNA, 1602 bp, Glycine max
ggctctatttttcttctctgacatttctatttaaatttgccgaagaatccaattcaccgatctccgaagagctccatttggaaaaagaagcgaactgggtatccaattttcgaacactttcgatggggaatgatgcagggtcacctcagggtccggttacgtgtgggtcgtggattcggaggcctgagaatttgaacttggtggtgttaggaaggtccagacgtggcaattcttgtccttctctcttggagattttctccttcgatcccaagaccacttctctgtctacctgtcctctgaccacttatgtgttggaagcagaggaaggtgatcctgttgctattgcagtccacccaagtggggatgattttgtgtgcgctctcagcaatggtagctgcaaattgtttgagctgtatggtcgtgaaacaaacatgaagttgttggctaaggaactggctcctctacagggtattggtcctcagaaatgcattgcttttagtgttgatgggtctaaatttgctgctggtgggttggatggacatctcagaattatggagtggcctagtatgcgcgtgattttggatgaaccaagagcacacaaatcagttcgggatatggattttagtctagactcagaatttctagcttcaacttctactgatggttcagcaagaatctggaagattgaagatggtgttcctttgactactttgtctcgcaactcggatgaaaagattgaattatgtcgattttccaaggatggaaccaaaccatttttattttgctctgttcaaaaagcaggtgatacttctgtcactgcggtttatgagattagcacatggaataaaattgggcacaagaggctgattagaaagtctgcttcagtaatgtccattagccatgatgggaaatacctttctctgggcagtaaagatggagacatatgtgtagttgaagtaaagaaaatgcagatataccattatagcaagagattgcacctgggtacaaatattgcatatctggagttctgtcccggggaaagggttgtactgacaacctcagtagaatggggagcgctggtcaccaagctgactgtacctaaagattggaaagagtggcagatctatttggtgctattgggactatttttagcatcagctgttgcattttacatattctttgagaactctgattcattctggaactttcccatgggcaaagaccaaccagcaagaccaaggtttaaacctgtgttaaaagatccccagtcttatgatgaccaaaatatttgggggccagtagatatgtgatcacattaacattcttgatttagtcttcggtgctgttttggaagcagtatcagtagctgtaactggtatcaatatttatttaagcccttatagagttaggcacttgactggtattacaaacatttacttctatttttttggggtgaaaattctgagccaaaggccatgattggtatgtaattttaatagaaactttaggaataatcaaatagcttccttaaatttacaagttacacgcaaggctgctttgtagctatgtgatgggatcccttgaagaggcccgtctttggtt

SEQ ID NO: 5575 - DNA, 1670 bp, Glycine max
gtcgacggtatcgataagcttttttttttttttttttacgtggcaccaaactttgataattctgcaatcagagagagacagaaagttgatggagactatttaatttgaacgcgtgcatgcgttattttcgaagacagtaagcaaataactcaaacaggagcagccatggataccgcaaatgcagctcctttgcacatagcaatatttccatggtttgctatgggccatctaaccccatctcttcacctctccaacaagcttgcacagagaggccacagaatctccttcataggccccaaaaaaacacaaaccaaactacaacacctcaatcttcaccctcatctaatcacctttgttcccatcaaagttcctaatgtcaatggtcttcctcacgatgctgaaactacttcagatgtgcccttctctttattcccacttattgccgaggctatggatcgcactgagaaggacatcgaaattctcctaagggaactgaagccacaaattgttttcttcgatttccaacattggctaccaaacttgactagaagactaggcatcaagagtgttatgtatgtcattattaatccgttatcaacagcgtacttcgcaaacggaccaaggaaaagcaaaggaagagagttaactgaacttgatctaatggtgccccctcaggggttccctgattcatgcatcaagtttcagccacatgagcttcggttcctcgttggagtaaggaaactcgagtttggaagtggggttcttctctatgatcggtaccacactgcagcgagcatggcagatgcaataggattcaaaggttgcaaagaaattgatggaccatatgctgagtatcttgaaactgtgtatgggaaacctgttttactttcagggcctcttttacctgagcctccgaacactactttagagggaaaatgggttttatggcttgggagattcaaccctggttctgttgttttctgtgcttatggaagtgaaagccggttaccgcaaaatcaacttcaagagttgttgcttggtcttgagctaacaggttttccatttcttgcagcacttaagcccccctaatggttttgagtctattgaagaagcacttccagaagggttcagagaaagggttcaaggaagagggattgtagatgaaggttgggtgcaacaacaattgattttaggacacccttctgtcgggtgcttcataacacactgtggagctgcttctttgacagaggcgcttgtgaataagtgtaggttggttttcttaccgcatctgggtgctgatcaactcataaattgccgaatgtttagtagaaagttaagggttggtgtggaaattgagaaaggtgaagaagatgggttgttcacaaaagaaagtgtatgcaaagctgtgaaaattgtgatggatgatgggaatgaggttggaagagaagtgagagaaaatcatagcaaactgaggaacttcttactaagcgacaacgtagagtcagaatgtgttgatggtttctgcaaaggacttcatgatttacttaatttgaaaagactcgtcatgtgttgatagattctgccaaggtccgcttgggttgtcctgggtagtgtgtaaacatacgagctacgctgccgatgaataaaatattttatattttcttgggttg

SEQ ID NO: 5576 - DNA, 986 bp, Glycine max
  misc_feature (593)..(593): n is a, c, g, or t
  misc_feature (608)..(608): n is a, c, g, or t
  misc_feature (627)..(627): n is a, c, g, or t
  misc_feature (647)..(647): n is a, c, g, or t
cttgatctctatgagtctggtggtggaattagctggcttctatgggccattgaattgcaagacacccatgatgctttgtttctcgataacacatgaggaggatatgtcactaatacaggagaagatgcttccgttctcctccgtgtaaaggaagaccatgatggggcagaaccctcaggaaactcagtttctgctataaatcttataagattggcttccatggttgctggaagtaaggctgagcattataagcgaaatgcagaacatctattggcagtttttgagaaaaggttgaaagatatggctatggcagtgcctctaatgtgttgtgcagcagatatgttgcgtgtactttctcggaagcaagtggtcgtggttggtgaaaggacgtctgaggactttgaaagcatgcttgctgcagctcatgcagtatatgatcccaacagaacagttattcatatagatcccaacaacaaagacgagatggaattttgggaagtaaataacagtaatgttgctctcatggcaaaaaataactttgcagtcaacaaggttgtagctcttgtatgccaaaacttcacttgtagcccctntgtgactgaccattngtcacttaaagctttgctntccaaaaaaccttccttttngttcacgtaagctattggttttgatgagtaggaaaatagttaacgtcggcgaaagctccctcttagagatccccctttcaatttacagaactagttggttttgacttctctgtcaaaataaagataggtaacattttctgttgacttgaggaattgatgcatgtccttttcgtatgcctgtgctcaacaagccatgatttttcttcaaatgtgatacagaatgagggaatcatggaagtatgtataattgtatatgcaatgtaagctatcgttgaaataattatcttttccaaaaaaaaaaaaaaaaaaaaaaaaaaaaaaaaaaaaaaaaaaaaaaaa

SEQ ID NO: 5577 - DNA, 1164 bp, Glycine max
aattcgcccccaggaaccatctaaggaaacagtgaaacgagagtcagaagctgagaaaccttcagaggaaactcatatcagtgaaccagttaaggaaacagagaaactagagtcagagactgagaaaccttcagtggaaactcatatcagtgaagcagctaaggaaactgtgaaactagaatcaaaagctgagaaaccttcagaggaaactcatatcaatgaaccagacaagaaaacagtgatagttgagtcagaagctaagaaaccttctgaggaaactcatatcaatgaaccagttaaggaaacagtgatagtagaagctgagaaaccttctgaggaaactcatatcaatgaaccagctaaggaaataatgatagtagagtcagaagctgagaacccttcaaaggaaactcttgtcaatgaaccagctaaggaaacagtgaaactagagtcagatgctgagaagccttcagaggaaaacaatcaaagcagcgagtcactgaaagaagaatttgtagaggccatggaggcaccttcagaggaaacacaaagcattgaacccatcaaactcaaagaagagcctattgaaccatcagaagaaggtaagccaagtggggaatcagagaagaatgcttcagaaactaagactctcattgtaaagagcataaactctgaggtggctcctgtgcctgaggagagagtaattgaagaaattccaactgctgccaagtcttttgagaaggtaacaaaggaagctgcatcaagcacagaagagaaaagccataatggggtggagaatgcacctaaggctgttgatgctggcgctgagattctctaaaacctgaaatctgaatgagagccatgaacaatttgaaacattgtagagtttcagattgttctttggttcatcccaaccgaatcattgtgtgagatttcccaactgcattttcctcgtgttattttttttcatatatagtttgaagaaccaattttttgttcttgtcaagtcactttttttctatcctatcattgcttatctgtattggtaggtcaaattcaccaatgtaaattgtaattttgttgggatccctgatctgcgagggggaattccaaggacctcaatctttttttctttttttaatattaccgtcaagtaatttgtgc

SEQ ID NO: 5578 - DNA, 1135 bp, Glycine max
cagtatattatcatcagctctttgaattcaatttctccaagaggatcttgttaaggagacctggagtgggaacaaatttctacatgttcattacctggccagcgaaaaaaccttgtagtttagttttgcctcctcgatattgctctacctgttttggattctccacaataactttgtccaccattttttcaatctcaacaggatctgctatctgaaccaagtcctttttttgtatgagttccttcacagttccacccttggctaatagctcaaatagtatctccttcccaatcttgccactaatggttccacctttaatggaagctatcaactcagacaactcttcaggtgtaagctttatctcatttatggtcaacttttcatttttcatgaaggcagcaatatcactcattatccagttggcaaccagctttgagtcagcaccttttgcaagagttgcatcaaaaaattctgcaatatttttatcattagccaggaaaagaacatcttgcatgcttaagcccatctgctcatatcttctccgcttaatttctggaagctctggtaaagaattttttataccatcaacatattcttgagaaaggattactgctggaaggtctggttctggaaaatatcgataatcagcaagcccttcctttttcctcattgtaattgttctctgagagccttcttcccataaacgagtttcttgtactatctgatcttcctggccttgactatggagttgcacctgcctagaaatttcaaaatcaatagctctgctcactgatgaaaatgagttcaaattttttatttcaacctttgtcccaaactttgattgcccaataggtcgtattgatacatttacatcacaacgaagagaaccttcttgcatattgccattgctcactcccaaataccgcaccaacctctgtaattctgctgcatattctgctgcttcaataccatttcgcggggcgggcgccgacgctgcctcaagcaaaggtacccctgccctatttagatcaacctgaaacttggatgtcaaacaaataaaaaagcatcatacggtcctgtgagtaatttccattctctgcatgtaggagcttccctgcatcctcttccctcgtgc

SEQ ID NO: 5579 - DNA, 2080 bp, Glycine max
ttttttttttttttgaccccacataactcatcaaaatctgttttattttgccggtgcaacatattctcatgtacatatcaatgaaaattgatggcttttctagctcaggtttatttactgcatcataattattacataaataaacaaggaactagaaatgtcaattttacataaatcagctagttgcagcttaagcacttttgtcagcagctttgcctaaggaggtgaagttcaacctgataagcggcttcttcattggtaaaggtgcaggaggcccacttaacaatggtgctgatagctcagcaggctcaagctcctccaagatctcattggagaataaatgagttgaacaagtaatttccttagaaataactggctcttctgccactgcaggctttgagagtaaagattccatgttgtttttcatgttcccaccagaatctttgtcttgatttttatactgagtatcgtcttcaagctcttcaggttcttctggaaaggcttgatgtgcatcatacggaccggacataatcttttcaatggctagcttttcttcttctttagaattagatgtatcagcagctgcaagtacggggttcacttgtctggttgtttgtcactgatccattggtcccactatccccagaaggaatctcccctggagaattcagacaaggtttctcgctcttttgtccacctatactattcacttctgattcatcaaatttcatagaacaagaacttgaagcactaataggagatatatcctcatgaacttccctgctggggggagctaaagatacaggggacctggaattccttgggttattatccatgttgtcctctgatctctttctcttcctcacatcatctgctccaactgcaacagctttacctccttgaggcttttctgtttgaccatggccagaagcccttgatttggaactctgtttattctcggcagttacttttgatgggaaggtaggtcgcacaccaccaggaaatatgtagttaggaatgttactgcgtttcacatgggacacatggatatccattccaggtttccatagagtgtaagcattgacagaatgtttaaattcttcaacagttagccttatatcaaactgttcaccttcattcactggaactccttgcttacgctgcagacccataaagtaacagtggtgaaagggtctagaattgtctgagaattcaccaggatgtggatgacattgaagcataccataagtgtgcctctcaatcttcaatgtcaactggcggagacgagactcaacccaacctttccattgtctaaggtcatctgcattctctgctgttatatctatctgtagataattcttgtatgattcaaaaaagggataaggctcaaaaagagtatcccaatcagccttgctagcctccatagcctcacatatttcacttccccttcgaaactcatctgacataacacgcaatgtacttgatgtcacattgtaagtggagttcatgcagggataaacaggagtaattataggcattagatgatatctatccttgggatttcttctaggatcccaaactggtagtccaagagatccttcttcaatagcacaaagcatgactggatttggccatcgccattgagtatataccctaaagaatcgagacactaacatatcaggaagtgcattaggatataactggcatattcgagcaacaagcaatgccaggtttataccaccaagaaaacctgcaacattggaatatacaccacgacgcttggcccaaaacctcatgcatctcaatgtcgtgcgaaaggtctgaatatttggaaccaatcgcaggacctggtcagttactctacaaccatttagactaagaacagtttgttcgtcaacactttgtaatattgattcctgtgatatatctatatcttcaggaataacccacaacgctaatcttgcatacaggagatcaacagaaactccattaaacttgaatttcaccacagggacatgagcatcaggcacagggtgcaattctgttacttcttgcatctcagatagcatcttctgtagcc

SEQ ID NO: 5580 - DNA, 1315 bp, Glycine max
gaatggttagttttaaggattgaagcacttcaaaatttgaccgtcccgcctccggcgccccccccccccatagttcctcagggatatgtgacctcaggccttgtgggactgtctctctcttatgctttctccttgacaggatctcaaatattttggactcgatggtattgcaacttattaaactacattatctctgttgaaagaatcaagcaattcatccacctaccagtggagcctccagccatcttggaggaccaccggcctccatcttcatggccttcaaaaggcaggattgatcttcaagccttagagattagatatcgtcccaatgctccattggtgcttaagggcatcacttgtacttttaaagaaggtagtagagtgggagtcgtaggaaggactggaagtggaaaaagtacactcataagtgctttgtttcgcttagttgatccagcaaaaggttatattcttatagatgggattaacatatgctcaattgggttgaaggatttgagaatgaagctaagcatcatccctcaagaaccaactcttttcaagggcagcattaggaccaacttggaccctctaggcctgtactcagatgatgaaatatgggaggctttagagaaatgtcagctcaaggaaactatcagccgtctaccaaatctcttggactcttctgtgagtgatgagggaggaaattggagcttgggacagcgccaactgttttgtcttggaagagtactacttaagaggaacagaattcttgttctagatgaagctaccgcatccattgactccgccacagatgccattctacaacaaataattagacaagaatttgtagaatgcacggttataactgtggctcacagggttccaactgtaatagatagtgacatggtcatggtcctctcctatgggaaattggtggaatatgaggagccttcaagactaatggagaccaactcctcattctcgaagctggtagctgaatattggtccagctgcaggaagaattcttcctcaaatcttagcagacagcaacattgaataatgaataataacattatggaaaatcacgtgcagacttactttttcactgttttacttttaaaataatctacctgatgcagagttatatatctttataaactccccttcaacatttgtcgatttttttcttggtttgttaagccatgataatttgaagaactgcagcatttttaactagaaaaaaaaaatgtttttacatataaaattaaaattccatagcccttcaaaagggggggggggggggggggggggggggagg

SEQ ID NO: 5581 - DNA, 1613 bp, Glycine max
gaggaattcttcccacttcggctggagtattatgagagaagaaagaaacatatactgaacaaccttgaacaacttctgttgatattggacaacaaagttaggtttatattaggggttgtgaatggagaaattgtcgtgagcaacaggaaaaaggctgaattgttgattgagctgcagcagaaaggttttactcccatgccaaggaaaggtaaatctgcagaaccccaagttgctggggcaaatgatgaagaggagcaggaagatgacaacaacactagagagcaggaaactggaagtgttgaaggagtgaaacgaggtgactatgaatatctgttatccatgtcaattggaactttgaccctcgaagctgttcagaagctgctagcagagaaagctgaaaaagaaaaggagttcgagattttgaaggctacaccatcaaagtctctgtggttgaaggatcttgatgagcttgagaatagacttgatgacatagatagcatagaggctgaggaggaacggaaaagatcaagtcaagcaaatagaaagacatccaatcgtggtgttacaaaagcagctaagaagccaccacaaccacggaagtatactaagaaggccaaaaatgttgagccagagaatgataattcttcaatggaaattgagaatgttgccgaagtcgctaaaccaaaaggcagagcaggttctaagaatacccagaatactcagccggttgctgaggatgaaattgtatctcttcaagaacggctagctgcatataacttcggtgcatctagtgatatatcagcgggcatggaaactgaagaacctcctgcacctgctgagaagaaagaggggccaaaaagacggggtgctgcaaaaaagaagtcaagtgccatagtgttggacgactcagatagtgataatgaagttcacaatgttgacgatgacgatgatgacgaggactttgaaatcatgcagccagttgccccagggagaaagaaaggagggagaaagcctgctgctcaaaatgccaagaaggcacctgctgctgctgccaggaagagaaacgtaggtggcaagcaatctcagtttttgggtcagaaactcataactgatatgttggagagtacagggatatcaccagagaagaaagtgaggaagatgagggcgtctccatttaacaagaaaagcagttctgtattgggaagggttgctgctgctgacaaagatgaaagtgtaagtaaagacttgtctggtggttctgatgcttctggttcttctccaagcatcactgaggaggtggttgagattgcaccaccagcagcaagagctaggccccagagggccaatcgtaggcaaacgacatatgtactgagtgaatctgaaagtgacaatgattctgataatgaagattattccgattttgaggaagatgaagactaggaagggaagatgtgtgtgctttgtagaaacctgattgtggattttaacttccaagtgataattgtgaacgttatgagtgagttgcactaatttgtatatgctttcggatatgttttcatgatgaatgaaatagatttatcattagtcccaaaaaaaaaaaaaaaaaaaaacac

SEQ ID NO: 5582 - DNA, 2415 bp, Glycine max
tccagggtcagccaccgcgtccgcggacgcgtgggcggacgcgtgggcggacgcgtgggcggacgcgtgggcggacgcgtgggcggacgcgtgggttccttctctcaattcccaacctcgcatctcccattattttattctcaaaccacgacaacaaaagcacaaacttggtttctcaatttcttcctctcgatcctacccgagttaaattaaaaacaagaggagagaaaacaaaacagaacaaaataaaggtttggtcttttgaagtgggagtgaggaatcagacatctgggttggttgcttgctaggttcggttaatgttagaatgtgggatctcaacgactcacccgatcagaggattaacaaggacgaggaatccgaagaagggtgttcttccctcaataaaacttccttcgatggagatgatgacaacaacaacaacaaaggcaaaaggctcgagtctgtttccaattcaagctcttcagcagtagtcatcggagacgggtcagaagaagagtacgaggaggaagaagaagatgaagaaggtgttggtgttggtggtggaagaagtatgaagaaacgtagcagcaagattttcgggttctctgtgacccaaaatgaagaagagtccatggacagtgaccatccacctgtgactagacaattttttccggtggaagatgctgacgtggcggttgcaaccggtggtggtggaaccggtgtaagctcaacgttccctcgtgctcactgggtaggtgtgaaattttgccaatcagaaacacttggcaccggaaaatcatcagtggaagtttctcagcctatgaagaagagtcgccgaggaccgaggtcaaggagctctcagtatagaggagtcaccttctacagaagaacgggtcgctgggagtctcatatatgggattgtggaaaacaagtgtatctaggtggatttgacacagcacatgcggctgctcgtgcatatgatagagcggctattaaattccgaggagtggaggcggacattaacttcaacattgaagattatgaagatgacttgaagcagatgagcaatcttaccaaggaagagttcgtgcacgtgcttcgccgacaaagcactggatttccgagagggagttccaagtatcgaggtgtcactttgcacaagtgtggaagatgggaggctcgaatgggccaatttttagggaaaaagtacgtttatttgggtctcttcgacactgagatcgaagctgcaagggcttatgacaaagctgccataaaatgcaacggcaaagaggcggtaacaaattttgatcccagcatctatgacaatgagctcaattccgaatccacaggtaacgctccagatcacaatctggatttaagtttgggcaattcaacttcaaaccctggcaacgatcaagcgttggggaatcacgccccaaatgctgtaacccatgatcagcacctgccatctgagtctaattggcgtaatgggggaatcaagcctaagctggtgaatatactcccaaaaccatgttacagaagcaacaacaaggacacacatggaagggatgtgcacggggagagtgaaacactgaggatgctaagtcaaacccaccttcattctccagccttcaatgaaatgcaacaaagatatggtccctacaggtctccgggaggagagtctcaaatgcttcaaaattttgcgcacattcacccaccaaattttcattttcccagaagcagcattggaggccgaattgggagtgatctttcattatcagtggctgatcaacaacagtggcaaaccgggccttcacgttatttagcaactgctgcagcatcatcaagtttccaacaagagataagaccctcttctcaaggttggctgcagaaaaatgggctccacagtctcatgagaccctcatgatccctattataaatagagaattttctgcctcgccaagtactagttacattcaaataatcgtaatctgctccctaagtaatattattattgttacccttccagggtttcacccccaaaaaattattattttcttttcttagcatgtaaaataggatgcagtgttagattgtgtccatgtccaacccagacccctcgtcacacaaggccacaactttactattgaggtgaaaaagaaaaggataaaagaaaagaaaaaaaaaagaagagaaaatccaaattgggaacttactactggtctggggtcagtcaaactaacaaacggacgaaatctttaactagatattctgggctctgactaaaattttaggatcttatataactctgattttattgcttttctgcggttgtggtatatttatgacagcacctattcgtttcttgatttgggatgtattgctatcacatataaaaaaaaaaaaaaaaaagaa

SEQ ID NO: 5583 - DNA, 2227 bp, Glycine max
gtgcttgctcgtactcttctcctctgaggatgctgcaattctcttccaccatttcccaaacaaattaaaatgtttctgaatccaatttggaaaccaaaaagttcgtagcttttcatagagctttcaagtaattagccccgtgaaatatttttctttttacgcaagatgacaccacgggccttctaactgaaacaagcaataataataacaggccaaggaaaaactcagcagcattctgttagaaggaaaacacttatctctattagcatatttgtctccattaatctcttacttcagtcctctatcaggaaattcctaccaaacaaaattcatttgtgttggcctagaggtgaagtttatagcatttgctttgaagtttggaaattgttgcttgttcaatcacaacaatggctttagctcctacttcaaaagttgtccttggttcaatagcctttgcaatcttctgggtactagcagttttcccagctgtgccttttctacccattgggagaactgcagggtccctgcttggtgccatgcttatggtcatattcaaagttcttagtccagaccaagcttatgctgcaattgatctcccaattcttggtcttctttttgggactatggctgtcactacttttcttgaaagagcaaacatgttcaagtacttggggaaattgctctcttggaaaagtagaggaccaaaggacttactttgtagaatctgtctcatttctgctatctcaagtgcttttttcaccaatgacacttcttgcattgtgttgactgaatttgtgttgaaaattgcaaggcaacataacctcccaccttaccctttccttcttgcacttgctacaagtgctaatattggatcctcagcaaccccaattgggaacccccagaatttggttatagctattcaaggtaaaatatcatttgggaggtttctgatgggtattcttccagctatgcttgtaggagttgtggtgaatgttgtatttcttatagccatgtattggaaggtgttatcttgtcctaaggatgaagaggatccaatctcagaaattgtagtagaagaggaggttgtttctcatcagttttctccagccagaatgtctcattttacatcctttaattctcaagaatgtaatggcagtgtagaccaatcaactccaagtgaaagcgaagttcagatgattcataggagcacaaaggattccacaaaaaactcaaatgcatccaaggaggggacaaatgacacaaaggaggaaattaataatccttcaaaaaatgttgcaatagtagtagataaacctattgaagcacatgttatactctcttcagaagaaaaggactacatgaacaacaaatggaagagggtactgtggaaatcttgtgtttatgcaatcacattagtgatgttgatcgcaatgcttataggtttgaatatggcatggacagcaattgcagctgcaataactttggtggttcttgatttcaaagatgcagggccaagcttagagaaggtctcatatgcacttttggtattcttctgtggaatgtttatcacagtagatggatttaagtcaactggaattccaagtgctatgtgggacttaatggagccctattctcgaatagatcatgctagtggaacagctatacttgccgtggttatacttgtcctatcaaatttggcttcaaatgtaccaactgttctattgcttggagcaagagttgcagcctcagcggctgcaatttccaaaggagatgaggagaaggcatggctaatcttagcttgggttagcaccatagcagggaacctttcactattaggatcagctgccaacttgatagtttgtgaacaagctcgtcgagctccaaaccttggatacacattaactttttggacccatctaaaaattggccttccttctactcttatagtcactgctattgggttgacactaataaaatgacaagagcttactcgagtcctaattgaagaatcttatcgtagatgtttacacaagcaaattaaagtcaggttttattgtaatgtattttaaggttgttagaaaatatagttagatgaacagggaattttctctgtttttgttgttaatgtcatcaaataagtatatgattgtgattgtcctagctaaaagtttgattggaatgctttgaaatttcaacttgtaatgaattttagtttgggagttatgtg

SEQ ID NO: 5584 - DNA, 747 bp, Glycine max
  misc_feature (8)..(8): n is a, c, g, or t
attgtgtntctgagttttggaagcatggaacgattctcgaggactcagttgagagagaatgctatcgggtcggagaagagtgaacataggtttctgtgggtcgttaggagcgagttgaagagggtgagtcgacggagccaccgagtctggagtagttgttccagaagggtttttggataggactaaggagaagggaatggtggtgagggactgggccccacaggcggcgattctgagtcatgactcggtgggtgggttcgtgactcactgcgggtggaactcggtgttggaagcgatttgtgaaggggttccaatggtggcgtggcctttgtacgcggagcagaagctgaatagggtgattttggtggaggaaatgaaggtggggttggcggtggagcagaacaataacgggttagtgagttccaccgagttgggtgaccgagtcaaggagctcatgaactcggataggggaaaagagattagacagaggattttcaaaatgaaaaacagtgccaccgaagcaatgactgaaggtggatcctcagtagttgcattgaataggttggtagaaatatggagggagcattaatggtatagaacttgagaatgagagaatgatttagaaatgtgcatgagattcagtataagaactgaatttctttctcaataaagaatgagcacgagttaagttgttgtaaattatcgatgttctgaatatgaattcggtcgtgatatttattactatct

SEQ ID NO: 5585 - DNA, 732 bp, Glycine max
ctcgagccgaagacgacagaagatcggtgaatgtttttttctttctttctttcttttcaagactaaaagtgggggttaattttacttgttccctctttctccattacacagacttagagttcgtggtggtgactctgatttgagaagaagaagaagaagaaaggatgttgcgaagtcgattcttatggttcacgttcggattcgcatccacatacgctgtgctttcccaagttgttttgaaggacctcatgcttgagcgtcacgcgctcacttctcacatggaacgcgattttcgcattctcgaagccagactctccaacatcgaagaatcctcttcttctgttccgctcccgatcgatcaggtcgaaggtgtttctggtccagcgaaatgatttctactaggttctatgggatttatgcttgattcaaaaggtttgtagaggaaatgaccataataaaacagacgatgaggcaacgttaaaattcttacctattttttttttttcacctgggagattaaccaattgtgaggaaaaaatgaaaaatcaaattggagtttactgtcatgttattaaatatcatgcttttgttgtacagctccaggagcttgaacttttaactctgttttattattgttagcaacttctgatgaaatctgatccacctacaatgaaaaatgaagggaccaatcctttgggttctgacaaaaagaaaaaaaaaaaaaaaaacaag

SEQ ID NO: 5586 - DNA, 1452 bp, Glycine max
aattcttttaaacagcctgctataatgggaaaaccttatatttgcgagttgatgccgcaaggggatgataaaatacatggacgttccagtggacattatgcgcttgttacacaacaaccacttagaggaagggccaagcagggaggacaacgggtaggcgaaatggaggtttgggccttggaaggatttggtgttgctcatattttacaagagatgcttacttataaatctgatcatattaaaactcgccaagaagtactcgggactacgatcattggaggaacaatacctaaacctacagatgctccagaatcttttagattgctagttcgagaattacgatctttagctatggaactgaatcatttccttgtatccgagaagaacttccggattcataggaaggaagcttaattggactgaatcagaatttttattctatgattgatcagtataaacatcaacaactccgaattggattagtttctcctcaacaaataagtgcttgggcaaaaaaaatcctacctaatggagagatagtgggggaggtaacaaaaccctatacttttcattacaaaaccaataaacccgaaaaagatggattattttgtgaaagaatttttgggcctataaaaagtgggatttgtgcttgtggaaattatcgagtaatcagagataaaaaggacgacccaaaattttgtgaacaatgcggagtagaatttattgattctcggatacgtagatatcaaatgggctatataaaactggcatgcctagtaactcatgtgtggtatttgaaacgtcttcctagttatatcgcaaatcttttagataaatctctaaaggaattagaaagtctagtatactgcgatgtgtgatttgataaaaatttttattgtacagattccgaatgagaaactgtcattccatttaatttaattgggatgccctgaatctgacatgtctcttggaatgagtaacatgaaactcagaattatggatgtattgaatactccctaataaaaagggaattggtctatggtcaattcagtaacaaaaaatatgaaattataaatataaatttctaactgtacgtacctcgtgaaaaaaaaaaatatttttttcttgtagaattagcgattccatcttttttagaaagaactgaaattatgttcaaataagcaaatatatcgtggttgcagaagtctatacatcgcatataggcttaaggacatcctgacagaaccggcccgccgacgtttgggacctaaaggatcgaatggaatgatacatagacaaataaatctcttatgaatttcgggatactcttttatttaattaatttaattaatccatttttgaagattccgcattcgaaggggagtagactactcaagaactttacttttcatttcttttctgccttaattgagaattggataaataattaag

SEQ ID NO: 5587 - DNA, 2269 bp, Glycine max
cggacgcgtgggtgcaaatgcaagaggtggttccctaatgatccattgcttctgttgaagaatcctttggtttctctctctctctcgaccgacattatctctctttatatcagttgtcttaggctgagtttctaacccccccgccaaagaaagcaaagggttggcattgacccctttgcacaaaggaaaagagggtggtgctgtgttaaaaaaatattgaacttggttggttcaaagttgaaacaagattttcattttcccatttccacattttttgggtttgggagggaagcagaatcctagaattaagaaatgggttgctccataagagagtgttgtgtcttatttttggttttgttggtgtcatgtgctagaggggaagacccttatagattctacacttggaatgttacatatggagacatttatccacttggtgttaaacaacaggggattttgataaactggcaattcccagggccacaaattgaagctgtgaccaatgacaacttgattatccatgtttacaacagcttggacgaacctttcctcttatcttggaatggagtgctgcagaggagaaactcgtggcaggatggagtgtatggtaccaattgtccaattctaccagggcataacttcacttatgttcttcaagtgaaggatcagataggtagctacttctactacccttcccttgcttttcacaaggcagcaggaggttatggtggattcaaaattgctagtcgccccgggattccagtgccttttcctactccagcaggagatttcaccatattggcaggagactggtacaagagaaatcacacagatttgagggcaattttggatggtggaagtgaccttcccttccctgatgggattatcatcaatggtcgtggttccaatgcttacacattcacagttgatcaaggcaagacatacagattcaggatatcaaatgtagggctcaccacttccatcaactttagaatccaagggcataaaatgacaattgttgaggtggaagggacccacactctccaaaacgtttatgactcacttgatgttcatctggggcagacttactctgtgttggttactgctgatcaaccaccccaagactacctcattgtcgtcacgacacgattcacctcccaagtgttgaatgctacctccatttttcgttacagtaactctggtggaggtgttactggccttttcccttgggggccaactattcaagttgattggtctttaaaccaagctcgctctcttaggaggaatctgacagcaagtgggccaagacctaatccacaaggatcataccattatggtttgataaacacaactcgtacaattagacttcaaaattctggtccagttatcaatggcaaacagagatatgctgtcaatagtgtgtccttcatacctgctgatacaccacttaaactggctgattactacaagatccaaggggtgttctcccttggaagtatccctgactaccccactggtagtggtggctaccttcaaacttctgtcatggaagccgatttccgaggctttatagaggttgtgtttgagaacactgaagacactgtggagtcatggcacgttgatggccacagcttctttgtagtaggaatggatggagggcaatggtcatcagcaagcaggctaaattacaatttaagagatacagtttctcgttccacagttcaggtgtatcccaagtcatggactgcaatttacatgcctttggataatgtgggaatgtggaatgtgaggtctgagaattgggttcatcagtatttgggccagcaattttatcttagagtgtattcccctgcaaattcatggagagatgagtacccaattccaagcaatgctattcggtgtggcaaggctgtgggacactactaatgccaccaccaaaccaacattgggatttttatttgaacagtgtcattcatttccattcatggcttaactcaagcctcttctcttgttctcttgtaccattattcatgttatgatgccatagattattatagagttattgatttctcctgtcctcttcctcctctcatcttcgtgttatgtccaaattcagctatatataagatcatctgtgtttggattatgatattcttcttatttaaactatttatttatttaaataggttcaagggacctgatgttaatgtgccatggaaataatgagattgttattattattgttgttaagaaaaaaaaaaaaaaaaaa

SEQ ID NO: 5588 - DNA, 1280 bp, Glycine max
agtgcaccccgttcagtggtagagttcccgagcaacgaaagctaggtcacgggttcgaaaccatttttcgtgaaaataggtgttttttttagttcgtcgttttgctcttcgtgttgttgaagtgcaacgccatggatccagatcagggcacttcaaaagcccggaagcccaagttcaaacccaggaatctcaaagcagtccgagctcccaaaaccgaagcggatgataagcgaaacgaagatagcgaagtgcctcgagctctctcgcgtcgacgacatgaaaatcctgcaaaacgcgagcctaaagtcgaaagaaaatctagcgtggaagttgcatttagtcttggaagttcatcatcacattccctcaggacatatggcacaagcaaatctatagatagtggcacaagcagtggttcaccatctaaatattttgccaatgaacaaattcgttcaattgctactgaggatcaaaatgatgcttctaatgcatctgccaggaaaatcaaaagagagtacaaggaaccatgggattatgaaaactcttactatccgactactcttcctttgaggaagccaaattctggagatccagaaattcttgatgagaaagaatttggtgaagctgctactagtgtggagtatgatgagaatactgttaattctgctgcagaactcgagatcttggagagtgaggaacaaaggatgtttttctttcagattcctactcctctgcctatggacaagcagagtaataaggggaaggagaaaattggtacatcaacagtatcgggagaggccacaaagtcaaagaatgccttggaagagttgccgaggggatatatgggcaaaatgctggtgtacaagagtggagcaatcaaactaaaattaggagaaactctgctcgacgtgtctccaggttcaaattgtcgatgtgttcaagatgttatggctgtgaacactgcacagaaacagtgttgcaatcttggcgagattagcaaaagggttgttgtggttcccgatcttgattcaattgaactgtaaaacactctagacaaatatgactaatgcaccacatacagggatagtacagtaccttgttggcttatgtgaatatatgtgactaaaaagacacggacaattggcaagtgccaattggatactagacctagcatttgatattaatgaaatatcaagtggatgattgaactcaaaaatttgttattgttttcttttatccgtagaaaccaaatcaggtaacaagagatttacaacaaaacc

SEQ ID NO: 5589 - DNA, 1696 bp, Glycine max
gtctagtctatctagaattcaataatttactattttaggcaaataaaaacaaattaaacttgagaagaaaaaaaggcctgcaaagggacattgtaccttaaattaaaagattgaagtttcatgtagtttctttttcatcatccattgaactgaaccttaaattaattatagaaccatgtttgcaactaccaattcctccactttgtcacctttattctctttcagtagaacaacagcaacctctctgccttccaaacccacattctggaatttggttccaatgaaacaatcttcttctccggggcacttggccttagccttagacaatccacgtagaacacttcacgtgtcttgtggctccacatcaccacatgcttcccagagatcatcaattcaggggggtgaagcttttttcaggggtgtgttggaaagtatgcaatctgtttacttgaacagaaatcgtactgctaaggccatattggaccttgttcactctgctgagaataactcattatgctatgatcatcttgcattcaggacatttggggtgaatggttatggaattgattccatggctagtttttttctggattatggctatacacaaagggaagagttgaggtttccagccaaaaagttgagggctttgtggttttctcctcctgctgattcactggctagcaatggcagtggcattaatgggcctttgccaagaatatttatatcagagctactggtagatcaaatgagtccacaaactcaggaaataattaaaaaatacaccgaatcatctgtggatggaaacaagtatgcagcacttgcaagttcccttggacatttaacatgggaaaagcccttatattctgagtttcaacaattggcaagtgaaagtgagtatgctgcctggaccctagtcaacgggtatgcactaaaccatgttactatatccactcatcggctgaaaactcatttgaaggagataaaaaaactaaatcagtttattaaggatagtggattcagattgaattctgaaggaggagtgctgaaagtgagccctgatggtcttctccagcaaagctcaactgtagcagattcaatttctttcaaattttctgatggtataactgaatcagttccatgctcatacattgaatttgctgagcgactggtgctgccgcagtataaaaatttacctgacacagaggttaaagagttccatagaagagatggttttgaggtagcaagtgctgacaagatatttgaaagcacatccaaggagcagttgagcagagtaggctcataagaggctcatctcactccataccaagaatgtgtatactttatttcccttggggaaatatattacaatttatacccagttgtattctggaagtttggatttcatacaattccaatcatgtggatgttgcatcaataatttgggttgattaatttcaaaaaaaataattaactcaaacacaaacataaaataatcgtaagggatttgtctagcagcacaatatagagtctcagattttacatgcaagttcgagattctcccttgtcttcttgcagtgagataaatataagtgcatttgtaagtgttttttagtcggaagactttttttgtctagtacaaatatgtcatttctttcccctaaatttttctatacaaaaaaaaaaaaaaaaaaaaaaa

SEQ ID NO: 5590 - DNA, 1428 bp, Glycine max
  misc_feature (1367)..(1369): n is a, c, g, or t
  misc_feature (1371)..(1379): n is a, c, g, or t
  misc_feature (1381)..(1398): n is a, c, g, or t
  misc_feature (1402)..(1404): n is a, c, g, or t
  misc_feature (1406)..(1407): n is a, c, g, or t
  misc_feature (1419)..(1419): n is a, c, g, or t
  misc_feature (1421)..(1422): n is a, c, g, or t
  misc_feature (1428)..(1428): n is a, c, g, or t
aacaggataatcggaggagaaaatattactgatatatatatatgtggcaaacagaagaggagatatgcctctaccctctcactctccgttgcaaactctccgctcactccaccgccgcatccacacttccatcgtacgccacttcatggctgcggcggagcccataataagctcatccaacacgcgcgtgggctggatcggcaccggcgtcatgggccagtccatgtgcgcccacctcatccgtgccggctacaccctcaccgtcttcaaccgcaccccctccaaggcccagcccctcctcgacctcggagcccacttcgccccctcccctcacgccgtcgccgccaactccgacgtcgtcttcaccatcgtcggctacccctccgacgtccgctccgtcctcctccacccctcctccggtgccctctccgccctccgccccggcggcgtcctcgtcgacatgacaacctccgagccctccctcgccaccgaaatcgccgccgccgccgccgccaaaggctgccactcaatcgacgccccagtatccggcggagaccgcggcgcgaagaacggaaccctagctatcttcgccggaggggaagaagcgacggtgaagcgtctggaaccgttgttttctcatttggggaaagtgaagtacatgggagggagtgggaaggggcaattcgccaagctggcgaatcaggtgacgatagcttcgacgatggtggggctggtggaggggatggtgtacgcgcacaaggcggggctggatgtggggttgtacctggacgcaatttccaccggcgcggccggttccaagtcgcttgatttgtacggaaagagaatcttgaatagggatttggatccggggttcttcgtaaaccactttgttaaggatttggggatttgcttgaaggagtgtcagaatatggggattgctttgcctggcttggctctggcgcaacagctttatgtgtcgcttagggctcatggggaaggtaatttgggtactcaggctcttattttggtcctagagcgactcaacaatgttacacttcctccctccaatacctgaagaaaattttaaacatgctttgtattgtatccatcatcgtctactttactttacttccctgccattgctatgcagtctacagaatcgtatcgcataacaaaaactttcaatcccgaagctgattattgcaatgagcagtgtcttttttatattattggtgatgtaatctagacacctaatattatgaatggagaacttgttcagtgaacgaacgcccaatttctaaatgggaaaaattatggaaattttgttcaaaagctttcgagttttatcatttatgaaaaaaaaaaannnannnnnnnnnannnnnnnnnnnnnnnnnnaaannnannggaaaaaaaaanannaaaaan

SEQ ID NO: 5591 - DNA, 1546 bp, Glycine max
  misc_feature (1510)..(1510): n is a, c, g, or t
acagcgtagtatcagcactcagcagttcaagtaatactaaactaaaactcaacagaaaagtgtttcatttgtttctcccaagtcagaacacaacacaacacaactaaacaacaatgtcgatcgctttttccttcttcactccactctcttccaaatccgttccatccttttccctctctaccccttctctctgttttcgcctcactcccctccgccgccccaccgatcgcttttaccctctctgctcctccgccggaggacctggcggcggatccttcggaggccacggcggtcccggacacggaggacatggtggcggcggcggcggcggcggtcacgacaacgacgacaatgagagaaagaacgaggctttattggtggtggcggaggcggggaggtcgttggagagcgtgccggcggacctggcggcggcgataaaggacggcaagattccggcgtcggtggtgagtcgctttctcgaattggagaagtctccgttcttccggtggctgcttcagttcactgggttcagggagcgtcttctcgctgatgatctcttcctcgcaaaggttgctatggaatgcggcgttggcgtcttcaccaagactgctgctgagtacgaaaaaagaagagaaaactttttcaatgagctcgaaattgtcttcgctgatgtggctatggccataattgcagatttcatgttggtttatcttcctgctcctaccgtagcgcttagaccgccacttgcactcactgcagggcctattgctaagtttttccatggctgcccggataatgcatttcaggttgcactatctggagcatcatattccttgatacagagggttggtgctattgtgcgtaatggggctaagctttttgcagttggaactgcttcatccctggttgggacagctatgacaaatgccttcattaatgcaaagaaggcagttaacaagacttctgaaggggaaattgagaatgttcccatattgtcaaccagtgctgcttatggtgtctatatggcagtttctagcaacctcaggtatcaagtacttgctggaattattgaacagaggcttttggaacctttgctgcaccagcacaaacttatccttagtgcactttgttttgctgtgcggactggcaatacatatttgggttcattattgtgggtggattatgctcgttttgtaggggttcaataggcccaagaccaagattactacatgactctgatctttctctattgacaacatttttctcaacatgttcatttgttttagtagatctttacaaaagctatttattttctgcagaggtttggttgtaggactatctcaataggttttcgttctctatttttatttgctcattgctgagcactccgtattcttgtttttctcacaagtttccccattcaattgtgcaatgaggatgtggaaataatttatttgttgttatcaggcaaaaaaaaaaaaaaaagtgaacagattcataacttttcttntaggataaaaaaaaaaaaaggcgccccgacagtagc

SEQ ID NO: 5592 - DNA, 2031 bp, Glycine max
  misc_feature (372)..(376): n is a, c, g, or t
cccctagaatcacttaacagtgttagcttatatggtgtgacaaattttggtttgggtaacctagaacatgattccaagtctgctgattgtccatggatattgattttagatataaactctacttgcacgccatttgtaataagtctgcacgcttgctagtattagctgtcatattgtgtatgtaaatttcaaaatatttaccaatgagcataacgtaaaatatgttttctattaacattgcacaagaagtgtaaaggattatcctgtgcgtggggtattacttctcacaaccattaatcatattcagtataactcccaagacaggagcttaaggcttcaaataaaatacgtcaatatatgtttcatatgcannnnnctcgtctcctataccttgcaagtttttttttttttgtttttttttttttttttgaaaatcaaacacaatacggattgcatagtcgaggaatgtaacaagattttacaaaatagggttgcatggcgctctccctacagggatatgcgcatgcggtatccctaacaattgtacacactaactattgacatggacgggtagatgcccacaatagacatgttgcaaattacaattgagttcgtgatgtccttacatttctttgccatgcgtgacatccgttttcaaacagaaaggggaagaatggaaaaatattaccttacgaaatattaacaaataaaaataaaaattgggcagttctgcaggaaatgtctttcttgaatatacgggagcccattcaatgactactacatgcagatgcaataaaacagtctcttctaacagtgtactactcaactccgccatgcagaagatacttctgaatcaaaatcttcttcccaccacgtgcttgccttgtagcctcttcgaagaaattctagggaacttccctcttcttcttgaagtcccaagaccctcaacaattcctctttggcctcgccaaggctgaagcggtttgcactttctgctatgcaagcataagaaccatctgcttgtttaagcatcacctgccaaggacctgggtactggcggaatacagctccactgtaattgacaatataaggtgctattgcaactgtctttgaatactctctgattcggatgtagaacactggagtgaattgagaaagaaagcggtagtgcaaatctttggctgggaagcccgggaggcctaaatcagcacgtagtgtgtctagttcaagattaaataaaagtgttggtgttgatgtggcaaatttttccacatacttctctatatatgcaagttcacgtgtactgcagttaatgaatatgtagagtgatggaggttcactagattgccaacgaccttcattgtcatcttcgaaatcaaaatcaagggtgttcctgacagatctgaaaaatgaagtcataggtccagtagggacatcatctaaggaacctatggtaatgccatcaattgaatctagagctgctttgaacaattgacaggcccggcgcttttctggtttatcagggaatactatgcaagctctggtttccttcttttccttgagctttcgtacaacagccaaggcaagttgaatgttggcatcaatgaactcatctgaagatcccttataagaagaaatgttgctgggcaaaggcgggaaatcgatttcgaggcgaagttttccgtcttgaagagcataagagagggaattggcggcatcgctaacgagaacttcgtaggatttaggtttgtaaagtgagacgccggccttgggatcggaagctggaccttctcttccaactccaacgctctgaatttttgcacagaacttgagtgaaaggtttcggagaggttgagcaaaaaaagaacaagatggcggagttaaagaaagaggttgaagtgagcctgagcgaggaagaaggaaagtgaggttgtaagaaggagatgaaatggccatggccatcaccatgctcggttctcttctgttctctctgttgtgtggcagtgccaacaccaacactttacaatagat

SEQ ID NO: 5593 - DNA, 1673 bp, Glycine max
  misc_feature (1616)..(1618): n is a, c, g, or t
  misc_feature (1664)..(1664): n is a, c, g, or t
  misc_feature (1669)..(1669): n is a, c, g, or t
ctttagttaactttagtacattggatattctcacaacaggagacatcaataaacagtaccaaaaaatggaggtctgtaaaacccctttacctgaggtaaccagcaaaaatgaagttgccggaggagagttacagaagtttcctgctagactttttgcagtccctcctcgaatagcccagggagctattccaggggttacagctgaatcttatcaagaggacaacaaattatggaaaaagcatgttaacgcttacaaaagaatgaataaattgattggcactactagatatcggaatgtgatggacatgaatgcaggccttggaggatttgcagctgcacttgaatcaaaaaagtcttgggtgatgaatgttgtgccgtcaattgctgagaacactttgggtgttgtctatgagagaggtctgatcggcatttatcatgactggtaagtttctaaaactctgttgaactttgtaggagtcttctaatttcatgaaaattttccttgcaaatgagcttcatatactcaaaagaatgattcattaagttgagatgcatgttaattgttgtttgatctttcatttatgataactgtaatacaaaatgggcatctttgtatttgtttagacagccttttttcctccctaattcggaacctactcaaagatatattggaattgtttgctgttgctgcttctggttactcgccattcaataattgttgtatttcactatttctgatggaggacttaaattaagcaagccatcatggatgagcgattcaatactgctcattatttcctccaccaataaaaataattcaacaggcaattattccctttatgcctattggtggaaggaaattatgtactatgaaattgcaatgacattatttttctttcttcaggtgtgaaggcttttccacatacccaaggacatatgatcttattcatgctaatggtttattcagcatataccaggacaagtgcaacctagaagacatccttctagagatggatcgcatcctaaggcctgaaggagcaatcatcatccgggatgaagttgatgttcttaaccaggttaagaaaattgttgggggcatgagatgggatgccaaactggtggatcatgaggatggccctcttgtgcctgagaagatattggttgctctcaaagtgtattgggttggcaccagcaaaaacaaaacatccaatgaggaataaaaccactattgttcgggtgtgaatcttgtacttcagcctgcagtaacatccaaggtttctaaatccaacccaaagaaggaatggggaaaaatatgaataatgagaagagaaaaaagattgtagagcaaagcaaaagcaaagattggtatggttattcgagtttattctacgtctgccttacaccaagtgtagaactgtagataaaataggttctaagtagtcttaaattaattttggaggatatggaccagcaagtttagctgtctgaataatttaagcccaagttgttgtgttgatgcccagatatgaatatttgatgttagaatattgaaatattgcaattttatttattctcatcattattcagtatatatttgtttgtgttcctttgaaaannnaaaaaaaaaaaaaaaaaaaaaaaaaaaaaaaaaaaaaaaaaaaaanaaaanaaaa

SEQ ID NO: 5594 - DNA, 1402 bp, Glycine max
tcgagtcagctcgtaggccccccccccatctccaatctgccattgtgtaatgcgctgtgtgcatttcaattcaatccataaaatcccaaaaacattgacagcaagaccaagtcaaccacctctcccagttgcagacttgagttccttatgatgggaaccgcatgtttcccaactaataacgttgttctcaaacctcaaaacttatctgggaatttctctaccctctgtgataactttcggtgtctgaggttcctcactccgaaaccgccccacctgcgatcctctcactctaagttgggaaatagagtaaagctgacatctttttcgatgtccaaggcaacccatttgaaggtttcacaagctgcactctcatccacggaagaatcactgtcttcatctcctcgggtaataggagaacatgacttgctcattgtgggtcccggggttcttggtcgtttggttgctcagaagtggagtcaggaacttccgggtagtcaagtttatggtcagacagtgaccactgatcatcacaacgagttgattcaaatgggtattaacccatctttgaaatggacagaagctactcacaaatttcccaatgtcatttattgtgctccaccctctcgtaccccagactatgctggtaatattaggctagctgcattaagctggaacggtgaaggttctttcttatttacatcaagcagtgctccatatgattgtaatgataatggaccatgtgatgaggattctccggttgtgcctattgggaggagccccagagttgatgtccttctaaaagctgaaaatgtggtactggagtttggtggctgtgttgtgagattggcgggactatataaagcagatagaggtgcacacaattatttcttggaaaagggtgttgttgatagtcgtcctgatcacatcctgaatcttatacattatgaggatgcagcttccctctcagttgcaatcttgaagaaaaacttccgtggacagattttcttgggttgtgataatcatcctttgtctaggcaagaaatgatggatctggttaataaaagtgggaaattcagtaaaaaatttgacaagtttactggaactgatggccctcttggaaagagattaaataacacaagaaccagccaggtagttgggtgggagcccaagtaccttagctttgctcgttttctagagagcagcatgtaacagactcctgagtttgtctttttgttgttccctctaattaaatagtgaaaatgcataggtgccttagggaattcttgctgtagatggagagttcatcagacatgcctgaactcagaaagtgtgcacattttcctatttcttcatatctgacattgtcaataaggatgatcagttattgaattgtctttcccac

SEQ ID NO: 5595 - DNA, 1622 bp, Glycine max
acgaggtggggttgcaagctggggagcctacttgctaaagagaaatgtcctggctatgtcctttgctccgaaggacaaccatgaagcacaagttccggttcctcggcccccccccgtacctgctgttattggtgttcttggcaccatccgccttccatacccatcaagagcattcgatatggcccagtgttctcgatgtctgataccatggacttcaaatgagggaatgtatctaatggaagttgaccgagtcttaaggcctggtggatactggattttgtctgggcccccaattaattggaaaacatactaccaaacatggaagcggtccaaggaagatctgaaggcagaacagacaaaacttgaggagttagctgaaagtctttgttgggaaaagaagtacgaaaagggtgatattgctatttggagaaagaaaataaatgataaatcctgcaaaagaaagtctcccaattcatgtgatttagataatgctgatgatgtatggtaccaaaaaatggaggtctgcaaaacccctttacctgaggtaaccagcaaaactgaagttgctggaggggagttacagaagtttccagctaggctttttgcagtccctcctcgaatagcccagggcattattccaggggttacggctgaatcttatcaagaggacaacaaattatggaaaaagcatgttaacgcttacaaaagaatgaataaattgattggcactaccagatatcggaatgtgatggacatgaatgcaggccttggaggatttgcagctgtgcttgaatcacaaaagtcttgggtgatgaatgttgtgcctacaattgctgagaacactttgggtgttgtctatgagagaggtctgatcggcatttatcatgactggtgcgaaggcttttcaacatatccaaggacatatgatcttattcatgctaatggtttattcagcttgtaccaggacaagtgcaacctagaagacatccttctagagatggatcgcatcctaaggcctgaaggagcaatcatcatccgggacgaagttgatgttcttaacaaggttaagaaaattgtcaggggcatgagatgggaagccaaactggtggatcatgaggatggccctcttgtgcctgagaagatattggttgctgtcaaagtgtattgggttggcaccagcaaaaacaaaacatccactgaggaataaaaccactgttattcaggtgtaacatcttatacttcagcccccagtaacatccaaggtttctaaatccaacccaaagaaggaatggtgggaaaaaaattatgaataatgagaagagaaaaaagattgtagagcaaagtaaaagcaaagattggtatggtaaattcgagtttattctacgtctgccttacaccaagtgtagaattatagataaaataggttccgagtagtcttaaattaatttcggaggatatggatcagcaagtttagctcccttaataatttaagccctagatgttgtgttgatgcccagaaatgaatatttgaagttagaaaattgaaatattgcaattttatttattctctatgttattcaaaatatatttatcatatttgaaaaataggtcatttttaatgt

SEQ ID NO: 5596 - DNA, 1552 bp, Glycine max
ctcagctacgtaggcccccccccagcgaagacaattggaggaggaaagcgcgatcctcgtgactcgcgacccctcgggtttaaatcccctgcgacgcagcacaagctactacttcaccgtcaccggagaaaatggccgacgacggagcaacctcggcggcgacgagccggagaaagccgtcgtggagagaaagagagaacaacagaagaagagaaagacgaagaagagcaatagcagcgaaaatatactcaggacttcgagctcaggggaacttcaacttgccaaagcactgcgacaacaacgaagttctgaaagctctctgcgcagaagctggttggtgcgtagaagaagacggaaccacttatcgcaagggttgcaagccgcctctagccaatggtgctgggagctccatgagaaacattcccttttcttcttctcaaaatccaagtcctctttcttcatcatttcccagcccaattccttcataccaagttagcccttcctcctcctctttgccaagcccgtttcgtttagatggggataaggacaatgtatcaaacctcattccatacattcgcaatgcgtccttgtctcttcctcctctcaggatatcaaacagtgcccctgtgacaccacctctttcatcaccaacatcaagaaatccaaaaccaattcctacttgggagtctattgccaaagaatccatggcctccttcagttaccctttctttgcagcttctgcccctgctagccccacacaccgtcacctttacactccgcccactattccagaatgcgatgaatctgatacttccaccggcgagtctggccagtgggtgaaattccaagcatttgctccttcttcatctgtgttgccaatttctccaacctttaatcttgttaaacctgtggttccacccgggatgcctgataactcaatccaagagatgaggacgagttcagatgagtttggggtacaggtaaagccttgggttggggaaaaaattcatgaagtggcattggatgacttggagctcacacttggaagtgggaaggtgcggagttaggctgctagcagaattacctcatctgggttatgtaagaatgagaccacgggattgtttttgctggttggttgttcactcaacttggtgttagagcttgagctaatagctacctcatccagctctgttggtgcaagcagtttatctggaagagactagagagttattattgggaaccagatttatcagatattgtggtcattttatgtagaaaatcatctccttccatgccttgggtaaaatgtagaaatgagaattacacttcatcccttcttgattaaatcagctatggttcaaaaaatctcatcaggcataactgcttaagagttatgtgttgtgagtgatttgaattagaaatttgaggttttgtcaagtttattgtctgtcagaaagctcacaagaccaacttatttgttaatgtcatacatttaagttgtattgttcttctttatgttcttgttctttgtatcaaatagtttgtatgtgat

SEQ ID NO: 5597 - DNA, 1178 bp, Glycine max
ggtccggacaccacacctcacctcacacactagttagagcttcttcccacttcctccgccgccaccgccaccgccaccaccaccgatggcggatccgaaagcctactggtgccacgagtgcgacatgagcgtgtccctgacgctcccaccctcccctctcctctgcccgcactgccacacccacttcctcgagctcatggactccccaaccctctcccaaaacgacaccgaatcctccctcttcgacgtcgttttccaagacgctctcttactcctcaaccccccttcctcaaaaccccgccccctcccctccctccacgtcaccccctccctcctctcctccctcgaccccaacggcgtcgttcgctgcgccgtctgcaaagaccaaattaccccccacgccgaagccaaacaattaccctgcaaacacttataccactccgattgcatcacgccgtggctcgaactccacgcctcgtgtccgctatgcaggtttcggttggaagaagaggaggaagaaggcggtgacggcgttatgacgaagatcaggagggagattattgccaggctgacggtgctgacggaagaggatttctacgggctgaggaccacgctcaaccacattgcctcgcgccacgcgctcatccaagagaacgagaatcgcggcgcccagattggggaaactcaaggtggcgattcggcttgctgatcatattggttcataaggtatatagtgtattaaaataatgctgaagttgtatcaccatagatcgtcttttcaagtgtaaatctgcaccgacgattatgctgctgttcttttccctccttttttgggaatctccaactagctaggtctagtgctatagctaaaaaatacaataaattgatggagtgcacgggtaatgtgcacttctctacccatcttccactctctctatgttggtccttgtaactggatttccttagccaaatttcttgtgtaaaacttagctttcttttatgttgtgtctgaattgcccaagtggatgatggatccttcccactgaatcatttcgttcccaatttttttgctttggctttacagtagatgctattttttcctgccaatgttgctgtagttacggtatgagatattgagattgttgagggattgaatcatttgagtgttgttgtgtacc

SEQ ID NO: 5598 - DNA, 1590 bp, Glycine max
gacattttttcacttctctataccattttcataattttgttatttttaggaattaaattgacaccgtctaatttttttaaaataaataatataaaaatacacattgctgatccggtgctgaagttaccccccgcccgggtttctgctgtgtgctgttactgtagctgcaaaccatatagctccgattgaatcactctgagttcaatcttcctgtttcatgtggtttagcttagcgcatgaccttaggtgggagataagtctgctagattcatctttcgtattaaggaattttctttgaaggctgtgatcttatggagcctgacaggttaaattccccaaccacatttgagatgccattggaggttatgggccatgagttacagttttctcaggatcccaattccaagcacttagggactacagtatgggatgcatcacttgtgtttgtcaagtttcttgaacggaattgcagaaagggaaagttttccccagctaaacttaaaggaaaacgtgtaattgaactaggagctggctgtggtgtttctggtattggcatggctttgttggggtgtgatgttattgtgacagaccaaaaggaggttttgccattgttacagagaaatgttgagcgtaatatttcaaggatcacgcaaaagaatcctgagtcatttggttcgatcaaggtggctgagcttcagtggggagatgagagtcacattaaggctgttggtcctccatttgactacatcattggcactgatgttgtttatgtagagcatctattggagcctctattacagacaattcttgctttatctggaccaaggactacaactatgttggggtatgagatccgctccacgagtgtccatgagaagatgcttcagatgtggaaaagaaactttgacgtcaagactgttgcgaagtccaagatggatgaaacatttcaacatccaagtattcaactcttcattatgggatttaaacaatcagccgagtgcacagagaacccaggtcaggcaactgttgaaaaagttgatgtggaaactgttgtggaggatgaaagcagtgagggaaatgttgtagtagaaggatctggtctcgttgaagaaaatgtgggggatcacagtaagccaatctctcaaaatgcaaagcttagtgagtgggaagccagaaggtatggagcaatggctgctagggttttgaaagatgtaaaaatatcttgattttgagagttggtctgggagatatattgtcatagtaaatacatcatgatatattagccacatgttttttttcgtattggttttaacaatctttaaagagagaattatgcgtaggttacactttagtgagcttttaatgagcgttaaacctttttcttaatccaaatttcttgagcatggatttcagaacccctgacagattaagagctagatgtaacactggaacgaagttagaatcatattatcggttacaataaatgtttctgcatcaaatggcacattgtaagtccgtttgcttgtggtagtttttttttcaccatgataacattcatgcaaagtatttactagttttattaatatctaa

SEQ ID NO: 5599 - DNA, 975 bp, Glycine max
accatatggtatagtaagtaactaaaattaagcatgaaggtgcatcagttcgcacgtggattctgggagcacgaaccctccctcacactcgggtgcaaacgcttacgcccccttgcccccaagctttccaacaccgacaccatttctccacctcatcatcctgttacaaccttcgacctcaagagcttcatcaaacctgaaagtgcctccagaaaacttggaattggatcctccgatgataatactaataagagagacccatcttcaccccagggccaggctgaaacgcatattccaggagggacacggtggaatccgactcaagaacaaatagggatattggagatgctgtacagaggagggatgcgaactccgaatgctcaacaaatagagcagatcacagcacagcttagcaagtacggcaagatcgaagggaagaacgtgttctattggttccaaaaccacaaagcacgcgagagacagaagcagaagcgtaacaacctaggccttgctcatagtcctcgtactactctcaccacttcacccccctttagttgttgtgtaattaccactatggacaccacaaaacggggggaagtagtagaaagagaggaggaagatagcccgttgaagaagtgtaggagctgggcgtttgagtacttggaagaccaaagagaggaggaacatagaactctggagcttttcccattgcacccggaaggcagatgaaggggtttgttttaattgtttgaccaatttaacgagaaatatttttagcttttaattaattgtttctgaacccttcaggctgattggaatgtatgtgctttaattagtttggtttagtttttcatcactttcttctttggttgtgttgggaaagaagaaaacacaaagtcgtctacaaatgtgtactgttccctctttgagaccaaattaaccaaacctgcttaattgtcaaaaaaaaaaaaaaaa

SEQ ID NO: 5600 - DNA, 1715 bp, Glycine max
cccgggtcgacccacgcgtcccccccgcgtccgtaccgccgcgggccgccccccccccccgggcacagaatgaaaatagtttcgtcgaattctagcttgaatatacacaagtgcgttaggtaatcagaagtgtgaattggagtgtatggattcagaagaatcaatctggagaggtcgataaacataaactccaattggttttgttttgtcggcaatgagggttctgcaacttggattgtttcttgctctggcatctggattcgcagccatttccatttacatcaccggcctctcagatccttttgtatatcccagttatcacctcacagatgaagacacccaagcattgctttcgctgcacgacactttccagaagtgtgtgactgcaaatggacttggcctaaaagcaaccaggggcacagattattgccaaaccacaataagtttccccagtgacaccatccccaaatggagagatcccaaaaccggtgaacttgaagccctgtcttttgattttaatctatgtgaagctgtggctacatgggaacaggtgcggaacagtaccactatactcaccaaggaattcattgattctttaccaaatggatgggaggaatatgcatggcgtaggatcaataaaggaatacagctcaaccgctgtgagaacaagaccttgtgcatggagaaactttcactggttctccctgaaacaccaccatacttcccaagacagtttggacgctgtgctgttattggtaactcgggagatctcttgaaaacaaaatttggaaatgagatagatggttatgaagttgtcattagagaaaatggtgctccaacacagaactacactgattacgtgggtaggaaaagcacatttcgccttctaaaccgaggatccgccaaagcactggataaagttgtagagttagatgaacaaagaaaagaagtcttgataataaaaacaacaattcatgacatcatgaacaaaatgattcgggaggttcctataaaaaatcctgtgtacctcatgctaggtgcatcctttggctcagcagcaaaaggaactggacttaaagctcttgaatttgctctctctatgtgtgattcagtggatatgtatggtttcactgtagatcctggttataaagaatggacaagatatttctctgaatcccgtcaaggccataccccgttgcatggtagagcttattaccaaatgatggagtgcttggggcttatcaaaattcattctcccatgcgagctgatctaaatcgtgttgtaaaatgggttccaagccgccatattataagatctgctagaattgcatcagagaaattactgaggagagttggagcaggatctgaagatccactggctgcatgttccataattaagaagcaagtaaaaagaaatctaaatgcagtttcaaagctcagaaaggcagcacttgatcatttacggtatgtgaaaagaacaaccatgtatcctctagagcatagtcctggacatgggtcgctttgcactgtgccaactgattaaactgttgggaagcatccaaccccatcatttacaaaattatccgtttttttaccttttccaaaatatgtcattaacttgacaaaatggcaatgaagcttcctactcaccagcgtagtggtaaatcaaggaaatttatttaatctctcaaaaaaagaaaaaaaaaaaaaaaaaa

SEQ ID NO: 5601 - DNA, 1452 bp, Glycine max
tcagctacgtaggccccccccccccccagtaaccgaagccagaaagaggattgagctttgagccagagactatggcttttacttcttcatgttctcttgcttctcagtttctccctcccatatatcattctgcaatcccttttcactcaacgaactgcacaaatttgtcattccccgctgttccgactccaagacaacaaccactgttgttttcttcaacctcaacttgcttagcagcagcggcggcgtcaaactcaaacagcacttcgaattccaataacaacaaccctgcttcagcttcagcttcgtcgaaagagaagaaagtagaagtggaagtggaagtggaggaggagctgccgtggattcaggaaaaggctttggacctggtcgagttcacgggctccgttacccaagccattcccgggcccagagtgggtcccacctccttgccttggattctcgctattcctctcacatatgctggccttactttcgtcattgcctttgtcaagaccgtcaggaaattctcttctcccaaagcaaaacgccgcagacaggtcagtaaaaatgcgacgctatgcaagtcgctggatgatttatttcaaaaaggaagagatgaagttaagcttgatgctctcaagcaaattgagaataagacaggttttgatttggaagaaatattgcgcaagtatatcaggtatgctctgaatgagaaaccattcaatcctgacatggtagctgatttaatccagctaaggaaagcttctatgttaaatgattcacaagttgctgagattctgaatgaaatttcacgacgaattgtgcgagacaaaggccctattgtgatggataaatcaggttataccgaaaagggttttaagagaaaaatagctgttcaggccctttttggaaaggtcttctatctgtccgagctgccagagttttgttcaagagatagctccttagttgtcaaggaaatcttcggtgttacagatgaagatgctgacaaactcagaatccacacaatctctgaagctggcagcctagatgcacttgagaagatggttgatagttcagattcagaggatgctagcgaggattcattcgaggcctcttaatgcaaatcatatttcagtgtttatcatttgaaaaggtcaaagaataaattgatgctgcaaattaactgtacaacaccatcatcggctcccatccggaagagaaaattttagaggaaggcagtgattcagtacttttactttacgtacaatttacagtgtaacttcttacatactttcgagatccatgatatttgcttgatatttttgttattacggtcttataagtcagtcttagcggcataacggcattgatgtttaaactggagaaattgatagtgatacgtttggatatagacaaaaaaaaaaaaaaaaacatttgggttcacactttgac

SEQ ID NO: 5602 - DNA, 1973 bp, Glycine max
tgttgatttgagtcccatattgtttgtttttcgatggctaaattgttcagagcgtttttcttcaagtctcttttcttcttttggtaccgttttctctttaggcaactcaggaacctcgtccgtttccacagaaccattagcaattctttttcgggtgcaacaacacagtttaacaaatacctgaaattcccctctctaatccaccgatcagacctcaacgatcacacgttgatctttgatgtcgaaaacgcgttgttgaaatcctcttctttgttcccatatttcatgctcgtggcctttgaggcaggggggcttataagagccatagttttggttcttctatacccttttgtttgtgtgctgggaaaagagatgggcttgaagataatggtcatggcatgcttctttgggatcaaagcttcgagcttcagagttggaaggtccgttctgccgaaattcttcttggaggacgttggtgcagaaatgtttgaggctctcaaaaaaggagggaagacagtgggagtcaccaatctaccccatgtgatggtggaaagcttcttgagagagtatttggacattgatttcgttgtgggcagggagctgaaagttttctgtggatactacgtaggattgatggatgacacaaaaactatgcatgccttggagctggttaaagaaggaaaaggatgctccgacatgatcggaatcacaaggtttcgcaacatacgcgaccatgatgattttttctctcattgcaaggaagtgtacgtggtgtcagaagcagacaagaggagctggcaaaagctagcaagggagagataccccagagcccttatatttcacgatggaagattggccctaagacccactccaaaggagtccatagcgatgttcatgtggctaccgtatgcaataatcctcgctgttattcgcatttccctcgctctctcactcccatttaccatctcaaccccctttttggtctttagtgggatacgtctcacgaccacagcatcatcagcgcccacaggctcccacaacattaaacagaacaaggggaatgtcggtaatctctacgtgtgtaaccacagaacattattagacccgctctacatctcattctcgctacaaaacaacttaaccgccgtgacctacagtttgagtaggatgtccgagatcctggccccaataaaaacggtgcggttaaccagaaagcgcgacgaggatgccgaaatgatgaagaggttgctggggcaaggggacctagttgtgtgtccggaggggaccacatgtagagaaccgtatttattgaggttcagccctcttttctcagagatgtgcgatgagattgtacccgttgcagttgacacccacgttagtatgttccacggaaccactgctggtggacttaagtgcttggacccgttcttcttcctcatgaaccccgctccagtttacactgttcggcttctcaaccatgtcttcactaattcacaattactatcatctcacaccagtaacctttaccaagaggctcataattcgaggtttcaagtggctaatagggtccaaacacagattggaaccgcgttggcgtttgagtgcactaaactcacacgaaaggacaagtacttgatgttagctggtaatgaaggcattgttaattccaacaccaaatgcataagcaagtccaactcttagtggatcgatcgagatcgagagctagtacgttaccctttgtaaagtcgccaacaaccatgttagctgtgtcgtaaatgaccaattacatatacaggatccatgataaagatagaatgccaatcaaggggacctcagtaaattaaaattaattaaattcgtcctattcctttctcttgattgttattatttcaaactttgtaataattccttgtgtggtacaaaagcaattttaattctcatctaaaaaaaaaaaaaattattatgcaattaaa

SEQ ID NO: 5603 - DNA, 898 bp, Glycine max
cccacgcgtccgcccacgcgtccgcccacgcgtccgcccacgcgtccatacggctgcgagaacacgacagaagggggcagccactctgtgagagaaagagatagtgtgggagggagagaggagcggaggagagaaaatgacgacgaggttcaagaagaacaggaagaagagaggccacgtcagcgccggtcacggtcgtatcgggaagcaccgcaagcatcccggtggtcggggtaacgccggtggcatgcaccaccaccgcatcctcttcgacaagtaccatcccggtttcttcggaaaggtgggtatgcgctacttccacaaactccgcaacaaattctactgccccatcgtcaacattgataagctatggtccctcctaccccaggaggccaaggacaaggccaccgccgacaaggcgccattgctcgatgtcacccagttcggttactttaaggttttgggtaaaggggttttgcctcagaaccagcctctggtcgtgaaggccaagcttgtttccaagatcgccgagaagaagatcaaggaggccggtggagccgtcgttctcaccgcctgatttttttggggtatttttatttaaaaggattttgagatctgttgttatttttggttttggttcttgttttaatctgtctgaactggattagtttaaatgtttttttttatattctcaatgttctggattatatcgttttttgttgcgtgttatggtatgcgatgggagttttacatgcacaaatcggtatttacaatactgatttggaacgaggcgactaaggttaatgttggatataattaaaaacagtgctttgttggaacgatgcttgttggcattgaaaactggcaatgcttcaccccaggcttggtctctataatc

SEQ ID NO: 5604 - DNA, 839 bp, Glycine max
ccggtccggaatgcccgcgggcccccacgcgtccgtacggctgcgagaagacgacagaagggggctgccgctctctgagaaaaacagatagtgtgggagagagaagagcggaagagaaaatgacgaccaggttcaagaagaacaggaagaagagaggtcacgtcagcgccggacacggccgtatcggaaagcaccgcaagcatcccggaggtcgcggtaacgccggtggcatgcatcaccaccgtatcctcttcgacaagtaccatcctggtttcttcgggaaggtaggcatgcgctacttccacaaacttcgcaacaaattctacaatccgatcatcaacatcgacaagctgtggtccctcctcccccaggaggccaaagacaaggccaccgccgacaaggcacccttgctcgatgtcacccagttcggttactttaaggttttgggtaaaggggttttgcctcagaaccagcctcttgtcgtcaaggccaagcttatttccaagatcgctgagaagaagatcaaggaggccggtggagccgtcgttctcaccgcttgattttttagggtatttttatttttaaaggattttaagatctgttgttatttttggttcttgatttaatctctctgaactgtattagtttaaatggttttttatattctcagtgttctggattctatcgtttttgttgcgtgttatgttatgtgatgggagttttacatgcactaattgaaacctattccctatgcatctctgttaaaaaaaaaagttgccgcgcccgtgctaatttcaatcagattaagcatctcttcgaaaaaaaaaaaaaaaaaaaaa

SEQ ID NO: 5605 - DNA, 1114 bp, Glycine max
cccacgcgtccgcccacgataaaaggatcccgcgggtggtccctctttcttcgtgctaatcttatcttatccctctaatcactctagctgttgcaaatttctactatttttcaatggcttctgcagatgttgagttccgttgctttgttggtgggcttgcttgggtcaccggcaacgatgccctcgagaaagccttttcaatctacggcgacatcgttgaatcgaaggttatcaacgaccgtgagactggaaggtccagaggattcggatttgtgaccttcgcctcagagcagtcaatgaaagatgcgatcgcaggaatgaacggccaggaccttgacggtcgtaacatcactgtcaacgaagctcagacccgcgccagccgtggtggtggtggaggcggtggtttcggaagtggtggtggatacaaccgcggtagcggtggatatggtggtggtggtggcggcggcggatacggtggtcgtcgtgaaggtggatacaaccgtaatggtgggggtggaggtggaggatacggcggtggtagagaccgtggttacggtggtgatggtggttctcgctactctcgcggtggggaaggcggtggatccgatggaaactggagaaattaggcatatgaccctgtaaattagggtttatgattaagttcaattattttaaggtgttgtctgtgtgtggtttaagtttcggtatctgtgttggtttcgtttcgtgttcctgtggttttcgtttttgacctacaattctagttgtgtttatagtcgatcgaatgaaatgatagtaagaaattatcgcatcaaatttctatggattttgctatctgtttgctggacgtggaaatcgaattggattaatggtgatggttcttagtttaccggattcggtaaattgtatacccaaaacgataaaaatcactaatttatttttttaaaattggcataaacaaccctttggtactaaaattaatttagttgatctgcagtctgcaccaaaaaaaaaacaacatggagggcagaatagaggcataaaaagcacgtgattcaacatgagggattgtgaaattcttaatctatgaaacataaatctaattaccaattat

SEQ ID NO: 5606 - DNA, 1546 bp, Glycine max
gggacttgtccttttcagacctgtctgtcgacgccactatttttccatcctccccacgcgtccgcccgcgcgcccgcccccgcatctttttttttttttttgccttcttttcattcctttcttttcttcaaatcaaggaactcagctatgactaccagagaaatccttcaaaagatgaaggtaaaagttggtttgggttcatcagaccctgactcagggaaaggaaagagcaagatgtcaaagaacataactcatggttatcatttggtgaaaggaaaatcatatcatgacatggaggattacgttgtggctcaatttaagcaaatagataacaatgaattgggtttgtttgcaatattcgacggccatgcgggtcagaacgtacctaattacttgcggtcccatttgtttgataatatcttacatgagcctgacttctggaaagaacctgcagatgctgtgaagagagcatacagtaaaactgattctaatattttagatatgtcgggtgaattaggtagagggggttcaactgcagttacagcaatattagtcaattgtcagaagttaatagtagccaacattggggattctagggccgtcttatgcaagaagggtgtggccaagcaactatcagtggatcatgagccaaccgcagaacatgaggatattaaaaatagaggtggttttgtatcaaactttccaggggatgttcctcgtgttgatggacggctggcagtgtcaagggcatttggtgacaaaagcttgaagaaacacttgagttcagagccatttgtgactgtggagaatataggtgatgatgcagagtttgttatattagccagtgatggattatggaaggtaatgtcaaatcaagaagcagctaattgtataaaaaatataaaggatgctcggtcttcagcaaagcgccttactgaagaagcagttaacaggaaaagcaccgatgatatctcctgcatcgttgtgaaatttcagtgatctcaaggctcgcatgatagactttgatccagcaacttgcaagtgtaacataaacttcggtgtaatgaataaaacgataatgcttcatagccatcaggtggtgttattatgttgagtcattcatgcaaattaaatgggacaactgtgttatttaaagtaataatgtgggaaagatgtagattctgattatgtatagaccaaactttaatatgtgagtttgcaaggaagtttgtcagtgatcttgaaagcttgctttcagatcactgcctaggcccataagattttagattaagttattcgattgtattattggccaacactcctacctttgttggataattagagtctagagtgtgtgggaagctttctcacaatttcttgtaatttttcagaacgaacctgggaatgaccttcaacgatatcttttcataaataggaaggagggtgatggctttgcagtaaaacaaggatatcaaaagttgacaggggcagagaaggaacatgtttgtcacccttttgagctattatacaattttatttactggtt

SEQ ID NO: 5607 - DNA, 1009 bp, Glycine max
ttcactcattcattattaggtaaacaacacaaaaaaagaaaagaaaaaggaaagaaacagtcacaacaaaaaaagaacaaaaaaaatccaaatcatcgatgggtggtaaatctggcgtggtttggattttgctggcgttgatcgccgccgcttggtgtctgttaactccagcgagggcgaattcgacgacaatatatgaggagctccgggcgcagggtcttccggtggggcttcttccaaagggaatagcgaagtactcgatgaacgcgacgagcggggagttcgaggtgtggatgaaggaagcgtgcaacgcgaagttcgagaacgaggtgcactacgactccaatataaagggtgttcttggctacggtcggatcggggaattatccggtgtgtcggcgcaggagctcttcctgtggttccccgttaagggtattagggttgatgttcccacgtcggggctcattcatttcgatgttggtgttgcggataagcagttctctctttcgctctttgaagatcctcctgattgtaacccccaggcccaggttaatgttggtggtgaaggtgagcaaagggctgtttggtagaagataggaggaatgttgctgcatttcaaattatacagctcaatcggcccctctatgcctgtggttggtcttcattgatatatatatatatatatatatatatatatatatatatatatatgatatccagtgcggtctttttcatatctgctgctttgattgaatcaatcgcctgtctcaagggactaaggatgacaattttggtggtccgcaagcatatggtttttttttggcaaaatctgtgacagacaaggatgtagggttaggttggttttgctaatataccaaggttttactatctgtattttggtcttgttatttgtgcatataaatgtttcagacttgtgttagattcaactatattatattaaacaacataatctgttaggtggttcttctattataaaattctttttatc

SEQ ID NO: 5608 - DNA, 2684 bp, Glycine max
ccacgcgtccgctctctctctcactccaaaatcccaaaaccgaattcacattcacaaccacacctccgcaataaaataaaaaaaggtaacctccctcagtccctcgctgatggaagagctctccgcggggcctctcgtccccgccgtcgtcaaaccggaagcgtccaaaggcgccgccgtcgccgccgacacctccgccgcggcctccggcggcacgttcccggcctccacgtcggagccggacaaggacttcctctgcccgatttgcatgcagatcatcaaggacgcgttcctcaccgcgtgcggccacagcttctgctacatgtgcatcatcacgcacctccgcaacaagagcgattgcccttgctgcggccactacctcaccaacaccaacctcttccctaacttcttgctcgacaagctactgaagaagacttctgcgcgtcaaatatcaaaaaccgcttcacctgtggaacatttccggcaggcattgcaaaagggttgtgatgtgtcaattaaggagctagacacccttttgtcacttcttgccgagaagaaaagaaaaatggaacaagaagaagctgagagaaatatgcaaatattgttagacttcttgcattgcttacgcaagcaaaaagttgatgagttgaaggaggtacaaactgatctccagtttataaaagaggacattaatgctgtggagaaacatagaatggatttgtatcgtgcacgggacaggtactctgtaaaattacggatgcttgatgactctggtggaagaaaatcatggcattcatcaatggacaagaacaacagtggccttatatctcgtcctctaaatctacgaggagggttgtcatcagggagccatactaagaaaaatgatggaaagtcccaaattagctctcacgggcatggagttcagagaagggatgccatcactggatccgattcacaatatataaatcaatcgggtctttctctagttagaaagaagagggtgcatacacagttcaatgacctacaagaatgttacctacaaaagcgacgacatgcagctgataggccccatagccaacaagtaagagatataaatctcataagtcgagaaggttatactgctggtcttgaagattttcagtcagtcttgacaactttcacacgctatcccccgcgtccgtacggctgcgagaagacgacagaagggggatttaaccatgtatattgcactttgcagcatagagtttgactgcgatgatgatttgtttgctactgctggagtttcccggcgcatcaaagtttttgacttttctgctgttgtgaatgaacctacagatgctcactgtcctgttgtggagatgtctacacgttcaaaacttaattgcttgagttggaataaatatgctaagaatcaaatagctagtagtgattatgaaggaattgtgactgtttgggatgtaaccactcgaaagagtttaatggaatatgaagagcatgaaaagcgtgcatggagtgttgatttttcaagaacagatccctctatgcttgtatctggtagcgatgactgtaaggtcaaaatttggtgtacaaatcaggaagctagtgttctaaatatagacatgaaagcaaacatatgctgtgtcaaatataatcctggatctggcaattatattgcagttggatcagcagaccatcacatccattattatgatttgagaaatatcagccgtccagtccatgttttcagtgggcacaggaaggctgtttcatatgtgaaatttctgtctaatgatgaacttgcttctgcatcaacagatagtacactgcgattatgggatgtgaaggaaaacttgccagttcgtactttcaaaggccatgcaaatgagaaaaactttgttggccttacagtaagcagtgaatacattgcgtgtggcagtgaaacaaatgaagtctttgtgtaccacaaggaaatctcgagacctttgacttgccacagatttgggtcccctgatatggatgacgctgaagatgaggctggatcgtacttcattagtgctgtatgctggaagagtgatcgccccactattctaactgcaaatagtcaaggcaccatcaaagtgctggtgcttgcagcttgaacacgagaaaaaagaatagaatgtggaattggtattatcttttcccatgctattatgattgtatcatttattaattgtacatagttttcaagtgtatatggcaggctttagggatcttaatgagatattagttgagtgcttaaacctttatcaacaaacctatttaagggactgaactttaatttttaccaattgaggacctcaaatttattaaattttgtattaataaatgctcaggagacaaaataaaatatcaaatttggcatgcaaaaaaaaaaaaaaaaacagcaaagcacctagtgtatatgatttaactttgtaaatacataactatgattgttactattgtgataaaattgaggccctcaattgatattgaaataagttaaggttcttaacataaatcttgaagataaaggcttccttaattggttataacattatagttaaggtccttcgagtacaaactagttgaggttactcttcatattgacattctcaaagaaacacgtgtattaattttttatgattggttgtatcggagag

SEQ ID NO: 5609 - DNA, 731 bp, Glycine max
  misc_feature (1)..(1): n is a, c, g, or t
  misc_feature (10)..(10): n is a, c, g, or t
nacccagggnaattcggccattacgcccctcctattgtttcttaccccttcaaagcaaatacagaaaaaaagagtcaagcggcgagcaatggcgacatcgctggtgcgatcgggttttcttcgaagcgccctaagaggaagcgctcgtggctcccaggttccgaagcgaaactttgcttcctctggtcatcacgatgatgcatatgagacggccaaatgggagaagattacatatctaggcattgttagttgcactggtttagccgtttataatctatcaaagggccacccacacttcaaagaacctcctgcttacccatatttgcatatccgcaataaggaattcccctggggtcccgatggactatttgaaacgaagcaccatgaagagcattagtggtttaatgaaggtatttgtggcactggtgggcattcgttttgtcaatgttcaacgaatagtgataatgatgattattgtgatttttgaaatgtgatctagaacttgcacttggcaacgttagtttgtcatgtttttatctcatgttcgtttgtatggttgaaacaaaataaatttgtcaaacaatatgatgcttctttttatgccgattcttgttcagtaagatttttaaagaaaatgatcttaagaccccagacttttatcaaaaaaaaaaacgagactagttctcctcaaaaaaaaaaaaaaaaaaaaaaaaaaaaaaaaaaaaaaaaaa

SEQ ID NO: 5610 - DNA, 628 bp, Glycine max
tcctattgtttcttaccccttcaaagccaaaacagaacaaaaaagagtcaagcggcgagcaatggcgacatcgctggtgcgatcgggttttcttcgtagcgccctacgaggaagagctcgtagctctcaggttcccaagcgaaactttgcttcctctggtcatcacgatgatgcatatgagacggccaaatgggagaagattacatatttaggcattgttggttgcaccggtttagccgtttataatctatcaaagggccacccgcacttcaaagaacctcctgcatacccatatttgcatatccgcaataaggaattcccctggggtcccgatggactatttgaaacgaagcaccacgacgagcattaatggtttaatgaaggtatttgtgacaccggtgggctttggatttgtcaatgttcaagaaatagtgatgattattgtggtttttgaaatgtgatctagaacttgcacttgacaacgttagtttgtcatgtttttatgtcatgttcgttcgtatggttgaggaacaaaataaaattgtcaaacaatatgatgcttcttcctagccgattcttgttcaataagatttttaaagaaaatgatcttaagacccaaaaaaaaaaa

SEQ ID NO: 5611 - DNA, 995 bp, Glycine max
gacttcacagaacgacaactgtgccagcattcattatagagagacgtagtactacacttcttgagatcgatcataataaatcagctacgtaggccccccccccaaaacttaccaatgaagttgaagcagcagaaaatgagagtagtagtagggtcagtgtggctgtgcctctttctgttggctgtcggggagtcggagggagcggatttggcggcgaagtgcaacctgctggttcagaaagtgctgccgtgcctgaacttcgcgacggggcaggcggcggttccgaccaaggactgctgcgaggcgacgtcggagataaagaagagcgacccggagtgcctgtgctttgcgatccaacagactcacaagggtagtccggaggtgaaaaatatgggcatacaagaggctaggctgcttcagctaccttctgcttgtaacttgaagaatgccagcaccaccaactgtcctaagcttctgggtctatctccaaactccgctgacgctgctatcttcagaaatggttcgttgaaaacgaattcagcttcaacagtctcagaagaaatccacaagggctcttatggaaacatgcttagacctgttctcgttgcagacctaatagctgttctcctcgtcatgattccaataggttcgtgatgggtgccttcaattaatgactcacgaagtaacagataggcaccactttaaatgaaagtagccgtggtagttgttttcctactcatggatgggtggattttaattactttgcaggttgcagcatatatagaattaactgatttgcgtctgcaacatcttgttatgttgtctttattagttaataattatcttaatttgtatggacttcttttccacatgctagactattgaaaatcaaggactgttgtgttttaatttgttttaggttgtacatttcgaactgccttatgttatgcttatcgtccgtcactcactcattagtttaatttttacatcaaaaa

SEQ ID NO: 5612 - DNA, 1223 bp, Glycine max
aattcggcaccaggcaagatgttgcaacaattactggagctgaaatgttttggatgctccagaatccgaggaagtacaatcagagcaactggctgaagcaggaaacttagaagcaacggttgcacaagaagctgaggctaacttaaatgttgaaaatcagccaagtttgaatttggaggttgctgaaatctctattgaagcgtatgaatcagatacaaagcaggcacacctacgtgggcccccccccccccccaacgaacaaagtgacataagtttagattcagatgttgctgcagcgaaagatgatgtagcagaggaaaaatcagaaagcatagatgctgcgattaaagggaatgaagggcgattaggagcaattgacattcctccacatgtggtgctatgtttgctgctcggtgcaggtactgttttaattgcaggtgcagctttcaattggtcaaggaagaagggtagcaaaagcataagctccgtggagaaacccctggagttacataatgactcctttccatctaagaacaaacagatttctccagagaaatcatctgggcccgtagaaatggacgtgcttgaagattcatcatgcccttcagaagcgagcagcattcagcaaagctcattctactgtgaaaaagaagtgaatgaaggtcacagactaggccctgagaagaagcgcaagaataactacaggagagaatctttggcttcttctgcatcagactattccatgggttccccatcctatggaagcttaactttgtatgagaaaattccaatcaagcagggacattgggaggacgagatcatcactcctgttaggcgttcaagtagaattagaaaccaagccacttctccttcataacctggttttgtttgtgtttggtttttaattcgtgttccaaagcatgttcaaacttcaacccaatccatggggtgtagtttcattgaactgaataactgtctgaatcttctgaatggaatcaaactcataccttggtgttcaagtaggattagaaacctagccggctacatttatccgttgtaatatgaccagcataactggttactgtaagcagaagtgtcctatcttctgaatcttgattcttctgtagcagaagaaatttattgttgagtcaatctgattggttattaatttgtattaatccaatggcctcaccataattattattaatttgcatattccaaaa

SEQ ID NO: 5613 - DNA, 1414 bp, Glycine max
  misc_feature (1372)..(1378): n is a, c, g, or t
  misc_feature (1380)..(1384): n is a, c, g, or t
  misc_feature (1386)..(1395): n is a, c, g, or t
  misc_feature (1399)..(1399): n is a, c, g, or t
  misc_feature (1413)..(1413): n is a, c, g, or t
ggtttgtattgatattattatatttacctatgaaaattatgcgcgtggttcatatatttatttctcctgctacgacgactggtacatgatcagtagttccccaattttcagttagatagattatcacacctcgtgaacacaggttgcatttgctgcggaggatcgatctcgccaatggatttcaacaaggagcaaaagaaaaccatagaccaatccatcttattatgctgcaagttctttgtctccgaatcacgcaacaacgccaccctcaatgcaatagaacgagttgcaaggtcaaacccggaaactgtgattgtgaacatgtttcatgatcgaagttataacagggcaaggtacgaccttgtgtcatatgttttgcacgactgcacaggaaatcccatatacagccccttgcaccaaactgtcatagccatggctgaggctacattcaatgccatcaacctcgaattccatgaaggtgctcaccctcgcttgggcgcactcgacgacattatcttccatccacttggtcatgcgtcgctcgacgaggcagcttggcttgccaaagcagtggcagcagacattggcaaccgattcagtgtgccagtgtttctgtacgccgcagcccacccaacagggaaggaagttgatgccataaggcgagagctcggatattaccggccaaattcaaggggaagtcaatgggccgggtgggcaatgcccgaaacgctaccgctgagccctgatgaagggcccaacgtggtttcaagagctaaaggcatcacagtgattggtgcacgcccttggattacattctacaacgttccaatcctttgcactgatgtgtcagtagcaagaaggattgcaaggaaggtgagtgctcgtggcggtggccttcccaccgtgcaaacgattgctgtagtccatgaggattcaactgagatagcctgcatgcttttggaccccaaacttgtcggagcagatagggttcagaatagggttgagatgcaggcagcggaagaaggactcgacgtagaacaaggttatttcaccgacctttctccggaaatgttcgtagagaaatacatgaaactaatcaataatgctaacaaatcgtgatcatgtgtgtaactcgttagttggacttgttgatcgatgaataatcataaatgatcaaaggttgtgattttcagtaagtgtaatacaatggttctaaattatgattcctaaatggttggctggaaagacaaccaaagggtaacaaaaatgaagcatgcatggactagaaattgagattcctaaatgcttctgtgactatctatccgtatttatatatcaaattaatgacccgtttttcggtccaaaaaaaaannnnnnngnnnnngnnnnnnnnnnaaanaagggggggcgttnt

SEQ ID NO: 5614 - DNA, 1598 bp, Glycine max
agatttaatgcccccaagtccaagtccaagtcccattctcttctctctctctctgagcaatgcctgtcacaaacacaacaacaccaactgtggcagaacacatcaaatggagaagacccagaaaccaattcaaccaccatcagcaccccatttcagaaaccgatccaaaccctcaaatcccttccattatccaatccactaggtgcaagtctaccatttcctccttgctcctctccactttctccaacaacacctcctccaacaatgacactcccaccaccttcaatgccactgcccatagcaagaaaaaaagcaacttttctgcatcaaccttcagagggttggggtgcaccgccggagcgtcgcagcaggtgtcggtgccggcggtgattcgctcctccgccgattggcaaggaaagaaaacaagaaaaaagaagcacaagagaagcagcagcagcagcaagaacaagactttccatggtggggttctagaagggtccaatccagagtgcgtggattttcaagatgtttggtgtggccctggaattgggttctcaacagatgctgctgctgctgcctctgttgattgtgttgtggccaggaagaatgtctcttctgcaagagggaaaattgatgtggataagatcactcacagggagcgatcatcgtatgtgggaaggcgcactgaaaccttcacttttctggacagtactgatcctgacattttcacaccacgctctgcctctgactcttatggaactgcaacatactatcgtcatgttagagatccttcctctgatggttttgctgagataatgatgcttcaagggagtctactaatgggtggacaactaaattcacatgatcatttcagagactggagactggatgttgataacatgtcctatgagcaattgctagagcttggtgagagaattggtcatgtgaacactggactcaaggaagatgagatgggacggaacataaggaagactaggattcaattttgggatgatacatcaaagcttcaagtagataaagagtgcagcatttgtcaggaggagtatgaagcgggtgatgagttggggaggctaaattgtgagcacagttatcactttcagtgtataaaacaatgggttgcacaaaaaaatttctgcccagtatgtaagcaacaagttgcggctcgacactgagtgactcaacccttctgtttttttggacagcttccattctcatccataaatttgtgtatagtttttcatatccaatacaagcaagagttttcattctttgctgtcaattatcatttcatctttcaaaattcctgcatcctctgcgaggaatcggcaattatatgttatcgagtaaaggtttatattcgggctgagacctttgcatattatacgcaagagttgccttgcttaagagcagttattattatttttttgttttgggtttttaatgaagttgtgtctgtgacgaagtagggtgttcttatttggaatgcttgtcctcaactatgcctatccattttgaatcctatggtgataggttttgttggctgttgcaatatctatattatgtaacttgtttatggg

SEQ ID NO: 5615 - DNA, 702 bp, Glycine max
acggctgtcacgaaattgtgagcaggtaaacatctacaatctgttgccatggcaaaaacaactcacatagctattgtttcaagccctggttttggccacatagttccaataattgagttcagcaagcgacttgtgaagcttcacccaaattttcaagtgacctgcatcattccttcacttgagtcatccacagaatcctgcaaagcctaccttaaaacccttccttcattcatagacttcatctttcttcctccagttagcatagagcaattatcccaaggaggatacattggacagctaattcaactcactatttctcattctctgccatcaatacatgaggtgctgaaatccttgttctctaaagtccctttaactgcgttggtggtagatgttcttgcacttcaagcattggaatttgctaaggaattcaatgccctgtcctatttttacttccctagttcagctatggtattgtcactgcttctacacatgtcaaaacttgatgaggaggtttcaagtgcgtacaaggatctaacagaacctataagggtaccaggttgtgtaccattcatggggagtgatcttccggatccatcccatgatcgatctagtgaattttacaagcattttgttgaagataccaaggcaatggtaactactgatgggatcttgatcaacaccttcttagaaatggaatca

SEQ ID NO: 5616 - DNA, 1269 bp, Glycine max
ttttttttttttttttttttttaaaaaaaatactattaattatagcagggtaccaattccttaataaaattaaaagtggaaggaaagaaataccctgtaattacatattaattaaaactacaaatagcataaagatgtggagcttaacttaaagggagagtgtaggtcgagacagtctagtatgatacaaatcacaactacaaatgaaacaaagtgaaatatgaacaaaattaattcatcattaagcaatacgtgtatagtctactaatctagagtctagtttcactcttgaactaaaaacctctaatcaaagttttgtcttgtactggcactcttggttcccaacagttccattagaaagattaattgcaacatcacaagaagtggaggaaaccacatggactttgataaagcctaagatgctgactttcccagacatcctcacgaaagtgtttaggggcaatgtaccagatgtgacatcagataaaagctgagaattggagagcaaacggtcggccataatggtgagggtgagattgaatcctttggtctcaccggatgaaatctctccggcagagatcgggacttcacctatcagctgccctctgtaattgaggtgggcagtgctgtctgaatactggaatcccaccttgttcgggttcttcactgagacatccactcccagggtcacattcaaatctacccttagttttactggatccaagctcacgtgaaagtcctctagcttcgttgagtccactgtggtaacaggatgcttggctttgaacactgtcaacgctagtatcacaattagcaatacaattgcaatcacaacacctgtcaccgtcaggcacacttttctccctttaccagatcctaccttcattctgcttgttccttcttatcagcctgggaatgcaatagaggttatctggggtgggtgttggtcgcatacatccaccgcaaagcaaagatgaaatctctcaaaaatgcaatccttcaaaggatccgttatcaaatgatagtcggcagtcacgaaaattgagaagagaaactgttgaacggggatgcgtaggattacactttacaggctgttcaacagaactgccattaaaagcggcgtggtggtattgctttttggcttgtgacagaacagaagaactaactacattcacagttgacactttgacattcggggggggggggggggcctacgtagctgaaatcgactctaatacactactttgtttttataatacactttatcca

SEQ ID NO: 5617 - DNA, 851 bp, Glycine max
aattcggctcgagcaaatattatttacacccacccttcctatatatataaaaaagaaagccccctaagcctcataggggaaaggaaagccatcgagaaaccaaaaaccaaaatcaatttagaggaaaaagttggaagaagcatggattctaggcggcgtggtaaaaacgcatctatgcaacgcaagttgcaacaacttcgatcggttacaaattccagtgctgtgaacaaagcctcaattattgtggatgccaccagatacatagaggagctgaagcaaaaagtggatggattgaactcagagctaggaaccgcggaatcatcaatctcccaagacgaactacccatggtcactgtagaaaccctagaaaggggattcctcattaatgtgttttcagaaaggaattgtcccggtatgcttggggcaatactcgatgcatttgaagaactgggacttgatgtgcttgatgctagggtttcttgcgaagacactttccagcttgaagcagtcggaggagaaagtcaagagaacgaaagcattgacgcgcaagtggtaaagcaagcagtgcttcaagcaatccaaaacatggattaatcgaagaacacatgtgctaagaagaatgtacctcagactctcttaatttcttaaaatctttgtattaaatataaaagttacgtacccaagcttaagtgatgagagaattgaagtgtgttactatattgtgccaaaatgtaagtaccacaatggcccttaaatgtgatgtggcttcttcgtttgtaggaaagaatgaatggacagggatcgtccaggttaattggtatattggtgtttaattggaatcaatgagtttg

SEQ ID NO: 5618 - DNA, 1299 bp, Glycine max
actaaataaatagttctgttttgtttctctctcaactctcacaacccatctttcatatccaaattccaatgcttcttcttccttcttatttcaatttcaatcactactattattactctttcacgcttttgcttctcgatttttaaaccctaaatctatctatctgtctaatagataagatagggcaaaaacaaaacaaaacaaaataaaaccctagccaaagaaagaccttgttgagcagcagcagcagagagagagaggcttatggaaggagtaccgcacccaatacccagaactgtcgaagaggttttcaccgattttaagggcagacgcgctggtttgattaaggccctcactactgacgttgaaaagttttaccagcagtgcgatcccgagaaggagaatttgtgtctatatgggtttccaaatgaaacatgggaagtgaatttgcctgttgaggaagtgcctcctgaacttcctgagccagcattaggtataaactttgccagggacggcatgcaagagaaggactggctatcactggttgcagttcacagtgactcatggctgcttgctgttgctttctattttggtgcccgctttggatttggtaagaatgaaaggaaaaggctttttcagatgataaatgatctgccaacaatcttcgaacttgtgacaggaagtgctaagcaatcaaaggatcaaccagctgctcacaacaatggtagcaaatgcaaatcaagtggaaagtcccatcagtctgagtctcaggccaaggggatgaagatgtctgcaccacccaaagaagaggatgagagtggagaagaagaagaagaagatgatgaacagggtgcaacatgtggtgcttgcggtgataattatggcactgatgaattctggatctgttgtgatatgtgtgaaagatggttccatggtaaatgtgttaaaattactcctgctaaggctgagcacatcaagcaatacaagtgccctagctgcagtaacaagagggttagagtttgaaagctctaaacctttggatcaatcaccaattaaacagacaagatttagaatgtttgataacatttttacaagtgaaaattgcttcctgttctagtgaatggttcactttaatgactatgcagatggaatttcaagttttgctactgttcattactactgtctaatcttcttgggaattgtgttaagtagtcattgacaacaaatatattatataaatatattctgcagtttctggttttgattttaaaaaaaaaaaaatttatttccctcagccgg

SEQ ID NO: 5619 - DNA, 1366 bp, Glycine max
accaatttgtcctcctgttcgagtaggttgggagtgatgatgttatgtgtagcacataggaattgccgaattggatacaatccggaagaataagcttggtgagcaagcccccccccccccgttttatggcagaaataggtgcacggcaggcatgggtttcagcttttgtgactcaatcacccaccataaccattattatcagtacatagtactagttaatctcagtcatgcctattcctaggtttatgctcttttcatcccagcatcgctccactgctgcggccctcgctcttcttcgaaggtgcgttccctctacgacaactcaatctgttaggtattcaaaatcaacaagtcacggtaaaacaaaacattatcttcatcctgtattccaaccagaatccagctccgcctcccaggtttctcgctcatggggtgcctatgttgttccagctgctgttcttggatttgctgggcttgcagctttttttcactataatgatgagagaagagcggttcccaaaggtcatcagggtggtggcctcagaaatgttgccaatggacccataattgggggtccatttacactaattaatacagagaaacaagcaattacagaacgtaattttcttgggaattgggtcctcctctactttggttatacctcatcccccgatcttgggccagagcaagtccaaattatggccaacgcaattgatatattagaatcaaaacagaatctcaagattctaccagtatttgtttccattgatcctcaacgtgatactccctcacaacttcgtgcttaccttaaagagtttgattcaagaatcataggattaactggacctgttgcagctattaggcagatggctcaagaatatcgtgtttactttaaaaaggtagaagaggatggcaatgattatcttgttgactgttcccacaacatgtatttgctgaatcctaaattggaggttacgagatgctttggagtcgagtatagtgcagaggagttgtcagaagcgatagtgaaagagctgaacagaaacccctcttgaatggttacgagatgctttggagtcgagtatagtgcggaggagatgtttctgtttttcgttttcttttaattagatcacagaataatttacatgtgatgaattaagttttactttagacgattggatttagctttgctttattttcaactagacttgcagaaaaatgtagtggcaatctgagcttcattttaagtttcgcgggcatttagttcttggctaacatcttagatggatgttttatacctgaatgttttcacattcaccttcatctaacaagcactttggttttagttaaaaaaaaaaaaaaaaaa

SEQ ID NO: 5620 - DNA, 1939 bp, Glycine max
tcagctacgtaggcccccccccctttttttggttaaaatttaatatattttggtcctgggagtttaactaagtaaggaaatgtaaaataattcgatggagttaatttataaaaaaacttaagtagaaaatgaggatttgaattatttctaaagtggtaaaagtataattaatccaatggtccataaaggttgattcatttagtaaggatcaaacttatcccctaagaatgcatatttgaatcccgctatgaatatgaagatcttgttggtgggtgatccataagtaccttttaagcattcagtgaggcttgaggtgagcactgatcttcatgagtccccgaaatcaaggttattaagtccaagagtctacttcatataaaaataataataaaatatatataaatgacatacaaattaaacattttaataacataataaagaaaaatattaaatcataaattctataatacttaaataactaagtatagtaatgcaccactactagatatttagtaacttgtggaggtgatagttgtggaagaagattttcgtcaagggtttgatgttgttgtagaaataagagttgttcgattcaaagacgacactttgaaatgaaggtatatgttgaaccttaaacatatagaaaataacttaaaatgacttacattttagtataatatttttaccttgttgactcgctaatttggtggtaaattcgagagtctaccgaatttattataaagagagcttgctcatgagccaactttcataagataattggattcataaactcgtaagagttaataagttagttcaagagtttgataaatatgtccagaatccaactcaccgatctttttggtcagaaagaaaaaatataattaagccaatcatagttatatgtgtggaaacttttatccatgcagaaaaattgctagaaagtaccagaaatgcaaatgggaaatgcttaacggcatctactactttgggcctcaagaaattagtaggcaatggattgaagaacaatggccaaatcttcactggctatccagtagtgggttaccaaggcaaaatgcaaacttcaggttcatgcttatattcatcaagatttgacaccgcatgtgcctgggatccaagaatcaaagggctattcttctacgagagcacagcaatcttccctgcgtcgaaattcggagacttcgccggcgatgtgagaaaacttagagacctcaagccagaaaatttctgtggggtggacaactacaacgggttgctaattcgctttatcaaagcctcaagtgcctatctagggcaacctgaagattctgtggttgttgatttcaactattatcgcggaaacgatccgtcaaaccctaggctaaatcaagatgtgtgggaagaagttgagcaattggcattcttcaagcatggggctaagccacactgggctaagaataggaacatagcattcttaggggtgaatcagaagtatcccaagtttaacatgtttattgcagccaaaaaacaaatggatccactcaatgtgttctctagtgaatggtcagatgagatactttatgggcaggaattatcagagaaagttgatgggtgtgctttggagggactatgcatttgtagcgaacatagacattgtagcccacaaaaggggtattattgcagtcatggccttgtctacaaggaagccagggtatgtagatatttacaatcattcatttcatcaaccatagtatgatgtgtgcctttatatcatatcattgttttaaattatagttgtagttacagtcaatatgactgcaattacagtcagaaaactacaataatatatcttttgataatatatcatattacatgtagttttattttttgtactcagatcgtagtccccatcacccgatcggagaataaatgtcattttgtt

SEQ ID NO: 5621 - DNA, 1845 bp, Glycine max
ctttcttttcaccatgttattgctaaacggttcatgacatgcccttgaaaaaccttggttggtattaattgtagcactagctttgattttggtgccaagttcttgagctgtggtggtgctgaccctgaaaagttctccaagtccaacatgagataaggctgaaatattggagctggtttcaattagtagacaaatttggttgctgactttcgtattcgtgtgtcttcaatagatggtatttttaaatagaaagcatagttgacaatttcttgaatgttgttgtttcttgccttttgaattatctccaagacttcaaataagttggctctctcctacaattttttaaatgctattatgttcagtattgagaatcaaacaagacttggtctcaggcacaacaggtttttcaattttggactagttctgatttgcatacttatatagaggcaaaaggggtatcctctttttcattatcctctattcatacatatccaaagacaacaacatttcctttcagtacccctattagttgaatcagcatggcttcatttccttcaaattctgcattggaacatagcatggccagtgcacaacaaaacagtaaccctcatgcttcctcaccttctttcatgactagagtggccatgagaatatctagatcaagatggttcactttcttgagaagagtattccattaccaaaacggaccaagatccaatctcggctccaaccctttcaattccagcacttggatgatgctggagttgattgctttgttggtccaaatagcaagcacaacattcactttggccatttcgaagagtgagaagccaatttggcctatgagagtgtggatagcaggttatgatattggttgtgtccttaatcttcttctactttgtggccgctaccatcaacttcatgtcactcaagggaataacgctcttaccctctctgaattggagcagcagagaaacaatgaagaatcaagtgtgtacaggacctcacatttgatagacaaatgccgtagttcactagagcttttctttgccatatggttcgtgatgggcaatgtatgggcctttgactcacgttttgggtccttcccacaagctccaaaactccaagtgctctgcatcatcttgctttcttggaatgcaatatgctactctttccctttcctactgtttttgcttttgtgttgttgtgtgccactaatgagcaccctccttggatacaacatgagcatggggtcctctgctagaggggcatctgaagatcaaatctcacaactcccaagttggagatataaaggggttcacaccaacttggaccttggcaatgactctcaaagcagtgaaagattgatcaaccaagatccagaatgttgcatttgcttggccaaatacaaagacaaagaagaagttaggcaattaccctgttcccatttgttccacctaaaatgtgtggatcaatggctaagaattatatcatgctgccctctttgcaaacaaggattacaaaggtagcaataggacgaggcagaaaatacacaagaacattcataatcttatacattcccaattattttgttttatctcctttggttacacgagtgagtttgtacatgtacagaagaggtcaccagtaaccaaaactacattgaatacttggttcttaggagtgaatcaatccctttatttttcaaattagtttgtttgtacaagtttttcctcccttatcctgccatctaaatattgcaaggtgagcatatagttgtactgaataatgaagtaaatatttacatttgctccttaaattttatataataaaattattggggct

SEQ ID NO: 5622 - DNA, 976 bp, Glycine max
acttttcatttatttgttatatactgtgtgcaagaacaccaaaacccaaacgaaaagaaaaaataaataaatcaaagaacacaaacaaagaagaagcgcaaaatgaagagtgcgatttgtgggagaatcctctctcccaaccacgtcttcaaaccaggggacacacattcaatttgtaaaggaccatactccaatctttgtgtacccatggctgtattggcaacaggacctggtaaaggaggcggggtgctggaaaagcccgttattgaaaaagtcacccctggccgtgagtctgaatttgatttgaagaaatcacggaaatcagcaccaccgtatcgtgtaatattgcacaacgacaactttaataaacgggaatacgttgtccaagtactgatgaaggtcatccctggaatgacccttgacaatgcagttaatatcatgcaagaagcacactacaatggattgtcagttgtgatcatctgtgaccaagctgatgctgaagatcattgcacgcagctaagaggcaatgggttgctcagttcaattgaacctgcaagtggaggctgctgatggcaagtttcactttaaatctcactggcttttatgctattgaaaggtgagatggaactattagcaggtgtacataagttccccctcttgaaggcttagaaaccaaaaaagaaaatatatcttgtgtaaaaacttggccttatgtgaacgaacctatgattaagacatgtgatagttgtgattttgaataaagaagcgcacaacatattaaagctaatagctgatgaaatgattgtggtatgtatgtggaaaacatagagattagatcaacataataccacagcactgtcatgttacttgataacaataggatctaaatctacatgtggaaagcatataaaatttagatcctctcatttatttatttaaaaaactcgagactagttctctcctggggccaaattcc

SEQ ID NO: 5623 - DNA, 1492 bp, Glycine max
tcagctacgtaggcccccccccccctattttcctcttctacttctctacttactttgatgatgaatggaaggaacaggttcccctttaccccatcacagtggcaagagcttgaacaccaagctctcatctacaagtacatggcttcaggcatttccattccacctgatcttctcttcaccataaaaaggagctattttgattcccctctgtcctcaaggcttttgcctaaccagccacagcactttggatggaactaccttcagatgggtttgggaagaaaaatagaccctgagccaggtaggtgtagaagaactgatggcaagaaatggagatgctccaaagaagcatacccagattcaaagtactgtgagaggcacatgcacagagggaagaatcgttcaagaaagcctgtggaagttttaaaatcaacaacaacaccatcatcatcaacaacaaactcaaatgcttcttctacacaacaagcaatctcatcaatcaccaaaattaatagcactctctcacctcttgcatcatctgagactcaccaacaccaccactatcctcaacactatggctcctttctctatcatcatcaccctccttcaaggtcctctggcattggcttgtcttttgaagacaacagtgctcccttgtttcttgacactggctcatgctctcagtccaacacagactgcaggagtaggtatgtttatggagagaaagaggaggtggatgagcatgctttcttcacagaaccttgtggtgttatgaaaagcttctctgcttcctctatggatgactcatggcaactcacaccattgactatgagctcctcatcttcatcttccaagcagaggagttcctttggcttgtccagtgattactcttgcttgcaacttcagagccactcaaagcagcagcagcaagagcatcatcaagatcagggttgctacatgtttggtgctggtcaagttgtgaaagaagaacctcagaaaacggttcatcgcttctttgatgaatggccacacaaaggaagagaaggctcttggcttgatttggatgacaaatcttccacaacccaactttcaatttccatccccacatcttctcatgatttttcaactttcagttccagaacccaccatgatggttgagtgtaggtttccaataatgggtcctctgtacggaaatcaaaggccaaaaatgtacctataagggtggggtttaagatgctttggggtcttatttccaaccacaccctcttcttttttcttctgccataaaggcacttgaaagggatttctgtctccatggagagatctaatgtgtaatgctatatgatgctaatgctttcttagttataagtgcttccttccaaacatagtataaaaaattctctgtgacaaagcctgaactgtttaatatttgagctaacattcaattgcacatctatgtatttttggtttcatcaaaaaaaaaaaaaaaaaacta

SEQ ID NO: 5624 - DNA, 1410 bp, Glycine max
aactcatttcacccctccagttccctcttcgctggggttaacggcttgattcgttttggttctcgtagtgtctgcagtgtgcacttctcttgcatagggagggaaagagcgaagactagagaagaaagagaagcttctgctgcatcactattgcgttggcgctgcttcttcctgttcttcttcttcttcccacttcgctttctgtttctgctcaaactcaaccaaactaccactacgcctcccaaatcagccaaatcaacctcaaaatcgctcacttagaatcggttcttgaagaaagtaacacaagattaaaggaaagggatgcgcacctggaagagtgtgagaggcgaatgaatgaattatcggaaaaaattcaccatctgcattctactctctctgcaatgaaggctgattcattgcatgctgagagacagtatacagctctggaggaagaggtacaacttctttggcataccttgagaaggaacaactttgatcttcatattttggaatctaaagcacaagatgctgaagagagactggaagagcttacctcaagagttgaaaagatgggtgacattgtgaatgaacagtggattcaagttcagcatcttgagcaggctcttcacattaccaaaatgaggactctaaaggctcaaaggctaacaagtgtaacaagatgcacattcatgaagtttatcaacgtccttcttgatgatcttcgggcacttcattcatatgtatttggtgaaaggactatagtcagttcactcatctcacagactttggatcagttgaagagatgctcttcattgaccaaaaaatatcaccatcagcttcaaggttttatcaaagatctgatggagagaaatgaattgactgcgtctattgcaaatgatgaattagtcttcttcctggcttctgctctaatcacctttccattaatgagtgcctggatgttgctctcttcataatgacctggcaggcaagtttgttttttttttttaaaactgaacagaaaattgtccccgtacttctttctacagctacaaactgctgacaactttcttcgaacatttctgcttcaagaatgtttctcagtgatggtggactactgtagttttgatcttgtatcagtgtatggttgcaagtagccgagaatactgagcattttatataactattttgcctgtacatatccatctggatagtaaatccctgtgtttcgaaatacattgagtagggaaagaatcttgtcaaatcaacaaatgatgcaagagttacaattagtagcttcaatttagacatggaaaattacatcccagatgtgaatcagatattcaatatctttttagtttgtaaaaaaaaaaaaaaaattttttgtctccatcctcgcttttgttcggaaaa

SEQ ID NO: 5625 - DNA, 751 bp, Glycine max
aatcctttggtcgcccccctcaagtcatgttcctccccaaaactctttcttttcttccttcctccctatacccctataggtttgttgtttgtcactttgattgtataattagcttagctctctttttcaactaagtggtgtgatgatagccatggatggacaccaaccacaaccatcatcagaaacattagcatcagaaaatgggagagaatcagaggactatggagaagaagggagagaaaagggtcctcatcctcttgctcaagctggaactggctctttccctggaggcttcattgggaaacataggttgcaagcagccataaccaacctcaataaccaaattagtattttgcaggaagaattggaaaaagttgaaacaattggtgaatcctccaccgtttgcaaggatttaatttcaagcgttgaatccattccagatcctctccttccattcaccaaaagttcagttgatgctggttgggatcgatggttcggaggtgcccaccactctcgaaatcacaaacgttggatttagatattttgttttttatttatatatattttttggttactatgaacaaataatttaaaatttacctgttagtgatggaaacaaaagaggatattctaatgtactacagtgataaatgaattacatgttctttcagtttttaatgattcacttttctttccagaaaaagaaaagcatgatgattataaatgaatcgagattccttctttagttttt

SEQ ID NO: 5626 - DNA, 837 bp, Glycine max
agttgtaaaatgttgttctcacgccctattgaaagaaaagaaagagtttggcactgataatggcgggaaaggaaatctaactataaaaccctaaccctaaacccattcgaatcggaatcggaagaagataatgtcggaggcggaggagctaccccggtctattgtgcgccgcgtagtgaaggataagctgtcccgttgctccgaagacggagaaatttccgtcagcaaagacgctcttctcgcattctccgaaagcggtaggatcttcatccactacctttccgcaacggctaatgatatatgtaaggagtctaagaggcagattatcaatgttgaggatgttttcaaagctcttgaggaaactgagttccctgagtttcttcgtcctctgaaagcttcccttgaagagtttaggaagaagaatgctggaaagaaagctgcagtgtcaaagggaaaggatgatgagccgagaaagaaaaggaagttggaaggtgagtcacctgataagggtgagggttctgataaagctgagttatcggataaaggagaggatcctgataaaggtgagagtgataaaggtgagagtggtgacgagaccaatgatttaaaggaatgaaggcagttgtatttgttatgactgagccagcgcgtttatgttttgtgttatgttgggaatgtgcatgactccttgtttattggatgcagcttggtattaatgtcaaaaatgtagctttttgattgtttctcagtaaaacacatcccctaccctaccccctgatgtatggagcatttcaggaaataaatgatattccatcttatataaaaaaaaaaaaaaaa

SEQ ID NO: 5627 - DNA, 775 bp, Glycine max
ggtaaaagttgggttgggggaagtgtgaagggcgggaagatggtgatggcgtggaaatggatcgtgcgaaggacccgcgaatcaaagcccttcttccttgcattcgccaccatatgcggcgtcgttccgggcgtcataggctatggcgtcatgcaactcactaacacccgcaacgagaagctcgagtcacatcttcgcacaaatgcccgtcccgaatcattgatgatggggcaagtcaataaagagaggctggcagagtacctaggagagctacagcggaaggaggataccaatgatcgctatgttgctgctctaagaggagagactttaaccagaaaaccttatgtgagaatccaaccgattccagagcacattgacaccaaggcaaacaaggagcagaaaaattgaataagttgcagatctccggttattgtgaatatatgtttctctaagtccactatgaacttgctggatgcgtttaatcctgttttactgctggatgcgtttatttaagcattaaactctttttggttaggaggaaactgatgtccatgattctgtccagacaagactacactagttatactcttattatttgatttatccaaattcttcatagacatctagtatttgtcctaaacattttgtctatccttttctcttttggaatataaacattttccagacattggtatgcttttaccctaaactatttgtcgtgtaatatggaattatgagagtataactgttgcacttacgaaaaaaaaaaaaaaaa

SEQ ID NO: 5628 - DNA, 1929 bp, Glycine max
  misc_feature (1145)..(1147): n is a, c, g, or t
  misc_feature (1155)..(1158): n is a, c, g, or t
  misc_feature (1171)..(1172): n is a, c, g, or t
tgtgaggacctttttggtagaattatacatataagtcctgttatgggtagattcattggcaagagttacagtccaagacagttgatgagagcatctactgggactccaatttttgaaatttatgtggtaaaaaatgctgatgacacgtatcatatgcaggtagtgtatttgcgacaagccaaaggaaagtcaaggagaaaccctcaatctgtacctgctaaaggcccatcccgacctgcggcggaggccccccccccccctgaggtgcaggaacctgaagagaagattgagagaaatgatgagaaaaacactaatatcgagggagtaactgaggaaggcattaaaagtgtcataaattttcttaaagaaaaaattccaggattgaaaatcaaagtcatgaatgttagcgttgaagaggaagcagcagaaaacaatgattctattaagcaattgatggaggaagatagcaataaaactggctccagtgagaatcatgaagaggaagttaataatcttgatgaacctgatgcggtcactctagaaagagatggagatgccacagaagaagaaaaggatttggaaatgaagcttttaattggtggggttgtacacaacaatgaagatactcctgtcaaggatgaatttatacgtcttccagctgaaataaaaaatatggaaaaggattcttttgtctttcattttgattgtggaaatgtagattatggtatcaaagaagataaaattcccaatatcaaagtagcagccctagcagcacaaggagtctccgagcttatgcctcctgatgttgctaatgcattttggagttctgacaaagtctcttctaaggtctccaaaagcatgcgtgatattgtcagagttgctatgagtcaagcacagaaaagaacaagattatctggggatacaaattttagccggattatctgttcaagaggggattctgatccttttgatggactctatgttggtgcatttggtccttatggcatggaaatagtgcatttgaggcgaaaatttggacattggaatgaagtggacaatgaaaacaaaacttcagatgtgggattctttgaatatgtagaggctgtgaagttaactggggatcttaatgttcctgctggcctggnnnaagcattnnnnatttcttgatccnngttagtaaacttctatcaagtttatgtgtgagcatgacaggaaaggaacttttttttttggtgtataggtgacattccgtgctaaaattggcagaggcaatcgcatcaccaaccaagggatgtatcctgatgatttaggagtggttgctagttataaaggccaggggagaatagctgactatggttatcgaaatccaaaatgggtcgagggagaactgctccaacttaacggcaagggcatgggaccatacatgaaaggtgcagatcttggtttcctttatgtcgttcctgagcaaagttttcttgtgttgttccaccggttgaaactacccgagtgagccatggttgatggtaccctaatcctgtctaatttactttctgatgcggggaagaacacgaagcattcttacaccagcgatgagattgctgtgttacctttttttctgagtggtagttttacccgacaggcaggcacttgttatttttctagccccttctacgagtttattttttgttgttccttttaccaatctctttgctatctatcatcttgtgtatataaattttgctgaccagtaaaatagtatgataggaactctgaaagtaccattagggatcttttatgtgcatgttatgcctccttgtttggacttctcgtttgtgttagtcccacttagtctgcatgtatgaaagggagttattaataattaaatttaatagtaaagaacttcagatcggtggtaaaaaaaaaaaaaaa

SEQ ID NO: 5629 - DNA, 1285 bp, Glycine max
attggccccccctcgaggtcgcctgagctcggaattcggctcgagcaataatgaagatactcctgtcaaggatgaatttatacgtcttccagctgaaataaaaaatattgaaaaggattcttttgtctttcattttgctagtggaaatgtagattatggtatcaaagaagataaaattcccaacatcaaagtagcagccctagcagcacaaggagtctccgagcttatgcctcctgatgttgctaatgcattttggagttctgacaaagtctcttctaaggtctccaaaagcatgcgtgatattgtcagagttgctatgagtcaagcacagaaaagaactaaattatctggggatacaaattttagccggattatctgttcaagaggggattctgatccttttgatggactctatgttggtgcatttggcccttatggcatggaaatagtgcatttgaggcgaaaatttggacattggaatgaagtggacaatgaaaacaaaacttcagatgtgggattctttgaatatgtagaggctgtgaagttaactggggatcttaatgttcctgctggcctggtgacattccgtgctaaaattggcagaggcaatcgcatcaccaaccgagggatgtatcctgatgatttaggagtggttgctagttataaaggccaggggagaatagctgactatggttatcgaaatccaaagtgggtcgagggagaactgctccaacttaatggcaagggcatgggaccatacatgaaaggtgcagatcttggtttcctttatgtcgtgcctgagcaaagttttctcgtcttgttccaccggttgaaactacccgagtgagccatggttgatggtaccctaatcctgtctaatttacttatcatctgatgcgaggaagaacatgaaggattctgatactagcgtgttgagattactgttaccttttttttttgagtggtagttttacccaacaggcaggcacttgatattttattagcccttctatgagttcattttttgttgttccttttaccaatctctttgctatctgtcatcttgtgtatataaatttggctgaccaacaaaatagtgtgataggaactctgaaagtaccataagggatcttttttgtgaatattgtggtttatggctgtgtgcttcctttcttgtttggacttctcgtttgtggaagtcccactagtctgcatgtatgaaagggagcatttactaattaaatttgatgataaagaacttcagaccaaaaaaaaaaaaaaaaaa

SEQ ID NO: 5630 - DNA, 2661 bp, Glycine max
caagttgcgtgtacctgctgtcactactccctaaggaaaaccagaacagcacagggggtcctattagaaatacgcccacatcaatccacgccacccctgtcaaaatcaatccccagataccattccccttcctataacaaacacaaaacaacccaatcattgtttgttcacatccgaatccacaacacactgttaataattattctgattcacgaaaaacaggaaaaccccaaaactctctttgttcacaatgggcacagagacctcatcggtagatatttcggaacccctgctcttggatcctcacgggaacgaggaaaaggaagagtatttgcgcgaagaggttccggagtggaaggagcagataacgataagagggttggtggtgagtgctgtgttggggagcttgttctgcatcatcacccacaagctaaatctcaccgttgggatcatcccttctcttaatgttgctgctggcttgttggggttcttctttgtgaggacctggactgggttgttgaccaagatgggatttttcaccaagccctttactaggcaagagaacactgttattcagacctgtgttgttgcttgctatggccttgccttcagtggggggtttggttcatccttgattgccatggatgagagaacatatgaactcataggccctgattaccctggtaatagagctgaagatgttaaagacccaggcttgggttggatgatgggtttcatgtttgttgtcagtttccttggactttttagtcttgtaccacttcgtaaggttatggtcatggattataagcttacatatcccagtgggacagccacagctatgctaatcaacagtttccatacaaaaactggagcagaacttgctgggaaccaagttcggcagcttgggaagtatctaagcataagtttctgctggagttgctttaagtgggtcttcagtggtattggggattcatgtgggtttgacaacttccctagctttggtttgacactatttaagaacacattctattttgacttcagtccaacctatgttggatgtggtcttatctgtcctcacctagtcaattgttctgttctccttggagctattatatcatggggctttctgtggccttttgtctctgagcatgctggcgactggtatccagctgaccttggtagcaatgatttcaaaggtctttatggatacaaggtattcatatctattgccctgattttaggggatggtatttacaatcccgcgcgtccgcggacggataaccattagggaaatgtggaggacaagctccaaacagcttcctgttgtgacagaggttcaagatgatgagaattctcaactgcaatcagaagaaaagaagagggaagaagtatttttgaaggacaggatacccacctggtttgcagcttctggatatgtgggcttggctgcgatatccatagcaacaataccaattatcttccctcctctcaaatggtacttggttctgtgctcttacatcctcgcccctgcccttgccttctgcaactcttacggtactggcctcacagactggagtctggcatccacttatgggaagattggtcttttcatcattgctgcagcagtaggccaaaacggtggtgtaatagcaggggtagcagcctgtgctgtgatgatgtcaatcgtcgcaactgctgctgatctcatgcaagatttcaagactggttacctgaccctctcatcggcaaagtccatgtttgtgagccaattgattggaacagccatgggttgtgtaatcgctcctctcacattctggatgttttggactgcctttgatgttggctcacctgatggcccttacaaagcaccatatgccgttatattcagggaaatggccatactcggtgttcagggattctcagagcttccaaagtactgccttgaaatgtgcggtggtttctttgcggctgccctggctatcaaccttctaagggatgtgactcctaagaaattctcacagtacatacctatcccaatggcaatggcagttccattttacattggtgcttactttgcagttgatatgtttgttggaactgtgatattgtttgtatgggagaggttgaacagaaaggatgcagaagactatgctggagcagttgcttctggactgatatgcggtgacgggatatggacaattccttctgcaatcctttctattatgaggattgatccccccatctgtatgtactttggcccttccacaagtagctgaaaccagcaactttaagttgtctttaaaactgcaatgtttatttatttgccttgtgtctgtaaatatatgggatgtaagcatcacaggcaatatctggcatttcatttcctctgtttctctttgcatgtgtccctaaatatttagggatatcgttcagttccttaactgtctcaggggaacccgaaaacagaagaaaagcaccaagagggaagggggtaccttgatcccattttccttttggtgcattaatgtattccacattcttttcttaaagttgtctcagttcacaaccaaagtaatgtatgtttaacaagttaaattagaatgcattccctgtgtaaaaattatttgtattcatcaaataatgagttatattatgtagggt

SEQ ID NO: 5631 - DNA, 1018 bp, Glycine max
cggtccggattcccgggtcgaccacgcgtccgcctgattttcctggtaatagcagtctgaagatgttaaaaaccctggcttgggttggatgatgggtttcatgtttgttgtcagtttccttggactttttagtcttgtgccacttcgtaaggttatggtcttggattataagcttacatatcccagggggacagctacagcaatgctaatcaacagtttccatacaaaaactggagcagaacttgctgggaaccaagttcggcagcttgggaagtatctaagcataagtttctgctggagttgctttaagtggttcttcagtggtattggggattcatgtgggtttgacaacttccctagctttggtttgacactatttaagaacacattctactttgacttcagtccaacctatgttggatgtgggcttatctgtcctcacctagtcaattgttctgttctccttggagctattatatcatggggctttctgtggcctttcgtctctgagcacgctggggactggtatccagctgaccttggtagcaacgatttcaaaggtctttatggatacaaggtattcatatctattgccctgattttaggggatggcatttacaatcttgataaagattatactgataaccattacggagatgtggagggcaagctccaaacagcttcctgttgtgacagaggttcaagatgatgagagttctcaactgcaatcagaagaaaagaggagggatgaagtattcttgaaggacaggatacccacctggtttgcagcctctggatatgtgggcttggctgcgatatccatagcaacaataccaattatcttccctcctctcaaatggtacttggttctgtgctcttacatcctcgcccccgcccttgccttctgcaactcttacggtactggcccttcacagattggagtctggcatccacttatggaaagatcggtcttttcatcattgctgcagcagtaggccaaaatggtggtgtaatagcc

SEQ ID NO: 5632 - DNA, 1326 bp, Glycine max
tcagctacgtactattcattaggattagttagttctcctgttgttgttgtagcgctgattgaggtagcgctgattcgatcgcatcagaacattcattcacattcatatcctctctctccgatcccaatggcggatgagagccccaaaccagagaccttcgaactcaacaatggaagcatgcaggtcctcctcaccaatctcggctgcaccatcatctccttatccgtacctggaaaagatggtgtgttatctgacgttgttcttggccttgaatctgttgaatcctatcagaaaggtcttgctccttattttggctgcattgtgggtcgagttgctaaccgaattaaggatggcaagtttacacttgatgggattcattactctttgcctatcaacaatccaccaaacagtctccatggtggaaatgttgggtttgataagaaggtatgggaggtagttgaacataagaaaggcgaaaccccctcaatcacttttaagtgccacagtcatgatggagaggaaggttatcctggggatatcactgttactgccacttacacactcacctcaagcacaactctgaggcttgacatggaaggagtgccaaagggcaagcccaccatagttaacttagctcagcatacctactggaacttagctggccacaactcagggaatatacttgaccattcaattcagttatgggctaatcatatcacacctgtgaacgagaataccgtgccaaccggtgaaatcatgccagtgaagggtaccccttttgattttacatcttttaatagaataggcagcaccattagtcaggttggactgggatatgatcacaattatgtgcttgattgtggggaagagaaagagggtttgagacatgctgcaaaagtgagggatccatcaagttcaagagtacttaacttgtggacaaatgcccctggtgtgcaattttacactgcaaactatgtgaatggtgttcaaggaaaaggaggtgctatatatggaaagcatgctgggttatgtctcgagacacagggattccctaatgccataaaccagccaaattttccttctgttgtggttcgtccgggcgagaagtatcaacataccatgttgtttgagttttcacttgagtgatgtttgttggagtggcatagcaatcaggtagacatcttgatctgcatattatgatttagaacctgaacttagtaggcttctcctgaaataaacacttgtttgtgttcaaataattgaatgatcatttcattgtctcaaaaaaaaaaaaaaaatcaattctaaaagttgacattatattgc

SEQ ID NO: 5633 - DNA, 1615 bp, Glycine max
gccgccacagagagagaaagataagaagtaaggaggtagtaggcagtgtgtttgtttgtgttgtgttgggcgttaaggatggtgttgaattgcaaaagcaaaaacatcctccttttagttttgttagccatagcaatagaaacgggatggtcatcagaagaagaaagcagcatcatatcacgattccagcaatacctgaaaatcaacactgcccaacccaccccgcgttaccacgaagccgccgatttcctgatatcccaaggtaaagccctctccctggaatcccaaagcattgagtttgtggcaggcaagccacttgtccttctgaaatgggaaggctcaaaccctaacctcccctccatcctcctctattcccacaccgacgtcgtcccatcggagcactctaagtggacccaccaccccttcagcgcccacctcgactcctccggccgcatcttctcccgaggctctcaggacatgaagtgcgtcggcatgcagtacctcgaggccctccgactcctcaagtcccacaacttccgccccctccgctccctctacctcgctttctcccccgacgaggaaatcggtggccacgacggtgccgagaagttcgctgactcctctatcttccaaagtatgaacgttggcgttgttcttgacgaaggtctggcttctcccgacccccattaccggtctttctatgccgaaaggagtccctggtggttggtcatcaaggcctttggtgttcccggccatggcgccaagctttatgataactctgccatggagaatctctttaagagcattgaaagtatccgaaggttccgctcctcgcagttcgacttgatcaaggccggcttcaaggccgaaggcgatgttgtttctgttaatatggtctttctcaaggctggaactccatctccaactggttttgtcatgaatttgcagccttctgaagcagaagctggatttgatattcgggtgccacccactgctgatccagaatcgttggagaggcgcattgctgaggaatgggcaccttcatcccgcaatatgtcatttactctcgggcagttcaaacagaaggcgcacacacgagataagtctgggaaaccaatcctcaccaaaactgatagttccaatccctggtgggcccttttagaaaatgctgtccaaaaggctggtgggaaacttggtaagcccgaggtctttcccgccgctacagattcacgctacttccgtgaacgtggattaccagcaattggattctcacctatggcaaacactcctgttcttctacatgaccacaatgagtttctgcacaaagatgaatacttgaaagggattaaaatctacgagtcaataattaaggtatatgcatcgttggatgataatggaagagatggagcatccaaagatgagttatgagcaagtggtgtggcacctacccctacctaattctcattttctgcctttccttatgtaacaatagagaggaaaaataacacctcaactgactttgttgtagcttctgacacataacaataaagaggaaacaaatatgtttgtttcaaactttgctcagagcaaaaaaaaaaaaaaaagactagttctc

SEQ ID NO: 5634 - DNA, 3428 bp, Glycine max
tgattaccctcccactccacactctccgctgtctctccctcccaattccgatgagcaacaacgcctcccggaagcgcgcgccgccgcctccgtcccaacctccgccggcgaacaagccctaatgactcaggaagaagagttcatggacgaagacgtgttcataaacgaaaccctcgtctccgaggacgaagaatccctcattctccgcgacattgagcagcgccaggccctcgccaaccgcctctccaagtggacacgtcctcctctctccgccggctacgtcgcccaatctcgtagcgtcctttttcagcagctagagattgattacgtgattgcagagagtcacggggagttgctgccgaactcgtctggacctgtcgccattatcagaatatttggagttactaaggaaggacacagtgtttgttgcaatgttcatgggtttgaaccatatttctacatctgttgccctcctggaatgggtccagatgatatctcccattttcatcaaactctcgagggaaggatgagagaagccaatagaaacagtaatgtgggaaaattcgttcgccgtattgaaatggtgcagagaaggagtattatgtactatcagcaatccaattcccaaccctttctcaaaattgtagttgcactcccaacaatggttgccagctgccgtggtattcttgataggggtattcaacttgatggtctgggaatgaagagcttcttgacttatgaaagcaatgtactttttgcccttcgcttcatgattgattgtaacatagttggtggaaattggattgggattcctgccggaaaatataagaaaacagcgaaaagcttgtcttactgccagttagagtttgattgcttgtattctgaattgattagtcatgctccagaaggggaatattcaaagatggctccgtttcgcattttgagttttgacatcgagtgtgctggtcgtaaaggtcattttcctgagcctacccatgatcctgttatccagattgctaatttggttactttacaaggagaagaccagccatttattcgtaatgtgatgacccttaaatcatgttctcctatcgttggtgttgatgtgatgccatttgaaacagaaagagaagtcctgctggcttggagggattttattcgtgaagtggaccctgatattattattggatacaacatttgcaaatttgacttgccatatcttattgagagagctttgaacctgaagatagcagaatttccaattctgggtcgtatcaggaacagtagagttcgagtaaaggatacaactttctcatcaaggcagtacggaaccagggaaagtaaagaagttgcagtagaagggagagttacgtttgatttactccaggttatgcaaagagactacaaattaagttcttattcactgaattctgtgtcatcacacttcctttctgagcagaaagaggatgttcatcattcaattatatccgatcttcagaatggaaatgcagaaactaggaggcgccttgctgtgtattgtttgaaggatgcatatctccctcagcggcttttggataaattgatgttcatttacaattatgtggagatggctcgagtaacaggtgtcccaatttcttttctactttccagaggccaaagcattaaggtactttctcaacttcttaggagggcaaggcagaagaatctggtcattcctaatgccaaacaggctgggtctgaacaaggaacatttgaaggtgccactgtattggaggcaagggctggattttatgaaaaaccaattgctactttagattttgcatccttgtatccatctattatgatggcctataacttatgttattgcactctggtgatccctgaagatgctcgcaagctcaacatacctccagagtctgtgaacagaactccatctggtgaaacatttgttaaatcaaatttgcagaagggaatacttcctgaaatacttgaagagctattaacagcccgtaaaagggcaaaagcagacttaaaggaggccaaggatcccctggagaaggcagtgctagatggtagacagctagccctgaagattagtgccaattctgtgtatgggtttacaggggctaccattggtcagttaccatgtttagagatatcatcgagtgtaacaagctatggtcgacaaatgattcgagcacacgaaaaaacttgtggaagataaatttacgacacttaatggctatgaacacaatgccgaggtaatatatggagacacagattcagtcatggtacaatttggtgtttctgctgtagaagaagctatgaacttggggagagaagctgctgaatatattagtggaactttcacaaaacccatcaaactagaatttgagaaggtttactatccatatctcctgattagcaagaagagatatgctggtttgttttggacaaaaccagacaactttgacaaaatggacactaaaggtattgaaacagttcgaagagacaattgtttattggtcaaaaacctggtgaacgattgccttcacaaaatattgattgacagggacattcctggggcagtccagtatgtcaagaatgcaatttcagatcttctcatgaatcgtatggacttatcacttctggttattacaaagggtttaacgaagacaggagatgattacgaagtaaaggcagctcatgttgaacttgctgaaaggatgcgcaagcgagatgctgccactgctccaaatgttggagacagagtaccatatgttattattaaagctgcaaaaggtgcaaaggcatatgagagatcagaggatcctatctatgtgctagagaacaacatacccatagatcctcagtactatcttgagaatcaaattagcaagccaattctgagaatttttgagccaattctgaagaatgctagcaaagagcttctccatggaagtcatacaagatctatttctatttctacaccgtcaaacagtggcatattgagatttgctaagaaacagctacctgcattggttgtaaagctttacttggcaagggttatcacactctctgttcacattgcaaaggaagggaggctgagctgtactgtaaaacagtatctcaagtgtctgagctggagatgctttttgggaggttgtggacacagtgtcaggagtgccaaggttcacttcatcaggatgttctctgcaccagtcgggattgtccaattttctatcgacgaaaaaaggcacagaaagatatgggtgaagcaaagttgcaattggacagatggaacttctaagttttgccaagaatttgaccttgcggatctcttcgaaccaatggacacaaatacaatctggtgtttgccacaatcctgacatttgtaatgtgagtaaaagcccacaatttgtttactg

SEQ ID NO: 5635 - DNA, 1152 bp, Glycine max
tcgagtcagctacgtcgggcaccccccccatccagcacccgaaacgaacctcaacaacgctgagcgcagaaaggggaaaaggggattagggtttaggaagcagcgacaacaatggatttcacagtggagaagaaggaatcagagaacaacgccgaaaatgctcacccaacaacgttagattcttcttctcaattggcatcggcacttgattccaacaacaaagaaatcgaagaacgacaagctcgtgaactcaaagccggacttcaccccctaaagcacaagtttgtcttctggtacactcgtcgaacacctggagttcgaaatcaaacatcatatgaggacaacataaagaaaattgttgaatttagtacggttgaaggattttgggtctgctactgccatcttgctcgtcctgcttctttacctagtccaacagatttgcaccttttcaaggaaggaatccgtcctctatgggaggactctgctaactgcaatggtggtaaatggattatacgattcaaaaaggttgtctctggccgtttttgggaggacctggttcttgccttggtgggtgaccaattggattatggggataacatatgtggtgcagtactaagcattcgtttcaacgaggatatattgagtgtctggaatcgcaatgcttcagaccatcaggctgtaatggctctgagagattcaatcaaacgtcacttaaagcttcctcacagctatgttatggagtacaagccccatgatgcctctctgcgagacaattcatcttacaggaacacttggttgagaggctagagatccaattgtgttcttgccaaagtccctgccgtggaagctatattgcatactggtgcagctttcactcagccaggactggtttcactcagccattggcttcggtctagtgatggggctgggtgttcctggactggtttctgtcttttgaattcaatgtacgacagctacattgctactgctttaaatagtttcatttggttacttggggttcactctaattttgtgtagtgtgtcgtagtttttgtaaataaacttgttcgtcttgttgcttttcccctcgcttatggagagaatcatggcttttcattcccattaaaaatggtagattacttctgtagcgcc

SEQ ID NO: 5636 - DNA, 1015 bp, Glycine max
gggagctatctctcaacaacgctgaacgcagaaaggggaaaaaggggattagggtttaggaagcagcgacaacaatggatttcacagcggagaagaaggaatcagagagcaacaccgaaaatgctcatccaacaactttagattcttcttctcaattggcatcggcacttgattccagcaacaaagagaggcgaagaacgacaagctcgtgaactcaaagccggtcttcaccccctcaagcacaagtttgtcttctggttacacgcgccgaacacctggagttcgaaatctaacatcatacgaggacaacataaagaaaattgttgaatttagtacggttgaaggattttgggtctgctactgccatcttgctcgtcccgcttctttacctagtccaacagatttgcaccttttcaaggaaggaatccgtcctctatgggaggactctgctaactgcaatggtggtaaatggattatacgattcaaaaaggttgtctcaggtcgtttttgggaggacctgcgttcttgccttggtgggtgaccaattggattatggggataacatatgtggtgcagtacttagcattcgattcaatgaggatatattgagtgtctggaatcgcaatgcttcggaccatcaggctgtaatggctctgagagattcaatcaaacgtcacttaaagcttccacatagctatgttatggagtacaagccccatgatgcctctctgcgagacaattcatcttacaggaacacttggttgagaggctagagattcaattgtgttcttgccaaagtccccgccgtggaagctacattgcatattggtgcagctttcactcagccagttaatcattggcttcggtctagtgatagtgatggtgctgggtgttccaggactggtttctgtcttttgaattcaatgtacgacagctacattgctactactttaaatagtttcatttggccaaaaaaaaaaaaaaaaaaaaaaaaaaaagcggccgctctagagga

SEQ ID NO: 5637 - DNA, 1947 bp, Glycine max
ggtcaggaattcccgggcccacctacgcgagcagccgcccgcgctcggaaccgaaacgaacctcaacaacgctgagcgcagaaaggggaaaaggggattagggtttaggaagcagcgacaacaatggatttcacagtggagaagaaggaatcagagaacaacgccgaaaatgctcacccaacaacgttagattcttcttctcaattggcatcggcacttgattccaacaacaaagaaatcgaagaacgacaagctcgtgaactcaaagccggacttcaccccctaaagcacaagtttgtcttctggtacactcgtcgaacacctggagttcgaaatcaaacatcatatgaggacaacataaagaaaattgttgaatttagtacggttgaaggattttgggtctgctactgccatcttgctcgtcccgcttctttacctagtccaacagatttgcaccttttcaaggaaggaatccgtcctctatgggaggactctgctaactgcaatggtggtaaatggattatacgattcaaaaaggttgtctctggccgtttttgggaggacctggctcttgccctcgtaatgcaaatatggtcatctgtaacatttggtatcttccttgataaaatgtatggctatggcatgattatggaaaatgttaacactttaatttattgagtgattatttaaatctgtacttgcaccaactagttttactgaaaatctgattttatcccaatggtctgttttgatacatatagtttatctgatcccactcagtagcataagtcttggttgttgtcgttaatatctaaatttttcattaaaattagatgaatgttagcaacatactctaatacactcattttaacacactctactattggttccaatttttttaaaactacaaaattatgagagagacttgttgaataagaagtaagacccgcaaaaaaaaatgtgatttcaaaggaattcctgccacgacgggagagtgtgttcaaaagagtgttagaatgtgttactaacatttctcctaaaattatgcaattttatgggcctcaaatgttttgttgttgattttcacaactgaaactgaagacagaaacctacatttctgaagttaattgaccagctaaagtactgtttggaatctctcttgtttggttattttgatttcatgacctgtaccatcaattgctattatatttctgtcttctattgttggagacttgaatgtttcataatactaagtgcaggttcttgccttggtgggtgaccaattggattatggggataacatatgtggtgcagtactaagcattcgtttcaacgaggatatattgagtgtctggaatcgcaatgcttcagaccatcaggctgtaatggctctgagagattcaatcaaacgtcacttaaagcttcctcacagctatgttatggagtacaagccccatgatgcctctctgcgagacaattcatcttacaggaacacttggttgagaggctagagatccaattgtgttcttgccaaagtccctgccgtggaagctatattgcatactggtgcagctttcactcagccaggactggtttcactcagccattggcttcggtctagtgatggggctgggtgttcctggactggtttctgtcttttgaattcaatgtacgacagctacattgctactgctttaaatagtttcatttggttacttggggttcactctaattttgtgtagtgtgtcgtagtttttgtaaataaacttgttcgtcttgttgcttttcacctcgcttatggagagaatcatggcttttcattcccattatatatggtagattacttctgtagcgcattttacagagacattaatcctttgaactgagacgatcgatgagatgggaggggatcaagtctactttaaactgataaataaagtctacttt

SEQ ID NO: 5638 - DNA, 1111 bp, Glycine max
cccacgcgccggtccgccaactccccgtcgaccttccacacttaataggaaaagaaaaaaaaaaaaaaaaagtaagcccagctttgttctgcttcaaccttctctgctgagacaacaatggcgatggctttcaaaatggccactactgggatgtgggtgacggatgagtgcaagaactctttcatggaaatgaagtggaagaaggttcatagatacatagtcttcaagatcgatgagaagtcaaggcttgtcaccgttgataaggtgggtggtcccggcgagagctatggtgatctcgccgcctccttgcccgacgatgattgtagatatgccgtattcgactttgatttcgtcaccgtcgataactgccgcaagagcaagatcttcttcattgcatggtctccaacagcatcaaggataagagcaaagatgctctacgcaacatcgaaggatgggctgagaagagctctggatggaataagctatgaagttcaggccactgatccaaccgagatgggattcgatgtaattcaagacagagccaaatagatggatgccccctttttttaaagtgggaatccaactccttatttatgtgctgagctaatcaattaatctgtcaatcttactctctctctctctttatttgctatatataaattaagtaaccatatatagtccaatgactgtatgacatgtgctatctcttcttctttcttgtttttatgctagtttaattgtgtttgatgtaagtggggcatctaatcttcaatccttactcataataataagttatgtgtaatatatgactgtcggctgtatgataagttaagggcaacaaactttggttgcaatctctttaatgatgaaaatttgtggaaaagaatggattagctcaacttttcccacggaaagttgatgcgttaccatatttataaatgatgctttcacattctacattctcaatactttaattacttaactattgtagtttgctaacttgggctcggcagttttgttcaatggcgccataacgaaggcacttgccaacaatgcttcgctcatggattcgtacaaaaccagaaatagaaaatcagaaacagcggtgact

SEQ ID NO: 5639 - DNA, 2461 bp, Glycine max
  misc_feature (524)..(528): n is a, c, g, or t
ctctgcagtcgacctgcaggctcattggctctgacattggtaaaaagggtttgactttttttgttctttcttatgtggagctgacagtacagcttgttgttgaataatcagttcctggcaaggttgctattatgatccttaaaagaggcattgaatctgccgtaccacttttctattgcggttgccatgatagttgttgcatcatctcacggattgccattcaccgctgcactaagcttcgcttcacgcatcactactttatgattgatgcagtactcgcgagacatctttctgcctgcgagactatgggctcggcgacctgcatctgcacagataaaacaggaacattgaccactaaccatatggtggttaataaaatttggatatgtggaaagatcaatgagattaaaggcaatgagagtattgacaaactgaagacagagatatctgaagaagttttaagcatccttttgcggtctatatttcaaaatacttcttccgaagttgttaaggacaaagatggnnnnncgacaatactaggaacaccacctgagcccgcatttcggctcgtgggcttgcttgcaggtggtgattttgaagcgcagcgtggaacatataagatacttaaggttgtgcctttcaattcagtccggaagaagatgtctgtgctagtaggtcttcctgatggaggtgtccaagctttctgcaaaggtgcatcagaaatagtattaaaattgtgtaacaaagttattgatccaaatggaacagctgttgatctttctgatgagcaggcaaagaaagtctctgacattataaatggatttgccaatgaagctttgagaactctttgtttagctctcaaagatgtaaatggaacccaaggagaaagcagcatccctgaagatagctatactctgatagccattgtgggaatcaaggatcctgtgcgccctggggttagggaagctgttaaaacttgtttagctgctggaataactgtccgcatggtaactggtgataacataaatacggctagggctatagctagagaatgtggcattcttacagaggatggtgtggccatagaaggaccccactttcgggacttgtctacagagcaaatgaagagtattataccaagattccaggttatggcgcgatccttacctcttgacaagcataccttggtaacccgtttgaggaatatgtttggtgaggttgtagctgttactggtgatggaaccaatgatgctcctgcactgcatgagtcagacattgggcttgctatgggcatagctggaacagaggttgccaaagaaaatgctgatgtcattataatggatgataacttcactactattgtcaatgtggccaggtggggacgggccatatacataaacattcaaaaatttgtgcagtttcagttaacagtcaatattgttgctctgattattaactttgtttctgcatgcatcacaggatctgctcccctcacagctgttcagttgctttgggtcaacctgattatggacactctgggtgctttggccttggccactgaacctcccaatgatggacttatgctaagacccccagttggaaggacaacaaattttatcaccaaacccatgtggaggaatatttttggtcaaagtttatatcaactaattgtccttgcggtcctcacttttgatgggaagaggctactgagaattaatcgtccagatgcaactatagtgctcaacactttgatattcaactcctttgtattttgccaggttttcaatgagataaacagccgagaaatcgaaaagataaacatattcaaaggcatgtttgagagctggatattttttacggtgatcttctccacagtggtgttccaagtactcatagttgagttcctgggaacatttgccagtacagtgcctctaagctggcaattctgggtgctcagtgtcgtaatcggagcatttagcatgcctatatctgctatactcaagtgcatcccagttgaaagaggagatgctacaacgcaccatgatggttacgaggcgctaccttctggtcccgagctggcataaaatacgggaaggaaaaacataacttttcccttctaagattttctttagtgcaaatgtggctgaaattttggcctctgtggcatactacaaatcttgtcttttggcttcgtttttaagaaattttctcacaaaaatggagggaggaaccgccacttgttcaaattattttcggaaaatgaaaaaaggttttgttttttctacaatacattttcgtatcgtggtgctaatttgcagcatctcttgcaaatgttcaattttgttttcatctttctcccctggtcatccatgtcaacgggcacatcattaataatttgggttagatcaattttatttttttaagggaggaccaaaaataaataaattgccccaattattat

SEQ ID NO: 5640 - DNA, 537 bp, Glycine max
gaaattagggtttcaactattacataaggagtttcctccgtaattcggctctcacactgttcttcttctttgtcttccatttccaattctctgtgtagaagccatgtctaagggtcctggtctctactctgacattggcaagaaagccagagatctcctgttcaaggactaccacagtgaccagaagtttaccatcactacctactcacccactggagttgctataacatcctcggggaccaagaaaggtgacctttttgtggcggatgttaacacccagttgaagaacaagaacatcaccactgatatcaaagtggacaccggttccaatcttttcacaactatcactgtcaatgagcctgctcctggtctcaagactatttttagctttagagttcctgatcaaaggtctggaaaggtggaagtccaccacttgcatgactatggctggaataagcaccagtgtgggtttaacagcaaacccaattgtcaacttctacggcgttgtaggaactaatgtacttgcccttggtactg

SEQ ID NO: 5641 - DNA, 1558 bp, Glycine max
tacggctgcgagaagacgacagaagggggcgtttacatacacaaatatcggaatcattcattcaagactaagactcactcctccctccgtcaccatcgttttgtgcgtgagcgtttctccatttctttccccatcagcgaaaagacagaacaagctccgttgactttttccattttccaattttctcggtgattctatcagcctccgacacaatcgcgcgccaaacgttgaattggtgccaccactcagggagagtctctaacagaccaacatgagtgtggatccaaagagaagtgcctctaatggccaggagaaaatgttaccatcactagaacagcaagcattgatcaatgaggtgagaaggttaattgggccacagtctggtaaggcgtccattttttgttctgatgcatgcatctcaaggtatttgagagcacggaattggaatgttaagaaggcagccaaaatgttgaagctgaccttgaaatggagagaagaatacaaaccagaagagattcgctgggaagatattgctcatgaagcagagacaggaaaaacctatagaacaaattacattgacaagcatgggagaacagtcctagtaatgagacctagtcgccagaactcaaagtcaacaaaaggccaaattaaatatttggtatactgcatggagaatgctattttaaatcttccaccagaacaggaacagatggtctggttgattgactttcagggtttcaatatgtcacatatatcaataaaggtgacacgtgaaacggcccatgtattacaagaacattatccagaacggcttggtctggcaatactgtacaatgcacctaagttctttgaaccatttttcacgatggtaaagcccttattagagcccaagacttataataaagtcaagtttggttactctgatgatcagaacaccaagaagattatggaggatttgtttgattttgaccatcttgaatctgcatttggtgggaatgatgatacaggatttgacataaatagatatgctgagagaatgaaagaggatgacaagaagactccctctctctggacaagggaaaactctccatcatcagtcccaactcatgctccttctttagattcgactaggttagaatcagatactgatgcttcagacaatgagaaaatagactcttcccctgaccccgtgatggatacaggtatcattaaccctgatcagaaaatcttggttaatgaaggagaaaaaaatgccagtgcagatattcattagaatgagaaattacaaaccttgggcctttgaaataatatacaggcactaaggtagccagatgctgtgacattcttattttgaagttagaatcaagagaccttttgttaatttgatgttggatttaacatgatcacagatgtttttgccttgtgaattctatcttttaacgggcatgaaatgcttgcttgtgcagtcagcagagttttgctgctgttgtggtagacaatttttttcctccctcgtggatggaagaatggcttgttattgaaaaaaaaaaaaaaaaaa

SEQ ID NO: 5642 - DNA, 1302 bp, Glycine max
  misc_feature (18)..(19): n is a, c, g, or t
  misc_feature (1233)..(1233): n is a, c, g, or t
gtgcttaatcaaaacatnntctcttgagaaatgagtgccgtgaaagaatccaggttctacatcccacatggctcccttgtcgcatctagagcctcaaaactgtgatgaagaagcagatttttggggatccatatggcatctgtttggaatttgggaagagggatattggtccatacaggcaattatgtgcaattgatgccaaatctttcaatccaaaacgaactgcaaatactttatttttactacatcggttgacactactttttaggaacgtagcctctgtcaacttggaaaacctcaaccatcaggagaagcttgcattctggatcaacatctacaacttcgtgtatgatgaatgcattcatagagaatggcataccagagaatcctcaaatggctgttgcactaatgcggaaggcaacaataaatgttggtgggcacgtgctaagtgcaacaaccatagagcatttcattttaagacttccttatcactggagatttacgttttccaagggaacaaaaaatcatcaaatgacagcaagaagcatatatggaatggaactgtcagaacccctagtgacatttgctctctcttctggaacttggtcctctcctgctgtgagagtttacacagcatcccaggttgagaatgaactggaagtggccaaaagagagtacttacaggcagcaattggattttcaacttcaaagtttgctatcccaaagctactggattggtatttgctgaactttgcaaaagacttggagtcattgctggattggatctgtctccagttaccaagtgaattggggaaagaagcccttaaattccttgaggaaagaaaaaccgagcccttatcacaatttgtacaaattatgccatatgagttcagctttagatacttgatatgcacataatttcactcccttttggccattgcaattttgtatacagcagtagatcatacatataaaaatgtacatgatcatcttttctctactccctttgggagaaatgttcaggttccttcttttaactaaagtgaataaaagaatcattgtataacatggaatttgaactatgtaagtggccccatttggataaaattctcacccagtacataaaaaaaaaaaaaaaaaaaaaaaaaaaaaaaaaaaaaaaagaaaaaaaaaaaaaaaaaaaaaaaaaaaaaaaaaaaaagaaagaaaaaaaaaaaaaaataaaatgggggnaacctaaatggaataaagtggacgtagttttacaagggtagggattggaaaattccctggggtccccaa

SEQ ID NO: 5643 - DNA, 2006 bp, Glycine max
cgataagacaacagaacggaacgggtgttagaagacgacagaaggggtccctttctttctctctcacataacactgtttatcgatgatgctctgaactctttatctatatatgcctctctgatgccgatgggtgcctccagttttccggcaagcttcaaacttcccttcgccggccccgattttgatcacttttccggtatgaatcgtttgcgacaccccctttgttgatttagaaatgctagatctattcgtcgcatcacacgttcgatccaaaacctggttccacaagaggaaaaaaaaccaccgacttcgttcccataaaccctagtgctatttccctcccaatttcgtaacactgattgtaatttgcaaattgtacagctagaattttgtttcttttctttgtttaattttttgtttttttttttgtatttcctttattttacaattctctttgctgggtttgcaaagtttgtacagttagggttgtagatggtgaggatcggagggtgtttttgaaggaattatcagattttgattctgggtttttgttggggtggtagagaacaaggatttgaaaaacaggatttttgttttttggagtgcctatgactgattgacggtaattgcgaccgcactcggtcacatttgtctgcaattttccttaatatcaaggaataggataaaactgtgatcgcaatttaaaactttgttggagaaagtgggggaaatgagcatgagtgtggcagaagatgaatctagtgaagaggttcatgttccaggtgagattgattggcaaatgcttgataaatccaagtttttcttccttggtgctgctcttttctctggggtttctgcagctctttacccggttgttgtgttgaagactaggcagcaagtggctcagtccaaagtttcttgcatcaacactgcattttcattgattaggggtgagggttttagagcattgtaccgcgggtttgggacttctttgatgggcacaatccctgctagggctctttacatggctgcattagaggttacgaagagcaatgtgggcactgccactgttaggtttggtcttgctgaaccaactgctgctgcagttgccaatgcagctgctggcttgagtgcagccatggcagctcagcttgtgtggacccctgttgatgttgtgagccagaggttgatggttcaaggtgtttctgattccggaaatcccaaggcttcggctcttcggtacatcaacgggattgatgccttcaggaagatcttgagcagtgatggccttaggggcttgtataggggttttgggatctcaattttgacctatgccccttctaatgcagtttggtgggcttcatattctgttgcacaaaggatggtttggggtggagttgggtactacttgtgcaagggaaatgatagtgcagctaatagtgcattgaagcctgatacaaagactgtgatggcagttcagggagtcagtgcagcagtggctggtggcatgtctgctttgatcaccatgccactggataccatcaagacaagactgcaagtcctggatggcaatgagaacggccgtcgcggaccgacagccatgcagacagtaaggagtctggttagggaaggtggctggatggcttgttatagaggattgggacctagatgggcttcaatgtcaatgtctgcaacaacaatgatcacaacttatgagttcctcaaacggctctccgcgaagaatcaagaggttttgacatgatgaagggacaggtttatgacagcaaaagaaaaaaaggataaacaaagagaagagaggaggttcttctttgcctgtttttctgttcttatcttttctccacttgtcaatgttgtttcttcacttttggcttgccacaatgactgtttgatcaatgtaagtcattgcaggttattacataaataaaaatttacttctaacaaaaaaaaaaaaaaaaaaaattaattcaagcggccgctctagagg

SEQ ID NO: 5644 - DNA, 1707 bp, Glycine max
tcgagtcagctacgtagggcccccccccagaatatgtgctgattttctgttccaaaaaaacatgaacgatcgatgagatatttcgaaatatagtgttggacacccagttagcaattagcatagctatgactgtgattttaccaaccccgaccaaaaatctcataaatttcgcggtcagcattttctgctacggttttgcattcctaaccttgaactttaggtctcattgttgaatttttcattttcagctttcaccacaaccctttgaagctctgcatcctctaatggctctctccacaacatttatgcccccttcatccccaaaattgaacctttactccaaaattcgaagacccttttaccctcactctgtcagattccttaaccccctaaagattcgggcttcaactactctggattattccaacgtctctacgaacgacaaatccccccctttgaagactagcaattggcaatggaaattcaaggacaaccttataaacatttattatgaggagcatgtaaaggagagtccggagccttcccaaaatatcttgatgatgccaaccatttctgatgttagcactgttgaggaatggagactagtggctggagacattgctcaacgtaatggcaacaccaattggcgggcaactattgttgattggcctggcctgggttattctgatcggccaaagatggactacaacgctgatgtcttagaaaagtttctggttgatttcatcaattcacccaatggtccaatgaaacaaccagaaaatgatttgataatttttgggggaggacatgctgcatctatagtagcccgtgctgcaaaaaagggtctggtgaagcccaaagctatagctgctgttgcaccaacttgggctggtccactccctatcgtgtttggtcgagactctagcatggaaacaagatatggtcttctaagaggcacattaaaggcccctgcagttggctggatgatgtataacatgcttgttagcaacgagaatgctatccaatcacagtacaaatcccatgtatatgccaaccctgacaatgtgactccaggaattgtggaaagcagatatgcattgaccaaacgaaaaggagcacgttacttgcctgctgcgttcctgaccggtcaattagatcctgtaacatctcgtgaggagtttctcgaactcttcacagctttggagggaaagacaccagtgctggttgtatcaaccaaaggatctcccaagaggtctaaggctgagatggaagctctcaagggagccaaaggggtgaccaagtttgtggaagtgccaggtgctcttcttccccaagaggagtatcctgctttggtggcagaagagctttatcagttcttgcaagaatattttggcactgttgcttagaattgacattttctttcggtaatttatcatctatcaaacggggagagtcaatctcattgatgttctgcagcttttcacttcagtatgttggtgcagcttttggaggcacaaatactaattgatggaaaaagtttttccaagggtatatacatgtttatgtagtttgattttatctgattattattgattatagaacccctcgtgtatatgatgcttacagttatcatgtccgactgggctgatgacttgaacattacttctcagctgaaagatattaaaaatttaagttccctttgattcg

SEQ ID NO: 5645 - DNA, 1405 bp, Glycine max
tcagctacgtaggcccccccccctgtccattgatgatgctcgtctttgcaaaccgggaacacttgatcctaccaaagtaaagggaaaaatactagtctgccttcgaggtaataaattaacttcagccagtgagggtgaacagggtaaacttgctggcgctgtggcagttctagtgcaaaatgatgacccaagtgataatttacttctggccgagaatcatgtattacccgctgcaagtataagtggaacgggaagtcataatattaaaaacggtacaggcaacaatggcaataacaaggagattttagcttacttgagtgctgcagaaacatatataggagtaaaaccagctccaatcatagcaggattctcatccaggggtcccagttccgtgcaaccattgatactaaagccagacataactgctcctggtgtgaacgtaattgctgcttttacacaaggagctggtccgtctaatcttccatcggatagacgccgatctcttttcaatgtgcaacagggaactttctatgtcttgccctcatgtcgctggcattgcaggtcttctcaaaacatatcatcctacttggagtccagcagctatcaaatcagctattatgaccacagctacaacactagataacaccaatcaaccgattcgcaatgcatttcataaggtagcaactccattcgaatatggtgccggacacattcagcctaaccttgcaattgaccctggactcgtttacgatttacgcaccaccgattacttgaacttcttatgtgcttctggttacaaccaagctttactcaacttatttgccaaattgaaattcccatacacttgtcccaagtcttacagaattgaagatttcaactatccttcaattacggtgcgtcatcctgggtcaaagaccataagtgttactcgtacagttacaaatgttgggcctccaagcacgtatgttgtgaatactcacgggccgaaggggattaaggttcttgttcaaccaagttcgttgacttttaagagaaccggagaaaagaagaagtttcaggttatactgcagccaattggtgcccgtcgtgggttatttgggaatttgtcttggacagatggcaagcacagagtaaccagtcctatcacaattctgccttagaaattactctcgatcagcattcttatgttatcattgtcgtcttttgagtgtgtttgcatttgctgttttttaggctgtaatatgagcgtgtttcctactcctattgcattaagctcttttttttttttttatgtaaagctttgtcataaataaggtatttttagaatgctgatggaattggagctatcatcaaagaactagtaatgatcggaggaaaatcaagcaaatttaaaccctagcaataa

SEQ ID NO: 5646 - DNA, 1770 bp, Glycine max
  misc_feature (1629)..(1629): n is a, c, g, or t
  misc_feature (1679)..(1679): n is a, c, g, or t
  misc_feature (1700)..(1701): n is a, c, g, or t
  misc_feature (1720)..(1720): n is a, c, g, or t
  misc_feature (1744)..(1744): n is a, c, g, or t
tcagctacgtaggcccccccccctacaaagcgtgctggcataaattggacacaggagggtgccatgaagcagatattctagaagcatttgatcatgccattcatgatggtgttgatgtcatctctgcctctatcggttcgtctaatccctataccgaagctttgttaacagatgggatgtccataggggcattccatgcagttgccagaaacgtagtcgtagtttgctctgctggaaatgatggaccatcacctttaagtgtcacaaatgttgcaccctggtccttcaccgttgctgctagcacactagacagggattttctcagcgacatttctctcagcgacaatcaatccattacgggtgccagtctcaatcgaggcttgccaccatcgtccccgtcgaacaagttctatcccataattaattctgtcgaggctagacttcctcatgtgtctattaatgatgctcgtctttgcaaaccgggaacacttgatcctagaaaagtaaggggaaagatactagtatgccttcgaggtgataaattaacttcagttagtgagggccaacggggtgctcttgctggtgctgtggcagtttttgtgcaaaatgatgagcaaagtggaaatttacttctggccgagaatcatgttttacctgctgcaagtatcagtggaacccataatgaaagtcaaggaggtgctttcaacatcagcagcaagggggtcttagcttacttgagtgcggcaaggacacatataggagtaaagcctgctccaatcatagcaggattctcatccaggggccccagttccgtgcaaccattaatactaaagccagacataactgctcctggtgtgaacgtaattgcagcttttacacaaggagcaggtccgtctaatattgcatcagatagacgtcggtctcctttcaatgtgcaacagggaacttctatgtcttgccctcatgtcgctggcattgcaggtcttctcaaagcatatcatcctacttggagtccagctgctatcaaatcagctattatgaccacagctacaacactagacaacacgaatcaaccgattcgcaatgcatttgatgaggtagcaactccattcgaatatggtgccggacacattcaacctaaccttgcaattgaccctggactcgtttacgatttacgcacctccgattacttgaacttcttatgtgcttctggttacaaccaagctttactcaacttatttgccaaattgaaattcccttacacttgtcccaagtcttacagaattgaagatttcaactatccttcaattacggtgcgtcatcctgggtcaaagaccataagtgttactcgtacagttacaaatgttgggcctccaagcacgtatgttgtgaatactcacgggccgaaggggattaaggttcttgttaaaccatgttcgttgacttttaagagaaccggagaaaagaagaagtttcaggttatactgcagccaattggtgcccgtcatgggttgcctttatttgggaatttgtcttggacagatggcaggcacagagtaaccagtcctgttgtagttctgtaatgtaaccttagaagttagaagttgctctcagcattgttatgttatncactgtcatttgagtgtgttttggcgtttgctgtttttaggctgtaattnaagcgtgcttcctactcctgnntgtgttaaactttgtctanactagtagggaaggtttaaaattncgaggtattgaactctgttgctttgg

SEQ ID NO: 5647 - DNA, 1595 bp, Glycine max
accagctcagctacgtaggcccccccccccggtgtgtgtgagagagagagaagtaggcgaggatcgttcacataaaatatcgacagagatcgacgagaaaaagctaagcgaacaatgtggagctccaaaacgacgatgatgctggccattgcagccattgctctgatgatgtttctctcatcggcttcagccgacgacgtcgttgcactcacagaggaaaccttcgaaaacgaggttggcaaggatcgcgccgctctcgttgagttttacgctccctggtgtggacactgtaaaaggcttgccccggagtacgaacagctcggagcgagttttaagaaaacgaagtccgttttgattgccaaggtggactgtgatgaacataaaagcgtttgcggtaaatatggggtatctggttaccctaccattcaatggtttcctaagggatctctagaacctaaaaagtatgaaggtgcacgtactgcagaagcccttgctgcgtttgtgaacattgaagcaggtacaaatgtgaagatagcttctgttgcatccagtgtggtagttctctctccaaataactttgatgaggttgtcttcgatgaaacaaaagatgttctggtggaattctatgcaccatggtgtggtcattgcaaggcccttgcccctatttatgaaaaagttgctgcagcatttaacctggataaagatgtagttatagccaatgttgatgccgacaagtataaagatttggctgagaaatatggtgttagtggctatcctacactgaagtttttcccaaagagcaacaaagctggtgaaaattatgacggtggccgtgatttggatgattttgtagcattcatcaatgagaaatgtggtacctaccgtgatgggaaggggcagcttacttctaaagctggtataatagcatctctggatgacttggtgaaggagtttgtgagtgctgacagtaatgagaagaaggcagtatattcccggcttgaggaggaagttaagaagcttaaaggttcttctgccagacatggcgacctttacttaaaacttgctaagaagggtatggaaaagggtgcagactatgcaaagaatgaaattcaacgtcttgagcgcatgcttgagaagtcagtcagcccagcaaaagcagatgaattcactctcaagaagaacatcttatctatctttgcttgatcttcctgtgatagaagagccatttctttcagttcagcggggagatatgatttgtaattcctgagtttctaggtgttatcaccctagttttcttgatgaccgtttcctataaatatgcactctttcacgcgcatttttgcactgatcatgtactgagtcgtaaaactaaagcaaaagtagcatctgagaaatcatattcaaaacgtatattgacttcaggctcaagtttaatttagagattgttatagcccttttccttttttttttctagtgtccttagcacattgattaagaaactaaaaggaaaaaatattgtgtaaatcataggagagcgtaaaaaagatcatggacaatacaattttttgtctcctaataaaaacatttttacttta

SEQ ID NO: 5648 - DNA, 1108 bp, Glycine max
atttcagctacgtaggccccccccccaatcgaagggtttttgagagagagagagagatggcagcttctggttcgtggaagagtgggagtggttcttcgatgggtctggagaggatgagcgtggagcagctgaaggcggtgaaagagcaagccgatctggaagttaatcttctccaagacagcctctccaacattcgcaccgccaccacccgcctcgagatcgcctcctccgccctcaacgatctctccctccgcccccagggcaaccacatcctcgtccccctcaccgcctccctctacgtccccgccaccctccacgactcccaacacgtcctcgtcgacgtcggcaccggctacttcatcgagaaaaccatgcccgaaggaaaagattactgcgaccgcaaaatcaacttgctcaaatctaactttgatcaactcgtcgaggttgcatccaaaaagaaaaatgtggcagatgaagctggtgttattttgcaggcaaaattgaagcagttagcgtcttcatcctaaaagtagttggtatagaatttatttgttttctttcaatgcattgtaccatagaactatttaaactttttatttgaaaactccctttttgttggcacctccaaaatttggcttggaactattggatgtgtatttagaaaatggagtcaaatcaatgacaattgaaatttagagggtatttaggaattttacactggtgtttcaagtacattatctcttattagagaagactgttgcagttcccgttataagtgttatttgctggcctttctggtgtgttctaatttcaccaaagctgctcctgaaatatgcttgcgtgtgggggtagagaagggtgtcctcgagtaatattgtgttagtctggggaagagggaagggtttcctctaggctaacgcaataatttggatagctttagagtgttcgtttggtgttgcggtcgaccttttcataggtaaataaacgaggttacgacaaacagacaacttttagagttttacatggttaagattttggtctttattttccgtcagatatcgattcttacatttcctcatgaattttggcctctaatgtttaagccttt

SEQ ID NO: 5649 - DNA, 2221 bp, Glycine max
cttttacgttttcttaacatttttcgggaatgcgagctgaaatgtcaatcatcatgacatgagattggtcctctctatattgatcgcacaatgtatcacaggaaatataggaagagacgtagtggggtccagcacccatgtgccctcctcctgtctccaccagctgctgccgctcaatgatgagacccctgttccccttcaagttcaagttcaattcccacaccaaggaaactctctcatctctcaaacccaacaaaaaaaaaaccattactttacttcactttacatgtcgaactccgacgccaccactaacggcgtcagtaacggcgccatcattgatgcgcagagacagcaggccttagccgttaagaagccgccgtctaaggaccgtcacagcaaggtggacggccgagggcgccgcataaggatgccaatcatatgcgccgcacgtgtgttccagctcacgcgcgagcttggccacaagtccgacggtcaaaccatcgagtggctcctccgccaggccgagccctccatcatcgccgccaccggctccggaaccacccccgccagcttctcctccgtctccctctccgtccgcgccgccgccaactccctctcctccccttcctccacctccgaccacaagccccagttactctctcccactcccttcatcctcggcaagcgcatacgcaccgacgaagactcttccaaagacgaagctgtctccgtggggccctctcttgtgggcccttctactcctcccggactgtgggccctcccggcccggcccgatttcggacaaatttggagcttcgccgccgccgctgctcccgaaatggtgtcggtgtcgcagcagcagcaggcttcattgttcgctcatcaccaccgtcagcagcagcagcaagcccgcgccgaagccgccgcggcgagggtgggaaattaccttcctggacatctgaatttgctcgcctcattgtctggtggacctgggaattctggtcggagagacgatgagcctcgttgattgtcacatcttcaacggtggtggtgatggtggtggtcggtggtgttggtgtttttttccgtatatatgcatattctcgtgttgtggttgctgtttttgttgtgtgtggcaagcaggagattcttagggttaggttttttcttagatttgagtggagaagtccatcgattaagaaattattcaattagggtttttgttttacttcctgctggtttggagaacttaactaggtttttagatgttggataattgttttagattccggggctttgttggaggagaggaggggaaaaaaaggggagaatgtaatgaactgatgatttaatttgtgaaattgtcatggtgagaaatttgtaccgattgaggctggaattgggtttcagaagcttggtccgtgtgcgagtgcagttgaatttgtaatgtaatgttgttgtactcaaagagagttcttctaagttgaagagcatggattggattgcattgttgcttctgtttcactttcatagtgggttattttgggctttgacttactgggtctacaagtatggtgtggttgaagtggttgcagttgaggtaattagtgcttgcaagcttgtttctgaagccagtgaattgtgtttccaaagttcaattgtcagtcccagaatgttggagtaccctactttccaacatgggttgagaattcatgtctcttggatgttgttggggcatgttttgagggattgaggttcatgtaaggtggttatgttgtgaatttggtgcagctctctgactctctcctccactttcacgctccttgatggtgttttattcgttttcagaggtgactggtgtgtgaaagatgaaaaaaaaaaagaagaaagctctggttgtactctgtatgacttctgctttgagatttttatcttcaattcttagccatttcttagattgatcagcgtgagaataatgttttcttgtatgtaagtggattgtttcgggtgccagaataaaaacccgtctgtttctttctttacctcttttcttcacttgtcactttctttgtttctatgtacacgggaacttgttttgctgcttgatgacgattcaattatttcagtgtgctttctgttcttaaattattgtagccaagttgaccctgggctttgcggaatgtgttgtggcctagcaatataatattataggagtaaattc

SEQ ID NO: 5650 - DNA, 1037 bp, Glycine max
tagtcaaaagatagtagcacgtaatgacctttctgtagttgctgtcctcatctgtggacatgtctatcatgctgaatgtttggagattatgacacctgatatcaataagtatgatccagcttgcccagtttgcacttttggtgagaaacaaactattgcctccgtctgaagatgctctgaaagctgaaatggatttgaaggctagaaccaataaatcaaagaatcgggttgtggacagtgatattgatgatgattctgttgtgtttcatcactttaaagggagagggcttaaaggtaaaagtcctaggatagactccagttccaatgggagaagctcctatgggaaaccttttctgaggcgacacttttcctttggatcaaagggttccagatctacattagataatcaccctacaagaaagaagggtttcttttgggcaaaatctagcaaggaataagctgcttcttggttgttgggaggttccgctgttgaacttttgtgcatcctcaattggtttgtgaaaaggacaaaatgcaatttatgatttcagagcatctgtataaactaatctgcaatttcaactggataagaggtttgaagttactctgtaaagaagacatacagaagtataagttgaacatacagacgtaaaatattatgtttagaccccaatgttctttctgcattgtacaggttgatttgtttatttcatggatataattcttatatccaaatgatgttcagttgtccatggttcttatgtaatgcaaaccattagcccttcggagtttctggagttgggaaatggtcttcaaagattgataggcaaataccaattatttcgatccacttagttggttgcttttaatgaaggagcagattcaggatagcctattatcaaaccagtgtttttgcagttagcagattgaattgaatactttattctgatgtgttgcctttaatgaaagaacggtttcagcatagcatccggtcaaattaatatttttttgtcggtagcaaaaaaaaaaaaaaaaaa

SEQ ID NO: 5651 - DNA, 602 bp, Glycine max
cgggccccccctcgagcagctacgtaggccccccccccaaaaagtttaaagaatgtttatacaagtgcgtaccgtcgctactgaaagaagaaggaggggtcctcaaaccggcgtaaaagaaaccgtctgaaacgctcctcctctttccgttctctctctctgtggcacttgatttcgtcaaaaggcaaagggatgtgttcccgagtgaatgatgttggtttgtatttgctgatgcaattggtggttatgttggtttaagaagctaagaactgttgctactacttcacaatgggtgctgcttgttgtgttgctgccagagacaaaactatacaaagtggatcaaccagtgacaatttgcatcggaatgctcgatgttctccaacatggagctttcggtgggatcatcgggggcgtgtagctggtgaagatacttctataaattggttttcagatggtattagcaggaatgatggatcagagaataaaaatgaatcagcatatgtgtcagaggatggaagtccactgcagaattatcaacagaaaagatgccaaaaaccaccaatttcggaaagtactgctgcacacaggagaaattcaacttc

SEQ ID NO: 5652 - DNA, 2127 bp, Glycine max
tcagctacgtaggccccccccccaacacagtaactgaaaactttccctgaaacagcacataatatcttgctgccagtgtgcactgcttccacattcagtgttaaaagcctaattccatattcaccactcacttgttcattctacatttagtgtcaaaaagccttttggattaccatacccatttggtgaaagaccccatctttggttgaaagaatgggaagtagcaaacccagatccttcattctccttctatttgtgttcctttgtgtttttgcaacggcacaagaacaacagcaaccaataaaaaccgttgttgttctggtcatggagaaccgttcctttgaccacatgctgggttggatgaaagagagtatcaacacactaatcaatggggtcacaggagatgaatgcaacccggtttccaccaaaagtccaagaaaagattcaatttgcttcaccgatgatgcagagttcgtggatccggatccgggccactcgttcgaggatgtgttgcaacaggtattcggttccagttccggttccggctcaattccttccatgaatggatttgtggaacaagcattgtccatgtcttctccgaacctctctgagactgtcatgaaagggtttaaaccggactctgtgccggtttatgctgctttggttaaggaatttgctgtttttgataggtggttttcttcaattccgggtccaacacaacccaataggctttttgtgtactcagcaacctctcatggctcaacaagtcatatcaagaggcagttagcgaaagggtatcctcaaaaaacaatctttgattcaatgcatgagaatggcctagactttgggatttactttcagaacataccaacaactctgttctataggaatcttaggaaattgaagtacatatggaagttccatcagtatgatttgaagttcaagagggatgctagagatgggaagcttccacccttgactgtgattgagcctaggtactttgatttgaagggcataccggcgaacgatgatcacccgtctcatgatgttgcacatgggcaaatgctggttaaggaggtttatgaggctctaagagcaagtcctcaatggaatgaaacgctttttgtcattacatatgatgaacatggtggattttttgatcatgtgaagaccccttttgtcaacattcctaatccagatgggaacaccggacctgctccctatttcttcaagtttgataggttaggggttcgggtgccaactattatggtctctccttggatcaagaaagggactgtgataagtggcgccaaaggaccggctgaaaactcagaatttgagcactcttctattcctgcaaccataaagatgattttcaacctttcctctaactttctgactcacagagatgcatgggctgggacatttgagcatgttgttggggagttaagttcacccagaacagattgcccagtgactatgccagacgtgacacctctaaggagcactgaagcaaaagaaaatgctggcctttctgagtttcagagagaggtagttcaattggcagctgttcttaatggggaccattttttgagcagtttccctgatgaaatgagcaagaagatgagtgtgaaggaagctcacgagtacgtgcgaggagctgtttcaagattcataagagccagcaaggaggccatcaaactaggggctgatgagtctgctattgtggatatgagatcctctctcactactagatcttcagttcataattaatacaaaacaaaactcataaacagacaagagcaaagaaagttgtgtgcctatctctgtatctaactattatagtttttaggttatctgataattcttgtgctagattttgttaggtttgtgaaagtgaaatgcagtagaatggcgtgtttgatagaaggccgtgcaaggacgggaggtttctcaaggtctctgtttgaaagaatataaggaaattaaaaaaaaaaaaaaaaaaaagagaatgatggtttggctagtgagtaatttcgaatggaaaactccaatgctgttgtacaaagtacaaacacattataaatgcagctccataattttgttttcaaaaaaaaaaaaaaaaaa

SEQ ID NO: 5653 - DNA, 1703 bp, Glycine max
actcgagccgccccgcctcgcggcacaagtgagggaggttgaaggcggcgtgagaagcatgttggacatcaacctattcagagaggagaagggccacaaccctgaattcatccgcgaatcccagcgccgtcgtttcgccagcgtcgaagtcgtcgacgaggtcatcaatctcgacaaagaatggcgaaagcgtcaattcgagttggagaatctccgcaaagaatttaacaagatcaacaaggaagtctccaaactcaagcgtgctggcgaggatgcaactaagttcatcagtgaatcagaggaaaccaagaaatcgataggggagaaagaggttgaagttcgggaaactctgaatctcttgaattccaagttggaaactattggaaacctcgtccacgattccgttccaattagccaggatgaggccaacaatgttgtcgttagatcgtggggagagaagagagtggagcctaagctgaagaatcatgtggatctagttgagcttctcgggatagcagatacaaagaaaggagctgatgtagctggaggtagaggtttctatctcaaaggagatggtgttcgtcttaatcaagctctaataaactttgggcttgattttttggataaaagggagtatactttattgcatactcctttcttcatgagaaaagatataatgtcaaagtgtgctcaactagcccaatttgatgaagaactttataaggtaactggtgaaggagatgacaaatatctgattgcaacagctgagcagccactctgtgcatatcatttagatgattggatccaccctacccagctaccattaagatatgctggatattcatcatgctttcgtaaagaagctggatctcatggtcgagacactctaggaatattccgagttcaccaatttgagaaagtggagcaattttgcctcactagcccaaatgacaatgattcatgggacatgcatgaggaaatgctgaagaactctgaagatttctacaaagcgttaaatcttccctatcaagttgtttccattgtatctggtgcattgaatgatgctgcagcaaagaagtatgatctagaagcatggtttccagcctctcaagcttacagagagctagtgtcctgttcaaactgtacagactatcaggccagaagattagaaattcgatatggtcagaaaaagagcaatgagcagatgaagcaatatgttcacttgttaaactctactctaacggctactgagaggaccatttgctgcatactggagaacaaccagaaggaagatggggtagagataccagaagtcctcagaccattcatgggtggaaagactttcctgcctttcaagagccaaccatctaatgaagccaaagggaagaaatcgaaggcctaattgcattttaagtcagtgatatttatgaagagttgttcagagttgtgtaggttatgatggccctgatattatccaccacatactgtttccctttctcccttatatgactaaatagtaaaatgatttgtaggagcacgcacaatttttggtcaaaatacacagcatgacattttctgtaattcattaccctaaaaaatttgtgcttctataaattgcattttggtgcttttatccattgcgaaaaaaaaaaaaaaaaaaaattttaaaaaaaataaaaaaagcggccgctctagaggatcct

SEQ ID NO: 5654 - DNA, 718 bp, Glycine max
  misc_feature (107)..(107): n is a, c, g, or t
gagggaaattgtcgaccctttatggaaggggtgcaaatggagagccttgatgccttgctctctgtggctattcagtgtgtttcctcaagtccagaggatcgacccanctatgcaccgagtggtgcaattgcttgaatcagaggtcgtaactccatgccctagtgacttctacgactccaactccgattagaaagcttgcaaagacaaacttaaattatgttgttgtgtttgcacccatgtcactgcaaattccttgcaagtcagaagcgactatagaggctcagaatctgcagtgttacttttcatctcagttgcattcattcttaactggaattataatgaaagaggcccttcattacaccactacatgatagaagttgttttggttctcagtcacatgtcatcattggacatgttcatacattttcgtctttgtgaatggagttgcatgtgttactcgatcggtggtcttcctcgtgtttatttttcctctattttttttctctctctctttctctttgctagcattgtaatctttgttacatttgttcactccaatttaagtgtatatgaatgtgtacaagttcaggtgacccactcttgcaagtgattcttgttatttatttttgtaatatatgtcccataaaagaatccatctaatgagtgtggttctcacttctcaggttgtgtttttattttttccaaaaaaaaaaaaaaa

SEQ ID NO: 5655 - DNA, 2431 bp, Glycine max
  misc_feature (2)..(2): n is a, c, g, or t
gnaagttaatctcagacacacacactcgcatctcagatcgaaatcgaggaagtgtttacgttattctgcgctgttgatgttcatacaaactagatagctacatggtggagagagacatttttctcatatgacttctattagctatattattattgagcggtgttgctatgggcatttgtctttggaaatggcaatggccgtggcttctttatgttctgctgatacatgttgtaatccataaaagcgaagcaatcacccccgatggtgaggtgctgctcagctttaggacatcagttgttagttctgatggtatcctattacagtggaggccagaggatcctgacccatgtaaatggaaaggagtgaaatgtgatctgaaaaccaaaagagtaacacatctgagtctatctcaccataagttaagtgggtctatatcacctgaccttgggaagctagagaatctgagggttcttgctcttcataacaacaacttctatgggtcaattccaccagagttgggaaattgcactgaattggagggaatatttttacagggtaattaccttagtggagcgattccaagtgaaataggaaacctttcacagcttcaaaatttggatatatcaagcaattccctcagtgggaatattcctgcatcacttgggaagttgtataatctcaaaaatttcaatgtatcaaccaattttctggtcggacctataccttctgatggtgtccttgccaactttactggaagctcctttgttgggaatcgtggtttgtgtggagtgaaaataaattcaacatgtagagatgatggttggccggataccaatggtcaatctactaactcagaccaaaatcaaataggaaagaagaaatattctggccggctgctcatcagtgcatcagcaactgtgggagctctacttttggtggcacttatgtgcttctggggttgttttctttataaaaagtttggcaaaaacgacagaataagtctggcaatggatgttggtgcaggtgcatcaattgtgatgtttcatggagacttaccatattcttcaaaagacatcatcaagaaactagagactttgaatgaggaacacataatagggataggggggtttggaactgtttacaagctagcaatggatgatgggaatgtgtttgctttgaaaaggattgtaaagttgaatgaggggtttgatcgtttttttgagagggagcttgaaattcttggtagcatcaaacaccgttatctagtgaatttacgaggatattgcaattcacctacgtcaaagttgttaatatatgattacctaccaggtggtagtcttgacgaagcacttcatgaaagagctgatcaactagactgggattcgcgcttgaatataatcatgggagctgcaaaagggcttgcctacttgcaccatgattgttcccccaggatcatacaccgagacataaaatctagcaacattttacttgatggaaacttggaggctcgggtctctgattttggacttgccaaacttctggaggatgaagaatctcacatcaccactattgttgctggaacatttggttatctagctccagagtatatgcaaagtggcagagcaactgagaagtctgatgtgtatagctttggtgtgttgacactcgaagtgctgagtggaaagcgaccaacagacgcagcattcattgaaaagggcctcaatattgttggttggttgaattttctaattacagaaaataggccgagggaaattgtcgaccctctatgtgaaggggtgcaaatggagagccttgatgccttgctctctgtggctattcagtgtgtttcctcaagtccagaggatcgacccactatgcaccgagtggtgcaattgcttgaatccgaggtcgtaactccatgccctagtgacttctatgactccaactccgattagaaagcttgcaaaggcaaactaaaagtatgttgttgtgtttgcacccatgtcactgcaaattccttgcaagtcagaagcgattatagagggtcagaatctgcagtgttaattttcatctcagttgcattcattcttaactggaattataatgaaagaggttcttcactacactacatggtagtagttgttgtggttctccgtcacatgtcatcattggacatgttcatacatttcttcgtctttgtgaatggagttgtatgtgttactcgatcaatcgctggttccagtcttcctcgtgttttttttttccctctattttttctctctttctctttgctagcattgtaatctttgttacatttcttcactccaatttaagtgtatatgaatgtgtacaagttcagatggcccactcttgcgagtgattcttgttatttatttttgtaatatatgtcccataaaagaattcatctaaa

SEQ ID NO: 5656 - DNA, 1054 bp, Glycine max
tctcattgagcatgaattttcagataaattaacctgtgttcagcctttgttcatgttagactatattttagacagagtttcatgcatactctttcataatgcaagacataacctgttaatagcaatgttctctgttctttattagcatactgaaacatttcttcacatttcagctggttggtttggatgagaaattgctttaagctatttgttttgcattctatttaggatatttctcctttacgatcctttggattcgtgtgtggaaccaaatataataaattaatgtgctattctgctctcacctcttttcccttgcaggaattcccaaattcatcctgatctctgttcatgattataacttaccatcatttttactttcatctgggtactttacgggaaagaggaaagcagaatccgaggttctctccaaataccccaattcaggtattgtcttaagacctgctttcatatatgggaagaggagagtgaatggttatgagcttcctttggatttggtaggggagccagcagaaaaaattctacgagcaatagagaacttcaccaaacctttaagttctcttcctgcatctgatttactcttagctccacctgttagtgttgacgatgttgcgctggctgttatcaatggtgtcacagatgatgacttctttggtgtttttacaattgaccagatcaaggacgctgccaataaagtacgggtatgaatatgatccggatatagtcaaacgagataaacctgcaattacaataattgtacagtcagggagtaactacaatgaggccattttccttgtgttaataccggtggcagcttttggagcacaatcttttttaaattttaagggagtagtgtgtgaccgtgtgaggagaatggtgtttaaaacaatactaaatgtaataaatgaggttcatatcttcttttgttgtccaagtattgttagtttatgattcggaccattctcgtgcctgtaaattctcaaaccttctagcgaactagtgatttaattagaggctaacttgttagatttgt

SEQ ID NO: 5657 - DNA, 1036 bp, Glycine max
  misc_feature (986)..(990): n is a, c, g, or t
  misc_feature (992)..(993): n is a, c, g, or t
  misc_feature (997)..(1001): n is a, c, g, or t
  misc_feature (1004)..(1007): n is a, c, g, or t
tcagctacgtaggcccccccctgatttacattcttgccattcgtgttgaactgaaaaccaaattgaaagaaagaagcctacggtctgaaaaatccacttgtcctgatgagttatgtaagtccagtaatggcagcagcaactgcccttctttctcttgcattagatccatgggatgaattccgagaaaacaagtactttgataattcattgcatattactcgaagttgcttgctgatgcttcttggtggcacacttgccttttttatggtactaacagaatatgttctggtctcagtaactagtgctgtcacagttacaatagctggggttgttaaggaggctgtcaccatattggttgcggtattgtactttcatgatcaattcacttggttgaaaggatttggcctattaactattatggttggtgtcagcttgtttaattggtacaaataccttaagcttcagaagggccatgctgatggcagtgatgtggcagagcattcaagagattctgcagccaaatatgttattcttgaggagatggaggaacaagaagatggcatctgaaaccattatgccccaaataataattcaaagccaaatgaagccatgatctctaaagacctatgggcacaaaataatcttccagcaatatgccagttggcctgcaccatctcatcttttcgagagccctgttggaattgtggtgtcaaagttctttttaagtttctttgagtgaacaattttttaagatataatgccctcctgcgatcaacatcacttatattctgtaaaaatatgcactcaaacagttaatagattttgtcatttttttagagttgacaaggtatatgttgcagatcacaacaggttgtaatagataattttttctcatttttgcattctagtatggaattgtattttttttgtcatattttcagtatttttctagtatatactaaaagcagttcttaatttcttgcccnnnnntnntttnnnnnttnnnntataaaaaaaaaaaaaaaaagggcgggcc

SEQ ID NO: 5658 - DNA, 1934 bp, Glycine max
aaaccctcccccttctccatgggacagtcaccgtccaccaccgccgcgcctccgccagacctcaaccgccaccaaattcctcagatacatccaaacaccgattccgatttcaccgattacaccctccgtctctccgacgattgcctggccgcaatctttcatttcctgagcaccgccgatcggaaacgttgctctctggtctgccgccggtggctccgcgtcgacggccagaggcggcaccgtctctccctcaacgcacagccggaattactagacttcgtcccttccctattcaaccgcttcgactcggtgacgaaactcgctctacgatgcgaccgaaagtgcgcgagcataaacgacgacgctttggttctgatctctctgcggtgcaggaatctcacgcgcctgaagctgcgcggctgccgcgacataactgaactcggaatggccggcgtaggcgaaaactgcaaggccttgaagaagctatcgtgcgcgtcgtgcatgttcggagcgaagggaatcgcggcggtgctcgatcgatgcgttactttggaggatctcacgctgaagcggctccgtggggtccaccacatcaccgacgtggaggttggtgccgcggcttcgttgaaatctatatgccttaaggaactcgtcaacggtcaaagcttcgcgccgcttgtgattgattcgaagaagcttcgaacgttgaagattattgggtgcacgggggattgggatgagactctggttagggttgggtgtttcaacaatgggttggttgaggttcacttggagaagcttcaggttaccgatgtgggacttgttgccgtgtctaaatgttttggtttggacactttgcacgttgtgaaaaccgctgagtgctccgatgtggggctttgtgcggttgctgataggtgtaggttgttgaggaaggttcacattgatgggtggaggactaataggattggtgatgatgggttgcatgcgattgccaaacactgtcttaatttgcaggagctcgtgttgattggtgtttatcccactttttcgagcctagcggcgattgcgtccaattgcaggaatttggagaggttggctctttgtgggattggaaccgttggggatgcggagattgagtgcattgctgataagtgtgttgcactcaggaagctttgcattaaagggtgccctgtgtctaatgctgggattggagctctggcttctgggtgtcccaatttggttaaggttaaggtgaagaagtgcaaaaggattactggtaaaggggtggagtgggtgcgagaacagagggtttctttggcgtttaattatgatgatagtgaagttgaagctttggatgggagtgcaagtgatgggattggcggagctcgggataatactgtagagtttctaccaaccattaaccaaacaaccgtggctgtggctgaggctgatgctgaagcttcttcaagtaataataacaaccgattgacaatgttaagatcaaggtttgggtttttggctggtagaaatttagtaccgggtgccttcagaagatggtctaacggtgataatgtctccagtagcagcagttttggatgatgttagtaaaaaagcagcaagccagcaaccacattcttgccaagtttgcattcctccatatctataatagtagttctcatgtcgattgcctgttctttgcagtgttgctatgtgattttttgtttttcatgttagttgctgatagcagcagcatttcttttgttgactagatttgtcagttaccctcattgattgtccctttcctatttgttctggttatacacctttgtaaaaggtctgttttatttcctatcagtgcagttttttttttttgataaaaactgcagagttgacaaaaaagaagataaaaactgcagaaaatctcgttccctctt

SEQ ID NO: 5659 - DNA, 630 bp, Glycine max
gcttctctaatttgtggcttttaattgatggaggggtatccctaactttgtaaagttcgatacattcttgagagaaacggtgtcgttggtgcggagtctcatggcgacgaacctcatctcttcggtgatgccggtggtctctccgggcggcgcccgccgccgccgtccgggcttctgaatcgtcttttacttctcagcagcttcggctagggttcagaaacgaaaaagggttcggtgttctgttcgcgatgagagccaagtggaagaagaagcgtatgaggaggttgaagaggaagcgccgaaagatgagacagagatccaagtagtgcgttaaacctagtttgtttctgttgcttttacaattgcttatgttgtcgaatgggacacccagttgttagtggcactggtttctcctttttgatgtttgatacattttgttggattcaagtagtttatgttcgtcttatgttattagctcaaaacaatgttgttactgcttttgctaatcaacatgatctcctatttgcatctctgattttcttagggttattataatttcacattatatctgcttcaattttttatgatctaattgatattcttaattccaaaaaaaaaaataaaagggcg

SEQ ID NO: 5660 - DNA, 1443 bp, Glycine max
atctaacaaattaataattttataattagcagacgagaatagaactcttggtgtgaacaccaagaacacgtcataaactctctcgctttttaaattcatttttttttttttttttaaaataaaataaaacttattttcataattaatattgataatataagatttaatttaataattaaataatattaatggacataattctaacaaattagccaagccttcagccacccacaagtttgaggctttatttcttaaaaataactggtcacttgaattggtccaaatatttttgaagaataggagatatgagcctcttgtaaacgctttctgtaggatgaaaactgtcccaaaagacataatcctgaacattgggacagctggaatcgaaacggttgcatagtattgcaacctctatcctgcctgtgccacagcatcctgtgtctccaactttatagccatatttttggtgattggtgatgatgtcaagtagagggtcgtaaacattgatgaaaacattcctgctattgggaaagttgcggttgagggaatcaagctcctttgacaatttggtgttaaataattgggccaaattgttgggcctttctgcacatcttttttctaatcctcctcccactgttctctgaaatggcaaacacccaattgggggtgcactgaatactgcaatcctccgtgcacccagctcatttatttccgtcaagaaattagaagctgagttgaccaaaagatcagtgtaagcaggaagatcatagaggagggatctagtgcgataggtattagaaatgtcactgctgcctgctactacaatgaatagactgttggctaagataaactttgctctgtcctctccaaccagcccttttagtttccctatgtattctttcaacaaatccacttgcccagttaatggcatcgatgactctaatattgatgtcaaagggtcgtagcctgagccacctgaagcaaaacagacccctgtgatcaaatcactagattggagattgggtttcaaatatgctggcagaagctccttaatgcccaactcttcaactataaggtctgatggaacctttccattgctaaatcgaccagttgggatgccaccttgaaagtctctcccatatggagggaaattcgagcgagcaaacgatgttgttctgttgttgttgttgcctgtatccaccaccgaatctccaaacacaaacactgctggaacagacacatctgctggtagtttcaccaaacccttaattgttttgcatgaaactagtaatattattaatgtcaaacgaagcaccaaggaagaagaagggagaaaatgggagcaagaagaagaaagtagcttagtgagatgaaccataaccatggctacttcagttttggctagctagctagtattgggggggggggggcctacgtagctga

SEQ ID NO: 5661 - DNA, 884 bp, Glycine max
  misc_feature (97)..(97): n is a, c, g, or t
  misc_feature (148)..(148): n is a, c, g, or t
actagacgctatcttggaagtgttaatacaagaattgatagcaaggcaacaactttccttccaggcagattggtaatccattatttcttctgcaaantttggatccacaagaaggtttgccagattagggtttctttcatatgcctgnttgattttgtttaagaatattgttttaataatgcaaccccctttccaaatccgggccagttcacccaacttcaaatcccttcccgggtttaaatcctctgttacctctcagcagcttaggctagggttcagaaacgaaaaagggttcggtgttcagttcgcgatgagagccaagtggaagaagaagcgtatgaggaggttgaagaggaagcgccgaaagatgagacagagatccaagtagtgcgttaatccaagcagttgatttccgttgcttttataattatgttgtcaaattgggcacccagttgttagaggcactggtttctcctttttgatgttttgatacatttttgtttggtttaattcgtcttatgttattagctgaaaacaatgctgttactgcgtttgcgaatcaacatgatctcttatttgcaaaaaaaaaaaaaaaaaaaaaaaaaaaaaaaaaaaaatctccctcgtgccgaattcggcacgaggaaatcttctctgcttcagaccagagcttcttcagaggaatcatcctcagtagatgccaatgaggtgttcacagatttgaaggaaaagtgggatgctcttgaaaacaagtccacagtacttttttatggtggtggggctttagttgctgttaggctatcgtcgattcttgtgagcgccatcaactctgttcccttgcttccaaagattatggagttggtggggctagggtacactggatg

SEQ ID NO: 5662 - DNA, 898 bp, Glycine max
  misc_feature (67)..(67): n is a, c, g, or t
  misc_feature (159)..(159): n is a, c, g, or t
aatcgactctttggacaattagtgtaaatactgggcccagtagtgggcctttcagcacacttcttantatcctacacccacagtctctgaaaatgcaaatcactcaactggtggtgcactgaatactgcaatctgccgtgcactcagctcatttatttncgtcacgaaattagaagctgagtgttccaatagatcagtgtaagcaggaagatcatagagcagagatctagtgcgataggtattagaaatgtcactgctgcctgctactacaacgaatagactgttggctaatataaattttgctctgttctctccaaccagttcttttagtttccctatgtattctttcaacaaatccacttgcccagttaatggcatagatgactctaatattgatgtcaaagggtcgtagcctgagccacctgaagcaaaacagacccctgtgatcaaatcactagattggagattgggtttcaaatatgctggcagaagctccttaatgcccaactcttcaactataaggtctgatggaacctttccattgctaaatcgaccagttgggatgccaccctggaaatctctcccatatggtgggaaattggagcgagcaaatgatgttgttctgttgttgttgttgcctgtatccaccaccgaatctccaaacacaaacactgctggaaccgacacatctgctggtagtttcaccaaaccctttgttttggaagaaactagtaatatcaataatgtcaagcgaagcagcaaaaaactagggagaaaatcagagcaagaaagatgaaccatggctactactagctagtattgggggggggcctacgtagctgactcgattatagagaagaaagcccacgcgtccgcccacgcgtccgcggacgcgtgg

SEQ ID NO: 5663 - DNA, 846 bp, Glycine max
ccacgcgtccgtacggctgcgagaagacgacagcagatggtgtgcggcaagtgtctcatcacgtctcgcgatctcttcaaaggcgaaggggaaggcttcaggggtttgaaaaaggttgatattgaagccatggttcttgactccattctgacttctcctcgtctcaagtctccatctttcaggaggcagtttacaaaggatgaactgggtagttggtccacactttttcagaggcatcgcttcctcttatctgctcttgttctgctaactctcctctgcactgtttatctttactttgctgtcactttaggggccagtggcacctgttccgggttgactggagcccagaaagcttcatgccatatggagcttgttaaggattctgtggccaagggtaaactgaagattctttgatatttcaaaatattattacaagaaaatttttttctttattttgtgcctgagtataggtgacatgaaatccaaatatagtctctggctacagtatcagtgtgactgtgatttgtatacatactatttatcttggtatttgtgggccaaaatgtagaatacatgtagaaagcaatttgttagatacatcatgttaattttagtgattgcttcattgagataaatttttgggcatcttagttgctaaatgaagtttgagtctctgcttatgtgtaaattatgggcggctccaagccttatatttgttatattcatctgatggtctaatacgacctggggaccttttctattcttttctgaatttatattgtattgtgtattgctgattgggtttaatctaaataattatcgcaatgagtaatactctgcttgatc

SEQ ID NO: 5664 - DNA, 918 bp, Glycine max
catgagcatgtattatcacatcaatgcgtatctgtcatctactactggtatgcaatatgcatgttatgttcaacttcaagtaccgctttccattattcctgattccatttccacccttgccaaactgcgggcacaagtcccaaggcaacccccatggtatatatagatttaacgccaggggtgaacatggaattggatcatgcagctgcttccagtttctctctctaaaactcgcaaaagcgaattactgaaaccctagcctctgtttctgtgtttatttacttcgattctacgcatcgaattcaattctctgtgatctgaacccgtgaaatcaatgtgcctctttcggaatcgcagagcgagcaacggtgaccgccatcatcatcgatgaagcgatcgggtcggtggcagaggactctgatcctcgctcttctctttctctccctcgttgctccgctcgtttacgtctctcacctcctcaacactctcacttccgacggacgacgagattttcttgatgatttatcgagttttacacataggtcagatcctttaaatgcaattgaacaggaaggtgctgaagaattagaagagccaaaggaaattgtttataaagaagaagattttgattcaacaaatagttacattttgcaaaagactaatgatactgcggcatctaaaagtgaggggtacagaaataacactttggaaagaaatgtttcagaattcgaccaggacaaaaaacaaggccaggaagctcagcaaaaaggattattctccatggacggggatgtgaatgtatttaatacaactgtcacacttaagcagaatatgcacactcagtctcaaagaatgacagatgtgaatgttgaagtgatagataagaaatctagtccaaaagcaatccaacatcgtcag

SEQ ID NO: 5665 - DNA, 1937 bp, Glycine max
ctttttcttcaaatccatgattctgtttctaaacctccgtctcagacaacaccctctactctctgtctctagcctcttccctttccctccaactaacctaaccaaacactccctaacaccatttctttatgcatttcgctgcttccattgattcgtgttaggtatattcaattccccccaaatctcgcgccaacatggggcaagaaaatcaccacaagcgcagcaccagcgcgagtttgccgacctccaccgcgcgaagccgcggcggcggcaacgcgcttccccgcggccgccagatccagaagaccttcaacaacatcaagatcaccatcctctgcggccgcctcgccatcctcgtccttcgcggcaccatcggcgtcaacctcggctcctccgacaacgacgccgtcaaccagaacctcatcgaagaaaccaaccgcatcctcgccgagatccgatccgacgccgacccctccgatcccgacgaccagcaattcttcaaccctaacgacaccttcaccctcggccccaagatcgataattgggacactgagcgcaagaattggcttcaccaaaaccccgaataccctaatgtcatcggaggtaaacctcgcatcttgctccttactggttctcctcccaagccttgtgataaccctattggagatcattaccttttgaagtcgattaagaataagattgattactgtagattacacgggattgaaattgtgtataatttggctcatttggatgtggaacttgctgggtattgggctaagttgcctatgattaggaggttgatgttgtcgcaccctgaggtggagtggatttggtggatggatagtgatgctttttttactgatatggtgtttgagcttcctatgtctaagtatgatgagtataatctggtgcttcatggttaccctgatttgttgtttgagcagaaatcttggattgcggtgaatactgggagttttctgtttaggaactgtcagtggtctttggatttgcttgatgcttgggctcccatgggccccaaggggccggttcgcgaggaggccgggaagatcttgacggccaatctcaaggggaggccggcgtttgaggccgacgatcagtccgccttgatatacttgctgctgtccaagaaggagaagtggatggacaagacgtttcttgagaattcgttctacttgcacggttattgggccgggttggttgatcggtatgaggagatgattgagaagtatcacccagggttgggggatgagaggtggccgtttgtgacacattttgtcgggtgtaaaccgtgtgggagttacggagattatcctgtggagaggtgcctcagtagcatggagagggctttcaattttgctgataatcaggtgctcaagctctatgggttcaggcaccgtggtctcttgagtcctaagatcaagaggatcagaaatgagacagttagtcctttggagtttgtagaccagtttgatattcgaagacattctacagaaaacacggaatcaaagagctagtgagaaagttgttgttcaatgggtggtattatagagagtaattatttagaagtggagtttcatttggggacagttcacatgtaacttttgcttcttctgtcgtcttggtacttctgtgagaattttaggatagaattctttcgtaagttcttctttcttccagatttgagcaatcagcaaacaaattttatttactcatctactgtatactgagcttcctttgtatttgggcttttgtgacatgaaatgaattcagaaacttaattaatacacattcctgtcctcttgaaaaaaaaaaaaaaaaaaaaaaaaaaaaaaaaaaaaaaaaaaaaaaaaaaaaaaaaaaaaaaaaaaaaaaaaaaaaaaaaaaaaaaaaaaaaaaaaaaaaaaaaaaaaaaa

SEQ ID NO: 5666 - DNA, 2635 bp, Glycine max
  misc_feature (2622)..(2627): n is a, c, g, or t
  misc_feature (2629)..(2629): n is a, c, g, or t
  misc_feature (2632)..(2634): n is a, c, g, or t
gtaaaatctcgccgccttcacataaaaataatctttaatgaaagaatttcatatcaggtgaaattaatttatgatctttgaggtagacccgtattatctgacctatgaaaaaatccctgcttatccacgcacgatttggaacttctgaaaacacgctgaaatagatttttttttttgggtataatattgattgtagtagtatttattttatcttctgatattatatttccaattttgctgtcaaaacattattagcgatcaatttgaaattgatacagagctgagagcatcaaggaatcgaagaatagaagattcatttttgtctctttttgatatggaagctgatgtttctattatttttgttgcgttttcagctacgtaggccccccccccaaatcccaatttctccttctgtctttctgctttggatgtttttcaaccaaaaaattgtgcttttcaaatcttttgctctgatgggtacttcaaatcttctcttgtttttctctctgatgagcctgtgtgctatggcggcttccaaggtggtgcttattgggaataatatcactctctcctttgatgatattgaagctaattttgccccagcagtcaaaggttctggaaaatatggggtcttatatttggcagaaccactggatgcgtgtgcagaattgacaaataaagttgaacaacttcccaatgcgagttcaccttttgctttggtggttagagggggatgtagctttgaggaaaaagtcagaatagcacaaaaggctggcttcaaagctgtaattgtctatgacaatgaagagggtggcatcttggttgcgatggcaggaaattctgctggtataagaatacacgctgtatttgtatctaaagcttcgggtgaaatactaaagaaatatgctgggttgactaatgtggaaatatggctcattccaacttttgaaaactcagcatggtctatcatggcaatttcatttatttccctgctagctatgtctgctgtcctggccacttgtttcttcgtccgcaggcatcgcataagaagagaaaggcctcgagctcctcttgttcgtgaatttcatggtatgagtagtcgcctagtgaaagcaatgccgagtttgtcagctacgtaggcccccccccccaactgtacatcaagaacatgtgctatatgccttgaagactattgtgttggtgagaagctcaggattctgccctgctgtcacaagtttcatgctgcctgtgtggattcgtggcttacttcatggagaaccttttgtccagtttgcaagcgtgatgctagaaccggcttaactgatccaccaccttcagagtccacacccttgctctcatcaaccccagcatctatggcatcctctgtcttatcttctgcaagatcatcactagcttcatcttcagcaatacaaattgcccggacagcatctatggcatcctctgccttaccttctgcgagatcatctctagcttcatcttcagcaatacaaattgcccggacagcatctatggcatcctctgccttacattctgcgagatcatcactagcttcatcttcagcaatacaaatttcccgggcagcttcacagaccccatctgtttcccgtaaccactccatagccagtacaccttatgttcagccatctcttaggtcctcctaccatcaatccccctccctaagcatcagccgaagctccgtagatcttaggaatgcatcccaaagatctctagcttctcacttgaattcaccatgttccatgggatacccatctttgtcatctcttaactcaaggtacatgtctccacacattccaagtccaagcaatgcttcagtaagctatatgggttcatccagtcatcaacaacatcctctccgttatagtgagtcggctgcaagcttctccccatttgcatcgacacactcccttccagaatgttaaattgttcaattgattatatcatatgattgagacgtccacgcagttgaactagtaattgccaagtcttgaactaaaaggtggccatgtgatgaccggtggtctagttgaatagtcctatgtgatgcttggggcattccctacctctgtcatttgacttccgtcttggcacctggtgtacattgtagcttctctctggtgttagtttcgtttacatgtgctggttgaggttcttacatttataggttggagagcttgcatacagtaacttgtgcgtattgtttgtactttgaatgttgacgttttcatggccttgatgtccaagtatagtcaactgctaacaagagaaatgttgggctgtattgacactagacacattgaagtaagaagagttctttatgctctgtctagtggatttgtccaactgaatcatgagagatcatgtgatgtatcactctagtgttatctatacttgatcatctaattgcaactctgagtatcaataatacttgtaaaattttcgtagcttgcattgctaatagataatgctggtaagtgttatcaattttaaaccatgggggcaaattagatatcctatttgatccgtggaaaattcatcatctagatatgttaaataccttctgtggcatcttcgatttatagnnnnnngnatnnnt

SEQ ID NO: 5667 - DNA, 1974 bp, Glycine max
  misc_feature (973)..(973): n is a, c, g, or t
ggaggattcaggttttaagcctctgctcaagccgtatcagttggttggcgtcaattttttgctcctgccgcgtcggaaggggctcggagtcgctcgggccatattggcagatgaaatgggtcttggcaaaacagttcaggccatcacatatttaactttgctgaaacacttgcacaatgattctggtccacatcttatagtatgtcctgcttctgttctggaaaactgggaaagggaattaaaaaggtggtgtccatccttttctgttcttcaataccatggggccggacgtgcagcttactgcaaggagttgaactccctgtccaaggcgggattgcctcctccatttaatgttcttcttgtgtgttattcacttttcgaacgacacagtgcacagcagaaagatgatcgcaaaatcctgaagcggtggaggtggagctgtgtgataatggatgaggcacatgctttgaaggacaaaaatagctttaggtggaaaaatctaatgtctgttgcaagaaatgcgaaccaacgcttgatgctgacagggacaccacttcagaatgatctacatgagttatggtcattgttggagtttatgctgcctgatatttttgcttctgaagatgttgacctgaaaaagttactaaatgcagaagatggagatttaattggtcgtatgaagtccatcttagggccatttattttgcggcgactgaaatctgatgtgatgcaacaacttgttccaaaaatacagcaggttgaatatgttataatggaaaagcagcaggaaactgcttacaaggaagccattgaagagtatcgtgctgtttcacaagctcggatggaaaaatgttccaatcttaattcaaagagtgttcttgaagttcttcctcgacgacagataaacaactattttgttcagttccgcaagatagcaaaccatcccttgttaataaggcgaatctacaatgantgaggatgtcattcgctttgctagatacggcgagaagacgacagaagggggttttgaatgtactttggacagagttatagaggagcttaaaaattacaatgacttctgtattcaccggcttttacttcattatggtgtcaatgatagaaaggggatccttccagataagcatgttatgctttctgcaaaatgtcgggccttagcagaacttcttccttcactaaaggagggtggtcatcgagccttgatctttagtcaatggacttcaatgcttgacatattggagtggactttggatgtcattggattgacctataaacggcttgatggaagtacacaggtggcggagaggcaaacaatagttgatacgttcaataatgatacttcaatatttgcatgcttactttccacgagagctggtggacagggcttaaacttaacaggagccgatacagttgtaattcatgacatggattttaacccacagattgatagacaagccgaagatcggtgccatcgaattggtcagacaaagcctgtaaccatatatcggctggtgacaaagggaacagttgatgaaaatgtgtacgagattgcaaaaagaaagctagtattagatgctgccgttctcgagtccatggaggagattaatgaaggtgacatgcccgagaagaccatgggagaaatattgtctgcaattttattgagttaaaatattgatctaagaaaaacagtttaatttatcgtcactcctttcctatagttccaatcttgaattaatctgttgatttgggatagaagagaactggcagcctacaaattagtgagattcttctctcctaattatgtttttttctttaactcgagattttgtttaaagggatcgaatacaatacaatatcaattgaccaaccacttgttggttggaatgaggtgtttataccaagaaaaagagagatcagaaataaagaaaaaaaaaacaaatatgataaattatgtat

SEQ ID NO: 5668 - DNA, 2210 bp, Glycine max
  misc_feature (130)..(135): n is a, c, g, or t
gcctgcagcctaacatgacaagcatattatattgatatatagctcccatccgagtaggagccacgtaaggtgagatgaataaacaaaggacaatcactggccacaccatccccttgcaacttgtttaccnnnnnnctaacaacttgctccttcttaatccattactctgaggagagaagagggtctacactgccctcttgtacgtaatcgccacatcagtgacagcttaattcccacatgctatttacacatatctaatttgacacacacgcttgttcatattaccatgccatgcccttaattccctcttatttcctaatgaaaagtaccaggacaacattgtaaattaacattagctcaaaatgatttctgtggtgcatgcactataagtaccctctaaaatagcatggttttgcatgtcctcctttcacaacttaacatattgctttctaattattcgtgttgtcagtgtctctttgaggccattttgctagctatttaataatggcaattgagaagcatgaggatgttgagagtggatatttgcacgagcccttcattcaaccagaggatgctgctgctgcttgtaaagaaaatggatcagataagagtgtgaaaaatggatccattggaatggttttgcttagcacacttgttgctgtttgtggttctttcacatttggaacttgtgtgggctattcagcacccactcaagcggctatcagggcagatcttaatctctctcttgctgagttttccatgtttggttcattagtgaccattggtgcaatgcttggagctataaccagcggcaggattacagatttcattggccgcaaaggggcaatgaggatttcaacaggattttgcattacaggatggatagctgtcttcttctctaagggttcttactcccttgacttcggaagatttttcacaggttacggcattggagttatctcatacgtggttcctgtatatatagcagaaatagcacccaaaaatcttcgaggaggactagcaacaacaaatcagcttttgattgttactggagggtcagtctcattcttattaggaagtgttataaattggagagaacttgcattagcggggctagtgccttgcatttgcttgctggttggtttgtgctttatccctgagtcccccagatggctggctaaggttggccgtgaaaaagaatttcaactagctttaagtagacttcggggtaaagatgctgatatttctgatgaagctgctgaaattctggattatattgaaactcttcaaagtcttcctaagactaagctgttggatttgttccaaagcaaatatgtgcactctgtagttattggggtcggcttaatggcatgtcaacaatctgttggaattaatggcataggattctacacagctgagatttttgtagcagctggactttcttcaggaaaagctggtaccatagcatatgcttgtatacagattccatttacattattgggagccattttgatggacaagtctggaagaagacctcttgtaatggtttccgcagctgggacattcttaggttgctttgttgctgcctttgctttctttctcaaggaccaaagcttattgcctgagtgggtacctatattagcatttgctggcgttctgatctacatagcagcattttcaattgggctcggatcagttccatgggtgataatgtctgagatatttcccatacatttgaaggggactgctggaagcttggtggttttggtggcttggctaggagcttgggtagtttcatatactttcaactttcttatgagctggagttctcctggtacattgtttttgtatgctggatgttccctcttaactattctatttgtagcaaaattagtcccagaaaccaaaggaaaaactttggaagagatccaggcttgtattagttcatagagataaaagatcaaaaacgcactgcaggacccagtcaaaccattaccaccatttttcaaattcttttacatccatttaggaccgtcaaggcataaaataacataatgttgccatatcgatccatttttgttgttgtataataataataataataataataatgtatcattagcttatttgataagaaaaaaaaaaatcagaaaaaaaaaaaaaaaaaaaagggaaaaaaaaaaaaaaaaaaaaaaaaaaaaaaaaaaaaa

SEQ ID NO: 5669 - DNA, 1435 bp, Glycine max
gaaagtgaaaattctcggagtgtgtgtctatcgaggtagctaccttggccccccccccgatcattagcaaatagaagagcaaagagagtgagaaaagaaggaagaagaagaagaagagatggcaaatgaactacccgtcaaagcttttggttgggctgcttcagacacttctggcacccttgccccttttcatttctccagaagggaaaatggcgtcgatgacgtcactctcaagattctcttctgcggggtttgccactctgatctccacactctcaaaaacgactggggtttcaccacctaccctgtcgttcctgggcatgaaattgttggtgttgtgacagaagttggaaacaatgtgaaaaacttcaaagtgggtgataaagttggagttggtgtgatagtggagtcttgcaaggaatgtgaaaattgccaacaggatctggagaattactgtccccgccctgtgtttacctataactctccttattatgatgggacacgaacccaaggtggttattctaacattgtggtcgtgcaccagcgttatgtgctccggtttcctgagaacttgccccttgatgctggtgctcctctgctgtgtgctgggataactgtgtatagcccaatgaaatattatgggatgacagagccaggcaaacatttgggagtggcagggcttggtgggttaggccatgttgcaatcaaacttgctaaggcttttgggctcaaagttactgtcattagtagttctccaaacaagcaagctgaggccattgaccgactcggggctgattttttccttgtttcatcagaccctgcaaaaatgaaggctgctttgggaaccatggactatatcatagacacaatttctgctgttcattccttgattccactgcttggtctgctgaagctgaatgggaagctagttactgtagggttgcctaacaaaccccttgagcttcctatctttcctttagttgcaggacgaaagcttataggggggagcaactttggagggctgaaagaaactcaggaaatgcttgatttctgcggaaagcacaacataactgcagatattgagctgattaagatggatcagatcaacacagccatggaaaggcttagcagagctgatgtgaaatatcgctttgtgattgatgtggcgagctctttctcaagtttttagaatccactgtgattctccaactctttgcatcatgtgtcagtatttttgaagtagttaagattggtggtattaactagtctataagatgttgaactttaaagatgagagcatccgctcttcaattaataatactttgggttttgaatttacattatgttccttcatcttcatgaagtcgtagattaagcgtttcattttttgggaataaatctaaattggtcatttgaagtttacaatatgaggaat

SEQ ID NO: 5670 - DNA, 936 bp, Glycine max
catgaacttgcctcactctatgaacaataatcttctggcagaatctttgttgttgaaggagtttccaaaaagaatgtatcatgtgaatcacgggctgggtgttgttggggctggaacaaggcatcaaagttccagaagctgctctcaacaaaattatttgttggcatctcctcaaatcccatgcagaggaaaatctgtttcagctgagcacgtaccttcagcaatggatgaagactgccaccctcaagaggttgacctttagcactataattgtactccttgaactcaagttccttccactcaccactctgaaaattatcacgagtcagatcagtgacaaccttctttcttttgggcgcataattagcaccccttttcaatgagtaccccttccacgtctgtggaacaatagagctttctcactttgagtgctttgatctcgtctgaaccaatgttcagcccctgttgtatctgaagaagaagatctttgaccttatcatccacatgttggacctttctagacatcagctgtttccccatatccacccatttgttcttcgcagcctgagcacaacctatcttaaagacagaaggatccagctttttctgaagctcttccttagagataccctcttgaggaacggccaaaaaaagttgaacttcaggggatcctacagtagcatacgttttcccttcatcagtgagtacccatgtttctctcttaatatcttgcgcatcaacgtatctgaaaccgtgcaagctcttaatcacattcacgatctcgttgtggtcaatgccgcattcagctgcgaattcacccgagtctctaatctcatcgttcttctctaggtatcccagaattgcttcttccgccattgcttcgccgcacagcacagtagaagacacagcgtttggggggggggcctacgtagctga

SEQ ID NO: 5671 - DNA, 1019 bp, Glycine max
tacggctacgagaagacgacagaaggggatgcttagaaatgtacaactcagagcacaacaagggtgatcatcaacatcatcatcaatgcgctcctccaatgagcccaagaatctctttctcaaatgatttcgtggatgtgaaacaagccatgaagcaagaacaaagaggctcatccagatcagacgcgccagtatcttcagatttcgagttttcagtggcaaactactccatgatgagtgctgatgaacttttcttcaagggcaggttgatgtccacgtataacaaggacaattgcaacaacaacaacaaaaacaaccacatgatgatgatgcagcagcagagggccaccaccaccaccaccaccactctcaaggaagagctccttataaatgacgatgatcatgatcatgatttttctctcaggcctcccaagccctcctcaacgaggtggaagggacttttgggtcttagaaagacccacattggctctaagaagcctcacaaaagtactgaaggtggttcttcagatgcaacaaggtctgcattggtcaatgattcacctccaactagtatcacttcttctcaggaggtgttgaatgaaggaggctcaagttgcagagatttggagattggcatataagctatggttggtggtagtgttgagtatttgtagaggaatggactcttttttttctcctttctttctttttgtttttcttgccttgccgatgacaaggtggaggggaaaaaaggtcatgctcttttttgtttttctcttcttcattggggtgggatgagttaagttaatttgtgttaggaatttgcttgtcaatgtcgattcttcttatcttctctcttccaagttctaatttctcttgattccgtagaatgtaggatttggctatatgttgtacaaattatttgctttcttgcatttccgtgtttgactcttgtcgtcaaaagaaaaatatttatcgattttgctaggctccactatcaacattaatggatttccccc

SEQ ID NO: 5672 - DNA, 1362 bp, Glycine max
gataaatcagctacgtaggccccccccccaacgacaacttcaacttctcttctgcatcttcaaacacccttgtggcttttctaagtgttgtgattctttgtttcacctttttcttcaggtcctaaagcatacttgtgattccctccattatttacctttgagatttagaaagtagttagtcatacacccaattctaaattagagttgggatgtctggagtagtagtttgatacagtgatgcatctccacagatatttgagtaaagctatatgccgtgccctagatttttactatgtacttaaatgcaagttatgacgttgagcattcacattctacacaaagaatacagcatgagctgtggcctctagatccaattgatccaaagaaggcaaagtttccatgttgtttggtttggaatccacttcctgtggtgtcatggttggctcccttcattggtcatgttggcatttgcagggaggatggagttgttttagatttttcaggatcatatcttgtgaatgttgatgattttgcatttggtccagtggcaagatacttgcaactcgatcatagacagtgttgcttccctcctaacctatctgcgcatacatgcaagcatggttacctgcatgctgagtatggtactgcaatcacatgggaccatgcattacagacaagtttgctgtattttgagaacaaaactcacaaccttttcacttgcaactgccactcgtttgtcgcgaactgtctgaatcgactgtgttatggtggatcaatgagttggaatatggtgaatgtaggagctttggtactattcaaggggcactgggttgatttcaggtcaattgtaaggtctttcttgccttttattgtggttgtttgcttaggtgtttttatggttggatggcccttcttacttgggctactatccttctctttactcttaatagggtggtttatattgggtacttacctatttagaaacttattagagtgctaaaatggtctgttgagttgaaagatggtcatgatttgtgttccctcttcaccaaataacaagtttaaatgttgttatttgaacaagaaatagttatctcttatggaaagttaatgaaataacttttaaaagtgtactttgaggcctcattagaccgtgcattatgcaattgcattgccttgttggtgaaactgttctagttgcagattctctcatgtttctttcaagcattgagatgaaaagatgggaagacgtttatcaaatagtattgttttgggaaataatgtgaagaatgtactccaattaagaatttgaaagcaatgagaactcattcaagattgaacggcaaaaaaaaaaaaaaaaaa

SEQ ID NO: 5673 - DNA, 1767 bp, Glycine max
attaaaattttagccaatggggatggtattcgtttgttgcgtacgcgagtcagctccttattgccccccccaagagcatctgaagccttgacaaagcctacaattaatccaatttctgctgctgccgctgctgcaaccagtgctgcactggcagagagggcttcatctgtagtagctattgctggaatgaatggggatacccgaaacttgggtgatgttaaacctagaataagtgaagaatctaatgacaagtcaaagatatggaagctcactgaaatcaacgaacaatctcaatgtagatccttgaagctaccggagaatgtaagagtaaccaagatatcaaggttgatatatacaaattcaggtaatgctattctggcattagcatcaaatgccattcacctactctggaaatggcagcgaaatgagcgtaactcatctggcaaggccactgctaccttgcagcctcagttgtggcaaccatcgagtggcatcctgatgacaaatgacattgctgatagcaatcctgaggatgctgtaccctgctttgcgttgtccaaaaatgactcatatgtaatgtctgcatcaggagggaagatatctctgtttaatatgatgacttttaagactatgacaactttcatgcctccaccacctgcggcaacctttcttgctttccatcctcaggataacaatattattgctataggcatggatgattcctctattcaaatatataatgtccgtgttgatgaggttaaaagtaaactcaaaggccataataaaagaattactggtcttgctttctctcatgtattgaatgtattagtttcatctggagcagatgctcagatttgtgtctggaatactgatggatgggaaaagcagaagtctagattcttgcagcttccttctgggagaacaccaccggcacagtcagatacccgtgtacagtttcatcaagatcaaatacagttcttggttgtacatgaaactcagctcgccatttatgaagcaacaaaactagaaggtctaaagcagtggttcccgcgagactcatctgcaccaatatcctatgcaactttctcatgtgatagccagctggtatatgccagctttttagacgcaacaatctgtgtatttagtgcttcaaacctcagattacgttgtcggatcaatccttcttcatatcttcctgcaagtgtcagttccaacacacaaccacttgtaatcgctgcacaccctcaagaaccaaatcagtttgctgtcggactgtctgatggtggagttcatgtttttgaaccccttgaatctgaaggcaagtggggtgtgcctcccccgattgagaatgggtcagcaagcaatgtggcagctgcttcagttggaccttctccagatcaagctcaaagatgatccatgtcagccgaagacaagtttcttttacatacttggcttgctggccattttaagaactaaatttgtacttaagttaatgcagggcactctccaattcagttgatccagctaagttaaatccatcaatcgtacatgccaaaagtttggagcaacttctttggttgaagaccaaaatcacattgtaatttgccaatagatgtgaaaaattcttttaaagtttaatgctaagatgatgtacaagtccttttgagtactttcaagttgtttttggctatctaattagattggttgatcctaacttgttgccttttgtgagttccatttcagccttactgtactattcttatctgc

SEQ ID NO: 5674 - DNA, 1832 bp, Glycine max
cacgaatccgttttaacaaggatggagctcttttagctgtttctgcaaaagagaatggaattaaaatcttagccaatgcagatggtattcgtttgttactcagctacgtaggccccccccccgatacatcaagaacatcggaagtcatgacaaagcctacaataaatccaatttcagcagccgccgccgctgcaactagtgctgcacttggagagagggccttgtctgtgaatggggatgcccggaacttgggtgatgttaaacctagaataagtgaagaatccaatgataagtcaaaaatatggaagctaactgaaatcaatgaaccatctcaatgcagatccttgaagctacctgagaatgtcagagtgaacaagatatcaaggttgatatatactaattcaggtaatgctatcctggcattagcttcaaatgccattcatctgctctggaaatggcagcgaaatgaccgtaattcaactgtaaaggcctctgccagcgtgcaaccccagttgtggcaaccttctagtggcatcctgatgactaatgacattactgatagcaatactgaggatgccgttccctgctttgctctgtcgaaaaatgattcttatgtaatgtcagcatcaggagggaagatttctctgttcaatatgatgacttttaagacaatgacgactttcatgcctccgccacctgcggcaacctttctagctttccatcctcaggataacaatattatcgctataggcatggatgattcctctattcaaatatataatgtccgtgttgatgaggttaaaagtaaactcaaagggcatactaaaagaattactggtcttgctttctctcatgtattgaatgtattagtttcatctggagctgatgctcagatttgtgtttggaatactgatggatgggaaaagcagaagtctagattcttgcagcttcctcctgggagaacaccaccagcacagtcagatacccgtgtacaatttcatcaagatcaaatacagttcttggttgtacatgaaactcagctcgccatttatgaagcaactaaattagaaggactaaagcagtggttcccgcgagactcatctgcaccaatatcgtatgcaactttctcatgtgatagccagctggtatttgccagctttttagatgcaacaatctgtgtatttagtgcttcaaacctcagattacgttgtcggatcaatccttcttcatatcttcctgcaagtgtcagttccaacatacaaccacttgtaatcgctgcacacccacaagaaccaaatcagtttgctttaggactgtcggacggtggagttcatgtttttgaaccccttgaatctgaaggcaagtggggtgtgcctcctccgattgagaatgggtctgcaagcaatgtggcagctacttcagttggaccttcagatcaagctcaaagatgatccatgtcagccgaaggcaagtttcttttacatacttggcttgctggccattttaagaactaaatttgtacttaagttaatgcagggcactctctccaattcagttgatccagctaagttaaatccatccatcgtacatgccaaaggtttggagcaactcatttggttggaagaccaaaatcacattgtaatttgccaatagatgtgaaaaattcttgttaagtttaatgctaagatgatgtacaagttcttttgagtactttcaagttgcttctagctatttaattagattggttgatcctaacaccaaaaccacattgaattccgccaatagatgtgaaaaattcttgtaagtttaatgctaagatgatgtacaaagtc

SEQ ID NO: 5675 - DNA, 1820 bp, Glycine max
gtgccacactagttttttttctacacatacatatatcccaagaaaaattaagcaacgattcaagaagaaaatgggttctgaacttgaagctcccattcacgtcctcatggtgtcctatccagcacaaggacacataaaccctttgctcagactaggtaagtgccttgctgcaaagggcttatttgtaaccttcaccacctcagagaccgctggtaaaaacatgcgaaccgccaataacatcactgacaaatcagtgattcctgtcggcgatggttttctcaagttcgatttctttgaagatggcatggcagatgatgatgatggtcccaagaagataaatctcggtgatttcagtgcacagcttgagcttttcgggaagcaatacgtttcccaaatggtcaagaagcatgctgaagaaaaccacccattttcttgcatcataaacaacccttttgttccatgggtttgtgacgtagctgctgaacatggtattccttctgccatgttatggattcaatccagtgctgtcttcaccgcttactacagctacttccacaaactggtaagttttccttcagattcagatccttatgttgatgttcaattgccttccgtagtccttaaacacaacgaagttccagattttctgcatccttttagtccatatccatttctggggacactcatattggaacagtttaagaatttgtccaagcctttctgtgtgttggtggatagttttgaggaactagagcatgattacataaactatcttacaaagtttgtgcccataaggcccatcggtcctttgttcaagaccccaatagcaacaggcacaagtgaaatccgaggtgattttatgaagagtgatgattgcatagagtggcctttgttcaagaccccagcatctgtggtatatatatcttttgggagtattgtgtatctgcctcaagaacaggtaactgaaatagcgcatggatttacgaattcgcatgcctcgtttttgtgggtgttgaagccacctcctaagaatttcggggttccacctcatgttctgccagatgggttctttgaggagacaagagataaaggcaaagttgtgcagtggagtccacaagaggaagtgttggctcatccttcggtggcatgcttcttgacacattgtggttggaactcttcaatggaagcactcactttgggagtgccaatgttgacatttccagcatggggtgaccaagtcacgaatgcaaagtttttggtggatgtgtttggagtggggattaaactgggttatgggcaggctgaaaagaaagtggtgagcagagaagaggtaaaaaagtgcttattggaagctacagaagggccaaaagcagacgagttgaaacaaaacgcgctcaagtggaagaaggatgcagagaccgcggtggctgtaggtggctcatctgccagaaatctcgatgcatttgtgaaagaaattaaaaaacgtggagctgttggggtcagcgggagataagtctatacctttattaattattatgtcactcccttcatgaaaaaacaagagagtaaaaaagtggaatagatcgataacctttaatttgtactttgtagcgtggaatacataaattaaatgctgatatatagctccgtgttacattaacacatgcaaatgctaaataaaggtattaaaaaacgtggagctgttggggtcggcgagatataactaagtctacctttatgccccttcacgattcattattgcattgcatgtataaccttaataaaatttattcaggaggaactaccttctcttccaattt

SEQ ID NO: 5676 - DNA, 2242 bp, Glycine max
caacgacaacaacaacaacaacaacttctcttcttccctctcagactctctctctccttaccactgtttcatgcaaaaccatttctagggttttcggttttctcgccattcttcaattctcgcactccgacaccgcttcgccatggcatttccgaacaagaagctcatcgacgaccccaatgatgttgtgactgaattcattgaaggtcttgtggagacatattccggactacagtatttagatggctttcctctggtgaaggttgtcttacgtgcagatgtttcagctgcaacatatgataaagttgcaatcgtaccaagggggaggaaggggccatgagccctgcccatgctggatttggcggggaaggaatgcttacagcagcaatatgtggagatatattttcttctccacctgttgactcaattctagctgggatacgagctgtaactggtcctaagggatgtcttttgattgtaaagacctcgcctccggatcgtttgaactttggcttggctgctgagatagcaaaatctgaagggtataaagttgagactgttattgttggggatgattgtgcactacctccacctcgagggattgcgggaagaagaggtttggcagggactattctggttcacaaggttgcaggagctgctgctgctggtggtctttctcttgctgatgttgctgctgaagcaaaacatgcatctgaaatagtgggaacaatgggtgttgctttgactgtgtgctcaattcctggtcaagttgcatcagatcgtttggggccaggaaagatggaacttggtcttggaattcatggagaacctggggcagctgtggctgatattcagcccgtaaatgtggtggtttctcatgttctgcagcaaattttgtccacggaaacaaactatgttccgataactcgaggagaaagagtggtccttatggtcaatgggttgggtggcactcctacaatggaactaatgattacagctggaaaaacagttccaaagttacagctagaacatggattggctgttgatagagtttatacagggtcatttatgacttctcttgatatggcaggtttctcaatttctattatgaaggctgatccagttattcttcaacgattagatgctccaactaaagctccttattggcccgttgctgctgatggtaatcacccgcctgctaagattcctgttccaatcccagcatctcgaacagcaaagactgatgagccacgaagtcagccattacaactaaatgagcaaggccaaattcttgaggtagccattgaagctgctgcaaatgcaattataaatctgaaggacaatttaaatgaatgggatggtaaagttggtgatggtgactgtggatcaactatgtatagaggtgcaaaagcaattcttgaggacatcaaaaattaccctctaaatgatgctgcagaaactgtcggtgaaattggttcatcaattggaagatccatgggaggaacaagtgggatcatatatactatattttttaaggcagcacattcggtgctaaaagcaagttcccattctggtgtcacttcaaaacaatgggctgaagcactcgcagcttccattgctgctgtaagtaaatatgggggggctagtgctggttatagaacattgttagatgcccttatcccagcatcgttggttcttgaagagaaattaaattctggagttgatccttgcatcgcatttgttctctcctctgaagctgcattggctggagctcagtcaacggtagacatgcaagcacaggctggacgttcgacttacttttctggagagattctttcaacagttcctgatcctggtgctatggctgccgctacatggtacagagccgcggccttagctgtgaaggccaaataccagagctaagctatatacttgaaatgtcctgtttgtgcggatatacccaagttttgttccaaattttgtactctcctgtaaccatttaaggctctccgcttatgtctttcatgcataaagctgagagagcaattcccagtcactttcatatacgccaaaaatttaaaagtggatgtaaatttgaaactttattactacaatcgacaataatgtcagtctcaatttgagctcatgattgtaccccccgtggctgctttatgcgcggctatcagtttacagcatgcccttaagttgaaaacaataaatttcgttggtcatttctcccaaa

SEQ ID NO: 5677 - DNA, 1772 bp, Glycine max
cggtccggattcccgggtcgacccacgcgtccgcggacgcgtgggcggacgcgtgggctcacttgatgctttctacaatctctgggacacccagatctcaattttctgcaatttcactcagaccaggaaattaaccatggctcaacctgcaagcctcacaagaataggccttgctggcctggctgtgatgggccaaaaccttgctctcaacattgctgagaaaggctttcccatttctgtctacaaccggaccgcgtccaaggttgatgagacagttgaaagagcaaaacaagaaggaaaccttcctgtgtatggctaccatgaccctaaattctttgtccaatccattcaaaagccaagggtcataataatgcttgtcaaggctggtgcacctgttgaccaaaccatcaagaccctctcagcacacttggaaaagggtgattgcatcattgatggtggcaatgagtggtatgagaacactgagagaagagagaaagcgatgtccgaattgggtcttctctaccttgggatgggagtttcaggtggtgaagaaggtgcaagacatggtccctctttgatgcctggtggttcattcgaggcctacaagtacatagaagacattctcctcaaggtggccgcacaagtccctgatagtggtccttgtgtgacctacatcggcaaaggtggatcaggaaattttgtgaaaatgatccacaatggaattgagtatggtgacatgcagctcattgctgaggcctatgatgtgctaaagtcggttggaaagttgtcaaatgaggagctgcaaagtgcgttttcggaatggaacaaaggggaactcctgagtttcctcatcgagatcaccgctgacatatttggaatcaaggatgacaaaggagaagggcatttggtagataaggttttggacaaaactggcatgaagggaactggcaaatggaccgtgcaacaagctgctgagttatcaattgctgctcccacaatagaggcctctttggatgcaaggttcctcagtggattgaaagaggagagagttgaagcttcaaaggtgtttaagtcaagtggctttgatgaaatcttgagtgaccaacatgttgacaaaaagcagctcattgatgatgttaggaaggctctttatgctgccaagatctgtagttatgcacaaggaatgaatctgatcagggcaaagagcattgagaaaggttgggacttgaagttgggggaacttgcaaggatttggaaagggggttgcatcataagagcaatatttttggacagaatcaagaaagcatacgacagaaatcctaaccttgcaaaccttcttgtggatccagaatttgcaaaggaaatagtggatagacaatctgcatggagaagagttgtgtgtcttgctatcaactatggcactagcacaccaggcatggctgctagtcttgcttattttgacacatatagaagggaacgggtgccagcaaatttggttcaggctcagagagactactttggtgctcacacatatgagaggattgacatggagggatccttccacactgagtggttcaagcttgcaaaacagtcaaggacttagattactactattcaaactctttatgattaattttcaataaatgtaatgctttctactcaggactatgctgagttcagcttaaataattgcattgtggtgaacttcaatttcataatttgtccatcttaattggttggcttttgttctataaaaaaaaaaaaaaaaaatt

SEQ ID NO: 5678 - DNA, 1304 bp, Glycine max
tcgcgtcagctacgtaggcccccccccccgacgcaactccaccacagttgcagaacagcacaaacacaagacagtgccaaggaaaaatactcagattcagcgttagtgtgtgattgtgaggctgttgagtgttgagtagggaagaaaagtgaagacctcaaaacaacgagctaaatcaggctcttgaggacaaccaagagaagaagaagagtgaagaagatgactggaatgacgaagaatcaaccgtcacagtggtggtggcttgatagccacaccacttctaatcgatccccttggcttcaatccactctctctgagcttaatgagaagacaagggcaatgttaaagttaattgaagaggatgcagattcctttgccaaacgtgcagagatgtattacaagaagcgaccagagcttgtgagcatggttgaggatttctacaggacacatcgctccctagctgagcgctatgatcaagtcaaacctgatactactggaattggacacctcattactggggggtcaccttttgcttcagcaaagcatcagttggagaagttgatgactttttcagataatggatatgatacctattctgagcattgtgatgtgtacgagtctgaggaatctgaagttgatgatcctgaacaggaggaggatgaagaggggaccaagtttcttcataacagcataaaaaatgagcaagtttcgtttgtggcagcgagtgatgttgaagtgatgaagctgaggggtgaagttaagagactcaatgaagagaacaaggctcatagggatcaaatcaagcagaaggataccatttgtgatgaaatcatgatgctgagggaagaaattggaaggcttagagatgagaatgaggcacagaaggaacaactcaagcagaaggatgaagagaagattgaggtgataagacagctgagtttagcaatagatgtgctgaagcaggagaatgtgaagatgagaaacttcattgctaaggagtccaccaagaaatggaagaacccatttgagatcaacaaacttgtgggagcattttctgtgaagttgttcagtggtggtactccaaagaatcagcccggcgttgagctctctagatgtggttaaaaatttagcagattgagtcattatatacaaaaatatttacaaatatgtctatatttatgttaggaacttattacccaatagcctaggcttaaaatcttttatctattacattccaattgttacaaatttgcatttgtattccttataatttatgtgtccaattccaattcaaaaaaaaaaaa

SEQ ID NO: 5679 - DNA, 1774 bp, Glycine max
aagctacatatcatacatagcgaagatgtgtgttgttctcttcttcttgtgtgaagccaaagccacaacaacaaccattggaacaacccaacaacatagtgaacaacaaccttggtaataataaccatggagagcaccgaagactcatccacgagttcacagcaacaaccgaacctgccacccgggtttcggttccaccccacagacgaggagctcgtggttcattacctcaagaagaaagtagattctgttcctctccctgtttcaatcatcgctgatgttgatctctacaagtttgatccatgggaattaccagccaaagcatcgtttggggcggaagagtggtactttttcagcccgagagaaaggaagtacccgaatggcgcgaggccaaacagggctgcaacttcagggtattggaaagccacggggacagataagcctatatgtagtggaactcaaaaggttggggtgaagaaatctttggttttctatggagggaagccaccaaaaggggtaaaaaccgattggatcatgcatgagtaccgtgttactgaaaacaagccaaacaataggcctcctgggtgtgacttgggccacaagaaaaactccctaaggctggatgattgggtgttgtgccgaatctacaagaagggcaacacacaaaggtcacatgagagggacgattccattgatgacatgattggagaagtacctccttccatcaacgtgggccacatgagtgcgaggtttcacctttcaaggatgtccacgagctacagtggtgcattgttggaaaatgacagaaacacgttagaaggggtggttataggcaatggtagtgtgaatgggatcagcaatactaataatattacaagtgtcatatcatcatctcatcagtttggcacctcaaactccaaggcagagcttcttccttttgtcccttcaaacaacacttctaattcggcctccaaaagaacactctcatcactctattggaatgttgatgatcacaaacacttcaatttggacagtaatgggaatgtgagtgttttgaggacagatcaagagaataataataataataatggtacttctggctcctttgctactctgcttaaccagcttccacaaacaccttcattgccccaaatagatgggttacttcggacaccgtatcaaatacaagggaccaattggtatggttaattccattttgaggggtatgcttgatatgataatttcataattataatgcacaaggagatcaaattgaactaaggtgtggcaagggatcctcaacttgtgctagattgcaaggattttaaaagggtcattgagattgtggtttaattgttaggagaatggaagaatgttagagcacactaatcaatgttttctttcaaccatttgcaggtagctaagggcaattaataccacatgaggtgagggtgtaagaccttggaacttttagtttaattattatatagatcggtatagtaacatagataaagatagatatatagaagcatatttgcttgttttattagtgtgtaaagaaacaaaatgagggtaaaaactttcgagagaggataaaagaaagagttagccacagttctatatatatatactttgctttatgatacagaatgaagagtatagaaaatatacttcagaacgatataaattgatgcaagattttaaaatatgtatattgattgtattcaaaaaaaaaaaaaaaaaaacttgttcatgaagagcttgatattaatct

SEQ ID NO: 5680 - DNA, 2164 bp, Glycine max
  misc_feature (2103)..(2103): n is a, c, g, or t
ggctcgagctgtggttgtacgagggatgtggctgttcccgatgtttccagggacattggatgctaccaggaggctatggtgcgtcagagttctggggtccgcagttttaaagagatggtggaatactttaatgaaagggcaaatgtatcagggaagtttcctattgggagttttaattctgcatttagcttcactggttcaaaacatgttgatgaagcagctacaaaaaccttgtcttcagatgggttttacattcctcttgcaaaggttcagcttcaaaaatcccacttaaggttgcaaggaaatgtcaaaaaggctgtcccagtcaattgggacccactgtccttggcaagttttattgaaaattttgggactcatgtcattacatcaataactatgggtggtaaagatgttatttatgttaaacaacaccatacttctcctttgtcaaagttggagatgaaaaactatattcaggatattggaaatcagaggttctctgacatcaacagccaaacaagttcagggcaaacaaaatctaaggataagggtgttgatcccttttcattcaatagtcaaggggtttatccccaacccacgactgcaacatatcctattgggaaagaagatgtcacagtcatttttagaagaagaggaggagatgatttggaacaaaaccacagtaaatggttatcaactatcaagtcctccccagatatcattgagatgactttctgtcctataactgatctccttgatgagatacctgccaaggagcatttgactcgtgccattggtctttatcttgaatataaacctcctattgaagaacttagatatttcctagagtttcagattccttgtgtatgggctcctttacaggacaggattcctggtcaacaaaggaaggaacctgtatgcccatctttgcaattcagcataatgggccagaaactttacattagtcaagaacagattacagtcggacgtaggccagtaactggcttatgtctttgtctagaaggaagcaagcagaatcggctgagtgttcacgttcaacacttagtatctcttccgaaaatccttcatccatattgggacagtcatgtcgctataggcgctcccaagtggcagggccctgaggagcaagacagccggtggtttgagcctgttaagtggaagaacttttctcacgtgagcacagcaccaattgagaaccctgaaaccttcataggagacttctctggtgtctacatagttactggagcacaacttggagtgtgggattttggttcaaggaatgtattgtacatgaagctcttgtattcaaggttacctggctgcacgatccgaagatcgctgtgggatcacgtcccaaacaagccgccaaaaacagtgaatgctgaaaacacctccaacccggataactcaacccttagagaaaatgccacagccaacaagttggtgaagtatgttgacttgtctaagatgaccaaaggaccccaagaccctcctggccattggttagtcactggtggaaagcttggtgttgaaaaagggaaagttgttttgagagtgaaatattcattgcttaattactgattccacctttcgagtttgtgtatgaaaatgtgcatgcagtggtggcctatgctagaagaagcagtgttttaggtgcttataatttgcgctttgttgtccatgtgaaaacattttgaggtttgatgacctgagttgaataggaagcttttactattagtggattatgattagtggatgcatgttgtggtggtggcaaatgctgtttatttccattgccactgttgatgtgatgtccatatctcataggagttagaacctgttttcaccatgccccattttaaagtaatgtttatatccatatagatttgagaatacaaaatgacaaaaatcctttgcttcccctttctcttatacaacaaaacaagacggtgacagaaagggggaaaaggtggttagtgaagttgaacattcttaatctatcgttttatttgtgggactttccttaacctattatgcatctatttgcatatgcttgtgtattggcaactaacattactattntgaaacattatgtgtggaaaaataaaacttattcacattcaagaaaaaaaaaaaaaaaaaa

SEQ ID NO: 5681 - DNA, 1572 bp, Glycine max
tcagctacgtaggcccccccccccatactctcaaaaaaggagttgcgtcaaagccagtattccagggccctctctgagcagcaaatccaaacatccaatttagaaaaagaaaaacagcctcctcgccccttacatgtccaactaattttgaagggctctaatgggacaccagagaataagattggtgtgcatgattcacatgtttctagtgagaggcaggagagacatgttagacataaagatagacctgatcgtggtgtctggacaagtcgttccaatggagctgacgactctttctcatcttctgcttcctcacaagtagatcctttggaaggaagtcatgcagatttgaaacatgacacgccaaatgcaagaagtggggaggtaaaatctcttggaagtgtccgtactagtcactcatcagaaaatggtttcaataagcattttggtcgtcgtggaccatcacatggggtaaaggatgttgatggctattcagtttcaagtgaagggaagcatcttagaagatctagtacatctgcttatggttccaacgagaaacaagtttgggttcaaaaagcaagttctggtacctagagtattttgattgtggtaagcttgctgacttacagttttggagcatccatttgctagctgctggattctgtctctttttggttgacagatcagctacggtggccccccccccccctaaaaaaaattcttttacaatacaagagaggaaagtatcatgatgcaattgatttggcctaaaatattcagagacataacttcattgaagatggctccctagtaaaaagagaaacgaaaacagtggtatcacaattgcctggtgtcccagttacgagttgttgcttgtttgaagaattatggatagatttgcataccttggcaagttgacctagtatgagcatagtctgggtttatagagttaatcttgtgagtggttttagtgtcaatataaatccagggtattctgtatccgtttccttagttcctgtatatgcaatcccctattcgaggtattgtgtgcctttttccttagttcctatatcatttagctgtctgccaaatacaattgggcgcttgaaatgatcctggaaagtttttggacaatctttgctcactactttgaagcaacattccatggatgatgtttcaggttcgtgtcttcggtcttctgttgacagtggagtttcttgtagagctcagacacctaaataccatagatggtgtgtgttactaaggataaataagggtcttgcgggacttattacagtgtggatattgatttacgtctaaaatatcattgtacagtatggtgtcgcatttctcagcataacgtagctgttacattgtcggttcttgattatattgtcaattttgtgaattgctgccttgggcgcaattgttaaatttataatccaagttatgctgttaaagtttacgtccaattcggctgtggtataacttttagttgatgttgacattcccaagatttttttgttcttagcagactctgcgtgccaatttggatgaagttttatctcaaaa

SEQ ID NO: 5682 - DNA, 2112 bp, Glycine max
tcagctacgtaggccccccccccaaaatgccgtcacggatgtagagagcagatagagaattccccatacaaaaaggggacattctttttatcctatatataaaaagaagaaagaaaaagacaagcaaaaaaaaaaaaaaaatagtattaaggtctggaagagtggagagagtttggtgggtcatgtcatatggtgtgtgtgagtgaaagaaaattgctcttagtggctgttgttagtttttgctccttccatgatgttggtattatgctcaattaatgggaagctcttctaagtgggtcactgcagcaccacccaacaggttagggaagatagcacgtatatagataggtttagccaacttcataagttaatgctgtttgcaattttggcgttggaatgaatgagaaatcgtagcaaacactgtttgttagatagctttggtagaacaagttttgtagttgctggaactggggtatccgagactttcataggattgaaggcaattgtttttcatgatttgtcagtgttttcaatttaatggttctctgaaggattaatatttgaggaataggaagtcaagaaggaaaggaataagctccacaggcaggtttcaagaacacaagagtttagtcatgtctgggacattattatgggttgtttcctcccctggtttagaggtttcccattccagtgggttacttgattctattcggagtgtgaagttcttagattcctcaaaggccatgtctcgagattttgggtcgattagagcgaagctgggtaaggaaaagggatggagactgtgctctttgagtacagatatgaagtacacatgtgttggtcggtctggcttagaaagtgctagcaacttccctctgatagccaatgtgcttgtaaacccagcagcaggagaagtggctgtctcgtcagaacagaaggtctatgatgtggtgatgaagcaggcatctttggttaagaggaagttgggcgctgcgggtgaacttgatgcaaagccagatattgctctgcctgggaatttgagcttgttgaatgaagcatatgaccgttgtggagaaatttgtgcagaatatgctaaaacattttacctgggaactctcctaatgactcccgaaaggcgaagagctatctgggcaatatatgtgtggtgtaggagaacggatgaacttgttgatggtcctaatgcttcacaaattacgccaactgctttggataggtgggaatcaagattggaagaacttttccaaggtcgtccatttgatatgcttgatgctgctttatcagatacagttgccaaattccctgttgatatccagccatttaaagatatgatagaaggaatgagactggatcttaagaagccaagatacaaaaactttgatgaactatatctttactgttactatgttgctgggacagttggtataatgagtgttccaatcatgggcatttcaccaaattcccaagccacaacagagagtgtatacaatgctgccttggccctaggcattgcaaatcagctaaccaacatactcagagatgttggagaggatgccagcagaggaagagtgtatcttccacaagatgagttggctcaagcagggctttccgatgaagacatttttgctggtaaggtgacagacaagtggaggaacttcatgaagagccaaattaaaagggcaagaatgttttttgatgaggcagaaaagggagtgacggagcttaatgaagctagcagatggcctgtatgggcgtctttgctattgtatcgccaaatattggacgagatagaagctaatgattacaacaatttcactagaagggcttatgtgagcaaagccaagaagttactttctttgccagctgcatatgctagatctatggttcctccatcaaaaaagttatcttctgtaatgaagacataaatcgagcaccttatggcattctgtagaaaaatggataaggaggaccacagaaaatggaaaggcacaatttgtatatgataaaacaaggcatgatattagtcaatattggattttgatattcatatttaaaaaaaaaaaattacataaaaaaagtttggactaatatttt

SEQ ID NO: 5683 - DNA, 1167 bp, Glycine max
ctgcttttgtctcctgcctcccacatttcaccaccccctttatccttatctcctctcttcattgttctgctcttccccttaacaaacaataactctatttaaagcacacacaaagggatcatatatcttggttgcaccttggtaaggtgagaaaatatggcatttgcaggaacaactcagaagtgcatggcttgtgacaaaacagtttatctggttgataagttgaccgcagataaccgagtgtaccataaggcttgcttcagatgccaccactgcaaaggaacactcaagctcagcaactataactcttttgaaggagttctttactgcaggccacactttgaccaactgttcaaaagaactggtagtcttgacaaaagcttcgaagggacaccaaaaattgctaaaccagaaaaaaccggggaagagaaacctgcagcaaccaaagtctcaagtatgtttggtggaactagagataaatgtgcgggttgtcagaaaacagtgtatcccactgaaaaggttaccgtgaatggaactccttatcacaagagttgtttcaaatgcactcatggagggtgtgttattagtccctccaactacattgcacacgaaggcaaactctactgcaagcaccaccacatccaactgatcaaggagaagggcaatttaagccaacttgaaggtgaccatgagaagagtacagaggaagagaaaatcaacggtgaagtggttgcagctgagacatgaaatgaaatgaaatgcttgagttatgacaaatgaatattctcttcctcaagttccatatttctgtatcatgtgtttgtgctatatctcctgctttatcattatggagtccataatgctcttgaaaaatatggtaatcccttttttttttgtggtcggggacttggggtgtgtgaaaatccgtcattttgttttctgttgctgtgaggttgtggatactaaaaatgagacttaatggcatgcgattctgaatgtgattcagaagccagtgctactgaatttgtatgaactctcttttgtattcatattgatacatatacatacatcttaatccccgaaaaaaaaataatcaaaaaaaaaaaattataattaaaaaatgataaaaaataaaaaaaaaaaaggggctgcccttcaccatttggc

SEQ ID NO: 5684 - DNA, 899 bp, Glycine max
ctacactataacttaaacacaaggctactagtgacgagtgagtgagagaaagacagagacattactttttggtagtagcaacaagcaaagggaggaaagaaggaaagaaagagagagaatcttcattcatttttttctgctcattttctgtgtacacctttatcgtttctctcactaactttggagtctgctttactccacactccacaacaaagatcgtctgcattccctttcccttctcttttcaccccccttttttttttctctcttcttcttttttctttttctggtgggggcacctcatttgtttttgacttcataatactactacttcttcactcaaaaaagagatagaaagagaaggaaaaaaaaggctattatggcaggaggaggagctccagctaaagcagatgagccacagccacatccaccaaaggatcagttaccaaatatttcttactgtattactagtcctcctccatggcctgaggccatacttcttggttttcaacattttcttgtgatgcttggcacaactgtgttgattcccactgctcttgttccccagatgggaggtggcaataatgagaaggcaagagttatcgaaaccctgctttttgtagctggtattaacacattgttgcaaacaatgtttggaactcgattgcctgcagtaattggagggtcttacacctttgttccaaccacaatctcaattatccttgctggccgattcagtgatgaaccagatcctatagagaaattcaaagaggataatgaggtcaatccaaggtgctcttattgttgcttcgactcttcaaatagtactgggcttcagtggtctctggcgtaaatgtgcaaggttcttaagtccactttcgtcagttccttttgtatct

SEQ ID NO: 5685 - DNA, 2909 bp, Glycine max
ccacgcgtccgcggacgcgtgggcggacgcgtggctcttaactcacttcttaaattgtgctattattgtggccattgctttcacttcattgcctaaagagagtccccagctcaactctctagttgttgttgctgcatttttcattttctaggcttagtcattagatagaaagagaaggaaaaaaaggctattatggcaggaggaggagctccagctaaagcagatgagccacagccacatccaccaaaggatcagttaccaaatatttcttactgtattactagtcctcctccatggcctgaggccatacttcttggttttcaacattttcttgtgatgcttggcacaactgtgttgattcccactgctcttgttccccagatgggaggtggcaataatgagaaggcaagagttatcgaaaccctgctttttgtagctggtattaacacattgttgcaaacaatgtttggaactcgattgcctgcagtaattggagggtcttacacctttgttccaaccacaatctcaattatccttgctggccgattcagtgatgaaccagatcctatagagaaattcaagaggataatgaggtcaatccaaggtgctcttattgttgcttcgactcttcaaatagtactgggcttcagtggtctctggcgtaatgttgcaaggttcttaagtccactttcgtcagttcctttggtatctcttgttggttttgggctgtatgagttagggttccctggggtagctaaatgtgtagagatcggattgcctcagcttatattgctagtatttgtttcacagtatgtgccccatgtgctacattcgggaaaacatatcttcgaccgttttgctgtgttatttacaattgtaattgtgtggatatatgctcatctacttactgttggaggggcctataatgatgctccacataaaactcagatatcatgccgcactgaccgtgctggacttattgattctgctccttggataagaattccatatccatttcaatggggagcaccttcatttgatgcaggtgaagcctttgccatgatgatggcatcttttgttgctcttgtggagtccagtggagctttcattgctgtatataggtatgcaagtgcaacgccattgccaccatctattctcagtcggggtattggttggcagggagttggcattctgttatcaggattgtttggaacagtcaatggatcctctgtgtctgtagaaaatgcaggtcttttggctttgacacgtgttggaagtagaagagtggtgcaaatctctgccggatttatgattttcttttcaattcttggaaaatttggagcagtttttgcctctatcccacctcccattattgctgccctgtactgcttgttctttgcttatgttggtgctggtggtcttagttttcttcagttctgcaacctcaacagttttagaacaaagttcattttaggcttctcaatcttcgtgggcttgtccgtgccacagtacttcaacgagtacacagcaattaatggttatggtccagtccacacaggcgcaagatggttcaatgatataatcaacgtcccattccaatcaaagccatttgttgctggtgttgtggcatattttctagacaacactttgtttaagagagaagctgctattaggaaggacagaggtaaacattggtgggacaagtacaagtccttcaagggtgacacaagaagtgaggagttctattcccttcctttcaatctaaacaagtacttcccctctgtttaattgtgcacaagagctcaatcaaatatataaaggtggtctcatcatcttcaccacggtctagttctaatatttaatttaaatcttgttacacgccatagctctatgaatagtccatcctattatatttatagcattttgtaatacatttattttattgctcttgtttctgtaaatcctgatcaaacaagtggattgacgtagcaaatgcgcatggttaaatcctcgcccccttcatttttgttacgttcactttagaatgccccctccatgcaatgcattttgtactcaattgtctattgaattatattgtactgtttattaatctagacataaacccgcacagtgcgggtagataagcaaaaatgctttagctgttacaatttaaaaaaaaaaaaaaaaaaaaaaaaaaaaaaaaaaaaaaaaaaaaaaaaaaaaaaaaaaaaaaaaaaaaaaaaaaaaaaaaaaaaaaaaaaaaaaaaaaaaaaaaaaaaaaaaaaaaaaaaggggggggccccccccaggggccccccccccccggaaaaaaaaccccccccggcccccggggggccccccccttcccctaaagggggggttttaaaacccgggggaaaaaaggggaaaacggggcccccggggaaaaagggtccccccccaaaaaccccccaaaaaaaaaacccggaaaaaaaaagggaaaacccggggggccccaaaggggggcccccccccccaaaatggggggggccccccccccccttttaaaaggggaaaacccggggccccccccttttaaaaaaaacccccccccccccgggaaagggggtttcctttttggccccccggggggtttttttttccccccgggaccccgccaaccctttttgccccccccccccccgcccccaaaaaaattgaaaaaaggcgcccccccctgtttcccccccaaggcaaaaaccccttttaaggggggaaaaccgggggaaaaaaaaagacccctctcggggtaccccgtcccccccccccaaaaatccccccaaacccccccccccccctcgaaaaggccccccttgcccccccccccctttgtccggggcaccccctacccggggggacccccccccccc

SEQ ID NO: 5686 - DNA, 1532 bp, Glycine max
agttcagacttgagagtctctccgtccttctaagatagagtgttttgttttcattataaaatcagctacgtaggccccccccccaaaatttgcagtgcgagccctggcagcacacacatctttgtgtctcaaaaatggaacctattgacaaccatctcacctctttcttccaccaccaccagcaacaacaacaacaccaccagcaccagcaccagcatccgccgccgccgccgccgaccacggcgtcgccgaccaacggtctcttgccgaacgcggatgggtcccacatgctgtaccctcactcggtcgcgtccgcggtgtcgtcgcagcttgaaccggcgaagcggaagcgggggcggccgaggaagtacggcacgccggagcaagctctggccgcgaagaaagccgctacgacgtcgtctcagtcgttctctgcggacaagaagccccactctccgaccttcccttcctcttctttcacttcctccaagaaatccctttccttcgctctaggcaatgcagggcaagggttcactccgcatgtgatttctgttgccgctggtgaggatgttggccagaaaattatgttatttatgcaacaaagtaggcgtgagatgtgtattctgtctgcatctggttccatctctaatgcctctcttcgccagccagcaacctcaggaggcagcattacctatgagggtcggtttgagattatttcacttactggttcttatgtccgtaatgaacttggaactcgaactggtggtctcagtgtatgcttatctaatactgacgggcaaatcataggtggtggagttggtgggccacttaaagcagctggtccagttcaggtcatcgttggaacattctttattgacaacaagaaagataatggtgctggtttaaaaggtgatgcctctgccagcaagttgccatctccagttagtgaaccggtatcaagtttaggtttccgccaatcagttgactcttccagtggtaatccaatccgcggaaatgatgagcatcaagctatggatggaagtcatttcatgattcaacagcttggtttgcatggaacacctccccgatccacagactggggtcgtccggattcaagaaataccggttttgagttgacaggaaggacaggtcatggggcgcaccagtctcctgagaatggaggctatgaccaaattcccgattgaaaaaccaagatggctttttggatttgatagcagtgataaatgtgtgatagatgtatgatatctctacataccagcagtctttgtcacgcgatgccgtttatagtatgcatcattcattaaggatcgtggcttctgaaaattaatactcgtggatgtccttgaaaatattgttctgtctcatttactcatgttgtatttataaatcactaaatcggggttgcttacttcatttttgcgggcctgttagtttataccgggataaatataatagatatatgcttcctagatcccctcatctactgtggaatatattttcttcaattttcc

SEQ ID NO: 5687 - DNA, 1618 bp, Glycine max
agagagtgagactccaaatcagaggcttcagttcagactcgggaccctgcccttcttccaagataaagtgtttttgtgtacaatataaaaataaattaaaaatatcttttaaaaaaaattgcagtggcagcacacacatctttgtgtttcaaaaatggaacctaatgacaaccaactcacctctttcttccaccaccaccaccaacagcaccaacaccaccagccgccgccaccaccgcagaccacggcgtctccgaccaacgggctcttgccgaacgcggatgggtcccacatactttacccccactctgtggcgtccgctgtttcgtcgcagcttgaaccggcgaagcggaagcgcgggcggccgaggaagtacggaacgccggagcaagctctggccgcgaagaaagccgctacgacgttgtctcattcgttctctgtggacaagaagccccactccccgacgttcccttcctccaagaaatcccattccttcgctctaggcaatgcagggcaagggttcactccgcatgtcatttctgttgctgctggtgaggatgttggccagaaaattatgttatttatgcaacaaagtaggcgtgagatgtgtattctgtctgcatctggttccatctctaatgcctctcttcgccagccagcaacctcaggaggcagcattgcatatgagggtcggtttgagattatttcacttactggttcttatgtccgtaatgaacttggaactcgaactggtggtctcagtgtatgcttatctaatactgatggacaaatcataggtggtggagttggtgggccgcttaaagcagctggtccagttcaggtcatcgttggaacattctttattgacaacaagaaggatactggtgctggtgttaaaggtgacatctctgccagcaagttgccatctccagttggtgaaccggtatcaagtttaggtttccgccaatcagttgactctcccagtggtaatccaatccggggaaatgatgagcatcaagctatggggggaagtcatttcatgattcaacagcttggtttgcatgggacgcctccccggtccacagactggggtcatccggattcaagaaatactggttttgagttgacaggtcatggggcgcaccagtctcctgagaatggaggctatgaacaaattcccgattgaagaaccaagatggcttttggatttgatagcagtgatgaatttgcggtagatgtatgatatctctacataccaccagtctttgtcacgtgatgctgtttatagtatgcaccattcattaaggatcgcggcttctgaaaattaatactcgtgcatctccttgaaaatattgttctgcctcgtttactgatgttgtatttataaatcactaaatcagggctgcttcatttttgcgggcctgttagtttataccgggataaatataatagatatatgcttcctagattagctaatctattgtggactatattttccttccattttcaaggtgcagtcttaatattgttcaaaattctatcaagcatatattattatggttcttaatttataagcttattcggaaaaaaaactcgagactagttctctccctcgtgc

SEQ ID NO: 5688 - DNA, 1885 bp, Glycine max
cttgtgatctctccgtagggacaataccatgcctcttggtcctttctctaatccaaatatctctccgttaatgctctcaccacaaacttcaatagactagccaaaagctaacaccaactataggccaaatcaccaataaatattatttcccgttcttttggcgtgttggccacccactgaacacatttgcactcacacatagaagcagagagaggccattggttggtttcagagatgggaagcatgcacatagaaaccccagaaacttttgctgatggtagcaaaaacttcgatgatgatggacgagctaaaagaactgggacttggattactgcaagtgctcatatcataacggctgtgattggttctggagtgctatctcttgcatgggcaattgcacagatgggttgggtagctggtcctgcagtgctctttgtcttctctttgataacatacttcacctccactcttctcgctgactgttaccgttcacctgaccctgtacatggcaagcgaaactacacatattctgaggttgtcaaagccaacctaggaggaagaaaatttcagctgtgtggattggctcagtatataaatcttgttggtgtaacaatcggctacactataactgcatcacttagtatgggggcggtgaagaagtcgaactgtttacacaaacatggccatcaagacgagtgcaaagttaaggacaacgcttttatgattgcttttgcctgcatccaaattcttctaagccaaataccaaacttccataagctctcttggctctctatcgtagcagctgttatgtcttttgcttattcttccattgggcttggcctttccatagccaaaatcataggtgggggacacgtgcgaacaaccttaacaggggtggaagtttcgggaacggaaaaggtttggaaaatgtttcaagctatcggtgacattgcctttgcttatgctttttctaatgtcctaattgagatccaggacacactgaaatcaagcccacctgagaacaaagtcatgaagagagcaagtttgattggcattatgactacaacattgttttatgtactatgtgggtgcttaggctatgctgcatttggaaatgatgcaccatctaatttcctcacaggattcggcttctatgagcccttttggctaatagactttgccaatgtctgcatagcagtgcacttagttggggcataccaggtctttgtccaacctatatttgggtttgtggaaaagtggagcaaagaaaattggacagaaagccaatttataaatggcgagcatactttgaacattcctctatgtggaagctacaatgtgaacttctttagggtagtgtggaggactgcatatgtgattatcactgccgttgtagctatgttactcccattcttcaatgactttttggcccttattggtgcactctctttctggccattgacggtttacttccctatagagatgtacattaagaagtcaaatatgcaaagattttccttcacctggacttggctcaagatattgagttgggtttgcttgatcatttctattatctcacttgtgggttccatccaaggcctttcggttagtatcaagaaatacaagcccttccaagcagaacaatagaactttcatacttagtattccaacttgagccaagagtttctattgagggcgacaaaatttgtattactatgttttgaaatagttgttatattttcaattctcgaaatcgagacaacttgttatactaaagtaatataataaaatgtttagtttgctatgttaaaaaattttaaacttggtagctgtttttttttcttttttgttaggttatgtttagattgatggaagaggatggaat

SEQ ID NO: 5689 - DNA, 1144 bp, Glycine max
  misc_feature (1127)..(1127): n is a, c, g, or t
ttcccgggtcgacccacgcgtccgcggacgcgagaagagacagagggggactcgctaggtttgccaaaccaactccccaaaggggaccttagagagcaatcttcttccttctctctctctctctctctctctctctttcaatggcttcctcgtcttccagaactaagtccagtgggcccgttctacgctccctctcaccctccagtagattctgctcatacaccacatccaaaacccctttctcttctccttcatccgcattcgcttcctccacaagctctggcttctcctcttcaaccttcttcaaccagccacgtcagcatcactctcaaagccatcacagccaccaccgtgccgcatcgcccacacgtgtcaatctatacagccccgcccctctctcttccggcgtccggttctctatcgacccccggtctatatcacccaaccggtccatatcgaaccagatcatcacgacgaagaacaaccgtccgatctctggccagaagaagacgtgtatgtgctcgcctacgatgcaccctggctcgttccgatgcagcctccacaagaacatcgggaacaacaaccaccactccgattcatacccctcgaatcggcttaacatgcgtagatctgctatgaagaactcgctcgtgagaatcggaggcgtggagggcgagtgggtgaaacgggccctgacagcactgattcggcccagttcgcatcaacagaggaggagagcggggttcgagcccaggcccagtcgtctctctgtcatgtccaaagcccaggatctatgattttcttttagaaaaaaggttttttctatttacaccttgcaggttgttcttgattttgctggtttatataccataccacccatggcgccctgatctgccgccagagttggattccggcgaagcggttgggaggtagcggcgagtcctatccggcgagttttggtttcgtcgtctggagcagattggtgaatttggctgcatagatctatgacactggacctacacattgattttgtacataaattttgctatggaagcagagtttggacccccttttgttttatgccttgtgcataatttgattacagtgaacatacatacatacatacncaaaaaaaaaaaaaaaa

SEQ ID NO: 5690 - DNA, 1967 bp, Glycine max
  misc_feature (1490)..(1490): n is a, c, g, or t
  misc_feature (1498)..(1498): n is a, c, g, or t
  misc_feature (1553)..(1553): n is a, c, g, or t
  misc_feature (1559)..(1559): n is a, c, g, or t
  misc_feature (1567)..(1567): n is a, c, g, or t
  misc_feature (1591)..(1591): n is a, c, g, or t
  misc_feature (1594)..(1594): n is a, c, g, or t
  misc_feature (1607)..(1607): n is a, c, g, or t
  misc_feature (1644)..(1644): n is a, c, g, or t
  misc_feature (1649)..(1649): n is a, c, g, or t
  misc_feature (1660)..(1660): n is a, c, g, or t
  misc_feature (1674)..(1674): n is a, c, g, or t
  misc_feature (1720)..(1720): n is a, c, g, or t
  misc_feature (1736)..(1736): n is a, c, g, or t
  misc_feature (1793)..(1793): n is a, c, g, or t
  misc_feature (1801)..(1801): n is a, c, g, or t
  misc_feature (1810)..(1810): n is a, c, g, or t
tcagctacgtaggccccccccccagtagtcaaaattctgtggtaaaagattattccctgccgctggaatggaaaaccatattttgagaagtcagagccttcaaacttaggtttgagtagagacagtggcgttggtccttctaaaattcctaataaagggactcctaaccaactagaaaatttgccagccttgtctggtacttctctgtacaaagggactcttggaatgaatacagttggtgatgggacaagattgaatgtcaatgttgtaccatatactaataacagccccaatgactctcggaacctttttgcagatcttaacccattccaaataaaaggaatggggaaggcccctgtgcataacaaacctgtggaaaataaacctcctgagcttaaaagtactaaaaacaatgctgtttctggtcgacccccagtgccactgatgtggaagaatcgtcatgcttacaatgaagaccccaggaaaactaatcataatcctaatgaatacaaccctcccttatttgtttccaatggttcttctatgtctgaaattattgaccttagtagttccaagccgttgtataattcaaatataaataatgatgtaaatgctcaaactttggcgcaagttactggttcagtttcaccacctaatcatgaccagaggaactgtacatatgacagattcatgggaagcaatttgaaattaaaagatccagagagtcctagctcatcaattgattccatcacaaacagggttgatcaaatattggatgatgtagatgttggtgaatgcgagattccatgggaggatctggttcttggtgaaagaattggtataggttcatatggagaggtataccatgccgactggaatggcacggaggttgctgtgaagaaatttttggatcaggatttttcaggcgctgcattgtcagaattcaaaagagaagtgcggataatgcgtaggctacgtcatccaaatattgttctttttatgggtgctgttactcgtcctcccaatctctcaatcatttcagagtatctaccaagaggaagcttgtaccgaattcttcatcgctctaattatcagattgatgagaaacgaagaataaaaatggctctggatgtggctaggggcatgaattgcttacacaccagcacacctacaattgttcatcgagatctaaagtctccaaatcttttggttgataagaactggaatgttaaggtatgtgattttgggttgtcacggttgaagcacaacacatttttgtcatccaagtcaactgctggaacgccggaatggatggctcctgaagttctccgcaatgagccctcaaatgagaaatgcgatgtttatagttttggagtcatcctatgggagcttgccactctaaggttgccgtggagtggaatgaatcctatgcaagttgttggtgccgttggtttccaaaacccgtagacttgatattcctaaggaagtcngatcctanagttgcaaggaataatctgggagtgttggcaacaggatccaaatttgcggccctngtttgngcaactcncagtggctttaaagcctttacagngtntggttatcccatnttatcaagatcagttagctccacctatgccgcagganatttntgtaaattccnccccctgaaatgtntcgcttcaagtgtgaataattaaaggcattttgcatagttatgtgngtataaaggtaacatnaacccaataaaaggggaaaaaaaatatcaaaacttgtaacggcaaatgtttgtgttnaggaaaanatcaactgntactgcaaccaaacaactgcagagccattttgtatttgtgatgataggttgtccgaggaaccaaaactcggtaatgtgtaaattactgtacttgaaagcaaaaaagtatatacttttgcaaaaaaaaaaaaaaaaaaaagaaaaaaaaaaaaaaaaa

SEQ ID NO: 5691 - DNA, 1275 bp, Glycine max
gaagaattaaaaggaattgaagaagatccaagataggttcatatggagaggtataccatgctgactggaatggcacggaggttgctgtgaagtcgtgttcggctccggaggcttcccccccctctgtttaatccttttgctgcaaggtgcggataatgcgtaggctacgtcatccaaatattgttctttttatgggtgctgttactcgtcctcccaatctgtcaatcatttcagagtatctaccaagaggaagcttgtaccgaattcttcatcgccctaattgtcagattgatgagaaacgaagaataaaaatggctctggatgtggctaggggcatgaattgcttacacaccagcacacctacaattgttcatcgagatctaaagtctccaaatcttttggttgataagaactggaatgttaaggtatgtgattttgggttgtcacggttgaagcacaacacttttttgtcatccaagtcaactgctggaacgccggaatggatggctcctgaagttctccgcaatgagccctcaaatgagaaatgcgatgtttatagttttggagtcatcttatgggagcttgccactctaaggttgccgtggagtggaatgaatcctatgcaagttgttggtgccgttggtttccaaaaccgtagacttgatattcctaaggaagtcgatcctatagttgcaagaataatctgggagtgttggcaacaggatccaaatttgcggccctcgtttgcgcaactcacagtggctctaaagcctctacagcgtctggttatcccatcttatcaagatcagttagctccacctatgccgcaggagatttctgtaaattccaccccctgaaatgtctcgcttcaagtgtgaataattagaggcattttgcatagttatgtgcgtataaaggtaacatgaacacaataaaaggggaaaaaaaatatcaaaacttgtaacggcaaatgtttgtgttgaggaaaatatcaactgctactgcaaccaaacaactgcagagccattttgtatttgtgatgataggttgtccgaggaaccaaaactcggtaatgtgtaaattactgtacttgaaagcaaaaaagtatatacttttgcaaaagtacgttttaccgggaatgtctagaatttggccaagcagtatgtgctcaagctttaatgtggtgacgaagctcgtatactaacgaaaatgtcttcaacattttatttgagtcaaggttgttaccatgaagaaatagagtattttggcaccagc

SEQ ID NO: 5692 - DNA, 1310 bp, Glycine max
  misc_feature (1267)..(1267): n is a, c, g, or t
  misc_feature (1269)..(1269): n is a, c, g, or t
  misc_feature (1280)..(1280): n is a, c, g, or t
  misc_feature (1286)..(1286): n is a, c, g, or t
  misc_feature (1292)..(1292): n is a, c, g, or t
  misc_feature (1303)..(1304): n is a, c, g, or t
  misc_feature (1308)..(1308): n is a, c, g, or t
gtaccgggccccccctcgagtcagctacgtaggcccccccccaatatctctcttcctttctctttattctctcacacaaaataatggacaagaagcttggcaacacgtctcatgatcctgaagtgagaaaggggccatggacaatggaagaagacttaatcttgatcacctatattgccaatcacggggaaggggtttggaactctttggccaaggctgctggacttaaacgtaccggaaagagttgccggctccggtggctaaactacctccgtcctgatgttagaagagggaatattacacccgaggaacagcttttgatcatggaacttcatgcaaagtggggaaacaggtggtccaaaattgccaagcatctacccggaaggactgataatgagattaagaactactggaggacaaggatccagaagcacctcaagcaagcttccagcagcttccagcaacagagtagtaattctgagataatttatcatccccaagcttgcactagccaagtgtccaccatggcgcagcccatagaaacctattctccacccagttatcaaggaatgttagatccattttcaattcagttcccaacaaatcctcatcattctagttgttgtaccaatgacgacgacaacaacaactattggagcatggaggatatctggtcaatgcaattagccaattactgaacgggaattaaacctataaacataaatataaataatatatataaacctaagtgtctaagttccataaattaagctgtagtctctggcttaaaacatgttaggtttgtttatacaagtagttggatgtttggagtacttcggtcttttgcgtaccatcaatatttaagaactaagttagttatgttccgtaacttatgggctcttaattaaactatatctgcacaaaattatatatatatcaaatgtgatggtatgtggactataaaaagatatggttgagaaccacaaactttgaaacttcgaataatatattgccagtgacagtcttgttgatttgttatagcaagtcctattttcttaatcattgctttgttttaacgtacctagatttcataacttttgtctttgtctcaagctgaacctaatgatgatagtaatattaacttattgtataggggtatttcataggataaaaaatgatgtgcaattacgtgtagaccaaatattacttgatgacagatggataaatatttcaaaaaaaaaaaaaaaaaaggattcctgccagcccngnggatccactanttctanagcggncgccaccgcanngganct

SEQ ID NO: 5693 - DNA, 961 bp, Glycine max
cagtatctctctctctcccctcttccccacccaaccttctctctatcacacacacaagtcaatggataaaaaacaacagtgtaagacgtctcaagatcctgaagtgagaaaagggccttggacaatggaagaagacttgatcttgatgaactatattgcaaatcatggggaaggtgtttggaactctttggccaaagctgctggtctcaaacgtaacggaaagagttgccggctaaggtggctaaattacctccgtcctgatgttagaagagggaatattacacccgaggaacaacttttgattatggagctccacgcaaagtggggaaacaggtggtccaaaattgccaagcatctacctggaaggactgataatgagatcaagaactattggaggacaaggatccagaagcacatcaagcaagctgagaactttcagcaacagagtagtaataattctgagataaatgatcaccaagctagcactagccatgtttccaccatggctgagcccatggagatgtattctccaccctgttatcaaggaatgttagagccattttcaactcagttccctacaattaatcctgatcaatccagttgttgtaccaatgacaacaacaacattaactattggagcatggaggatagctggtcaatgcaattactgaacggtgattaaatattatcaagataaaacctaagttctgaagttccataaggctggaatgtctctggattaaaacatattattgggtttgtttatataagtagttggatgtttggttttgcgtaccattattagctatgtgctgtaatatatacgagatcttatattaaactatatctgcatgctttatatatattttaaatgaggtgctatgtgcattgtagaagatacagttaagaaccacatagttcaaaacacttaatatattcccagtggcatgcttgcttacct

SEQ ID NO: 5694 - DNA, 1236 bp, Glycine max
tcagctacgtaggccccccccccccccccaaacttgagagattctttacaaagtctagtgagatttattagggaggcaaaaaaaaaaaaaaaaaaattcttggtgaagtgaccggaggatacagccaaaaatgattttcatctgaccccattaaaggtcattgcatatcacaccaatcaccttaaaagataagaagatcgcccattaagcaaacagtgtccatgaaatgggaaataaaaagctcacaaagcaaggcccaagcattagaatggtttgtaatttgtgttgtgtgtgcatatggaaagttactactattctggctggcctctggctcaattcaactctgcaccaaacagtgatcaattatctcctttttcagtcccaacaacaacacaacaaacactccctcttgttgctacttcaacttctgaccgtgcagcagcagcctctcttcaatttggtgagttcccttcgtggcctgcccccattgcagcagaagatagagctgcaagtgcttccaagagccacagccaagcagagaaaaggcgcagggacagtattaatgcacagcttgcaactctcagaaaactcattcccatgtctgataagatggacaaagcaacattactagggagtgtggtagaccatgtgaaagatctaaagcgaaaagccatggatgtcagcaaagccattactgttccaactgaaactgatgaagtaacaattgactaccaccaagctcaagatgaaagctacacaaaaaaagtgaacatattaaaggaaaacatcataatcaaagcttctgtttgctgtgatgatcgaccagaactgttccctgagctcatccaagtcctcaaagggttgagacttacagcagttaaagctgacatagccagtgttggtggcagaatcaaaagcatattggttctttgctcaaaggatagtgaagagaataatagtgtttgccttagcactctcaaacaatcacttaaatctgctgtgaacaaaattgcttcgttatccgtggcaacaaattgtcccactagaagtaagaggcagaggttcttcttgccttctcattacgtacaataattcattgcaattttctttttcatttttgtttttaattcttagaggggtcgtgtcagtagctcaaattattggtttcatttttcaacatttgtttaccggtcagatataaaactaaggaaagcttaagtgttagttttgtgcctc

SEQ ID NO: 5695 - DNA, 2018 bp, Glycine max
gaagtcgaattcggccccgcacgcggctcctgctccatatccccccctagctacagagcagccaaaggggaggaataataataagcctatattctaaggccggaaaaataaaaaaggaataacaaaaatgtctggaaaggtaattatctcggctgtttctctcatcctggtggttggagtggccataggtgtggtggtggccgtcaacaagaagggcgaggatcccacacttcaatctcaacaaaaatcagtaggggttatctgccaaaacactgatgaccagaagctctgccacgaaaccctaagctccgtgaagggcatggacaccgctgatccaaaggcttacatcgccaaggcggtgaaagccaccatggacagcgtgaccagggccttcaacatgagtgataggctcagtaccgagtacggaggcaacgataacggaaccaagatggcccttgatgattgcaaggacctcttgcaatccgctatcgagagcctccaactcagcattgacatggttcacaacaacaacttgcaggccgtgcataaccaacaggctgacttcaagaactggctcagcgctgttatctcgtaccaacaggcctgcatggagggttttgacgatggcaaagaaggtgagaagaagatcaaggagcagtttcataccgagaccttggacaatgttcagaaactcactggcatcacccttgacattgtgagtggtttgtccaacatcctcgagaagttcgggttgaagtttaatcttaaacccgcgtctcgccgtcttctcggcaaggatgggttgcccacttggttctctgctgctgatcgtaagcttttgggtcgtggatggagatcacgtgtcaagcccaatgttgtggttgcccaggatggcactggtcagttcaaaaccgttgccgatgctattgcttcctacccaaaggataacaaaggtagatacattatctacgttaaggctggtgtctatgacgagtacatcaccgttcccaagagttcaaagaacattctcatgtacggtgatggccctgctaagaccatcatcaccggtcgcaagaacttcgtcgatggtgtcaagaccatgcaaactgccactttcgccaacactgcagaagggttcattgccaaggcaatgacattccagaacactgccggtgctgagggacaccaagccgttgcattcaggaaccaaggagacatgtccgctctcgttggttgccacatcttgggttaccaagacaccttgtacgtccagaccaacaggcaattctaccgcaactgcgtcatctccggcacagtcgacttcatcttcggcacctcctccaccgtgatccagcactccgttatcatcgtgaggaagcccctggacaaccagttcaacacagtcaccgccgacggaacatcccagaagaacatggctacaggaatcgtgatccagggttgcaacatcgtcccagaagccgaacttttccctacaaggttccaagtgaagtcataccttggaaggccatggaagcaattctcaaggacggttgtgatggaatccaccgtgggtgacttccttcaccccgaaggatggtgcccatgggccggtgaacacttcgaagacaccttgtactatgctgaatacaacaacgatggacctggtgccaacgttaacggaaggatcaagtggaagggttaccgtggtcttattagccgcgaagaagctacccaattcacccctgcccagttcctacaggctggagccaacggtggaagcgactggttgaaagctctccgtgttcctcacgcacttagcttcatgaaggcttaattgaaattacacaaacacatatccatgcatcatcaattgagtactgttagagagtgtgatgatgagggtcatagtccgtagacaatttgttattctttgtatttatctttggaggtctaccggaaatatttttaatgaaaatttttaaaattgctttgattaaaaaaaaaaaaaaaaaaaaaaa

SEQ ID NO: 5696 - DNA, 737 bp, Glycine max
tacggctgcgagacccgaccaaccattttacatttacagtaacagtattgaaatttcggaaaaaatggcgatggctttcaagatggcgacgactggaatgtgggttacagatgagtgcaagaactcgttcatggatatgaaatggaagaaggagcacagatacattgttttcaagatcgacgaaggatcaaggctcgtcaccgttgataaactcggtggccccaccgagggctatgatgatctcaccgcctccttgcccaccgatgattgccgatacgcggtttttgacttcgactttgtcaccgttgataactgccgcaagagcaagatcttcttcattgcatggtctccaacagcatcaaggattagagcaaagattctatacgcaacttcgaaggatgggctgagaagagcgctggatggaatcagctatgaactccaggccacagatccaactgagatgggattcgatgtaattagagacatagccaaatagacagatagagattcaaattaaatacgagagtccttttatcttcagttcagatgtggttccacgttgagtagttttaatttagcagctcccatgacatgtgctctcctttcttatcgttttgtatcatcacccagtactttggctggcatgttcaatgtgatatataatgtatgtggggcatgtaatcttaaatcacaataatatactatatctaataatgtggttgaaaaaaaaaaaaaaa

SEQ ID NO: 5697 - DNA, 1534 bp, Glycine max
cgtgaatgtcctgctccttcccctttgtgcgcacacttcacatggaccgccacttctgccgccctccataagctccatcgcgcctcttttcctctccgtctccgacctccgatcctccctcgccgagacatcctccgacggtggcagaatcgtaattttccgcggcaccgtcgacacacctcgaaaaccttgagacccggtgtcttggtttctcgcaagtccagcgataacagcgtcgttcttcaaagaactcaaacgtgtttgtccactgttttctgcttcctatttggcagagtttttatctgatctctggagaaatatggctgccaatttctggacatcatctcattacaagcatcttctggatcaggaagatgtggatgtggtgaatacactcgacaaggaaaagggtattacactggaggattttaagcttattaagatgcacatggctaattatattttgaaattggctcaacaagtaaaagtgaggcagagggttgtggccacagcagttacatacatgaggcgtgtttacaccaggaagagtatggctgaatatgatccacgcttggtagctccaacatgcttgtacctggcatcaaaagcagaagaaagcacagtgcaggctcggcttcttgtattttacattaaaaaattatacagtgatgacaagtatagatatgaaatcaaggacatacttgaaatggaaatgaagattttagaagctcttaattattacctggttgtataccatccataccgttcactatctccgttgcttcaggatgcaggtctgaatgatctaaacatgactcaactaacttgggggcttgtaaatgacacatacaagatggacctaattcttgtacatcctccgcatttgattgctttagcttgcatatacattgctagtgtgctcagggagaaagacaccactgcttggtttgaagaacttcgtgttgatatgaatgtggttaaaaacatatcaatggagatacttgatttttatgaaagcaatagaatgttcactgatgagagaatcaatgctgctcttcagaagctgagcctgagaccctagaacttactgtagatgactcaacgctgaatatgtggaatgaagttaatgctatggtgatttgtctgaatgatttttctgggtcaatgacatgttttacggtagaacactatctaaatgtatccaaaagtaagggcacgtaatattgggggtcaattcaaagtgtcctattaaagagcaaaaggaggatgaaaaaaggtgattctcggtgaggaccagatagactcccacctgattcatagaatcttttgtttttatctatttattgtcataaatcaaagtgtctacaatttttttaaaactttttaccattatttagtgtgatgaacaatttataattgttttatcggtcttaattcctctgtaagggatcgatttacgctacttaacgtggcgttattagatattttcacattttgtttaaaaaatttaaaaaaaaaaaaaaaaaaaaaaaaa

SEQ ID NO: 5698 - DNA, 1410 bp, Glycine max
gcattgcttagggttttggagcagattcaattcaatccaagcacatggcgaaaggaaagcattcgcatacccgcgcacaagggaagaagtggtcaacgttctcgctggttctgtgggcgcttttcttcctcacactcatcctcgtcgtgctccttgctctcggcattgtttatcttccaaccaccgacgacgattttccaaccacggagctcagcgccttcaggcgcaagacctctcaaagtggcgagagtttggtggaaaactcggagcagtggaccgagattctctcctgggagccaagagcgttcatctatcacaattttctgtctaaagaagaatgtgagtacttgattgaacttgccaaacctcatatggtaaaatcaagtgttgttgatagcaagactgggaagagtacagaaagcagggttcgaaccagttcaggaatgttcttgaagagaggaagggacaaaatcatccagaatatagagaaaagaattgctgactttaccttcatacctgtagagaatggagaaggacttcaaatccttcactatgaagtaggacaaaaatatgagcctcactatgattacttccttgatgagttcaacactaagaatggaggccaacgtattgctacagttcttatgtacctttcagatgttgaagaaggcggtgagactgtatttccggctgccaatgcaaattttagttctgtgccttggtggaatgatttatcccaatgtgcaagaaagggtctctcagtgaaaccaaaaatgggtgatgctctgctattttggagcatgaggcctgatgccactctagatccatctagtttacatggcggttgcccagtaattaaaggaaataaatggtcttcaacaaagtggctgcatcttcatgagtacaaggtttgacccatcaactgcataggattaacgtggtacagggtgagtatttcatcgcattttggattggagaaacacaagttcaatgcattcatgttcaccttttattctacctagtgatctttccctttgctcaggtgcgccagcattttcttcacatgtagaataaaccatttggtttctctttctcatggatagataatttggcgttgccaagggaaaaaagagtatttacagttaatgatccgagttttagtcttgtagagttttcaagtgaatatgtctttaggtaagaggctcaccggggactgatgtgttgaatacgtggagataaatttgtagtttagcatagtgaaaggatggtatattggtcatagataagtttttgagaatgtgatatatccacagaagtaagaaaaacacatttggagaagaaacaatttttagtttataaagaggttttttttccctccaaaaaaaaagtaattatttttatcattcattc

SEQ ID NO: 5699 - DNA, 2817 bp, Glycine max
  misc_feature (2814)..(2815): n is a, c, g, or t
attttgatattttggtgcgttaaagtcaagttatccaatgtcgtgttgcgagaacgccgtggcaatgacttgaacgctgctttgtttaccatatatttccaatcctcactgcgcgccttgcatgtgtagtccttaaaagcatatcaacacagagactgttgacacctcactcctcagcttggacccttctgtgcaataagtttataacctcaggcagtgccttatgttccatggtgcagctaaagaacgagaagaaaaatagtcttttactatatatattcacgtgaagctttcatctctggtctcaatactattcacacaaactctctctgactagtgatatctatccatggaggccaagaacttgtggcgcttcctggttctttcaatcggtgtggtactagttttacttgtcacttggctgcccaacaaggaggctctagactgcaacctttactctggatggtgcacctcaaagaaccggttctactcttcagcacatcctaataatccgattaagaaaccatcattttccacatatcatcatcacaagaaccaacaccatgaatccgagattcctcaacaccctcttgaccctctaaccatccaagagttcaacaaggtccgcaccatccttttgaactaccctctcttcaagtcctcatccagctacactctcaactccgttgtccttgaagagccagacaaaaaacttgtcctcaaatggaaaaagggtgatctacccttgcctaggaaggcttccgtggttgcatatgtgaagggagactcacatgtgctcacggtggacctcgaaaccggccaggtggtgagccaggaagccatcacctggtcggtctcgggttaccccaccatgaccctagaggacatggtgggagtacttgaggttcccctcaagagcaccgaattcaaccgctccatcactaaacgcggtgtcaatttagcagacctggcatgcttgccaatctcttcagggtggtatgggacacaagtggaggagaatacaaggttgattaaggtgcagtgctattccaaagaaggcactgtgaacttctacatgaaaccaattgagggtgtgactgccttggttgacatgaataaaaaagaggtgctgtcaatttcagataatggccaaaacatccctgtggccaatggaattaacactgactaccgttactccattcagaagctgaatggaggagagttgaggatgctgaatccaatatccttggagcaaccaaaaggtccaagcttcacaattaatgggcacttggtgaaatgggcaaactgggaatttcatctgagaccagacccaagagctgggatcataatttcacaagccaaggtgagggaccctgacacatcaaagctgagaagtgtaatgtacaaagggttcacctctgagctatttgtgccatacatggatcccacacaagattggtactttaagacatacatggatgctggtgagtatggatttgggttgcaggcaatgccactagaccccttgaatgattgccccaagaatgcttactacatggatggtgtctttgcctcttccgatggaacaccatatctccaacccaacatgatttgcatttttgagagttatgctggtgacattgcgtggcgacatgcagagtgccccatcactgacctcaaggttacagaagtgaggccaaaggtgacactagtggttaggatggcagcagcagtagcaaactatgactatatcgtggattgggaatttcaaactgatgggctaatcagagcaaaggttggactgagtggtatcttgatggtgaaaggaactacctatgagaatatggatcaagttcccaaccaagaatatctttatggaacccttttgagtgaaaacattataggtgtaatccatgaccattttatcacatattacctagatatggacgttgatggctctgacaattcatttgttgaggtaaacataaagaagcaagagacctctccgggagaatcacccagaaagagttatctaaaagctgttaaaaaagtggcaaagacagagaaagatgctcaaataagacttcaactctatgacccatcggaatttcatgtggtgaacccattgaagaagacaaggatagggaaccctgttgggtacaaattggttccaggtgccacagcagctagcctgctggatccagaagatcctccacagaaaagagcagcttttacaaacaatcaaatatgggttactccttacaacaaaagtgagcaatgggctggtggtttatttgcttaccagagcaaaggggatgatactcttcaagtctggtccaacagggatcgtccaattgagaataaagacattgttttgtggtacacaatagggttccatcatataccctgtcaagaggactatcctgtcatgcctactgtatcatcaagttttgatttgaagcctgctaatttctttgagagaaatccaatccttggagtccctcccaatttcgaagatgatttacctgtttgcaaggctcgtgattcagcttgagatcccatcagttggtttttagtctaattagatacatgctttatttatgcatgtagcaaatgatgatgcccaaactgaactttaaacctaacttaaagtaaagagggtctagttctgttgattaaacagaatgtataaatattgtaaaaccttttgataccatgtttaattcttatgtataagaaaaattatgatgttaaaaatctaaaaaaaaaaaaaaaaaaatataaataaatttgtgaattccatcacagttgaannca

SEQ ID NO: 5700 - DNA, 1753 bp, Glycine max
  misc_feature (1744)..(1744): n is a, c, g, or t
  misc_feature (1748)..(1748): n is a, c, g, or t
ctcgtgaacgagaggcccaaagacactcccaattcttgaactcatctcttccccacatcctaatgtggtcacgttatctgaaaggagccaaatccaatatccaacttccaactattacaccacagtttagtcatcaacaatataaggttaaaggaatcatatgtcaaagtcatttccatgcaccaattttattggtcagaaatgagttagtatggttaagtatttcacactggatcatctatttctaatattataagctaaaggaccaagaactgaaattattataacctcaacttgaactatccatacatagccactttacactcactcttgtgttgttgccttcatggccaagccagtgtccattgaggtatggaacccaagtggcaaatacagagttgtcagcaccaaaccaatgcctggaactcgttggatcaatcttctcattcaaaatgatgttcgccttgaaatatgtaccgagaagaaaacgattttgtcagttgaagacatcattgctttgattggtgataagtgcgatggagttattggacagttgactgaagactggggagaagagttgttctctgctttgagcaaagcgggaggcaaagctttcagtaacatggctgttggttataacaacgtggatgttgatgctgcaaacaagtatggtgttgctgttggaaatactcctggagtgctcactgagacaacagcagagttggcagcttcactaactttggcagctgctagaaggatagttgaggcagatgagttcatgagagcaggattatatgatggatggctacctcatctatttgttggaaacttgctcaaggggcaaacagttggtgtaattggagctggtcgaattggatctgcttatgcaagaatgatggttgaagggttcaagatgaacctaatttattatgatctctaccagtccacacgactagaaaagtttgtcacagcctatgccgcattcttgaaagcaaatggtgaaaccccagtgacttggaaaagggcagcaaccatggatgaggtcctccaggaggcagatataattagtcttcatcctgtcttggataaaaccacttatcatctagtcaacaaggaaagactagctaagatgaagaaggaagcaattcttataaattgcagtagagggcctgttattgatgaagctgcacttgtggagcatttaaaacataacccaatgtttcgagtaggccttgatgtgtttgaggaagagccctacatgaaacctgggcttgcagagttgaagaatgccattgtggtaccccacattgcatctgcctccaagtggactcgtgagggaatggctacactagcagctctaaacgtgctggggaaggttaaagggtacccagtttggtttgatgccaataaggtggaaccattcctcaatgagaatgctcgaccaccagctgcatgcccaagcattgttaatgcaaaagccctgggtttgccaacttcaaagctataaacacacatggttcaagggcctcaaattgcacaaatggccaatttttgtgtgttgggttaggctctggggctagtctgttcttttttgtgtatgtactatgtagagtgtcgatggcactgtgcatataaagactgtgatgttaataagcatcgtgtgtttgtagtatttcaaacattaattaaacataaatgaagttattccttatgtccctaaaaaaaaaaaaaaaaaaaaaaaaanaaanaaaaa

SEQ ID NO: 5701 - DNA, 1128 bp, Glycine max
  misc_feature (12)..(12): n is a, c, g, or t
tcgagtcagctncgtaggccccccccccatatcccctattcttcggctacgttcgccccaacaagggaattagctagaagcattgaaggacgtagctgctatggctcgaggaaagatccagatcaagaggatagagaacaccaccaaccgccaggtcacttattctaaacgacggaatggccttttcaagaaggccaacgagctcaccgttctatgcgatgccaaggtttctattattatgttctccagcactgggaaactccacgagtacatcagcccctccacctcaacaaagcagttcttcgatcagtaccagatgactctaggagtcgatctctggaactctcattacgagaatatgcaagagaacttgaagaaactcaaagatgtgaataggaatcttcgtaaggagattaggcagaggatgggagattgtctgaacgatctgggcatggaagatctcaagctccttgaggaagaaatggacaaggccgccaaggttgttcgtgaacgtaagtataaggtgataacaaatcagattgacacccaaaggaaaaagtttaataacgagaaagaagtgcacaacagactcctgcgtgacttggatgcaagagcagaagatccacgttttgcattgatagataatggaggggagtacgagtctgtgatcggattctcaaatttaggtccacgcatgttcgcattgagcctacagccaagccatcctagtgcccaaagcggagcagcaggctctgatcttaccacttaccctttacttttctagtacgcaagcttaagcagctcgatctcttcatcaatcagaaataccacattcactcaaatttcaataagaatatgacttgtgatcgatatcttaagttatgcacccgtacgtgcagtttgtacttaaccacaaaacaatctcacgaatcttctcttctcggtcgatcgcatatatgcatgtgtgaattattcagttgcaactgatgaactgttatctctgtatgttttttagcctaatcatatacctgaaacatgacgttgcatgtgtttccttttattgagaatgctttggcatgattatttatagagcgtttcataagtctatattttaaaaaaaaaaaaaaa

SEQ ID NO: 5702 - DNA, 2282 bp, Glycine max
catgcctcatggaagtattgtttctcctcaaattggtcctatcagggttggaaatgacaactctccagtggttcgagatggccgcgtctcttctagcagtcctctcgctggttcaggaatcatgcatgggtccccattgtctgatgattcatctcatcattctgattcaggaattctgaatgatggtttcagcaatggagtggttaaccacactggaccaaagcccttggacaatgcattgtattcgcaatgtgtacttgctatgtgtactttagcaaaggatccttctccacgcattgcaaatcttggtcgccgggtactgtccataataggtattgaacaagtggttgcaaaaccattgaagtctagtggtgttcggactgctgaatctacagcttctccactggctcgttcatcttcttggtttgacatgaatggaggacacttgcctctgaccttcagaactcctccagtcagtcctcctcgcccaagttatataactcgaatgcgtcgagtttgttcattggagtttaggccccacctgatggattctccagactcaggattagctgatccactcttaggttctggtggagcttctgggacttcagatcgaagctttcttccacaatcaactatatatagttggagttgtgggcacttttccaaaccacttttaactgctgcagatgatagcgaagaggtatcagccagaagagaagagagggaaaaatttgcattggagcacatagcaaaatgccagcactctgctgttagcaggctaacaaatccaattgctaaatgggacataaagggtacacaaacagcattgctgcaacctttctctcctatagtgatagctgctgatgagaatgaacgtatcaggatatggaaccatgaggaggcaacactactgaacagttttgataatcatgattttcctgacaaaggaatttctaagctctgccttgtaaatgagcttgatgagagcttgcttcttgctgcttcatctgatggaaacattcggatttggaaagattatactctgaggggtaaacaaaaacttgtcactgcattctcttcaattcatggtcataaacctggtgtgaggaatctgaatgcagttgttgattggcaacaacaatgtggttatctgtatgcatcgggtgagatatcatctattatgctatgggatgttgataaagagcagcttgtcaattctaaatcttcatcatcagattgcagtgtctcagcattggctgcatctcaagttcatgggggacaatttacagctggtttcatagatggttctgtccgactttatgatgtcagaacacctgatatgctcgtttgtggattaaggcctcatacacaaagagtagaaaaggttgtggggattggctttcagcctggattagaccaaggaaagattgttagcgcttctcaggctggggatatccaatttcttgatataagaaatcatagcagtgcctatcttactattgaagctcataggggttcactcacagctttagcagtacatagacatgccccaattattgccagtggttcagcgaaacaactcattaaggtctttagcctggagggtgatcaactaggcaccattcgatactatcctaccctaatggcccagaaaattggttctgtaagctgcctcaatttccatccataccaagtattacttgctgctggtgctgcagatgcatgtgtttgtatttatgctgatgacaacactcaagctagatgaatccgcattttttccaatgatttcatcggttgtctccagcttagaagagtgcatcaaacatctctcaggattaccatgcatattttcttgtagttggataatcccgtgatgatgctttaatccctctccgctgtgaatacatctgaaaatattggtaggggtacattctgctgatagtgtatgcaagatattcattagcctccatgcttagagggttgcactcgacaggaagaaagtcatgcttattgattggaggcttcggcaaataatgtcaattcgtaaatgtgtaaatatcattttctccataattatttttcgttcctgttttgcgtgctattcccatccttccttgatttgtaaaatttttagtcagaatacataagctagtttgctgacaaatatgggcgactggctcctgaaaatgagccatgtcatgattgtagtttctgttgaatcgggggacccttgtttttaaccaacatgtaattaaattcaagtttgtccaagtgtgctg

SEQ ID NO: 5703 - DNA, 1098 bp, Glycine max
ctcgtaggcctgagctcggggataagtttagcagcaggcatgggcaaaaaggtgtttgtggaactattgtcccgcaagaagactttccattttctgagaaaggcatttgtcctgatctgattatgaatcctcatggtttcccaagtcgaatgactgttggaaagatgatagagcttcttggagggaaagcaggggtttcatgtggtaggtttcattatggcagtgcttttggggagagaagtggtcatgctgacaaggttgaaaccataagtgaaactcttgtgagtaaaggcttcaactacagtgggaaagatttcatttattcaggtattacgggatgccctctgcaagcatatattttcatgggtccaatttactaccagaaattaaaacatatggtgcttgataagatgcatgcacgtggtagtggccctcgtgtcatgttaaccagacagcctacagaagggagagctagaaatggaggtcttcgtgttggagaaatggaacgtgattgcttgattgcatatggtgctagtatgttaatttatgagcgactcatgttgtctagtgatccttttgaagttcaggtatgtacagcatgtgggttgctgggatattacaaccataagctgaaaactggtatttgttcatcttgtaagaatggagacaatatttctaccatgaagctgccatatgcatgcaaactcatgattcaggaactccaatcaatgaatattgttccccgcttaaaactggcagatgcgtgagtttaattgatgatccaattctgggaaatgcatatgctactgtttggtcaattacaaggcagaaaaattgccattggccactgttgatgaatttctactgattctttgtatattagcctcttcaattttgctcaaccctccccctccttttcacctccttaaaaaaaattgtaaaacttagggactgtttgtttctttttttttattattattattagaaaaaactattttgtaaaactattttctactgttcagctgtcaatttctattttaaaattgattaagctttggtaaaaaaaaaaaaaaaaaaaaaaaaaaaaaaaaaaaaaaa

SEQ ID NO: 5704 - DNA, 1527 bp, Glycine max
cccacgcgtccgcccacgcgtccgcccacgcgtccgcgcggctgcgacgtggcccccccccccggaatcgaatcgatattggtgttttgttccgttctaagcatggggaaggaaggagatctatgggacgattcagtactcatcaatgccttcgaccaagctatttctacttacaacaaaatgcatagcagcggcaaacacaaagacgccgcctcggttcaagaggaggcgaagacactgatcggagaaaatggctccaattttgacactacaaggggtgctgatacgaatattccagctactgatgcgcttgattcaggtgagactggtaatttgtcgaagttggaagaaaatcatcacacagagtcacaggtggatcatctggattcaacaagtggtcaagacatccagaatgcacagaacggttatgcatatgctcaagctgtagatggttataatcaattagttgtgcagtactatgaacttgaggagaaaaggttgaagattttggagcaacttaatcaatatggtggttggaattaccaaaatgtggccgctgattctaactctggtgtaccatattccaattctcaagattattcagcgactgcataccaagtttctgatccaaatgctgtctgtacatgttgcccgtgttacagtcaatgtctgccggctccatgcacgtcagttcctggttgttctttgggtggatcatctgttagcaagccgtgtagcaatctttctgtggaaatggatcgtaaaatgtcatttccttgtgaagatggtaaaatccacaaaatggcaatgggagctgcagagaaggcactatctactattagaacaaccatatctggtgattttaatgtgaatgaagggaaagagagaaacaattctgaacttgaagaaattaatggctcaggaacagatcttgctgctgttttgaatgcttggtattctgctggcttctttactggaaagtatcttgctgaacaatccattcaaaacaaaagacagagttgaactattacatcttcttcaagcggagtcaaaagggttctcatacaaacaactatactagtacttgtgattatactcaacagttgggcaattgatcttcttctcttaacatctttgggaaatcagaagaactttggtatattctgatctgattggataggctggctcatcataattttttatgcaccggtactagttttcttagcaagattttgctggacatatttagggaatgctttcactctctgttgcagacatgaatatgttgcccgatttgatgttgaatgcagaactataaaatgcataaatcattttgttttgttgttttatctgtatttaataattggcattagcgagagaggagtaatggcatcacttgttgctcttttccttggttgaaaattaacatcactaggactgttgtgttgaaatgttgttactggtttatatgatgacataaagaagctcaatcacgctaaaaaaaaaaaaaaaatgcccaagttgaag

SEQ ID NO: 5705 - DNA, 1241 bp, Glycine max
agcaagcagagccccaaggttctcaccttcatctcttctcttctcctctattttgctgtcacacacacactcacaagcattaacatctctcacacgctttatttgccttttcgagatctgtgcttgagaccgaacaatagtagcaagcagagccccaagacgagcttcaccttgcgccgaagggccacagatggttgaaaccgatatggatgccgaaactgttgcaaatgtggttccaccaaaggagactccaaacagtgttcccatctcttatcattcctcacactcacaccctcctcttaatgagaggattatttcatccatgaccagaagatctgttgctgcacacccgtggcacgaccttgagatagggcctggtgctccaacgatcttcaattgtgtgattgagattgggaaagggagcaaggtgaaatatgaactggacaaaaaatcgggtcttatcaagatcgaccgtgttctttactcatcagttgtgtatcctcacaattatgggtttatcccacgtactatttgtgaggacagtgatcccctggatgtcttgattattatgcaggagccggttcttccaggttgctttcttcgggccaaagcaattggtctcatgcccatgattgatcagggggagaaagatgataagataattgctgtctgtgctgatgatcccgagtatcgacattacaatgatatcaaggagcttcctccacatcgtttagctgaaattcgtcgtttttttgaagactacaagaagaatgaaaacaaggaagtcgcagtaaacgactttttgcctgcctcagctgctttcgaagcggttaatagatccatgagcttgtatgcggactacatagtggagagcttgagacggtagtcgttgatgaatgatgcacgtcaaggatttttaactgacggaccaatggaagatgtttgcttgaaaaaaggctgcattatcaatattatgtaggaataaaaaaaaacattttactttagctgcctcttagctcatgcatgttctacaaactgtgcttaatttcaaatatgtcatccctgcaatatcaaatttacctgcctcttatagcacatgcacaatccaatatcaaatgttttaatcttgtataattttatattctcaccctttctattagaaagagtgtaatggttttttatattaaaaaaaaaaaattttttaaaaaaaaaaaaaaaaaaaaaaaaaaaaaaaaaaaaaa

SEQ ID NO: 5706 - DNA, 964 bp, Glycine max
  misc_feature (913)..(913): n is a, c, g, or t
  misc_feature (927)..(927): n is a, c, g, or t
  misc_feature (930)..(930): n is a, c, g, or t
  misc_feature (937)..(937): n is a, c, g, or t
  misc_feature (939)..(939): n is a, c, g, or t
  misc_feature (946)..(946): n is a, c, g, or t
  misc_feature (954)..(954): n is a, c, g, or t
  misc_feature (956)..(956): n is a, c, g, or t
ggagcgggaacgagttgcgtacacctcacatcctcctcctcctcctcctctacctctacatcggctcagctacgtaggcccccccccagactcaacaagcattcatttcatttcactcactcactcactcttcgtttcgtttctctttctcactctagatctgtgtttctctctccaaccttcgtttcaccacacttccatcacttgtcgagtgtagaaatggctccaccaattgagaccccaaccaaggtttccagctatcagcactccccaaaccctcgtcttaacgagaggattctttcatccatttccaggaaacatgttgctgctcacccgtggcatgatcttgagataggacctgaagctccaaagatcttcaactgtgtggttgaaattgggaaaggaagtaaggtgaaatatgaacttgacaaaagaactggtcttattatggttgatcgtatcctttactcatcggttgtgtatcctcacaactatgggtttatcccacgtactatttgtgaggacggtgatcccatggatgtcttggttatcatgcaggagccagttcttccaggttgctttctacgggccaaagctattggactcatgcctatgattgatcagggtgagaaagatgacaagataattgctgtctgtgctgatgatcctgagtataggcattacaatgatatcaaggaccttcctcctcaccgtttagctgaaattcgtcgtttctttgaagattacaagaagaatgagaacaaggaagttgcagtgaacgactttcttcctgcttcagctgcctatgaagctatcaagcattccatgaccttatatggcggaaatacgttgtgggagaacttgaggcgggagaagcttggaaaattttggtttggttggggaaaaaaaaacnggctttccaaaggntgnttattanantggggantttgcccntnaaaaaacc

SEQ ID NO: 5707 - DNA, 1222 bp, Glycine max
taccggttccggaatcccgggtcgacccacgcgtccgcccacgcgtccgcccacgcgtccgtacggctgcgagaagacgacagaagggggaaggtaagaattttcttactacttgagtttcctttttcttattgctttgcacttttatttgtgctcgtcttcttctcctttccttaccacagaagaatagtagcaatcagagactgaagacgagcttccccttgcgccgaagggccaccgatggttgaaaccgagatggatgcagaaactgttgcaaatgtggttccaccaaaggagactccaaatagtgtttccatttctcatcattcctcacaccctccccttaatgagaggattatttcatccatgaccaggagatctgttgctgcacacccatggcatgaccttgagataggacctggtgctccaattatcttcaattgtgtgattgagattgggaaagggagcaaggtgaaatatgaactggacaaaaagtcggggcttatcaagatcgaccgcgtgctttactcatcagttgtttatcctcacaactatgggtttatccctcgtactatttgtgaggacagtgatcccctggatgtcttgattattatgcaggagccggttcttccaggttgctttcttcgggccaaagcaattggtctcatgcccatgattgatcagggggagaaagatgataaaattattgctgtctgtgctgatgatcctgagtatagacattacaatgatatcaaagagcttcctccacatcgtttagctgaaattcgtcgtttttttgaagactacaagaagaatgaaaacaaggaagttgcagtaaacgactttttgcctgcctcagctgcttttgaagcggttaagcgatccatgagcttgtatgcggattacatagtggagagcttgaggcggtagccgatgaatgatgcacgtcaaggatttttaactgacggaccaatggaagatatttgcatgaaaaaaggctgcattatcaatattatgtagggataaaaaaaaaacattttactttagctgcctcttagcacatgcgtgttctacagactacacgtgcttaatttcaaatatttcatctctgcactttagccacatgttttatccctgtataattttatattcattagaaagggtagaaagggtgtaatatttttttttgttttttacaagtaggttaaaattattttctcaa

SEQ ID NO: 5708 - DNA, 927 bp, Glycine max
  misc_feature (884)..(884): n is a, c, g, or t
  misc_feature (897)..(897): n is a, c, g, or t
ggctcgagcctgtgtctgtgaaacaacaaggagagcgggaacgcgttgcgtacacctcacatcctcctcctctacataagccagctacggtcgcccccccccgagactcaacaagcattccactcacacctcatcgtttctctctctagatctctgtttcttctttttctccaaccttcgtttcaccaccacacttacattactttgtcgaaatggctccaccaattgagaccccaaacaaggtttccagctatcaacagtccccaaaccctcgtcttaacgagaggattctttcatccatttccaggagacacgttgctgcacacccgtggcacgatcttgagataggacccgaagctccaaagatcttcaactgtgtggtcgaaatagggaaaggaagcaaggtgaaatatgaacttgacaaaagaactggacttattatggttgatcgtatactttactcatcagttgtttatcctcacaactatgggtttattccacgtactatttgtgaggacggtgatcccatggatgtcttggttattatgcaggagccagttcttccgggttgctttcttcgggccaaagctattggtctcatgcctatgattgatcagggtgagaaagatgacaagataattgctgtctgtgctgatgatcctgagtataggcattacaatgatatcaaggagcttcctccacaccgtttagctgaaattcgtcgtttctttgaagattacaagaagaatgagaacaaggaagttgcagtgaacgactttcttcctgcctcagctgcctatgaagcgatcaagcattccatgaccttatatgcggaatacgttgtggagaacttgaggcggtagtgttgattcctgggtgcttgnaatttcgtttggntgtgaagacatacattacatgtattcaaag

SEQ ID NO: 5709 - DNA, 1203 bp, Glycine max
tcagctacgtaggcccccccccagggaagaaagtgcttttcagcgacactgtgggattcatatctgacttgcctgtacagctggtggaagcatttcaagctaccctggaagaagtggtggaagcagacctgcttgtgcatgtggtggattcaagtgctcccaatcttgatgagcatcgctcaacagtgtttcaagttcttcaacaaataggggtgtcagaagagaagcttcagaatatgattgaagtttggaataagattgatatggaagaagaatgcatggatgttgatgaatatcttgatgatgaagacaaagatggagatgctgatgaaaatagcagcttcagtggagaagatgatgtgaaatctgaggtattaccagaaagagagaaagatcgtgctgggagtatttctggtgcagaaaatgaaggcatcaaggaggttgactgtgagggcatggaagaaaaagaagactattccgatggttggctatatgatgatgatttggttgatgaagatgaattttgttcaccttcaacggtggccgaccaacaaaatgagtcctataaaaaggacaacagtgtcgtgaaagatggctcgataggacaatctggtcctcatgtgaagacatctgctgtcacaggagttgggttgcaagagctgctggaattgatagataagaaacttagtgttcagaataagaagggtgcacgagtggttgaaagaagtatctatgaccgaaaatggaggccctcccacaatcaggagtctggcatagcagttgaacagtagataggaaacagtttctttccatgctttcttgccatgtgcaagtttggttgccatagaaaagtaactggcccggagaagtttgttgttaagcttttcccaccactttggtggagtcattatgtgctaatgggacaaaacatggcctctacaatccagaagatgaagtgtttaaaagctgctcgtgttaatgtggctttcttctgtctgaactctgaacctgcaagttatgagcttgcaatggagcatagttttagacttttagttctgaaaaaattgaataagtttaacgtgttttccttcatagcgagtcacataggttgtatgcttcctgccaaaaaaatgggtccatccgtggacaattgaagtaataattgcataatagtgatatataaagtaacaccatacagagatt

SEQ ID NO: 5710 - DNA, 1356 bp, Glycine max
  misc_feature (1342)..(1342): n is a, c, g, or t
acacaatttagatgacaggctgttacattatcactcactcacttactcagatgattaatgttaccttataaagcaacacgtcctcagtgtttgagattgttctggtttgtcgttctttctctcgcaatcttcactacattcaccgagcatttgcattcacattgaatatggctgagactacacaatctaatgctgagttgttggagtggcctaagaaagataagcgccgcttcctgcatgttgtgtatcgtgttggtgatcttgatcgcaccattaagttttatactgaatgttttgggatgaagcttttgaggaaaagagatattccagaggagaaatatgccaatgcttttcttggatttggccctgaacaatcccattttgttgtggaattaacatacaattatggggtgacctcatatgatattggaactggatttggacattttgctatcgcaactccagatgtttacaaattggttgaagacatccgggctaagggtggaaatgtcaccagggagcctggtccagttaagggtgggaaatctgttattgccttcgtgaaggatcctgatggttatgcttttgagctcattcaaagaccttcaacccctgaaccattgtgccaagtaatgcttcgcgttggtgatttagagcgctcaattaagttttatgaaaaggctttgggtttgagggtggtaaagaagactgatagacctgaatacaagtatactatagctatgcttgggtatgcagaggaacatgagacaactgtgttggagctgacatataactatggtgtcactgaatacaccaagggaaatgcttatgcacaggttgctattggtactgatgatgtatacaagagtgctgaggttgtcaacatagtcacacaagagcttggagggaagattactcggcaaccaggaccaattcctggccttaacacaaagatcactgctttcttagatcctgatggatggaaaactgttttggttgacaatcaagattttctgaaggagctggagtaaagagttatggctttttaatttaaagtactaatgctattgtatgaataagtgatcagctcctgtatttatcagtgaagtagtagtgttcaatacggtttctctgatgtgtttgcctgtttggttgagattctagacagtctacagtgacatccaacagtatttcaatatatttagtaaaagttggagaataattctgatgtttaaaaacaaaaagaaaaacgaaagcccggggaaaaaaaaaaaaaaaaaccaaaaaaaaaaaaaaaaaaaaaaaaaaaaaaaaaaaaaaaaaaaaaaaaaaaaaaaaaaanaaaaaaaaaaaaaa

SEQ ID NO: 5711 - DNA, 1236 bp, Glycine max
tcgagtcagctacgtagggccccccgattgttctggtttgtcgttctttgtctcgcaatcttcactattttcaccgagcatttgcattccacattgaatatggctgaggctacacaatctaatgctgagttattggagtggcctaagaaagataagcgccgcttcctgcatgttgtgtatcgtgttggtgatcttgatcgcaccattaagttttatactgaatgttttgggatgaagcttttgaggaaaagagatattccagaagagaaatatgccaatgcttttcttggatttggccctgaacaatcccattttgttgtggaattaacatataattatggggtgacctcatatgatattggaactggctttggacattttgctatcgcaactccagatgtttacaaattggttgaagacatccgggctaagggtggaaatatcaccagggagccgggtccagttaagggtgggaagtctgttattgccttcgtgaaggatcctgatggttatgcttttgagctcattcaaagatcttccacccctgagccattgtgtcaagtaatgcttcgcgttggtgatttagagcgctcaattaagttttatgaaaagactttgggtttgagggtggtaaagaagactgatagacctgaatacaagtatactatagctatgcttgggtatgcagaggagcatgagacaactgtgttggagctgacatataactatggtgtcactgaatacaccaagggaaatgcttatgcacaggttgctattggtactgatgatgtatacaagagtgctgaggttgtcaacatagtcacacaagagcttggagggaagattactcggcaaccaggaccagttcctggccttaacacaaagatcacttctttcttagatcctgatggatggaaaactgttttggttgacaatcaagattttctgaaggagctggagtaaagagttctggcttttcatagtactaatgctattatatgaataagtgatcagctcgtgtttatcagtgaagtagtagtgttcagtatggtttctctgatgtgtttgcctgtttggttgagattctagacagtctacagtgatatccaacagtacttcaatatatttggtaaaagttggagaattattttcatgttttacagcagaaccttatcaatttaagccaaaaggatcctgaggggggggggggggggggggggggggggggggggggag

SEQ ID NO: 5712 - DNA, 1647 bp, Glycine max
tcgagtcagctacgtagggccccccccagcttacaaatgccgcgatagttcatgcagggatgcacatactattggcttaatcaaataccaagatccatacccgttggtgtagatcccagctggcgtggaagtcgatcagaattgcctttcctaaactctttgaagatgaagatgtccattctgtttggtgtggcacatatgaacttggggattgtattgagttattttaatgctcatttctttcgaaactcactggatataaggtaccagtttgtgccacagatgattttccttaacagtctatttgggtatctttcccttctcattgttatcaagtggtgtactggctctcaagcagacctttatcatgtaatgatatacatgtttttaagccccacagacaatcttggcgagaatcagttgttctggggccaaagacctcttcaaattgtgttattgcttttggctgtaattgcagttccgtggatgctctttccaaaaccttttatactaaaaaagcttcatactgagaggtttcaaggtcgtagttatggtatactgaatacctctgaggtggatcttgaggctgaacctgattctgccagacaacatcatgaagaattcaatttcagtgaggtctttgttcaccaaatgatccacgccattgaatttgttctaggttcagtttctaatacagcatcatatcttcgtctttgggcactaagtttggctcactcagaactttctactgttttctatgagaaagtcctgcttcttgcttgggggtatgacaatcttgtcattcggttgatagggctaaccgtttttgcctttgcaactgcctttatactactaatgatggagagtcttagtgcttttcttcatgccctgaggcttcactgggtagaatttcaaaataaattctaccatggtgatggctacaagttcaggcctttttcatttgcctccttaacagaggatgacgattgatccattcatatgtatggtttcatggcaactatatagaaaggatatttccacaagtgaagggagcataaaatgagaatttgtagtgtcggaaccaaatttggcggctatggttgttaggtttgcttgatgatattctgcttgatattgacctggcaacaaaaagttcctgctcattttcccatggctacggggttgtaagaagatcacactgccgatgatcatggaaggtatctaacagaatatttgctttatagttattttttgttatttttcttttgcttagaataggaaacggaagagctaagggaagggactgtttagagtaatttttgtaaagaggagcagggatccatcagagtgtagctattggattttggttctttggggttacatacatatatatacatgatgtagggcaggttttgctgggaaataaccaatcttctgaaattttcttgtattgatagatgacaagttatagagccccaatttttttttgttaaggattgatcaaagtaaatacagacatctgaagttgaataatgtcatctgtataatgcttgtgtaatgcccagttggcaacttacaatttgaaatgttacttccaccatcccccaagttgaataaaatgcagagatatttgtttttattattcaa

SEQ ID NO: 5713 - DNA, 1586 bp, Glycine max
gttagtgttaggtcgaatcttaatcctgtagctgatcgttttgtatccatgcttgctcagtgtggattttatcctctcctccataattttccaacaaaatctcaaactcagctacgtaggcccccccccccccccacaaaaatatcgggattcatcttgttctcattttgcccccttttttcttctgctctcccgaatcagaaaccctaatcattgtttgggatttcagaggaaagaaatttaaacagagcacgaagatgaagggtctcttcaagtccaagcctcgcactcctgcagatgtagtgcgccagaccagagatcttctgctctttgttgatcgcagccccgaaacccgcgaaagcaaacgtgaagagaagatgtccgagctatttaaaaatatcagggagctaaagtcaatcctgtatggaaatagtgaatctgaaccagtgtctgaagcctgtgcgcagttgactcaggagttctttaaggaggatacgttgcgactgcttatcaagtgtcttccaaaattgaatttggaggccagaaaagatgccactcaagttgttgcaaatttacaaaggcaacaggttcagtttaagttgattgcatctgattacctggagaaaaatatggatcttatggatattttgatagttggctatgaaaaccaagatatggctttacactatggtgcgatgctgagggagtgcataagacaccagattgttgcaaaatatgtcctgaactcacctcgtatgaagaagttttttgactatatccaacttccaaattttgacattgctgcagatgctgcagcaacctttaaggagctcttgacaagacataaatctactgtggctgaattcctttccaagaattatgaatggtttttcgcagaatataacactaagctgttggaatcttccaattatattacaaggcgtcaagctgtcaagttgttgggagatatgttacttgatcgttcaaattcagccgtaatgacaagatatgtgagctcaagagacaacttgaggattttaatgaatcttctaagagagtcaagcaagagcatacagattgaagcatttcatgttttcaagctatttgctgctaaccaacataagccagctgatatcgtcggtatatttgttgcgaacaaaagtaagatgctgagactgttggaagacttcaaaattgacaaagaggatgaacaatttgaagctgacaaagctcaagtgatgagggaaattgaagctctttaaacaaggaaacagcgacgcacctgaactgcaaattgtgttaagtggcaaagttgcaatgtgtggcatttcactttagcgaattgtgtattgtaatagttctgttagtcttttatcacgatgagacgatccgtttcatacagacttcgatgcttcctttctgtaattttgtaaccgccctttaaaattgtagataaataaattgcttaaatgagcctacattattagtgtctttgtaggtgttagtaataaggtcttccaagctgccgtgtaaattattaattgtgcaaggtcatgcaataatctcacaatcacatttgtttaact

SEQ ID NO: 5714 - DNA, 1670 bp, Glycine max
catgaattatgaaagcagggttgttttttctggtgttagtgttagctctatgtatccatgcttcctctgtgtggattttcattttatcttctcctccttaattttccaacaaaatctcaaacataaataaattaaaaaataacatttttatttacaattaataaagatatcgggattcatcttgttcttattttgccccctttttcttctggtctcccgaatcagaaaccctaatcagtgtttgggatttcagataaagaaatttaaacagatgaagggtctcttcaagtctaagcctcgcactcctgcagatgtagtgcgccagaccagagatcttctgctctttgttgatcgcagccccgaaacccgcgaaagcaaacgtgaggagaagatgtccgagctatttaaaaatatcagggagctaaagtcaatcctgtatggaaatagtgaatctgaaccagtctcagaagcttgtgcgcagttgactcaggagttctttaaggaggacacgttgcgactgcttatcaaatgtcttccaaaattgaatttggaggccagaaaagatgccactcaagttgttgcaaatttacaaaggcaacaggttcagtttaagttgattgcatctgattacctggagaaaaatatggatcttatggatattttgatagttggctatgaaaaccaagatatggctttacactatggtgcgatgctgagggagtgcataagacaccagattgttgcaaaatatgtgctgaactcacctcgtatgaagaagttttttgactatatccaacttccaaattttgacattgctgcggatgctgcagcaacctttaaggagctcttgacaagacataaatctactgtagctgaattcctatccaagaattatgaatggttttttgcagaatataacactaagctgttggaatcttccaattatattacaaggcgccaagctgtcaagttgttgggagatatgttacttgatcgttcaaattcagctgtaatgacacgatatgtgagctcaagagacaacttgaggattttaatgaatcttcttagagagtcaagcaagagcatacagattgaagcatttcatgttttcaagctatttgctgccaaccaacataagccagctgatatcgtcagtatatttgttgcgaacaaaagtaagatgctgagactattggaagacttcaaaattgataaagaggatgaacaatttgaagccgacaaagctcaagtgatgagggaaattgaagctctttaaacaagggaacaacgacgcacctgaactgcaaattgtgttaagtggcaagttgcaatgtggcatttcactttagcgaattgtgtattgtaatagttctgttagtctttatcacgatatgagaccatccgtttcatacagacttcaatgcttcctttctgtaattttataaccgtcctttaaaattgtagataaataattgcttaaatgagctacattattagtgtctttgtaggtgttagtaataaggtcttccaagctgccgtgtaaattattaattgtgcaaggtcatgcaataatctgacaatcacatttgtttaactaaactgttactcaaaagaaaaaacgttacgctgcttggttgggaaaaaatttagtattttgtggagaaagatgg

SEQ ID NO: 5715 - DNA, 1215 bp, Glycine max
  misc_feature (1199)..(1199): n is a, c, g, or t
  misc_feature (1203)..(1203): n is a, c, g, or t
tcgagtcagctacgtaggccccccccccgtttttactgctctgtgttattcccaaagccgatacttccttttcaagtcttttctctctctctctctctataataagattcttccctctcccttctctctctctctctagaacttcgtcctccctctgcttctttctttcttagttgcagcgcgattgctgcatcgtcctccaataagagctcgctgctagtgaaccctaacacggcggcaacgagaggtgttcggttgaagctcagatcagcgatggcagcagcaacccgcacttctctgcggttcctcctctcagtctccgtaaccctaactctcgctcacctcgccgcctcaaattccgaaggcgacgctctctacacgctgaaacggagcctctcggaccctgacaacgttctccagagctgggatcccactctcgttagcccctgtacttggttccacgtcacctgcaaccaggacaaccgagtcactcgcgtggatcttggtaactctaacctatctggacatttggtacctgaacttgggaagctggagcatctacagtatcttgagttgtacaaaaacaacattcaaggaactattcctccagaacttggaaacctgaagagtctagttagcttggacttgtacaacaacaacatatcaggcaccatcccaccttcattggggaaattgaagaatcttgtctttttacgactcaatgacaaccgactaactggcccgatccccaaggaacttgctgctgtttcaagccttaaagtagtggatgtctccaataatgatttatgtggtacaattcctacctccgggccattcgagcatattccattgaataactttgagaataatcctcgtttggaaggtccagagttgttgggacttgtaagttatgacacaaactgctcgtgaataacgtgatgtggtaggatctcaatctgcgttgaattatatatatgtattacctcatagtgtaatgggcagtggtaaatgtaatctctggtatatgtaaatttacatactgaagggcattggaatttgtaacaatattatgatctgacaatgatgttaagacttgaatatctattgatgtaatactaaaaaaaaaatcgacttggtcactcactgataaaatatttgtgacgtattgctctccaaaaaaaaaaaaaaaaaaaaaaagnggangggaaaaaaaaa

SEQ ID NO: 5716 - DNA, 1224 bp, Glycine max
cccacgcgtccgtttacgcgtggggcgagcatgccatgttttactgctctgtgttattcccaaagccgatacttccttttcaagtctcttctctctctctctctctcttccaaaataagattcttccctctctctctcccagaatttcctcctcccactgcttctttctttcttgcagcgcgattgctgcatcctcctccaataagagctcgctgctagcgaaccctaacacggcggcaacgtgaggtgttcggttgaagttcagatcagccatggccgcagcaacccccacttctctgcggttcctcctctccgtttccgtaaccctaaccctgcttaacctcgccgcctcaaattccgaaggcgacgctctctacacgctgaaacggagcctctcggaccctgacaacgtcctccagagctgggatcccactctcgttagtccctgtacttggttccacgtcacctgcaaccaggacaaccgagtcactcgagtggatcttggtaactctaacctatctggacatttggtacctgaacttgggaagctggagcatctacagtatcttgagttgtacaaaaacaacattcaaggaactattcctccggaacttggaaacctgaagagtctagttagcttggacttgtacaacaacaacatatcaggcaccatcccaccttcattggggaaattgaagaatcttgtctttttacgactcaatgacaaccgactaactggcccaattcccaaggaactgtctgctgtttcaagccttaaagtagtggatgtctccaacaatgatttatgtggtacaattcctacatctgggccattcgagcatattccattgaataactttgagaataatccccgcttggaaggtccagagttgttgggactagtaagttatgacacaaactgctcgtgaataacgtgatgtggtaggatctcaatctgcgttgaattatatatatgtattctaaaatttaagtgtattacctcatagtgtaatgggaagtggtaaatgtaatctctggtatatgtaaatttacatactgaaggacattggaatttgtgacttgaatatctattgatgtaatactagaaaaaagatcgacttggtcactcgctgataaaatatttgtgacgcattgctctccatgttattggttctttgtcaatgacaatgcaagtgtttatcgccgtggtattcacttcacaca

SEQ ID NO: 5717 - DNA, 1391 bp, Glycine max
acgcgtcagctacgtaggccccccccccccccaactccctccaaactacaaacagtgtccgtgcgtctctctttattttctctgagaaaattcagcaagaaaaatttgcaaatgtcgaatttcctgagcaacactaatccgaaccctaacaagtcctttgaggtgaatcagcctcccactgattccgtgtccagtctcagcttcagtcccaaagccaacttcctcgtcgccacttcttgggacaatcaggttcgttgttgggaggtagcacagaatggagttaatgttgccactgttcccaaggcttctataacgcacgatcatccggttttgtgctctacatggaaggatgatggcacaactgtcttctctggtggatgtgacaagcaagtgaagatgtggcctctgttatctggaggccaaccaatgactgttgccatgcatgacgcacccatcaaagaagttgcttggattcctgaaatgaaccttttagtcacagggagctgggacaagactttgaaatactgggatacaaggcagtcaaatccagtgcacacacagcaactcccagagcgctgctatgctatgacagtgagacatcctctgatggttgttggcactgctgatagaaatcttattgtttacaacttgcaaaaccctcaggttgaattcaagagaattgtttcacccttgaagtatcaaacaaggtgccttgctgcattccctgaccaacaaggtttcttggttggatcaatagaaggaagagttggggtgcatcatttggacgatagtcagcatggtaaaaacttcacttttaaatgccatagagagggcaatgaaatatactcagtcaactctttaaacttccatcctgtacaccacacatttgcaacttctggttctgatggtgctttcaatttttgggataaggatagtaaacagcggctcaaggccatgttgagatgcagcctacctattccttgcagtaccttcaacaatgatggttcaatatttgcttactcagtctgctatgactggagtaaaggggcagaaaattctaatcctgcaacagcaaagacctacattttcctgcacttgcctcaggaatctgaggtcaggggcaaaccacgcattggtgctactgggagaaagtagagatgatcctgctctgggaaactgttctattatgtatatagttggctagtacttgtataaaggtataagttgatatcaaaatatagaggttgaatgggctggtcgttcttgaaagatttttgttttttgtacgctgtacttgaaagaaattatcaactgattcttggtgaaaaattctatgtccaatgtatatatgtatataaagcatatggtgtactaaaaaaaaaaaaaaaaaa

SEQ ID NO: 5718 - DNA, 2342 bp, Glycine max
cactcaagtcaactccctccaaactccaagctctctattttctctgagaaaatttgcaaatgtcgaatttcctgagcaatactaatccgaaccctaataagtccttcgaggtgaatcagcctcccactgattccgtgtccagtcttagcttcagtcccaaagccaacttcctcgtcgccacttcttgggacaatcaggttcgttgttgggaggtagcacggaatggagtaaatgttgccactgttcccaaggcttctataacgcacgatcatccggttttgtgctctacatggaaggatgatggcacgactgtattctctggtggatgtgataagcaagtgaagatgtggcctctgttatctggaggccaaccaatgactgttgccatgcatgatgcacccatcaaagaacttgcttggattcctgaaatgaaccttttagtcacaggaagctgggacaagactatgaagtaatgtgctagcatttgctgcctttacagcaatttgtttttaaattatatctttagaaattagaatatatgaaaaatatcccgtaatatcaacattatatcttttagaatatcttaggtgatattggaggaatagtttccatatctcgttatagtttcatgatttgttttatttaatttgaatttagaatttcctgagtatagataggcatttgtgttttgtatcacattcatcatgtcattttttttacccaagaaaatattattcggaatctgtattttctctttttttctttccatacctaaatccctataatttgaacagtatctgtgtgttacctttgtagtctgtcttgccactattctgctgccgagttccttttccttggctgtatgatacaccagccttactttcaaatttcaatttgaaaattcaaattattttgggttctcctaagttcttttgtagcttgaagcacatgccattcttgatttttggagaagttgtagttctttctgaatatattttgcttgccaggaaatttccactaatgatcattacaatgtaatatcttcttccttgtttatgtaacagtccaataagctcttcagtttagtctgatttttgttccatgcatcaagtgtttcctattacctttgcacattatgggattagtattttgtgatgctgatatgtattgtatccttcttattaaatatggtatgaaagctaacaattttgcttgatctgatgcttctgtcctctccacatgagtctttttggctacttttagatactgggatacaaggcagtcaaatccagtgcacacacagcaactcccagagcgctgctatgctatgacagtgagacatcctctgatggttgttggcactgctgatagaaatcttattgtttacaacttgcaaaaccctcaggttgaattcaagagaattgtttcacccttgaagtatcaaacaaggtgccttgctgcattccctgaccaacaaggtttcttggttggatcaatagaaggaagagttggggtgcatcatttggacgatagtcagcatggtaaaaacttcacttttaaatgccatagagagggcaatgaaatatactcagtcaactctttaaacttccatcctgtacaccacacatttgcaacttctggttctgatggtgctttcaatttttgggataaggatagtaaacagaggctcaaggccatgttgagatgcagccaacctattccttgcagtaccttcaacaatgatggttcaatatttgcttactcagtctgctatgactggagtaaaggggcagaaaattctaatcctgcagcagcaaaaacctatattttcctgcatttgcctcaggaatctgaggttaagggcaaaccacgcattggtgctactggcagaaagtagagatgatcctgctgtgtgatactgttctattatgtaaatagttggcttgtcctggtatatggtagaggcaaggtattagttgatatcaaaatatagaagttgaatgggctggtcgtacttggaagattttttttttttttgtgcgccatgcttggaagaaattatcaactaattcttggtgagaaattctatatccaatgtatatgtgtataaagcatatgttgtgtatacgcatggtttgtattttcctgttttaagatcgatgatggttggcttatacagtgaagcatctgaaagtagattctttcatggctctgcaagacattggagggttgttgcatttaggggtgaatgtcggttttagatgtcaaattatgaattgtaggatttagaaaatagcaattaaaagaatattttagcaagttataatttggattatacactt

SEQ ID NO: 5719 - DNA, 2269 bp, Glycine max
tccacgcgtccgcacaactccccctaaatctctcacatctcttatctttctctctctctcttataatacaagaccctagtcctctctcacgccccaaccaccgccatcaaccaaaccttcctctctcgatttcccttcaattcccttctgggctttgcaattcggccaattgggtccccaaatctgcaaccttttcctctgtctaacgcgaaacggaagagaaacacccacatagagaaagagaaaaaaaaggagaggaagaaacaattttagggtgtggggttaaaacccggggttgaagcattgcagacatcacggctattcaaggagttcgccactctctttctcatgcccgttgtgtccgacgcaagggttgtgtgacggagagcaatccttcgccgcacggcgggcgtggcgctctgccttccgaaggtggcagcccctccgacctcctcttcctcgctggcggtggttcttcccattaacattctaaagtagtattagccattaacattacatcctacaccttcaaaagttctctctattagcggtttctggtttcttttgttcttcttctttggtagttgttaggtttggtgaggtctaagatgttgagcattaagagggttcccactgtggtttcaaattatcaaaaagaagagacaggggaggctgctgccggaggttgtggtcgtaactgcctcaaaagttgttgcattcaaggtgcgagactgcctttgtatgctttcaagaaggtggacaaggtttgtggaaatgaattgcctttgcttggatgcaaggagcagcaccctgtggcctttctggactcgcttgttcttggagagtgggaagatcgcatgcagagagggcttttccgctatgacgttacagcctgtgaaaccaaggtgattcctggggagtatggtttcattgctcagctgaatgagggtcgccacctcaagaagagaccaactgagtttcgtgttgataaggtcctccagccctttgatgaaaacaagtttaacttcactaaagttgggcaagaagaggtcctgtttcagcttgaggctagcaatgatggggaggctcaattctttccaaatgcacctattgatgttgagaattctcctagttttgttgccatcaatgtgagtcctattgaatatgggcatgtgctgctgattccacggatttttaagtgtttacctcaaaggattgaccatgcaagcttcttgcttgcacttcaaatggcagttgaagcaaggaatccatattttaggttgggttacaacagcttgggtgcatttgcaaccattaaccatctccactttcaggcatattacttggctcttccttttccaattgagaaggcccctactaagaaaattgccaagttaagcggtggtgtgataatatctaaactgttaaactatccagtcagaggccttgtctttgagggcggtcatacactagaggatttagcaaatgctgtttcagaagcctgcatctgccttcagcacaacaacataccttacaatgtacttatttcagattgtggaaggcaaatatttctcttaccacagtgctatgcagagaaacaagcccttggagaagtgagtcctgagcttctggagacccaagtgaatcctgctgtgtgggaaattagtgggcacatggtgctgaagaggaagaaggactatgaggaggcatctgaagccaatgcttggaggcttcttgctgaggtttccctctctgaagagaggcttctagaagtcactgctcttgtttttcaagccattacatcatcggttgagatgaatgtcaagcctcaacgtcttgaggaagttgatgccgttagcccaaacgcacagcatgccatggtggctggttcacatgaatgccttgttctccagtaacaaggctatgaacaaattcgtagtgattatgaactaaatattgcttgccatgttacgtttcagttctaataagtgtagtaccttatattatggtccagttactggagtctgaagtatttatgttttaaggacttaaataattgtggtttgtattttattatatggactcgctgtacggtgcttgattgtccttcgtggtctatgtaaaaatacaatgactgttcttctgagccttattcagtggttagtgtttctgtgtttgtggtttgattaatgtgacatactttcatatagtgaggcatgggaatgtgcaagtagcatttatataaatggtgcttgatctttttctattt

SEQ ID NO: 5720 - DNA, 3847 bp, Glycine max
  misc_feature (2570)..(2570): n is a, c, g, or t
tgttccaggtggggttggaattggaattggttattggactttgttgcaacaagttagattttgattgatggaggctgagtttggagcgaagaatcagtacttgtatgcacctgtggtgtcaggaatgaagaaagctgttgttgggaatgggaagaggagtttggaatgggatttgaatgattggagatgggatggtgatcttttcactgctcaaccactcaattcagtgccatctgattgtaggggtcgccagttttccccacctcatcctgaaattcctgcaaaaaatgctaatccatctaccaccaatttgtcttattctgttttcatctcaggtgaaggaaagagggaattggagaaaaggaggaggggtgttataggtgaaggtgaaggtgagggactgaattatgaggctggttctcttagtttgaaccttgcgggtcaaggttaccctctcatggtggaagaagaagaaaagagtggaaagaaaacaaaggtaattgggaccactacagctagtactaccactgcctctaatcgtgctgtttgtcaggtgcaagattgtagggctgatcttagtaatgccaaggattaccaccgtcggcataaggtttgtgatgttcattctaaggccactatggcactagtgggaaatgttatgcaacgtttctgtcaacagtgtagcaggtttcatgttcttcaagagtttgatgaagggaagagaagttgtcgaaggcgtttggcaggccacaataggaggaggagaaaaactcatcctgatgtctctgttgttaatgaaggctctctgaacgatcaaagggacagtaactatctgctgatgagtctgttacggatactgaccaatttgcattcctatggctcagatcatacaaggaaccaagatattctctctcatctgctgaagaacctggcaagtctggctggtccaaataatgcgtggaaggttagcacccttactggaggaatctcgtggcttggcccccccccctgggacgcatggagctgatcatgataaacccaaccttaactcaaatgctcctgaagcttccaggccttcttcttccatcaagacagacaatggcatcatcgctcaggaccctccaatgtcggtggtgcagtatgaaacacctgctaatggcatgacacaaaaatgtatagcttcaggtgatggagtaggaaatttaaaacctccttcaggaccactgctctcaaatgtatgtgaaccaagggacagcgttccatcccaattaactacagcagagactaaagtaggaaggggaaacttgaataacattgaccttaataatgtttacaatgatatacagaatactgttgagaatcataagaagccttatcctcctgtggcttcagggatggggtttattgaccatgcctcatggttgcaatgtgattctctcaaatcaagtcctccacagacaagtagaaactcagattcaacctctacccaatcaccatctagttccagtggagaagctcaggtatactcttgatgtaatttaaatccatttcctcttttctgaataatttaataattctgctatttactttgtatcaaaatatttagattacttaaatgattgtatagatatctttactgataaagatactattttgccaaggtcatcatttgaagtccccttttcaggttctttgccttttcattagtgtgtaggtctactttttgtggctgactccgttggtcttgttgttgttgtttactgttttgccaagagtcgcacagatcgaattgtttttaaactctttggcaaggatccatctgattttccccttcttctccgatcacagattctcaactggttatcccgcagtcccacggagatcggagagctatataaggccaggttgtatcatattgacgatatacctccgtcttgaaaaatctgcatgggaggagctctactgtaatctaggatcaagcttgagaaagcttcttgctgcatcaaatgattcattttggagaacaggatgggtatatgcaagggtgcagcacgctgtagctttcctgtataacggtcaggtagtcttagatgtgcccttgcgtctcaaaagcccacaacattgtatgatttcatgcattaatccacttgctgttcctgcaagtgctagtgctcagtttattgtgaaaggtttcaacctttcccaatctagcacaaggttgcactgtgcacttgaagggaagtatctggtacatgctagttgtcatgatttgataggtggagctgatgcacccattcagcatctaagcttctcttgtcaaataccaagtgtaactgggagggggtttattgaggtggaagatcatggtcttagcagctgttcctttccatttatagttgcagagcaagaagtttgttcggagatctgcaagctggaaaatgtgattgaggaagctgaaaccactgatgatatccagataaaaaaccaacatatggaagaaaagactcaagctttggatttcttgcaagaaatgggttggcttcttcatagaagtcatgtgaaatttaagnctaggttccatggctcccttccctggtcccttgcctctgctagtaggccccccccccccccgacttctccatggaccatggttggtgtgctgtgatgaagaaactcttggacattatatttgagggtggtgttgatgcaggagagcatgcctccattgagcttgcattgttgaacatgggtcttctacacagagctgtaaagagaaactgtaggcctatggtagaactactgttaagatttgttccagttaaaacctcagatggtgcagacagtgaaatgaagcaagttgccgaagcccctgacagattcttatttagacctgatactgtcgggccagctgggttgactcctcttcatgttgcagcaagtatgagtggctcagagaatgtgttggatgcattaaccaatgatccacgaatggtgggaattgaagcatggaaaagtgcccgggacagtacaggtttgacccctaacgaccatgcttgccttaggggctattactcttacattcaactagtccagaacaagaccaacaaaaaaggtgaaagacaacatttggttgatatccctggaactgttgtagatagtaacacaacgcagaagcaatcagatggaaataggacatgtagagttccaagcttaaagactgagaagattgaaaccacagcaatgccccgtcaatgtagggcatgccagcagaaggtggcttatggtggcatgaaaacagcaatggtttataggccagtcatgctctccatggtgaccatagcagttgtgtgtgtctgtgtagctttgctcttcaaaagctcacctagagtttattatgtcttccagcccttcaactgggaatcattagagtatggggcaatgtaatgttgtatatcaggtgttttctgctgtaagcttccaccttttcttaatatattattttagaaactgggtaagtcttagattttgggtttagagtatagacatgttatacatccatagtaatagtagctgtcatcaatatatatggggaaaacccgaggttgacacttcacctgttcagaacagaatcttgattatgaaacctgtgaacctgttaaatatggggtcaatgctattaggccattatatatgtgataatagggataacgccataacagttttaagcaatttgaggaaattgccttgtattaattaatcaataaatacaagatatttacggttcagtttcaaaaaaaaaaaaaaaaaaaaagaaaaaaaaaaaaaaaaaaaatttagtattctttta

SEQ ID NO: 5721 - DNA, 994 bp, Glycine max
tcgagtcagctacgtagggccccccccgatctctctctctctctctctaacatgcacacaaagtaatggacaaaaaaccatgcaactcatcatctcatgatcctgaagtgagaaagggaccatggaccatggaagaagacttgatcttgataaactatattgcaaatcacggtgaaggtgtttggaactccttagccaaagcttctggtctcaaacgaacgggaaagagttgtcgactccgttggctaaactaccttcgtcctgatgttagaagaggaaacattacacccgaggaacagcttttgatcatagaacttcatgcaaagtggggcaataggtggtccaaaattgcaaagcatcttccaggaagaactgacaatgagattaagaacttctggagaacaaggatccaaaagcacattaagcaagctgagacttcacaacaacatggtaattcagagaataatgatcatcaagcaagcactagtactagcaaagtgtccaccatggcacatccaaatgagactttctctccaccctcataccaaggaacttttgagccattccaacctcaattccctacaatcactgatcaatcaagttgttgtaccaccaccaacgacaacaacaactattggagcatcgaggatatctggtcgtctatgcaattactcaatggagattaaacctagctatatgcatgcctatataaatcatatatatgatgatatataaacctaagctcttgtagagtgtgttcaggcttaataacatcattaggtctgtttatatgagtagtctaagtttggtgtttgtaatgcatgatgtgagttaagaattaatttagttatggattgaaatatatagtaacttatatactacatgtgcattctcctattatcgtaaataatatggttgttgtaccatatattatcagtgacgggcatgctcgtattttagtaaatcggtataaataattgctttgtctcaaaaa

SEQ ID NO: 5722 - DNA, 798 bp, Glycine max
  misc_feature (779)..(779): n is a, c, g, or t
aaggggggtcgggacgagaggataaagaggtgtagcaattacgggagggcaatgcaatggccaccattctaccgccaagcaacgctcagtttgtttccttcaacgctcgccaccgctcttcctctcccactctcccaaggtggggatggagaaaagagcaagacgcaagcatagttgccaatagaacccgaggtcaagcatttcaagtcctggtagcttcaggaaaggaaggttcaaaagatgatgtggtcatggttgatcctgtggaagccaagagattggctgccaaacaaatggaaaaaattaaagcaaaagagaaactcaagagaagacgccaaattgaggcaattaacggagcatgggcaatgattggtctcacggctggcctagttattgaaggccaaactgggaaaagtattctgactcagctgcaagactacttgggtacaattgttagtttctttgtgcggtagacttcttccaaaaggtccatggatacatattaaggactccagattctttctcacattctttgtactttatatttgttaaaagtatacctgcgaggtttttcttcacataccaagccatacaattttcacttctcaattttcgtcgttacctggtaatgctacatatgtaacataaataattgagctgcaagccaatttatgttgtatgatatggatgtttgtgtactgaattgttttgcactggtcttctagcatttattgttaaaaaaaaaaaaaaaaaaaaaaaaaaaaaaaaaaaaaaaaaangaaaaaaaaaaaaaaaaaa

SEQ ID NO: 5723 - DNA, 1020 bp, Glycine max
ctttcgttaccgttcgtcagctacgtaggcccccacgtgatcgcatttcatagcactcaccctcattaccaacacgaaagcatagccaaaaccttttttcgaagtctctgattttcctaatggctccggcaaaggcagagaagaagccggcggagaagaagccagcggcggagaaggcaccggcggagaagaagccgaaggcggagaagaagatctcgaaggaaggagggagcgagaagaagaagaagcgcacgaagaagagcgtggagacctacaagatctacatcttcaaggtcctcaagcaggttcaccccgacattggtatttccagcaaggccatgggcatcatgaacagcttcatcaacgacatcttcgagaagctcgcccaggaagcgtcgcgtttggctcgctacaacaagaagcccaccatcacctcgagggagatccagaccgccgtgcgtctcgtgctccctggtgaattggccaaacacgccgtttctgaagggaccaaggcggttaccaagtttaccagctcttgaattagggtttgttaggcggttgtgttgcagatctagggttttctgtggatttcttttcttaaaaattagtttgtagatgtaatgatctgaacagttgttaatggaaggtttcgtttgaataattataattgcatgactgtggattactttttcgtcctttttgtttatggtttgggcggtgattagggttagggttgttggattgactcttaagatgtataatagataagaggagtgtggggttgtgtcaatttgatcatatcgttccctaatttccgctctgtttgccgcaatttgaagaacaacagttcacaccaaaaaaaaaaaaaaaactattgttttctgattttcgaaatgaacgccgttttgaaggatgtggttttcgttgtttcggaagatcggtgagggcttgaatgtattttggctgcttaatggacgtgctgcaataattatcgcagcctatttttagaaattgattctc

SEQ ID NO: 5724 - DNA, 2178 bp, Glycine max
ttttacctttaatgaatttccaataaaaacctgatttccaattcataaattaacaaataatcatacattgaaaaacatggctttaattagcccaatgatctattttcaatcactagagtacaagcagagagtatgtttacgacgggtcctcattctctgcaaagttgatcatcttacaagggcaaattttagctcatgttggttaaaatacgaaatcgagtgaatgggtcacaatcacccgcaatagaaaacaatgttgataatttacaggcaagggggaatgtccaaatacagacaaacggcccccaacttgctgcagcatggtaaattcatgttacaaacagaaatttgggttaggagttaaacattccgcatcagtgaatcaatctgagcacatgaattaggcaaaggctgttgcactatttctggttcatccaaatcctgagattgaatatgtatatcctgtgtttgtataagtggttgaggttgctgatcttgagctaatgcataagcttgcggttgagacattctatagtaaggttctttcagatcaagtttacaggatgatgtttgaagaattcctccttgttcagcaccaggaccccacattttagctgacagtgttaagtatattgtatagctttgtgcattgtgggcaatcaagtgaagcctgccagtaatttcttgtcctgccatgacataaattggctgagagagaacacagcgcaactggtaccaatgggttgtcggtgacccaggagcagtggtaagccacctttgcacagtacttccattgaatagcacatcaaaccaacatgccaacccatgcactctggtgcccacagaggctatgaatctcagaggaatatcaatttcatacagttcttcctcctttattttggtgaagtctatcacatggaacattgaaggagctattaacaatcttggatcaaaagcatccaccacaggctgagaaaagtatccttgaaatgcagtcccatgtaggggtgttaaatcaacaccataatagttttgctgctgccaaaacagggccttattagcaatttcaataaacaaatattcatcagtgaaaggtgccatgtgaatccttcccacacctggaaacattttcccagtaggaacgagaaacctatctctggcaatgacataagactccagcattctttcattgactaacaaggtgcccatgggctcagagatcagaatatctgctttctctggcaattcaacatcctcaactttgcctttgatcactgtaattcgttgagccagtgttgggtttccagctataagtttccgcgcatattctgccatttcagatgcttccacagcataaacatgctttgcaccagcttgagcagcaaataatgacaaaataccactaccagcacccacatcaactacaacacgaccaatgaaatcagcacggttctcaagaacagcagcatgataggtccctgtccgcacatagtcctgcaacatattttgctgatgcagaagttgtccataataatgaaaatacattttagaagatgatgactctatcttatcatcaaatttgcttttagaagttggtaatagttccatttcgtccatttccttcgagcatttacttccttcttccactgttgaactacacaatggaaggctgcactctcctcatcatttctaaactggattgtgactcccctggaatacaatgtctttttaccaacatcggatccttccaccaagcaaaccgatagaacaggactcaccttgaataactgaacagttcgaggatcaacattgaatggaatctggtgagattggtgatgaatttggagaccgtcagagttgaagcgagcaattcccggcgaagccgaagaaggagccgaagagaggtcggaaactgatgccaaagcgaactctcgctgcttccatttctgccctaacgattcctccattactttactactttctccaccgagccacaacccactactctctctttacttaacttctttcaaacaatacgttcatgaatgataacactacgcgtgaaactatgtgtgagtgtaattattagagaagaaatcgaaatgaaactagggtttggggttcgaaaaattgagagccgccaaaggaggtgagggtttctccaatgttgtatggaag

SEQ ID NO: 5725 - DNA, 1907 bp, Glycine max
atataaaaatagagggatctccttctcttatccagagaagcatatatagagaaagaaagaaggccctgccctatatagctgaaggcagtgtgcacaaactctgagactgcatattagagtttgagtcttcactctgaagcctaacttgggtttgtgtctctcatagcaagatgatggaaaacggtggcaaacagacatttgaagtctccaatgacacgcttcaacgagtaggttccaagagctttgatgatgatggccgtctcaaaagaactggaactatttggactgcaagtgcccacataataacagctgttattggttctggggtgctatctttggcttgggctattgctcagctaggttggattgctggtcctgtggtgatgattctattctctattgggacttattatacctcaactcttctagctacttgttaccggtctggtgaccacctcagtggcaagagatactacacttacacacaagctgttagatcctaccttggcggtttttcggtcaagttttgtgggtgggttcagtatgcgaacctttttggagtggcaattgggtacaccatagcagcttccataagcatgatggcagtcaaaaggtctaattgttatcatagtagcggagggaaaaatccatgcaaaatgaacagcaattggtacatgatttcatatggtgttgcggaaattatcttctcccaaattccagatttccatgagttgtggtggctctctattgtagctgctgtcatgtccttcacatactcattcattggacttggccttggtattggtaaagttataggaaacggaagaattaaaggaagcctaactggtgtaactattgggactgtgacagaatcccaaaaaatttggagaactttccaagcgcttggaaacatagcctttgcttactcctactcaatgatccttattgaaattcaggacacaatcaaatcccctccagcagagtcagagacaatgtccaaggctactttaataagtgttttggtcacaaccgttttctatatgctatgtggttgctttggctatgcttcttttggagatgcaagtccgggaaaccttctcactggctttggcttctataacccattttggctcattgacatagccaatgctggcattgttatccaccttgttggtgcataccaagtttactgccaacccctcttctcattcgtcgaatcaaatgcggcagaaaggttccctaatagtgattttatgagcagagagtttgaagtaccaatccctggttgcaaaccctacaagctcaacctcttcaggttggtttggaggacactttttgtgattttgtcaactgtgatagccatgctcctaccattcttcaatgacattgtagggcttattggagccattggattttggcccctcactgtgtatttaccagtggagatgtatataactcaaactaagataccaaagtggggcataaaatggataggcctacaaatgcttagtgttgcatgctttgtaattactatattagctgcagcaggttccattgctggggttattgatgatcttaaagtttacaagccatttgttaccagctactaattcaataggataattacttagtgatcatgatcaccattgtcagagatttcattagcaacaagaaaaaaaaaagaaggtaaattgttgcaaattgaaatcaacaggaaggtggtcttacttgtttattgcttagtaaccttgtatcttctgtatctttgtttttttttgtttgtgtgtgtgtgttctcttactttgtaacttgctctgtatccctaatttgcaatgagaaatggaggaaatgaagcagaggctttcaaattatcaaagcttttctctttgagtcaagccacttgcatt

SEQ ID NO: 5726 - DNA, 2529 bp, Glycine max
  misc_feature (2524)..(2525): n is a, c, g, or t
aatctctcggttttcttaccttgtttcttctgatgtttcaatagggtttcgaatttttctctgtttccctctgagactctctctatgctttggttttctcagatttttccaaattcgcggctcttccaggttgaatttggtagttttttcaatctagggttagggttttgtgcgtgctagtcaatggtttgttgcgtgcaaatttcatgaagagtgttatttatatttccgtacccgcttcagtttcttcgtaggttctgttgcagtgagaattgggcactttctcctttcgattttccggtcgaatcaagcatcaaaatctgagatttttcttttttgcaagtggtttttttagatttggggtagattttttttttgttttctttttattttgggcttcgtagtgcattgaattggcgcggcattcactggaatttgcgacgtgggagctggagaagctgcgatgaagtgtggtgcttggagggtattcttaaagtagcactcaattcgaggtttaatgtttggtcagagcatggattctgcaagggatgctgcgggtggtgtggcagggacagtgctaattcccatgcgttttgtgtggccatatggaggaaggagtgtgtttctcagtggttctttcacacggtggttggagcttctaccgatgtcgccagtggaaggttgtccaactgtgtttcaagtgatttataacttgccacccggttaccatcagtacaagttttttgttgatggagaatggcggcatgatgaacatcaaccttatgtacctggagaatatgggatagtcaacactgtcttattggccactgatcctaactacatgcctgttttacctccagacgttgcttctggaaatagcatggatgtggataatgatgcttttcgccgaatggcccggttgaccgatggtactttgagtgaggtgctgccaagaatatcagatactgatgtacaaatatcccgtcagcgtatttctgcatttctatcttcacacaccgcttatgaattacttcccgagtcaggcaaggttgttgctttggatgttgatctaccagtgaaacaggcatttcatatattgcatgagcagggagttttcatggctcctctttgggacttctgcaaggggcaatttgttggtgttcttagtgcttcggattttattttaattttaagagagctggggaatcatggatccaatctgacagaagaggagcttgaaacacataccatatcagcttggaaagaaggaaaatcgtatctaaatagacagaacaatggacatggaactgcattttcaagatgttttatccatgcagggccatatgataatctgaaagatattgccatgaagatcttgcaaaaggaggtttcaactgttcctattatccattcatcttctgaagatgcttcatttccacagttactacatcttgcttcactttcaggaatacttaaatgcatttgtaggtattttaggcactgctctagttccttgcctgtacttcaacttccaatctgtgcaatacctgtgggcacgtgggtgcccaaaattggggaatcaaatcggcagcctctagcaatgttgagaccaaccgcttctcttgcgtcagccctaaatttattagttcaagcccaagtaagctcaataccaatagttgatgataatgactcattactggatatatactgtcggagtgacataacagctttggcaaagaacagagcatatacacatattaatcttgacgaaatgactgttcatcaggctttgcagttgggccaggacgcatatagtccctatgagcttagaagtcaaagatgtcagatgtgtttgcgttctgatcctctgcataaagtgatggaacgcttggcaaatccaggtgtcaggcggcttgtcatcgtggaagctggcagcaagcgtgtagaaggcattgtttcattgagtgacatattcaagttcttcattggtggttagttttggattggtgaatggagaagtaaaatggtatgtgctgtggttatgacacttaagcatccatacaactagccatcatcacttgtccaaaccattgaaagtgctttctacacggtgattttatctctcatttcattgtaatacaattggattggcctcttgctttattgcctctttttaagattttaggctgagaaagaggcctgtaaattcagagtatttgattgcccaaaatttattcatctctccccattcgtattatcttcaaatgtattgtgctcctgacatagataccagcaaggtgggggagcacaacttctgtaatcattccatgctgtgaagatatcaagtttgaagaaaaaaaaatgaggatgaagattgagatactgttgttttatagaaaaaaaaaaaaaaaccttacttacggtttgattgtttaccttacttatgaacaactttagccggagtagcttatgaataaggaaccgttgcatatgaagttgtatcattagaggagctgatgctganntgaa

SEQ ID NO: 5727 - DNA, 1225 bp, Glycine max
tacggctgccagataacagtgtcaaacaatctcatacaatggcaggaactgctttctccacctcctgtctttcctcttctagcaacttagggacatgttggttggtattaaaaactcacaatgcaagggccgtgccagggaaactactacctggaaatggaaggagaagaatggcattaataaaagcagaagtgaagtatgtgaacgctgaaaaagctaaggaacttgtggaagctgatggatatacggttcttgatgtgcgggacaaaaatcagtttgagcgagctcacatcaaatcttgttctcatgtgcctctttttgttgaaaacaaagacaatgatcccggtactattataaaaaggcagctgcacaataatttttctgggttgttctatgggttaccattcactaagccaaatcctgaatttgtacaatctgttaagagccagtttccccctgaaagtaaactcttggttgtatgtcaggaaggactgaggtctgctgcagcagcaagtaagttagaagaagctggtttcgaaaatatagcatgcataacatctggccttcaaactgtaaaaccagggacttttgattctgtagggtctacagagttggagaatgccggcaaagctggcttggtgacaatccaaggaaaaatctcaactgtgctgggaactattcttgtttgtgcatatatattcgttaccttcttccctgaccaagcagagaagctattccaattggcccctacaggctaagcctaataaatccattgtagtctttcttgattttgttcttcctcactcattatgcatttatgcatgtagcataattaaggaacgtgtgattagaattgaggggaaaaaacatgaaatgtgaataaagtaatgtaagaattagtaatgtgagtatatggctatgatgctcaagaaaccaaatggtttatatcactggtagtattctccattaagcaagaagtatacccatttccattgtttaagataccagttatttcgaatttacgttcctagggaagtatgttgccttgtactggatggcataacccgctagattgccttcatctgtacttacaaatgactttgttgacacatttgaattttgaatcctctaatgagattgtattaaatgtatattcactccgttgtaaaaaaaaaaaaaaagaaaaaaaaaaaaaaaaaaaaaaaaaaaaaaaaaaaaaaaaaaa

SEQ ID NO: 5728 - DNA, 1358 bp, Glycine max
tcgagtcagctacgtcggccccccccacaacaactgaaggaagaaagagagagagagagagaaagagaagtgtgtagttggtgaagtttttgagaagaatatggaacgaagtggcggaatggtaacggggtcgcatgaaaggaacgaacttgttagagttagacacggttctgacagtgggtctaaacccttgaagaatttaaatggtcagatttgtcaaatatgtggtgacaccattggattaacggctactggtgacctctttgttgcttgtcatgagtgtggcttcccactttgtcattcttgttacgagtatgagctgaaacatatgagccagtcttgtccccagtgcaagactgcattcacaagtcaccaagagggtgctgaagtggagggagatgatgatgatgaagacgatgctgatgatctagataatgagatcaactatggccaaggaaacagttccaaggcggggatgctatgggaagaagatgctgacctctcttcatcttctggacatgattctcaaataccaaacccccatctagcaaacgggcaaccgatgtctggtgagtttccatgtgctacttctgatgctcaatctatgcaaactacatctataggtcaatccgaaaaggttcactcactttcatatgctgatccaaagcaaccaggtcctgagagtgatgaagagataagaagagtgccagagattggaggtgaaagtgccggaacttcggcctctcagccagatgccggttcaaatgctggtacagagcgtgttcaggggacaggggagggtcagaagaagagagggagaagcccagctgataaagaaagtaaacggctaaagaggctactgaggaaccgagtttcagctcagcaagcaagggagaggaagaaggcatacttgattgatttggaaacaagagtcaaagacttagagaagaagaactcagagctcaaagaaagactttccactttgcagaatgagaaccaaatgcttagacaaatattgaagaacacaacagcaagcaggagagggagcaataatggtaccaataatgctgagtgaacataatgtcaaaagatggcagagaaaacttatagatggaatagatttagaaagagagaatacattagccagaaagagaaaaaaaaattggacattagttgatgattctttctaggtgtgcgtttggaatacaatgaagtaaaggatgaaccttaagacatgctttatcctaaaatagtgtgatctgatattccattgttaatgagtaatgtaattatcatacaaacaatttgtagtctcattttaattaataattattaaactacttgattacttatggtcc

SEQ ID NO: 5729 - DNA, 1514 bp, Glycine max
cgatcaaccataatttttctatttcgagttccatcttctttcaagccagcccccacttccataaaaacacaaaaaggcccccagagcaaaagtttagaggaacatggcatgtccagcaatggcaaatgggaacgactcattgaacttgaagccaagtgagaccaagggaaagaccatcacttgcaaagccgcggtggcatatggtcctggagagccctttgtggtggaaaatattcttgttcatcctcctcagaaaatggaggttcgaatcaagatcctctacacttcaatttgtcacaccgatcttagcgcgtggcgaggcgtgagcgaggctcagcgtgcttatcctcggattttgggccatgaagcatctgggattgtggagagtgtgggggaaggagtgagtgaagtgaaggaaggggacatagtggtgccaatattcaatggggagtgtggagagtgtaccttgtgcaagtgtgagaagaccaacaagtgtgagatatatggggtgaatcccatgaagaaggtgatggaaggagatggcacaagcagattctccacagttcatgggaaacccattttccatttcttgaacacttcgactttctcggagtacacggtggtggattcggcctgtgtggtgaagtttgtgagcacagaccacagtctcagcatcaagaacctcaccttgctcagttgtggtgtctccacaggggttggagctgcttggaatacagctaatgtgcattcgggttcaactgtagctgttttcggcttaggagctgttgggctcgctgttgctgaaggggcacgagctagaggtgcatccaaaataataggtgtagacatcaaccctgacaaattcatcaaagctatgggagtgacaaacttcataaaccccaaggatgaagagaagccagtatacgagagaattagagaaatgactgatggaggtgtacactacagttttgaatgtactggaaacgtggacgttcttagggatgccttcttgtctgctcatgagggttggggattgactgtagtattgggaattcatgcatcaccaactttgcttcccatccacccaatggagctcttcgatggtcgcaacattgtaggatctgtatttggaggtttcaaagggagaagtcacttgcctcattttgcgaaacaatgtggacaaggagtggtgaagctggataatttcatcactcacgagctacctttagaggagatagacaaagcctttgatcttttgatcactgggaagtcactgagatgtcttctgcacttctaagaaaagatgccctttagattggatgtgataattatgatctgaattgttcaatgggagcatatcaaaatatgaatgtgaaatagtcttggaaaggtgttaggggtgcttttgaacagtgtactgaaagaaaataagatgaagtgtactcagctttgttcacctaacatcacttgataatagcgtgctgtagctgttcagctacttttttctttaaaaa

SEQ ID NO: 5730 - DNA, 2934 bp, Glycine max
gaaaatacatagcacaagataaaaaaaattaaaatttataaaaaagaaagaagagagattatagaaagcgaaagagagagggttcaagttcaacaagcctctcttctttgtgttcttgcgaagaagaaaaatccctccgagtcaactcggacgagttgcctcatcgtacggttccttcctcggactctttcctcttcttccccttccgaatcaccgttcgcagggttttgctctctctctctctctgtctctcgcttcgtttctagttcagatctcgcattggcttcagctgaaaccacgcggtttaatttcattcccttaaattagggatttatcttatgtcgaaacacttgaagtgatgatggtgtggttgttgtgagaaattaatgatcgttgagggtgtgggacattggtacagagctttcagtgtagttgacaactacctaggagggaagaagaggaatctttcttccgccgttgtcgtgtgccgtggttgttgtactgttgatgtctcggaaactcgacagccctgtgcagactcagatggctgtggcagtgataaggagcagtccacttgggagagagtaccacgggaagcaacccgcgggtcggaggcgcgtgttcgtgcagacggagaaagggtgtgtgttgggtatggatttggatcgtggtgacaatgtgcacactgttaagaggaggctgcagcttgccctcaatgttccggttgatgagagttatctcacttttggggatatggtcttcaagaatgaccttagtgctgttcggaacgataccccccttttgctcactagggggaaaaataatctaatgcctaggagctcctccacgccgtgtctgtcgccgaaggggagggacattgataaaagtggacctatcgagatattgggacagtctaaccggcttgatgggatcaagcacatgatcaaggacattatgaaggcgattaagatggggattgaaccgattcctgtgcatagtgggcttggaggtgcttactatttcagaaacagtaagggggaaagtgttgcaattgtgaagccaaccgatgaggagccttttgccccaaataacccgaaaggttttgttggcaaggcgcttgggcagcctgggctgaagcgatctgttcgggtcggggagactgggtttagagaggttgctgcttatcttcttgattatgatcattttgctaatgtgcctcctactgcgttggtgaagattacccactcggtgttcaatgtgaatgatggtgtcaatgggaacaatttatggaggaaaaggctgtttagcaagattgcgtctttccagcagtttatccctcatgattttgatgccagtgatcatgggacatcgagcttccctgttgcttctgtgcatcgtatagggattttggacattaggattcttaacacggataggcatgctgggaacttgttggttaggaaacttgatggcatcgggagttttggtcaggtggagttgattcccattgatcatgggctctgcctgcctgaaactttggaggatccatattttgaatggattcattggccacaggcttccattccgttctcagaggatgagcttgcctacattgaagatcttgacccttatcgggattgtgagatgctgagaagggaactgccgatgatccgagaggcatgtctcagagtcttggtgctgtgcactattttcctcaaggaggctgcggcttatggcctttgccttgctgaaattggagagatgatgactagggagttccgcaggggtgaggaggagcccagtgaacttgaggttgtttgtttggaggcaaggaagatagtggtggaaagagacagggaggaactgtctcccaggtctgagatgagagatgatgagtttctgtttgatatagattattatgatgaatttggatcagattttacgccaaagatggcaatagatgaccctttaaccagagcaacttttctgcctgcacttgggaatgggcagtctcgtaacccgctttccaaattggatgaatgcattgaggaggaagaggaggaagaggaggaagctgagggagaatctcctcaggggtttgttacttctgctgctgaagaaaaaatcccaagtgtttcagaactttctgtgtctctgaaaaataccatgttagatgggaaaaaccagaatcagcagaaatattcaggaggaaaggtggagaatggtcattttgcaaatacatcatctggtcacaagagtgccaatgagcagcttcctccaagcataagctttgtggatgtgacagaaatgaccgaggatgaatggccattgtttctggagaagtttcaagagctgctgtatccggcatttgccaagaggaaatccataaccttaggtcagaggcagagacagaggcttggtacttcctgccagttttgaagttgagcgatatgctggtatgataggagaggactatagaatgaagaagaataaggctttgtaggtttcagggaatgaatgaagggttgctaagatagtgttctggtttatgagatttggatgagtgctttggttggaaacgtcgtaggaaaacctgctgtaaatatacttggcatcagctaagtggtgagccgattagttgtttgtattttgatttcatgatttcatttcttcttttccccttcttcttctttgtaggataaaattgtgaaatgaaattcgtgtatatagtcaaatggcatgtgccttgtcttttctccacttaatttggtgtctgccaatgttttaaattgcaatcgggagttcgtctcgttttgtttcttgatattgtgagaaattgcggataaatatgtgattgatgcagctacaattgcgacaccagtacttaaaaaccttgatgttgtgactgaaattgcagtcagtagattatttttt

SEQ ID NO: 5731 - DNA, 1511 bp, Glycine max
acaaagacaaaatgaaacctactactagttccagttgatcctgcgtttacagcactacagttccacagcattagccattagcactataaataaatagagaacacgcgaaacacctgattcccctccccagacgccgcagagtcagagagagagattcactgaaacagagcgcagaagaaaatacataaactaatccagaaaatgagcagcggcgctggaaaggtggtgtgtgtcaccggcgcttccggttacattgcttcctggatagtcaaattcctcctcaatcgcggctacaccgttaaggccaccgttcgcgacacaagtgatccgaaaaaaataaaccacttggttggcctcgacggtgctaaggagaggctgcacctctacaaggcgaatcttctcgaagaaggttcctttaactctgtcgttcaaggttgccatgctgtgtttcacactgcttctcccttttatcacaatgtcaaggacccccaggctgaattgttagacccagctttgaaggggactctcaatgttctgaaatcgtgtgtaaacttgccgacgctggaacgcgttgttttaacctcttctgttgctgcagttgcgtacaacggaaagcctcgaactcccgatgtagtagttgatgagacttggttttctgacccgggtttctgtagggaatcacagatgtggtatacactttcaaagactttggccgaagatgctgcctggaaattcgtaaaagagaacaacattgacatggttactattaacccagcaatggtgataggacctctcttgcaaccagtccttaacacaagtgctgcttcaattttaaacgtaattaatggtgcacaaacatttccaaatgcatcttttggttgggtcaatgtgaaagatgttgcaaatgcccatattctagcatatgagaatgcttcagctaatggaaggtattgtttggtggagagagtggcacactactcagaaattgtgaagattttacgtgatttgtacccgacattacaacttccagagaagtgtgcagatgataacccatatgtgccaatatatcaggtatccaaagaaaaggcaaagagcttggggattgaatatactcctttggaagtgagcctcaaggagactgtggatagcttgaaagaaaagaagtttaccaacttttaatttgtgatatctcctagaggagaaaacgttaataatagaaaccttgtgtggttggtcacttggcttgtgatgctcatgcttctgaacaaacttactattaaataagacttaaatcaagattggtataagtactgaaagaagccattcttggtctgatttgtaccggtgacaattaagtttcaaacatgcgtttccaagtagagtttgcattacaaattgtatccccgtttttattatattactaggaaatgtctgatgcaaaaaaaaaaaaaaaaaagcttgtatggttagcgccataacactataatgtgggcgattttggacccctttgg

SEQ ID NO: 5732 - DNA, 1202 bp, Glycine max
  misc_feature (1189)..(1189): n is a, c, g, or t
aaaagataaaatttcctatgatgaattgtctaattattggagctatactaatgaagaaaaaagaaacaaattgagcaatgaatttgtaaatagggcaaaagtaatggataaggaattaatttctctggatatattagaaaaccgaattcgattgtctaatgatgaaactaaaacaaaatatttaactaaaatatatgatcctttcctgaacggacgctttcgtggacaaatcgaaaatgttttttcaacctcaatccaatatgaaaaaaatgaaaaaaaaaataccattttgataaataaaattcatggtatccttatttctaataatacttataaaaaaaataatagtaattatccagaattagagaaaaaaataaatatatttgatagaaaatctttagtaactacatttttttttttcaatctaatcagtaaattttcaaaaaaattagtatcaagcttgagttttgaagcactttctttatttccagaacatgaacaagtaaaaataaattatgaagaagaaaaaaaacaaataataaaaatattatttgatgcaattagaactgatttgaacgaaaaaacaatagtaaatggaaatagaacaaagtgtattagaataaacgaaatccgtaaaaaagttcctcgatggtcatacaaatttattgacgaattggaacaactggagggaaaaaatgaagcagagaattatcaaattcgttctagaaaagccaaacgtgtagtaattttgactaataaatctaaattttttaagaagtacgatacttataatcctacaggagatactgataacgctgaaaaaaaaaaaaatgaattggctttaatacgttattcccaacaatcggattttcggcgagacataatcaaaggatctatacgtgctcaaaggcgtaaaacagttacttggaaattttttcaaaaaagggtgcattcccccctttttttggataaaattgaaaaacctttattcttttcttttgatagtttcaaatcaatgaaaatattttttatgttcaaaatttggatgcgaaaaaaggaagaatttgaaatttctagttatacagaggaaagggcaaaagaaagttcgaaaaaagaggaggaaaaaaaaaaggaaaatgaggaaagaaaacgtatagaaatagcagaagcctgggatagcattatattngctcaagtaataa

SEQ ID NO: 5733 - DNA, 1681 bp, Glycine max
gcggtttcctatcatttggagtggtttctcctcagaatctgaaagaacattcctatttcctacacaacactacactgtctggtggaagaatctcttcactctccatgcaacaacgttggctatgtctccttattctctctctttgttagcctctgtctcccccaaaatgcacacccttctttctttctcctcatcacactctccacatcttccaaaccacaacataaccaaatccaataataaactctctcattccatcaatggactttcatcatgcccttcttctcctttgctccccagtgccacaaaatcttctccctttctcatttccacttcaaaaattgcatctttcagggtccttgctgcttcctctatacctgatgctagaagtgatgaaccagccaaaactagtgatttcttaaaaactcttcagcttggggccatgtttgcaacttggtaccttttgaacatctactacaacatctacaacaaacaggttctaaaagtctatccatttccagcaacaattacagcatttcaatttggctttgcatcgttggttattaatctagtctggactttgaatctccatcccagaccaagcatcagtggttcacagtttgcagcaatccttccactggctgtggctcacacaatgggaaacctcttgaccaacattagtcttggcaaggttgctgtatctttcactcacacaatcaaagctatggagcctttcttcactgtagttctttctgcccttttactgggtgagatgcctactttctgggtggtttcttcccttgtaccagtagtaggtggagtggcactggcatcaatgactgaagtctctttcaattggattggattcactactgctatggcatctaacgttactaatcaatcgcggaacgttttgagcaaaaaactgatgactaatgaagaggaaactttggacaatatcaatctctactcagttataactatcatttcctttctgttgttggtcccatgtgctattcttgtggagggtgtcaagttttctccttcatacttgcaatctgctgcaagtcaagggctgaatgtcagagagctatgtgtcagatcagttcttgctgctttttgcttccatgcataccagcaggtatcatatatgatattacagatggtgtcacctgtgacccactctgttggaaactgtgtgaagcgtgtggttgtcattgtttcttcagttatattcttccaaattcctgtctcacccgttaacacacttggaactgggcttgcacttgttggagttttcttgtactcaagggcaaagaggatcaagtcagtccaaaagacaaattgaggctgcataacccttcaaaaaagaaaggaaacaggcagagggaaaagtaaatattgtagacacataacagccattgattttttttttctttctttttacattttgtgagggtatcactactccttgttaattggccatcctatgcgactaaatcttagtaaataatataggagtttaatagacatgtactgtaagtttaattttttttacaaatattcagaaatctttattgacatgactatagttattataaaatttaattaacttaatatatatatatatatatatatatatatatatatatatatatatgataaaatgcctaaaaaaaac

SEQ ID NO: 5734 - DNA, 1468 bp, Glycine max
tcgatcagctacgtaggcccccccccccgagcgtgaagattgatttcacaattaggccgctgaaagctccgacttggaggaggcgtcgccggacgagtcctctctccgccttcgtccgtcgtcgtcgatcatcgcttatgactgtgatttgaaattgatggattccaacaattggagacctaatcaaggtactaaccccactatggatacaagtgattggagagctcaactaccaattgattcacgccaaagaattgtcaacaaaataatggagacattaaaaaaacatcttcctgtttctggtcctgatggattgcatgaacttcggaagattgctcaaaggtttgaagacaagatttttactgctgcaacaagccagcctgattacctacggaaaatatctttgaagatgcttacaatggagactaaatcccaaaacaccttggctaacaatatgccaccaaatcaagtcggccctagcaataaacctcctgatcaaggacttgttttgcagtctcaagttcataatcttgggcaacaacattctattcctttgcctggtcagctccagccacatcagcagcttctatctcaaaatgttcaaaataatgttgcgtcgcaacctaaccttccacctgtatctagtctagcccagactcccagccaaaatattgtccagaactccaatatacaaaatataactgggccaaattcagttgggaccactattagccaaaattccaacttacagaatatgtttcctggttctcagagacaaatgccaggaaggcagcagattgttcccccacagaattcacagcaatatctttaccaacagcagtttaagcagaagctccagcttcaatctcagatgcagcagcaacaacaaaaccttctgcaaccaaatcagttgcaatcttctcagcaatctattatgcaaacttcatctgttatgcagccatccatgatgcaaacatcttctctatctagcataccacagaatcagcagtctactaatgttcaacagccaatgcagtccatgccacagcagcattcacaagttatcaggcatcagcaacaaacagcagtcactcatcagccaagcttaccttcacaacagcaacaacaacttatggggcatcagccaaatacaacaaacatgcaacatgcacagatgcttgggcaacagaacaatgttggtgatatacagcaaccacagaggatgctctcacaacagagtaatcttacaaacctgcaacagagacagcagttaataaatcagcaaaacaacccagcaaatatacatcaacaacaatttggaaataatggccctgggttacagcagcaacatttgctcggacatgaatctggcaatgctgacatgcaaacaagtcatcactctacacacatgttgcagcaaccaaaggttccaatgcagcaacaatcacaacaaaaaaaaaaaaaaaaa

SEQ ID NO: 5735 - DNA, 1646 bp, Glycine max
ggggcgtgcgcccacgcgtccgcccacgcgtccattaaataagttatagaaaaaatatctttgtaaacagaaagagaaaggcagagaggaaagactttaccgagtccttacgcgttgtttgtgtttgcgtcggaaggaagagaagatgagtgagaatttgatggagaaagtgagcgcactgggagagcgcctgaaaatcggaggcgtggaagtggggagaaagatgagcgaggggatgagctccatgagtttcaagctcaaggagttcttccagcctgggcccaatcaggccgacaagcttgtggaggacgctacttccgaggccctggacgagcccgaatgggccctcaatctcgatctctgcgacctcgtcaacaccgacaagctcaactgcgtcgaactcgtccgcggaatcaagaagcggatcattctcaagagccctagggttcagtacctcgcccttgtcctcctcgaaaccctagtcaagaactgcgagaaggccttctccgaggtcgccgccgagcgtgtcctcgacgagatggtcaagctcatcgacgacccccagaccgtcgttaataaccgcaacaaggccctcatgatgatcgaagcctggggtgagtccaccggcgagttgcgctatctccctgtctatgaggaaacttacaagagtctgagatcgaggggtattcggttccctggccgtgacaatgaaagcttggctccaattttcactcctcctcgttcagtgtcttctgctccggaggctgatgtcaaccttcaacagcagtttgagcatgatattcctgagcagtttcatcatgatgttcccgtgcttagttttacgcctgaacagacaaaggaggcccttgatgttgcaaggaatagcattgagcttctttccactgtgttgtcgtcttcaccacaacaagatgctttacaggatgatttgaccaccacacttgtgcagcagtgtcgtcggtcacagactactgtccagcgaattgttgaaacggctggggataatgaagcagtgctttttgaggccttgaatgttaacgatgagattcagaaggtcctcaccaaatacgaagagttgaagcagcctgcaactactccacttcatcctgaaccagctatgatacctgttgctgttgaaccagacgagtcaccctatcatagtaaagaagatgctttgattcgaaagccagctggatcaaggactggtgtcgagggagggagcaatgatgacatgatggatgatctcgatgagatgatttttgggaagaaaggtggggaagcatcagatgggggacacgagacaaagaagcagccgtcatcgaaagatgatctcatctctttctaagccgcaatatagtctatgctgaatataaaacagagtgcctttaatttcatgccactacttttatatctagatgttgatgttgactctgaactttgttcagacttcagattgcttggtccattatttttttgcacattgtgtgcaacttatgtttgaattatggtatataagttcttgcagggtatacatgggaactctatggagaatttcaatgaggttgtctacttagattattcttcgttgatggttgccctcttttagcccaaaaaaaaaaaaaaaaaaa

SEQ ID NO: 5736 - DNA, 1953 bp, Glycine max
aatttcaatttccgcttctgactccgtgccctagcttcttcttcctcctcctcctctgccattgcagcaaggcacacacctcaggctccaacccatttcacgagggatcggattcgctcgccatcatggggaagaagaagaagagagtttcctcgaaggtgtggtgttattactgcgatcgcgaattcgacgacgagaagatcttggtgcagcatcagaaagccaagcactttaagtgccatgtctgccacaagaagctctctaccgctggcggcatggccatccacgtcctccaggtccacaaggaatccgtcaccaaggtacccaacgcaaaacctggcagagagagtacggatattgaaatatatggaatgcaagggattccaccagatatcttggctgctcattacggtgaagaagaggatgatgttccgtcaaaggcagccaaggtggatattccaccaactcagcttgtaggtggaatgattccacctcctttgggtacaggatatcctccgcgaccaaccttgcccacaatgccaccaatgtataatcctgctgtacctgtgcctccaaatgcttggatggttccacctcgacctcagccatggttttcacagcctccagctgtttcagttcctcctgctgccccatacacacagcagccattatttcctgtgcagaacgtgaggcctccactgccagctactgctcctgcgctccaaactcagattactcctcctggattgcctacatctgcacctgtcccagtttcacaacctttatttcctgttgttggaaataaccatacaactactcaaagttcaacattttctgctccacccctgccctcaagtgttccatcagttactccagtgatgtctacaaatgttcctgttgatacacatttgagcagcaactcttcagtaacaagtagttatcaggctataggggttccaggtggagcagctagtaactcacattcttatgcttctggtccaaatactggtggtccttcaattgggcctcccccagtaattgcaaacaaagctcctgctcctcagcctgccaccaacgaagtctacttggtttgggatgatgaggcaatgtccatggaggaaagaagaatgtctttgccaaaatatcaggtgcatgatgaaagtagccagatgagctccattgatgcagccatagataagaggattcttgagagtaggctggctggtcgtatggcattttagatcaatctcatccatacactcttgtcaaatttcttcagtgataagggctcaaaatggtattttaataaagcttgacagcgcgtgttcaagattcctttatttaaggtccggcaagtaattgttattggtgcaattctttgccaaaatgggcaatgggccctacggttatggtggaatcgaaggaaaaatattgaaatggttctgatttcttacttcttaggaagttgcaaaactttgtttatttctcatttcataccttttctcccgttgatgtttgtagtcaacctttaggacgtggtactcaaaagagtattatatatttgctgtaatcagattattacatgttttgggtggaaaattgacggcaatttttggttggttatatgcttcgtaattagtgtctctaattgtgtaaaagacagcaaaaggtgtactttggtggagagacaaaaatacatattggacattaatttgttgctaatattcgaggagagtatgtgttgcaacggttagagagatctgagaaaacattgaggatgtgatactgcactgtcttgaagtagaaagacagttccattggagaatgcaagcaagatgattgtgtagaattcttttttttttaataaaatatcttaatgtaaacttatagttgagaattatttgaaaccattgaaatgtttaataataattctatttaatttgttttgagatt

SEQ ID NO: 5737 - DNA, 2191 bp, Glycine max
ctcgagccgattcgggtgtctgtctgtctgtctctgactccattcccaccttcgcctgcgtcactcactcttcctttctttcacttccttttccttatcatatcattattctcttctttttcttttcttttcattcttcaacgcccacaacaccacaccactttctctgttctctccacatctccaacactcacatactctgaaaaaaaaaattaaaaaaaatataaaaaataaaaaaaagtttgtttttcttcaacaaaccatggagggacttccccaaggttaccgtcccaacgttggtgtctgtctcatcaactccgatgatcagatttttgtggcttctaggttgaatgtcccaggagcatggcaaatgcctcaggggggaattgaagatggtgaagagcccaaatctgctgccgttagggaacttcgagaagaaactggaatagtatctgctgagataattgctgaggtttgctcataatcttagctctatctatagatcagtgatatcttacaacattcaattaattgagttcaaagtagttttaccattgtgtaataaaatgaacaaaaacaatgtctgagagcatgaaacagaaacacccagaattagattcaagagaagcatttatacatctatgtcttggtacattatatataaaacactgatcattttgataaccgggtggatgttgatcttttaatacatttggccgagcttgtgcgttacaggttcagaaatggttgacatatgacttccctcctgctgtgaaggctaaagtcaatcgtctgtggggaggtgaatggcatggacaggcgcaaaagtggtgagtatttttttttaattttatttcatgtgctttacatagccatgtacttgacatttcagtgctaacttctgaaaatattacctctaatctaaaactctggtggtgtatctctataccaaaaaatatgaccaccaaactgggtgaaagattaatgaaattaaatcagtttggtccataatgctggttaaaacatttgaaagagtttgtgaatgcatgaaacattataccaggataagtgtccaaagaagccccctcacaacttacatggttgctaaaatattagcttggcagtatagaaagcaagatggatggttggtttgcttgactttgtaaaatgaaaagaaaaagacagatttatgatgtaaagtctgaattcaatgtgtgaaagtttaaaacttaatttcttttctttagctgaagcagatgtaagcaactggaaaaaaggtcagtcttcaacaatcaacacaatgaaggctgagaaaaggcaaacatgaaaatcctgagtgtgagtgaagagagacaaataatacctgtggtattagtatatggagattacattgtgatccttttcctagtaaaattggtgtttgtgttttgtgcattttttccattttgtgtggtagttgtttgatctggagtttcaggtttggtgcctgttttgtcaattgtgtacttcaatgtagatatgagaaaccattgacttttctcaataggtttttcattactcaagctggatatcctgtttacttatgacatgccaatttaggttaaaatacggataacttaaaaattcttagtgtcccaaacttactactttttggtagtcagaatgataattgtcttaactcttaattatccagttatgtaaatgtacagttaacaaagccgatacatttagttgagtgtttctatgtctatatcctaccaaaactctgctttttctgccattgattgcgaacatttgataggtttcttatgagattaacaaaagatgacagtgaggtcaacttaactaatggggaagcagaacctgaatttgcagaatggaaatgggcagaccctgaagaagttattgagcaggcagtggactacaagagaccaacttatgaagaggttataagaaccttcaagccttactttcaagggagtggaatatctgccaaatgtaaatcaacaaagtggtgaatgttatgagtgtgcattgtagttttatccattttcttatctaatttcactgagtttggatagcactcagctatttgtaaagggatgatagttagaactgtccattaggtacttgccttcttgtaataataagctatgtgcaaatgcctaatttctattctaaacctccctgc

SEQ ID NO: 5738 - DNA, 1510 bp, Glycine max
  misc_feature (1507)..(1508): n is a, c, g, or t
cacgaaatgaattccatgcaatcttcgactctgtcctcgtaggccccccccccatacatctgcggccccaataagccttaaacctcctccttttgatcgtcgcaaatcatttgatgaggatgagttttcaaacaagcccgttatagtcaataagcccactaaagtcaagaagactgtaacagctcctgcaaatgtaaaatcatattctatagctgacctccagattgctactggaagcttcagcgtggagcaacttcttggtgaggggtcttttggacgcgtataccgtgctcaatttgatgacggaaaggttcttgccgtgaagaagatcgattcatctgtccttcccaatgatatgtctgacgattttgtagaactagtttcaaacatatcccaattgcatgatcccaatgtgacagagcttgtaggttattgttcagagcatggccaaacacctactagtctatgagtttcataaaaatggatcactgcatgacttccttcacctacctgatgagtgtagtaaaccattgatatgggaatttcacgagtgaaaattgcttttggggattgcacgcgctttagagtacctacatgaagtttgttcaccatctgttgttcataagaatataaagtcggccaacatattgcttgatacagattttaatcctcatctttctgacagtggattggcaagctatattccaaatgcaaaccaggtattaaacaataatgctggatctggatatgaagctcccgaagttggtttgtctggtcattatactcttaagagtgatgtttatagcttcggagttgtcatgttggaacttcttagtggacggaaaccgtttgatagctcaaggccgaggtctgagcaggcgttggttcgatgggcaacacctcaactccatgatatcgatgctttggctaaaatggttgatcctgcattggaaggactataccctgtgaagtccctttctcgatttgcggatgttattgctctatgcgttcagccggagccggaattccgaccacctatgtcagaagtggttcaagcgctggttcgattagtgcagcgaactaacatgagcaagaggacgtttggaactgatcaaggaggatccaacagagggggtgatgataatcaagatacacaagacatgtaaatgggaacaaaaggcttgtgttgatacaatggcagaaaaggaaaataatattcttcagatttttatcatttctttttaacccccttcagtcattttctcctgagttagatggattgcacctttgattatttaaagctagacaatttgttggtgtatgtttctgagctatttcttttattggtgatataatttcaataatttaacctttttgcaaaattgaagctcgattaagattgatggttgccatcttgttgtaataactaggaatcataacaagctttttcatcgtattttgtgattgtatgggtccaatattttgtattagtctaaataaatacacnnct

SEQ ID NO: 5739 - DNA, 2716 bp, Glycine max
gcttgccagctttactcggcaatggtggcaacatatataggcagcaacccatttcccggcgtcgtcccacgcggccgattaacgtaaaggggttgattgcacatcctttttgctttcagggttggaagaatttttgcgataaaatattttttcacccaaaaaaaatggtgttggatccaagactggtgctggtgctgttcatcggcacttgcattttggccatcaatggtgacacagatccaaatgacgttgcttctctaaaggttttgtttcaaagtatgaactcaccatcccagctaaattggaatggtgatgatccttgtggacagtcgtggcaaggcatcacttgctctggcaatcgagtcacagagattaagttacctggtcgttcactttctggatctttgggttaccagctagaacccatgtcatctgtgacaaacctagacttgagtaacaacaaccttggtggcaccataccataccaacttcctcctaatctgcagtacttaaatcttgctaataataatttcaatggggcaatcccctattccctttctgaaaagacttcgcttatagtcctgaatcttggtcacaatcagctccagcaagcacttaatgttgatttccaaaagctttcttccctctctacattggatctctccttcaattctttgacgggtgacctgcctcagactatgagctcactttctagcataagaaccatgtatctgcaaaacaaccagtttactggcaccattgatgtccttgctaatctgcctcttgatactttgaatgtgggaaacaatcattttacaggctggataccagaacaattgaaaaacataatacaaaaggatggtaatgcatggagctcgggacctgcacccccacctcctcctgggacacctccagcagtagcaagaaaccgaaatcacaaatctggtggacatagcccatcagatggtggctcaagtgacggtggaggcaaaaaatctggtataggaggtggtggaattgctggaatagtgatctccatcttggttgttggggcaatagtagtattctttctggtgaagagaagacccaaaaagtcatttaatgatgttgaaaagcttgacaatcaacccttggctcaaaatgaagtgcacgaaatgaattccatgcaaacttcatctgtaattgatttgaagacatttgatacatctgcgaccccaataagccttaaacctccaccttttgatcgtcacaaatcatttgatgaagacgagttttcaaacaagcccgttatagtcaataagcccactaaagtcaagaagaccgtaacagctcctacaaatgtaaaatcatattctatagctgacctgcagattgctactggatccttcagtgtggagcaacttcttggtgaggggtcttttggacgtgtataccgtgctcaatttgatgagggaaaggttcttgccgtgaagaagatagattcatctgtccttcccaatgatatgtctgatgattttgtagaactagtttcaaacatatcccaattgcatcatcccaatgtgaccgagcttgtaggttattgttcagagcatggacaacacctactagtctatgagtttcataaaaatggatcacttcatgacttccttcacctacctgatgagtatagtaaaccattgatatggaattctcgtgtgaagattgctttggggattgctcgtgctttagagtacctacatgaagtttgttcaccatctgttgttcataagaatataaagtcggccaacatattgcttgatacagattttaatcctcatctttccgacagtggattggcaagctatattccaaatgcaaaccaggtattgaacaataatgctggatctggatatgaagctcccgaagttggcttgtctggtcattatactcttaagagtgatgtttatagctttggagttgtcatgttggaacttcttagtggacggaaaccatttgatagctcaaggccgaggtctgagcaggctttggttcgatgggcaacacctcaactccacgatatcgatgccctggctaaaatggttgatcctacattggaaggattataccctgtgaagtccctttctcgatttgcggatgttattgctctgtgtgttcagccggagccggaattccgaccacctatgtcagaagtggttcaagcgctggttcggttagtgcagcgtactaacatgagcaagaggacgtttggaactgatcaaggaggatccaacagagggggtgatgaccaagatacacaagacatgtaaatgggaacaaaaaaggcttgtgttgatagaatggcagaaaaggaaatgatattcttcagatttttatcacttctttctaacccccttcagccagtttatgttctgagttagaggattgcacctttgattattgaagctagagacaatttcttggtgtatgattttgcgctatttcttctattggtggtataaatttcaataatttaacctttttgcgaaattgaagctgggttacgattgatggttgcaatcttgttgtaataactaggaatcataacaagctttttcatcgtattttgtgattgtatgggtccaatattttgtattagtctaaataaatacacctgtgttggggtcattttactcctctgcttaatcttcatcagaatataattaacgaacttataagt

SEQ ID NO: 5740 - DNA, 1485 bp, Glycine max
cggaattcccggggaaaacaaaaaccatcagcaacataaaaaaaaaaaatagaaagaaaaatgatgctcggagaacaccatcgcgggaatccgacggtcctcgtgccaccgtggccagcccacgacgatccgacggctgagatgtactccgcgttcttaacaaacgacgtcaatgctggtgagtactctccgtaccatcttcaagaagcactaacggcgctgcagcgttttctgccgtcaaacgaaacggacgcagactcggactcctcggaggcggctcagcccgacgcggcggtggacgcgtacacgtgcgaccatttccgcatgtacgagttcaaggtccgtcgatgcgcacgtggcaggtcacacgactggacggagtgtccgtacgcgcatcccggcgagaaggcccgccgccgtgacccgcggaggttccactactctggcgtggcgtgcccggagttccgcaagggaaactgcaggaaaggcgacgcgtgcgagttcgcgcacggcgttttcgagtgctggctccatccggcgcgctaccggactcagccatgcaaggacggcacgagctgccggcggcgcgtgtgcttcttcgcgcacacgccggagcagctgcgcgtcctgccgatgcagagtccgcgtagcgtggcaaactcatcggagtcctacgacgggtctccgatgaggcaggtttcgttgtcgtcggcggcggcggcggcgttcatgtcttctccggcggcttctctctctccgccagagtcgccgccatcggtgaacgagatggtggcttctctgcgtaatttgcagcttgggaaaatgaaatcgatgcctcataatagaaacgtgtcggtcgggtcgccgaggggatcggtactccgaccgggttttttaagccttccaacaacgccaactcagcaaccggttcggtctggggtgaagtgttttgatgtttgggatgagagttttgaggaggaaccggttatggagagggtggagtcagggaggggaataagggctaagatgtttgagaagctcagcaaggagaattcactcgacgcctcggcttcgcctccggatcttgggtgggtctcggagcttgttaagtgagaagccagtccttgtaaatatggcatggctgaagagaagaagacaagaagacaagaatctcttttttgtatagttagcttactattattattatcatcatcatggttttaaacagcattcctcaacgcaatcaaggtatttggattcactgtaatacacaatctgtaattgaggctgcgtcagtcgcaattacctaccatttatataaaggttttcacccttgtgcgagtccgatcgcaatcctaatttaaaactaggtttttacttaaattaactcttgcatgtgttattttcagtactactttcacttactagctaatctcatcttattgatgtacaaatgtataaatactgctatttaggatcccaggg

SEQ ID NO: 5741 - DNA, 1074 bp, Glycine max
tttttttttttttttttaattgtttttttttttagatataataaataatatgatattgatggaatgtttaaaattaaggagtgttcaaatatcattgtccttggaaaatacacatggcaattaggtactcgacaattttgcacctgtggcacagtacatgatagaacgaaccatagcactgactaagtaagaacaacgtaagtgagagttttgggaatgggaacaactggtattattatccttaacagcttcgtctggcaaggaacctcaaattttaggcttatctcccctcaaacttcggtatagttcatctatttcaacctgataatacttgagcatattatttcttcgcttcttcattgttgaagtgaccaaatctctttccatgtcaaatggttgcgggtctaatatgacccctttgatatattcaaagcccttcagcttgtttctctcagcggtcatcttgagttcagataacacgtgcttcttcaattggtcaagagaacatagttttgagaaaggagccatgtgaccatttgaaaatgcccacttcttggtagtttcttcatttggaactactactgcaaccagagctgacttgaagctattcccataaacccagacatcttcaactattggagtgattccataaacattttccaaatgctcaagagcgatatactctccttgagaaagtttataaggttcttcttcctgtcaataatctttacaaccccattaggctgcacttcagctatgtctcctgtgtgaaaccatccatcttttatggcttcccttgttaactcagggtttttgtagtagccagtaaaaacagttttccctctcagacatatctcgccacatgaaggaaatacaagagggttgtaacccatctctggaacctcctccagcctcatttcattgtatacagatacaggaccaacagtgccaagcatgcacatttcatcaggataggcgagagtagttgacccacaagtttcagttaaaccatagccttggcatacaaaggcacaagaagtaacacgcaagaattcttccacctctgagctcaag

SEQ ID NO: 5742 - DNA, 986 bp, Glycine max
tttttttttttttttttttttttgtttttttttttttttttttttttttttttttccctttgtggagaaatcttgtaatgttttatattaattgattctgtcgtataacatatagggtgttataattggttaactagccaatactagtagtaatagggttctttaaagaaaataacatatatgatacaacatagggcaaaaacaatgataaagagatcaatggtgatggccgaaactgcctgatcactaagcttcatattccttccaccaaggcggtcaaccatgtctggaacaggttcccagttcttgagttgttgctggcgaggatcttctaatttcattttcatcttctctgcgtggcggcttgcagcctcttgagcaagggtccaatcataaaactttcgactctcttcattgctaagaacgttgtaaacctctcttaatttcatgaatttttctgaggcagttttgagaggcagggaagttgtgtcgggatgatactcctttgacaatttccgataagcaactttaatttcttctacatccgcatctggtgatacacccaagaattcgtaatgagaacctaaagaagcggtgaggaaatcaggaaagtcatcagcctgtaacatgttgttattgggtttgtgggtctgttggtgtttggtattggtagctccaatccaaccttcatcttcgttttcccaatggattctggtgtcaactccaggcccagggggtggtggtctgcgagaggcgtggaccgtgcaacgagcagtactcctcaaaaacaaaaacttgggatttccgtataatacaacctggataagaggagctgctgcgaaagccatgggagaacagaacggtaatatcacaatacctttcatttctcactcttccaccatatcacactgccttatttcatttgtggtctaccttcactcttccattttctgtggttcagctttcaaactgccttgtcacccgcc

SEQ ID NO: 5743 - DNA, 2425 bp, Glycine max
gaggcgagtttttttttttttttttttagcgtgccacgggcatacgagggttgacaacatttatactttcttcactcgaaatggattgttcattctcgtagtcatacacacacaaacacacacatatatagactttgacaattaggtaatattatggttcagcacttgctagttgctgctgcataatacctcacgcaaaatactagagcattgagcttctaggacaatatatcgatgggggttgtggaacggaaataactggttacagggtactactaaataggcatatccgtgtctagaatttagaaacctcagaagttatgcttttttccctttcaaactttggtatagttcatctatttccacctgataatacttgagtagtttgtttcttttcttctttagtgttgcagtcaccaaatctctttccatgtcaaattcttgcggttctaatatgacccccttgatatgttcaaatcccctcagcttatttctctcagctgtcaacttgagctcagatagcacatatttctttagttgatcgagagagcagagtatggggaaagaagctatgtgaccatttgaatatgcccacttattggcaacctcttcatttggaactactactgcaaccagcattgatttgaagctattcccataaacccagatatcttcaactataggagtgaccccataaacattttccagatgctcaagtgctatatactctccttgggaaagtttaacaagattcttcttcctgtcaataatcttaataacaccattaggaagcatttctcctatgtcccctgtgtgaaaccatccatctttaatagcttcctttgttaactctggatttttgtagtaaccagtgaaaacagttttccctctcacacatatctcaccacatggaggagtttcaagaggattgtagcccatctctggaacctcctctagcattatttcattatatatggatacagcaccaacggtaccaagcatgcacatttcgtcgggaaagccaagagtagttggtccacatgtttctgtcagaccatagccttggcatacaaaggcacaagtagtgacacgcaagaattcttccacctctgggctcaaggctgccccaccagatattattagtcgaacacgacccccaagcctagctttgacctttctgaaggctaataaatcggctaaacgtgatgcttgtctatgtttgtatccttttttcatccaaccaagtttgtagttgtagagcatgccaaaaactgttctcctcactggattgagttcttccactgctttcttgatcccttcatagactttttcgaaaacccgtgggacaccagcaaatagtgttggctttaactccattaaatcatccctcaacgcgttcagatccccatgatagtatccaacagatgcacccttacggaaaaagtactcctcaatagtgcgatcaaggatatgagccaagggtaggaatgataaatacacatcatccacggtcatcttgtcttcaaattgttccatgaaaagatccattcctcttactaaagccgttacgttctcattcgttaaaacaacacctttagggtctccacttgtcccactagtgtacattattgtgcaaatgtcatgagcctgaggaggaaaagtactttttgggttttcttttcccaagtgcaagaagtcatgccacgaatatggcttaattccaattgcggtggctttagctttctcttcctctgttaatgaagtgaagcacaccatggctttcagtcgctttgaagatttacattcaggatttaaaagctctttaaccttcttatcttggacgaacacaaaatctacttctgcatgatctatgataaaatttacagcaccaggcccaagggtgtcatagagaggcacacaaacaaagctttgagcagaacaagcctccattgccacaatccattccgggcaattagatccataaattccaattttagtgcctggttcggcaccagatgctcgtaaagcagaactcatatgcagaacttcatcataaacttccttatatgtcttccaaacatagggtccaatcttttcatcaacaattttacgctttcccagcatacgattattaggatgatttttgacagacacacagaaaatatcccaagtggtactgaaatcaggatccattggaggaaattcattttctgagaggaggttacggtacacaggaccaacagaaaggttgccatttttaccttcccttccttcctcaaccttaactgaaaaagccttcattctcctttgttatgaaaaacctcgctgctttgtctgcacttcgtgttgaaataagatagaagtcatacatacgataagtttgattatttgagggtggtatccccttctgtcgtcttctagctga

SEQ ID NO: 5744 - DNA, 829 bp, Glycine max
tatatatatagcagtacttgtttacaacattttaactttatcaaactttcggggtaacttagcgtaagaatcctgaaattattatctggccacctattctctaatctaattcatggacttgatttcattccgggtgcaaaaattgattttatattcaacatgcctgtaggctgtagcgtgccgcgggcatatgaggattgacaacaaacatactttctccacgcgaaatgaattgttctcgtatatatagactttgacaattaggtaaatatcatggttcagcagttgctagttgctgcataatacctcacacaaaatactagcattgagcttctaggattatatatatagatgagagttgtggaacggggttactgggtactactaaataggcatatccgtgtctagaatttagcaacctcagaagttatgcttttttccctgtcaaactttggtagatttcatctatttccacctgataatacttgagcagtttgtttcttttcttcttcagtgttgcagtcaccaaatctctttccatgtcaaattcatgcggctctaatatcacccccttgatatgttcaaagcccctcagcttattcctctcagctgtcaacttgagctcagatagcacatatttcttcagttgatcaagagagcagagtttggggaaagaagctatgtgaccattcgaatatgcccacttattggcaaattcttcatttggaactactactgcaaccagcattgacttgaagctattcccataaacccagatatcttcaactatagggagggattccataaacattttcaagatgctcaaggg

SEQ ID NO: 5745 - DNA, 767 bp, Glycine max
tattatgttgttggaccgattatgtattcataactatagtcatattcatttgtagtacaaaaaaataactatgtctattaagtaatgtacaattgttatgacttgaattgattcatattcttaatcatgaaataatgatgtactcaatatataaaacgatttaatcattttgccctttcgagcggccgcccgggcaggtacgcggggatatttatctgcgacttggaggctagggtttccggattcttgcgttttaatctttgcaattcaaaagcatggggcactccaatgtgtggaactctcatccaaagaactacggacctggttctcgcacctgccgtgtgtgtgggaatcctcatggattgatcaggaagtatgggcttatgtgttgcaggcagtgcttccgtagcaatgccaaggaaattggcttcattaagtatcgctgaaggattagtgtccaactgccccattcggtttggattcttgcattaggctgggttgattttactgtctgaagaacctaagaatttttgtgacatttagtgaagttaattatcaaaactcaatttgtggaactaagaatatttttgttttttatataattgttttgagctatctacatctttctccgtgagccatcattctgcagttcttttccttgtgtatgctctctcactttgaccatgatgggaaagccatcatcgactcgactccatacaatgctatacttttaaatgttaggtctgattgtttcttaacctaactgc

SEQ ID NO: 5746 - DNA, 815 bp, Glycine max
  misc_feature (677)..(677): n is a, c, g, or t
aattccgcagtttatagggaggacttctgccaactcaattaatagtactttaccaaacgcgcttttcccaagaaaatattagatagtttcaaacctctatggtctctacggtttatgaaaaagaatactcaattacatgtaatgtggagattaattggggccatagtagtcagggatacgtaatagtttctccctcttagagggaaatcacggttgggaaaacatcaataaattttccaccacatgcttctactcctactaggctaatactaacactcgtgtctcctcggaggaaaaaaatggaaatatcttttccttggattctggtggccacaatggtcatggcaatgcggccactttcatttcgcataaaagcaaaccaactttcttacgactactacaaattttcatgcccaaacttggaaagcatagtcaagagtgagttgctaagcttattcttgacagatgctactgcaccagctgcatttctcaggctcatgtttcatgactgccaagttcaagtaaatgtgtttcttctctctttttgtcccttatatactttgctcttcacaggcttgcttcaccaactagcattattgcagaacattttcaagacaaacccaaccgtgttcttgtttcattaattcaagatttatatataaagccttgttgttgtntgtgtttattttcatgcagggatgtgatgcctcaattctgttggactccaactacctagctcacagtcacagctctgaaatgatatcttcaaggaactttggcatcagaaagcgcgaaacgatcggccaaatgaagtc

SEQ ID NO: 5747 - DNA, 2192 bp, Glycine max
ctaagtacggcaatatcatatggagtgggaaaataacaggaagacagataaagagtggcttagtccaaaacctcacacgactccctttgttgcgttgtgtttcctttcgccgaaaccctcgctcgcaacttctacagaatccctttcaccatggatattgaggaggacatccgttctttacagctcgattcagcagaagacaataatggggtggtaaatgcagaggatggaaggccagaagaagttgagaaatctgataagatggatgaagatccaaagcaggatgttgaggctgagccaaaggctgttgaggctgagccaaaagtgaaggataaggaggttccttctgttcaagatgaagaagatgaaccagagatgacaaaaagacacttgaatgttgtttttattggtcatgttgatgctggtaagtctacaactggaggccagatacttttccttagtggtcaagttgatgagcggactatccaaaaatacgagaaagaggctaaggacaaaagtcgagaaagctggtatatggcttatataatggacacgaatgaggaggagagggtaaagggaaagacagttgaagttggaagagcacattttgagactgaaacaacaaggtttactattttggatgcacctggtcacaaaagctatgttcctaacatgattagtggtgcatctcaagctgatattggagtgttggttatttctgctcggaagggagagtttgaaactggatacgagagaggtggacaaactcgtgaacatgtccagcttgcaaaaacgctgggtgtgtctaagcttcttgttgtcgtcaataaaatggatgagcctacagtgcaatggtcgaaagaaaggtatgatgaaattgagtcgaagatggttccatttttaaagcaatctggatacaacgtaaaaaaagatgtcttgtttttaccaatatctggtctaatgggtgcaaacatgaaaacaagagtggataaaagcgtttgtccatggtggaatggaccttgcttatttgaggcacttgacgctattgaagttccactgcgagatcccaaaggtcctttcaggatgcctattattgacaaattcaaagacatgggaactgttgttatgggcaaagttgaatctggcagtgttcgtgagggagattccttgttggtcatgccaaataaggatccagtgaaagttgttgccatatttattgatgaagatcgtgttaaacgtgctggacctggtgaaaatttacggattagattatctggtgttgaagaagaagacatattgtctgggtttgttctatctagtgttgctaatccaataccagcagttaccgagtttgttgctcagttggtgatccttgaattgctagacaatgctatttttactgctgggtacaaggctgttctgcacatccactctgtggttgaggaatgcgagattgttgaactcttgcagcaaatcgatacaaagacaaagaagcctatgaaaaagaaagttttgtttgtgaagaatggagctgttgtagtgtgccgtgttcaggttaataactctatttgcatcgagaagttctctgattttccccagcttgggaggttcactcttcgcactgaaggaaaaactgttgctgtgggaaaagtcactggtctgtgaatttgtaacaattttgacttgaggacgggaattcctgcacaaatatagtggagtggcagctgaggcataattgacagcatcaagtttaccatatattcatttcggtatttattttgcttttacttggggtagtattcagtgaagagttatttgttgccgctggtgtccatgatgtacttgtatacggccttacaaggcctggctgcttcagtattttgcggttggctgcttccaaccgtgctactcgtgagatataatttgaaaatggatggttttaaatcaatctgccttattagctgtggaatctgatgactattttagcccaacagcggttaaacaaatttcctagttgtagttgactagcatatttaattctgatagtgatattgttttaatgaatcatgttgcttagtaaacgtgatggaattttgctgaactggaaatttgaaagttgggttcaccggcctgtttatgatttgataataaatttatttgtcaagacagaacttatgctctgtggctcaggg

SEQ ID NO: 5748 - DNA, 2114 bp, Glycine max
tacctaccatttcctcactcacacactcatcatcatcataacccattcccctttcgccacttgaaccaaaacctcttccacctttatcttttccttcactcttcgcttcaatattatgacggaggatcggaacgtgcggaagacacgtgtggtcgacctggtcctcgactgtgtcatcccttacatcgacgaccccaaggaccgcgacgccgtctcacaggtctgccgacgctggtacgaactcgactccctcactcggaagcacgtcaccatcgcgctctgctacaccaccacgccggcgcgcctccgccgccgcttcccgcaccttgagtcgctcaagctcaagggcaagccccgagcagcaatgttcaacttgatacccgaggattggtgaggccacgtcaccccatgggtcaaggagatttctcagtacttcgattgcctcaagagtctccacttccgccgtatgattgtcaaagattccgatcttcggaatctcgctcgtgaccgcggccacgtgcttcactctctcaagcttgacaagtgctccggtttcaccaccgatggtcttttccatatcggtcgcttttgcaagagtttaagagtcttgtttttggaggaaagctcaattgttgagaaggacggagaatggttacacgagcttgctttgaataatacagttcttgagactctcaatttttacttgacagatattgctgttgtgaagattcaggaccttgaacttttagctaaaaattgccccaacttagtgtctgtgaaacttactgacagtgaaatactggatcttgtgaacttctttaagcatgcctctgcactggaagagttttgtggaggcacctacaatgaagaaccagaaaaatactctgctatatcattaccagcaaagttatgtcgattgggtttaacatatattggaaagaatgagttgcccatagtgttcatgtttgcagccgtactaaaaaaattggatctcctctatgcaatgctagacacggaggatcattgcatgttaatccaaaagtgtccaaatctggaagtccttgagacaaggaatgtaattggagacagagggttagaggttcttggtcgttgttgtaagaggctaaaaaggcttaggattgaaaggggtgatgatgatcaaggaatggaggatgaagaaggtactgtgtcccatagagggctaatcgccttgtcacagggctgttcagagcttgaatacatggctgtttatgtgtcggatattacaaatgcatctctggaacatatcggaactcacttgaagaacctctgcgattttcgccttgtgttgcttgaccacgaagagaaaataactgatttgccacttgacaatggggtgagggctctactgaggggctgtaacaagctgaggagatttgctctatatctcaggcgtggcgggttgaccgatgtaggtcttggttacattggacagtacagtccaaatgtgagatggatgctgcttggttatgtgggggagtctgatgcagggcttttggaattctctaaagggtgtcctagtcttcagaaactagaaatgagagggtgttcatttttcagtgaacgtgcacttgctgtggctgcaacacaattgacttctcttaggtacttgtgggtgcaagggtatggtgtatctccatctggacgtgatcttttggcaatggctcgccccttttggaacattgagttaattccttctagaaaggtggctatgaataccaattcagatgagacggtagttgttgagcatcctgctcatattcttgcatattattctcttgcagggcagagatcagattttccagatactgttgtgcctttggacactgccacatgcgttgacacctagaggccagagctgtgtatataccatttttcttctcccctttcatatgttgtttctatgtttctctgctctatttctagttcattttagacaaattagtcttgtaataagcaagtgttttcatttgtaattctgaaacactacttcccctaacgcaattggctcccttcaaaactcaacattctcaattttgtaaataaaaagcaagagttgcccccaaaaaaaaaaa

SEQ ID NO: 5749 - DNA, 2066 bp, Glycine max
aaaaacctctgcaccttttcttttcactctcagtctccgatccaatatgacggaggaacggaacgtgcggaagacacgtgtggtcgacgtggtcctcgactgcgtcatcccttacatcgacgaccccaaggaccgcgacgccgtttcccaggtgtgtcgacgctggtacgagctcgactcgctcacccgcaagcacgtcaccatcgcgctctgctacaccaccaccccggctcgcctccgccgccgcttcccgcacctcgagtcgctcaagctcaagggcaagccccgagccgcaatgttcaacttgatacccgaggattggggcggacacgtcactccctgggtcaaagagatttctcagtacttcgattgcctcaagagcctccacttccgccgcatgattgtcaaggattccgatcttcagaatctcgctcgtgaccgcggtcacgtgcttcacgctctcaagcttgacaagtgctccggtttcaccaccgatggtcttttccatatcggtcgcttttgcaagagtttaagagtcttgtttttggaggaaagctcaattcttgagaaggacggagaatggctacacgagcttgctttgaataatacagttcttgagactctcaatttttacttgacagacattgctgttgtgaagattgaggaccttgaacttttagctaaaaattgccccaacttagtgtctgtgaaacttactgactgtgaaatactggatcttgtgaacttctttaagcatgcctctgcgctggaagagttttgtggaggcacctacaacgaggaaccagaaagatactctgctatatcattaccagcaaagttatgtcgattgggtttaacatatattggaaagaatgagttgcccattgtgttcatgtttgcagccgtactaaaaaaattggatctcctctatgcaatgctagacacggaggatcattgtatgttaatccaaaggtgtccaaatctggaagtccttgagacaaggaatgtaattggagatagagggttagaggttcttggtcgttgttgtaagaggctaaaaaggcttaggattgaaaggggcgatgatgatcaaggaatggaggatgaagaaggtactgtgtcccatagagggctaatagccttgtcacagggctgttcagagcttgaatacatggctgtttatgtgtctgatattacaaatgcatctctggaacatattggaactcacttgaagaacctctgtgattttcgccttgtgttgcttgaccatgaagagaagataactgatttgccacttgacaatggggtgagggctctactgaggggctgtgacaagctgaggagatttgctctatatctcaggcgtggcgggttgactgatgtaggccttggttacattggacaatacagtccaaatgtgagatggatgctgcttggttatgtgggggagtctgatgcagggcttttggagttcgctaaggggtgtcctagtcttcagaaacttgaaatgagagggtgtttatttttcagtgaacgtgcacttgctgtggctgcaacacaattgacttctcttaggtacttgtgggtgcaaggttatggtgtatctccatctggacgtgatcttttggtaatggctcgacccttttggaacattgagttgattccttctagaaaggtggctacgaataccaatccagatgagactgtagttgttgagcatcctgctcatattcttgcatattattctcttgcagggcagagatcagattttccagatactgttgtgcctttggacactgccacatgcgttgatacctagaggccagagctgtgtatatataccagttttcttttgtttttcttctcccctttcatatgctgtttctatgttcctgctctatttgtagttcattttagacaattagtcttgtaataagcctgtgttttcatttgaaattctgaaacgcttcccctaacgctattggctcccttaaaaactgaacattctcaattttgtgaataaaaagcaattcttccccccttttggatctaaaaaaaaaaaaaaa

SEQ ID NO: 5750 - DNA, 842 bp, Glycine max
  misc_feature (2)..(3): n is a, c, g, or t
  misc_feature (6)..(7): n is a, c, g, or t
  misc_feature (22)..(23): n is a, c, g, or t
  misc_feature (32)..(32): n is a, c, g, or t
  misc_feature (40)..(40): n is a, c, g, or t
  misc_feature (44)..(44): n is a, c, g, or t
  misc_feature (50)..(50): n is a, c, g, or t
  misc_feature (59)..(59): n is a, c, g, or t
  misc_feature (73)..(73): n is a, c, g, or t
  misc_feature (90)..(90): n is a, c, g, or t
  misc_feature (117)..(117): n is a, c, g, or t
  misc_feature (836)..(836): n is a, c, g, or t
gnnttnnccccaaaaccaaatnngattggaancccttttncccncccagntaaaattgnccatggccattttntaaaacgaaggaaggcnttaagggagaatgagcattcccctggntatgctaaaaatttttttttttttttttttagacgaaggaaaactcgttagaaaattgcaacacttgaaggaaaggaagagaaactagtaattaatactataatcagtgcttaaacaaaacgaaattgcaaattctaatatcctcaaacacaaaacatttctgcaaaatcaaaagccgaagatgacaataaaaactgagagaggtagagagagtgtgtgaaatggcaaattctaatattccatctagaacagagaggttccttttcccttcttgtcaccaccgatctcaaaatgcttgcacctcttgatagcgtgctgcgagacatgcttgcatccctgacactggagcctcaacacaattttcttggtggttttggcctttttgtggaaaacaggcttagtctggccaccgtaaccggactgtttgcggtcataacggcgttttccctgagcggcgatgctgtccttgcccttcttgtattgggtgaccttgtggagcgtgtgcttcctgcactccttgctcttgcagtaggtcttctttgtcttcggaacgttcaccattgctgcggagatcaaggcggaagcacagtatatggttcaatggcgaattagggctagttaaatgcgctttctattaggtcgggccttccagttacatacttgtccgggtcgaattttgtcgcgtccgcgtatgacgcgtgggtcgaccgcgggaattnccggac

SEQ ID NO: 5751 - DNA, 722 bp, Glycine max
tccccctagcgccgccccttttttttttttttttttttttttttttttatcttttcaaggaaaggaagagaaactagtcattaatactataatcagtgcataaacaaaaacaaaattgcaaattctaacatccccaaacacaaaatacttctgcaaaaattaaaagccgaagatggcaatcaaactgagaaaagtacagagagtgtgtgaaattgcaaattctaatattccatctagaagagagatgttccttttcccttcttgtcaccaccgatctcaaagtgcttgcacctcttgatagcgtgctgcgagacatgcttgcatccttggcactggagcctcaacacaattttcttggtggttttcgcctttttgtggaaaacgggcttggtctggccaccgtaaccggactgtttgcggtcataacggcgttttccctgagcggcgatgctgtccttgcccttcttgtattgggtgaccttgtggagcgtgtgcttcctgcactccttgctcttgcagtaggtcttctttgtcttcggaacgttcaccattgctgcggagatcggttgagcaaaccaaagagcggagccaaggtgaaagcacaatgtctagggttcaatggcgaattagggttagttaaatgctctttcttttaggttgggccttccagttgcatatagagagtcattgttgttcccccttctgtcgtcttctcgcagccg

SEQ ID NO: 5752 - DNA, 2913 bp, Glycine max
gattattaatcgtatcagtgaaagaagtaagaagagagagaagtgaagttagtagtgtaaatgtacaaactctcctctattcagtgtgtggcgccgtttacgatctcactctgcactctctccttctcatcctcttctcttcgcttctctgttcgtgccacttcttctcgagcaatggcatctcatattgttggttatccacgcatgggacccaagagagaacttaagtttgctttggaatctttttgggatggaaagagtagtgctgaggatctgcagaaggttgctgctgaccttaggtcagccatctggaagcagatggctgatgctggaataaagtatattcctagcaacactttctcatactacgatcaagtactggacacaacagccatgctcggggcagttccatctagatataattggaatggtggggagattgggtttgatgtttacttctcgatggcaagagggaatgcatctgtaccagctatggaaatgaccaagtggtttgacaccaattaccattacattgttcctgaattgggtcctgatgttaagttctcctatgcatcacacaaggctgtcgatgaatttaaagaggccaaagttctgggagttaatactgtacctgtgcttgtgggacctgtatcctacttgttgctgtcaaaaccagctaagggtgttgagaagtcattttcccttctttccctaattgacaagatccttcctgtctacagggaagttgtggctgaactgacggcacgcgtggtgctacttggatccagtttgatgaacctacccttgtgaaggatctcaatgcccaccagttacaagcatttacccatgcctacgcagagttagagtcaagtttatctggtttgaatgttctgattgagacatactttgctgatgtccctgctgaagcgtacaaaacactcacctctttgaaggctgttactgcatatgggtttgacattgttcgtggaacaaagacccttgatttgataaagcaaggatttccatctggaaaatttctttttgctggtgttgttgatggaagaaatatttgggccaataattttgcatcttctctgaacacccttcaggcacttggagacattgttggaaatgacaaggttgtggtttccacgtcgtgttctcttcttcacactgcagttgatctggtgaatgagaccaaattggaccaagagattaagtcttggcttgcatttgcagcacaaaaagttgttgaagtaaatgccttggccaaggcattgtctggacagaaggatgaggttttcttttctgctaatgctgctgccttggcttcaaggaagtcctccccaagggtgataaatgaggctgtccaaaaagccgctgctgctctgaagggctctgatcatcggagggccacaaatgttagtgccaggttggatgctcaacagaagaaattgaatctttctgttcttccaacaactacaattggatctttccctcaaactgccgatcttagaagagttcgtcgtgaattcaaggctaacaagatctccgaggaagattatatccgtttcattaaggaggaaatttacaatgttgtaaagctccaggaagaacttgacattgatgtcttggtgcatggagagcccgagaggaatgacatggttgagtactttggagagcaattatctggctttgcatttactgccaatgggtgggtgcaatcatatggatcccgctgtgtcaaacctcccatcatctatggtgatgtgagccgtcccaagcccatgacagttttctggtcttcaactgctcaaagtttgaccaaacgaccaatgaagggaatgcttactggccctgttactattctgaactggtcctttgttagagatgaccaaccaagatttgaaacatgttaccagattgctttggctatcaaggatgaggttgaggatcttgagaaagctggtattactgtcatccagattgatgaggctgctctaagagaaggtttacctctgaggaagtctgaggaggctttctatctaaactgggctgttcactcatttaggattaccaactgtggtgtggaggacactactcagattcacactcacatgtgctactccaacttcaatgacatcattcactcaatcatagacatggatgctgatgtgatcaccattgagaactccagatcagatgagaagttactttcggtcttccgtgagggagtgaaatatggtgccggcattggtcctggcgtttatgatattcactcacccaggattcctcccacagaagaaattgctgacaggatcaacaagatgcttgcagttcttgaaagcagcattctctgggtcaacccagattgtggccttaagacacgcaaatacactgaggtcaaacctgccctcaccaatatggttgctgctgccaaacttattcgcaaccagttatagctagtaccaagtgagttgagaatgagccaataaggtcatccatgtgagataatgtactcatgttgaaaatccgaatgctttgtatttccaataatgtcttcataaaagattttgtcctttcttctcccaaatcatcttttctgctcttgtaggtaaggcttttcagtatatggttctgcttatgaataaactgttttatgtgctattttgtttttctggtttatcttacacatttgattgaactgtgggagaattgttttatttttattttttgaactttggaggagtgctattgtcatgctcagaaccctcagaaggatatccttgcaagctatagtaatagggtctgtttctttttgtggatttggaggtgtaagtagctttattctatctcatgatctccaaacatttgttgaatattatagacttaaatatgtttttgattcttact

SEQ ID NO: 5753 - DNA, 1437 bp, Glycine max
  misc_feature (1396)..(1396): n is a, c, g, or t
  misc_feature (1415)..(1415): n is a, c, g, or t
acaagatccttcctgtctacaggtatggtcctaaagtagttagacgttcttgaatcatatacttctttccctaattgacaagatccttcctgtctacagggaggttgttgctgaattgaaggcagctggtgctacttggatccagtttgatgaacctacccttgtgaaggatctcaacacccaccagttacaagcatttacacatgcctatgcagagctagagtcaagtttatctggttttaatgttctgattgagacatactttgctgatgtccctgctgaagcatacaaaacactcacctctttgaaggctgttactgcatatgggtttgatattgttcgtggaacaaagacccttgatttgatcaagcaaggatttccatctggaaaatttcttttcgctggtgttgttgtcagctacgtaggccccccccccagtcttgcatcttctctgaacacccttcaggcacttggggacattgttgggaatgacaaggttgtggtttccacgtcctgttctcttcttcacactgcagttgatcttgtgaatgagactaaattggaccaagagattaagtcttggcttgcatttgcagcacaaaaagttgttgaagtaaatgccttggccaaggcattgtctggacagaaggatgaggtttttttttctgctaatgctgctgccttggattcaaggaagtcctccccaagggtgacaaatgaagctgtccaaaaggccgctgctgctctgaagggctctgatcatcggagggccacaaatgttagtgccaggctggattctcaacagaagaaactgaatcttcctgttcttccaacaactacaattggatctttccctcaaactgccgatcttagaagagttcgccgtgaattcaaggctaacaagatctccgaggaagattatatccatttcattaaggaggaaattaacaatgttgtgaagctccaggaagaacttgacattgatgtcttggtgcatggagagcctgagaggaatgacatggttgagtactttggagagcaattatctggctttgcttttactgccaacgggtgggtgcaatcatatggatcccgctgtgtcaagcctcccatcatctatggtgatgtgagccgtcccaagcccatgactgttttctggtcttcaactgctcaaagtttgaccaaacgaccaatgaagggaatgcttactggccctgttactattctgaactggtcctttgttagagatgaccagccaagattcgaaacatgctaccagattgctttggctatcaaggatgaggttgaggatcttgagaaagcaggtattactgtcatccagattgatgaagctgctctaagaaaggtttacctctgaggaagtctgaggaggctntctatctaaactgggctgntcactcatttagattaccaact

SEQ ID NO: 5754 - DNA, 835 bp, Glycine max
actcttcttttttgttacaatttctcttcaattttacttctttagccttacaatgacttcttcagtcagacgcggactccactcttctttctgtgtgtattgcaacaacaaataatcaggtagaaccaccttcaagttctgatttttatcctttctcatattggacatacaaggacggctctaattactgttccagctagtgttttgtgatggccatggatgcaaaaggcataacttgggttggaaacatattccagaagtttgaggacatttatgtggacgtggaagacacaatgttggaggaaaccgttaagtacatagggaatcagatgcagactgttggggaaagtgttaaaaagatctattcagatgtcatgcaagatttacttcctccgcctttatatgatttggatgaaacatcagcctctgagttgccaatagatcaatatattgacgctggattctctaataagtcatttcaaggttccaagaaaataactgtaaaggatgataccaaccaaacaactgaggattcaaggatcaaacatgatgttgataatgatgtaatccatgctaaatccggtgattctgatgctttgttcacatcagcttcttgcaactctgtcaaagggaatagttttatttcacatgcaagacaatacgttggtagcacagatattagatcaaacctcgggggtgatgaaaatcgacaaaataaaagcatacctggttccaagacagtcagtgaaatcactttgtcaaaagcagatacatgcagtacatcacaatcatgtgaactctcccgggtaaatcaaaatcatgccgccactgtttc

SEQ ID NO: 5755 - DNA, 601 bp, Glycine max
ctcgagcccgagccgcgagataataatcgtgttggatcgagtcctccgtcttaccggtgtcaacgaggtggcggagaatggaaaacgccgacgttttcttgggcttacacgacttcctcgagcgcatgcggcaaccctccgccgctgaattcgtcaaagcaatcaaaagttttattgtttcgttttcaaacaatgctcctgatcccgatagggacagtgctgcggttcaagcgttcctcgcgaaaatggaagcggatttcagggctcatccactttgggctggttgctccgaagaggaacttgaaagtgccggtgaaggacttgagaagtatgttatgacaaagttatttgctcgtgtatttgcttcacttccagatgatgtaaaatttgatgaccaactttctgagaagatggctttgattcaacaatttattcgacctgaaaatttggatatcaagccagtatttcagaatgaatcatcatggttgcttgcacagaaagaattacagaagatcaacatgtacaaggcacccagggataaacttgtctgtattctgaattgttgcagggttattagcaacttgctacttaatgcttcggt

SEQ ID NO: 5756 - DNA, 1193 bp, Glycine max
  misc_feature (1100)..(1100): n is a, c, g, or t
tcgagtcagctacgtatggcccccccccccgagaggttagtttgggagcactagagagattagtcgcctcgtcctcgagccgattcggctcgaggctgaatcgttcggtgcccgttgatgcactgcaaaggataatgatgcgagcacctcaactatcggatttgggtattggatcacttgtccatgatccagaatcggaggcctacataaagcttaagaataccattctcaagtgcaagtccataaccagtttgtctgggtttttggaagttgctcctcattgtcttgcagctatatatcctatttgcccgaacttaacatctttgaacttgagctatgcagcaggcattcagggaagtgctctggtaaaactaattcatcactgtgttaaacttcagcgcttatggataatggattgcattggagacaaaggactaggtgttgtagctacgacatgtaaagatttgcaagaattgagggtttttccatctgttccctttggggatccagcagctgtcacagaaaaagggctggttgcaatatcaatgggctgccctaagcttcactcgttactctacttctgccaccagatgacaaatgctgcactcataacagtggctaagaactgcccaaattttattcgattcaggttgtgtatccttgatgcaacaaaacctgaccctgatacaatgcagccactggacgaaggttttggcgcaattgtgcagtcttgcaggcgactcaggcgcctatctctctcggggaaattgactgaccaggttttcctttacataggaatgtatgctgagaaacttgaaatgctgtctattgcatttgctggggatggtgacaagggaatgctgtatgtgttgaatggatgcaagaagcttaggaagcttgagataagagactgccccttttggcgacatggcacttctgacggacgtacggaagtatgaaaccatgcgatccctttggatgccctcctgtgaagtgactgtcgggagcctgccagttgcttgccaagaagatgccaaggttgaatgtgggagatcttcaatgaaaacgagcaagaagattgtagtctggaagatgggcangaggtagaagaagatgtatttgtatcgtacattggctgggaaaaggaaagatgcaccagaatatgtatggactctgtaggtgcattttttaag

SEQ ID NO: 5757 - DNA, 1761 bp, Glycine max
ttgcccacgcgtccgtacggctgcgagaagacgacagaaggggggttgctttcacttcttcctctctgcttcttcttcttccttgccctctctcgctattgagcttttctttttaacacggaatatgagtgacacaaaagggttttgaggctttctatcactctaaagctcttagctcattcacctcttgggtggtgtggtctattatgtaaattaccatttgtgcaattttttctcagatctatccaacttctcttttttatcctttattctgtttgcaaatcgccatcatcaccatttgatttgcaagaccataatttttctgctttggttttcccctcttccacatcatttttcaattttttttcctctgggtgttttcttcctgagaaaattttgttctttttggctaccctccaagcagatcctacttgggaaaagtaaaattttcagttttttttttatcagtaccctcttttcagaccttaccctcatgttctagatttgaagatattgtcattacctcactcttatttgtgccaagatctgctccccctttttcttcttttagatcttggtctgttccatgatgtagtagtacttcaaagttgagagctttacctttctggggttttgttttatttatttttcatcctcccctttggagtatgaaaattttcctggaaaattggggagtttggatcactgagtgagagaaaagaagagagaaaaaaaagatgatgaattatttccccgacgaggtaatagagcacatatttgactatgtggtgtcacacagtgacagaaatgctttgtctttggtgtgcaaaagttggtacagaatagagaggtgtacgaggcaaagggtgttcatagggaactgttactccatcactccagagaggttgatccagaggtttcctggtctaaagtctttgactttgaagggaaagcctcattttgctgacttcagtttggtgccttatgattggggtggctttgtgcatccatgggttgaggcactggccaagagcagggttggtttggaggagcttaggctcaagaggatggtggtctcggatgagagcctggagctactttctcgttctttcacacacttcaagtctttggttcttgttagctgtgaagggttctctaccgatggccttgctgctatagctgcaaattgcaggttccttagggagctggatctgcaagaaaatgaagttgaggatcacaaaggccaatggctaagttgctttcctgataactgcacatcacttgtttctcttaattttgcttgccttaaaggagaggttagtttgggagcactagagagatttgtggccagatctcctaacctgaagagtttaaagctgaatcgttcggtgcccgttgatgcactgcaaaggataatgatgcgagcacctcaactatcggatttgggtattggatcacttgtccatgatccagaatcggaggcctacataaagcttaagaataccattctcaagtgcaagtccataaccagtttgtctgggtttttggaagttgctcctcattgtcttgcagctatatatcctatttgcccgaacttaacatctttgaacttgagctatgcagcaggcattcgagggaagtggctctggtaaaactaattcatcacttgtgttaaacttcagcgcttatggattatggattgcgttggagtccattggagacaagactatgggtggtgtagctacgacatgtaaagatttg

SEQ ID NO: 5758 - DNA, 1417 bp, Glycine max
taaagctgaatcgttcagtgccctttgatgcactgcaaaggataatgatgcgagcacctcaatcagcggcgttggccccccccccccccttccatgatccagaatcaggaggcctacataaagcttaagaataccattctcaagcgcaagtccataaccagtttgtcaggatttttggaagttgctcctcattgtcttgcagcaatatatcctatttgcccgaacttaacatccttgaacttgagctatgcagcaggcattcagggtagtgatctgataaaactgattcgtcactgtgtgaaacttcagcgcttattgataatggattgcattggagacaaaggacttgatgttgtagctacttcatgtaaagacttgcaagaattgagggtgtttccatctgttccctttggaaatccagcagccgtcacagaaaaagggctggttgcaatatcaatgggttgccctaagcttcactcattgctctatttctgccaccagatgacaaatgctgcactcataacggtggctaagaactgcccaaattttatccgattcaggctgtgtatccttgatgcaacaaaacccgaccctgatacaatgcagccactggatgaaggttttggcgcaattgttcagtcttgcaggcgactcaggcgcctatccctctcggggcaattgaccgaccaggttttcctttacataggaatgtacgctgagaagcttgaaatgctgtccattgcatttgctggggagagcgacaagggaatgctctatgtgttgaatggatgcaagaagcttaggaagcttgagattagagactgcccttttggcaatgtggcacttctgacggacgtagggaagtatgaaacaatgcgatccctttggatgtcgtcctgtgaagtgaccgtcggagcctgcaagttgctagcgaagaagatgccgaggttgaatgtggagatcttcaatgaaaacgagcaagaagattgtagtctggaagatgggcagaaggtagagaagatgtatttgtatcgtacattggctgggaaaaggaaagatgcacctgaatatgtatggactctataggtgcattttttaggtcatttaatttcttgttattcagaagtttgtactttgcttttagggctgactgattaatgcaattttagccgggtgtagtgttttgtaacttgcattttgctagttttatacatatgctagattgctttttctcctagttattattccataatgccacttcttactacgtatattattagagtgggtatttcgccttttatctaaaaaaaaaaaaaaaaaaaaaaaaaaaaaaaaaaaaaaaaaaaaaaaaaaaaaaaaaaaaaaaaaaagaaaaaaaaaaaaaaaaaaaaaaaaaaaaaaaaaaaaaaaaaaaaaa

SEQ ID NO: 5759 - DNA, 1399 bp, Glycine max
tcagctacgtaggccccccccccccctaagtttcttacactacgtaatactccctttatcaaacctgatatgtctccagacccactaagtggagctttaggtgtttacaagaagaattgaataacttttcccaattactagctaaataatttttatggcatttttcataaaatatccaaatgctgaaactttctccctttggcacatccaatataattcatgcatttcatttcaacattttatcatatatttttcctaagtgattttctttctagtttcaaaagtaaccgaaatgacggatcctcctaaagaacaagaacaccaggaatccatagtttcaccttccacagatgaagctttgacatcttcgaaacgtggaaggtcacgaaaaacaaagcctaccaagttcataattaaccagaaatccaataccccatcaacaccccgaagatctaaaagaataaagcatgtggcagataaaactgccaacaatgttcccgaagtatcttcatccgaggaattattgaagggacgtacagctgaaaattcacaagtagatggcaaagaagtctcttcagatatcgatgccttagtaatctacaaaagaaaaagactacctcgaaggaggtcttctggtcaaataggcaagtccccaaagaaaactgctccttcagagcctccatctgctgcaatttcaagctctactactgcatcaccccctcatcaagatcctcctgcagctacttcacccagcgctgatgctcctcatattgaaaatacaaatactgctgagccagtattgagtaaaagccttgtcgaagaggtcgagaaggtgaaccctgctccagccaatgctcaagaacaggttgcttctagtaagggtcaagaatctccagatcaagttgacccaaaggttgatgaagtctctactgggaacacctcactcgatctagaagccattaacaaaatgatcgaagatgaccctttgagtgctattgaaaatatcctgacagggaaggtttccatttgttctaagactccacaatctatcactcagtcagaacaaccaaaagttcaaggctcccctgcagatgttctgtcaaaagagctaaaagacttaatgcagatctttagcttaggtgattttgttactgactatgaacaaatgtcaaaggtcctacttattcttgaagagttgcagaagaatgagaagtttctttctcttgaacagcaagcattcataaaggccttcagactcttcttcaacaatgctgttactcaccgcaaacaatgtgatatggctggaataaagaaagtcgacttgaaccgagctaaagaagatatccttctgaaactgcaagaagttaaacatacacaggagcaaatcacatcgaccatt

SEQ ID NO: 5760 - DNA, 734 bp, Glycine max
agggtttaagagaaggctcactcatgtacaaaggccaagggttcatcaacagcttgtatcattacccttactgacacgggactacatgccattaatttgggtgacagtgggttcatcgtggttagagatggatgcaccattttcaggtcccctgttcaacagcatggcttcaattttacatatcaactggagagtggcaatggaggtgatctacccagctctggtgaggtctttacaatacctgttgccccaggagatgttgtcgttgctggaacagatggattgtttgacaatctgtacaatgatgaggtcactgaagttgttttacattcagttagagctggactagaaccccaagtaactgctcagaagatagcagtactggctcgtcaacgagcactggacaggaataggccgacaccattttctacggctgctcaagaggctgggttccgttattatggtggcaaacttgatgacataacagttgttgtgtcatacataaccggctcaacatgtgtgagtttttcgccatcttagctttgctacattttgtatattcatatttgtctacagggactgggttgccagccttgtctgtcatttttgacctgaatgcactactgcttcaaaattttatctcaaacttgaggtgcttacttgctatagtgatatatttgtatacaaaatcctgggccacgaagatgccttcatctccctctcaaaaaaaaaaa

SEQ ID NO: 5761 - DNA, 865 bp, Glycine max
ttcggggttattgttgtcgtgtatcggtcataaatggttagtggataggacatgcgagacgtcacacacgcttaccaatgctcatagtgcggtacatcagcgaggagaccccaggatgtccttgcactttagctgttctgttacaaagaaagaacaccaaataatgcagtccatgttaaccatccgtgccacccatggccttcctctgtgtctctcagggatgattcaccctcttgctctctctcacgatgtgtgtaggatagcggatcacgaccgtaggagacgcaccatgaggaagcaaaggcaaagatcactcaccagagagggtgtagtgcatgatgcggttcgagaaattcactttgtggaggtcaaaggtgagaccgatttgcatgatctctcccacactcatcacctggggttgtcagcaagagctgcttaaaatttagctgcttctccaaaattgattaatctcgctagctcctaccactttgttatgcactttatttaatttcactgtgatggactctttcgttattatatatatcatgttaattaattactagttgtctcctttgttctgtactcaattcttattttctgtaaccacatatgtggaactttttcttgtactcttactcccatgattaatatattcttcttatgatgttgcatatatgatgctagtatatgcaccttccattgtcatgtgggcacttcaattagtactcaaaatttaatctcaaaaaaaaaaaaaaaatagtctaaaaaaaaaaaaaaaaaaaaaaaaaaaaaaaaaaaaaaaaaaaaaaaaaaaaaaaaaaaaaaaaaaaaaaaaaaaaaaaaaaaaaaaaaaagaaaaaaaaaa

SEQ ID NO: 5762 - DNA, 1208 bp, Glycine max
ttcggctgcgagaagtcgtcaggtagggggttattgaagagtagggataatagaatccgtatcgtagcaaaacgcacgagttaggggcggcgatgggaggttcatcggaggatttctcggtggtggtgctggcgtcggacctcggcgtcgatgcgcgacctttcctcgaacacgatcaacagcaagaagaagagaattggcacgactgttcccagtacctctcccccgacgaggacttctccgatctcgatcagttgcaattcctccgcctccaaggctccgacaagaactccaatcgcattctccgcatcgtcggcaagtactttcccgcaactgttgtgagtgcggagcggctcaagcggtatgtgttcaacaaaatttgcagtgagttgcctgaggggcccttctgtattgcttacatgcacagcactgttcagaaggaggataattcccctggcatcaccatcttgaggtggatctatgaagaacttcctgctgatttcaaggacaggcttcagactgtgtatttcgtccaccctggctttcggtcccggctagtcatcgctactcttggccgctttttcttgagtggaggattatattggaagatcaagtatgtaagccggcttcagtacctttgggatgacataaagaaaggagagattgagataccggattttgtgaaaagtcatgatgatattctggagaatagaccactcactgattatggcattgaacctgacccctttcacttgactgggatgccttcaactacctactcatttggaaagtacgaggagagatgggcgggaaggaattatgtgtcttagtatgtgtattgtcttattacatgatgaacccaaaccttttgtacagaatgactctagtattgtatttgtatttcctatactctcatctttgagtttctttgtttgtttagttaaacttgactgtgtacgaataggaggactacatgttttctatgccataagaaacttttatgtaagttgtatgctgtgtactgcacgattatcaccttcctgtgagcttttgaaataagaaacatgcagcttgtttttactggaaaaaaaaaaaaaaaaaaaaaaaactcgagactagttctctccaaaaaaaaaaaaaaaaaaaaaaaaaaaaaaaaaaaaaaaaaaaaaaaataaaaaaaaaaaaaaaaaattttgggggggggg

SEQ ID NO: 5763 - DNA, 1053 bp, Glycine max
  misc_feature (33)..(33): n is a, c, g, or t
  misc_feature (35)..(35): n is a, c, g, or t
  misc_feature (103)..(103): n is a, c, g, or t
ccgaagagaagcgtcgcactcgtttcaccgcancngtccggcactggccgaaagaaattaaaacggcgttttcccattacgggcgcaaaaaaatacaaataanaaggctgcaagaagacgaccatcactcacactagtctctgtgaaaagcgacacgacacaacacaacacaagctttattctttttcttcgcttcttctgtacagcacccaagattgaagatgatagaccttgcgcgcgtgcagaaggagcttgtggaatgcagcaaggacgcggagggatcgggcatcaaagtcagccccaaaaacgacaaccttgttctcttgatcggcaccattcctggccccgtcggaactccatatgaagggggcattttccagattgatatcacattgcctgatgggtacccgtttgaaccccccaagatgcagtttaaaaccaaagtttggcatcctaatatcagcagccaaagtggagctatttgcctggatatcttgaaggaccagtggagcccagcactcactctgaagactgcacttctttctgtgcaagcacttctctctgctccacagcctgatgatcctcaagatgccgtggtggcacagcagtatctgaaagactatcagacatttgttaacactgctcgctactggacagaaagttttgccaaggaatcgtctcgcgggattgaagacaaggtacagaaactcgttgagatgggatttccagaagctcaagtaaggagcattttggaagctgttggtggtgatgaaaacttggctcttgaaaggttgctgtagatcatggtcaagtttaggatgacatgtctccataatatgatggaaccatatagacaaaaagtttaaattgaatatagagtcatataaatctacttggcacatcgtatagtccttttgttttactctgccttttttttctccttggatactacggtactcgactatttcctagtgattatatccgttatgaaattaaataccttattgccaaggtttctgcaaaaaaaaaaaaaaaaaaaaaaaaattaaaaaa

SEQ ID NO: 5764 - DNA, 1050 bp, Glycine max
aaaataaaagaattgtaagaaagaatacatcactcacactagtctctgtgaaaagcgacacgacacaacacaacacaagctttattctttttcttcgcttcttctgtacagcacccaaggtgagttattaattgaagatgatagaccttgcgcgcgtgcagaaggagcttgtggaatgcagcaaggacgcggagggatcgggcatcaaagtcagccccaaaaacgacaaccttgttctcttgatcggcaccattcctggccccgtcggaactccatatgaagggggcattttccagattgatatcacattgcctgatgggtacccgtttgaaccccccaagatgcagtttaaaaccaaagtttggcatcctaatatcagcagccaaagtggagctatttgcctggatatcttgaaggaccagtggagcccagcactcactctgaagactgcacttctttctgtgcaagcacttctctctgctcctcagcctgatgatcctcaagatgccgtggtggcacagcagtatctgaaagactatcagacatttgttaacactgctcgctactggacagaaagttttgccaaggcttcgtctcgtgggattgaagataaggtacagaaactcgttgagatgggatttccagaagctcgagtaaggagcattttggaagctgttggtggtgatgaaaacatggcccttgaaaggttgctgtagatcatggtcaagtttaggaagacgtgtctccataatatgatggaaccatatagacaataggttttaaattgaatagagtcatataaatctacttggaatatcgtatagtccttttgttttacttttctcctccttggaaactacagttctcgactatttcctgattattatatatatcagctatgaaattaaataccttgttgaaaagaaaactgcttcatggatgaatcgtttaattactgcattgacggtgtattaagcaggtttacgtgactgaagtggatgtaagtgtttgttgaggatgaaaggcaaaatgcattgatgatttacgtgg

SEQ ID NO: 5765 - DNA, 1451 bp, Glycine max
  misc_feature (1448)..(1448): n is a, c, g, or t
  misc_feature (1450)..(1450): n is a, c, g, or t
ggttggaatccaagtgcaatgttgaataacctttccttcctcgatggttcgcgtcggcagcttcgggatctagtgcatgtaattgttagtaaaaagtgccaaccttttggacaacctcatgaactggtgactcaggaacagcagctcatcacagccgatcttacatcaattattgttcaattgatctctactgctggtagtcttctcccctctgttaggcacaccctcacaaacgcaaatcccttggttggccagcttgaccagcttcatgggattaacctcccttttggatcagaaccaagtagtggtattaggccacaaaataacagtggaaataaactgtttgatcagtccattcagaatgatctaccaaataaattggaaatggagcaaaactacaatatggaagagcatgagccaaaagatgaagaagatgtggatgagggagagaatcttccacccggttcctacgagattttgcaattagaaaaagaagaaatcctcgcccctcacacacatttctgtacaatatgtgggaaaggattcaagagggatgcaaatctccgaatgcacatgcgtggccatggtgacaagtacaaaactcctgcagctcttgcaaaaccacacaaagaaaccgggtctgaaccaaagctcatcaagaggtattcctgcccctatgccggctgcaagcgtaacaaggatcacaagaaattccaaccactaaagaccattttgtgtgtcaaaaaccactacaagagaacacactgtgacaagagctacacttgcagcagatgcaacaccaagaagttttcagtcatggcagaccttaaaactcatgaaaaacactgcggtaaggataaatggctttgttcatgtggcacaacattttcaaggaaagacaagctttttggacacattgctctattccaaggccatacaccagctattcctttggatgaaaccaaaggaatggctgagccacctgatatccagaacagagaaagcaacaataaggtagaaagtattaacttctgttttggatcaaattcttcaagtgaaaatgtagttcaaaacatgatggatatgaaaggtaataatgatgatcccatgaattatttctcatcattgaacttcgaaggctgtaactttggggcgtttaatgaattctcccaacctccatttgaagattcagatggttgtttctcttttcccatgtcaggatcctttaattatgctcccaaatttggtggcggtgaatcaagttctgacaatctgtagtgacaatttataataatgttactctacatcatgtctatgttttctttattcccctgttaacgaataatccttttgttttgtcaaatttgtaaatccaggtaatatcatgtactcccaccatctctttatattgaaaaaaacaacttttatgtttatattttttaaaaaanana

SEQ ID NO: 5766 - DNA, 841 bp, Glycine max
gttaagcttcttcgcataagcatttcacttccccctcccatgttctcttcctcatcgcaactacgtaggcccccccccctttaattttcctctcaagtggagcattcaggttccgttgggctttcaatctgtggctggattttgatttctctgcgtttaaaatggatccaaaaggaagcttatgtgctaaaaactgcacaaggacctcttccttaacttctcctgggaatggactacaaacaaatttgtcctctgatcctccctctttctatggggtcaggattgaatcacctttcaaagaattcatccaaccctctcctccaactcaatctgtacttccaggtgaatctaatgcagatattgatatccctgaccaggaaaattgtccactgagtaactcatcacataccagtaaactccaagattggaatccaagtgcaatgttgaataacctttccttcctcgaagaaaagattcatcagcttcaggatctagtgcatgtaattgttaataaaaagtgccaaccttttggacaacctcatgaactggtgactcaggaacagcagctcatcacagccgatcttacatcgatcattgttcaattgatctctactgctggtagtcttctcccctctgttaggcacaccctcacaaacacaaatcccttggttggccagcttgaccagcttcatgggattaacctcccttttggatcagaaccaagtagtggtattaggccacaaaataacagtggaaataaactgtttgatcagtccactcagaatgatctaccaaataaattggaaatggaacaaaactacaatatggaagagcatgagcc

SEQ ID NO: 5767 - DNA, 1240 bp, Glycine max
  misc_feature (1202)..(1202): n is a, c, g, or t
gcatctccactatattacaattactactttctctctctttgtaacttgtaagcatggagtcctcaaagatctatgcttacctcttcctttgcatgctcttcctctcctccgccactcccattctcggttgtggctactgtggcaaaccccccaaaaagcacaagcctggtaaaacaccaaagacacccacagtacccgttgttaagccaccagtcacaatccctcccattgttaagccaccagtcacaatccctcccattgttaatccaccagtcacaatccctcccattgttaatccaccagtcacaatccctcccattgttaatccaccagtgacagttccacccgttgtgcttccaccaatagtgaagcccccgggttttctccctccaattcttaacccaccaagtacaccaacaccgtcgccggggaagggagggaacactccatgtccaccaccaaagtctcctgcacaggctacatgccccattgacacgctcaaactaggtgcttgtgtggatcttcttggtggcttggttcacattggcttgggagaccctgttgcgaaccagtgctgccccgtgcttcaaggcctggttgagcttgaagctgcggtgtgtctttgcaccactcttaagctgaagcttctcaacctcaacatttatgtcccacttgcccttcagcttcttgtggcttgtggcaagtctcctcctcctggttacacctgctccctctaaaccagtgaaaggattgaggaaaatatggtcaaaatcgacatgagaggatgtcgagccacactatctctcttctgtcctgattggaactgctgttgtttgttttgctattatttgaaaaaccaatttgtttttaattgagattgttgcatgtatgttttaatcctaggcaagtagcagcaaagatgcttctctgtgacatgttcaattattaatttatatgaattgcgctttaatttgttgaatatatcaggttcgtacgtgtttctctagttgtatagcatttgcttcaattgtggatctgttgctcaatctcgaatctctataaaggaaagaaaaaatcttaaccatgaactttgtgggtattgaaatcatttgtagtttttgagaaattaataaatattttacttattagggatgtctcaactttacaggtgagattatcgcttttttctttcattctagttntagttatgtaatgtcatttttatttaatctttcatatt

SEQ ID NO: 5768 - DNA, 1099 bp, Glycine max
ttttttaaatcaactcttactccgatagcttccattcaaattaaagttcatttcaattttactccctcagatgaaacatgaaaggttcagcagatactattgggggcccttcttgttcaaacattaaacacaccataaactgaaaacaaatttaaaaaagaaagccaagtaacttttgacaagggttttacacatccggcgtgtctctacttctgcatatggtgctaagtttcatggctacaaggtatgtgaaatattataaaatgaaaattgcataaacttacaaccaacagctaagaacaaatcctagaaccataaatataagccatttctgcattgatacctgatacgaagaagaagaagcaccattgcacaaattaaatccataccatgtatctctggggatatatgtgttgtaatagaaagtaacagccctgccgttataactattgattttcacactttcaggcttccagccatctaatccagatctatataggtacacataacatatctgatatgcacacggaccagttatctgaaatgtatccgaagaacagctctcaaatgtacctgaagctggatcatccagtcttggtgcatatatctgattgccataagcatccccaaaagaaatactgatctgatcccttgtatacctaggagacgaacagctagtagatataaccaccaagtaagaacaagtcccggcgttcttcatctggatatagctgacattgaaggactcagcggcgtgaggcagaagagaaacagattcagtctctgagactgagagggtcaatccagaggccaagaagagcagaacaagaagaacctgtttgatcattttttttttcaattctgaaagctgaaactttagccaaaagaatttacaagaacataaagagtggagctgttggttggggaaaagaaaaaatgcgtaggtttggggtttggacgccttcgttgaaaattcaaccttttattgttgtgtgcgtaagtcataagacataggcaaaactcaataagggtaaatgtatctttaaggtcccccttctgtcgtcttctcgcagcgtctcgagccgaattccgagcttac

SEQ ID NO: 5769 - DNA, 709 bp, Glycine max
tttttttaatttcgtatttctaaggcaaagagtgaaaattgttagcccgttgaatttgaagctcacgagaaacaaaaatatattcaagacacatgaacgaaaggaggagaaatcaagcaatttttagcttccctagtcgaacatgatcaacatcatgaagagtactaatgaaagcacttggcaaggctatcaatggttggaatcttcttcttcacagaacttggagtacttttctgaatccatcaggttgtttagttcaccactgtcactcatctccactttaattatccatccatctttgtaagggcttgtgttgaccaaagcaggagaactggtaagtttttcattaacttcgaccacttttcctgaaacaggagagttaatatcactagttgccttcacactttcagctgcaccaaaaccttctccttgtgtcacggtggctcccacttcaggcaattcaacatacacaacctcacccaaatgatcttgggcatgatcagttatgccaacagttgcagaatttccatcaaccttcacccactcatgagaatcagcatacttcagatcattcaaaacgttagagaagcttctgtgaaacacggagatcctgaggtaggaagcagctcttgaagcccacaactgtctgcaagccatctctctgcactcactctgcttcttctcaatctgtcgtcttctcgcagccgta

SEQ ID NO: 5770 - DNA, 1157 bp, Glycine max
atctgctcttaaccccttttgttttcttctcctcgtttctattcttattcctatatatgcaccccatcccgggtctcccggcccacacttactagtagtaagcatggagtcctcaaagatctatgcttacctcttcctctgcatgatctttctctcttccgccactcccattctcggttgtggctactgtggcaaaccccccaaaaagcacaagcctggtaaaacaccaaagacacccaaaacacccgttgttaagccaccagtcaccatccctcccattaatgttcctcccgttgttcttccaccaatagtgaagcccccaggtattctccctccaattccaattattaacccaccaaccacaccagggaagggagggaacactccatgcccaccaccaaagtctcctgcgcaggctacgtgccccattgacacgctcaaacttggtgcctgtgtggatcttcttggagggttggttcacattggtttgggtgaccctgttgcgaaccagtgctgccccgtgcttcaagggcttgttgaggttgaagctgcggtgtgtctttgcaccactcttaaactgaagcttctcaacctcaacatttatgtcccacttgcccttcagctccttgtgacttgtggcaagtctcctcctcctggttacacgtgctccctctaaaccagtggaaaggattgaggaatatatggtcaaaatcgacatgagaggatgtcgagccacactatctctcttctcttctgattggaactgctgttgtttgttttgctattatttgtaaaaccatttgtttttaattgagatcgttgcatgtatggtttaatataatcttaggcaagtagcagcaaagatgcttctctgtgacatgttcaattattaatttatatgaattgcgctttaatttgttgaatatatcagtttcgagtttctcttgttgtatagcatttacttcaaattgggatctgctgctctatctcgaatctctataaagaaggaaaaaaaaatattaaccatgttctttgtgggcatggaaacagatcgatcatttgcagtttttgagaaactaataaaaaatatttaccttaggggtgtctcatttttaaaaaaaaaaaaaaaaaaactcgagactagttctctctcgctc

SEQ ID NO: 5771 - DNA, 1018 bp, Glycine max
cacatcatatcttcaagtttgagattatttagtgctaaatttttccaacaattgtcagaagaacagcgataaatcaattcttactctgatagcttccattcaaattaaagttcatttcaattttactccctctgatgcaacataaagcaagccaagtaataaactaacttttgacaagggttttgcacatccggtgtctctacttctgcaaatggtgctaagtttcatggctacaaggtatatgaaatataacatgaaagttgcataaacttacaaccaacagctaagaacaaatcctagaaccataaatataagccatttctgcatagatacctggtatgaagaagaagaagaagcaccgttgcacaaattaaatccataccacgtatctctggggatatatgtgttgtaatagaaagtaacaggcctgccgttataaccatttattttcacactttcaggcttccagccatctaatccagatctatataggtacacataacatatctgatatgcacacggaccagttatctgaaatgtatctgaagaacagctctcgaatgtacctgaagctggatcatccagtcttggcgcatatatctggttgccataagcatccccaaaagaaatactgatctgatcccttgtatacctaggagacgaacagctagtagttataaccaccgagtaagagcaagtcccagcgttcttcatctggatatagctaacattgaaggaatcagcggcgtgaggcagaagagaaacagactcagactctgagactgagagggccaatccagaggccaagaagagcagaacaagaagaagaacttgtttgatcattttttttcaattctggaagctgaaattttagccaaaagaattacaagaacacaaaagagtggagttgttggttggggaaaagaagaaatgagggaggtttggggttttagatgcaggtatccaatgaaattagaatttctccttgtaatttatgctgataattgatgaaaattct

SEQ ID NO: 5772 - DNA, 2254 bp, Glycine max
cgggtctcgtggtgttctctatttcttcacaaattaaagagtgtccaaactaaactcattattcctccctgcaactctgtgttcactggttcccttgatggtaaactcttcagctcctcttcaatcatttttaaagctctgagcttaaacaaaacattggatacgacatgggttttcagaggtttctcataatatgaccaatgtttgtggcaccggttcttttgggggaagtagatcagcttcaaagattgcagcttttcattttgcttattttccatattttatgaggggaaattaagaaattggttgttaaatagagaaacaaagatttgtctccactgcatcattttcaccgtgatgctattgctatatcttgttccatattagctgtgaatccttgtcacttatgggggatattaggcttacccgggtagagcaaggtcaaacaaagattagaaatgttccaattgctgtcacccctgaaggattttggtgttgccctactcctgttgggtttcagaaaagcctcaaacctcaaaaccctttgaataaactcaaaccctcttcaccacctccaaagcctagttcccagaaaaaggctgtttcggagagtcagagaaaaacagtgccttccccttcaagattggcggtttcagatgctcaacaatgtaatgatgatccagatagacctccgactagcacttctgtgcctgcacagagagcacccaaaaaggtggctattgagtttggtgaacctggaacttttgacatgaagctgcttctccttggaaagcagggattttgtgtgaagttaagtgtgcacagggatgttctaatagagaagagtagcttctttgctgataaactttctgaacaatctagtttgtcatgtctccaagttgatgactgtgaggatgttgaaatatatgttgagactgttgggcttatgtactgcaaagaaatgaaacagcagctaatgaagcaaagtgtttctcgcattcttcgaatactcaaggtcgcagaattccttggcttcagctcatgtatccaatcatgtttggagtacttggaggcagtcccttggaatggaaaggaagaagaagaaaaggtgatcgcaaccgtcctacgactccaaggagaaggaatcggggtaaatcccggcctcgtacgccccccccccgatatttctaatgccccaaaagataccctctcccacattgttgaacttgttctcaaaagcaatgaggagagaggtcgccgagagatgaaatccatagttctaaagctccttagagagaataacagtcttccaagttcttcaggctcagctgacctctgtaatgacatgattaataagtcatgcagaagatgcatggattctttattgtgtctgttcaaccaggtggcagagccaggctttagtgataacaaagaacctgtagtaaaacatatagctcttgaagctgataacttgtcatggttgcttgagattttagttgacaaacaagctgctgaagattttgcactgatgtgggcaaaccagcaggaattggcagcccttcatggaaagcttccgattgtgtttcgttatcatgtcagttgcatttcaggaagactatatgttggcattggaagaggggaggttttgccatcaaagaacacacgccagttcttgttgcagacatggctacagcctctaatcaatgactataactggttgcagcacgggtgcgggtcattcgataggaaacttgtggaggaaggaattggaaggacaattctcaccttgcctttggaggatcagcagagtattttgctttcatgggttggaagtttcttgaaaactggtgatggctgtcccaatcttcagagagcttttgaggtgtggtggcggaggactttcattaggccatatgtggaaggccaaactattaacgtcatgccagatacgtgatgatatgtttatgattcatgaatatatcttagaatggttttggaatttgaattttctcttttgaggtgactattctaagcaattataaatgttatgttgatttgccaatgtggcttacctccagctgctaactagtactgagtcctgtatatatggccgtttcatgtatacaatcactcgttgaattgtaactttcagtaattatacaaatactaaggatttagtttttctaatttgagttttattttattatacaagtccatacattcaattataattttaatagccatattttcaatt

SEQ ID NO: 5773 - DNA, 1367 bp, Glycine max
tcagctacgtaggcccccccccccccagtttctttgctgataaactttctgagcaatctggtttatcatgtctccaagttgatgactgtgaggatgttgaaatatatgttgagactgttggacttatgtactgcaaagaaatgaaacagcggctaatgaagcaaagtgtttctcgcattcttcgaatactcaaggtcacagaattccttggcttcagctcatgtatccaatcatgtttggagtacttggaggcagtcccttggaatggagaggaagaagaagaaaaggtgatctcaaccatcctacgactccaaggagaaggaattggggtaaatccggtgctaaaacgagtttctcctgatttttctaatgccccaaaagataccctctcccacattgttgaacttgttctcaaaagcaatgaggagagaggtcgccgagagatgaaatccatagttctaaagctccttagggagaataacagtcttccaagttcttcaggctcagctgacctctgtaatgacatgattaataagtcatgcagaaattgcatggattctttattgtgtctgttcaaccaggtggcagagccaagctttagtgataacaaagaacctgtagtaaaacatatagctcttgaagctgataacttgtcatggttgcttgagattttagttgacaaacaagctgctgaagattttgcgctgatgtgggcaaaccagcaggaattggcagccctccatggaaagcttccgattgcatttcgttatcatgtcagttgcatttcaggaagactatatgttggcattggaagaggggaggttttgccatcaaagaacacgcgccagctgttgttgcagacatggctacagcctctaatcaatgactataactggttgcagcacgggtgcaggtcatttgataggaaacttgtggaggaaggaattggaaggacaattctcaccttgcctttggaggatcagcagagtattttgctttcatgggttggaagtttcttgaaaactggtgatggctgtcccaatcttcagagagcttttgaggtgtggtggcggaggactttcattaggccatatgtggaaggccaaagtaatgccatgccagatagttgaatgttgtcaaagcaccatgtgatgatatgttcttgaatatatcttagaatggttttggaattagaatttctcttttgaggtgactattctaagcaattataaatgatatgttgatttgccaatgtggtttacctccagctgctaactggtactgagttctgtatatatggccgtttcatgtatacaatcactcgttgaattgtaactttcagtaattatacaaataccaaggattta

SEQ ID NO: 5774 - DNA, 1567 bp, Glycine max
cgattgggtaccgggcccccccgcccgtccgcttcctaagccccccccccttttaaattaattaccaatatactaagttagacatctaatttgaatcctccacaacaacaagccacttcatataacttttttttgaactactaatagcctaatagcgagttttggtatttaactagactgcatgttatttcatcaataagattagataatacttttaaaaaaacatgagaatgtatattcccttgacagtaaaattaaaaaaaaatcctaaacgttttctttttccctttactagtggtaacattgtgattggttcatcgtggtcgcatcactgttcacacatagccatagattccccttttggcagccacaaagcaacaccctttctttttctctctaccctccaacgtgctctcttccctcctccacttcatccaaatctttctcattttctctcccaaatcacactctcaattacaataacacacactcaacttgagaattttccccaaaaatcccaagagctcgcgccatggtttccccggaaaacagcaattggctgttcgattacccgttgatcgacgacgacgttattcccgtcggcgactcctccttcgccgtctccgcttccaccttctcctggcccccacctcccgccaatgtcagtgtcgaaattgatgcttcgcttggggattctgatggcctaaaaaatcctgctttgaagaaaaggactaaatctgattcaagtactgcttctagctccaaagcgtgtcgggagaagttgaggagggataggcttaatgacaagtttgttgaattgggctccatcttggagcccggaaggcctcccaaaacagacaaggcttccattctgattgatgctgcccgaatggtgacacagctgcgggatgaagccctgaagttgaaagactcaaatacgagtcttcaagagaagattaaagagttaaaggctgagaagaatgaacttcgtgatgagaaacagaggcttaaggcagagaaagagaagttggaggtgcaggtaaaatcaatgaatgctcaacctgctttcttgccaccccctcctgcaatccctgctgcatttgctccacaaggccaagcccctggcaacaagttggtgcctttcatcagctatccgggagttgccatgtggcaatttatgcctccggccgccgtggatacctcacaggatcatgtactccgtccaccggttgcctaagttggcattgtacaattatttgggcttccattttggctcaaaagttgtaatcattttcctatagctttttagttattatcttctaagtgttccaagtaactggattcagtggtggctttgactgtatttggcatctgatactattatgaagtaatggctggtatttgcatgtaaatgttaataagcatgtctggctgtcttcacagcggctttgatggttgttactgtttttgatataacccaaaggcagaaccaaaataatgacaataataataaaaggtcaagcacagcgacttgttattttcgaaaaaaaaaaaaaaaaaacctcgt

SEQ ID NO: 5775 - DNA, 1271 bp, Glycine max
cgattgggtacgggccccccctcgagttcagctacgtaggcccccccccctccctctcggaactttgaaaacgtggaagcacaccccagaccccacaccagtccccgtttgttccgctgcaaaacaaaaacaccgcgtcttccccgtgcggggaaaaagaaaagaaaagaaaagaaccctcaattttccgggaaaaccctccccacaatggtttcccgggaaaacaccaattggctcttcgattacggcttgatcgacgatattcccgttccggacgccaccttcggcgtcaattcctccgccttcacatggccccctaacgccttgaacgcttcctccaatgtcggcgttgaaattgatggctcgttgggggattctgacagtctcaaagagtctggctcaaagaaaagggttaggtctgagtcatgtgctgcttctggctccaaggcatgtcgggagaagttgagaagggataggcttaatgacaagtttgttgaattgggcgccattttggagcctggaaggcctgccaaaacagacaaggctgctatcctgattgatgctgtccgaatggtgacccagttacggggtgaagcccagaagttgaaagacactaatcagggtcttcaagaaaagattaaagagttaaaggctgagaagaacgaacttcgcgatgagaaacagaggctcaaggcagagaaggagaaactggagcagcagctgaaatctttgaatgcacagcctagtttcatgcctccccctgctgcaatgcctgctgcatttgcggcacaaggccaagcccatggcaacaagttggtaccttttattagttatcccggagttgcaatgtggcaattcatgccacctgctgcagtggatacctcacaggatcatgttctccgtccaccagttgcctaagctggcactgtacaattctctgggccagcattttggctcaaggttgtatccattttaccaataccttcttggctttgttagttctcttctaagtattctaactggacccagtggtgacttctgactatatctggcatatgatactattatgattaatgctggtagttgcatgtaaatcagtcaatgttaaataagcttgtctggctgtcttcacaacaaaaaaaattgttgctactgggttctaagataatccaaggttaggttggcagtagcattattttggtttaggctttgcaagatatattttaacaatgaaggaagcaatagagctatggtgctatagtttcagtttt

SEQ ID NO: 5776 - DNA, 1391 bp, Glycine max
gttcaatacacttttaaataccatgtgtgtgtgtgtttgacatgaaagattttcctccagctttgaaaaattgtattgacacagcaatatatctgacatagattcacaatcaaacaaagattacaagcaaaaactagaaacaaagaaagagggaaagaaaaaagaagcaacaaagccatgagcttgaacattcaaaataaatattgacagaaaaatttgtagttgaggaagagcacttgcacaggtgtgactgaaagcaataatttctttcaagtgattcagttaccagaaaggaaatggatactctacagcagagaagagttactgagaagtgaactagtcttctaacttttgctttagtgtgccctttttagacttctttaactcccatggtggtaggcaacctttatagtgagagtgcataaataatgaagacattgacacttccttctgaggcattgagattgacgacaagcaactgaaggcagttcgtagtcttcttttctcactatcacacccttgaaagtttggatcatcatgctgaacagtggaagttttaagagcatcagggagtatgcagttgcacaaggaacctattcttgcaagacgattgacccatttcggtatagaattgcccgttagcttgtaacaaatatcctcacagaaatggttgcaattcttcacaatcaagtgataagtatcaccattgtaatttgcagactggcgctccatgaactctctaatctggaagggatctaagtttgtagttcccatgaatattgacttcctaaacttaaagccaggacactgtcgaggctcaacctcaaagacaccacttgttggatagtcatgggctccaaatgcatattctactccataaacttcaacccctgagtggaaaataccaatgcctgcccaatacatatagccatttactgttgtcaagtcatagacattgagatagacaggtgtattcccaggtatgttgccagctgatttcactttagagaatatgcaaaagggtgtcactgatttgtctcggagacgaagacgcacaacagagggccaaccattttttaaacctgatttcattgtatgtgaacccaggaagcagtcaatatctacttcctaccttttgtgttgcaaagggtagctgaaagaagagagggtgaagtgaaagactccttcgaagtttgaaagagccattgtgggtcttagacagaaaaaagagaaagagaataatggaacaatgtgtgtgccttaaactcacacattgtcttagctcttctgacagaagtgaagggtgtgtgtgtatgtaatgtaatgtgatgtagtaagagtgcagacagaaaaactggtttgtctctttttggagcctaatgaggaatgat

SEQ ID NO: 5777 - DNA, 1616 bp, Glycine max
ccacgcgtccgcgtgctgtggggtgacagttgaatggttcccgtagatgtcgccggcggtgaccagaaaagtggatctgattattaactcagaaaaatggaacatcagaagagcgggagcaagctaaccagaaaccactcctcgcttctccgatcctccgttcacaacctctcttccatcatcacccaacacgaacacgaacaacaactcctcctcgatgttcacgacgatgacgacaagaacaagaagcccaagaaaccccacgtccaggctcaggcccaagcccaccatgcccaggccctggcccacaggtcttccgcctattccgccctggcggtcttcttcctcggcgcgtgctcgctcctgttctacttcttctacctggaggtgtcctcctcggagaatttcctgctggcgctgatcttcgtggccgtggcgctctacttcgtctccaaaaacaagggcctcatccacagatcgttctctctggcgaagcattcgtgggaggagaatgtgaagcgcctagggttttccaaggcggcggcggtggcgaggccggtgcagtggttcatcggagaccccgccgcagcaacaacaaccaggaagaaggcggcggcgaagatagtgagggaaggggtggagttttacagcaatggggatttctacgaaggggagtttcacaagggaagaagcaacgggagtggggtctaccattacttcgtgaatgggaggtacgaaggggattgggtggatggaaggtacgatgggtacggaattgaaagctgggcgagagggagtcgctataggggacaatataggcaagggttgaggcacggttatggggtttataggttctacactggggattcttattcaggagagtggtgtaacggtcagagccatggcgtgggtcttcaaacttgctccgatgctagctgttatattggtcaatttaagtatggcgtcaaacacggtcttggctgttaccattttagaaatggggatagatatgctggagagtattttggggacaagatacatggatttggggtctaccactttaccaatggccactattatgagggagcatggcacgagggtcgtaggcaaggtattggctcatacacttttcgaaatggtgacagaagatgtggtgaatgggatgctggcaccctcaagcaatctctaccaccactatctgatgttgttcttcgagcagttcaggctgctaggaaaacagcagagaatgctataaaccttaaacgagtagatgaccaggttaacaaagcagtaatcgctgcgagcaaggctgccactgctgctagagttgctgctgtgaaagctgttcagaacaggatggatggaaaattttgtgacactgatgtctaagaattagatgttagctttgtttggaattgtaattgtaattttttttttttttttactaattttgagtccttggaagatgtcaccctggtgagcaaaagcttattggaggttgaagagagagtatgtttgtttcaccacactgtaacttgtatataaaccatgtatatcaatgaaaaatgaatttgctcaaaaaaaaaaaaaaaaaaaaaaccccggactagttctct

SEQ ID NO: 5778 - DNA, 2100 bp, Glycine max
cagtacgtaggccccccccccgatatgcctatgcctaagttttttcacaattggaatagccttgtcttctacactcccccaagctcttagattctaatccactgtggttttccaacctcagaatttcctcaaaacttgacagcagattatgtgaaaccagaagagagaaccttgagaagtcaggactatatctgtttccttggcatcagtatcaattaacagctttctctaggctactattgtccattgttgtgcttctacatataatctgttggaagagatcagttgaagtactacaacacagttgagtcccggcaattctataatgcaggcatcagagcaacatagaaattcaagtatgtactatcaaccattacaacaaattgaagcgtactgcttgccgcagtatcggacactaaatccgcagctatactaccatgatggaggccatggaactcagttttcaactccaagttcttcagaactttactgcactttggagtcatcttctgtagctctttacaactccccttcaactgttagtttctcacccaatggtagccccatatcgcagcaagactctcagtcatatccacctgaccagtatcattcccctgagaatacctatggctctcctatgagtggctcctgcataactgatgatttaagcagcttcaacttgaagcacaagctgagagagttggaaagtgtaatgcttggccctgactctgataatcttgatagttatgacagtgccatcagcaatggaaacaactttgttccactagagatggacggttggaaacaaacaatggtggcaatttctagcaaaaacctaaagcatatccttattgcatgtgccaaagccatttcagacgatgatttgctaatggcacagtggctgatggatgaattaagacagatggtgtcagtttctggcgatccgtttcagcggttgggagcatacatgttggaaggacttgttgcgcgattggctgcctctgggagttcaatatacaaatctttaagatgcaaagaaccagaaagtgctgagcttctctcctacatgcacatactgtatgaggtttgcccctacttcaaatttgggtacatgtctgcaaatggagccattgcggaagcaatgaaagatgaagacagagttcacataattgatttccaaattggtcaaggaagtcagtggatcactttaattcaggcttttgcagctagacctggagggccaccccacatccggattactggtattgatgattcaacatcagcatatgcccgcggtggcggactacacatagtgggaaggaggttatcaaagcttgctgagcattttaaggtgccatttgaatttcatgctgcagctatctcaggttgtgatgttcaactacataaccttggagtacgaccaggggaagctctggctgtaaactttgcgttcatgctacatcacatgccggatgaaagtgtgagtactcagaatcacagggataggctgttgaggttggttaggagcctatcaccaaaggtggtcacacttgttgagcaagaatctaacaccaacactgctgcattctttccacgtttccttgaaactctggactattacacagcaatgtttgagtcaatagatgtgactctttccagagagcataaagagagaatcaatgttgagcaacattgtttggcaagagacttggttaacatcatagcttgtgaaggggtcgagagggtggaacgacatgaggtgctcggcaagtggaggtcaagatttgcaatggccggtttcactccttaccctttaagttcattggtgaatggtaccatcaagaagttgctcgagaactacagtgatagatatagacttcaagagagagatggagctctttatctgggttggatgaatagagatttggttgcttcttgcgcttggaaatgaaagttctgcaataaggcataacatccctcttctttttctgttccattactatgtacaagttaatgacaaaggtctcaacattaaatccaatctaattgtccattttctgtgtttcaagaatttcaaaaaaaaaaaaaaaaaatagagga

SEQ ID NO: 5779 - DNA, 1642 bp, Glycine max
ccacccaaactcatctatctttgcttccccttagtcaaacaaagtaacacaccatccatcctctctctcttctcttcttctgttctctagtttcctgctcttgtttcttagaatccgtacggtctaatcaacacaacaaaatggatgcaattagttgcctggatgagagcaccaccaccgagtcactctccataagtcaggcgaagccttcttcgacgattatgtcgtccgagaaggcttctccttccccgccgccgccgaacaggctgtgccgcgtcggtagcggtgctagcgcagtcgtggattccgacggcggcggcgggggtggcagcaccgaggtggagtcgcggaagctcccctcgtccaagtataagggcgtcgtgccccagcccaacggccgctggggctcgcagatttacgagaagcaccagcgcgtgtggctgggaacgttcaacgaggaagacgaggcggcgcgtgcgtacgacgtcgccgtgcagcgattccgcggcaaggacgccgtcacaaacttcaagccgctctccggcaccgacgacgacgacggggaatcggagtttctcaactcgcattcgaaatccgagatcgtcgacatgctgcgtaagcatacgtacaatgacgagctggaacaaagcaagcgcagccgcggcttcgtacgtcggcgcggctccgccgccggcgccggaaacggaaactcaatctccggcgcgtgtgttatgaaggcgcgtgagcagctattccagaaggccgttacgccgagcgacgttgggaaactgaaccgtttggtgataccgaagcagcacgcggagaagcactttcctttacagagcgctgctaacggcgttagcgcgacggcggcggcggcgaagggcgttttgttgaacttcgaagacgttggagggaaagtgtggcggtttcgttactcgtattggaacagtagccagagttacgtcttgaccaaaggttggagccggttcgttaaggagaagaatctgaaagccggtgacacggtttgttttcaacggtccactggaccggacaggcagctttacatcgattggaagacgaggaatgttgttaacgaggtcgcgttgttcggaccggttgtcgaaccgatccagatggttcggctctttggtgttaacattttgaaactacccggttcagattctatcgccaataacaataatgcaagtgggtgctgcaatggcaagagaagagaaatggaactcttttcattagagtgtagcaagaaacctaagattattggtgctttgtagcgttacgttactttttttgagttttttttttttttgagttttgtgactgatgaaagaaagaaggtacaagaagaacggcggtgtagtggcatagtggcatcgcaagttgctgcaaaaggtgaattgtatattacttaatattagatgctgaaatattaggtgtaatgtaacaaaaaactgtacaaggagaagaaaaaaggttctaagaaggggagaagctagaagaaaaaaaatgatgtcatcatgggataactgtttaattgtatatgttgataatattgttgaatgttgattattatgttcacggcaaaaaaaaaaaaaaaaaaaaaaaactcgagactagttcc

SEQ ID NO: 5780 - DNA, 1952 bp, Glycine max
attcggctcgagctcgacccgacccaaactcatctctctttgctacctcttagtcaaacaaagtaacaaaccatcctcccctctcttctcttcttttgttctctagatttcttctctcttgtttcttagaatccgtacaatctaatcaacataacaaaaatggatgcaattagttgcatggatgagagcaccaccactgagtcactctctataagtctttctccgacgtcatcgtcggagaaagcgaagccttcttcgatgattacatcgtcggagaaggtttctctgtccccgccgccgtcaaacagactatgccgtgttggaagcggcgcgagcgcagtcgtggatcctgatggcggcggcagcggcgctgaggtagagtcgcggaaactcccctcgtcgaagtacaagggcgtggtgccccagcccaacggccgctggggtgcgcagatttacgagaagcaccagcgcgtgtggcttggaacgttcaacgaggaagacgaggcggcgcgtgcgtacgacatcgccgcgcagcggttccgcggcaaggacgccgtcacgaacttcaagccgctcgccggcgccgacgacgacgacggagaatcggagtttctcaactcgcattccaaacccgagatcgtcgacatgctgcgaaagcacacgtacaatgacgagctggagcagagcaagcgcagccgcggcgtcgtccggcggcgaggctccgccgccgccggcaccgcaaactcaatttccggcgcgtgctttactaaggcacgtgagcagctattcgagaaggctgttacgccgagcgacgttgggaaattgaaccgtttggtgataccgaagcagcacgcggagaagcactttccgttacagagctctaacggcgttagcgcgacgacgatagcggcggtgacggcgacgccgacggcggcgaagggcgttttgttgaacttcgaagacgttggagggaaagtgtggcggtttcgttactcgtattggaacagtagccagagttacgtcttaaccaaaggttggagccggttcgttaaggagaagaatctgaaagctggtgacacggtttgttttcaccggtccactggaccggacaagcagctttacatcgattggaagacgaggaatgttgttaacaacgaggtcgcgttgttcggaccggtcggaccggttgtcgaaccgatccagatggttcggctctttggggttaacattttgaaactacccggttcagatactattgttggcaataacaataatgcaagtgggtgctgcaatggcaagagaagagaaatggaactgttctcgttagagtgtagcaagaaacctaagattattggtgctttgtaacgttacgttaggttttttttttctttttttttttcgggagtttttgtgactgatgaaagaaagaaggtacaagaacggcggtgtagtggcatggcaagttgctgcaaagtgcaaaaggtgaattgtatattacttaatattattagatgttgaaattaggtgtaatgtaacaaaaactgtacaagaagaagaaaaaaggttttaagaaggggagaagaaaaataaaaataaaagatatcatatgaaaactgtttaatggtatatgttgataatattgttgaatgtatgttcatggcatctgatgttgtttttttttctttttttagttgtgtgggggttgagggaagtaaacatgggtttccaaaaatatctttgttgattgttgaacgcgcacacaacaaacaatttttttggttggtgaattaaaagtagtatgatggttgaggaaactaattaattttcgtggtgtattttgggtaatcataatgaggcattttgtcaggttgtgagaattgctattataattagacaaatgttaccaagtgttttaaatatgttatttgtattttttataaaaaaaaaaaaaa

SEQ ID NO: 5781 - DNA, 2185 bp, Glycine max
tcagctacgtaggcccccccccccccccgagagagagcgtttttgtgtttttctctgtcacaacttattattattattgttgtttgggacacaactcagagagttcttgcgaatttgcaatctctctctctctctaacgttggtctttcctttcccctttctgccgacgattttggttgtctcctttggatcagttagggccctttgtgctggtttgtagcttttgctgaataccagcaataatgaagaaggttattggtcaaactgttagggaccttaaaagagaagtaaataagaaagtgctgaaagttcctgggattgaacagaaggttcttgatgctaccagcaatgaaccatggggtcctcatggatcacttcttgccgatattgctcaggcaaccagaaaccctcatgaataccagatgatcatgtcagtaatctggaagcgaattaatgacactggcaagaattggcgacatgtctacaaggctttgacagtactagagtacttggtggctcatgggtcagagcgagtgatagatgagatcagagaacatgcttatcaaatatcaacattgtccgattttcaatatattgattccagtggaagagatcaaggaaacaatgtcaggaagaaatctcaaagtctggttatccttgtgaatgataaagaaagaatcatagaagttaggcagaaggctgctgctaacagggacaagtttcgcaacaatgcagcaggtggaatgtatagacctggttcacattcaagcagtggagcctatggtgaccgatatgatgatgatcgttatggaagcagggaggaagatagaaatggctatggttatggaagagaaagagaatggggcaatagagatgatgatcaacatagtcgtgatggagatcgttatggcagagattatgaggatcgttatggcagggatggttacagagatgacgactacaggggaagaagccgaagtgttgattaccaatatgacacaagaagcaggagctctgatagagatcgttgtgatgatgatggacaacactcatctcgcggaagcaatgctaaagctgaagaccaatctctggaagcaaggcttgagcggaaactttctgagcaaaatatgggtgctcctcctagctatgaagaagctgttggtgaatctcgcagccctgtacacagtgaaagagatgcggaaacttcggcaccatctgctcctagagactcctctcctcatgtaaatgataatcctagtcaaatctctgctcctacgggatcttttcctgtaaacaataatccaaccgaagcaactactgctgcatctggagcccaggaaactgagacgactgatgacttttttgacccacgtggtccttcatcagctgctcctgccgccccagccaccactaacagcgttgaaatggacttgctcggttccctctcagactcattctcttcaaatgcattatctcttgtaccagctgcatcagcaactgctgcccctgatgcaaattctggatcaacagcttcctttgcagcagcaccatctgggtccaataattttgatcagtcttttgaagatccatttggtgactcgccattcaaggcttttacttccactgaaactgctccatctcaaccccagacatatcagagtattgagccttcccaatcaaatggtcttaatgcagaaacaaactctaactatgggtttggggactcattttctgttgtaccatactctgcacctgtttcctctgacgctcaacctttctctacaaactctcagtttccgtctcaagatatgtcatcttcacagccagaaacagatattcttgcagacattcttcctcaagcaccattatctgagatgcattcacagcagaacattccagttcctacagatcaattttctcaacaacccttttctgctcctaatggccaaccaggacaagtacaatcatccttttcatctccctccagtcaatatgcacaaccacccttttcatctcatgctggtcaacctagcttgcatgcattttcatctcctactggccaacatttgcagtcgccttttgcttctcaaggtggccaacctgcacaatcaggtggtatgtatggtggattgcactcccagggtggatatccaaccatgtctcctcaatcccaaaatggatataa

SEQ ID NO: 5782 - DNA, 666 bp, Glycine max
  misc_feature (662)..(664): n is a, c, g, or t
agatttggacacttttcgtgtatacggaattgggacactgtcctgttctgtgttaaggagctaaatatcagaagagatcacagaaagcgtcagcaacaaaactaaagaaagcggtttcacagaccgagaaatcccaatcctatggcagaggaagggaaacccgatgaacagctctttcagcttctctccaatcttctccaccaggtggaatcactgacgaatcaagaagaagttgagctgcgttctaaaattgaaactcttggattagaggttacaaaagttccttcaaagtcaacgcagcaccttaacgagttggaaatagctgaggagttggataaattatcagcaagattggataatcttgatgagatgatatcatcatcaatggcttcagatccacaggtgcagtcactcttgagtgatacagccgatgtgtggatgccagttatcactgctacttctgaggaaaggcgcaacttcacagcggctactggagacagcaccctccaaactgatgtggaaaagtctaaatagtttcctattttcttgtctttgaatatggacatgtttctattgctttacagtatactaattcatttatttgtaatagactgagctacataatagtaaataaagtgtttcattaaaaaaaaaaaaaaaannnaa

SEQ ID NO: 5783 - DNA, 1805 bp, Glycine max
ataatctacaaattttctagagcatattccccaatgttctctgattctcatttctcactcagcatttctcttgagattaataagttaatattggatttaatgttgtgttgacttgaaaacaaagcaatccactgtcccagtccacacccatctagccgttcgatcccaaagctgcacgaatcggacggtggccattgctccaatgcagaaccgtttcggtgcagcgtcatctcctccctgagaacgaacgaagcagagacaaaccttcctatcactcactttctcttcaacgacacaaaaaaaaaaaaaaaaaaaactcaaaccaaaccctaattctccgaaattagattcctttcgggtaagttcttccctaaatccacgcctcctgcagacccagatcgcttttcttccttctatctaattctccgccaccaaatttgcgatctttctgtgcctccgaatcatggagaaggaagagaacgaaccccacgttcagaaaagtggcggcgaaagcgaagacgctgaacccatagagctcgttctctttcaagtgcccgagtgttacgtctacataatacctccaagaaagagtgcagcttcttacagggctgatgaatgggatgtcaacaaatgggcatgggaagggatattgaaagtcactagcaagggagaagaatgcatcataaaacttgaagatgaattcggcaccagcacaggttgaattatatgctcgggcatttttaagaaatggagagccgcatccagtggaacctgttattgacagcagcagatactttgttcttcgcatagaagagaacataggtggtcgccttcgacatgcttttattggcataggattccgagaaagaacagaggcgtatgacttccaagctgccttgcatgatcatatgaaatatctaaacaaaaagaaaactgctgaagagatggaacaacattaccagcaaacttcctcagttgattacagtctgaaagaaggagagactcttgtacttcaaattaagaccaataaaagtggcagcagtgtgaagtccaagttttttgagctgggtctgaacaaatccccagaagaaaagaatggggggaaagaatctatacctagtattaagctatcacctcctccagcaccactttcacctgttttcggcacgcagaagtctccaacaaactcacctacaaatctcagccttgagaaaactaatatagttgagactcctaaaacagttaaagacacagaacctgaggattctcctgaaaaacaaagcacagaggatgtactagatgatgattttggcgatttccaagcagcaggttaagctatccattgccgtgtgtttttgaatttgtgatgattagaaaacatgcaaaattgttgattccttgaacatctggtatataccaaagacttctgattcagcttggagaatcaattatgtcattccagaaagtaaatcctacatagccaccaacaaaatatcattaaagaatcaacctatatgctctgtaatcggtgattgttctagttgcactgcgggttactactacgagagtttttccttcatcttgagtcaatttatttcagttttatgctttgtttatatttctgagttgggatgcctcagtagtcaatttagtagtacatcataaatggggttcatagctttgttgatagcataattgctgatttgctgttatgatgaatgaacaacattgagcgttttgaacttgtggagttgttccttgtgctttataccctaagaggatttgctaaaggccttttcagtctc

SEQ ID NO: 5784 - DNA, 2022 bp, Glycine max
ccacgcgtccggtctatcagctacgtaggccccccccccctccacagcccaagaaactccattaaacaaaaccagagcaacaatgaagactttccaactctctggtaagttatgttgctcttggttcttacttggcctgcttgctcttattggttcccttgcttcagctacagagattcattttcatgaatttgtcattcaagctaagccagtgaggaggctgtgcaaaacccaaaacataatcactgtcaatgggcagttcccagggccaacagtggaagctagaaacggggattttgttgtaatcaaagtagtaaatgcagcacagtacaacatctccatccactggcatgggttaaggatgctgagaaatccatgggcagatggaccaagttatgtgactcagtgtcccatccaaccagggggaagttatacataccgatttagaatcagggaccaggaagggacactatggtggcatgctcacaccggcttcctaagagccactgtttatggagctttcatcatctatcctagattgggttctccttatcccttctctatgcctaagcaagaagttcccctccttcttggggaatggtttgatacggatcttgtgcttctccaaaggcaggcagattttgcaggattacctccaaatacatctgttgcatacaccattaatgggcaacctggtgatctgtacagatgctcaagccaagaaactgttcgtgttccagtagatgctggggagacaattatgttgagaatcatcagcagtacacttaatcaagaactcttcttctccattgccaaccacacaatgactgttgttggtacggatgctgcatatactaagcccttcaaaaccacagtcctcatgataggacctggtcagacattcaatgtcatagtcactgctgatcaacccccaggtttctactacatggcggcacatgcctatgaatcagctgtaaatgctccctttgacaataccaccaccactgcaatccttgaatacagatctactagacgcagaaaccaaaacagatcaagaccagttttgccagctttgccagccttcaatgatacccccactgcaactgcattcactgctaggatcaggggtcttacccgggttagagtctttaagaaagttgatgtgaatctatatttcatagtgggattggggttaatcaactgtactaatcctaatagtccccggtgtcaaggaccaaatggaacccgcttcacagccagcatgaataatgtatcttttgtactcccaagtactacctccttaatgcaagcctactatgaaggaatacccggtgtcttcaccacagactttccccccgttccccctttacaatttgattacactggcaatgtgccaccggggctatggacaccttctcgaggaactaagctctacaaggtgaagtatggctccaaggtgcaaattgttctgcaggacacaagcatagtgactactgaggaacaccctatgcatgttcatggattccacttctttgtagttggttcaggttttggcaacttcaacccagcaactgatcccctcaagttcaaccttgtagacccacccgtgaggaacaccattggaacacctcctggaggatgggtggccattcgttttgtggctgacaatccaggaatttggtttgtccattgtcacatagattcacatctgaattggggtttgggaatggcacttctggtagaaaatggagttggcctttcacagtcagtattacctccaccaccagatctaccccaatgttaaggttaatgaagcatcattagttaataaatttattgttctgtattacaagttctacaagaatttgccaaacaaacagtatggctttctgcagtttccaataccagaattagattatgcttaattgagctgtatgttggcggtatgttgattaggtggcattgcaaacctatactaacaaaaataaaatttaaatgatttcttttcattactacaaaaaa

SEQ ID NO: 5785 - DNA, 920 bp, Glycine max
aaaagaaataaagaatagtagcggcagaaaattgaaaaacggaaaatcgaacttgaaaaagtctaaaacccgcgctctctccgatttttgaaatggaagacgaccaattggaactctgcaacgacgacggcttcgtcttcaagcgcaagcgccgccgcgtcgacgccccaccgccgccgccctccgagcccgaccaagaggcggcggaaaaattccggagagagcgcaagaaacaaaccctactcaagctcaaatccaagtatgagaaagagattcttcaatgggaatcattctcgaacaccttgcgctcaatgcaacaactacacaccactccacaacaacagccccaaccaaacctaagcctatctcttccttccaccgattccgccggtacctccctcctccgcgacctcctattgcaggtggaggcgcaggatgcaataattcgtgatgtgtcaaatttgtgcgacatagcggaagcggtgtgcgttaagagagaagaacagcttaaacaaaccttgttcgatcttccaatctgggcttctccgctcgaacttatgcaagggctatgtgatggtgatgatgattgaatttgaagctgctactgcattactctctttggtaatgaatttgaagaagcagaaagaaaggaaatgatggtctttacaccgtcaattttaatatttgtaagtgtaaactctgtagtagcacagtgatgtagtgtagattaggcatttggcagcgtggtaaatatttttagattgaattgtgttatcaacagtattaaacgttttaggctgaatgaatgatattgatgaatttataaggtggggaggctaagatggaatcatgtggttttgtatacaaagttcattaacttctagaatctaatgtccttatgtgattgatttcttaaaaaa

SEQ ID NO: 5786 - DNA, 779 bp, Glycine max
gaaaaccagcatatcaatatctgggacaactgtccaatacagtaatccatcctaccaaaaactggcggacatatggattcaacacattcatgcgctccctcagcagtggtatgaatccttagtccctgaactgatcactttcagtcacaatatccttcacaagcctatctaagaggtgagcagcactttgtacattggcatctgagtcagcagaaagcttgcataaggcatcaaagatctggttgaagaaaataataaaatcccctctcacaacctttgctatgttataaagtgcttcgcaagcataataacgaactttgctatcttggtcagagaacgaatttaacacagggggcacaatttgctcaagatgctgagctgcttcagaagtcaacccaccagttgcagctgctaatcctatcaatcctcccttccgatggttggcctgtggtgaataagtaaatgccgtagtcaacaaattgatcacagccgttattttatcatgatccccagcagtagctagctgcttcactatcccctcaatatcaagagcagcatttttgcgcttctcgtagagcttgtcagcaaggttgcgaagcacggctgccggaatcaacgagagagcgtcggccatggcaacacccaacaagctggaaactatttgattgtcgaaaagaaattaactttacgaatcaaattcgttttcggatcttttcctgctcgaaacgaaacattttggtgttttcttcttccaggttctcccccctccgtcctgccgt

SEQ ID NO: 5787 - DNA, 1682 bp, Glycine max
cgggaaagtagctaattccttatattttcatatggcagtatatgattaacaggtagacaaaagacattttactaaatcaaatatctccctctagcccacatggtttttaataaataaaaaataacataaccacgtgggaatcacgttgtacaaagtcaaaagaatagcctaggaaaagcccaaacttatcttgattcaaaaacccaatttttgccatcccaacttctataacaagtggaataaaacgagctactatgatttacaattttacaaatcataccgaccctttcaaagttgacatactttaacttagaccccatgggcagaagcaatattaaaattataattgtagctgccctggacctctctttgatgatgatcttgaaggaggaacattaacttcaatagactgaggttttcttggttcttcctctctttgtggctcctttgacaatgaagtggacatattgcgcaactttgcctgtgttttggtaagcacccgatgctgatgctgcatttgctgaaactgttgtagcctagcagcaaaatttattccattgcgtgagctaccaccatctttggctacgtcaccatcctcaatggttcgaaatccatccggcacgttacgaaattggtatgaatcccctgaaggcattcttttcaactgctctccattgaatgaatacaatggcacagctttcacacgagtttttagtatcttacaggcggcactttgctgaggaagcaacatcagaagaccatacaatgccttgaatagccaaatatatcttccaggttcaagaagctgcaatcgaagataagcaaagattggagtttccatcaagcgaatcaatttatccagttggaccaaaaatttgacattaatatcctcctcctccagtgattgaatcacagcactggcatgttggtaagtctgagccaaaaagcaaagacttataattgccataggagaatgacaccaagaggcatacagagaaacatacaagtccttcccagcaggatttaccagtgattgcttcaaaagatctcgaatctcagataattctgatgatgtaagtaagatcaaattcagagcctgaaccataattgacgcaaaatcaaagtcagattctctttctaatattgtagaaagttcacggtagactctctcagcattcaaaagaacacaaaggcgacggactatcaaagcaccacgcttctccaaaagagaattatctagtcggaaattgtgcactagaaaaacaacaagctgccggaagtggtggggatctcttgcaatgcatgcatgaacatcaagaactagaagcacaacctcatcagatgaatctgaaagtgctttgagtagggtttcaaatatgtcattcagaaatgtcaaaacctcactacgatgtctggataaaagggttgatatccagtgcaaagcttcaatacgagtagcctcccattcactagatagttgcctcctagcaatggagaggattgctcctacatcaaatgcttcggctggatcggccttgattgcacgtaactcttcattggtttcacgagcaaccactctaattttctctggggggggggcctacgtagctgaaacagctccaagaatgtcagcataatatggaacaagcagatctccaccaagtttacaaactcatttatcc

SEQ ID NO: 5788 - DNA, 855 bp, Glycine max
attttttttttctttctctttcactaagcagcttattccttattattatactattattggatatatggcagcacatgacatgataatcaaaaagcaaattttctaaataaaatatgccctctaacccgcatggttttcaacaaaaacaacagaaccatgtggggatgtatctcgtttacaaggtcaaaagaatagcccagaaaagtccaagctttatattcatcattccttcaccacctcaagtctcccaaccttctatgatatgatttacaattttacaaatcaatacctgatcccattcaaagttcacatacattgggatcagtgagtgcacaataagatttgactcgatatgggcaataagaaacattctagctaccctgggctcttttagatgatcttgatggaataacattaacctcactcgactgaggtcgctttggttcttcctgtctctgtgcctcctttgataatgtggaggaatttttccgtgactgtgcctgtgttttcaagtgcacacgatgcaggtgctgcattttctgaaactgttgtagcctcgcagcaaaatttatcccattgtgtgagttcccaccatccatagctatgtcaccatcctcactgatttgagatccaccagacatgtgatgatggagaaattgatagggatttcctgaggatgtcttcttcaattgctcaccattgaacggatatgatggcacagcttttaaacgagttttgagaatcttgaaggcagcactttgctgaggaagcaacatcagaagaccatacaatgttttgaataaccatgtatatcttccaggttcgagaagctgcaatcttagataagcaaagatt

SEQ ID NO: 5789 - DNA, 659 bp, Glycine max
aaaggaagaatgagcgagtggtcaaagttaaagttgccccaagttgtgtgtcttgtttaagaagaagctaaggtttacgaaattgtggtggtggctaaacagtgggagcacgcaatctttgcataaatacagagaagagataagagaagacaagagtttcaaaatggggaaggcaaaagaagcggcggtggtggcgggagccctagcattcgcgtggctcgctatagagctcgctctcaaacccttccttgccaaggcacgtgcttcgattgacaactccgacccgccacgtgaccccgacgacgatgctcttcctaaaaccaccactgacgacgttcccgacgccgccgattctaaacccgccggcgacgtgcctcccgctgctgatactataaccaccgacgccgtctgaagtggtctctcattcatgttattttgaatttcgtcatatctcaaaactactgtccaaatgaaataatattgttagcctgttgtgcttctgttaaatttgtatattgtgttgtcggtaaatgctctgtttggtttgatttggttttaggattgaaaaaaatatcaggttgttctattctgaatgtttccctaatcattagatatatgtgtatatttgatttatagttaaaattaaaaaaaaaaaaaaa

SEQ ID NO: 5790 - DNA, 1158 bp, Glycine max
gataagcaaagattggagtttccagcaagcgaatcaatttatccagctggactaagaatttgacattaatatcctcttcaactagagattgaatcacagcactcgcatgttggtaagtctgagctaataagcacagacttataattgccatcggagaatcgcaccgcgccgcccccaaagaaacatataaatccttcccagcaggatttaccagtgattgcttcaaaagatctcgaatctcagatagttccgatgatgtaagtaagatcaaattcaaagcctgaaccataattgatgcaaaatccaagtcagattccgcttctagtattgtagaaagttcacggtagactctctcagcattcaaaagcacacaaagtcgacgaattatcaaagcaccacgcttctccaaaagggaattgtctacccggaaattgtgcactaggaagacaacaagttgccgaaagtgctgaggatcttttgcaatgcatgcatgaacatcaagaactagaagaacaacctcatcagatggatctgaaagtgccttgagcagggtgtcaaatatgtcattcagaaattccaaaacctcggtacgatatttgtttaaaagggttgatatccagtgcaaagcttcgattcgagtagcctccagttcactagataattgcctcctggcaatggagaggattgctcctacatcaaacgcttcagctggatctgctttgagggcacgtagctcttcattggtttcacgagcaacaactctaattttctcttctttatctgctatacaaggcaaaatggctccaagaatgtcagcataatatggaacaagctggtctccaccaagcttgacaaactcatttatccatgtgatagctgttagcctagtgaattcatccggagaacctgccctctgtaccaggatttcagccatgcgaccataatctacagatggggagtttttaatctcttgaagaaactctgaaagagctgactcagctggttgactcgagcttgttgacgtatctcatgactcgaatcactcaacatattaaataagccatcagaaaatcaggaagaaaccccagcatatcaatatctgggacactatccatacagtaatccatcctaccaaaacgggggggggcctacgtagct

SEQ ID NO: 5791 - DNA, 1097 bp, Glycine max
cccacgcgtccgtacggctgcgagaagacgacagaaggggatatagcgcagtttcatttctttggattagaaatttttcccaaagctgatcgagaagccagccaggccagaaagagttgaagaagaatgggaagggggaagatcgaaatcaaaaggattgagaacacaacaaatcggcaagtgaccttctgcaagagaagaaatgggcttctgaagaaagcttatgagctgtcagtgctgtgtgatgcagaagttgccctcatcgtcttctccagccgtggccgtctctatgagtattccaacaacaacataagatcaacaatagagaggtacaaaaaggcatgttctgatcactcaagcgcgagcactaccacagaaatcaatgctcagtattatcaacaagaatctgcaaagctgcgacagcaaatacagatgctgcaaaattctaacaggcacctgatgggtgatgccttaagcacactgactgtgaaggaacttaagcagttggagaatagacttgaaagaggaatcactagaatcagatctaagaaacatgagatgctactggctgaaattgaatacttccagaaaagggagattgaactggaaaatgaaaatctttgcctccgaactaagataactgacgtggagaggattcagcaagtaaacatggtttctgggccagaactgaatgccattcaggcattagcttcccgtaacttcttcaatccaaatatgttggaaggtggaactgtttaccctcactcagataagaagattcttcatcttgggtgatcaataatatatgatcttggctagcctatggcatgtctatccaattagccggtggctaaatgcattattattactactcttttggttgctcattaactagaccatgtgatctatatactacttatggattatggatacttatgtatgatgattgtatgatatcataacaatcagttagaaataataattaaaaaatagagttgtgtttgaagacaaaaaaaaaaaaaaaaattaaggcatgcggccgtccagaggaaaaaaaaaaaaaaaaaaaaaaaactcgaactagttctctctctctc

SEQ ID NO: 5792 - DNA, 1011 bp, Glycine max
cgatcattttcctatacttcgttttttatgagtctgatctttttgttctcagacttatgcatcttcttgtgctaaaacaaaaggagttgaagaatgggaagggggaagatcgaaatcaaaagaatcgagaacacaacaaatcggcaagtgaccttctgcaagagaagaaatgggcttctgaagaaagcttatgagctgtcagtgctgtgtgatgctgaagtttccctcatcgtcttctccagccgtggccgtctctatgagtattccaacaacaacataagatcaaccatagagaggtacaaaaaagcctgttcggatcattcaagtgcgagcactaccacagaaatcaatgctcagtattatcaacaagaatctgctaagctgcgacagcaaatacagatgctgcaaaattctaacaggcacctgatgggtgatgccttgagcacactgactgtgaaggaacttaagcagttggagaatagacttgaaagaggaatcactagaatcagatctaagaaacatgagatgctattggctgaaattgaatactttcagaaaagggagattgagctggaaaatgaaaatctttgcctccggactaagataactgacgttgagaggattcagcaagtaaacatggtttctggaccagaactgaatgtcattcaggcattagcttcccgtaacttcttcaatccaaacatgttggacggtggaactgtttaccctcagacagataagaagattcttcatcttgggtgatcaataatatgatcttcgctatagcctataactatctatccaattagccggaggctaaatgcattattattactactcttttgattgctcattaactagaccaaatgatctatatacattacatatgaattatggattatggatacttatgtttaatgattgtatgatatcataacaatatgttagaaataataattaaaaagtagagttgtgtttgaagaaaaaaaaaaaaaaaaaaaaaaaaaaaaa

SEQ ID NO: 5793 - DNA, 823 bp, Glycine max
  misc_feature (779)..(779): n is a, c, g, or t
  misc_feature (805)..(805): n is a, c, g, or t
ctcttccaataaatccagtcagctcggaggccccccccccacgctagcacaaataaaaagaaccaaatttcagaagaaaaaagagtcacttgaaggttcaatgggcgaggaagagaaaaaattagaagaaagcaaagaggagaacaaaaaagcagaggaaccaaagaaggaagaagagaagaaagaggagagaaaaactgaggaatcaaaagatgacaaagaatctaaggagaaagttgcgccgtcagaaatcgtgcttaaagtgttcatgcattgtgaagggtgtgctcgcaaggttcgtcgctccctcaaaggattcccaggggtcgaagatatactcacagattgcaagtctcacaaggtggttgtgaaaggagaaaaagcggatccgctgaaggttctagagagactacagaagaaaagccatagaaaggttgaacttctctctccgatcccaaaaccacccacggaagaggagaaaaaaccccaagaggaacaagagaagcccaaaccagaggagaagaaagaagagcctcgggttatcacagttgttctgaaagttcacatgcattgcgaagcttgcgcccaggaaatcaagagacgcatcgagaaaatgaaaggggttgaatcagcggaagcggatctgaagaagtcggaggtaagcgtgaagggggtgttcgagacagcgaagctggtggagcacgtgtacaagaggacagggaagcatgcagtgatagtgaaagcaagaggcagagaaagaagaagaagagaaagaagcngaggaagaagttgagaagaaatgganaaagggagtggcgaggga

SEQ ID NO: 5794 - DNA, 1340 bp, Glycine max
tcgagtcagctacgtaggccccccccccatatataaagaacgaaaaatccactaacagcagcaagcttatctctgcagcattgaacaccaattgaacaccaatctgcagcattgaacaccaattcaacgccaatgggtcaggaagaggaaaaatcccaagaaaacaaagtggaggagaaaaaagtagaagaagaagaaaagaaagaagaagagaaaaaatcagatgagaagaaattcaaggagaaatctgcgccgccagaaatcgtgcttaaagtgttcatgcattgtgaaggttgtgctcgcaaggttcgtcgctccctcaaaggattcccaggggtcgaagatatactcacagattgtaagtctcacaaggtggtcgtgaaaggagaaaaagcggatccgctgaaggttctagagagagtacagaggaaaagccatagaaaggttgaacttctctctccgattccaaagccacccgcggaggaggcgaaaaaaccccaggaggaagaaaagcccaaaccagaggagaataaacaagagcctcaggttataacggttgttcttaaagttcacatgcattgcgaagcttgcgcccaggaaatcaagagacgcatcgagaaaatgaaaggggtggaatcagcggaaccggatctaaagaaatcggaggtgagcgtgaagggggtgttcgagacagcgaagttggtagagcacgtgtacaagaggacagggaagcatgcagtgatagtgaaggaagagccagagaagagagaagaagaagaagaagaagaagcaaaagaagagaagaaagcagaggaagaaggtgagaagaagaatgagaaggggagtggtgagggagaagaaaacaaggagaaaaagggagagggtgaagccaaagcagaagaggaatccaaagaagaaaccgcagtgttggagctgaaaaagagtgagtattattacaacccaccaccgaggtatggcatggagttctatgcctcctaccctggaccatcgtacccgcctcagatcttcagtgatgagaaccccaatgcctgttctgtcatgtaaaaatggtggaatgtcaggggtaatactggaactttgggggaattatggaatttgagtgagtgattgattggcattgcctcctgagatagatgtgccctactccttcttcttctgtacttttcccctaatatcaaaaagttaaatgaaatctacagataagctgtagagttttgtaatgcctctacttttttcctaaattgttgttaatatgtatatggaaatataagtgaaagtaattacagttccccttttaaaaaaaaaaaaaaaaagcgaca

SEQ ID NO: 5795 - DNA, 1928 bp, Glycine max
gcgtgattgtctttggtaaaaagatcgtccctttccgtagaaaaacgtcagctacgtaggccccccccccatcttctctgacaatggtactttctctctctacattagggttttcttcagcactttcgcgcctaaacttcttcccaaagccaccaccttctcttttctccgcactcaccactttccgcagaaaccaacttccactcaaatcgtcgctcgccgcatcgaaacgtgacggcgatgttgtcgttttgggcatcgaaaccagctgcgacgataccgccgctgctgtcgtgagaagtgacggtgaaattctcagccaagtagtgtcttctcaggcagacctgcttgcgaaatatggaggtgttgctccaaaaatggcagaagaagctcactcaaaagttatagaccaggttgtgcaagaagcccttgataaagcttatctgaccgagaaggatcttactgctgttgctgttactattggtcctggtttgagtctctgccttcgtgtgggggtgcagaaagcccggaaaattgctggcggatttaatttaccaattattggcatacatcacatggaagctcatgctctggttgccaggttaattgagaaagatttgcagtttccattcatggccctacttatttcagggggacacaatttactcgttcttgctcgtgatcttgggcagtacatacaacttggaactacgatagatgatgctatcggtgaggcatatgacaagacagcaaaatggctcggactggatttgaggagaagtggtggtcctgctattgagaagcttgctatggagggtaatgctgaatcagtcaagttttctattccaatgaagcagcacaaagactgcaatttttcctatgctggtctaaaaacccaagtacgtctggcaattgagtccaaaaagattgatgccaaaattccaatttcttcagcaagtaatggagatcgactgtcacgggctgatattgctgcttcttttcagcgaattgctgtgttacatcttgaggagaggtgtgaacgagcaatacagtgggcattgaagatggagccttccataagacacttggttgtctctggtggagttgcatcaaatcaatatgtccgagcccggcttgatatggttgtgaagaagaatggcctgcaacttgtatgcccacctcctcggctctgtactgataatggtgtaatgattgcttggactggtattgagcacttccgcatgggaagatatgaccctcctcctcctgcagaagaacctgaagactttgtgtatgatatacgcccaaggtggccgctgggggaagaatatgctgaaggaaaaagtgtagcacgttcgttaagaacagcccgcattcatccttctcttacatctataattcaagcatcattgcaacaatgacactgcttgaacttccatgttgcttcagcctctcatgaagatttgcagggcaagcctctctcttttggacttatctatgatttgccaaaatgacgtctgggctgaattttcaaaaatacatgaaaaagtgggctgaagtttgctgtggaaactgaccattggcatcaagcagtagcacgagaaaatccagcaaagcaatgtcacggcaaggagaaacattataatggtatggtggttggtagaagtgaaaaaaggagtgggatgggaagagatcaaaattcattgtgctattaacaaaaaatttcaacttaagagtaaaagaaaagaaaaggcaaggaaattttgtatttatgtattattattgacatattttgtcaatggaattgattaacaaaatattagttattaattggcacaaattgtaaaatatttgttattattggcacaaatttgatggccatttaaaataatagatcttacatgattaaacaaaaaaaaaaaaaaaaa

SEQ ID NO: 5796 - DNA, 3183 bp, Glycine max
ccacgcgtccgggaccattttactctgcagcagcagccaccacccatggcgtcgttttccgccgccgtcgctcagttctcccgcgtttcaccttctcacacttcgctccactctcactctcacggcacgctcttccaatctcaatgccgccctttcttcctctcgcgcacttcccattcactccggaagggtcttactttaccacggggaagagaggcaccgagtacatctgtacgtgcttcatttacagatgtttcaccgaatgtgtccttggaggaaaaacaactacccaaaggagaaacttggtctgttcacaaatttggtggaacctgtgtgggaacctctcagagaataaaaaatgttgcggacataattcttaaggatgattcggagaggaaattggtggttgtttctgcaatgtcaaaggtgacagatatgatgtatgaccttatccacaaggctcaatcacgcgatgagtcttatacagctgcattaaatgctgttttggagaagcacagtgcaactgcacatgacatacttgatggagataatcttgctactttcttgtctaaattgcatcatgatattagtaaccttaaggcgatgcttcgtgcaatatacatagctggtcatgcaacagagtcctttacagattttgttgtgggacatggagaattatggtctgctcagatgttgtctctagttattaggaagaatgggactgattgcaaatggatggatacaagggatgtccttatcgtaaatcctactggttctaatcaagttgatcctgactatttggaatctgagcaaagacttgaaaaatggtactctttgaatccatgtaaggtaatcattgccactggattcattgcaagcacacctcaaaacattcctaccacactgaagagagatggaagtgacttctcggcagcaattatgggtgctctatttaaggcccgtcaggtcacaatttggacagatgttgatggtgtgtatagtgcagatcctagaaaagttagtgaggctgtgattttgaagacactgtcttatcaagaggcttgggaaatgtcttattttggtgccaatgtcttgcatccccgcacaattattcctgtgatgcgatatggcatacccattatgataaggaacattttcaacctttctgctcctggaacaaagatctgccatccttctgttaatgatcatgaagatagccagaacctgcaaaattttgtcaaaggatttgcaaccatagacaacttggcacttgtaaacgtcgagggaactggaatggctggtgttccaggtactgccagtgctatttttggtgcagtaaaagatgttggagctaatgttatcatgatatctcaggctagtagtgagcattctgtatgctttgctgtgcccgagaaagaagtaaaagctgttgctgaggcattgcaatctagatttcgtcaagctttggataatgggcgtctttctcaggttgcagtcattccaaattgtagcattctggctgcagttggccagaaaatggcaagcactcctggtgttagtgcctcccttttcaatgcattggctaaggccaatataaatgtccgtgctatagcgcaaggttgttctgagtacaatattactgttgttgttaagcgagaggattgtataaaggctttacgagctgtccattccagattttatctctcaagaaccaccatagcaatgggcattattggacctggattaattgggagcacactacttgaccagctaagggatcaggcctcaaccctgaaagaagaattcaacattgatttgcgtgtaatgggcatacttggttcaaagtcaatgcttcttagtgatgtgggcattgacttagctagatggagagaacttcgagaggaaagaggagaagtggctaatgtggaaaaatttgttcaacatgtacatggaaatcattttataccaaacacagcattagtggactgcacagctgactctgccattgctggctattactatgactggttgcgcaaaggaatacatgtagttactcctaacaagaaggcaaattcaggaccacttgatcagtatttgaagttaagagctcttcaaaggcaatcctatacacattacttctatgaagcaactgtcggagctggtcttccaattgttagcactttacgtggcctccttgaaactggagacaaaatattgcaaatcgaaggcatctttagtgggactttgagttacatatttaataactttaaagatggccgggcttttagtgaggtagtttctgaagcaaaggaagcaggttatactgagccagatccaagagatgatctgtccggaacagatgttgccagaaaggtgataattcttgctagggagtcgggtttaaagctagaactgtctaatattccagttgaaagccttgtgccagaaccactacgagcttgtgcatcagctcaggagtttatgcaagagctaccaaaatttgatcaggagttcacaaagaaacaagaagatgctgagaatgctggggaagtcttgagatacgttggagtggtggacgtgactaataaaaaaggagtggtagagctgcgaagatacaagaaggatcatccctttgcgcaattgtctgggtcagataacattattgcatttacaacacgaaggtataaggatcagcctctgatagttcgtgggccaggagctggtgctcaagtcaccgctggtggaatatttagtgatattttacgacttgcctcatatcttggtgctccatcgtaagtgtcattctgcaagcataattttctgcatgtatggttttgcatcctctgctccacgacacgcattatctgaagcgacgaagaattgcttttatgtccaaaacgtgaattttgatcgaaatgaatgatgtcgatggatatccgaacacatgcaaatttgtaccatctatttatttatcttgattttcttcgtaggttatttgcttcttataacgttgtagtaatgtaagcttgtttctcttatcttttgtctggaagaataataagggaatggaacagaactccattaaccttgattgtgagttacattgtaaaggaacggaagtaaacagaatttattataatttttaacttcgctaaatgtctttttaataaaaaaaaaaaaaaa

SEQ ID NO: 5797 - DNA, 725 bp, Glycine max
gaattcgccctttcgagcggccgcccgggcaggtacgcgggggagacattttcataatcgaaattggaagcgaggaaggaaaacccaaatcgaaaatggcagtgatggagaggttgaagatgttcgtcgttcaagagccagttgttgccgcttcctgtctcatcgctggcttcggtctttttcttccagcttttgtgaggcccatgttggattcatatcaggcaaccaagcaacctccccagcctgctttaagtgacgtggttgcaggaatgactggtaaaaagtaaaggtgatttacttgacagatgcaagggcaaatttgctaagtttcttgtttgaacttattttaagtctcaaatgtgagagaaataagagtactgaatattggatttaacttccctgtctgacgatctctatctgttccggaatcattcagtggtttcatttcatattaatttcggctgagttgggttgaaatatcagtttttctgccgcttgatttattcggcctgtactagcagatacgatttctgaaattgtttcgatggatcaatgtgaagtatctttgaatacgttaacacatgaatgttgtttagtatttgagttagtcggcatttaaattaaatattaaaaacacttttagcatttcatgaggtttaggcatccctcttgaacactgaaaacttaacgagggactagcaccctaaaggcctaaacaagtgaaa

SEQ ID NO: 5798 - DNA, 736 bp, Glycine max
ttttgtccggattgatgggccgaacttgtagggcaattgagatggaaaaataataaaaagaaagagaaaaacacaggagaagagaagagagtagaagatacgaagatttgaggcatttatataatcgaaattggaagcgaggaaggaaaatcgaaatcgaaaatggcagtaatggagaggttgaagatgttcgtcgttcaagagccagttgtcgccgcttcctgtctcatcgctggcttcggtctttttcttcctgcttttgtgaggcccatgttggattcatatcaggcaaccaagcaacctcctcaacctgctttaagcgatgtggttgcaggtatgactggaaaaaagtaaaggtgatttacttgacagatacaagtgcaaatttgctaatttccttgtttgaacttattttaattctcaaatgtgagagaaataagagtactgaatattggatctagcttccgtgtctgacgatgtctatttgttccggaatcattcagtggtttcacttcatattagttttggctgagttgtggttgaaatgtcagtttttctgccgcttgattaattcggcctgtactagcagatacgatttctgaaattgtttctatggatcaatgtgaagtatttttagatacgtaaaaaaaaaaaaaaaaaaaaaaaaaaaaaaaaaaaaaaaaaaaaaaaaaaaaaaaaaaaaaaaaaaaaaaaaaaaaaaaaaaaaaaaaaaaaa

SEQ ID NO: 5799 - DNA, 1709 bp, Glycine max
cgatttgtccatcatgatgaatgaaggcgagatctaggttaagcgataaaagtatgaggaatgacaaattaaggatataaaaatggcgatttcgcgcaaaccttgtaaaagttcatataatcctaagtaaaaccatttatttattgattgtgttgtgtgtgtgtgcacggtctcaggtcaggttaattacactcacatctacatccactctctctttctctcttcttcttcttcttcctcctctaagacgaataataatggagcagcttcaaacccccaccatcacccataataacacgaacccagaaaccaacaatggcgaatcccttttcttccaagacttcgacagcacctgctccaccccttacgtcagcgccccttccagccccggccgtgggcccctccccggcttcttctacagcgctccggcgagtccaatgcacttcgccatcacagccgcatcgtcttacgagaaaactccttcttccgcaccaatgggtttcgagttcgaattctccgcccggttcgggtgctccggttcggccgggtccggttcgatgagctcggccgacgagctgttcctcaacggtcagatccggcccatgaagctctccagccacctcgaacggccgcaggtcctggctcccctattggatctggaaggaaatgaagacgaggaggacgaggaagtagtagaagaaggcgttaacgttaacgttagcgttgtccgaggaagagatctgaggctgagggacaagtcggttcgcaggagaaccagatccatgtcccctctccggagcaacacgcccctagagtgggccgagaacgaggaggatcacgaccaaaacgtgaccaagcccaacaaaaccaacatgattagttcctccgaagcagagaaagtagaggatggttttggtttggagacaacaccttcggcctcgtcctcacgctcttcctccgccgggagaagctcgaagcggtgggttttcttgaaggactttctccgaagcaaaagcgaagggaggagtaacaacaagttctggtccaccatttccttctcaccaaccaaagacaagaaaaaccaaaatccaccaaacaccaacaaaaacgtggcttcttctgaaaccacgcagaaacccaagggaacgagtagttctcagacttgggccaggagaataagtgggaagcccacgaacggtgttgggaagaggcgcgtgccagcctcgccgcacgagttgcactataaagcaaaccgggcccaagcagaggagttgaggaaaaagaccttcctcccttacaggcagggtctacttggatgcttgggatttagttctaagggttatggggccatcaatggctttgctagagccttaaaccccgtttcctccaggtaaatttcttcgctttccctttaattgtacagatcattattattatttttatttctttcttcattttggaatcctttagcttagtcttagccttaagaattaagatcaccccatgttcaaggggttcgttttacgagggttctggttctggttcttgttcttccctctccatccttcttgttgaggatgcggaactgataaaagtattattatgtacaatataccaagtcatgtactcgtactcgcagcattttgctatttacacagttgctgtgcagtgactggagtttattactaatatatatattttccccactt

SEQ ID NO: 5800 - DNA, 1788 bp, Glycine max
ctcgagccgaatcggctcgaggtgcccttatcaggttgcagcaaacattggaaggttaaacggcaacgtcaggcagctattgttccagggaatgaaggcttcacctttgatctctttgataactcatatgaccaagcagctattattcgctcattgtctatgtccactgttcgagttaatcatgatgcagctggaaatctggcaataaatgtgtctccggatttatgccattctctccaatttggtttcgttggtgcacaatcagatgatacaaggaggaaatccaatcaaaacaaatcccacttttcaggtgagcttaatttgggaaaaacaggtgaagagtccttaagtgatgaagagtgtgttaagaaaacacattcactccttcgtgaagtacatgaagcaattttcaatgaacaggtgtttgatctggtgaatcgagaagcggccgccccagccgccgggcgcggggtcactggaatacgggaaaattatttactattaagcttaggtcaagaaacctctgtgtacttaacactagtgtccaatagtcaagatcattctacagttgaaggtgaactcaccgataacgcagaaaatgcaattttacctctggaatcatctgatggaatgaagcgtgaagccaaacagaacacctctaacaaagggcagttttctaattccatctgctatgagatttatattcaacagatttttcatgaatatatatttggaaaaggtggtgataaaccaagttcctctggaaatcgtttgtctggcatacaggcaaaggatggatccagtcttcttggtcatttttttaaatctttagctcacaggatattttcaactaaagttcttgcagagctggaaaacgtggtatgcaaggtcccgtatatacagctaatttctaatcccacatggcattctcgggcttcgtcatggacactctacatggaggttcctcaatctgttcttcgtggtagccaaaccaaaacatcagattattatgagaaaaatgctgtcaagcgtcagttttggactaaggtggtggtaaatgatgattgcatcaacgttaaagctgaaggttctccaaatgtcgctggcctgttcaagggaaagattgaggaaacccattcaataaacaaatataactgcaacttagctgatcttcctgtgattattctgcagcaggttgctagccaaattattaattggctctatcaggaagctatgatggttgggataaaagtaaatcgagacttcttatgcctatctttggagctgaagcagggtgaaacacttggccttgttgcaagtgttgatccagaagatagtgaagagtgtatatcttggtggttggtcatggaggacagttttgctgaggagcaaaagcttcatatgagcatcacggatggtgcatctgaatataggaaattcctaggtcacttgtctcttgatttgttatacgcaacactgatcgacttggttggcttgtgcagtggtggaggcggccaatgaagttgtgtcaatgaatgtttttcttgcactttgtcaagtggaagatctaggaggtctcttgtgcaacaactgttttctgtctatttatgagaaataaatgagaagagatgaagagaaaaatgttaaggtttttctttaaaaaaaaaaaaagaatcttcagtctgctatgagaagctttttcttttctaccttgatttataatgagatgttataagtaaaaatagactgttagctgcaattaatgtatataaaaaaaaaaaaaaaaaa

SEQ ID NO: 5801 - DNA, 2038 bp, Glycine max
aattcggctcgagaccaaacacagccttagaatttgcgctcttacaattttttatacagaattagggtttatcaaatttaacccttttgcttctgccattgttgagttttcttctgcaatacgattgaatttcaatatagggttggtgtagaaggttgttctgtgttctcgtgcgtggttaaattttggagatgagtgatgcaaaagagaatgatgaagcagggcagaatgtacccttgactgtggaggaaactcaggagttagttgaagcacaggttcaactagaagatttggctgctcctgtgtccaaaggggatacttcaaatcatgttgaaaacgggaaggaagaggtagtggcacctgtggaggataaaattgtgaaaccagaagcagattcggagtgcattccacaaaaagatgttctaaatagtgaaaatactcttcagccagtccccgtaatggacaatgctcaagttttaaataaaacagaaggtgaatatgcttcagatgtgaagagcaaagctgaagaaactccacagtgtgataagagaatcgagaatgatgctaatgtttggcaaatcaacatggatactgctgaaacgactgtggcggtgaatcccaaagcttttgaagtggctgatagtaaaacttgccttaatggtgactccaactccatatgccccagtcataatgagcctaatacaccacatgcaattcctactgaaatcaatagtggattagacaatgagaatagggataatgaaaagcaggctgttgttgcacatgcagataatggacattcgatctcaaagaacttgtactttttggaccctgatgattcatataatggtaatgagtcaggaacagaagaggagcaatcagcttttatgaaggagcttgaaaatttctttagggagaggagcatggaattcaaaccacccaagttctataaagaggagcttaattgccttaagttatggagatctgtacacagattgggcggctatgacaaggttacctcatataaattgtgccggcaagtgggagagtctttcaaacctccaaagacatgcacaacagtttcatggacttttcgggttttttatgagaaggcacttcttgactatgaaggcatacaacaaaggtggtgagctgaatgtgcctattactcctcttgctgagccaataaatattgaaaatcagtctgtccagggttcagcatcatcgggtagggcgcggagagatgctgcagcaagggctatgcagggttggcactcacaacgtctccttagcaatggtgaatttagtgatcctattattaaggataggaactctttgtctacacaaaagcgtgaaaagcagcttaaaaacatcaatttacttaaacgcaagaaatcatcagacacagttaatgctgtcaaagtggcacacagccaaccatctagaccacaatcggacacatctgtggttgacattggacctcctgctgattgggtaaaagtcaatgtgcaaaaaactaaagattgttttgaggtctatgctttagttcctggccttctgcgggaagaggtgcgtgttcaatcagacccagctggacgcttggtcataagtggtgagcccgagcattctgacaatccatggggggtgacacctttcaagaaggttgtcagcttgccttcaagaattgatactcagcagacgtcggctgtggtgaccttgcatggacaattgtttgttcgagttccatttgagagcaatcagaatagagaaggctgatagattcatgccgaactaatttaccaaggtttataggatagttgacccctaagccaaattcatgccgtgttctattatctctgaattatgtcaataattttttatttaaatttttcatttgatgttctgtcaaaagttttacaatttcaagcattgtttaaaatcaccccttagtaatagtatagtggcagcgttggttgctattctattatttaaaccccatgctaccaaaaaaaaaaaaaaaaaaaaaaaaatttgaaaa

SEQ ID NO: 5802 - DNA, 786 bp, Glycine max
gactcgccgagctggcgcgctccgtgaacgtgcggtttgcgttccgcggcgtggcggcgtggcggctggaggacgtgaagccgtggatgttacaggtgagtccgaacgaagcagtagcggtgaactcgatcatgcagctgcaccggctgacggcggtgaagtccgccgttgaagaggttctgggatggatccggattctgaaccctaaaatcgtgacggttgtggaacaagaagccaaccacaacggggaagggtttttggagcggttcacggaggctttgcattactattccagcgttttcgactcgctcgacgcgtgtccggtcgaaccggacaaggctgctttggcggagatgtatctgcagagggagatatgcaacgtggtgtgctgcgagggaccggcgcggctggagcgccacgagccgctcgctaagtggagggatcggctggggaaagccggcttcagagccttgcatttgggtttcaacgcctacaagcaagccagcatgttgctcactctcttctcagctgagggtttctgcgtccaagagaatcaaggctctttgactctgggttggcatagccgccccctaattgcagcttcggcttggcaagccgcgcctctgggagacgacgaaacgctgcgttttgagcattgaggaaaagaacagaacagaacagatcacttgtttttgtttattctagtaactagtagcagtagtagtacacgggaagagtggtgaataataataatgtggtcatttttgcgtaaaaaaaaaaaaaaaa

SEQ ID NO: 5803 - DNA, 1295 bp, Glycine max
ccacgcgtccgctttaaatttctcttgcgctgtgttgctccgagagtcttaaaacaccgactctcctcccttaaggcaatgaatgaagaaaggccctccttctgcactttgtaattgcgatatttactccaaatttccccttcctgcatacttcttgggatttttccaaacaattaatacatttcctggcctcaatttacactctccttctacccaatacttcaattcaattcaatccctttctctctcctctctttctctctctacaccctacccccctccacctctctctcacaattaaattaagccttaaatcactcccttcgttttccttatataaaatggccctgaacctccaccaattctcgcaacaacaaagatcaccaacactttgctggtgccattctttctgacctctcttccaaaaacacttcctccacccaccttaaaaaaacagaggacagccatgagtcgcagaaacgaaagtggtccaaagcttgacttgaagctgaacctgtccccaccgagggctgatcggagactggattcgccgacacgatcggcgacggcgtctccgacgtcaccgccgagctcgtgcgtgtcttcggagctgaaccaagaggacaagagttactctaacagccctgaagccacttccatggttcttgtgggttgccctcgctgcctcatgtatgtgatgctctctgaggatgatccaaagtgccccaaatgcaaaagcaccgttttgcttgatttcctccatgacaccaaaaaccccaccataaggaggagttagagtaatagagttagggtcctctgtttgtagctccgttttcatctgttcctaatagtaggacatattatattagcttgcaatgcttaggaattaatctccttttactgtttttaactattccccccttttatgagtagtgctatgtgcgctccacttttacgctctttcccaacaattttgtcaaagcaggggatgcagagattgcagagacagaaagaggcagagtggagcgtgaatagcactattttcaatcacctatagaaagttactgggaaattcggaaatgttaggtatctattatataggagctgggtgctctttagcggttaaaaaaaaaagtgtaatagggggcttataatctcaggtgccctccctcttagcttgcttgttgaaatttaaggtgaaatcatcaaaccttagtttcccttgactctcttttgctctgcatcaatgatgttatgttaatgttactgtttcattcacaaaaaaaaaaaaaaaa

SEQ ID NO: 5804 - DNA, 1134 bp, Glycine max
ctccttctacccaatacttcaattcaattcaatccctttctctctcctctctttctctctctacaccctacccccctccacctctctctcacaattaaattaagccttaaatcactcccttcgttttccttatataaaatggccctgtccctcccgcccccctggcaacaacaacaacaaagatcaccaacactttgctggtgccactctttctgacttctcttccaaaaacacttcctccaccaaccttaaaaaaacagaggaaagccatgagtcgcagaaacgaaagtggtccaaagcttgacttgaagctgaacctgtccccaccgagggctgatcggagactggagtcaccgacacgatcggcgacggcgtcgccgacgtcaccgccgagctcgtgcgtgtcgtcggagctgaaccaagaggacaaaagttactctaacagccctgaagccacttccatggttcttgtgggttgccctcgctgcctcatgtatgtgatgctctctgaggatgatccaaagtgccccaaatgcaaaagcaccgttttgcttgattttctccatgacaccaaaaaccccaccataaggaggagttagactgatagagttatgatcctctgtttctagctctgttttcctctgttcctagctccgttttcatctattcctaatagtaggacatattatattagcttgtaatgcttaggaattaatctccttttacttttttttactgttttaactattccccccttttatgagtagtgctatgtgcgctccacttttaccctctttcccaacaattttgtcaaagcaggggatgcagagattgcagagacagaaagagacagagtggagcgtgaatagcactattttcaatcacccatagaaagaaagttactgagaaattcgggaatgttaggtatctattatataggagctgggcgctctttagcggttaaaaaaagtgtaataggggcttataatctcaggtgccctcttagtttgcttgttgaaatttaaggtgaaatcatcaacccttagtttcccctgactctcttttctctacatcaatgatgttatgttaatgttactgtttcattctctacatcaatgatgttatgttaatgtt

SEQ ID NO: 5805 - DNA, 2052 bp, Glycine max
tcagctacgtaggcccccccccccaactttgcttctctctctctctgtatcaaacctcttctactttcgttcctctcttctctgtttcaaacaaacggagaacaacctcaactaaagatttgaagggagtgcgcaattgatggatgaatattctgctaaaagagccactgatggggtggtagtccctagaaaggggatacgccatgcatttagagatactgctaacgccagagatcaaaatggtcaggtgtgcagccgcattacttgtagtagcagagtcaatactcctaaaggtgctcaaattggttcttctgaaaaaggtaaatctttgaaaccttcaatccaatcttcttcagctggcaaggaagcaattggaagctcctctagaacatttttcaagactaatagcccaggaaaaccgcttataaagccacggaaatcaccatcatctcagttagagacagattcatctgaaattagtagtgtacaggatgattcagaagtttcaaaactcgcccctccccctgaaaaaagtcagacaaatgttcaagctgaattggaaaatacagtgtctggtaatgccatgatggaagtaggaagctctagtgtagtatccaatacaagatctcggaggaattttcatccaaagcctggattaaggggccaagaaattaaaagcactggtccagtgacacgtgctggtaccagtaggtatggattgaggaacctcaaatgcaacactatttctgatgtcatccctgctggttgttcaccttcagattcaacccttaacagaaagaaggatgtcataaaaaagagaaattgtgaaggggaaggtagttccactggtagagggaagaaaatgagcgggtcttcattagaagcacgaaattctggctccagaaatggcatatctatctctgattcaagaatatctaggaatactcctcacagggacaggtcagacagcaacatggcaccagttagaactcgaaaattgattagtggtcgtaccaggggaaggctttctagccaaggaaatgccaatcccatgccacctaatgagtcccttgtcaagatacctgatttgccccgttctggtggtcttaatattcctggtgtatcacgtcatacttctgtagatagtcccttaagttgtcctagctctcatagtagaccagttactggcagtgaggagttatatggtgttatgcctgtatctccttcagagtatggcctcactcattctctaatgaatctggatagctttcgacgacgttacaacatggatagtattgcagaggtattggtggcacttgataggattgaacaagatgttgagctaacacatgagcaaattcgtttactggaatccaacttgttcctaactggactaaacttctacgatccacatagagacatgcgattggacattgataacatgtcgtatgagcaactgctggctttggaagagaggatgggtactgtgagcacagctctaacagaggaaacactatcagaatgcctaaagaaaagtttctaccagtccccaccctctgaaaatgcagctgagagttgcaatgaacataaggatgataccaaatgcagcatttgccaggaggaatatgtggctgcagatgaagtggggagtctgcaatgcgagcatgcgtatcatgtggcttgcatacagcagtggctacagctaaagaactggtgccctatttgcaaagcatcagtggcaccgtcaaattcatcaccatcccaatgatcccatcaatttcaatgttaggccagacgagggagactgatttctttgtacccctcttgctgttcattttattcttcatcacttctgtacaaaatacagttgctcctcacttatttttattggtcatttgtacatagccaatattttcatccccattatagaataatccaagccattgctggaacttgttgataatctgctggtgcaatgttttacagccttcatcttatgttccttttttttaatccatacataaagaagcactaaggaattcggaaggaaaa

SEQ ID NO: 5806 - DNA, 946 bp, Glycine max
aaaattgaatttgaactagaaaggaagagagtaactacgatttgaaggaagagacgcagacataggaggttttccgccaaattcgaaaatggtgaaagaaatcgaaactctgacagaagatgaaagacgcgcacttcgtggaagcaaattcgcccctcttccccgcccttccaattccaaacctaggttggctcatccaggtggacccttggcgacgaataaagcagcggctttggccaagtttctggagagaaagctgaaagacccaaatggattggcgtctattaaccctgatatccttgaacttgctgtcaataatgccaaagaaactgtctatgcaagtggtacttctaattcacgaagaaatgttcggcatgtggactcctttggtgactctgattctaaggattctagtgatgaagagcagaatgaactatctgaggtaaaggaatgcaagaagaagaagaagaagaagaaaaagaagaaagagaaaaacaaaaacaaaaagccaaagaatacagaggaccctggatgtgccgtgatgaaaaagcctaaacagaagtttaaattctgatcttatttgtactggcaaaattttgaaaaaggattggagctcaaaatttttagccatggtttctttccttgcccaaatttgctacttacaagtaacatggagtttagatgcaatattgtgcaggagcttttgattcgatcgacctttccaacaagctacaacatagattacgaacctttatatatatatattgttagattctttcatgttgtgaaggtggagggaattattgttgaaacaagtccaatttccaaatattaaatggcaaaaatgcaggtcgggcgatgggatttcaaatcgttgttgtaatttgtaaacattcaatttcaatcgggataaacactttcatttgtcaaaaaaaaaaaaaaaaaa

SEQ ID NO: 5807 - DNA, 1865 bp, Glycine max
gtattaggcgcgttgcttgtgtggatgtcccatctcaatacctggctttggcttctctttattattccttccttccttcttcgcatcaacaaaccctaacatagcatcctaagatacagagactatcaccatcgtcctgctcatttggcacatgcttctccccctgaatactttgtccgcctggagaacacaacttacaaagacgatctatatttaaggaagaggacaaggatgcgtcggtggctttgttgtacttgtcaggtggaagagtcttacccatcaaatgaaaatgaacacctgaaaagcccaaggaattatggagatggcaaccaaaaaggctcaaaggtgtcagctcctgtcaaacctgaaacacaaaaggcacctccacctattgaagctccagccttgtctttagatgagctgaaggagaagactgacaactttggttcaaaggcattaataggtgaaggatcgtatggaagggtgtattatgcaaccttaaacaatgggaaagcagtggctgtgaaaaagcttgatgtttcatctgaacccgaatcaaataatgagtttttgacccaggtttccatggtctcaagattgaaggatgacaattttgttgagttgcatggttactgtgttgaaggaaatcttcgtgtacttgcatatgagtttgctactatgggctctcttcatgacatattgcacggtagaaagggagttcaaggtgctcaacctgggccaactcttgattggatacagcgagttagaattgcagttgatgcagcaaggggattggaatatttacatgagaaagttcaaccgccgattatacacagagatatccgatcaagtaatgtgctaatatttgaagattacaaggccaagatagctgactttaacctttctaatcaggcccctgacatggctgcacgtcttcattcaactcgtgtattgggaacttttggttatcatgctccagaatatgcaatgactgggcagttgactcaaaaaagtgatgtctatagttttggtgttgttcttcttgagcttcttacaggaagaaaacctgttgaccataccatgcctagaggacagcagagtcttgtcacatgggctactccaagattaagtgaagataaagtgaaacagtgcgttgacccaaaactgaagggagaatacccccccaaaggagttgctaagcttggagctgttgcggcactgtgcgtgcagtatgaagctgagtttaggccaaatatgagcattgttgttaaagcactccaaccacttctgaagtctcctgctcctgctcctgctcctgttccagaaagttgaagcaaataaattcgctttggtttctgcatcttctgcacagttcgattcagttatctccagatttcatcaaatactgcggatatatctatatatttttttattattttttgtttgagattggatgacatgtgtaggattgggttggctcgtttaatgtcattgttaaattccatgtatttattgcatcacacttgtagtgctgagtctgctgacacccattgagccataatgcaacaataggttaatttgggttgtgtgggtaaatgttgtttgtcacttaacgttaatgccctccatattctttatttgtttcttgctatcaaactgagctgatacttgccttgaaagacctactatatttgtgggacctctctctctctctcgctttttgcggtgtgtttacaggattataattattgttcttgttatcggttgtgtagtaagaggattatgattcgtgtttttgtaatttacttagtctcgtaaaagtagtttctgacttaaatgttttgtttactttgaaaaaaaaaaaa

SEQ ID NO: 5808 - DNA, 1641 bp, Glycine max
attcgccgcgtcggcatctccctccttaaaccctagacgtcgctcatggcttccgagaacgtaagccccgagacagtatccaaagccgtcgatgctctcctccaatggcgccgctcccaatcggagattcagaaaccaaaactcttgggcgaagacgaagaattcgtgtacctgatcctcacgctgaagaagatcccttcaaaatcccgagttaaccctcacaagattcctctcccgcactccctcatctcccctttctccgagcagtgcctcatcctcgacgaccggcccaacaaggcccgcgtcaccaaagcccaggcccaagccaaaatccagtccgaatccatccccgtccacaaagtcctcaagctctcgaaactcgcctccgattaccgccccttcgaggcgaagcgaaaactctgcgattcttatgatttgttttttgcagagaagagcattgtgccgctcctgccgcggcttctggggaagagttttttcaagaagaggaagattccggtgccggtggacctgaagaaggggagctggaaggagcaggtggagagggcctgctcgtccgcgatgctgttcatgaggacggggacctgtagtgtggttagggttgccaaggtgaggatggagagggatgagattgtggagaatgtcgttgccgcgattgaggggattgtggaggttgtgcccaagaagtggggcaatgtgaggtcgctgcatttgaagctgctggagagcgtggctctgccggtctaccagactgttcctgatgtgaagttgaagattgagggatttaaggttgaggagaagaagaatgagaaggagagggatggtgaggttagtgattcgattgagggagggacggagaagaagaagaagaagaaggggaggattcatgaggttaggtatatggatgagaatgttgtggaggctgggatggaagatgaattggcgagtgatgacgatgatagtgaagatgagatggtgagtaagaagaggaagaaaggggtttcgagtgagttgagtggtgttgagcaattgaagaagttggtatttaatgagttgagtgccaatgggaagaagaagtcaaagaagggctgcttgtctgttgggaagggggttaagggaggtttgattgaggggagtggaagtgaattggttgtgaaggatgaggagtcgggggtgaagaagaagaagaagaagagaggggatgtgaaggctacgaaaagtgtaaaggctaagataattaagaaggctgtgtgagttggattagtgtttgatgttagaaattgctgcttgatgtggctctgtgcaagattgtatggttctgatttttgagcctctagcggatttttgttttagaccgcattattatggtagttgtgtgttgtgtcagttcaattcatcatttctaattcaaatttactatatttgaggtttagaatgattgttaaatgggcaagaatctaaatgttgcatcccccacaagtgtttagtatactagagatatttagatattgcatgttgttggagtttgacttggaatttgagatgaaaagttggtgctgtactttaagggaaaatgtatcaaggaaatgttaggagaatgctgagaacaaaaaaaaataaaaa

SEQ ID NO: 5809 - DNA, 767 bp, Glycine max
  misc_feature (11)..(11): n is a, c, g, or t
tcgagtcagcnacgtagtgcccccctccaatcccactacctctcaattccgcgctttaacaacagaaagaaatccacacatttccctttcaatggcacgaaccaagcaaacagcgcgcaagtccaccggcggcaaggctcctcggaagcagctcgccacaaaagccgctagaaagtccgctccggcaaccggcggagtaaaaaagccgcaccgttttaggcccggcacggtggcgctgagggagatccgaaagtaccagaagagcacggaacttctgatccggaagctcccgttccagcggctggtgcgcgagatcgcacaggatttcaaaaccgatttgcggtttcagagtagcgctgtttccgcgcttcaggaagcggcggaggcttatttggttgggttgtttgaggatactaatctttgtgccattcacgcaaagcgcgtcaccatcatgcctaaggatattcaacttgcaaggaggatcaggggcgagagggcttgaggttttaaaatgtttcgtcaccgctaggatacgttaaaataggatctggttcatgtagtttggggttttggtgtatttagtctatcgtgagggttgggattgttagtatgaagatgtggagttaaagatatctggcttattagtagtttagtgattactttgaattttctgattgggttaatgaattgaaaggttgattgcaatgaattttggcttcatctagttcttcttccattatgggttgcaaaatcatgcaaaaaaaaaa

SEQ ID NO: 5810 - DNA, 1746 bp, Glycine max
ctattattttctctttttcattttgtttgtgagcttagcaccacaccagacctcacctatggcaaatccaattctctcctttctcttgttggccctcctctgcatcctcgccttggctcacgccgattcccatttcgaaggctttgaagccgaagacgatgacgacctcgaagactcttccatcgatcccgcctctctccgatcaccgcccctctccgaccctactcccctcaccaccgatcccaccccccaacctcctgcttcagatctccccaaatcccctcccgccaccaccttcgatttctgggacgacgaagaattcgaaggcgtccccgtcgaacaccccgcccccgagcctccctccgatcccaaatcccccgaaaactccaccaccactcaaacccctccaaccctcacccctccgcgctccttcaccgtagagatcgtctgcggaagctttcttattatgttcgcaatcaactacttcactgggaagcgcgagaacgagaacatcgcgctatcgtgggcggcgcagttcgcggcgaaggattcgatcttcgagaagaatttcagcctcttggggatcggcgacgggggcgaggaggcgccactgctgctgaaggaagggcagacgacgttcaagttctacgcgagcgggagaaggtactgccagggtttgctggccactctggagttgaagagcagacacgatctcatcgccaggatctacaatatgatcgttccctgcagggacgagatcgccttcgaggtctacatgaacgacgacgccatggatcatgtcgttttcgccatggccaagaagaaggccgccaaggccatgcataaggatgtcagggatttgcagaggttcgctacccttctctcccctcccactgccactgcctctgcccgtaagtgggtcgctgatgacctcgctgtcatttctgagtccaaagaggtcgctaatgatttcatcactgatgccgtcattgatcaggtttttggtgagaaagcttttgagaaatttggaaaaggtttaatttcattacatttctccgaccagcaccctggtatacacaagaaggtattgttgttcaagtttgtgcttccagctgctaagaacatggctgatatgactcgactggtggctcttgttccgtattacattgacttgatcggacgatacaaattaagttctcaggctcggtctaagacagaggctgcgcgacaaaaggctgctgtagaagcacagaaagaactccgaaatgcacagcaagaggccatgcagagaagaaaggcagagaggaaaaagatggtggaggaggctgaggcaaagctcagtgcagaggctattcgaaagaaagaagcaaaagagcgtgctcgtcaaatgaagaaggcaatgccaaggatgaaaatggctcgtggtgcctaattcttgaattgatgattcgtttgccagtagaattgaaggccttccccgcccccagcgtacgttgtattgtagttggccttttgtagaatttacggcaatgtacgttttcagttggcatttcctgctacactagctagataggcgtgaccacgtcttaggcggattttgaatgtaccaaaatttccattttagagacatttatgagctcttgataacaagttaaatctctttattctggcttctatttgacaatgttgtaatcccattttctttttgtcatcgtgctgtgacaaatgtctaatgacttttttttt

SEQ ID NO: 5811 - DNA, 1790 bp, Glycine max
ccacgcgtccgcttaactcggaatgtgtcttgtgtaatcgaattaggtattgtttctgagtatgggaaatccgagtctctcatctctcttgttggtcttactctgcatcatctctctcatccttgccttggctcaggcagattcagattctcatttcgaaggctttgaagccgaagacgacgatgacgacttggaagactcttccatccatccagcctctctccgatcaccccccctctccgaccctactcccactccccagcctccaccttcggatctccccaaattccctcccttcgatttttgggacgacgatgaattcgaaggcgtccccgtggaacactcctcccccgagcctccctccgatcccaaatcccccgaaaacgccaccaccactcaaacccctccaacccccaaccctcctcgctccttctccgtggagatcatctgcggaagctttcttatcatgttcgcaatcaattacttctccgggaagcgcgagaacgagaacatcgcgctgtcgtgggcggcgcagttcgcggcgaaggattcgatcttcgagaagaatttcagcctcttggggatcggcgacggtgtagacgaggaggaagcgccactgctgctgaaggaaggccagacgacgttcaagttctacgcgagcgggagaaggtactgccaggggttgcttgccactctggagttgaagagcaggcacgatctcatcgccaggatctacaacatgatcgttccttgcagggacgagatcgccttcgaggtctacatgaacgacgacgccatggatcatgtcgttttcgccatggccaagaagaaggtcgccaaggccatgcacaaggatgtcacggatttgcagaggttcggtacccttctctcggctccctctgccactgccactgccactgccactgcccgtaagtgggtcgctgatgacctcgctgtcatttctgagtccaaggaggtcgctaatgatttgatcaccgatgccgtcattgatcaggtttttggtgagaaagcttttgagaaatttggaaaaggtttaatttcattgcatttctccgaccagcaccctggtatacacaaaaagatattgttgttcaagtttgtgcttccagctgctaaggacatggctgatatgactcgactggtggctcttgttccgtattatattgacttgatcggacgatacaaattaagttctcaggctcggtctaaaacagaggctgcacgacaaaaggctgctctagaagcacagaaagaactccgaaatgcgcagcaagaagccatgcagagaagaaaagcagagaggaaaaagatggtggaggaggctgaggcaaagctcagtgcagaggctgttcgaaagaaagaagcaaaagagcgtgctcgtcaaatgaagaaggcaatgccaaggatgaaaatgtctcgtggtgcctaattcttgaattgatgattcgttcgcctgtagaattgaaggccttacccaccccagcgtacgttgtattgtagttggccttttgtagaatttacggcaatgtacgtttttagttggcatttcatcctaactagctagatgggtgtgaccacgtcttagggggattttgaatgtaccaaaatttccattttagagctcttgataacaagttaaatctctttattctagcttccatgtgacagttctgtattcccattttcttttttcatcgtgctgtgacaaatgtctaatgaccttgcttttgaattttttgaactctattttcataaaaaaaaaaaaaaaa

SEQ ID NO: 5812 - DNA, 1582 bp, Glycine max
ccaaacctcactaatccaatccaacttaaccctcctcatattttccattctccttagcttcgtagctaattaacgaagtgatcacaaagaataaagcatttagttcaggtaattgaacatagtatataagttgttgtaaacttcatatctgactttgatccttacggattaaaagaagaaaaaaaagtgatcacagagagagaggcacgatggtgaacctggtggcagcacagaggccattgttacatggcctcatgaagatggcaggggtgaggccctacacggtggagattgagcccgggaccgtgatgagtttctgggtcccttctgaaacacttacgaagccgaagaaaaaaaacgagaagcccagaatcagctcgaagcccagcaggcccgcggtggttctggtgcacggctttggcgccgagggaatcatgacatggcagtatcaagttggcgccttgacaaaaaaatacgcagtctacgttcctgacctcctcttcttcgggggctccaccaccgacaaaccccaccggtcgccggcgtttcaggcgcagtgtgtggtggcggggttgaggaagctcggggtggagaagtgcatagtggttgggtacagttatggggggatggtggcgtttaagatggctgagatgtacccagaagtggttgaagcgttggttatcacagggtccattttggccatgacggactccatcagcgccacctcactgcaagagctagggttttcttcttcctccgagctcttgttgcctacttctgttaagggtctcaaggcactcttgaccgtggcttcgcacaagaagcagtggtatcccaatcgtttgctcaaagattatctcgaggtgatgatcacgaataggaaggaacgaggtgaactattggaagccttagtagttagcgacaaagatatcatcatcccaaatttttcacagagaatacatcttttatggggagagaatgataaaatattcaatctggagcttgcgcaaaatatgaaagaacaactaggggatggtacaacatttgaagccataaagaaagctggtcacatggttaacatggaacgaccccgtctcttcaacagatgtctcaagcagtttattgcctccttcttggccccaaatggacccaaaaaataatgtccagggtctgtattctaaacaggcacactactacttttcataagatgattttactgttcctttcttttctatttttttttatttaacgcaaaagttatgagcatttatctaaaaccatgttacacgataatttaacattattttaaataatgtaatgtgtattcaaacacactatatatatatatatatatatatattatattcttttttttatgtttttttatttatttaaattcagtctcactaattcgaaatgtgacttatgaaatagagaaagcaaattacccttgtattttggacacatgtttgtatgcacttgaatggcatccatgtagaatctacacaaaaaatagcttctacatgcatgtttggattggattgacattgacatataatagatattttctctgagttagagg

SEQ ID NO: 5813 - DNA, 943 bp, Glycine max
acggctctacgtttccgttttcagtttcttcttctttttcttcattagtctagtgacgaaccatcttaattttctcacaattcctctgttctcgaagggcgtaggagaagagggtttcgttccgtttcaatggggagcgaagagcagaacggcgaattctacctgcgttactacgtcggtcacaagggcaagtttggtcacgagttcctggagttcgagttccgcccagacggcaagctccgctacgccaacaactccaactacaaaaacgacaccatcatccgcaaggaggtttacctaacccccgccgttctccgcgagtgccgtcgcatcatcgccgagagcgagattatgaaggaagatgataacaactggcccgaaccggatcgggtggggcggcaggagctcgagattgttatggggaacgagcacatttcgttcaccacgtcgaagattgggtctcttgttgatgttcagagcagtgctgaccccgagggtcttcgcatcttttactatcttgttcaggatttgaagtgctttgtcttctctcttatttcacttcacttcaagatcaagcctatctaatgtgtttgcaataatatgagttcatcctctggggaatatgtactttaacaactatcacttttctgctaatggagttcgacctctgattgagtgactttaatcttgaaatgatttggttctgtatgggtgattacatgaattggaattttaaatttgagggtataacccttgttctaaagtgttgattggtttggtttttatggatggattagttattctttcgttgctcttgatttcactattcttttgatcacccattgttatatccctaaaaaaaattactcttattggaactatttaaaaatgtttctctcataattatagaaaaaagaaaaaagcagagtaaatccccctattt

SEQ ID NO: 5814 - DNA, 1083 bp, Glycine max
  misc_feature (953)..(953): n is a, c, g, or t
  misc_feature (955)..(957): n is a, c, g, or t
  misc_feature (985)..(985): n is a, c, g, or t
  misc_feature (992)..(992): n is a, c, g, or t
  misc_feature (997)..(997): n is a, c, g, or t
  misc_feature (1010)..(1010): n is a, c, g, or t
  misc_feature (1018)..(1018): n is a, c, g, or t
  misc_feature (1022)..(1022): n is a, c, g, or t
  misc_feature (1028)..(1028): n is a, c, g, or t
  misc_feature (1031)..(1032): n is a, c, g, or t
  misc_feature (1034)..(1035): n is a, c, g, or t
  misc_feature (1044)..(1044): n is a, c, g, or t
  misc_feature (1047)..(1047): n is a, c, g, or t
  misc_feature (1049)..(1050): n is a, c, g, or t
  misc_feature (1055)..(1057): n is a, c, g, or t
  misc_feature (1062)..(1062): n is a, c, g, or t
  misc_feature (1069)..(1070): n is a, c, g, or t
  misc_feature (1077)..(1082): n is a, c, g, or t
tcagctacgtaggccccccccccactactactacattagtgaagaccatttttcaattagtctcctctctctctctctctctctcacacacacactttggccttaacagaaccgaacacaacacgagagagatagagatacaacagaagaacaaactccgacatctctcgctttctctactttgccctgtttttattcggaagcaagcaaggcttaaatatatagatccctctttcccgtgtttttccttggatgaatctcaatctgaatggtataaggaataaaaaattcatcgtcataatcaggtatggaagttgggagcgtggtgttagtatggtggtggattagtctgatcccgaggattttatcagatccaagcgacgaagcatgcctgacgaacctaagcaagtccttggaagacccaaacaaactgctccataactggaaggaagagaacttcgccaagccctgcaacgactcctcctcgaatctccgaggcgcaatctgcaacaacggacgcatctacaagctctccctcaacaacctctctctccgcggcaccatatcccctttcctctcaaactgtaccaatctccaaaccctagacctctcctccaacttcctcacaggcccaatccccccagaactacagtccctggtcaacctcgccgttctgaacctctcttcgaacagtctccaaggggtgatccccccggtgctcacaatgtgcgcctacctcaacatcatcgacctccacgataatttgcttactgggcccatccctcagcaattgggcctgctcgttcgcctctccgcttttcgatgtgtccaataaccgcctctcagggcccatcccggcttcgctttccaaccgggagcgggaacttggccagattcaacgccagctcattcctaaaagaataaggatctctacgggtacccggtgcgcgttnannnaaaaaaaaggggttggccggtttgggcnattggtngggancgggttgggaaanggccttgntagntgggtnaanntnncccgggggnttngnnttggnnnaattnccggggnnaaagggnnnnnng

SEQ ID NO: 5815 - DNA, 1672 bp, Glycine max
caattgcaaacgtaggataggggtttttgtttcgcagtgagctgagcctattatcaacatcaacattcaacacaaacaatttcagtgaatcagcacaattttttattttttttgtcttcgtgattattattatttggatcatgctcttcgcttcaattttccttttcagctacgtaggcccccccccccccaaaattttctgaatcacatcagattcaattgaattatacccctcaatgcaatggtggtctgcaaatgtcgcaaggctactaagttatattgcttcgtgcacaaagttcctgtctgtggggaatgtatctgcttcccggagcaccaaatctgcgtggtccggacttattcggaatgggttatagatggggagtatgattggcccccaaaatgctgccaatgccagtctgttttggaagagggggatggatctcaaacaactcgactgggttgcttgcatgttatccacacaaattgcttggtctcgcatatcaagagttttcctccacatactgcccctgcaggatatgcgtgtccttcatgttctacttcaatatggcctcctaaaagtgtgaaagattcaggatcacgtcttcattccaagttgaaggaagctatcatgcagtctggtatggagaagaatgtttttggaaatcatcctgtatcagtgacagaatcacgaagtcctccacctgcttttgcttcagatccgttgattagtagggaaaatcatggaaactcagactcagttgatggatactcaactacaactcgatcagaactacctaaactttcagtgacagatattgtggagatagatggtgctaatccagcaggagatttcttgaaaaactcaagtcctgttggtcctggtgccaccacaaggaagggctcagtccacgttgaacgacagaattctgaaatttcttactatgctgatgatgaagatgcaaatcgtaaaaagtacacaaaacgaggtccattccaccataagtttcttagagctttgcttcctttctggtctactgctttacctactctaccagtgactgcacctccaaggaaagatgcatcaaatgcagcagccgaaacctcggaaggccgtacacggcatcaaagatcatcaaggatggaccccagaaaaattcttctcctgattgcaattatggcttgcatggcaactatgggtatactgtattacagactagcgcaacggggtccaggggatgagcttcttaatgatgaataaatttgtctgccattgagtgagtgctcttaaagtccggagatgttcagcggctcccattttccatattgctggttactgttgcttcttaaatccgtttgccttctttatttggaccagtcgcagtcttggcaaacatacaagtagtagtttgttgataatttttcatctggaatgcctatgacagtgacgtgttacataaaatcctagtcagccatctttgctctttgccctcagttttggtgtccacttggaatgaaattgcatcatattcagattttaatattgttctcttaattggattagttgtctccaccatttcaaaaatcaattaaagacattgttagccggcccgtgttttaaaaaaaaaaaaaaaaaaaaaaaaaaaaaaaaaaaaaaaaaaaaaaaagggcggcc

SEQ ID NO: 5816 - DNA, 1036 bp, Glycine max
ggctcgagaaattgtaatctcagaacatgtttgtatgtttgtgtttacgatcttttttttctctatttaagtagatactatgttgtcccataactcctttgaagccgtaggttgctttgctcacctaggcaccaatgctacgaaaaaagataaaactttggttatctcaaaatatggagcaagtggagattatcctgcttgtaccgacttagcatataataaggccatatctgatggtgtggatgttcttgactgtcctgttcaaatgtctaaggacggaacaccattttgcttaaactccattgatcttatagagagtacaacagtcgcccaatcaagcttcagcaaatttgccatgactatccctgagatcaaatctggcagtggcatatttgcattcaacttgacatggaatgatataaaaatcttgaccccctcaatattgaacccttttgcaaaatacagattgttcaggaatccaagatctaagaatgctgggacattgttggcattatcagatttcttgtccttgacaaaaaatcagacttctctatcaggtgtcgctatcattgttgagaatgcagcctatcttgcagacaagcaaggattaagtgtgattgatgctgtcatcggtgctttgagcaaagcaggttatgataaaccaggatcccaaaaggtttatattcaatccactaatagttctgtactgctgaaattcaaggagaaaaccagttatgagcttgtgtacaagattgacgagaccgttggtgatgccgctaatgcagctgttgaggatataaagagctttgctagttctgtggttgtcaacaaggactccataattcctaataatgatcaattcctgacggcctatacaaatattgtgccaaagctaataaatgctaacctctcagtttttgtagaaacattcagcagtgaagtaagtggctaagcatgggattttctctcaagatcaactggtgagaacaactcgtatattggagggagcacaggtggatggtttatcacaggactt

SEQ ID NO: 5817 - DNA, 1593 bp, Glycine max
  misc_feature (185)..(185): n is a, c, g, or t
caattctactcaattatcaaaatgatcaaaagataatatccaacagaaacataaaagataaaacccaatgaaaaatagtctaaaagaacctcaaacaaaaatctggcagtaaaaaaaccaaacgggtacgtcttctactaaaaacgcctgatagacaccaagtatttgtaaactcattcatcaancacgttacataaacaagttgggctttttggccttgtatgtggtcttcagctttccctcgtgccgaattcggcacgaggtattgaacccttttgcaaaatacagattgttcaggaatccaagatctaagaatgctgggacattgttggcattatcagatttcttgtccttgacaaaaaatcagacttctctatcaggtgttgctatcattgttgagaatgcagcctatcttgcagacaagcaaggattaagtgtgattgacgctgtcattggtgctttaagcaaagcaggttatgataaaccaggatcccaaaaggtttatattcaatccactaatagttctgtactgctgaaattcaaggagaaaaccagttatgagctagtgtacaagattgacgagactgttggagatgcagctaatgcagctgttgaggatataaagagctttgctagttctgttgttgtcaacaaggactccgtaattcctaataataataaattcctgacggcctatacaaatattgtgccaaagctaaaaaatgctaacctctcagtttttgtagaaacattcagcaatgagtttgtgtctcaagcatgggatttcttctcagatccaactgttgagatcaactcgtatattgagggagcacaaattgatggtatcatcacagacttccctaaaactgctgacagatacagaaggaacaaatgcttaggtttgggtgacaacaaacctacttacatggaacctgttcaaccaggtggtctttttggactcattaccaaagaattcttgcctccagcagaggctccgcttccacccttgacagaatctgaagtggcagagtcacctttgcctcctgttgctaaaatagccccagcttccagcccgaatgccagaaccaaatttccacagggaaattcacagcctaaggtcactgtctgcttcttcttgtccactctggctgtgtttatagcttctcttcttctgctttgagtaaaatcatctctaaacttccttctaagaaaaaaaaatggagaaaaggttgcttttggtggtctcaaccctctattttccacatctcttctaggtttgagtggcatgaagcttttggcttcagactagatgaacaatccacatttttttttgttcttcttagaaggagcaaattctttcaatcttatttgttgtagctacgcttgtccattcttagttcctcaattgcttctcgggttggatactatgagcacaaaagcctgcgtggtatatatctatgaattctttttagatgtgtattttgtatcttttgctgcaagatatatttatatttaatacttgtcggggtgcatttcgcattagattaacaattttcccgaaaactatccagagcatatacatggcttgattgt

SEQ ID NO: 5818 - DNA, 970 bp, Glycine max
cattattaggaattatggagtccttgttgacaaccacagaactagcaaatattgtgccaaagctaaaaaatgctagcctctcagtttttgtagaaacatttagcaatgagtttgtgtctcaagcatgggatttcttctcagatgcaactgttgagatcaacacatatattacgggagcacaaattgatggtatcatcacagacttccctaaaactgctgacagatacagaaggaacaaatgcttaggtttgggtgacaacaaacctacttacatggaacctgttcaaccaggtagtctttttggactcattaccaaagaattcttgcctccagccgaggctccatttccacccttgacagaatctgaagtggcagagccacctttgcctcctgttgctaaaatagccccagcttccagcccgaatgccggaaccaaatcaccacagggaaattcacagcctaaagtcactgtctgcttcttcttgtccactctggccgtgtttatagcttctcttctgctttgagtaaaatcatctctaaacttccttctaaggaaaaacaaaaaaaatatggagaaaaggttgtttttggtggtttcaaccctctatttccacatctcttctaggattgagtggcattgaagcttttggcttcaagactagatgaacaatccacattttttttgttctcttcttaaaaggagcaaattctctcaaccttatttgttgtagctacgcttgtccattcttagttcctcaattgcttctcgggttggatctatgagcacaaaagcccgcgtggtatatatttatgaattctttttagatgtgtattttgtatcttttgctgtaagatatatttatatttaatacttgttgggggtgcatttggcattaggttaacaattttcccgagaattttccagagcatatacatgggttgattgtttcaatataaacaatttttactc

SEQ ID NO: 5819 - DNA, 2511 bp, Glycine max
cgggaaatgtggtaatacaagacaatctgcagtttccaagtggtgctggtggcggtggcggcggcggcggtgctggcggagagatccaccagccccaccactaccgcccgcaatggtttgttgatgagagggatggacttattggttggctgcgaagtgaattcgcagctgccaatgccatcatagactccctttgtcaccatttacgtgttgttggtgatcctggggagtatgatatggtcgtcggggccattcagcagaggaggtgtaattggaaccaggtgctgatgatgcagcaatacttttctgtggctgacgtggcatatgcgctgcagcaagtggcgtggaggagacagcagaggcctctggatccaaggaaagtgggtgcaaaggaagttaggaaatccggttctggataccggcatgggcagaggtttgagtctgtaaaggaaggttataattctagtgtagagtcttatagtcatgatgcaaatgtcgcagttactggaggcacggagaaagggactccagttgttgagaagagtgaagaacataaatcaggtggaaaggttgagaaagtgggggataagggtttagcatctgttgaagagaagaaagatgctataacaaatcatcaaagtgaaggcagcttgaagagtgcaaggagtactgaaggatctttgtctaacttagaatccgaagctgttgtaaatgatggatgtatatctaattctaaagggaacgatttacattctgtgcaaaatcaaagtcagagccaaagtctttctaacatagcaaaaacttttattggcaatgaaatgtttgatgggaagacggtgaatgtggttgatggactaaagttgtatgacgatttatttgatagcactgaaattgcaaatcttgtttcactggtcaatgatctaagggtttctggaaaaaaaggacagttacaaggaagtcaggcatatatagtttcaagaaggcccatgaaagggcatggaagggagatgattcagttgggtgttcgaattgctgatgccccagcagaaggggaaaatatgacaggagcctccaaagatatgaatgtagaatctattccttccttgtttcaagatattattgagcgtatggtttcctcgcaagtaatgactgtgaagcctgattgctgcattgtggatttctataatgagggtgatcactcacaaccccacagttggccatcatggtatggaaggcctgtttatgtgctttttctgactgaatgtgaaatgacttttggaagagtaattgcctcagagcatcctggggattataggggcagtatcaagctttctctagttcctgggtcccttctggttatgcagggtaaatccagtgattttgctaagcatgctcttccttccacacgcaaacaacgcatactggttaccttcacaaagtcccaaccaagaaagtcactatcaagtgatgctcaacagcttgcctcggcagtagcatcttctcattggggtccaccgccaagccgatctcccaatcatgttcgtcatcacgtaggccccaagcattacgctacacttccaacaactggggtactgccagctccacccattcgaccacaaatggcagctcccgttggcatgcaaccattgtttgttgctgctccagttgtacctcccatgccattttctgcacctgtgccaatcccagctggttctaccggatggacagctgcacctcctccaaggcatcctcctcctcgagtccctgctcctggaacaggagtcttcctacctccatcgggctcaggtaattcatctcaacagttaccagcaagtactttggctgaagtgaacccaagcacggaaactccaaccatgccggagaaggaaaatgggaaaattaatcataatagtacaagtgcttcaccaaaaggaaaagtgcaaaagcaagaatgcaatgggcatgctgatggaactcaagttgaaccagctctagagacacggctagatagcaatgacaaagctgcaccaagtcattgagctgtaccatacttatagagagagagagagagagagaggtaaagcttatcacacgaacacgataggctgtgaacttaacttgagtttgaagcaaatgtaaagcgcggcaacaggagatatcactatatatatactgcagaggagaacaagggaaggaggtagaacttttggttctctctgtaatcctttctttgctccattccttttttgttgtcttaaaatattaactattacaggaagggaaacccattcttaattctatttttggcctttcctatcttaattattttattttattttaattaatgcatcttgctgttaatattgatcttgtgggagggggtatgtttcccctggatttgttaaaactaatttaatgcatacaaagtggcatgtttaggcggaatcaaataaaagttggcaacatattttttttttaaaaacaccaaaaaatttaaaaaaaaccccaaaa

SEQ ID NO: 5820 - DNA, 614 bp, Glycine max
  misc_feature (7)..(7): n is a, c, g, or t
  misc_feature (560)..(561): n is a, c, g, or t
  misc_feature (580)..(580): n is a, c, g, or t
ttacggncggggcgattaagggataaaccctaacgccgcgaggccaaggcaacattcatccgaagttctgcatcaaacactgcttgaactttgaagtatgttctcttatctagggtttactcgtttctcatttcttcctgaactagttcttctgcaattgtcgctttttgataggcgttgcgttctttgtcagtttctattgccgaaggacgtgtcaacgtaagcgtgtacgaattgcaatgttgagctcttttgtcacttttgtgacttgaacagctacgcaatatttcattcgtagtctgttccatggtctcgttgtgccattcctttttgttcaatttttttttttattaacgttgcttcttttggtgaactctcccttattattccatgggggttgttctagtttccgaagcatatataaattaattcgtctcgaataaccggttttaaacagcgtggtgtaatcttctctaagctaccctatgctacctgtcttctggtacattcaattcattactatatattcattttccacgattaaaaaaaaaaaaaaaaannttctaatgaaactattttnaattcagaatctgaaatgaaaattgaacgaataa

SEQ ID NO: 5821 - DNA, 1835 bp, Glycine max
ggctcttgcttcacttttaattcgttaggttaggctcccatcactctgctttgctatctatcccccctctcttcttcctctgattccccgtatatttcttctaaatcttctctctcttgtcctttttctccctacacctcacgcacacacgcacaattcttcctttctcctcttttgatgtcttaggaaccatccaatctgaatttgtgtattcattgcgtgattgattttccttcttcctttttgttgttgctgtgtgtgcgtgtggcggagaatagtgatcgatcgttgttaatggcataccaagcgatccaggttccgagttcgggatcgagttcgagttcggggtttcagttattgaattctccgttcggagacaccacctacaccaaagtcttcgtcggaggattggcctgggagactcagagcgaaaccatgcgccgctacttcgaccagttcggcgagattctcgaggccgtcgtcatcaccgataagaacaccggaagatccaagggctacggtttcgtgactttccgggatcccgaggctgcaaggagagcgtgtgccgatccaactcctgttattgatggcagaagggccaattgtaatttggcttcacttggtcgaccacggccccctctgccttatggacggataagacctgcctccccttatgttggaagtttgcaaccagctcgtggtgcttatgttgggggttttggctaccagcaacaaccagtttcctacagctatcaacaaggattggtttaccctccttatgggtatacgacatatggacctgagtacatctacccacagagtctgtacaacccatatatggggcaacagtatcttcagatatatggagtgcctggggcagtgaatacaactgtttatccttatggacaagtgggtcaggctattcctagtggtcatggttattcagctatacagggttatacagtaccaggtcatcagattgtgccctatggtggatctaatgttaatgccataacaacttcacctatgcctgccattcaagcttcatatcctagtggaattgctgcaccagttcctggccaaccacaatttattgttcctgctccttctcctcagtttatgcaaggtagtggtcctgaccaaacagctgggtgagggggcgaataaggtatccatagtttgcagcaggactaagagcagcggaactgctacttgagtggcgggcttccaatctagccttgcaagttaattattttgcattctagaggtcatatatagtcatgctcaccaagttgtgtctgagtcgctccagatggcgaaggaaactggaatgtgcgggctgcttttccatttggacatttacactagtgtatttatacctaatgctacctgtactcaagaagagttgcagtagtattggatcgatggatgctggaataggtttctagcagccattttaggaataaacttctgtaaaaaggaaaatcatgtctgaatcaaaatatgattctttgtagtcttgtccagcattgagtttgtagatagttgtcaatgctggtaaattgtgtgacgatggatgggccatcatattgaatgtgatttttgtgcatagtagttgtcaggggttcgttctactagaagacaagggtgtaatataagattttaagaacctgccgattatgcagggtagaaccatcagtatattccattagagaggattgcagtggttctttagtgttattttaccgtcattcagcacggagtcacatgttcaacattttcttgaattaattttcaacctttcgtcatggtgccctttataattaaaaaaaaaa

SEQ ID NO: 5822 - DNA, 2415 bp, Glycine max
ggcatgttttcacagaatggtactggtaatggtggtagtagtaatagagctcaagtgggtaaggaagatggaccctcttgcacccattgcttgcagtttgctgtgacttggtctttgttggttaatgggttccttcagtctctgccacttcctttcaaatctgggaagaagaagtgtcagaaagtgtgtgatgaagacaagctgtgttcttgcacgaagcctactgtttcatcatgtgaagtgaagcaaaatgaatccaaggggggtcagtttggtagagcagttagggagaagggtgtgaggaggaaggatgggaaaaatgtttcacttgagtgccttataggttttatctttgatcagctatctcagactcttcagagtctggattatggggtgcatgaaaacaatgatgaccttgacaatgggaaaactagtctgccccaaccttctttttctcattttggtcatgtgaatgcactcgcaggtttcttggaggagcacaaagtatatgtgaatagcttcttggggaatttgaggtttgcaaaggtgggtggtgtgccatcaagtgtgcctggaagaagaaagcccttcaacaaacggagagggagatattagtagtaacaatggtaataatggtaatggtaaccctcgcgtccgggatgaaaacggaggaaattcgccgcagaaggttgccaacaacatattcagtattcctctctctaacgtggagcgtctaaagtctacactttccacagtttcattgacagaattgattgaactgctaccgcagctggggagaacatccaaagaccatcctgataagaagaaactaatctcggtacaagatttctttagatacacagaggctgaagggaggaggttctttgaggagttggatagagatggggatggccaagtaactctggaagatctagaagttgcaatgagaaaaagaaagctgccacgaagatatgctaaagaatttatgagccgtgctagaagtcacttattttccaggtcttttggttggaagcagttcttatcattaatggaacagaaggagccaacaattcttcgtgcatatacttctctatgtctaagcaagtcagggacactgaagaagagtgaaatattggaatcactaaagaatgcaggactccctgcaaatgaagacaatgctgttgctatgatgcgatttctgaaagcagacacagaagaatctatttcatatggacatttccgcaatttcatgcttctacttccctccgatcgtcttcaagaagatcctaggagtatttggtttgaagctgcgacagtagttgctgttccaccagctgttgaaattcctgctggaagcgtgctgagatctgcattggcaggtggcctttcttgtgccctgtcatgtgcgttactgcatccagttgatacaattaagactcgagtacaagcatcaacaatgtccttccctgaaataatttctaagctgccagagattggaaggcggggtttatacaggggctctatccctgcaattcttggacagttttcaagccatggcttgcgaactgggatatttgaagcaagtaaattggtgttgataaatattgctcctacactgccagaactccaggtacaatctgtggcatcattctgtagcacatttttgggaacagctgtacggatcccctgcgaagtgttgaagcagaggttacaggcgggtctttttgacaacgtgggcgaggcttttgttgcgacttgggagcaggatggtcttaggggtttctttcgtggaaccggagctaccttgtgccgcgaggttccattttatgttgctggcatggggctttatgctgaatctaaaaaggttgccgaacgactactagagcgggaactcggtcccttggaaacaattgctgttggagctttatctggtggcttggcggctgttgttacaacgccgttcgatgtcatgaaaactagaatgatgactgcacagggccgatctgtgtcaatgaccttgatagccttctccatactaaaacatgagggaccccttggcttgttcaaaggagcagtacccaggttcttttggattgctcctctaggtgctatgaactttgcaggttatgagttagcaaagaaggccatgaataaaaatgaggagggcaaggcaggcagttcagagtaatatatctagttacctgggattttgtgtcacacagcaaccaaatgtttggttgaatttttgagtttattgcagtaatcattggaataaggccattgatgctgctctgaaaatacacattttgtttcctttgttcattttctacttctatgatattgccctttgtagcagcagaattaaaaaatatattacatcatatatttacaaactaaaaagattcaatttatttc

SEQ ID NO: 5823 - DNA, 1275 bp, Glycine max
tacgacctcgcggttctgggccgcagctcccggggcccccccccttaagcaccaacgagtaaaccactctctcctactatcttttaaatccttttgtaccctcaactccataagccactagtacctcacaatgcccattgtagcaacctctcttctcttctttcttcttaatttatgcctcagaggcacttatgctgactatggaggtggttggcaaggtggtcatgccacattttatggtggaggtgatgcatctggcacaatgggaggggcttgtggatatggaaatttgtacagccaagggtatggcactaacactgcagcactcagcactgctctattcaacaatggcatgagttgcgggtcttgctatgagatgaaatgtgacactgaccccaaatggtgcctccccggtagcataatcgttactgccacaaacttctgcccccctaactttgcattggctaacaacaatggtggctggtgcaaccctcctttgcaacactttgatcttgctgagcctgctttcttgcaaattgctcaatacaaagctggaattgttccagtttccttcagaagagtctcctgtgtgaagaaaggagggatcaggttcaccatcaatggtcactcttacttcaacttggttctcatcacaaatgttggtggagctggagatgttcattctgtgtccatcaaagggtctagaactgggtggcaaaccatgtctagaaactgggggcagaattggcaaagcaactcctacctgaatggccaaagcctctcttttcaggtcactacaagtgatggcaggactctcactagcaacaacattgtgcctgctaactggcaatttggacaaacatttgaaggggcacagttctaggaaccttaatgatttttaagtacacattaatttgtgtgtaatatatgatggcattgttcactagtttttgttatagttggaaagggtggggaaagagaagaaacgaaggtagattaggaggagtttctggccaacatggcccctaatgctgtggtggctatatggcacccgctaggcctaatataatatatagtcttttattttatatctatcatctcattgataaatgccttttgatgaagtaaaaggtgttgatgatctcaattgccttgtatatttgatcccccacaatatatggtacaaaaaccaatttgggggcgatttaatatcaagttgattatgctttttgattacaagtcaaaaaaaaaaaaaaaaaaaaaaaaaagggaagg

SEQ ID NO: 5824 - DNA, 2328 bp, Glycine max
attgtattttaattagccacccactaggccccccccccgtaaacatatcatagataaatggaagcgagctaagcatggcggtggttggtggtggtgcctgccggaattgaattgaaacagtgaagaaagagagatgttgtttcaggtgggcgggcaaggcagtcgccccaccttcttcgagatggcggcggctcaacaacttccggcgagcctccgcgccgctctgacatactccatcggcgtcttggccttacggagacccttccttcacaagctcctcgacttcgaagacgaatccttcgccttactcatgctcgtcctcgaatcccacaccttacgaaccacagatgcttccttttccgaatctctctacggcctccgaagaagaccagccaatatcgccctcaagaatgacgacgccactaccagcaacaccgcattacggaggcgccagagagttctttccgttctttttttggttgtgttgccgtatttgaaatccaagctgcattcaatctacaacagagaaagggaagccaggcttcaagccactctatggggagatgaaaccgaacacgattattctccagtgtcagtgccaacctctgatgccggtgcccccgttacaacgcgtgtcgcgaagagagttcagagaattttagggttttgctacccgtggttacatgctagtgctgagggcttgcaatttgcttaccagctcttatacctgttggatgctactggatactactcgctagcactgcacgcacttgggattcatgtttgccgagctacaggccaggagctgatggatacctcttctagaatttcaaagatgcgtaaccgtgaacgtgagagacttcgtgggcctcaatggttgaagacattgcaaggagcattgctcagctgtacgtacactgtacttgactatgcacaaaccggtttgattgcagcagtgttcttctttaaaatgatggaatggtggtaccaatctgctgaggagagaatgtcagctcctacagtatatcctcctccccctcctccgcctccaccaaaggtagccaaagaagggataccactaccaccagacagaacaatttgccccttatgctcgcaaaagcgtgcaaatccatctgtagttactgtttcagggtttgtcttctgctatgcttgcatatttaagtatattactcagtataagcgctgcccaattacgttaatgccttcaacagttgaccagataaggagactctttcatgatgtctaggcctgttggagctggggttggtagaattacagttatcttgagtacataagcaaaagattcccaattattgttgtactactaatgtatagtatatctttctcttttagtaagtggcttaataagaggcatcatttttgttattttccccttattcattcgtcgctcagtagcactgctggtggctgggtactctgcttcggcaaatgaactattgccaatacaagaaacatacaaattgagaccctaaaaaaaaaaaaaaaaaagcacaaaacaattgtgaaagaaagaacttcaacttagaataatctatgcataaaataattgaagaactgaatgatatagtaaagaaatgcatttgtcacgaatattcttccagggctacaacaaaaatcacgattctttatcactcagaagaaaaaaactgcctgtaggaccctagctcaaacttctgcagcactggcttcaaacgctctttctagtctggtctgcaatgcagttgaactcctctttggcttcacatcctttccacttttgttgaattctaaatccatggtctgctctgtgtgactccaatagctcccaacagtacctattatgggtgtctcgtcaggactccggcttctagaccttcttgaagatgcagataaagaaaacatcctgatctcttcaacggttaatgctcctaaaattggcctatcctcgcgactccatggtgagcctcttcttccttttggtgtttgttctcccacagaactggtattgttgatggaaattggtgtggtttccgatgattcaaccaaccagctcgagaggctggtgtctaccccaattttgtcatcgaacctctgctttgccttgcggtttgacagcttcaaactaggctctggactaatgggtatgttgatatctttcactaccatgttgatgttttctttatcattcttcagggttgctttgactaccctccctttggtaagattctgaattggattcagcactaaggaaagatctggaatctttccttgtgtgatgctgtttgtagcaggggctgacatttgact

SEQ ID NO: 5825 - DNA, 2444 bp, Glycine max
  misc_feature (2298)..(2298): n is a, c, g, or t
  misc_feature (2349)..(2349): n is a, c, g, or t
  misc_feature (2414)..(2414): n is a, c, g, or t
  misc_feature (2434)..(2434): n is a, c, g, or t
ggatggctagtattggctactggactagcatagcagtgagtaagtggtggtcgtatcgtttggtaccaccacagttctaaaactcaatcatctcataaccctcaccgcgccaatcacgctcccaatcaccaccaaccaccttaaagcgcaccaccattgcccatggtcctcagccccaccgtatcattcaacggagaaaagaaaaagcgtcctctgaaaccctttccttttcccctttcgcttactcggccacgcgacataatcatcacacttccatcatcctaggatcgcataaattcccccaatggggctttcgcggaagtccaagcttccacatttaaccaactttttcacctctgaaacccgcttttcttgtttcagtggaaatggccgaaactcgagacgccgccgccgatggggtgcccggaactcccgccataagggtcagctgccccgggccccccccccatgcgggaatcgggtcgggtggtattcggagggttaatttccgagcggagattgacacgtcgccgccgtttgggtcggtgaaagaggccgtgacccgttttggaggtagcggtccttggataccctattttaacaacattgaagattttgacttaaagaaagtagaggaacaagcagcagagttggagaaggatttgattgtcaaggaacttgaaacgcttgacgtgcttgaagaattaggagctaccaagaggattgtggaggacttgaagcagcagttacaaaaggaggctatgaaatgtttagcaactcgagatgtaaattcatatgaagaagctggaactcctgttattaaggagaaggatgaggacaattgtggaaatattgtcaatgatgaagaacaggtgatgcaaattccaagcccatgctctatgtcatcatcacctgatatgatcttaatggagttgaaaaaagccaaattgaatctaggcaaaactataaatgaacttggggtgatacaatcctctattgaatctttgaataagaagatgaagaaggagaaaaattttctggagaggacacgtgaaaagctagcatcaaagtttgcagcagaatctgctcaagagagggtccaagagcaaacaagattgaatccaccggcccctcatgtagagttcacctttggtaaccctgcaaataatttcaattctgattctgggcagtgcaatggaatggcagagacaagaagacctgaaccttcaaagcccttaagtgtatatgaagaatatggatttagtgttaaaactgctgagataaggtggcttgcggctaaaaagatggaagaagctgcaagggcagcagaagctattgctcttgctgaaatcaaggctctatctaatgcccagagatctttaggatttgttctgccagaacctgagaaagtcacttttgcttttggagagcgctctcccctaaaccccaaggctcagatacccaaggagtcaaccttgaagaaggtaatagattccaagtttcaaattgatgaaacaaaaatttctaagctgacaattttgaagaagttggaggaagcagctgaagaagttctacacagcaaacaagtcttgacagatgctttaaacagaattgaaactgcaaacagaaagcaacatgctgctaaggaggctctaaggagatggattccagaggatgatatgaaggagtatagcactattaattgcaacaagtttaatcaaactggaatttatcaagattctctgcaggatgtaaccaggtcaacaacagcaaacaatgatccaaagcctgctttaaggcccacaatttcaatgagagatgtacttagcagaaagcaggttcctgaaggatatgctacaagaaaggagatggaagagcacactgaacggcaaaaggtagcgttgagtcaaatgcttcaagcattgagggaagatctaactcttccaccaaagactgagaaagatgggaacaatcagaagccgtacgtagcacagaggaagaaatttggattcattcaaatatcactccccttggcaaagccaaataagaaaaggggatgaaatttcgatcctcaatccctatgcatgcatgaatagccactacccatgcatctttatgttttcccatgccattctttattggttcatgtgttcacactttcatttgtttatgtagaagtttgagtgggtgtttgattctgtaaaatatatgttgtgcttgagtgattggcttataattctgtagctagctttaatggagctagtagattatggtgctattgttggatgcattggcgtnatgaggaatttatccatagggtaggaaggtttttatcaatccaatgataanaaccttcctaccctatggataaattcctcatcactccaatgcatccatagggtaggaaggttttnatcattggattgataatccntgttagaagt

SEQ ID NO: 5826 - DNA, 1522 bp, Glycine max
tcgtgcagcacgtagggccccccccccgacacatcaaacacataagtttgattgtcctagctttgagcaacatcatgaagatctccattctctttatcacaatcttttcttgtggttttcttggaaatgttgtttcaaatgctagtcctcttccatatgaagctatttttaactttggtgactctataagtgatactggaaatgctgctcataaccacccacctatgcctggcaatagtccttatggttcaacatactttaaacatccttctggacgtatgtcaaatggacgactaatcatagattttatagccgaggcatatgggatgccaatgttgccagcctatttgaatctcaccaaaggacaagacattaagaaaggagtgaattttgcatacgctggttcaactgcacttgataaggattttttagtacaaaaaagaatcaatatagaggaagctactttttcattgagtgctcaatttgattggtttaaaggactcaaatcctccctttgtacaagcaaagaagagtgcgataattacttcaaaaactcattgtttctagtaggagagattggtgggaatgacatcaatgcactcatcccatataaaaatattacagaacttcgagaaatggttccatcaattgttgaaacaattgccaataccacctctaaattaatagaagaaggagcggtagaactagtggtaccagggaacttcccaattgggtgtaattctgctgttttggcaatagtgaatagcgaaaagaaagaagactatgatcaatttgggtgtttgatagcttacaatactttcattgagtactacaatgagcaactcaaaaaggctatagagacattaagaaaaaacaacgcacatgttaagataacatattttgattactatggtgctaccaaacgtttatttcaagcaccacaacaatatggcttttcttccggtaagactgaaactttcagagcatgttgtggaaagggtgaaccttacaatctcagttttcaaatattatgtggtagtcctgctgcaatagtttgctcagatccttcaaaacaaataaattgggatgggcctcattttactgaagcagcgtataggctaatagctaagggactagttgagggccctttcgctaatccatctctcaaatcccctcctttcaagatagcttagaatttaagcatggatgaaaatgaacaagaataagcttttctccatatgtttcatgtgtatatttgtaacatggatgacataagcaaagtgttgctaaaacaaacatcttgtattccatgatggacaatatattattaactattgtgtattataatttgtatgttttggaataatattgaggataatgggaccaaaatgaaaatgaagtgaaacaaaggattatttttcaagattttcatcttgaatccattgtattgttatgttataaacatgaacaatatattgttgctttgaaatgataagaagtttgatggatttctttatgtatc

SEQ ID NO: 5827 - DNA, 2051 bp, Glycine max
ccacgcgtccgaaaaaaacaatactgaatccccatcactttcttccccatcgtatgtgtgtccctgtcagagtatgatatgagaaactctataaattaactattttttctcccactttctgaatcaaacacaacacacacacgtaacttcatctgggtttcaggaaaaaagaaaaaggaaaacaatgggttccgataatcaccagaacttggagttcttgaaggagatcggtttgggctcttccaacattggctcttacattaatggccagtggaaagccactggttcttctgtcacttctgttaatccttctaacaatcagagtatagctcaagtgaccgaagcaactttgcaagattttgaggaggggttgcgagcttgcagtgaagcagctaagacatggatgactataccggcaccgaagagaggtgagattgtgagacagattggtgaagcattgagggccaaattggatcctttgggtaggctggtgtctcttgagatgggaaaaattctcccagaaggaattggggaagttcaggaaattattgatatgtgtgattattgtgttgggctaagcagacaattgaatggatcaattataccatcagaacgtccagatcatatgatgtttgaggtatggaacccactaggaatagttggtgtaatcagtgctttcaactttccatgcgctgttctaggatggaatgcttgcattgctttagtctgtggtaactgtgttgtgtggaagggtgctccaacaactcctttgataactattgctgtgacaaagctagtagctgaagttcttgagaggaacaaattacctggtgcaatattcacctctttctgtggaggtgctgacattggtcaggcaatagcaaaagacactcgcattcccctggtttcatttactggaagttcaaaggttggcttgatggtccagcaaacagttaatgagagatttggcaaatgcttgcttgagttaagtggtaacaatgcaataattgtcatggatgatgcagactcaaattggctgtacgtctattttggttgctgctgtgggtccactggtcaaccggtgtacacttggccttgtcgtagactgtttctgcatgaaagtatttatacagacgtactagaccaacttgttgaagtctacaaacaagtcaaaattgggaaccccttggagaaggggactctagttgggcccttgcatactcgtacttcagtagaaaactttcagaagggtatttcagtcataaaatctcagggagggaaaatcctaaccggtggatctgtattagagtcgggaggaaattttgtacaaccaacaattgttgagatttctccagatgctcctgtagttaaagaagaattgtttggtccagttctgtatgttatgaaatttcagactctagaagaagcaattgccttgaacaattctgtacctcaaggattaagtagttcaatctttacccaaagacctggaactatattcaaatggatcgggccacgaggtagtgattgtggtatagtgaatgcaaacatacctacaaatggagctgaaattggtggtgcctttggtggagaaaaggccacaggtggtggccgtgaagcgggaagtgactcatggaagcaatacatgcggcgttctacatgtaccatcaattatggaagtgaactaccattagctcaggggataaactttggctagaaagctatcctagcacatgaggctgcacaaaataatgcgattttgcagtctgaagagagttctatatataccgagatgttagtctggcttgacatgggttcaaagtgttgtcttaacaagacatgcttgctgtaaggatggcaccttgatatgacagtttcaatgtataagatatcttaaataaatgttaaatgaataagctgagaattcttttcccagtcaaaaagtgtttgatgtttaaattcgtgttttgtgattttggccattgaaaaaataatgtatgcatgtattcattgctataaaaaatttattctttttagacttaaaagtcgac

SEQ ID NO: 5828 - DNA, 1963 bp, Glycine max
ccacgcgtccggctttattgtacaaaaaaatctgaatccccatcactttccccatcccatgtgtgtccctgtcagagtatgatatgaggaactaactctattacggctgcgagaagacgacagaaggcgacacacacgtaacttcatctgggttgcagggaaaaagaaaaataaaatgggttccgataataccaacttggagttcttgaaggagatcggtttgggctcctccaacattggttcttacattaatggccaatggaaagccactggttcttctgtcacttctgttaatccttctaacaatcagagcatagctcaagtgactgaagcgactttgcaagattatgaggagggattgcaagcttgcagtgaagcagccaagacatggatgactattccggcaccgaagagaggtgagattgtgagacagattggtgaagcattgagggccaagttggatcctttgggtagactggtgtctcttgagatgggaaaaattctcccagaaggaattggggaagttcaggaaattattgatatgtgtgattattgtgttgggctaagcagacaattgaatggatcaattataccatcagaacgtccagatcatatgatgtttgaggtatggaacccactaggaatagttggtgtaatcactgctttcaactttccatgcgctgttctaggatggaatgcttgcattgctttagtctgtggtaactgtgttgtgtggaagggtgctccaacaactcctttgataactattgctgtgacaaagctagtagctgaagttcttgagaggaacaaattacctggtgcaatattcacctctttctgtggaggtgctgacattggtcaggcaatagcaaaagacacccgcattcccctggtttcatttactggaagttcaaaggttggcttgatggtccagcaaacagttaatgagagatttggcaaatgcttgcttgagttaagtggtaacaatgcaataatagtcatggatgatgcagatatcaaattggctgtacgatctattttgtttgcagctgtgggtactgctggtcagcggtgtacaacttgccgtagactgtttctgcatgaaagtatttacgcagatgtactagaccaacttattggagtctacaaacaagtcaaaattgggaatcccttggagaaggggactctagttgggcccttgcatactcctacttcagtggaaaactttcagaagggtatttcagtcataaaatctcagggagggaagatcctaacaggtggatctgtattagagtcagcaggaaattttgtacaaccaacaattgttgagatttctcccgatgctcctgtagttaaagaagaattgtttggtccagttctgtatgttatgaaatttcagactctggaagaagcaattgccttgaacaattctgtacctcaaggattaagtagttcaatctttacccaaagacctggaactatattcaagtggattgggccacgaggtagtgattgtggtatagtgaatgcaaacatacctacaaatggagctgagattggtggtgcctttggtggagaaaaggcgaccggtggtggccgtgaggcgggaagtgactcgtggaagcaatacatgcggcgttctacatgtaccatcaattatggaagtgaactaccattagctcagggaataaactttggctagaaagctatccttgcaaatgaaactgcacaaataatgcgattttgcagcccgaaagagagatgttagtctggctgacatgggttcaaagtgttgtattaacaagatctgcctgctgtaaggatggtaccttcacatgacagtttcaatgtataagatatcttaaatcttaaataaatttagctgcaaaagttcttatttcccagtcaaaaaaaaaaaaaatcaacttccggtgttacctatgtttttggttttagacaatat

SEQ ID NO: 5829 - DNA, 1332 bp, Glycine max
ttccgaaatgttcacctgagcaggataaactagcaaaattagagcaaatatcatatcgtctatggtccatgtcgcagtagacattagagttagcatgcgattgagcacctcattcacaattttcataatttgaggttcaaaacccatatccagcatcatgtgtgcctcatctagcaccaggtaagaaacctgattaagactaattcttctcatccccagaaataccattccagcgaccaggagtggctaccacaatatctgctccacgatcaatgtctctcagttgaggaccctttggtgctcctccatacaaacatgcacatgaaattctagatgatttcccaaacttcatggcttcatcttgtatctgtgttgccaactcccttgttggtgaaagtaccaatgcagtggggcccattttggagttattaccagagcgcttgaggtgaataaatgctggaattaaatatcccaaggttttccctgagcctgttttagcaatggcaactatatctctaccttgaagagcaatgggccatgactgtgcctgaattggagttggggctgagaacccagcattttgtacctctctcagaagctcagatggaaagccagttgacccaaatgatgcaaggggtggaggtacattgtctccagtcacagatatttcatgccgatgtcgataagactcaggagatagtccagctccagcatccgaagccccatgacctctgacagaagaatcaacattgccagcaacatgtgttccatttgaaacatcatgagaagcataacttccccctttggaactctgattattccgtgatccagcttcgttagacccaccactgccatttctatcatacctatcactgaaatcaggactacgaccacgttgcgacccttgagatgattgttgaacctggacagaagagctgggcactgaagaaaactttgactgggaagctgagcttgaggatggcctctcatactgggtgacattagtctcaggattccaaaagtaaagatacccagtcttgccatccacaagaccccgccatggtttagggagtgttgggtctggtggtgcatacctcggacccatcaaagacacagttgctgtggcagccattagcaaggaaaccagcaatacaattcgattgaagagtgagaagtggttgtcgattctgcgagctaggtcagtgtttctctctctccctctctctctctctctctgagattgaaaccgaattcgggttcggatttcgggtcgaagagcctcacggcgcgcttgggaaaaaatgaggaacgaaagcgggcgcgggcgcgtgg

SEQ ID NO: 5830 - DNA, 1361 bp, Glycine max
agtttcaaccatagtttcttttaccttttttttcaaacccccaacaagaaagaaccataacttaggaaccaacatgagtcttcattcttcatctagtgttaatggtgagggttctactcctaaggaccccttgtataagatattagatgagttgagatcccttaagttgtggaaagaaaaacaagagagaaaagaaaaaggtaaaaaaaaagtggaagaaataagtcaagatgaaagagagaaaataagagaggaagaaagaagaaaaataatgaaagaaatgaaaagagaaaaacatgcctcctatagtagtcataactcttgcaagagcctaggtgaagaacttcgtgactattatgaaggaaggcatagggcacatcttagacctcactcccattggagagaaaaggaaagaaagcctcaagaggctaacattaacctcccatacttccatgggaaggacaatgtagaggctaacttagattgggaaataagggtagagcaacaacttaaaaggaagtctacttcaaaatcttatggctctcactcttatccaaagaaagaccaaggtcaaggcatctaaggggtgacaccttctaagcccaaagatgataaggggaatacaatagaaaatcaaccccttaaggctagtatgcaagagaagactagctccataaagtgctttaaatgtcttggaagagggcgcattacttctcaatgccccaccaagaaaaccatgattatgaggggccaagacatttatagtagccaagatgagcctactaattcaccttcctctagtgaaagtgaagaagcaaaaagggaagaatctagtgaaaaaatctacccccaagaagaaggacaacatttaatggttaaggaggagtgtaaggaggtaagtgtccctctaagaggttagctaagaaggaaagtcattttgaaataaagacaaatattaaagaaacttcccctcttagccaacctccacatcttctcctttgtaaaaagacacatgttagcactgccatacctcttgggcttgaggttattcctcaagtaaagaatttgttggatgagggtttggttcgtaagagcttaaatccttatgctttgttggtgcccaaaataggtattattaggcacggaatccctaaaataagtgatatgatgaatgtgttgagtgttgcaaccctattttgtaaaatcagtcatgcaccctacatcttcatgattcatgtacatagggactcattaggtaggtttgttcttatttttggttttaatacaaacctaggtgctcatatggggcaccttaggtttgtcgtattttttttgggggggggggcctacgtagctgactc

SEQ ID NO: 5831 - DNA, 2580 bp, Glycine max
  misc_feature (2569)..(2569): n is a, c, g, or t
  misc_feature (2573)..(2575): n is a, c, g, or t
aattcggctcgagattagattacaggaaggaaggagagaagaagggacaaccaggcacatggcgagcaaatagttatatatatggttgatctatctttagtttagcctcacacacaaatctgacttatcggttggtcccttcaaccttggcctttcactttctcttcctatctctctctcacgttcacattccatgccagtgttttaggcagcaccccttcatattctttcaaccagacacagagccagaaaaccctgaagaagccagagtcagagagaaacagagtaatactatagtggaatatttgttggaccatgaagcataaagatggaaaaccgattaatcagccaaataagaaccgggctgtgactttggcagtcactttaattgctctatgtggtttttctttctatctgggaggaatcttttgctctggaaaggatggggttgtggttaataccattcagaagacccttgattctcctaagcaatcctcaggttctctgcaaattaagccaatcagtttccctgaatgcagcatagactatcaagactacactccatgcacagatccaaagagatggagaaagtatggtgtgtaccggcttactttgttagaacgccattgccctccagttttcgacaggaaagaatgcttggttcctcccccagagggttacaagcctccaatcagatggccaaagagtagagatgaatgttggtacaggaatgtgccatatgactggatcaataagcagaagtctaaccagcattggttgagaaaggaaggggagaaattcctgtttccaggtgggggtactatgttccccaacggtgttggtgaatatgttgatttgatgcaagatctgatcccaggaatgaaagatgggactgtgagaactgccattgatactggttgtggggttgctagctggggtggtgacttgttggatcgcgggattctaacagtttctcttgccccaagagataaccatgaagctcaagttcaatttgctctagagcgtggtatcccagctgttcttggtgtcatttctacacagagacttccctgccccgcaggccccccccccatggctcattgctccagatgccttatcccatggacagaattcggtggtatttatctcatggaaatacaccgtatccttcgtcccggaggattttgggttttgtctggtccacctgttaactacgagcacaggtggcgtggatggaacacaaccattgaagaccagagatcagattatgagaagttgcaagaattacttacttcaatgtgctttaaattgtacaataaaaaggatgacattgcagtatggcagaaggctaaagataacagttgctatgaaaagctggccagagagtcctatccaccacagtgtgatgacagcattgaaccagattcaggatggtacactccacttcgtgcttgttttgtggttccagatccaaaatacaagaaatcaggcctcacatacatgcctaagtggcctgaacggttgcatgctacccctgaaagggtcacaactgttcatggttctagtactagtactttcagtcatgacaatggcaagtggaaaaagcgcattcagcactacaagaagttgctgcctgaacttggcactgacaaagttagaaatgtcatggacatgactacagtatatggagcttttgctgcagccttgatcaatgatcccttgtgggtcatgaatgtggtctcatcttatggtcccaacacactccctgtggtttatgatcgtggccttattggaaccttccatgattggtgtgaagctttttcaacatatcctcgaacctatgacctccttcatcttgatggactcttcactgctgaaagccacagatgtgaaatgaagtatgtgttgctggaaatggatcgaattttaaggcctggtgggcatgctatcattcgagagtccacttattttgtggatgccattgctactattgccaagggtatgagatgggtgtgtcgcaaagaaaacaccgagtatggagttgacaaagagaagattctgatatgccaaaaaaagctatggcactcatccaacaacggttcaagatgacaaactctggaacctgtgcagtggtgagagggggtggctacaattgtaaatccagaagcagaagcaaagggaaatggattcagagccaccatcaactaaacattgattcattctataatatagaagccaagaatcggtcgagttcaaatttatcaaatgaagaattggtaactcaataatctgatcttgttaagttatatagaaaattttcatatagatactattctttatatggcatcaattgtatcagctaccactctcctatatctattttttgttgttgttgttgtgtaatatccaagtgaattcatgtgagaaatgaaagttttaattccgacagaaagcatatgatatgctacctatacataaattggaattccgtaccagacaatactacaacattttgtattaatattcgcactctataatcatttaattcaatgtcgtattaaacagaaanaaannnaaaaa

SEQ ID NO: 5832 - DNA, 699 bp, Glycine max
tcagctacgtaggccccccccccccagcattaggtaatcccactcggttcggttgatgtttggactatttttcttctctctctgtctctctgaggactctttgtgtttcgactctattttctccaaacacaacaacaacaccagaggcagaggcagagagaaacagagagagaaaggagtaacaaatagttgattatttcaaagacaatgaacaataaagatggaaaacccgtcatccaaccagacaagagcaggattgtccctatggcaatcatatttgtggtgctatgtggatcttctttctatatgggtataatcttttgttctgagaaggacagatttgtggcaatgtacaaccagaactccattgaatcccccaaggagtcatcaataagttctctgcaaattaaatacacgagttttcctgaatgcagcgctgactaccaagattacactccatgcacagatccaaggagatggaggaagtacggctcctatcgacttgtgttattggaacgccattgccctccaaaatttgagaggaaagaatgcttagttcctcccccagatgggtataagcctccaattagatggccaaagagcagagatgaatgttggtataggaacgttccatatgactggattaacaagcagaagtccaatcagcattggttggaaaaggaaggggagaaattcatc

SEQ ID NO: 5833 - DNA, 1752 bp, Glycine max
tcagctaccgacggttatgtgagtgcggcaatagtggaatagcggtagagtgtgcgatcgagaaagcagaaagcagaaagatggggttggaatcggtgggagatttagcgattaacgtgattctgaaaaaattaggagcccaagacattgcgagagtggcgtgtgtgagcaaaaggttcagttcttccgcttccgatgacactctttggatcaatctctgcttcaatgaactcgctttgacacaacccctcgatcatctcggaaaccctctctcttccttcaaggaatgctatctagcatggagaggagcttttgttatgtacccttggtctcttgttaagcgtgtaaaaaggtgctgggatagaataaaaacctggttgaccaataattttcctgaagcggaggccactctttgtaaaggtgcaactgaagctgacattcaggagttggagaatgtattaaaggtgaaattgcctcttcctacaaggatcctttatcgctttcacaatgggcaagaatttgcaaaggcagatccagaaactagtacatttggcagatctttgggtctaattggtggctactccttctatggtcatttggtgaatgtttatctattacctatatgtcagataatcctagaaactcagcaaactaggcgtcgcttgagctttttaagaagatcaaagtatgttcttgtggctgcttcatccacatacagtagaaagttgtttttcctcaactgtaccaatggtcaactatatgtcgggaccaggtctcctcttaccgaaagagacataatcccttgtgtacctcatgacctgattagtttacatcaggaattgaatagttcagagcaacaagatgccatgctactgtggttagaagaacatggtcgccgtttagaacacggctttatcaaacttcatgatgaaggaaatggcaaaagcattaatcttttcccagaagaaccccatatttgttcaacggctgttactaatggtgtgaaggttcgcgcttctgcactggttatccctgagttgatggatcttcaagatgaccttggagagtacttatttgcttattcaatccgcttgtcccttgaacctcaaggatgcattattaatggaatgtccttcagctcttgccagctccattggaggcactggatcatccgtgctaatgatattgttatatctgatgtcagtggaaaagctgttataggacagtttccacttttgcgtccgggtgctcaagaatttgtttatcagagttgcacgcctctaccaacaccatcaggttctattgaaggttcttttacatttatacccggcagattggcagacccaaaaggagacccttttctagctacagtggctcgtttcccgctccagctgccagactatatattctgattttgattctggatgggattgaagtatctctaatggcaattgcagctctcagatattgtttgggtgtattatgtccctttcgggagaggtttttaagttggacctgcacaatttccctatctataagagaagcaaagtatgtacaatatttgatctctatcataagagaagcaaagtagatacaatatttgttaggggtgttcatggtttgattaggttggattttttgttaaaaaatcatccaaatcaaacttaaaaaacgtgtgatttggttcgattcagttttcatttaaaataaaattcaaatcagaccaagttaatataaaaaacactttagttc

SEQ ID NO: 5834 - DNA, 1336 bp, Glycine max
cttgccagccagtcagtcacctacaaaggaaagaagctctatattgggtttggatatcgaggcaaacaatgatattgaaactctgaaggaatatcgtatagagtgtggcaaggaattaagctatggtaccttgaagggtggtttttcagctacggacgcccccccccccccttatattaataataccttggatgattcatcatcttcattgggggatgcttctgtccagaatgaaagatctttgcctatagtgaggacttcaattggttctgatgctcctgttcaggacaagtacacgagggaagtgagcagaggaaacaggactatgggcctgggagcgcacaacataccttctgattctgatagttatcgtgtggttgcaaattcacaagagactcttgctagaactaatgaacctcacattcagaaagagcaaagtgaagtaaaaaagaaatcaagctcaagggcctcttttacttactttaattctgataatagtgattctgaagaagaacttactaaacaaaattcacctagtcttgcccgtcctgttagtggaatatctcgaaggacatcagcttcttctaaagctgctacaggtttaagctcaagagatgctcctttatccaaggcttctgtgactcctgctacaacactcggatggaaatcttcaaggacttcttatgagagtaataatcaaaatgcttcaaccataatgaagagctctgaaaataggacaggacctaagtctggatcagccaaaaacaaagcatccgagccaatttcagaacctaatagatccttggatggggaaatttcgaaatcatctgcaagggtgcaacctttcagttctcctaaaacagtgatacaagataatgaagaggcccaagaggttgatggagatacttcctctaagcagaaggttgggcacgttcatccaaagttacccgactatgattcttttgctgcccacttcctgtctcttaagaagggtcgtcaataaatttcacttgcttccacctagcaacatagctactcgtacatagtctttgatggtttatctttcttctgcagcctcctgtattatgttacatatagatgcgtgatttcagattcgaagcatttgaggaataaggatgggacttatgtttttttcttttttttgtaaactgagtcagggtgtataggttttactatctcatttttggtacatctctatttgaggactattgcacatagttgaatgtttcactgtaaatattcaccgaatgcagtgtatgttcattccactcagctgattaatgttacattctttcacaccccaaaaaaaaaaaaa

SEQ ID NO: 5835 - DNA, 2192 bp, Glycine max
  misc_feature (18)..(18): n is a, c, g, or t
  misc_feature (2174)..(2175): n is a, c, g, or t
tcgagtcagctacgtagnacccccccccgatgcatacacttttcttacctacaaatgaccaagagaataatacaagagaaaataatgttgctaaagattaaagttgtggtacgcaaaagaccattaaataagaaggaacttgctaagaaggaggatgatattgtaactgtatatgacaatgcatatttgacagtccatgaacccaaactatcagctacgtagggccccccccccgagaaacatgagttttgttttgatgctgttcttgacgagaatgttaccaatgatgaagtatatcgagttaccgtagaaccaattattcccacaatttttgagaaaaccaaagctacttgttttgcttatggtcagacaggaagtggcaaaacatacacaatgcaaccgttgccgctcagagctgcagaagaccttgttagacaattgcatcgaccagtatatcgaaatcagagatttaaattgtggcttagttactttgagatatatggtggaaaactttttgatcttcttagtgatagaaagaaactctgcatgagagaagatggacggcagcaagtgtgtattgtaggactgcaagaatttgaagtttctgatgtacaaattgtcaaagaattcattgaaaaggggaatgcagcaagaagtacagggtcaaccggtgcaaatgaggagtcctccagatcacatgctatcttacaactggttgtaaagaggcacaatgaggtaaaagagagcaggcggaacaataatgatgtaaatgaggcaaaaagtgggaaggttgtggggaagatttcttttattgatcttgctggaagcgaaagaggtgctgatactactgacaatgatcgtcagacaaggattgaaggtgctgaaatcaataagagccttttggctttgaaggaatgcattcgtgctttggacaatgatcagatccatattccttttcgtggaagcaagcttacagaagtgctccgtgactcctttgttggaaattcgaaaactgttatgatctcttgtatatccccaaatgctgggtcatgtgaacacacacttaataccttgagatatgcagaccgagttaaaagtctatccaagagtggaaatcctagaaaggaccaggccacaaatccagtaccaccagcaattaaagaggtttcatccacatcttcacttccagctagtgttggtgcagatgattttaatggtcaatgtcaagaggtaaaaacaatggacatgggcaggaaagttgtcgaaaaggaaagttctttgtacagctccgctgctgatgttgacaaacaatcaagtttttcttctagttatccattcaatgggcgagaggaaaaaagctcaacttctgccccaatagacagggaaaggtttgaagtaaagaattcttacggtggtgattctaccagtcaaaagatgaactcttattccatagatgttacaaatgagaaagtgcaaagggtgtctcccccacgcagaaaagggactaaggaggagaaatctgaaagatctgtaaattgggtaaaacgggatgccaatggttctgatcattccactgcaagctccaagcagcagagcacaggaaattatagcattaccactggatcggggcagtctgaaacagaatcctcttctgatgtgaatatcagtgcaatacttgaggaggaagaagcactaattgctgctcataggaaggaaattgaagacacaatggagattgttcgtgaagaaatgaaactactggcagaagtggaccagccaggaagtcttattgacaactacgtaacccagttgagtttcgtgctttctcgcaaagcagctagtctcgttagtctccaagcacgccttgcaagattccaacatcgactaaaagaacaagagatactaagtagaaaaagagtgccccgttgagaggctccatttctcttgttcagtgatgatgtgtatgttcttgatgtaatatctccgtgtttgttagcaatatagttttaaaggcttttgttcattttattaaaaaaaaaaaaaggatcttttgttgggtattcaaattaaatttactcaaatgtatatttgtccctcgtgtgatattgtgtccaccttaatgcccttgcaaaaaaaaaaaaaaaaaaaaaaaaaaaaaaaaaaaaaaaaaaaannaaaaaaaaaaaaaaaaa

SEQ ID NO: 5836 - DNA, 3193 bp, Glycine max
ccggattcccgcgtcgacccacgcgtccgctctttttgtcgcgaattctcgttcttctgccataatcaagcgaaaaccatttcgttgcggtcactccttcgaagaactcggtttcagatctgaaccgcaatcgtttgaagagatccacagtggctgcgttctccgttcacttctcccacctttcatgttcttctccgcgtgcgaacagatcttgaaaattggcgcctcaacgacgttcgcagcgccacgcgagtggccagatgccgcagggcaatgccgccgccgcagcagcgctgctggaccacggcggcgatgccggcgacgccgtaatggcgcggtggttgcagtccgctggcctgcagcatctagcctctcccctcgcttccaccgccatcgatcatcgcctcctccctaaccttctcatgcagggttatggagcacagtctactgaggagaagcagaggcttttaaagttaatgagaaacctcaattttaatggggaatctggttcagagccatatacacccaccactcaatctttaggtgtggctgggtcggatgggttttattctcctgagttcaggggggagtttggagctgggcttttggatcttcatgctatggatgatacagagcttttgtctgagcatgtagtttcagaaccttttgagccatcacccttcatgcctggagatactagagtatttgaagacgatttcgatccaattaacagcaagctggaaagcggggaagcagatactgatgcatcaatttccttacctatgaatagcacaagggaaaataatgttgctaagattaaagttgtggtacgcaaaaggcctttaaacaagaaggagcttgctaagaaggaggatgatgttgtaaccgtaactggcaatgcatatttgacagtccatgaaccgaaactaaaggttgatttgacagcttatgtggagaagcatgagttttgttttgatgctgtgcttgatgagcatgtgaccaatgatgaagtataccgaagcacagttgaaccaattattcctacaatatttgagcgaaccaaagctacctgtttcgcttatggtcagacaggaagtggcaaaacatacacaatgcaacctttaccactcagagctgcagaagaccttgttcgacagttgcatcagccagtttaccgggatcagagatttaaattgtggcttagctactttgagatatatggtggaaaactttatgatcttcttagtgacagaaagaaactttgcatgagggaagatggacggcagcaagtttgtattgtaggactgcaagaatttgaagtttgtgatgtactaattgtcaaagaattcattgaaaagggaagtgctgcaagaagtacaggatccactggtgctaatgaggagtcctccaggtcacatgctatcttgcaactggctgtaaagaagcacagtgaagttaaagcgagcaagcgaaacaatgatgggaatgaggcaagaagtgggaaggttgtgggaaaaatttcttttattgatcttgctggaagtgaacgaggtgctgacactactgataacgatcgtcagacacggattgaaggagcagaaatcaataagagccttttggctttgaaggagtgcattcgtgctttagacaatgaccagatccatattccatttcgaggaagcaaacttacagaagtgcttcgtgactcctttgtgggtaattcaaagactgttatgatctcttgtatatctccaggtgccgggtcatgtgaacacacacttaataccttgagatatgcagatcgggttaaaagtctatccaaaagtgggaatcctagaaaagaccaggtcccaaatgctgtaccacaaactaataataaggaggtttcatccacatcatcctttccagccagttctggggcagaggattttaatgatcaacgtcaagagaaaacaatggatatgggcaggaaatttgtcgaaaaggaaaattctttgcacagctctgcagctgcttctgttgacaaacagccagtaagttattcttcgaattacctatcaaatgggcgagatgaaaaaggctttccttcagcttcagtggacagggagaggtttgaagtgaagaactcacatggtgactctaccagtcaaaagatgaactcttattcacaaagtgatacagatgagaaagtgcaaaaggtgtctcccccgcgcagaaaaggctataaggatgaaaaatccgaaaggtctgctaactggatgaaaaaagatgccaatgattctgatctcttcaccacaagctccaagcagcagagcacagggaattatagcactttgtctaaggatgaaaagtctgaaaggcctgcaaagtggatgaaaagggatgccactggtgctgatctcatcactacaagctccaagcaacagagcaccgggagttatagcactttatctaaggatgaaaagtctgaaaggcctgcaaactggatgaaaagggatgccaacggctctgatcccttcactacaagctccaagcagcagagcacagggaattataacaatatcaccactggatccaggattaatgaaacagaatcctctcctgatgggaatgtcagtgcagtacttgaggaggaggaagcactgatcgccgctcataggaaagaaattgaagatacaatggagattgttcgtgaagaaatgaaactcttggcagaagtggatcaaccgggaagccttattgacaactatgtaaccaaattgaactttgtgctctctcgcaaagcagcaagtctcgtgggtcttcaagctcgtcttgcaagattccaacatcggctaaaagagcaagaaattctaagtagaaaaagagttccccgtcaataagtgactcggtttctcttatctgtattctcgtgtttgttagcaatatagttgaaaggttttgtttgatatatataaacaaatcttttgttgaatataattctaattgaatttacttacatgtatatgcccttgtgtgagtcgtgtgacttttgggccacctcttgcctttgcaaatttggtgttatctatgtaggttatctgcttcgttgccataaaaaaaaaaaaagttgtctgccccaaaatttttagtttgtgggcaaagtaataaataaaatagaatttaatgctgcttctcgaaaaacaaattaaat

SEQ ID NO: 5837 - DNA, 2578 bp, Glycine max
cccgcctccgtttttttatttttttttgatcgccgcgcggagtgtctctcttctcttttgttctcgtcaatatcaccactcatctccacccacaacctagataacatctctctaaatttctcatcttctcctctgcccccatcaccttgatctgtctgtctatacactcattgtttgacaaaaaacaaaatataacactgggaagttttgtcatagctgagagctgactctagctagaggataataagattacaagagagaggaattgtttttgattggatccacaaaattcaagatgactccagttaatttggcaggccagtttggtgacacgacatacactaaggtgtttgttggaggcttggcctgggagactcaaaaggagacaatgaagaagtattttgagcaatttggtgagatcttggaggccgttgtcatcactgacaaagctactggaagatctaaaggctacggatttgttacttttcgtgaaccagaagctgccatgagagcttgtgtggatcctgctcctgtaatcgacggcaggagagctaactgcaaccttgcttctttgggtgtccagagatctaagccttcaaccccaaagcatggaggagcagggaggaactttagagtaatgggttctttccagacaggatttggagggggagtgggatcagcttttccttcagcagcaaccttccctcattacgccatccagcaagggataccttataatgtttatgggtactctccttactcgccggattacacttaccctacgagctactatggtgtgtatggaggagcaacagcacagtacccagtttatggaagtggacctgctgcagctgcaggagggatgatgagcggtggtgcagcgttctacccatatctgcagtacggaggagaagggagtggcggcggcggtacttccggacagggttatggtgtgaactaccctcctcaggctcatctttttcagtattctcccattgcttccaccgctggctatgcccagcactatggtacacctactatgtctcttgctccttcccctgccttgcaatcagtctgttttgctgtgccgcaggcgtgaccatgcctcttcaagctccaattcctcatcgctagagactcatcatctcaaactagctatgtcaaaacttcccagttgctcctgctccttgaagtctctcttccactcatcaacctttgccctaaccatggtgctctctctctctcacacacccacccactctttcactaacacttaaacaaagtccatcaatggcatttggactttttccagcataagaagccccccgtaggggctcaaatgtttctcctcgtttggagagtcatgcattcctttttctcaacataaagaagactctgttgcatcttcaatgaaattaaggttccttggaagaagagaaccaagccaacacaaagctatcggatatagctgacttgttggaaaaaaaaataattaagaacagcaaagcttggcccttggaaaggccaagcccaaacgaaccatcttcttaacttgggcccaagacgggctaagtaaaagtacagaatggtttcaaaatttgtaaatggcagatcacagatagctagctcatcaactagaaattttaagttagttctgcaaaaataggtattccctccaagcaatgctaatcacctctggatgaagaggaacttttagcaatcaatatcatggacattggatgtcccagcttttttgtatggtaacatctagctagtcttaggctttagtgttaggatcagtcatgtcttcataaatatgtttttgtcaattttcagaaaaaaaggggtttaaccaaccaaccaaccaattaacaatcttccctttgggtaaggggaggcaacaactaactgctgttttttatcctgtaaattcaatgaggctaaactatgggagtttaagcccaatccactaatctttaggagggatagtgttttaatttcccgcttagcataagtagtacatttcatcatcatcttgagaactacgtcaatggatgtggtactcaaaacacttgcatgtaaccctgggagatattttggttcccttgggtacttcacttactcaccaaccatggttaggacataggtgaatctcatcactctctttctctcttctccctgctttctgtctggcaacttttacatcgagatggaccttgatactctattaattatatgtttaagcctatatggtttggattgtaattaggaatactaaagtaggaggatttcattctctgtccatgctggatgagaatggatttgctactcatcctactatgcctttaatttgatactatgcttgcttctattcaacctatgtcaagataagcaaatcaagttaatgcttcgagtaatgttcaacttctttgttatatttcaatcaaggatattttatttatggcaaggtctggtttgtgctaaaaaaaaaaaaaaaaaaaaacgcgggatgtgaagtttacactggcaaaatcttgttgatgtaatcaacttcaacatgaaaatttcttccttttca

SEQ ID NO: 5838 - DNA, 1247 bp, Glycine max
acggtgtgtgacctccagtgggtcgggctggcctaggggcctaaacccatattgagcctgtcagctacgtaggcccccccctcacacccttctaagtttcataaccgtgttagggttctttcaatattctctgattgtcgtcaaatcacaaacaacccaccaattataagttgccgtttcccttctcacttgctcgcggaattggaggaacccttcgttcgtgtctcgcggcattgaaccctgaacacatgactcagaagcaaagagacagagtcccagattccatggaaacccagtacgaggagagtgagaaagacgagtcttcttctgcttatagttcctcagaagatgaagaggaggaagagatagagaaggagctggctgatgtaacatttgaggagttgcagaaagctcgctcgaatgggacacatgcatttttccagaaacccaaagaagacaaaaaattaaaaagggccaacaagaataggccaatggaggctagtagcaagaagccagtttctgggtttagagaggtcatccaagctccaaagaaggttgtacgtgatccacgatttgaatctctttgcggtaaacttgaccctgaagggtttaggaagagatataatttcttgtatgaaaatgatcttcctgctgaaagacaggctcttaaaaaggaattgaaaaaatataaagacccgaagcgcgtaaatgaaatagaagaacgtgtatcatggattgataaacaattgaagtctgattcagcgaagcatattgatgcagaaatattggccaagcacaaaaagaaagagagagaagcaacaaagcagggaaaacgtcccttttatctcaagaaatctgaaatacggaagcaaaggcttattgaaaaatataaccatctaaagtcatctggcaaacttgaagcatttgttgagaaaaggaggaggaggaatgctgcaaaggaccatagatacatgccatatcgtagatctggtgatgtggaataggttttgtagctttaagattctttcgtaggctacaattatactggaacataacaccaaaaagaaaaatagtttatgcatttggtctgccatctttatggattaaatgttgaaccctttttgatgactatcatggtatttgttctgtgactgacttgtatttatctaattacttgaatatttaccaaaaaaaaaaaaaaaaaaaaaaaaaacccgccgcccgctctagaggatccaagcttgcgt

SEQ ID NO: 5839 - DNA, 1307 bp, Glycine max
aaaaaattctagggcttgtcgtgtgtgaacttggaattccatggctgcctactactcacagccccaaccgtcggaccttctctcttaccagtactatcaaccgccgcctccgccgcttccgccgctgatggcggtggtgccacctccccccggcgcggttgtccagccggcgcaccacgtccatccgtcgtacatggctcagcatcaagcggtgttcgcttcatacggtgtttcccaatcctccacacacgaggttcgcactctattcgtcgctggcctccctgaagacgtcaaaccccgcgaaatctacaacctgttccgcgaatttcccgattacgagtcttcgcatcttcggagcccctccaattcgtcgcagccttttgctttcgctgtgttcgcgagtcagcagtcagcaatcatggcaaagcatgctctgaatggactggtgtttgatcttgaaaagggttccattctttatattgatctggcaaaatcaaactctagatctaaacgcacaaggatagatgacgagagggctggcgcggataagaaagctagaggccttacaccatcatgggccactcctgattctggtgttggcagcattcacatgccaggaatgggtaatcctgctttcaacacgaacatgtttggttatccatctgcacaaagtcttgggaatgctgatgggagtgccatgagtggcggtctatttgcgaatctgaagaagtcttctactccttacgttcctcaaaactcaaccccatgtgcaactttatttgtagctaatctggggtcgtcttgtaatgaacaagagctaatccaagtgttttctagataccctgggtttttgaaactgaagatgcagagcacgtacggggctccagttgcatttgttgatttccaggatgttggtagctcaactgacgctctaaacagtctgcaaggcacaattcttcactcctcacaatctggcgagggaatgcgtgtagaatatgctaaatcgcgtatgggcatgcggaagaagcccaatagataataacgagaatcactcatgacatgacgcctttgagctgcgctttgagttgtttaatatttgcggctacattggtaaagttctcgtgtattttatccactgtaaatttatatcaaagctaccttttacagctttttaaagattgatgaaatactttctattttatttgatgtatgttatattctgtacttttgttggtgtatattgtagcttaataaaattgatgataaaagtcaacagttaagatagtagtcatttgacattttgattc

SEQ ID NO: 5840 - DNA, 1144 bp, Glycine max
cagacattgcaggagcagtacccaacagctacccaatccattgcttaacaggtaacagtaacactcagaacgcaacaaagagagagtgagagagaatcacaaaccctcattccatttcctcccttttctctcttgcagtcacgcaagcagcaaggatcgcaattgcattttgtgggaatcggcggcgagaaaatgcagggttggttctcggggcagagtagcgaggaggaggcgaagccggcgtcgtcgttgctcgccgattggaactcctacgcatccgcccaaacctctgaagattcatccactttccccttcgatatcgaatccgccgttaggtctgccaacgacaccgtttccggcactttcagcgtggtttctaaaggtgtgagagatctacctggcaacttccagtctgccactagtaatgtgccttctggcaaagcgcttgtgtattttggtttgtttctggcaagtggagtcttctttgttttcatagcatttacattatttctgcccgtcatggtagttatgccccaaaagtttgccctatgctttacacttgggtgtggatttattattggatcattctttgctctcaagggtccaaagagtcagcttgctcacatgttgtcaaaggagaggctccctttcacattggcttttttaggcagtatgattggtaccatatatgtatcaatggtgcttcacagctacattctctctgtggtattctctgtagtgcaggttctctcacttggctactattctatatcgtactttcctggtggatctgctggaatgaaatttctgacttctgcttttacctcttcaataatgaaatgttttgggcggtgacctattttttgttgatagttgagttgagttcagacctgtgtccatatagtagttgacttgtaaatttgtctcctaagatctatcagctgaagcttcaaagtgacctaagaatattactgcgttgaagcatctctaacagtttcttagggttcaccgtttgttgttacttgccacatctaaatgaaaaaaattgttttgcctcgtgtttgtaaaagcaaattaacattatctgattgaagttgattgttgctacctttgtgttgcaatttgaaatagagtcttgtttgag

SEQ ID NO: 5841 - DNA, 1763 bp, Glycine max
actcgagccgaatcggctcgagcccaaaccaacccaagtctcattctctttctctccatcagaaagaaaaactcaacacaacaccccctctccaccctctttttcttttaatttctcatcttatctattaatcttatatacatatatataaagacatagataatagtcatatagatataattatttcgttatattttccttgcatgggctgttaagatgtctcgcacgtgctcacagtgcggcaacaacggccacaactcacggacatgcaccgacggtggcgccgccgggtctccgagggagaacggcatcatgctgttcggcgtaagagtcatgacggaagctaactcctccttcaggaagagcgccagcatgaacaacctctcacagtacgacgcggagttcaacgccgccgacgccggctacgcctccgacgacgtcgttcacgcctccggccgcacgcgcgagcgcaagcgaggtgttccttggacggaggaagagcatagattgttcctgttagggttacacaaagtcggaaaaggagattggagagggatttctagaaacttcgtgaaaactcgcacgcctactcaggtcgctagtcacgctcagaagtactttctccgccgccacaaccagaatcgccgccgccggagatctagcctcttcgacatcaccaccgatacggtgatggaatcttctactataatggaagaagaacaagttccgccagagacggtggcggcgcctctccccgccgcatatccgccgtcgcattacggggcttttgccggcgcgggttttccgatagctccggtggtgttgccggtgagtggcgagagactaaccaagccgatcaggccgacgccgattttgccagtgcctccgtcttcgaagatggctaatttgaacttgaaagagaaagcttctccgacaaatctcattgagcctttgccgttgtcgttgaatctgccatcgccgacgccgcggtctcaggatcagtcgtcggcgagtagtgggcactcgtcaccgtcgtcgtcgtcatcggcggcagcttttcaggctatgtctgcagcgaagttcggcagcggcggggatagtatcatcagcgttgcttgaaaagaaggaaacaagaaaaaaattagtgtcattaagttattaattaagtatggtcttagtagttaatttgcgtgtgtaaattaatgttacttaatcgggcatgtatccaagagggggaaaaattgaagatatgtgttggggatttattgattattacgaaagataatcataatataggtaggagggaggggatatttgaattaatgagtataatggtaattaattatgatttggaaaaataaatatatactatgggtttaggttatgtaggtaattaggcaatttaattgctggtttcagtgtacaggtttagtagaatttagaattagaaagatgggttgtcatattctgtagctgttgagggattcttgtttctgtatgtatgggggagtgtgagcgtgaaatgatagggcaccgggtactcttgagatgcgactggtctgtgtaatgccactggggtcattaaaatattccttagattagattagacaaaggaatatattatgcttaccatttttttttagatttagtttctgtgttcttggacttgggttgaaccaagaagtattcgaatgcaacacaatctaggaccactattacgttggaatgaaaagaatacaacaaaaaaactcttggttgacgaa

SEQ ID NO: 5842 - DNA, 1651 bp, Glycine max
tcagctacgtaggccccccccccctctttctctccatcagaaagaaaaactcagcacaacacccctcccaaccctctttttctcttaatttctcatcatatcatatctattaatcttacacatatattaagacatagatataatttttttcgttttatttttccttgcatgggctgttaagataagatgtctcgcacgtgctcacagtgcggcaacaacggccacaactcgcggacatgcaccgacggtggcgccgccgcttcctgcggcgggtctcccagggagaacggcatcatgctgttcggcgtaagagttatgaccgaagctaactcctccttccggaagagcgccagcatgaacaacctctcacagtacgacgcggaatccaacgccgccgacgccggctacgcctccgacgacgttgttcatgcctccggccgcacgcgcgagcgcaagcgaggtgttccttggacggaggaagagcataggttgttcctgttagggttacacaaagtcggaaaaggagattggagaggaatttctcgaaacttcgtgaaaactcgcacgcctactcaggtcgctagtcacgctcagaagtacttcctccgccgccacaaccagaaccgccgtcgccggagatctagcctcttcgacatcaccacggatacggtgatggaatcttctactataatggaagaggaacaagttccgcaagaaacgatggcggcgcctatccccgccgcatatccgccttttcccggcgcgggttttccgatgagtctatctccggtggtgttgccggtgagtggtgagagactgaccaagccgatcaggccgacgccgattgtaccggtgcctccgtcttcgaagatggctaatttgaacttgaaagggaaagcttctcggacaaatctcattgagcctttgccgttgtcgttgaatctgccatcgccaacgccgcggtctcaggatcagtcgccggcgaatagtggccactcgtcgccgtcatcgtcttcggcggcggcttttcaggctatgtctgcagcgaagttcggcggcgggggggatagtatcatcagcgttgcttgaaaagaaggaaacaaagaacaaatgagtgtcattaacttattaagtatggtcttagtagttaatttgggtatgtaaattaatgttacaaaatcgggcatgtatccaacagggaaaaaatctaagagatatgtgttggagatttgtttattacgaaagatgtatgatataggtaggagggagaggatattagaattaaatgagtatgatggtaattatgattagaaaaaaataaaataaagagatatgtatggtaattaggttatgtaggtaattaggcaatttaattgctggtttcagtgtacaggtttagttgaattaaaaaagatgggttgtcatattctctagctgttgagggattcttgtttctatatgtatgggggagtgtgaccgtgaaatgatagggcaccgggtactcttgataagcgattggtctgtgtaatgccactggggtcattaaaatattgcttagattagacaaaaggaatatttcatgctcaccgttgaaaaaaaaaaagcaaaaagaagagctatataaaaaaaaaaaaaaaaaaaaaaaaaaaaa

SEQ ID NO: 5843 - DNA, 2178 bp, Glycine max
tccccgcgtcttatctccctcctcactctccattcaacttcttcacttcagtgcctagaatactggttcaactttcaagtgttcaaatgggggcaatttcaacaccccttgtgttggttcttctattttgctgcctggtttctgtttcacaagcagaatacttgaagtacaaagacccaaaacggccactgaatgttagaatcaaggacttgttgaagcgaatgaccctggaggagaagataggccaaatggtgcagattgaacgaagtgttgccacccctcaagtgatgaagaagtacttcattgggagtgtgctgagtgggggagggagtgttccagaaacaaatgcatctgctgagacttggatccaaatggtgaatgggatccaaaatggatctttgtctacccgtcttgggattccaatgatttatggaatagatgcagttcatggccacaataatgtctacaaggcaaccatttttcctcacaatgttgggctaggagttaccagggatccagtgctgataaagaagattggagatgcaactgcccttgaagttagagctactggaattcaatatgtgtttgctccatgcattgcggtctgcagagatcctagatggggacgttgctatgaaagctatagtgaggaccctaagattgttcaagcaatgactgaaattattcctggtttgcaaggagacatcagtgacaattccagaaagggggttccctttgtcgctggaaagaacaaggttgcagcttgcgctaaacactatgtaggagatggtggcacaaccaagggcattaatgagaacaatactgttgtcagctataatgggttgcttcgaattcacatgcctgcatatcatgactccattgtcaagggggtttcaacagtaatggtctcctactctagctggaatggccaaaagatgcatgctaatcattttcttgtcactgattacctcaagaacaaactgaagttcaggggttttgtcatatcagattggctaggcattgacaggattacttctcctcctcattctaactattcatactctattcaagttggtgttggtgctggaattgatatgatcatggttccctttaatttcactgaattcattgatgtcctgacttatcaagtaaagaacaatattatcccagtaagtaggattgatgatgctgttaaaagaatcttaagagtaaaatttgtcatgggcctatttgagaatccacttgctgatctaagcctagtgaatcaacttggtagtgaggagcatagacagatagcaagggaagccgtaaggaaatcacttgtgttgctaaagaatggtaaatctgctgagaaacctctgcttccccttcccaagaaagctgcaaagatactggtggcaggaagtcatgctgacaatttgggttatcaatgtggaggatggacaattacctggcaggggggtgggggcaataatctcacagtcggtacaacaatccttgatgctgtaaaacaagcaattgatcctgctactaaagttgtctacaatgaaaatcctgactccaactttgtcaagtccaacaacttctcttatgccatagtcactgtaggtgaacacccttatgcagaaacatttggtgatagtttgaatctgactataccagagccaggtccaagcaccatcaccaatgtatgtgggtctatacaatgtgtggtagttctcatcaccggccgaccagttgtgattcagccatatctatcaaaaatagatgcacttgtggctgcatggcttccagggactgaaggccaaggtgtaactgatcttctctttggtgactacggattcactggcaagttggcaagaacatggttcaagacagttgaccagctcccaatgaatgttggcgataaatattatgatcctctatttccatttggatttgggttatctacaaacaccacccggtactaaaaccattaatgagattactcaaaggtctcacggttccttttctacaatgagactcgcaattgatttacacgtgtacctttgtaatgaaagcgttagagaaactccatttagcactagaaaataagcatgctatttaaaatataatttactctggagccttggcaattttatcttataaacttggctttctaattggtttggtaacctc

SEQ ID NO: 5844 - DNA, 1147 bp, Glycine max
ccctctcacttatatttagcagctcccacgttgcgtactcagtccactcaattttagatttttaagtgtctggtgccttaacttgttcttcattgtgccctttctctgagattgcatataggtttttagtgctgaagcatcaaaatggggagatattcaataccctttatgggtgttctgctactgttctgtctggtttcatcttcagaggcagaatatttgaagtataaagaccctaaggcgccactgaatgtcagaatcagtgacttgttgaagcgaatgtctctcgaagaaaagataggccagatgacacagattgaaaggagtgttgctactcctgatgtgatgaacaagtacttcattgggagtgtgctcagtgggggagggagtgttccggcaacaaaggcatctgctgcgagctggcagcaaatggtgaatcagatgcaaaaggcagcattgtctactcgccttgggattccaatgatttatgggatagatgcagttcatggacacaacaatgtctacaatgctaccgtttttcctcacaatgttgggctaggagttaccagggatcctgtgctcataaagaagattggagaagcaactgcccttgaagttagagctactggaattccgtatgtctttgctccatgcattgcggtctgcagagatccaagatggggacgttgctatgaaagctacagcgaggaccctaagattgttaaaactatgactgaaattatacctggtttgcaaggagatatccctggcaattccattaagggagttccctttgttgctggaaagaacaaggttgcagcttgtgccaagcactacttaggagatggtggcacaaacaagggaatcaatgagaacaacactctgatcagttacaatggactgcttagcattcacatgccggcatactatgactctatcatcaagggtgtttcaacagtgatgatctcgtactctagctggaatgggatgaaaatgcatgcaaacaaaaaacttatcactggttacctcaagaacaaattgcatttcaagggttttgtcatatctgattggcagggtattgaccggattacctctcctcctcatgctaactattcatactctgttcaagctggtgtcagtgctggaa

SEQ ID NO: 5845 - DNA, 959 bp, Glycine max
aagccctaagcctccaacgccggaggagcagaaaaaaaaacacttccagagttccttcctcagttctctctctttctagaatcttccaattccaatttttcttttccttcaacacaaattaactcactgagtagcgagaacgagtcatggaatccaaacccgctcaaactatcaagcttctctgtagctacggcggcaagattctcccacgcgccaccgacggcgaactccgttacgtcggcggccacaccagagtcctcaccgtcgaccgttccatttcctttccagaattgatggtgaagctacgcgtattttgtggttcgtctgtgatcttgcggtgtcaattacccaagggagacttagagaccttgatatccatcaccaacgacgaagatctcgctagcataatcgaagaatacgaccgttcctcgttgaaattggcgcatccgttgaagatcaaagccgttctctcgccgccgaaatcgatgaagaaagcttcgcctgttccatcgtcggcgtcggcgtcgtccagcgccacacactctccgtccggatcgccgcacacctccaccgaatcgctgccgtacgcggcgttccaccgcatcggccgccacaaccgcccgccggttgtgtatgctatcggcgcggcgaaggcatgttgctacacgcagttcgatgggagccctaggttcctgtaccgtggacctcactgcaattattactgccactgaggcgaacgaaccgattttattcactgtaaatacagctgcaagagaatcgctattacgaagttgattccatacaaacgatgatgacgacgaaaaatatcaaaggaccaaaaaaaataaaatagagagaaagagtggactcttaaatacaattaatattttttttaattttgataaaactttagacatggatgagttgaggttctaatttttttaaaaaaaaaaaaaaaa

SEQ ID NO: 5846 - DNA, 1702 bp, Glycine max
acaccacactgtttccttacgcgaagaggactgtttatccgtacatcatttattcctcctcatctttgttctatttgtgcccaaccctcctcacccatttgtttccttccacacttaacacacttgcttctacttctacttcttccctcatggaggaattaatcatatctccttcttcatcttcctctttggtctctctttcccaagaaaacccaacaccaacccttcaacaaaaacttcaatttctcctccaaagccaacccgattggtgggtctacgccattttctggcaagcctcacacgacgacaatggcaacctctacttatccttcggagagggccatttccaaggcaccaaagaaacttccccaaaatcactaaccattcccacaaagaataagttcctgatgaaaacacccacaaacgataacatcaacgacgccgagtggttctacgtcatgtcgttgacttcagctacgtaggccccccccccctcttcttcaaactccacttcttgttcttcttcttcttcttcactccctggcaagtcttttgctttaggctcggttctctggcaaaacaacaggcacgagcttcaattctacaactgcgagagatccaacgaggcgcacatgcacgggattgaaacgttaatttgcatcccgacacaaaacggggtcgtcgaaatgggatcctacgacaccatcaaacaaaactggaacctcgtacagcacgtgaagtctctcttccatacctctccagatccggttactgtccaaatcctcgacgaccacatcatctccttcgccgacatcggcatcgttgccggaatccaagaaaccaaaaaacgaaaacaaattacccaaacagcacccagcaaaaacgacaactatgtcgactccgaacactctgattcggattgtcccacgttgccaaccgccaccaccccgacagcctcggagccgaagaaaagagggagaaaacctgttctcggacgcgagactccgataaaccacgtggaggcagaacgacaaagaagggagaagctcaaccatcggttctatgccttacgagctgttgttccgaatgtttcgaggatggacaaggcttcgttgttgtccgacgctgtcgcctacatcaacgaactgaaggcgaagattgaggacttggagtcgcagcagccgagagacagtaataaaaaaatgaagacagaaatgactgacactctggataaccagagtgccacgaccacatcaaccgtcgtggatcaaagcgggtctggatccagattaggtctaggcccccttggactcgaggttgatgtaaggatcgtggggcccgatgccatggtgagggtacaatcagaaaatgtgaaccaccctggggctaggctaatgggtgctttaagagacctagagtttcaggttcaccacgctagcatgtcttgtgttaatgatctcatgcttcaagatgtggtcgttaagcttcccaacggaatgaggagtgaagagagtcttaaatctgctattatcatgaggttggatcagtgacactggtgaggctattagctgtaatgtaactgtaagatgttgttgcagttcatagtagtaggtttatggtgtacgttataataatgattaatgctttagataatttttagttttcttttcttttcgggggaaggtcttgcgtggtgagaagg

SEQ ID NO: 5847 - DNA, 1085 bp, Glycine max
aatctcaaggcacacactgctggaatcattgctgcttcatttggaatggcaaatatatatcctggctcgcccctttggtggatggacttctgatgttgcagcaaggttgtttggcatgaggggcaggctttggaacctgtggatcctccaaaccctaggaggcgctttctgcatatggcttgggcgtgccaattcccttcccattgcagtcttgcccatgatcctcttctctattggtgctcaagctgcatgtggtgcaacttctggcatcattcccttcatctcaaggcgttctcttgggatcatatcaggcctaactggtgcaggtggaaactttggttctggtttgacccaattgatcttcttttcaacctcaaggttttctacttccactggtctctcccttatgggtgtcatgattgtgtgttgcactcttcctgtgactcttgttcacttccctcagtggggtagcatgttcctccctccttcaaaggatgtcaacaagtccactgaggaatactattacaccgctgagtggaacgaggaagagaagcaaaaagggttgcaccagaatagtctcaagtttgctgagaatagccgttcagagagaggtaagcgtgtggcctcagcaccaacaccaccaaacacaactccaactcatgcctagcttctccactttgcactctcattcatgcgccttcagcgtattttttaaccattggatgaagatcagacaattgaagttgatcgaacgagataaaatatgagtggtctgatcttcatcagacgggtttaaattgctgaatgtgggtgaatgtgttgaagagtgaatggagtgattggggaatccggatcccaagttttaaggccttagggtataactactgcagtagaaaataccaccaataatgaggaacaacctaaagggaatctcaaattgaataagttttttttttatcccacccccccaaaaaagttgaaatactagtaatgtttcttgcgcttattttggtgtaaagtttacaccagacttacttatacgtgggccatacatatatatatgcaagaatcaatttgtgattatg

SEQ ID NO: 5848 - DNA, 1135 bp, Glycine max
  misc_feature (10)..(10): n is a, c, g, or t
ctcacttgtnataagggcagagaacaaaagcactgaggagcacagagcacattttggaaataggcttatacagaaaatggtttgatccgctgcatggtccttctcatcaattatcaggaggcaattaacttgctaccatgcagtgacgatcaaaagcatgttacaaggtacaacatctggctgccagaagcatcaaaagcatgtaggacacaaaaaaagaaaaagcttactcccaataacagccatttaccacttttctagtggttttcccactatatcaggaggaaaagagataaggattgagtgtctgacatacatacatgcatacataagttacaggttatcaaattggagatactaaaactggggtatttccaatcgcaggctggagactggctgcatgctcgagttgtttccacgcttccttccgcttctctgccgccatgtttagcattacttcttcttccttgaattgagaatgagaagccaggaacagcttctcatccatctctacaaacatttttctcacgttataagttaggttgagcactgactggctccagtggccctgagaattcttcgctcgcgcgggaaatatgattggcaggatcacttgtcggttcggacccggcaagttgacaatatggtcgttgttccataagaaaagggctctttcagctacctggaagtgcaaactgttaatgcagcatccaatccgccaaaacaacgggaccatgaccctctgaaactctaccatgttaattgtttccaaaatttcctccagttcacccaggcacatcacctctttctgactgttcgcaagaagattgagcgagcctttggtaaatacacactggagattaaaaataatcttgagcgaggaactgcattgcctgactaaggtacttctgtagtggtgtgttattatttcgcattgttctcatactgataagtttcagtggtggattgcactttttagagtgctttttgatcatgtaatattatagtcgaatattttgcaatgcacatatggagcattgcggagttattttgaacttcaaatattatatgcttgcttgggatattggttcttcttagtggactatttccaatcatcaaaaaaaaaaaaaaaaaa

SEQ ID NO: 5849 - DNA, 1137 bp, Glycine max
tcgagtcagctacgtaggccccccccagtccaacagggataatgctcggagcttggaagagtaaaccgcaatttcctccagtgtgtgtgtctgcatttgagctacttttttggcagaaaatcatgttaagaatgggtttgaggaagctacaagacaaggttgcgctgatcacaggcgcagctagtggaataggaaaagccacagctacaaaattcatcaataatggagccaaggttattattgctgatattgatcaagagcttggccaagagactgcaaaagaactaggacctaatgctactttcatagcatgtgatgttactcaagagtcagacatttccaatgctgttgatttggccgtttctaaacacaaacaacttgatatcatgtacaacaatgcagggaatagcctgcagaagtcctctaagcattgttgacttggacctggaactgtttgacaaagtcatggacataaatgttcgtggcgttgtggcaggcatcaagcatgcagcacgtgtaatgatcccacgtggaagtgggtccattctctgcacagcaagtgtcacaggtgtgataggaggggtgtcacaacacacttactcaatatccaagtttgcagttgtgggcattgttaaatctctggcttctgagctatgcaggcatggaatccgggtcaattgcatatcaccttttgccatccccactcctcttgtcatgggagaaatgagtcagatatatcctcatgttgatgctcagagacatgaggacattgttcacaatgctggtgtcttaaagggagcaaattgtgaacccaatgatattgctaatgctgcacttttccttgtgtctgatgatgccaaatatgttagtggacacaacttggttgtggatggaggtttcacatcttttaagaatttggacttgcctgcaccaaatcaagtgcagtaggagtttgtacaaattatattttagataaaggtaacaatgttaaaattaagtaattcaataagagtgagtcaattgaatttatttactcttcttgttagagaactataaagtcctacatgggacaaataaagacaaacaaagaagtatatataaacatggaggaattcatataaaaaaaaaaaaaaaaaa

SEQ ID NO: 5850 - DNA, 645 bp, Glycine max
gcgggcacgaggcctcgtgccgaattcgtggtgtcactgtcgagaaacatggtggtcggaagtgctttgggagcgtttgcagtggcaaggccttcctcgccactttttttgttaagaggacaaacggctttcaaattcagacccctctcatcttcttcttttggtgctgcaccttctagaaagctcgtcctctactccaaacccggttgctgtttgtgcgatggcctcaaagagaagcttcaagctgcattcttactcttgggcactgattcacttcacggcgttgatttgcagataagggatataactaccaatcctgagtgggaaaacgcttaccaatatgagatacctgtgttggctaaagtgctttccgatggcaccgaggtggctttaccgcgattgtccccacgtctaggagtggagctcctccagaaaaagatagctgctgctctgagtcaacaataaaaggcgtttgtttgttttgtaaccttacatttaagtatttaacaccatttcgtgtaaattatatttgtagacttccatttttttttaaaatgttgtgtattgaataaattaatttcaaaatattgcaatacaaactgaacccgatcaagaactccaaaaaaaaaaaaaaaaaaaaaaaaa

SEQ ID NO: 5851 - DNA, 1325 bp, Glycine max
tcgagtcagctacgtaggccccccccccgtctctgtaaaaactcttgtctctctctctcctgaaggtaaggcagagaagagaagaagagaaggaaagaggcttgtccctggagaaaagaggaggcaaatacatggagaacgagggtgtaaacacggtggtggtggagcaacaacctgtggcatccacgtccaagtttccgttgagcttttgggaaaccacggtggcttcaacggtggcgctggttttcgcggtgggccttctcggcgtctacctcaccatgcccgattccgattacagcttcctcaaactccctcgtaccctccaagaccttcaactcctacgggataaccttgagagctatacaagtgactacactgcacaagtcttggtggggtactgcgtggtatatattttcatgcagactttcatgattccagggactgtgttcatgtcattgcttgctggagcactctttggagtctttaaaggtgtggctctggttgttttcactgccactgcaggagcttcttcatgctatttcctgtctaaacttattggacgacctattctgtcctctctctggcctgaaaagttgaaattcttccaaacccaggtagctaaaagaagaaagggtttgttgaactacatgctttttctaagactgactccgaccctgcccaacacatttattaattttgcttctccaattgtggatgtgccttatcatattttcttcttggcaactgttattgggctgatacctgctgcctatgtcacagtcaaggctgggttggctcttggagagttacaatccgtgggtgatctctatgatttcaactcaattgctactttgtttctcattggtgtagtttcagtcacacccacactaatgagcaagaacgaatcatagcatttcagaagccaagaatctttgtgaatgaaggaagcccttgttctcctgacaactaatatcagctcagtatttgtacagatctccaaaacaaaaagaaaaaaaggaagaaaaagaacaattgcattgtgattctttgctattagatttattgcaaaatgctgcagtagttcaagacaagcatatgattggtcggatctctgccagtggcaagtaacgacgtttggctgaattagttatgtacattgtttatgagttgatttgtgtaaagcatttacttattcaatggtagttgctttgtcatgttttttacatgcacaaaagatgttttccctgggctctcctatcatttggtaactttggttacacagttacttttccactttctgtgtttccttttataaaaaaaaaaaa

SEQ ID NO: 5852 - DNA, 1215 bp, Glycine max
gcgtgcgtacggctgcgagaagacacagtctttgtctctgtaaaaactcttgtctttctctctctcccgaagataaggcagagaagagaaggagagaggcttgtacctggagagaaaagaggagacaataatacatggggaagcagggtctaaacacggtggagcaacaatctgtggcaccgacagcatccaagtttccgttgagcttttgggaagccacggtggcttcaacggtggcgctggtttttgcggtgggtcttctcggcgtgtacctcaccatgcccgattccgattacagcttccttaaactccctcgtaccctcgaagaccttcaactcctacgagatgaccttgagagctatacaagtgactacactgcacaagtcttggtggggtactgcgtggtttatattttcatgcagactttcatgattccagggactgtgttcatgtcattgcttgctggagcactctttggagtctttaaaggtgtggctctggttgtgttcactgccacagcaggagcttcttcatgctatttcctgtctaaacttattggacgacctattctctcctctctgtggcctgaaaagttgaaattcttccaaacccaggtggctaaaagaagaaagggtttgttgaactacatgctttttctaagactgactccgaccctacccaacacatttattaattttgcttcaccaattgtggatgtgccttatcatattttcttcttggcaactgttattggactaatacctgctgcttatgtcactgtcaaggctgggttggctcttggagagttacaatctgtgggtgatctttatgatttcaactcaattgctacattgttcctcattggtgtagtttcagtcacacccacactaataagcaagaacgaatcatagaatttcagaagccaagaacctttgtgaatgaagcccatattctcctgacagctcagtatttgtacagatctccaaaacaaaaaaaggaagaagaaaaaaagaattgcattgtgattctctgctaatagatttattgcaaaatgctgcagtagttcaagacaagcatatgattggtcggatctgtgccagtggcaagaaacgacgtttggctgaattagttatgtacattgttcatgagttgatttgtgtaaaacatttacttattgaatgatggtagttgctttgccaccttttttccatgccc

SEQ ID NO: 5853 - DNA, 501 bp, Glycine max
tacggctgcgagaagacgacagaagggggagggggttgaacataatgaaccaaaatccagagtaaaaggcgaagcagcggtgggagcgatgcgcatcatggttgctcccataaactaaatggctatgtctttacctcttcgtttctattcctcctcgtctttctctctcacttctcttggggttgtgagaaaagtgctcgggactcttacaacagatattgttcaaccaaggagtggaaattggcacttagcaaaaagaggtggaagactcatatcgtttaagggtcgtgcgaggctggtacatacaacgtgccgaatctctgtccctgggaccttaccaagaactgatgaaaaggcctcatctaacatctcgagggataagaagacagttccagaagcagatcctccgagtatcaaagacgttcagcttttgtatgaatttttggaccggagtaccaagctcacggtatgtgactgcagctggaatcagtacagagtgtg

SEQ ID NO: 5854 - DNA, 1013 bp, Glycine max
ttcatgatatatttgggtctcagtcatcatctgcttgccccacgtctcctcttcattttcaagaagaccttcttcatcgccggcaacacttggtggaggaaattttgcagctgtcccccccccccttttcagtggtatcttttgatagtaacacaagctgtagtgatgttgattgcagtgaatttgagttgtcagtgcctaaagttgataatttcccatgcaaatattatatgaatggaagtgttgatggtcatttatctcaaaatcagctcaaggaaaagttttacaacccaagacaaggaattcttcatgcaagagaaaatggaaattctttatctagttctacctgtgacccaacttctaagcagcattcaattgattttgctgctggtgctgacaatgctgagagtgcattttgtgctaaccaggacactggtttgttggagaatagaaaaattagaaaaaagccaagagaattatttcaatattagaagagaatttagatgttgatgcatctgatcatacacaagaacagacaagtcaaggacagatttctccaaatttaaaacaagtattggacattgatgattctactgaattttctgggcaccattactctacccaagagaatgatgatttgattgtgacatatttcaatacaagtattgctgattctgaagccagtgaggtctgtagtcattgtatgcgctgtaattgtgtccttcagagggagacaaactatattgaaagcgaagttgcagtattgctgagcagccataagaagctctatttgctactaatcaacattgcttctaatgggtcaggaacacttttgagtgttttgagttgccacaagattgaagaagtttgtgaggtgctagtaggaatgggacttcaggtgttaagggtaaattttgagaatggggaaacgtatctttttgtaacaagaagcattgagaaatcaagagaattactatgtaccatacacgtgcttgattcatgtggtggaaatg

SEQ ID NO: 5855 - DNA, 667 bp, Glycine max
aattcggcaccagtcgagtcagctcccgtggccccccccccccctctacaaggtctttggagaaaatccatcagggtttggatgcctttttgtcaagaaatctgctatcaccactcttgaatcctcatcttgtgcaggaattgtgaaccttgtgccagaaaggttgctacttcagccatcagaggataagcattcttctaagcaaaaaccattgtctatattacaagaacaagacctatcttccttgagttctttctctggtcggatacaaacctcacaagctataaaagttgaacaagaattatcggagcttcagatcatagcggcacctgcaaaaccaaaacaaggttctggaagtgtggaagcaaaaggaccagttgagagccttcaaagtaagaaagcacaagatggtagtgagaatgggggatttaacattgattgcaggtgtttggatcaagtggactctttgggattgataatgatcaccaatagaacgaggtaccttataaattggctggtgaactccatgatgaagctgaagcaccctaatgcagaaggggttcccctggtcaagatttatgggccaaaggtgaaatttgataggggacctgctttggcattcaatgtgtttgattggaaaggtgaaaaggttgagcctgtccttgta

SEQ ID NO: 5856 - DNA, 1810 bp, Glycine max
  misc_feature (164)..(164): n is a, c, g, or t
gagaaaatctactaaaatctctgaaaatagaaaatgagataggtccctcatcatctgaaatgccaactgttccaagacatatcgataaggtggggacaaaaccaaatcatatggaagaagagatatggtcctggtctcacttgctcaacaatgttggagtattnggagagatgtcaaatcgattagactctttctccgttataaatacgacacagaaacaacttggagggactgaaactgttcatgatgctaagaatgtgaatgacttcgcttttccctcagagtctgaattacacaaagcacttggatcagttggatatggagagacaggcgaatttatgtcaaaatgtatccctgttgaggaaacatacagtaactcaactcttgtaatcaacaaaaaagagcatgatcatattaaaggtttggagtttcccaaagatgttgacctggaagatcttttagatgctgttgttggcaatttatgtggtgccactgatgatacttcaagtatatccaacagtgtcaggtctcttacaaccatgccaacagagtttacaggttccgttcagcctgaaaattattcagaagaaagcactttgattgtggataactcagatgtgaaaaatgatcttatgcctgcagttatggtcaagggaaaagatcaattttctaaccattatacatcatcttttgatggaaatgcatgcttattgattgatgaggcgcggcaggaaaaggctaatagtcatatgcagcctgttggtggaccaaagctctctagcacaagcaagaaaagaacaagagttggtaacaaccaaaagtcaaggccaagagatagacagctgatcatggacaggatgaaggagttaagagaacttgtcccggaaggtggtaggtgtagtattgacaacctcttggaacggaccataaagcacatgctgtacttgagaaagataacaagccaggctgagaaactgaaacgaattgctaatcgggcggttcccgagtgcaaaagacagaaagtcaatgctagccacccaggaaggagctgtgcatttgactttgaaagtcaactatcatggcctatagtcatagaagatctggaatgctcagggcacatgctcatagagatgatatgcaatgagcatggacttttcttggagattgctcaggtgatccgaaagcttgatgtcaccatcttgaaagggatcttggaaaaccgttccagcaacagttgggcttgtttcattgttgaggttccaagaggttttcacagaatggatgttctgtgtcctctactgcatcttctgcagcttaggagaaaccctgtctcatgtaaaagctgaccctaccatcccagttatcagtttcaaacggcaacttctatttagagaagttaacatacaataatattcatgagggccttcttctgtgtactggtgtaaatgattgtgttcatgccctcgttagtgtacttgctgcatttttggtgcgttcattataagctagtacctaaatatatatgtaaacaaacaaggacgctttaggggtgctactggctgcggaacaatatgtgcatacaagctagctttgaactcatttctagtgtggcattattatgacctaaatagagaacgagaactgtttgctagaacacaggattaagatttaagactataagagtgcggggatgctgccactccagtctcaaatataataggaaaaaaaaaagcgatttacatttacttaaaaaaagttagataattatatttaattgcattaatatcaattaaaaattaattgttttttc

SEQ ID NO: 5857 - DNA, 1211 bp, Glycine max
gttgtaagagacctaacactgttggatatacttgaagtatcagcagcagcaccacaaaaattattcagaagaaagcactttgattgtggatagttcagatgtgaaaaatgatcttatgcctgcaatcatggtcaagggaaaagatgaattttctaaccattttacatcatcttttgatggaaatgcaagcttattgattgacaaggcacaacaggaaaaggctaatagtcatatgcagcctattggtggaccaaagctctctagctcaagcaagaaaagaacaagagttggtaacaaccaaaagtcaaggccaagagatagacagctgatcatggacaggatgaaggagttgagagaacttgtcccagaaggtggtaggtgtagtattgacaacctcttggaacgtaccataaagcacatgctgtacttgagaaagataacaagccaggctgagaaactgaaacgaattgctaatcgggcggttcccgagtgcaaaagacagaaagtcaatgctagccacccaggaaggagctgtgcatttgactttgaaagtgaagtatcctggcctatagtcatagaagatctggaatgctcagggcacatgctcatagagatgatatgcaacgagcatggactcttcttggagattgctcaggtgatccggaagctggatgtcatcatcttgaaagggatcttggaaaactgttccagcaacagttgggcttgtttcattgttgaggttccaagaggttttcacagaatggatgttctatgtcctttactgcatcttctgcagcttaggagaaaccctgtctcttgtaaaagctgaccctaccatgccagttctcagtttcaaactgcaacttctatttaaagaagttacaataatattcaagagggccttcttttgtgtaatgctgtaaatgattgtgttcatgccctcgttagtgtacttgctgcattttggtgttgattataagctagtacctaaatttatgtaaacaaaaaaaggacactttaggggtgctactggctgcggaacaatatgcctagcaggcagtagctatctttgaactcatttctggtgtggcattatcatcatgacctaaatagataactatgggagtgttagctagaaaagtagagccttacccccgctggatattaaactgagtatgttatatgagtgtaattaagttggcaattcgcgg

SEQ ID NO: 5858 - DNA, 1490 bp, Glycine max
  misc_feature (1210)..(1210): n is a, c, g, or t
  misc_feature (1214)..(1214): n is a, c, g, or t
  misc_feature (1216)..(1216): n is a, c, g, or t
  misc_feature (1220)..(1220): n is a, c, g, or t
  misc_feature (1225)..(1225): n is a, c, g, or t
  misc_feature (1227)..(1228): n is a, c, g, or t
  misc_feature (1262)..(1263): n is a, c, g, or t
  misc_feature (1265)..(1265): n is a, c, g, or t
  misc_feature (1269)..(1270): n is a, c, g, or t
  misc_feature (1273)..(1273): n is a, c, g, or t
  misc_feature (1282)..(1282): n is a, c, g, or t
  misc_feature (1291)..(1291): n is a, c, g, or t
  misc_feature (1295)..(1295): n is a, c, g, or t
  misc_feature (1308)..(1309): n is a, c, g, or t
  misc_feature (1311)..(1311): n is a, c, g, or t
  misc_feature (1313)..(1314): n is a, c, g, or t
  misc_feature (1318)..(1318): n is a, c, g, or t
  misc_feature (1336)..(1337): n is a, c, g, or t
  misc_feature (1343)..(1343): n is a, c, g, or t
  misc_feature (1348)..(1348): n is a, c, g, or t
  misc_feature (1353)..(1353): n is a, c, g, or t
  misc_feature (1355)..(1356): n is a, c, g, or t
  misc_feature (1358)..(1358): n is a, c, g, or t
  misc_feature (1364)..(1364): n is a, c, g, or t
  misc_feature (1367)..(1367): n is a, c, g, or t
  misc_feature (1370)..(1370): n is a, c, g, or t
  misc_feature (1374)..(1374): n is a, c, g, or t
  misc_feature (1378)..(1380): n is a, c, g, or t
  misc_feature (1386)..(1386): n is a, c, g, or t
  misc_feature (1389)..(1389): n is a, c, g, or t
  misc_feature (1398)..(1398): n is a, c, g, or t
  misc_feature (1403)..(1403): n is a, c, g, or t
  misc_feature (1406)..(1409): n is a, c, g, or t
  misc_feature (1415)..(1415): n is a, c, g, or t
  misc_feature (1417)..(1417): n is a, c, g, or t
  misc_feature (1422)..(1423): n is a, c, g, or t
  misc_feature (1425)..(1425): n is a, c, g, or t
  misc_feature (1428)..(1428): n is a, c, g, or t
  misc_feature (1433)..(1433): n is a, c, g, or t
  misc_feature (1439)..(1439): n is a, c, g, or t
  misc_feature (1441)..(1441): n is a, c, g, or t
  misc_feature (1451)..(1451): n is a, c, g, or t
  misc_feature (1454)..(1454): n is a, c, g, or t
  misc_feature (1456)..(1456): n is a, c, g, or t
  misc_feature (1464)..(1464): n is a, c, g, or t
  misc_feature (1466)..(1466): n is a, c, g, or t
  misc_feature (1468)..(1469): n is a, c, g, or t
  misc_feature (1473)..(1473): n is a, c, g, or t
  misc_feature (1478)..(1478): n is a, c, g, or t
  misc_feature (1480)..(1480): n is a, c, g, or t
  misc_feature (1482)..(1482): n is a, c, g, or t
  misc_feature (1484)..(1484): n is a, c, g, or t
  misc_feature (1487)..(1487): n is a, c, g, or t
tcgagtcagctacgtaggccccccccgtgcttgggctacgtgggccccccccccctaaactgctaagcaggaaggaagctgctctgcgtcaaagagaggctgctctcaaggctgctcaacaaacacagagtgggagagatgaggatatcacagcccttcgagtggaaattcagaacctaaaagatgatgctacagcagctttggaacaacagcaagaagctgaagctgaagcaaagtctcttcgcacaatgacacaaagaatgattttgacccaagaagaaatggaggaagttgtcttgaagagatgttggctagcccgctactggggtcttgctgtaaaacatggcatatgtgcagatatagcacaatccaagcatgagcattggtcttctctagctcctcttccttttgaacttgtcatctctgctggacaaaaggctaaggaggaatcctggaacaaaagtgctgatggtccagatagaagcaaacttgttcgtgatttgaatgatcttgctggggaaggaaatattgagagtatgctctcagttgagatgggtttgagggaacttgcttccttaaaggttgaggatgctgttgtgcttgcattagcccaacacagacggccaaattcggttcgacaatccgttttagattccaaatcacgtggtgatgccaaatattcagaagcatttgaattaagtgaagaggaagcagaagatgttcttttcaaagaggcatggttaacttatttctggagaagagctttgtttcatggtgtggaagaagatattgcagaagaacgccttcagttttggattgcccgcagtggacagtcaccaagttcacatgatgctgttgatgttgagcgaggcttgttggagttgaggaagctgagtatagaacagcaactttgggaagcatcacggaagggaattgatcagcttcaggggtcagcagatgctaatcataagcatgcctctgactctgatgcctcatcctgattgtctgagccccctttagttcttaatcgattctttgtcctatatgtatatttttgttttgttttctacacaagttttccaatctgtaaacatttcaaaacactgtattcgggaatacaaagaaagcaagaatctttacgttgcacgagacatagtgggttgtaataattaacaatctacttaagactggatttttccctattctttanaatnanatanttctntnncccgggggatcccttttctaaacggccggcctcnngntganntcnacttttgtncctttaagngggnatttctcttgggnnancnntgcntattggttccggggatanngtattngacanttccncnntnttccancgnggnttantgtnnnccgggngcntatgaatcnttttnttnnnnttggcntntgccnntnttntggantttgtncnattttttatntcnanggggaagngntnntggnctatntncncnagnttt

SEQ ID NO: 5859 - DNA, 1738 bp, Glycine max
gagaagtttcattagtgcttgatcgtatttaagatattaatctttcgcttacattaccaagcgatttaagttagttttcccaagtaatttttagtttcagttaaatgtaaatatttataatttcatatgagaaaaaatgatttcaattgaatatgtgaaactgtgattaggataatttgttttgaactatgaactaaaattaatatatatttttttctgataaaataataaaggggtggagaggagaagtaaaccctagagtagagaatggaaggtgagggtggggagaggaaaagaggcgcacgtttatgctgcgtgtgcaagaaatcaagagcttcggtgaagaggccgaaaaccctagagcagatatgcagggagtgcttctacgatgcttttgagtctgagatccatcaggtaattcttgagaatcagctcttcagccctggtgaacgcgtcgcaatcggcgcttctggcggaaaggattccaccgtccttgcctacgtcctctccaagctcaaccgcctccacaattacggcctccatctcttcctcctctccgtcgacgagggcatcaccggctaccgcgacgactctctggaaactgttcaccggaaccagattcagtacgggctccctctcaaagttgtatcttacaaggacctctacggatggactatggacgagatcgtgcgagtgattggtttgaaaaacaattgcactttctgcggcgtcttccgtcgacaggcccttgaccgaggtgcttctctcttgaaagtggacaaagtcgttactgggcacaatgccgatgatattgccgagaccgtcctcctcaacctcctccgaggagatgttgccagattgagtagatgcacctctataaccaccggtgaggatggccccattccccgatgcaaacctttcaagtatacttacgagaaggagattgtcatgtatgcttatttcaagaagctcgattacttttccaccgaatgcatttactctcctaatgcatatcgaggttttgctcgcgagttcatcaaagatttggagagaatcagacctagggccattctggacatcatcaaatcaggggagaatttcaggatttctactagtaccaagatgccagagcagggaacatgcgaacgctgcggttatatttctagtcagaaatggtgtaaagcttgtgttctgcttgatggactgaatagaggtttgcctaaactggggattggacgaagtcgtggcagtgttgcttctgataatggaaatgaaagtaaagtagaaaagagcatccagggcaaacaatgtacaactctagacttctgatttcccacatcacacctatcagcgagacgaggcttcctgttcctgaaattcagggtttaaagaaaagttgcactgtttccagattattactagtcaatttaatcatatatctttagctttatttctgtgggcaacggtcatgttgtcatttgtacaccaagtcggcttctcataatcaatggatactaatgctctggtggagagaaagtgagcgaagaaaaaaaaaaatagaaggaaataaatatttgaaattttgtggttgaaagttaacctttcttttctcactttttttctaatcaaacaaaagaaaatattgtcatccatattttcctttgtctacttgtttcagtaacacccgaattctaagtattaggagaagactgctttttaacaccatgttatttatatt

SEQ ID NO: 5860 - DNA, 959 bp, Glycine max
cctcacctctttcacactcatatccaaaaccaaatccacttctccaactaatgggcgtgttcagcgaagatccgaatcccaacccgaacccgatcgtgatccgagaggtttgggcctccaatctcgaatccgaattcgaactcatccgcgaactcatcgatcgctacccttttatctcaatggacacagaatttcccggtgttattttccgaccacatgtggaccccaccaaacccttcaaccaccgcaaccgtccctccgaccactaccgcctcctcaagtccaacgttgacgctctcaacctcatccaggtcggcctcaccctcaccgacgccgccggcaacctccccgacctcgccggaaaccgctccatctgggaattcaacttccgtgacttcgacgtggcgcgtgacgcctacgctcccgactccatcgatcttctccgtcgtcagggcatcgatttcgcgcgtaacaccgccgacggcgtggattccacgtgcttcgcggagctgatgatgtcttcggggctcgtgtgcaacgacgccgtgagttgggtcacgttccacagcgcgtacgatttcggttacttggtgaagatcttgacgcgccgtaacctaccgacgaggttggaggaattcttgaaaaccgtgaaggtgttcttcggagataacgtttacgacgtgaagcacatgatgaggttctgtgacacgctctacggcggattggaccgcgttgcacggacgcttaacgtggaccgcgccgtagggaagtgccaccaggccgggtcagacagcttgctgacgtggcacgccttccagaagattgttgacatttattttgtaaaggaagagcaccgaaaacatgccggtgtattgtttggactataggcattctgttaattataataacataaaaataataaaaattcaattgattgattatttaaaaaaaacccaaaa

SEQ ID NO: 5861 - DNA, 1057 bp, Glycine max
gctgcgagaagcccacgcgtccggccaccctcaaatccaattccactcccaccgaccaaaacgcgcaacacgttgtaattaaaacgacaccgaaactaatgggcgtcttcagcgaaaacccgaatccggacccggttgtgatccgccaggtttgggcttcaaatctcgaatccgaattccaactcatccgcgaactcatcgaccactatccttttatctcgatggacacagaattccccggtgttgttttccgaccacacctggaccccacaaaaccctacaaccaccgcaacaacaatcgcaaccgccactccgaccactaccgcctcctcaagtccaacgtcgacgctctcaacctcatccaggtcggcctcactctcaccgacgccgccggcaaccttcccgatctcgccggaaaccgctccatctgggaattcaacttccgtgacttcgacgttgcgcgtgacgcctacgcgctggactccatcgatctcctccgccgtcaaggaatcgatttcgcgcgtaacgccaccgacggcgtagagtccacgcgcttcgctgaactcatgatgtcttcgggactcgtctgcaacgattccgtgagctgggtgacgtttcacagcgcgtacgatttcggttacttggtgaagatcttgacgcgccgtaacttaccgacgcggttggaagaattcttgaaaaccgtgaaggtgttttttggggacaacgtttatgatgtcaagcacatgatgaggttctgtgacacgctctacggcggattggaccgcgtcgcacggtcgcttaacgtggaacgcgccgtagggaagtgccaccaggctgggtcagacagcttgctgacgtggcacgcgttccagaagattgttgacatttattttgtaaaggatgagcaccgaaaacacgccggtgtattgtatggactagaggtcttctgttaattacaaaaattattaaagcataaaaataataaaaattcatttgattgattgtttaaaaaaaaaaaaaaaaaaaaaaaaagaaaagggccgctctagaggatcca

SEQ ID NO: 5862 - DNA, 1875 bp, Glycine max
aatgataataattaattggggaagatgcgttgtgaccgcttatctggtaatccttatccgtatcggtccgcaacgcaattgagtgagagtgaggcccttatttatctctctccgccaaattctggttgggattggttcttcttccacttccaacgccatgcctctttttggaattttccagataccctcatttatggacataatcactgacctcgccatgttcattactccgctatggattgcggttatcgtcggcgtcgtcgtgggctgggcgtggaagcccaaatgggcctttcaccccaaagacgctcttctcaagtttcgctctcctcgccctcccaatccccaaaacgacaccgcttttacctactccgccaccagttcctccgcgcgtgagaaagacgcgagtgggagtcctgtggtgacggaagacgatttgctgcatctgtggaagttggttgaggaaaaagacggagggcgggcatggattcagatgatggaccgttctaccccgaccatgacctatcaagcgtggcgtagggatcctgagagtggaccgccgcagtaccggagcagaacggtgttcgaagacgcgagtcctgagttggtgagggatttcttttgggatgatgagttcaggttgaagtgggatgacatgcttatacatgcttccaccatacaagagtgtgtcctcactggaacaatgatggtgcactgggtgcgcaagtttcccttcttttgcagtgacagagagtatataattgggaggcgaatttgggacgcaggacgaatttactactgtgtcactaagggagtaccttgcccctccatgccaaggcataataaacctaaacgagttgatttattttattcaagctggtgtattcgtgcagttaaatcaagaaaagatgaccagctgacttcatgtgaagtgttattgtttcatcacgaagatatgggaattccctgggaaattgctaagcttggagttcgacagggtatgtggggagctgtcaagaagtttgatccaggactacggacatatgagaaacaaagggtttctggtaccccattgtcaccctgtgcacgtgctgctaagatcaacactaaagtaaccatggactatgtgaggtctctggaaaacacgaccagtgacttgttggagactgaaaatcaggattcttctgacaaaccaggtggaaggaacatacctaagcttttaattgttggtggagccattgcccttgcctgcactcttgatcaaggactactgactaaggcagttatatttggagtagcccgaaggtttgcaaaaatgggaggaaggaggttgtgatacattatgctttttgctttgagaaattgccaggccagccaattccctctggcagtagaattagaaattgagatgtcacttcttgctttggggcaaatgtttattctggatctagttggcagccatggttcaagaagaatggtattattctttctccatttgtttgatctatgaggcggcttttaactggaaatagctacattgtatctttatgtcattaaaaaaagattgtcatgctgcaggaataacatcaatattcaggtttttcttttagttcatgttttttttactgttagctctctctgccctcttctttttctaccgtttgattctgagaaatacagtgaacaagatatggtagctctcaaaatttcgttgcatgaatgtttattgtatttgccaagtctctgtagataaaatgagaagaccggcagttgatgaataatcacagtcaacactttgcagtttgcagggtaggtggttgttgaattacgatttaattattggtcctttaatcgttatagttaatattcattttt

SEQ ID NO: 5863 - DNA, 1675 bp, Glycine max
  misc_feature (1658)..(1659): n is a, c, g, or t
ccacgcgtccaaattctggctgggattggttcttccaataataaccatgcctcctcttttccgaatttttcagatacccacatcacttatggacatcatcactgacctcgccatgttcattactccgctttggattgcggttatcgtcggcgtcgtcgtgggctgggcctggaagcccaaatgggcctttcaccccaaagacgctcttctcaagtttcgctcccctcgcccttccaatccccaaaacgacaccgctttcaccttctccaccaccagttcctccgcgcgtgaaaaagacgcgagtgcgagtgcgagtgcgagtcatttagtgacggaatacgatttgctgcatctgtggaagttggttgaggaaaaagacggagggccggcatggattcagatgatggaccgttctaccccgaccatgagatatcaagcgtggcgtagggatcctgagagtggaccgccgcagtatcggagcagaacagtgttcgaagacgcgagtcctgagttggtgagggatttcttttgggacgatgattacaggttgaagtgggatgacatgctcatacatgcttccaccattcaggaatgtgtcctcactggaacaatgatggtgcactgggtgcgcaagtttcccttcttttgtagtgacagagagtatatcatagggaggcgaatttgggatgctggacgaatttactactgtgtaactaagggagtaccttgcccctccatgccaaggcataacaagcctaaacgagttgatttattttattcaagctggtgtattcgtgcagttaaatcaagaaaagatgaccagctgacttcatgtgaagtgttgttgtttcatcacgaagatatgggcataccctgggaaattgctaagcttggagttcgacagggtatgtggggagctgtcaagaagtttgatccaggactacggacatatgagaaacaaagggcttctggtaccgctttgtcaccctgtgcacgtgctgctaagatcaacactaaagtaaccatggataatgtgaggtctctggaaaacacgatcagtgacttgttggagactgaaaatcaggattcttctgacaagccaggtggaaggaacatacctaagcttttaattgttggtggagccattgctcttgcctgcactcttgatcaaggactactgactaaggcagttatatttggagtagcccgaaggtttgcaaaaatgggaggaaagaggttgtgatacattgcgttttttgctttgagaaattgccaggctctggcagtagaattagaaattgagatgtcacttcttgctttggagcaagtgtttattctgaatctagttggcagccgtggttcaagaagaatgctattattctttctccatttgtataatctatatgaggcggcttataactggaaatagctacattgtatctttaagtcattaaagattatcatgctgcaggaatatcatcaatttccaggtttttctttagttcatgttgttttactgttagccctctctgccctcttcttttttacccctttgtttgatctgtatatcatctttttctaccgtttgatactgagaaatacagtgaacaagatatggtagctctcaaaattccgttgcatgaatgtttattctgttnntcaagtcccagtagat

SEQ ID NO: 5864 - DNA, 2312 bp, Glycine max
ttcccacgcgtccgcccacgcgtccgtacggctgcgagaagacgacagaaggggccactcactctgtttactctatcacaatcttattatactactatcttcttctttctctctttttttcttctaatatttaattatcaaaatttgtttttatagatgatataaaaattcgttttttgtgttgacgacttgcattattgcatatacataggcagcacaaaatccttttgttgagtcagtgagagaaagagagagagagggtgtcagtgatgcccttttgcttgatccctcatttgtcaagataataagaagagggtacataacttggtggtgatttgatacacaagaagaatgttgggtcgggctgcattttcccgaactgggagtttcaggcctgagaatttaggtcagaatgccatggccatgattgggaacgtttgcttctcatttttttgtttttggggttttggttttcaccattatggctgccacttatgaacctgaggatcccttgtttcacccttcaaccaagatcaccacattcctcacttccaaatccaatgccactttcaagtctgataacagtgttgtgagaacaggggaggatttcatggctgctaatgaaactgtgtttgggtccattatcaactcaactgatgttgatatctttgctagtgccgaaattactgatgccggtgatgcggccgctgcttctgattgtgatgttagtggccctattgattgtagggaccctgaggtgtttcatttgatgatgagggcaacaattgaaaagtttcaggacatccatttttaccgatttgggaagccggttcgtggttccaatgaaagcacttgtgatatggcgtggcggtttaggccgaaggaagggaaggctgctgcgttttataaggattataggagatttgtgatcgataggtctgcgaattgttcacttagtgttgttagcattggggagtaccatactggtgtcaatgcaaggaagaggaagaagcatcagaaagctgggttagagaagacgccactggatctggaccaggcgaacgcgttacctgttgttggagagattgttaatgacagcctccctgtggtcgagtctgagagttcgtttattcatggtaaatacttgatttatgagggtggtggagacaggtgtaagagcatgaaccattacttgtggagtttcttgtgtgctcttggggaagctcagtacctgaaccgaacattgattatggatttgagcatatgtctgtcttcgatatacacatcatcgaagcaggatgaggagggaaaagatttcaggttctactttgattttgagcatttaaaggaggcggcgtctgtattggacaaggagcagttttgggcagattggaaccaatggcaacaaaaagatgggatgagtcttcatcttgtggaggatttcagggtcacgcccatgaagcttatggatgtgaaggatgccttgatcatgaggaagtttggatctgtcgagccggataactactggtatagagtctgtgaaggagagacagaatctgttgtgcaaaggccgtggcatttgttatggaaatcaaggcggttgatggatatagtgtctgcaatatcttcaaagttgaactgggactatgattctgttcatgttgtgaggggggaaaaggcaaggaacaaggagctttggccaaatcttgatgcacacacctcccctgatgcgcttctctcaaccttgcgcgacaagattgacgaaggaaggaacctctacattgcaacaaatgaacctgatacatctttctttgaccctctgaaagataagtataccactcattttcttgatgagtacacggagctttgggatgaaaatagtgaatggtactctgagacaacaaaactcaataatggcattccagttgaattcgatggttacatgagagtgtccattgatacagaagtgttctttagaggtaaaaagcagcttgaaactttcaatgatttgaccagtgattgcaaggatggtattaatacctgtaatgttgcagcaaactaatgtgagatttggaactgcaatgcttgatatattgaaatatactctcatagtctcatgtacttttagctgttatatgtgttgcatttgagaatttgtatcctttagccttagcagtgaggagtaaaattgttatacttttgtattgtaagagtagtgactacttggaagttttgatgttcttaatttaaatttggttcgttcataaaaaaaaaatcccttctggacgactgaaacaaaactgcttattctg

SEQ ID NO: 5865 - DNA, 1163 bp, Glycine max
  misc_feature (1018)..(1018): n is a, c, g, or t
  misc_feature (1043)..(1043): n is a, c, g, or t
attttctcacgtccttttctgccttttcctaggcagcacaaaaaccttttgagtcagtgagagaaagagagagagggtgtcagtgatgcccttttgcttgatccgtcatttgtcaagataagattaagagggtacatatcttggtggtgatttgatacacaagaagaatgttgggtcgggctgcattttcccgaactgggagtttcaggcctgagaatttaggtcagaatgccatggccatgattgggaacgtttgcttctcattttttgttattggggttttggttttcaccattatggctgccacttatgaacctgaggatcccttatttcacccttcaaccaagatcaccacattcctcacttccaaatccaatgcaactttcaagtctgataacagtgttgtgagaactggggaggatttcatggctgctaatgaaactgcgtttggctccattatcaactcaactgatgttgacaacttggctagtgcggaaattattgatgccggcgatgcagctgcggctactcagtgtgatgtgagtggccctattgattgtaaggaccctgaggtatttcatttgatgatgagggcaacaattgacaagtttcaggacatccatttttaccgatttgggaagccggctcccggttccaatgacagcacttgtgatatggcgtggcggtttaggccgaaggaagggaaggctgctgcgttttataaggattataggagatttgtgattgataggtctgcgaattgttcacttagtgttgttagcattggggagtaccatactggtgtcaatgcaaggaagaggaagaagcatcagaaagctgggttagagaagacgccactggatatgtaccaggcgaacacgttacctgttgttggagagattgttaatgacagcctccctgtggttgagtctgaaagttcgtttagtcatggtaaatacttgctttatgagggtggtggagacaggtgcaagagcatgaatcattactagtggaggtncttgtgagctcttagggaagctcantacctgaaccgcacattgattatagatttgaagcatatgtctgtcttcatttgcacctcatcgaaccaggatgagctaccaaacgatttcatgttctactttgattttgatcctttaaag

SEQ ID NO: 5866 - DNA, 1452 bp, Glycine max
tcagctacgtaggccccccccccaattttaaccatagcaaacacggtaaattgaagaccgattggatcaattttcccacacacttgagagtcacagctgttaactttcccctttgaaatcctttctgagttctgcgccaactgaatcaagcagatcgaactccgccatagtcttcatcgagacagagatcggaatctgattcccaaacggcaacagtatgagcgtcatcgacattctaacccgagtcgattccatttgcaagaagtacgacaaatacgacgtcgaaaagcaccgcgatgccaatgtctccggcgacgatgcctttgccagactatacgcctccgtcgacgccgacatcgtggccttgcttcagaaagcagaaagtgcttctaaggagaaaggtaaggcatctgctgttgcgatcaacgcggagattcgtcgtactaaggctcggttgctggaggaggttcccaagttgcagagattggctgtgaaaaaggtaaaagggctttcgtcacaagagtttgctgcccgtaatgatttggttcttgcattgccagatagaatccaagcaatcccagatggggctcctcctgtgccaaaacaaactggaggctgggcagcttctgcctcccgtcctgaaattaagtttgattcagatgggcgatttgatgatgaatacttccaacaaagtgaacaatcaagtcaatttaggcaggaatatgaaatgcgtagaatgaaacaggaccaaggattggatgtgattgctgaaggattggatacattgaaaaatatggcacatgatatgaatgaggaactggatagacaagttccacttatggacgagattgacactaaggtggacaaggcatcctctgaccttaagaatacaaatgttagacttaaagacactgtgaaccagcttcgatccagtcgaaacttctgtattgatattgttttgttgattataattttgggaattgctgcctacttatacaacgtactaaagaaatgatatgtacaaaggctgatggatgttcgaatggtttgcctttacttgtattttgagaatatcgtctgattttattttttttatctctaccgttgtgaaaatttcctgcgaattgagaggcgtgcccttgtgctttataagcattcctgtgtatgcagtcatgtcagataccattagtatgttaaatagttgctgtgtattttatacacttgttgttttggtgtatattataatgagtttaatgtcaatgtcgtgacagtctatacatgttgggttgtgattagatgattttgtaaaactttttgcactgggttgtgattagatgattctgtaaaactttttgcactgggttgtgattagatgattctgtaaaactttttacactattaatgcatgcataaccctttttctcttgtagtatcaaaaaaaaaaaaaaaaaa

SEQ ID NO: 5867 - DNA, 1267 bp, Glycine max
  misc_feature (4)..(4): n is a, c, g, or t
cgancgccgcccgggcaggtacgcgggcggaacaccggttcgttaactttcccctttgaaatcctttctcagttctgcgccaactgaaacgcagatcgaactccgccgtagccatcatcaccgatcgaacttcgcaagacagagatcagattctgattccgacacagtaacagtatgagcgtcatcgacattctaacccgagtcgattccatttgcaagaagtacgacaaatacgacgtcgataagcaccgcgatgctaatgtctctggcgacgatgcctttgccagactctacgcctccgtcgacgccgacatcgaggccctacttcagaaagcagaaagtgcttccaaggagaaaggtaaggcatcagctgtagcgatcaatgcagagattcgtcgtactaaggctcggttgctggaggaggttcccaagttgcagagattagctgtgaaaaaggtaaaggggctttcatcacaagaatttgctgcccgtaatgatttggttcttgcattgccggatagaatccaagcaataccagatggggctcctcctgtgccaaaacaaactggaggctgggcagcttctgcttcacgtcctgaaattaagtttgattcagatgggcgatttgatgatgaatacttccaacaaagtgaacaatcaaatcaatttaggcaggaatatgaaatgcgtagaatgaaacaggatcaaggtttggatgtgattgctgaaggattggatacattgaaaaacatggcacatgatatgaatgaggaactggatagacaagttccactgatggatgagattgacactaaggtggacaaggcatcctctgaccttaagaatacaaatgttagacttaaagacacagtgaaccagcttcgatccagtcgaaacttctgtattgatattgttttgttgattataattttgggaattgctgcctacttatacaacgtactaaagaaatgatgtgtacaaaggctgatggatgttcgaatggtttgccttgtattttgaggatatcttctgatttttttattttatttctaccattgtgaaaatttcctgcgacttgagaggcgtgcccttgtgctttataagcagtcctgtgtaatgtgtatgcagtcatgtcagataccattagtatgtgtatgttaaatagttgctgcttattttatacacttgttttggtatatgttatagtattataaattgacgctgatgaattaggaaggataaaaaaaaaaaaaaaaaaaaaaaaaaa

SEQ ID NO: 5868 - DNA, 2440 bp, Glycine max
ggcgggaattgatgctacaaagtatggtcatagtcctgtgcacaaggccttagttttgaaggatcatggtgaactcaggaggatacttgctggcctcccacggctgcgtagcaacggccgagattcgcactgaagcggtttcgattttagaggaagagaaggctgatgccatcgctgctgtgattgaccggcgtgatgtgcctaaccgtgatacccctcttcacttggctgtgaaattcggggatgaagtggccaccgagttgcttatggttgctggggcagattggagtttgcagaatgagcaagggtggagtgctcttcaggaagctatttgcagtagagaagagggtattgccaagataataattaagcattaccagcctctggcttgggcaaaatggtgcagacggttgcctcgcttggtagggaccatgcggaggatgagggacttctacatggagattacattccattttgagagttctgtgattcctttcatctcaaggatcgctccttcagacacatacaaaatttggaagaggggtgcaaatctaagggcagacatgactttggctgggttttgatggtttcagaattcagagatcagatcagagcattcttttccttggtgatggttctgaagatgggaaagtcccacctgggtcactctgcatgatctcacacaaggaaaaggaggtactcaatgctctagacgatgctggctttccagcaaatgatgaggaggttcagcaagaagtggttgcaatgtctaaaacaaatatctgctgccccggccccccccccccacaggcagttcttttgcctcagttgacttggaggcgacaggagaaaacagaaatggtagggccttggaaagctaaggtgtatgatatgcacaatgtagttgtgagcataaaatctagaggagttcctggagccatgacagatgatgagctcttttcttcttgcaatgaaaatgaaacagagagtgaagagctcaatgatattttgaccgaggatgaaagaaggcaattggaagatgcactaaggttggagtcgacagacttgaacaatgagagtgatgaggtgatcattgggcatcgtcacagctgttatgaagaaagagaaattcctattgaagatggaaattgtaacaaaagtggagaaaataagcaagaaaagaaaggatggtttggtggatggaggaaaaaggattctaaacctgaagcatcaaagaagattgctccaccgagaagttctctctgcgtagaagaaaaggtgagtgatttattgggggattctccttcaagaaatcagagtaagccaggaagacattctgttgagatagctgtgaggggtgatgagtcacggaggagaaaagatgccaaagcttcttctgcaaatcctgatagcagaagtcgtcaaaaggatggaaatcgtgaaaatgaatataagaaagggttgagacctattctctggctttccccttactttccactaaaaactgaagaactcttgccattgcttgacattgttgcaaacaaagttaaagcaattcgacgtttaagagaactccttacaacgaaacttccaatgggaacttttcctgttaaggttgccatccctgtggttcccaccatcagagtattggttacttttacaaagtttgaagaactagagccagtagacgaatttgcaacaccaccatcaagcccatctgcagctgagcaagagagccctgcagtgcctcacttctcggcatcgtcttggtttcaatggataaaggctccttatcgctctagtacatctgctccaggatccagcagtaggatagaaaatattgaagacccttttgcaattccatctgattatacttgggtgactgctgaagcaaagaaaaagaagatgcaagagaagaacaagtcaaagaaaggaaaaagtcataactgattatgccacttcataagtaagctccacacttggaaggactttggttgtttagagaacttgggccatttgtctggaaattgaattcgaagctatctttcatgtaggagtgagtgagtgattctccaaggagttgtgcgttgaccatttggggcttgtggcataaggaaaagacacattgtgattcttgcaataattgctggagttttcaactttgcaccaaagaatttgttgattgtgtttcaatatatgtggaaaaccattatctcttgatagttgcaatcacagtgagcaacttttatattcatgattgcagtttaaattcacctatgtttggttatataattctttcccatgattttattcatgtaaataaattgaagaatttgtttactagctttgggggctttatcatagtacgttctattatatttttcagtaatgatattgatgaaatttggtataatttatcaaaaaaaaaactcgagaaaaa

SEQ ID NO: 5869 - DNA, 2383 bp, Glycine max
cgcgctgccggtaccggtccggaataccaggcttgacgcacacgtgcggtggaatatagagctgagtaaatcgttagtacttcgagtcatggtgatagtaggaacacagcacagcagcatgctgtaaatctaattacgaagtcagtacctgttgccattagtgcatcccctgctgatgcatccagttctgacttagggtcgagtgcaaatgcatctgaaaatcatctatccagagctttgtctgaagatacacttgattatgaagccatgattttggatatggctggacaaaatctagtgaggccaatgggcccatcttcaaatgatctttcaagggctttggttgacaggttttctactgttgatttaaagcttaaattgcaactttacaaggttaggtttcatgcttcttactaggaacttgaagctagcaaaacgagaagtcaagctggccatgaacatcgcacgtggaagagattcatcaatggctcttcttttgaaatcccagcttgaatatgcacgtggtaaccaccgcaaagctgtgaagctattgatggcatcaaataatcggactgacacagcattttcaagcattttcaacaacaatcttgggtgcatttattatcagctcggcggctcccggacgtcttcattattcttctcaaaggcattaaccaattgttcatcactgcggaaggaccagtcattaaagctagccactttctcacaggataattctctccttataatttataattgtggtgtgcagtacttggcttgtgggaagccaatacttgctgctcgatgtttccagaaggcaagtctggtcttttacaaacaacctctcttgtggctccgactctctgaatgctgtttgatggctttagaaaagggcctaatcaaatcaagtcgggtcccatcagagaagttgggggtaggagtttgtgttgttgggataggaaaatggaggcaacttgtggtcgaagatcagatttcaggaaatggacttgtggactcatctgaaggggatgattgtccaagtgaagatgggcgactaaagttatcgatgtcccttgcccggcagtgcctcttgaatgctctacacttgctggactccaacagtgcaaattgtttgaagtctggtttgccctctaattcgtctgtggaggataacaatggaagtgaagtgtcgccttcaaagaattcaaatattaaaaacttacatggcattgattcaaaggcattttcagtagcagtagggttaggtcaggtcaatgcaaatggggacactaaagaacaaaaaggaggaaatagtcaggaacttgttcagaactccctctcctattatgaaaatgtccgtaaaagagaaaatcaattggttaagcaagctgttcttgctaatttagcatatgtggagctggaattggacaatcctgtgaaggcactatcagttgctaaatctctcttagaacttccagaatgttccagaatttacatctttctaggccatgtttatgcagcagaggctctctgcttgctgaacagaccaaaggaagcagctgagcacttgtcattttatttgtctgggggaaacaatgttgacttgcctttcagcctagaggactgtgagaaatggcaaccggagaggactgctgattttgacgaggtgaatggaggatccacagctgctaagaattcttctcttgaaggcactcagagtattgttttcctcaagccagaggaggcacgagcaacaatttatgcaaattttgctgtaatgtcggcgatgcagggtgaatttgagaaatccaatatactggttgcgcaggcattgtccttattacctaacagtccagaagccactcttactgcagtttatgtggatctcttgctcggtaagccacaggaagctttgaccaaattaaaacgttgtagccgtattaggttccttcctagtggaattacattgaataaatcttcttgagtgttgtatgcttgggttttgtcattgtgcctggccctctcagcgttagttagcaggtagcttaatccttccatagcatttgtaacatatataagttcaattcagagaataatttttttatgattcattttcctgataattctcaaatttagggttcacttacaggtggtggctgtgttttggttagtgctggtgcccacctttgaaatttgaggtgtagatctgattcggattgtgttttttactttttagaggctaatttgctttacattcaagaatagaggtcatctcattgtccctgtgcttatattcagaaaactgaaaagttgattttggaattccattttgaatccgacggagttcgctctttctcattctcactccgtgtggatgttatcc

SEQ ID NO: 5870 - DNA, 1874 bp, Glycine max
  misc_feature (1813)..(1813): n is a, c, g, or t
  misc_feature (1846)..(1847): n is a, c, g, or t
tcaaacacagattttccccttctctggtagtactgttcaaccatgtaccgtctgttaaggatagcaataaactacttgttgcttcactgaagatacagtcatctattgatctccagcgtcaccgcaaacacaccaacacaccttttgttacttgcatctttcgagccgttccttcggaacaggtcattttgaaagttgtgttagacggctgcggcgccaaaacccctaaggtcccattcttcttccccgcagcgccgcacagactcatcaaactcgttgtgactgcagctgcacagattttcctcttctctgtgcctttgcgagaacgcgcgtttggtttcaattcaatggcgggaggtaaagcgaagaaggaaaaggggaagccccatcagcagcagaagcacatgccctaccaaggcggaatatcgttccacaaatcaaagggtcagcacattctcaagaaccccttgctcgtcgattccattgtggagaaggccggcgtcaagagcaccgacgtcatcctcgagatcggtcccgggaccggtaacttgacgaagaagcttctcgaagccggcaagaaggtcatcgccgtcgagatcgatccccggatggttctcgagctccagagacggttccagggtacccctcactccaatcgcctcacggttatccaaggtgatgtgttgaagactgaacttccttattttgacatttgtgttgcaaacattccctaccaaatatcttctcctctcacattcaagttactcaagcacgaacctgcttttagggctgcaatcataatgttccagagagaatttgccatgagactggttgctcagcccggtgataaactatattgtcgtctcacggtcaacactcaactacatgctcgagtcttccacctcctcaaagttggaagaaacaacttcaggccccctcccaaggtggattcctctgtggtgcgaattgagcccaggaaaccccgtattgaagttaagcaaaaggagtgggatgggtttttgcggatttgttttaacaggaagaacaaaacacttggttcgatatttaggcagaagagtgtgatctccttgcttgaaaaaaactataggactgtgcgggcactggaacttgggcaagaagattcactaaaggaagtggatgctaaaatggacttctctagttttggtgatgatcgaggtatggagatggatgatgatggagcagatgatgatgaaatggaagttgaggatggggaagcagatgaggtgcaatctgaattcaaggacaaggttttgggtgttctgaaagagggagattttgaagagaagaggtcatccaagctcacattgcaggaattcctatacctgctttctctgtttaacaaaactggcatacacttctattgattttagattatcaattttctcgatagtttcttccctatttaaatctacactattctttcaataggcttatcattattcagaagttttccaagagagagtgatatcaaaaactgttaactatttatgcattgtattttgttaagctccatcgtggatgtatactactctatataatctttaggaggtttgatttaaaaaaaaaaaaaaaaacccactaggatctgcatttgcgacttactgtatggtgtttgcaaatgcttaatgatgttatcattttctctttttgatgcaccctgattgatagtctgaattgtggttaatggttgtgaggcatattaaaaaccaatgtttagttagatgatgctttgtcgcacgggttaaatttctaacatttggtactaaagggntgttgagattaaaggacataactgaaaaatggnngtattctctcatcttattcattgactc

SEQ ID NO: 5871 - DNA, 1696 bp, Glycine max
gtggagcatcaatttattcccacaatggttatgatatccataaggaattcttgattggcagatctttgatgggcacaatggtatatctgctgctatttttgcgaaggaaagcatactaagtaatgttttgagtgcaataccacaagatatcagtagggatgagtggcttcaagctctgcctcgtgctctagttgttggttttgtaaaaactgacatagagtttcagaaaaaaggggaaacttcaggaacaacagctacatttgttctggttgatggatggactgttactgttgcatctgttggggattcccgttgcatattagatactcaaggaggtgttgtttctctcttgacagttgatcacagattggaagaaaatgcagaagagagggaacgcgttactgccagtggtggtgaagtaggaagactcaatgtatttggaggcaatgaggtacaatgtaatctttctattcctttctaatcaggactttttcactagcctgttttggttccttaatacatctataggtagggcctcttcgctgttggcctggtggattgtgcctttctagatcaattggtgacacagacgtgggagaatttattgtcccaataccacatgtcaagcaagtgaagctatcaaatgctggtggaagacttattatagcttctgatggtatttgggatgctttatcttctgatatggctgccaagtcatgccggggtgtacctgcagagcttgctgcaaagctggtggttcaggaagctctaaggtcaagagggctgaaggatgatacaacttgcctcgttgtagatattattccttcagatcatcctgtgttaccagcaattccaagaaagaaacgtagtgtgctaacttcccttctctttggaaagaaatctccaaactctacaaacaaaggcaacaataagctttctgctgttggtgttgtggaggaattatttgaagagggttctgcaatgcttacagagaggtaactgagactataattgctaaatttatatttgcaggatgccatttgaagtttaattgttgctttgcttcatcaccaacatggtggaaagtgagaataaatgatcctttttcccaataacattatgtgtgattcttaaatttccggacataaaaaatgcaggttaggcaaggattttccgtctaatccgaatcctgggattttccgctgtgcagtttgccaagcagatcagccctctgtggatagtgtatcaatgaacactgggtctttttttcccccagtatctaagccatgggaaggtctgttcctctgcacaaactgtcagaagaagaaagatgccatggaaggaaaaaggtctaccaggccctcagagacagcataataatatagtagtaatctagcaacatagtaaaatattagtatagtttttctctagcagtgtgagcatgcttgcttctacatttgggtggtgattgtcattggtgtgttaagaatgaggttgagatagccatattaggtctattggaggttgttgcatgtttgtttttggcgtctgctcagctgttggactaactgatagaacagcaatgttgtgttgtgtagaagataacttctagtagtttgattactaacggcttgtaattaactgacactttcattgttaccatttatagatttttttaaacagtaaaaaaaaaaaa

SEQ ID NO: 5872 - DNA, 1941 bp, Glycine max
gaggaaataacagagcaagatctcttctttctctctctctctctccgagtctgttctgtagtgccacccacacccatcagggtttatgatcttttcctccaaatgctgaatcttccatctccatttttcacccgatttctttgccagggttccagaaatgtttaattttaaacaaagatgagtacgactgaattatctaatatgaagcaacctcctgttccgctggcaaccctgattggccaggagctacgaaatggaaaaattgaaaaaccttttgtgaagtatgggcaggctggcttggcaaagaaaggagaagattactttttaatcaagacagattgccagagagttcctggggattcatcaacactcttttctgtctttgcgtgaacaagtggagcatcaatttattcccacaatggttatgatatccataaagaattcttgattggcagatctttgatgggcacaacggtatatctgctgctatttttgcgaaggaaagcatactaagtaatgttttgagtgcaataccgcaagatatgggtagggatgagtggcttcaagctctgcctcgtgctctagttgttggttttgtaaaaactgacatagagtttcagaaaaaaggggaaacttctggaacaacagctacatttgttctgattgatagatggactgttactgttgcatctgttggggattcccgttgcatattagatactcaaggaggtgttggttctctcttgacagttgatcacagaattggaagaaaatgtagatgaagagggatcgcgttactgccagtggtggtgaagtaggaagactcaatgtatttggaggcaatgaggtagggcctcttcgctgctggcctggtggattgtgcctttctagatcaattggtgacacggacgtgggagaatttattgtgccaataccacatgttaagcaagtgaagctttcaaatgctggtggaagacttattatagcttctgatggtatttgggatgctttatcttctgatatggctgccaagtcatgccgaggtgtacctgcagagcttgctgcaaagctggtggttaaggaagctttaaggtcaagaggtctgaaggatgatacaacttgcctcgttgtagatattattccttcagatcatcccgtgttgccaacaattccaagaaagaaacgtaacgtgctaacttcccttctctttggaaagaaatctcaaaactctacaaacaaaggcaccaataagctttcttctgttggtgttgtggaggaattatttgaagagggttctgcaatgcttacagagaggttaggcaaggattttccatctaatacgaatcctgagattttccgctgtgcggtttgccaagcagatcagccctctgtggacagtttatcaatgaacactgggccttttttccccccagtatctaagccatgggaaggtccattcctctgcacaaactgtcagaagaagaaagatgccatggaaggaaaaaggtctacttggccctcggagacagcatagtaatatagtattctagcagcatagtaaatattagtataatttttctctggcagtgtgagcatgcttacttctacatttgggtggtgattgtcattggtgtgtaagaatgaggttgagatagccatattaggtctattggaggttgtcgcaagtttgtttttggcgtgtgctctcagctgttggactgactgacagaacaagcaatgttgtttagtagataacttctattagtttgattactaacggcttgtaattaactggcaatttcattgttaccctttataggtttatttgtttttaacaacagtacacattatgttgtgtgtgtgactctgtcggacaacaggatatgctcaatctcctgaattgtatgagcttttttttttttaacttgctacattattaat

SEQ ID NO: 5873 - DNA, 1350 bp, Glycine max
ggctcgaggaagcacacaagactctcttatcccttggaaaagtttcactcagatgttgcgggtcagctacgtaggccccccccccccattcagaggatgagagagaaggctgcctccctttccaatgtacgactggagcaaggaacagtcacttccctacttgaagagaagggggttattaaaggtgtgcactacaaaacgaaggatagtcaagaattatcagcttgtgcaccccttaccgttgtttgtgatggctgtttctcaaacttgcgccgatctctttgtaatcctaaggtagatgttccctctcatttcgttggcttaattttggagagttgtgaacttccttatgctaatcatggccatgtcatactgggagatccttcgccagttctgttctatcggataagtagttcagaaattcgttgtctggttgatgttcctggtcagaaggttccatctatttcgaatggtgaaatgacaaattatttgaagacagtggtagctccacagattccacctgagcttcatgactcattcgtagctgcagtggacaaaggcaacatcaggacaatgccaaacagaagcatgccagcagctccttatcctacgcccggagccctgttgatgggagatgcattcaacatgcgccatcctctaaccgggggtggaatgactgtggcattatctgacatagtagtgctgcgaaatcttctgagacctttgcgtgacctgaatgatgcacctggcctttgcaaatacctagaatccttttataccttacgcaagcctgtggcatccactataaatacgttggcaggagcactatacaaggttttttgcgcatcacctgatccagcaaggaaggaaatgcgccaagcttgcttcgattatcttagtcttggaggtctattctcggaagggccagtctctttgctttcaggattaaaccctcggcccttgagcctggttctccatttctttgctgttgcaatatatggtgttggccgtttactgctaccatttccttcacctaaacggatgtggattggagtccgattaatttctagtgcatctggaatcatcttgccaataattaaggcagaaggagtccgtcagatgttcttccctgcaactgttccagcttactatagaaatcccccggcccaataaatgtgagttccgtgaacccatcatgagtcattcaagatgagccaccagtgttttccattcagaaaattaacgggttcaattgagatgtttgcaaacaatctggctttagtgtcatgtaaagtcgattttaaattaaatgtttgatttgttaatcttcttaaacgaggtgtaaaaaaa

SEQ ID NO: 5874 - DNA, 1311 bp, Glycine max
  misc_feature (17)..(18): n is a, c, g, or t
  misc_feature (55)..(59): n is a, c, g, or t
  misc_feature (276)..(280): n is a, c, g, or t
  misc_feature (299)..(324): n is a, c, g, or t
  misc_feature (365)..(369): n is a, c, g, or t
  misc_feature (377)..(381): n is a, c, g, or t
catgtctctgcagtctnngttgcaactttcttcagtcaagttatggctaagattnnnnnaaacactgctggcccaggtacataataaacttcaacgaattgtgtgccaccagtttcttgacattgtaatgtgcctaattgatttaatttgtgtgcaggtgatgctgtggtcaatgtttacattaatcatgacaagaagtttgcctttgtggagatgaggtctgttgaggaagctagcaatgcgatggctctggatgggattattttcgaggtatcnnnnngactgtaatccaaagcttnnnnnnnnnnnnnnnnnnnnnnnnnncaagaatgcaagtatatccattggtgctaatccaaatttcnnnnncaattcannnnncacctgttaaggtcaggagacctactgattataatccttccttagctgctaccctaggcccaagccaacctaacccaaaccttaatctgggtgctgttggcttaacacctgggtcggctgggggacttgatggtcctgatcgggtttttgttggtggacttccttattactttactgaaacacagatcagagagcttttagagacttttgggcctctacggggttttgatctagtgaaagatagagaaacgggaaactcaaagggttatgcgttttgtgtttaccaggatcttgcagttacagatattgcatgtgctgctctaaatggaataaagatgggagataagactcttacagttagacgagctaatcaaggtgcaaacccacagcagcctaaacccgagcaagagagcattttaatgcacgcacaacagcagattgcactgcagaaacttatgttgcagccagccttagtggcaacaaaggtggtgtgtttaactcatgcagtttcttctgatgagctcaaagatgatgaagactatgaagagattcttgatgatatgagacaggagtgctccaaatttggtactttggtgaatgtggtgatcccacgaccaccgtctgatggtgaacctgccgctggagttggaaaggtgtttttggagtacgttgatattgacggtgctacaaaagcccgtgctggattaaatgggcgaaaatttgatgcaaatcaagtagtagctgttttctatccagagaacaaatttgctcagggagattatgaaggctaattggatgttatttggattccatcttgattagtaaggataatcttttgtattattatcataaacttgtaagccagagttgtggtcatagtacataaacttaaatgcgagtagtaagaaagtcatgatgggccatttttta

SEQ ID NO: 5875 - DNA, 1876 bp, Glycine max
tcagctacgtaggcccccccccggtggagaagttatgatttctgaatcagatgacgtttgaattctgaaagcatcaactgagattccaccaacgaacggcactcgacggttttttcgagttggttatataaatacgttcacaccgtcgcgtccatttcgttttccaatctctcactctcttctccaatcccatttcaggcaaaatttgcctttgaaggaatcaagtaagtcttgtatgtggattttgtggtattgattttcaatatccgctttatggtttgagcttctattaagaaactgagatacgagctgatcacataggagtatccagtactctctcagatttcatgcctgccatgaaaaagaatcctgagctaacttgtattggttctgtattcaacatgttggggaaggagcttggagaacctgtagactttgaacttccagattcatttaataaatccaagccaatgcagtacacctatataaaacgcaatatatatctcactaagaaggtcaagagatcccggtttgatgatgatggcatattctgttcctgtactccttcccctggatctactagtgtatgtggtagagattgccactgtggaatgcttctgtctagctgttcatcaggctgtaaatgtgggagctcctgtctcaacaaaccatttcagaaccgtcctgtgaaaaaaatgaaattggtcaagaccgagaaatgtggttctggaattgtggcggatgaagatatcaagcttggggagtttgtcattgaatatgttggagaagtcattgatgacaaaacatgcgaggaaaggctttggaacatgaaacatagtggggaaacaaacttctacttatgtgaaatcaatcgagatatggtgatagatgcaacatacaagggaaacaaatcaagatacatcaatcatagttgctgccccaatactgagatgcagaaatggataattgatggtgaaacaagaattggcatatttgcaactcgtgacatacaaaagggcgagcatctgacttatgattaccagtttgttcaatttggtgcagatcaagattgccactgtggtgctgctgagtgtaggcgtaagttgggtgtccgacctaccaagtctaaactttcttcagatgctgcattaaaattagttgcatatcaggtttatcagaatggaggtttgcaaattggaagttctcgtgttgttgaccaaccaaagtgcttgcacaattgcattggtgaagttattaggataaaacatcttgaaaatgagaggtttggaattattaaacgatttgataagtattcccgaaaacattcgatcatgtttgaggatggttgtgttgaaatttatgacatgtcaaaagaggactttgaacttgtgagatagtgttgcaactgttgggtgcaggtgaaaggaattgaaaagctgaaaattggactcattattctttcattgcatgtgcataattcttgtagttgctgaggctcttatcaacagaatatgaagcggaatagctcaacacaactcttactgattgaagataataaattcctttttctactaacaaactgtattatcgtgtaaacaacattgttgttcaaggttctggaaataaaccttgtattttttaaaatcctgaaagtactgtaaaatgagaatcatcttgtaccattagctaggatgtgtagttgttgtttcaagtgtattcttttactttcttcctatttttctagtataaggttattgataaatgtgggagtttcgattaggaaaaacttgttttaatatgcaattaccctttgatcaatgctaaagacatgtaccctatgaagagggtcacattaatcttacaaaaaacgagattt

SEQ ID NO: 5876 - DNA, 1119 bp, Glycine max
  misc_feature (736)..(736): n is a, c, g, or t
  misc_feature (987)..(987): n is a, c, g, or t
aaaggcgttccttgcgtgcgagagggatcagaacgagacagagttatctcaagttcgaatctttggaaaaatttctaacctcggacagatatttttcacttgcgtgaaccgtttgagaagccaaattacgatatctgagacatcagagagcaatagttgccgttctacttctcaacccttttgggaatgaggggtttgcgaagccttgaggtttggaaactgggagttgtcaactatttggatgcattgaaactgcaggaaaaactggccttggatagaaaacttcataggagatgtgatactcttctgtctttgcaacacccccctacatacactgttggcaaaaggcaaactgttcacaatttgttaatcccccaatcagaattggagaaaattggagctgaacttcactacacacaaaggggaggagacattacatttcatggtccccaccaagccatcttgtatcctatcatatcgctccgtgacataggacttggcgctcgaagttttgtagagaaaattgagttaaccatgattaaactggctgctatgtatggtgtgaaagcttgtcctggacaaagtggcgagaatggggtatgggttggagaaaggaagataggtgcgattggtgttcggatatcaagtggaatcacttctcatggaatggcatttaacattgatcctgatttgagctactttaagaacattgttccctgtggaattgtggataaanaagtaacatctttgagaagggagacagattctgtccttcctgaggaagaaataatacaggagcagttgatttcatgttttgcaagaatctttggttatagtgacctgatccggaaggaggatgcttcaatattttttgataaagaaactgaatgagattcagctagctgataattgtacaacatttgtttttttctttcgttctttgagaaatcttgtatgatacattaattggccaaatcctgtgcagtntgcatttgtttcttttttttatttttttctgaatttttgtgatagactgatagttgataatcataaacctaattcaatagattgattccaataattaaataatatgttgtgtgttgaatgataaaaaaaaaa

SEQ ID NO: 5877 - DNA, 1173 bp, Glycine max
catggaaccggatctcaaaaccaaggtcaagtccgatctcgaatctttcctcagagccaagcagtactaccaccgcctcggccgcgtctggaaacggagcttcctcctctacggtccctccggcaccggaaaatcgagcttcgtcgccgccatggccaatttcctctcttacgacgtctacgagatcgacctctgcaaaatccctaacgattcggatctgaaatcgctcctcctccaatcgacgccgaagtcggtggtggtgatcgaggatctggaccggttcctcgcggacaaaacggcgagaataagcgcgtcgggaatactgaacttcatggacgggcttttaacctcgtgttgcgccgaagagagggttatggtgttcacgatgaacacgaagaagcatgttgacccgaacctgcttcgtccgggtcgggtcgacgtgcatattcattttccgctttgtgatttttcggcgtttaaaacgcttgcgagtagttaccttggcgtgaaggagcataagttgtttcctcaggtgcaggagatttttcaaaacggggcgagtttgagtcccgctgaaatcggtgagttgatgatcgcgaaccggaactcgccgagtcgtgctattaaatcggtcatcaccgccttgcaaacggacggtgatgggagggggtgcggcttgatcggacggcagacggatgatgatgaaatggatgaacctgatggggttgtgtccggtgagggtctccatacggttaaggatttgcggaaactgtacgattttttcaggttcagggttactagaagatcttcgtcgtccaatgcttccttgcccgcaagcccattgcgataattagttacagcattggaaaagaataagcaatgttctcgattgcacttcattccctttcaaaagaaggcaatttgggggcaagcttcttttttgttcatagccgaattagtcacaacatttattcattggatgcaacattgggactcttggaaagtgttggcaattgtcgtttttgcatgggattttgggtgtacatctttagaaatagattcataaattgcatataggaaaacaatttgcattggcaaaacaaaattatctagagtttgtttctctattttggtgaattgtgaatccactttcatgtatatatttcttcaggt

SEQ ID NO: 5878 - DNA, 2050 bp, Glycine max
gtactacttcagtcaaattatagggtatcgatgtaaatatgctgtctcctatttggtatttgtgtgtcatgctgtccaactaatcagaatttagaagaaattgccctttaacgtggttgccgaaattaacagagcaagcacgttttgaacaggtgaagagatgcgatgagggtaagctagtagcaagagtgagaagaataggaggatggagaattgggaaacggaggaggttgaaggtgaaagtccccttccggttctggaggctgttgactacagaggtggagcctcggtgagatcgaaatctgggtcatggagatccgctgggtttatcataggtgtggaagtggcggagaggattgcatattatgggattcaggggaacctcataacctacctcacgggcccactccatcagactactgccaccgccgccgagaatgttaatatctggtcaggaactgcttccttgcttcctctctttggggctttccttgctgattctcttctcggccgctaccgcactataatactcgcttccttcatctatattttgggactaggcttgttaacactatcagctatgcttccctctcccaccggttctgagtgccaggttggcaatgaattcaaatcatgctctcctcagtcgcaaatagttttgttctttatctctctttatttggtcgccattgggcaaggtggacataagccctgtgttcaggcttttggtgcagatcaattcgatgaaaaacatccaaaggagtacaaagatagaagctctttctttaattggtggtattttactatgtgtgcaggttgcatggcaactctttccatcttgaactatatacaagataacctaagttgggttcttggatttggaattccttgtgttgccatgattattgcattgcttgttttcatgcttggaacagtgacctacaggtttaacattcagcagcgtggcaaaagcccctttctcagaattggccgtgtatttgttgctgctataagaaatcgccgatccaccctatcaagcacagctgtcaaagcagaacaatttgagttcctcaacaaagcattgttagcgccagaggattctatagaagacgagagttgtagccttagtgaggtggaagaagcaaaagcagtactaaggctggttcctatttgggctacaactctggtttatgctgtggtgtttgctcaagttcctacgttctttaccaagcaagggattactatggagagaacaatatttcctggctttgacatacccgctgcttctcttcaaacgcttgtcactgtggccattgttctgttcagccccatctatgaccgcctatttgtgccaatggcaagagctattactggcaaaccctcaggaatcacaatgctgcaaagaattgggactggaatatctatatccatatttaccatagtatttgcagcccttgttgagatgaaaagattgaaaacagctcaagagtctggtgttgttgatgaacctaatgcaactgttccaatgagtatatggtggttgattccccaatatttcttgttcggagtctctgaagtttttaccatggttggtctgcaggaatttttctatgaccaggtcccaaatgaactaagaagcatgggtcttgctctctacttgagcatctttggtgttgggagctttataagtggctttctcatttctgtgatagagaaactgtctggcaaagatggacaagacagttggtttgccaataatctgaataaggcgcatgttgattacttttattggctacttgctggactcagtgtaatgggattggccttgttcatttgctctgctaaatcctacatttacaatcaccaaggaatcagacgagaattgtgaattgtccggttctgtcaattttagctttactgtatgggatgaaaaattatattctgtataaggtacgagtatttgtgtataaaaacctctggacctggggaattgtcaattcatttgcattctgttccagatacgggttcttttttcccatattatacatgt

SEQ ID NO: 5879 - DNA, 1981 bp, Glycine max
acggctgcgagaagacaacagaagggggttccgttttggtacgaattgaacttgcgttgctgaagaataacatagtgagttgtgcactctgcagaagctccacgtacttccgcacgaccttttcattaagaatgaagcttgacgtagatgtcttgagatatctctccaaagatgattttagggttctcactgctgttgaattgggcatgcggaatcatgaaatcgtacccactgaactcatagaccgaattgcgcgtctcaagcatggaggcacgtacaaggttttgaaaaacttgctcaagcataagttgttgcaccacgactcctctaaatatgatgggttccgccttacctaccttggttatgattttcttgccattaagactatggtgaacaaaggagtgtttgtggctgttggacgccagattggtgttggaaaggaatctggtattttagttgatgttcttctgattgggtgccctttgttcaatcacatttcacacgtttttctgctatttatgttggtgtttgtgctctgctagatatatttgaggttgcccgtgaagacggaacagttctggctatgaagttgcataggcttggaagagtctctttccgagccgtcaaatctaagcgtgactacttgagacatcgcagtagttataattggctctatttgtctcgcctcgctgcacttaaagaatttgctttcatgaaggctttggaaacacatggcttccctgttccaaatgcaatagaaagcaatagacattgtgtagtcatgtcactcgtccaaggttatcctcttgttcaggttaagcagttactgaatccagagacagtttttgaggcaattcttggtcaggtcgttcggttggcagagcatggtctcattcattgtgatttcaatgaatttaacatcatggtactttgaccgtgatgttgaatgcatctttaagtttttcaggaaaaggttcaatctttcttttcaagaaagcatagatgatattgatggttctgatgaagggagagatgaagctggaaagccaagtttttcttcaatagaaagaagtgctggttttctagatagggagcttgctgccagtggctttactagaaagaatgaagaagatattcaaaggttcattgaaggcggggcagaaagtgatacaaattcagatagtgaaggggttgacttagtggaagacctgaatgaagcagacactgtagatggtgattcttcacatttgtcagtggaagagctgaatgaagcagacactgtagatgatgattcttcacatttgttagaacagaatgagggatacaaatgtcaagggaaagaggagagttgtgaagcacgtgaaagcagtggatctgaaaaggaagttgaggaaaacaatgaagaagcattgcaaagtgaagctgaactcgttaagaacttgagtaagcaaagacgatgcgccatagcgaaagctcataagggacggaagactgttgctgccagaaattcctacaaagacaaaggtggtaggtcatctcacaattctaaaatccagaaacagttgagcagctggtgaaaatatgggagacaaaacccatgtgattgaccttgtggtagagtgaactgaaaaagactttataaatagtttcaacggtgccatctatcagaaagagctttaaagtttggtaggctattataggtggcctttatctgtttaaaagttcaaacatgtgtaaagttgagaaataggaaagcaaatagattattgtctcgaccctcccttctcctgtggaggataatcatattatttccggggtgtgttatattgatgtcgaatgattttttttttaatcagcttcgaatgaaaattttgccttctttatattggaaaattttccattgtcccatatttttatgtttgacttttgaaacagctatttattgttctgttattatttaaagcctgattctagttcaaaa

SEQ ID NO: 5880 - DNA, 1832 bp, Glycine max
cggacgcgtgggtggtgaactgtttttattcaccattagatccatctgaccctcacgaatatattgaaagacctctgcattagatttattcattcccccccccgtcccaccaatctaattaagaatgaagctcgacgtagatgtcttgagatatctctccaaagatgattttagggttctcactgccgttgaattggggatgcggaatcatgaaatcgtacccaccgaactcatcgaccgaattgcgcgtctcaagcatggaggcacgtacaaggttttgaaaaacttgctcaaacacaagttgttgcatcacgactcttctaaatatgatgggttccgccttacctaccttggttatgattttcttgccattaagactatggtgaacaaaggagtgtttgtagctgttggacgccagattggtgttggaaaggaatctgatatatttgaggttgcccgtgaagacggaacagttctggctatgaagttgcataggcttggaagagtctctttccgagccgtcaaatctaagcgtgactacttgagacatcgcagtagttataattggctctatttgtctcgcctcgctgcacttaaagaatttgctttcatgaaggctttggaaacacatggcttccctgttccaaatgcaatagaaagcaatagacattgtgtagtcatgtcactcgtccaaggttatcctcttgttcaggttaagcagttactgaatccagagacagtttttgaggcaattcttggtcaggtcgttcggttggcagagcatggtctcattcattgtgatttcaatgaatttaacatcatgattaatgatgatgaaaaaattacaatgattgattttccacaaatggtatctgtgtcacaccgtaatgcgcagatgtactttgaccgtgatgttgaatgcatctttaagtttttcaggaaaaggttcaatctttcttttcaagaaagcatagatgatattgatggttctgatgaagggagagatgaagctggaaaaccctgtttttcttcaatagaaagaagtgctggttttctagatagggaacttgctgccagtggctttactagaaagaatgaagaagatattcagaggttcattgaaggcggggcagaaagtgatacaaattcagatagtgaaggggttgacttggtggaagacctgaatgaagcagacactgtagatgatgattcttcacatttgtcagaacagaatgagggatccgaaagtcaagggaaagaggagatttgtgaagcacgtgaaagcagtggatctgaaaaggaagatgcaagtgacaatggggaaagcaatgaagatacattgcaaaatgaagctgaactcgttaagaacttgagtaagcaacgacgacatgccatagcgaaagctcataagggacgaaagactgttgcagccagaaattcctacaaagacaaaggtggtagatcatctcacaattctaaaatccagaaacagttgagcagctggtgaaaatatgaggccttgttgtggagtgaactgaaaaggactttatatatagtttcaacggtgacatctatcagataggtaggcaattgtaggtggcctttatctgttcaaaagttcaaacatgtgtaaagttgagaaataggaaagcaaataggttattgtctcgacccccttttcctgcggaggataatcatattatttccgatatttatttggaatgaaaattttgccttctctatattggaaaattttgtcattgccccctttttttatatttgacttttcaaactgctattaattgttattatttaaagcctgattcttgccc

SEQ ID NO: 5881 - DNA, 1564 bp, Glycine max
tcgagtcagccgcgtccgagccgaaccctctgcatcttcaaacacaacacacacacacacactgtgtttgtgaaactctcacacagacaagtcacaacaacaagtttctgttgttccaatggcatcagcaacaccccttttgaaagatgagctggacatcgtgatcccaacgatcaggaacctggatttcttggagatgtggaggccattctttgagccttaccatctcattattgtgcaagatggagacccttcaaagatcatcaaggtccctgaaggctttgactatgagctctacaaccgcaatgacatcaacaggatccttggccccaaggccaattgcatctccttcaaggactctgcatgccgttgctttggctacatggtctccaagaagaagtacatctacaccattgatgatgactgctttgttgccactgatccatccggacacaagattaatgcacttaagcagcatatagaaaacctgctctgcccatccacaccctactttttcaacaccctctatgaacctttccgagaaggtgcagattttgttcgcggttaccccttcagtctccgggaaggtgtaccaactgcagtttctcatggtctttggctcaacatcccagattacgatgctcctactcagcttgtgaagcctcttgagaggaacactaggtatgtggatgctattttgaccataccaaagggcactttgtttcccatgtgtggaatgaacttggcctttgatcgcgatctcataggagcagcaatgtactttggtctcatgggtgatggtcagcctattggacgctacgacgacatgtgggcaggctggtgctgcaaggtaatctgtgatcacttgggattgggaatcaagactggtctgccctatatctatcacagcaaggccagcaacccatttgtgaacttgaggaaagagtacaaaggcatattctggcaagaagacattatcccgttcttccagagcattgttcttcctaaagaagctaccactgttcagaagtgctacattgagcttgccaagcaagtcaaggaaaagctttccaaggtagatccttactttgacaagttggcagatgccatggtcacttggattgaagcttgggatgagcttaaccctgcgggagcatcagtggccaatggcaaagcgtgaatcggtttttggttaactgcataacagccacagaacttggaaatggaactatttatatactgtattttttttccttagtatttatcttcaacttagctgttattctcggcttaaaatttgcagcattgttagctgtaattctgtttaataacttcatcatttgagcttagaaacaataagtacacccgtagggcgttactttctttttattattgtttgatgggtagagatcacatggcagcatttcgttacatgtgaaataatagaaaggttattgatgtatgtcttgtttattactgagtatagatccatagtgatcaatttttaaaaaaaaaaaatggacagaagtggtacactgtcaatgtttgaggtcgatggcaaaaa

SEQ ID NO: 5882 - DNA, 1635 bp, Glycine max
tcgagtcagctacgtaggccccccccccccctgcatcttcaaacacaacacacacactgtgtttgtgaaactctctctcacacacaagtcacaaaaacaacttgtgttgttccaatggcatcagcaacaccccttttgaaagatgagctcgacatcgtgatccccacgatcaggaatctggatttcttggagatgtggaggccattctttgagccttaccatctcataattgtgcaagatggtgacccttcaaagaccatcaaggtccctgaaggctttgactatgagctctacaaccgcaatgacatcaacaggatccttggccccaaggccaattgcatctccttcaaggactctgcatgccgttgctttggctacatggtctccaaaaagaagtacatctacaccattgatgatgactgctttgttgccactgatccatctggacacaagattaatgcacttaaacagcatatagaaaacctcctctgtccatccacacccttttttttcaacaccctctatgaacctttccgagaaggtgcagattttgttcgtggttaccctttcagtctccgggaaggtgtaccaactgcagtttctcatggtctttggctcaacatcccagactacgatgctcctacccagcttgtgaagcctcttgagaggaacactaggtactacttgtactcttatgatacattgaaaaattcaaaaacattaacttgtatttaagtttgattgtgaatcttgtgattattacaaggtatgtggatgctgttttgaccataccaaagggcactttgtttcccatgtgtggaatgaacttggcctttgatcgtgatctcataggagcagcaatgtactttggtctcatgggtgatggtcagcctattggacgctacgacgacatgtgggctggctggtgctgcaaggtaatctgtgatcacttgggattgggaatcaagactggtctgccctatatctatcacagcaaggccagcaacccatttgtgaacttgaagaaagagtacaaaggcatattctggcaagaagacattatcccattcttccagagcgttgttcttccaaaagaagctaccactgttcagaagtgctacattgagcttgccaagcaagtcaaggaaaagcttaccaaggtagatccttactttgacaagttggcagatgccatggtcacttggattgaagcttgggatgagcttaacccagctggagcatcagtggccaatggcaaagcatgaatcagttttggttaactgcataacaacagccacagaacttgaagtggaactatttatatactgtattttttccccttagtatttattttcaacttaacttttattcttggcttgaattttgcagcattgttagctgtaattctatttagtaacttaatgatttgagcttagaaagaacaagtacacccgtagggcgttactttctttttattactgtttaatgggtagagttcacatggcagcatttcgttacatgtgaaataatagaacggatagtggtgtatgtcttatttattaccgagtaatcgagtatagatccatagtggtcaatttttaaaaaaaaaaaaaaaaaaaaaaaaaattatctgcc

SEQ ID NO: 5883 - DNA, 1557 bp, Glycine max
aacttaggcactgcacgtgttgcaccctactctctcccccttaatactccctctctttcccttcaaaagctcaccctcgctcgcccccccttcacaccctctctctcttttttctctttctctctttgaaactctgtgagaaaccttaactttgtaattgcaatggctgatgcttctgtggcaccaccacctccactgaaagatgagcttgacattgtgatccccaccataaggaaccttgactttcttgagatgtggaggccattctttcagccttaccatttgatcattgttcaagatggtgaccccaccaaaaccatcaaggttcctcctggctttgactatgagctctacaaccgtaatgacatcaacaagcttttgggtccaagggcctcttgcatctccttcaaggactccgcgtgtcgctgcttcggctacatggtgtccaagaagaagtacatcttcaccattgatgatgactgctttgttgccaatgatccatctggaaaagcgatcaatgcactcgagcagcatattaaaaaccttttgtgtccatccactcccttgttcttcaataccctttatgaccccttcagagaaggtgcagattttgttcgtggataccctttcagtcttcgtgaaggtgtgccaactgctatctcccatggactttggctcaacatcccagactatgatgctccaacacagcttgtgaagcctctcgagagaaacactaggtatgtggacgctgttctgaccataccaaagggcactttattccccatgtgtggaatgaacttggcattcgaccgtgatctcattggaccagcaatgtactttggtctcatgggagatggtcaaccaattggacgctacgatgatatgtgggctggctggtgctgcaaggtgatcactgatcatttggggctaggagtcaagactggtctgccctatatctatcacagcaaggccagtaacccatttgttaacctgaggaaagagtacaaaggcatattctggcaggaagacatcattccattcttccagaatgttgttcttccaaaagaatgcaccactgttcagaagtgctacattgagctctccaagcaagtcaaggaaaagctctcaaagatagatccttacttcgacaagctggctgatgcaatggtcacttggattgaagcttgggatgagcttaaccctgaaggagcatctcaggccaatggcaaagcataaaccaaccttggttataacaaccactcatgagctagaagtggaactatttatatactgtacttttttttttcagtatttcttctcaatgtttgcagcattgttagctataattctatttttttttttaatcttcatgctttgagcttagaaagaataaactacaatggtcttggtcgttgttttcttgtgatttttgtcccttagtagacatctgcaggaccatatcacttgcaggcactgagtttcatgtgaaacaagtgttataggaagaatattaatgtatgattcattacagattaatagtgatcgaattttcaaaaa

SEQ ID NO: 5884 - DNA, 1511 bp, Glycine max
tgataccagaactcatgagaaagatgctgagggcaagatctctcataaattccatattcttcggaacccaagttttttttgtggttctggaaggtacatatgtggcaaacatgttgatcagaagcaaacagatggtgaatccagcaatcacacaattatggttcccaaagcttcaactctttggcctgacgtatttgacatggataagcctgttgtccccccccatgaagagattttctccactactgatggtttctctgattcaagtctacttgggcatggaacatatggttctgtttattatagcctcctccgtgatcaggaagttgctattaaaagaatgacagctactaaaaccaaagagtttatgttagagatgaaagttttttgcaaggttcatcatgctaatctggtagaattgattggctatgcagctagtcatgaggagcttttcctagtatatgaatatgctcagaagggttcactcaaaagccatttgcatgatcctcaaaataagggtcactccccgctttcttggatcatgagggttcagattgcaattgatgctgctaggggccttgaatacatacatgagcacacaaaaactcattatgttcaccgtgatatcaagacaagtaacattttacttgatgcttcctttagagcaaaaatttcagattttgggttagcgaaacttgttgggaaagcaaatgagggagaaatttcaactaccagagttgttggtacatatggatatcttgctccggaatatttgagtgatggtcttgcgaccactaaaagtgatgtctacgcatttggtgttgtcctttttgagatcatatcaggaaaagaggccatcatccgatctgaaggcacaatgtcaaaaaatcctgatagacgttcactggcatccataatgctgggagctcttaggaattcgcctgattctatgagcatgtcaagcttgagagaatatattgatccaaatatgatggatctgtatccccatgattgtgtatttaagttggccatgttggcaaagcaatgtgtggatgaggaccccatcttacgacctgatatgagacaagttgtgatatccctttcacagattctgctgtcttcagttgagtgggaagcaactctagctgggaatagccaggttttcagtggccttgttcagggaagatagttacatagaaggatagattcttttttcttttttatctgtatcctgttctatacctttttcgttggttgcttgatagtgatggatccataggaactgggacatggtggtgggtcaatatctatttttggccatttgttttccttaatgctttattatgagctataccttgattttgtttagctgcattctaatatgtcgaaattttttggtgtaatgtagagtgtgttatgacggagctaaagaagaaggattttattgctctgtgatttgtattggtataagttgtaattcgaatttaatctatgcatgtttatattctttg

SEQ ID NO: 5885 - DNA, 1157 bp, Glycine max
aagaattcgcgcccgcaggaatttttttttttttttttctacaagaaaaagcttaacacattcccaatggcaaactatggtacaatcttcagctagatctccaattgagcagtctgggatcaaaccaatgcccatacaagaattactcattgaactagaatgtaatgatgatgattggcaatacaaacttgtaaacaatagagatcgattcttacactgatgtttgacaggatttttgatatgttaacaaagcatcaagacatttttttgcctattctttcttcacgttatataatccaacctttggctaacttgacaccaccaaaaccaaacattgtgattttagctccatacagatagctatacaggaagctccgaagccgtgatataaattacaggactacatttgctacatgtatgcaggcaacccacaatcttacatcctgcatgtcagcttaagatcaggaaaccaaagtggtgtgtacaccactctataacccctgccagcatctccaacactctatgttcgaaaccaccacttaccaacaagataagctattagacttgcctttgccatgaattttttgaacagcaaagtgtggtagtgtggtagtgtggcaaacaaatatctgccttgctgaggggaagcagaaggcaacaaatatctgccttcagtattcactcaagtaccattcactttcttctactgtaatagattccactgccagaataattatgatgccgatgtcttgatccactacccctgccactgtttccttccaaactgctgccacggccaccacccttgtaacctacactctgcatccagtttgttgcctgggtccctaatccattaagctcctcttcttctctgtcattatactccaagacaagcctcttgatgtcttctttctcttgaagctctgctgcttctttctgttttgtactttgcagcagtgaggaattccgtgggatgaacatctgctttgtttgctgcttgtttccacggggggggggccctcgtagctgacccgctttgtttcctccagtatcctcacccttatgctcctcctccttcttgtgccctcccacatgaagggtctccccaatcttgtgaatgatccctgacattatgctctttgatttttattttttct

SEQ ID NO: 5886 - DNA, 2428 bp, Glycine max
aacctctctctctctctctcttgggttgaatttgacttggcaaaccctagcctgggaattcttcagagaacccgttgttctgctattctgaatctgtttcatagtttgcagcattcagagcaaagtttggaagggtgaagcggaaatgcttctgatttggtagtagtccgttggagattcggtcatggctaggcgtcatggatgggagctcccctttcacacttttcaggtcgtggctataactgtatttttcttgctatctatagcatattatgctttctttgctccttttctgggaaaggacatctatgaatatgtggctattggtgtttactctgtattggctctctctgtgttctttctttatgttcgatgcactgccattgatcccgccgaccagggagtcatggttgattgtgacaagacatcaaagaatagatcaaaacttgatgaagagttggcagaacccagcaagatgggactaaagggtgaaggaatgtctgatcgtcacaattcaagttggtgctctaaagttgggtgtttcttctgtagtttccttgttagagaagattgccgcagtaatgaagatattagtctacagcaacaatctggagaagaggaggctttgttctgcactttgtgcaatgctgaggttcggaagttcagtaagcattgtcgaagttgtgacaaatgtgttgatggatttgatcaccattgtcggtggttgaacaattgtgttggaaagaagaattacatcacgtttgtgtgtcttatggcagtgagcctagtttggcttatagttgaatgtggagttgggattgcagtacttgtcagatgtttcgttgataagaaaggtacagagaatcagatagctgaaaaacttggagctggtttctctcgagtcccatttgctattattgtggccatatgcacagcagtttcattccttgcaactgtacctttgggagaattattctttttccatatgatcctgatacgaaagggtatcacaacttacgagtatgttgttgccatgagaactctaagtgaaccacctgggccttcagttgatgggggtgaacagcagagtctaccatcgtctcctactagttcagctgtcactgcaatgagtggaagaagctccgttggaatgagtatacagtacaaaggtgcctggtgtacaccgccaaggatctttatggaccacccggatgaaattataccacatttggagccgggacgcctaccatccactgttgatccagatgccgtacaaccacctgacaaagggagaaaaatgaaccagcgccctgtgcgtataagtgcatggaaacttgcaaaattggattctaatgaggcaactaaggcagctgctaaggccagagcatcatcgtctgtgcttcgtccaattagttctcgacctcatgcgtatgatgttgatcatgtatccagtagcaatgtgagtggaagaagcagcccaatcagcaatcaaggatttcatataaaaaatgatacagtggggacatcaaggttatctccttccaagagctcgtaccctcctagtcaagcaagcaaggatgacatagatgcatcatgccaacacagtatgagtaactttagcagtccacgagtctccaaccttactccttcaccaatgcagaggccaggtttgaacagagaccatttcaaccccatgtatcaacaaccatcgggaaaccagtctccttcgtcagctaaaggaagtgaagggaacataaatccagttcacgacaatgtgccacgtgtaccaatgagaagcaacaccttagctgtttcagataatagaagatcgtcagtgttttgggatcaagcagctggacgctttgtctcgtcctcatcaagaggtcccggaacagaattattgtacacgggccgttctatattttttggcagccccgttgtgaatgaacagccaagtacaggaacaagaagtagcagttcagtagtagctggtattccggatagagattcttctacattaagggattttcagcaaggtagatcacataggggtggccagcttcctgtgtttgttcctggttgtggttatgcccagcaaaacaagtttccttagattgcctccttgttacggcaactgttttttatccttttttattttattttttttaaatttcctaaactttttaaatgtccgtctttttacttcatcgtttcccccttatgacggtatgagtgcattcgcctttccatctgtataggctaatgaatggatcacgaccttttactgtacaaaattattgaccactatctttgcattttaagtttgaatatgaacgtgaatattcagagagtagtagttcacatgtagctttgagtactgagtagtttataagtttattttattaacttaaagtggttgtaatttttt
